United States Patent Application Publication US 2013/0267429 A1 - sequence listing, part 2

SEQ ID NO: 22484 - DNA, 60 bp, Artificial
  Synthetic oligonucleotide
ctttagtgtatttattgatcaccacacttttattgctggccaaatccagcgcagtggcag

SEQ ID NO: 22485 - DNA, 60 bp, Artificial
  Synthetic oligonucleotide
aaacccataagtttaagtggcccttgttcagaggtttaacattgcagtgtgtctgtaagt

SEQ ID NO: 22486 - DNA, 60 bp, Artificial
  Synthetic oligonucleotide
cacgggctcacctaggacccagggaccaatctctagagaagttgacaatgctatgcagag

SEQ ID NO: 22487 - DNA, 60 bp, Artificial
  Synthetic oligonucleotide
gacaatgctatgcagaggtagtcccatagaagaggcctcaagagttcaatttgccagggt

SEQ ID NO: 22488 - DNA, 60 bp, Artificial
  Synthetic oligonucleotide
cagccaaaccaactaatgtttctgacctattttgtgataagtaagccgatgcaaactcct

SEQ ID NO: 22489 - DNA, 60 bp, Artificial
  Synthetic oligonucleotide
ggctctccctttcaggatcacgaacacacttgcttcccaaggttttgcaaagtccaacaa

SEQ ID NO: 22490 - DNA, 60 bp, Artificial
  Synthetic oligonucleotide
accttctgacgcaataccatcctaagtggatggcaggctgtcaaatttaaccaacagatc

SEQ ID NO: 22491 - DNA, 60 bp, Artificial
  Synthetic oligonucleotide
agcagatttcacccaccctcttactattaacagagtaacattttgacccttcaccagttt

SEQ ID NO: 22492 - DNA, 60 bp, Artificial
  Synthetic oligonucleotide
cttagtagggacctgacactcgcagtcccctctggtaatgtttgttcaatcaccctcatt

SEQ ID NO: 22493 - DNA, 60 bp, Artificial
  Synthetic oligonucleotide
ccctcattattctgtatcccctattcccatcgacccaatccttgacatctgaatcactgt

SEQ ID NO: 22494 - DNA, 60 bp, Artificial
  Synthetic oligonucleotide
ccctgcagtctagaagtgaatggagtccttgtgcccctgaggccctacctcccgacacat

SEQ ID NO: 22495 - DNA, 60 bp, Artificial
  Synthetic oligonucleotide
gtgtcgaaactgatcgcaaacccattcttccattagtgaattatagtaacttgttctccc

SEQ ID NO: 22496 - DNA, 60 bp, Artificial
  Synthetic oligonucleotide
cattcaagtataattagaatgttaccatttagcttcatcccatctggaaccacaagaggg

SEQ ID NO: 22497 - DNA, 60 bp, Artificial
  Synthetic oligonucleotide
cagttttaacccctcaatgagaagggacctaggctcagactggcccaggaacgcaagctt

SEQ ID NO: 22498 - DNA, 60 bp, Artificial
  Synthetic oligonucleotide
ctcagatcacaaagcgcattagacaaatagcttgacacaatgcctaggatcctcggtcgc

SEQ ID NO: 22499 - DNA, 60 bp, Artificial
  Synthetic oligonucleotide
gtgtggttccttgcatttgatattatgtagtgatgctgccacaaatttgctcaacagtgg

SEQ ID NO: 22500 - DNA, 60 bp, Artificial
  Synthetic oligonucleotide
taatctcaaagttcgtttctgaacttcgttgcaaactgacactggtacaccattggcaac

SEQ ID NO: 22501 - DNA, 60 bp, Artificial
  Synthetic oligonucleotide
cctcatcattgctgtgacaacattgaaaggcacctctaccagcttatgaatatgccaaga

SEQ ID NO: 22502 - DNA, 60 bp, Artificial
  Synthetic oligonucleotide
aaagtgagatgggatgacccctctttcaaattcagagaagaacaaactttcagtgatcgt

SEQ ID NO: 22503 - DNA, 60 bp, Artificial
  Synthetic oligonucleotide
cttctggtccaactttcgagatgtcagatacggagagttcaagcaaatctggttccaacc

SEQ ID NO: 22504 - DNA, 60 bp, Artificial
  Synthetic oligonucleotide
gtatctgagattttgaagtagtttctgggatctcttactgggttgacaaagaatcactag

SEQ ID NO: 22505 - DNA, 60 bp, Artificial
  Synthetic oligonucleotide
gactcaaatttctgtataacatcaaaaacaagaatgggcacatcatgggtccccatttac

SEQ ID NO: 22506 - DNA, 60 bp, Artificial
  Synthetic oligonucleotide
atacgccaggcttcttggatggtggatcatccacttcatcacaggtttttttactcaaga

SEQ ID NO: 22507 - DNA, 60 bp, Artificial
  Synthetic oligonucleotide
tcagtcggggtttctttgggattgactgttaatgagccaaattgaattttaggttccaaa

SEQ ID NO: 22508 - DNA, 59 bp, Artificial
  Synthetic oligonucleotide
gaaactaacatctagtccaagtgcccctccatcacccagtccaccaccatactcccctt

SEQ ID NO: 22509 - DNA, 60 bp, Artificial
  Synthetic oligonucleotide
gtacacgagtttgttataaatccggtaaaattcaaatgaactgagaacttctggccttgt

SEQ ID NO: 22510 - DNA, 60 bp, Artificial
  Synthetic oligonucleotide
gctgggactgattgaggtgtgccaactctatctcgtaatccaaccatgaatagcccatga

SEQ ID NO: 22511 - DNA, 60 bp, Artificial
  Synthetic oligonucleotide
cagatgcaacaggcatggggccagagttttgcaagagctgctggtttgagcgtaggagtc

SEQ ID NO: 22512 - DNA, 60 bp, Artificial
  Synthetic oligonucleotide
gccctcaccttgaggtagtgatgatctgtgagggaaccaagaaaatgatccaagtgtcct

SEQ ID NO: 22513 - DNA, 60 bp, Artificial
  Synthetic oligonucleotide
cgctaggccatcacccaacccagcatgggacagaaccaaagcagagacaaacaaaaggcc

SEQ ID NO: 22514 - DNA, 60 bp, Artificial
  Synthetic oligonucleotide
aaccaccacacctacaaggacccgccaacagtcccgccaaatcgctaggccatcacccaa

SEQ ID NO: 22515 - DNA, 66 bp, Artificial
  Synthetic oligonucleotide
gagaaactaaaagatcatcagacaaaacaatgtaatgctcttctcttttccatttaaccacatgtg

SEQ ID NO: 22516 - DNA, 60 bp, Artificial
  Synthetic oligonucleotide
gcccgttgatgagtgcctcatcacttgtctcctacttttactaaaacacagtgagtagcc

SEQ ID NO: 22517 - DNA, 60 bp, Artificial
  Synthetic oligonucleotide
agtgtctcagaaagatgtccaatttgcaaactgcctctgccacaaaaactgaaactaaca

SEQ ID NO: 22518 - DNA, 60 bp, Artificial
  Synthetic oligonucleotide
ggttttcaatttgacctttcaattcaaccccaccaatgctcgggtcaatgcctatgtggc

SEQ ID NO: 22519 - DNA, 60 bp, Artificial
  Synthetic oligonucleotide
tgttcggaagctcagcagccaatgcatcaactgtggtttcttctaccccacaaattccta

SEQ ID NO: 22520 - DNA, 60 bp, Artificial
  Synthetic oligonucleotide
ctcgggtcaatgcctatgtggcatgccttcagtatctcattgtagtgttcccccctgcag

SEQ ID NO: 22521 - DNA, 60 bp, Artificial
  Synthetic oligonucleotide
ggctgaccttaacccagtgggtagattcgaaatttcattcacttcagcatttgattcact

SEQ ID NO: 22522 - DNA, 60 bp, Artificial
  Synthetic oligonucleotide
ctctaacataacaatggctcataagaatgatggtgtctatcaataacaacagcttccttc

SEQ ID NO: 22523 - DNA, 60 bp, Artificial
  Synthetic oligonucleotide
gcattctgtcttgtcttgactgtggaggaggttttcattgagtttacaagggatagtgat

SEQ ID NO: 22524 - DNA, 60 bp, Artificial
  Synthetic oligonucleotide
caagattgtttccaacatgttaccaccatccaccaagcaagcaccagcttttacagctgc

SEQ ID NO: 22525 - DNA, 60 bp, Artificial
  Synthetic oligonucleotide
attgtgtcttgtacacaagtgcccaaacttttcccacacaacaccttcgaaaaatctggc

SEQ ID NO: 22526 - DNA, 56 bp, Artificial
  Synthetic oligonucleotide
aacatcaccaattccatgagggtcttcactaacattcatcacaatgtaaccaattg

SEQ ID NO: 22527 - DNA, 60 bp, Artificial
  Synthetic oligonucleotide
cctgcccctcgaaagcggcttggaagatgatgcagtccaaaagtgcacagtgtggttcac

SEQ ID NO: 22528 - DNA, 60 bp, Artificial
  Synthetic oligonucleotide
catgagggactctaaagcagtgtatgtagttccctgtggaaggctgataaattgccagtt

SEQ ID NO: 22529 - DNA, 60 bp, Artificial
  Synthetic oligonucleotide
cagacccttgacaagtgaaaaccactttctgaggaagtctcattaagatcctactcagaa

SEQ ID NO: 22530 - DNA, 60 bp, Artificial
  Synthetic oligonucleotide
gagagactgagtccatctgaagctgggaacctcactggcaccagacatgatggaaaagtc

SEQ ID NO: 22531 - DNA, 54 bp, Artificial
  Synthetic oligonucleotide
ttttactggtgcagatggcccatacaccacctcctttgacaaatcaactgtggt

SEQ ID NO: 22532 - DNA, 60 bp, Artificial
  Synthetic oligonucleotide
cacctctttctttagtggacctatgcttttggtcaactctcttttacatatcaacattat

SEQ ID NO: 22533 - DNA, 60 bp, Artificial
  Synthetic oligonucleotide
tagaaatgctattcagagcttaaatgatcaatctcaagccagattaaaccttttaactaa

SEQ ID NO: 22534 - DNA, 60 bp, Artificial
  Synthetic oligonucleotide
cagtgggctgtggtgtggtttggcataaagtgttttgataacacagcaatggccaagtgc

SEQ ID NO: 22535 - DNA, 60 bp, Artificial
  Synthetic oligonucleotide
ggtagacacactcttccacaatgttggttggtatcagatggttcgtacttgaatgaaacc

SEQ ID NO: 22536 - DNA, 60 bp, Artificial
  Synthetic oligonucleotide
tttactaatgaaaaataagctaagagaactaatgaacgtgccatactgtaattacactag

SEQ ID NO: 22537 - DNA, 60 bp, Artificial
  Synthetic oligonucleotide
ctgatctgtgtggctctgcttgccacaatcaagggaatggtcaacatctggaaatctggt

SEQ ID NO: 22538 - DNA, 60 bp, Artificial
  Synthetic oligonucleotide
atcattgcccgagattattaatgaagcgttgaacattgctctgatctgtgtggctctgct

SEQ ID NO: 22539 - DNA, 60 bp, Artificial
  Synthetic oligonucleotide
tggacctatgcttttggtcaactctcttttacatatcaacattatttgcgcatttagtgg

SEQ ID NO: 22540 - DNA, 60 bp, Artificial
  Synthetic oligonucleotide
tctttgtgaaggagagaatcctttactaactccagaacaatgggtcaagtgattggattc

SEQ ID NO: 22541 - DNA, 60 bp, Artificial
  Synthetic oligonucleotide
gagagacaaaaggggttgctcatcgagtacaatctcactatgaccaaagaccaccaccca

SEQ ID NO: 22542 - DNA, 60 bp, Artificial
  Synthetic oligonucleotide
cttgctcagtaaacaacacccaccattatttcaaaggtccccaaaacaccacctggggtc

SEQ ID NO: 22543 - DNA, 60 bp, Artificial
  Synthetic oligonucleotide
cctatgctccaagctcttgctcagtaaacaacacccaccattatttcaaaggtccccaaa

SEQ ID NO: 22544 - DNA, 60 bp, Artificial
  Synthetic oligonucleotide
gggttcttgatgtcccaaactttgacaacaccgttttgattggctcttggttgaaagccc

SEQ ID NO: 22545 - DNA, 60 bp, Artificial
  Synthetic oligonucleotide
ccaccacccaaattattggaatcaagtcttgtatggactggctaaattattgggctcaag

SEQ ID NO: 22546 - DNA, 60 bp, Artificial
  Synthetic oligonucleotide
taaatcatctagattggggtacttaactgtgtataggagacccaaagatgtcagcccttg

SEQ ID NO: 22547 - DNA, 60 bp, Artificial
  Synthetic oligonucleotide
tcagcccttgaacgacatcattcatctgctctgcaccttgcactgacatgcatgctatcg

SEQ ID NO: 22548 - DNA, 60 bp, Artificial
  Synthetic oligonucleotide
ggggtacttaactgtgtataggagacccaaagatgtcagcccttgaacgacatcattcat

SEQ ID NO: 22549 - DNA, 60 bp, Artificial
  Synthetic oligonucleotide
tcaacattatttgcgcatttagtgggtttcccaactcacagacaccttataggtgagggc

SEQ ID NO: 22550 - DNA, 60 bp, Artificial
  Synthetic oligonucleotide
gctggaattgagccaaactggttgattaacagctttgggttcttgatgtcccaaactttg

SEQ ID NO: 22551 - DNA, 60 bp, Artificial
  Synthetic oligonucleotide
catgttaccaccatccaccaagcaagcaccagcttttacagctgctgatagactgaggtt

SEQ ID NO: 22552 - DNA, 60 bp, Artificial
  Synthetic oligonucleotide
gctgctgatagactgaggttgtaaccagatatgttattagcgctttcctctttggtgatg

SEQ ID NO: 22553 - DNA, 60 bp, Artificial
  Synthetic oligonucleotide
ccacaatctgagatcttgatccaatatagggccagccctctcctgagagacacaacttgt

SEQ ID NO: 22554 - DNA, 60 bp, Artificial
  Synthetic oligonucleotide
atgttttcatatggattccttagtccaggtttctcattcacgaacatcttttcctgacgc

SEQ ID NO: 22555 - DNA, 60 bp, Artificial
  Synthetic oligonucleotide
gaatttgacctgtcacctgcccctcgaaagcggcttggaagatgatgcagtccaaaagtg

SEQ ID NO: 22556 - DNA, 60 bp, Artificial
  Synthetic oligonucleotide
caagctgttcggtaagagtggttttggaatttgacctgtcacctgcccctcgaaagcggc

SEQ ID NO: 22557 - DNA, 60 bp, Artificial
  Synthetic oligonucleotide
gcttgagacaatgcacctaagcatcagcaagccaggaaaacacatcgcacctgtcatgtg

SEQ ID NO: 22558 - DNA, 60 bp, Artificial
  Synthetic oligonucleotide
cctaagcatcagcaagccaggaaaacacatcgcacctgtcatgtgtgagagacaaaaggg

SEQ ID NO: 22559 - DNA, 60 bp, Artificial
  Synthetic oligonucleotide
tcctctttggtgatgaactcaagacagggatgatctttgctcaacttgtctaaatcatct

SEQ ID NO: 22560 - DNA, 60 bp, Artificial
  Synthetic oligonucleotide
gtattccaggtaaaccagtcagatggacaaagatgtcaaggtgagcctcgacaccctctc

SEQ ID NO: 22561 - DNA, 60 bp, Artificial
  Synthetic oligonucleotide
aggtgagggctgcccaaaaccacacagattaacagggtcagggatctgctcatgtggaca

SEQ ID NO: 22562 - DNA, 57 bp, Artificial
  Synthetic oligonucleotide
caatcagaccaccagcacataaaatgcaattactcgaattgcaaaggttacaccagc

SEQ ID NO: 22563 - DNA, 60 bp, Artificial
  Synthetic oligonucleotide
ggccaatcctttatcacaagaaggcttcaagcctttttaacctggacactttctgatgca

SEQ ID NO: 22564 - DNA, 60 bp, Artificial
  Synthetic oligonucleotide
cgcacagtggatcctaggcttaaaggatacgcttacagaaggtagtctcttctttgtgaa

SEQ ID NO: 22565 - DNA, 60 bp, Artificial
  Synthetic oligonucleotide
gcggcttggaagatgatgcagtccaaaagtgcacagtgtggttcaccactgttgccaccc

SEQ ID NO: 22566 - DNA, 60 bp, Artificial
  Synthetic oligonucleotide
aaccagattcagaactcaatggctaagtgaaagtaactctttatacacagaaatgctgac

SEQ ID NO: 22567 - DNA, 60 bp, Artificial
  Synthetic oligonucleotide
catcattcatctgctctgcaccttgcactgacatgcatgctatcgtcaaagctggaattg

SEQ ID NO: 22568 - DNA, 60 bp, Artificial
  Synthetic oligonucleotide
ctcagtccccttctgagagactgagtccatctgaagctgggaacctcactggcaccagac

SEQ ID NO: 22569 - DNA, 60 bp, Artificial
  Synthetic oligonucleotide
tccgatcttgaggctgacattattctgcttattcttcatcaccattaaactgtcaacaga

SEQ ID NO: 22570 - DNA, 60 bp, Artificial
  Synthetic oligonucleotide
ccaggtccttgcctatctcctaggttaatcttccttttcaacttctccaggtctgttgca

SEQ ID NO: 22571 - DNA, 60 bp, Artificial
  Synthetic oligonucleotide
aacttctccaggtctgttgcaagatccatgagttcatccttggacaggcttccgatcttg

SEQ ID NO: 22572 - DNA, 60 bp, Artificial
  Synthetic oligonucleotide
gtgatttggcatccctcaagacatctccctttgctgatgtggtgaagtgactcagtcccc

SEQ ID NO: 22573 - DNA, 60 bp, Artificial
  Synthetic oligonucleotide
catgaccctctgaacctgagaaacttggttgaaatccaaaccatccaccagtgatttggc

SEQ ID NO: 22574 - DNA, 58 bp, Artificial
  Synthetic oligonucleotide
gattgtttgatttcaacaaacaagctataaagaggctgaaaacagaagcacagatgag

SEQ ID NO: 22575 - DNA, 60 bp, Artificial
  Synthetic oligonucleotide
ctgcagacctttatgaggatggcttggggtggcagttacatagcacttgattccggaaaa

SEQ ID NO: 22576 - DNA, 60 bp, Artificial
  Synthetic oligonucleotide
gcacagatgagtattcagctgataaacaaggcagtgaatgcattaatcaatgaccaactg

SEQ ID NO: 22577 - DNA, 60 bp, Artificial
  Synthetic oligonucleotide
gtaagacatgctaatgtcaaactaggcatggtgccgaactggttgtttaagagatctgga

SEQ ID NO: 22578 - DNA, 60 bp, Artificial
  Synthetic oligonucleotide
gaccaactgattatgaagaaccatctaagggacatcatgggaattccttattgcaactac

SEQ ID NO: 22579 - DNA, 60 bp, Artificial
  Synthetic oligonucleotide
cctggtgggtattgtctaactagatggatgttaattgaagcagaactgaaatgctttggg

SEQ ID NO: 22580 - DNA, 60 bp, Artificial
  Synthetic oligonucleotide
tacaaactctagaactgaacatggcaaaccttaatatgacgatgcccttgtcttgtacga

SEQ ID NO: 22581 - DNA, 60 bp, Artificial
  Synthetic oligonucleotide
agaatctctatgaccatgctctgatgagcatcatctcaactttccacttatctattccaa

SEQ ID NO: 22582 - DNA, 60 bp, Artificial
  Synthetic oligonucleotide
tctcttatgtggcagatcatgttcagtaacctataaaggtgtttatgagctacaaactct

SEQ ID NO: 22583 - DNA, 60 bp, Artificial
  Synthetic oligonucleotide
gccccagcctttactgcagctcccaagctaaaattgtaaccagaaatgttcaaggagctc

SEQ ID NO: 22584 - DNA, 60 bp, Artificial
  Synthetic oligonucleotide
cttcttagtgtccaccatgttcagtatcggatgactttgggaaagcctgtccaggtcgga

SEQ ID NO: 22585 - DNA, 60 bp, Artificial
  Synthetic oligonucleotide
gccctcctgacacagctgcatcaaacattatgcaatccatcagggcacaatgtggggtga

SEQ ID NO: 22586 - DNA, 60 bp, Artificial
  Synthetic oligonucleotide
gtccaggtcggaactgttagggtacttagctgtgtatatcagtcccaagtccgtcagtgc

SEQ ID NO: 22587 - DNA, 60 bp, Artificial
  Synthetic oligonucleotide
ggggcaaatcataacattcttccaagaggtgcctcatgtcatagaggaggtcatgaacat

SEQ ID NO: 22588 - DNA, 60 bp, Artificial
  Synthetic oligonucleotide
ggcacaagtctttgcactggtcccaaacagcattttcaaacttcctagagtcaaccttgc

SEQ ID NO: 22589 - DNA, 60 bp, Artificial
  Synthetic oligonucleotide
agtcaaccttgcttaatgaaatatcaataagctttatgtccctccttccttgagagtcta

SEQ ID NO: 22590 - DNA, 57 bp, Artificial
  Synthetic oligonucleotide
atcagggcacaatgtggggtgatttcttctttgcctcctcttttcttcttctcaaca

SEQ ID NO: 22591 - DNA, 60 bp, Artificial
  Synthetic oligonucleotide
gctacctgtggtctctttgggttgatctcctttcttctcttatgtggcagatcatgttca

SEQ ID NO: 22592 - DNA, 60 bp, Artificial
  Synthetic oligonucleotide
gccacatcaatcccatgagaatacttggcgtcttgcttgaactgtttcagatctgttggt

SEQ ID NO: 22593 - DNA, 60 bp, Artificial
  Synthetic oligonucleotide
gcgaggaagagcttcaataactgcactagtcaaaccaggttgagcagggaaaagatctgc

SEQ ID NO: 22594 - DNA, 60 bp, Artificial
  Synthetic oligonucleotide
ttgcaactacagtagatattggtatctaaatcacactgtgacagggaagacatcactgcc

SEQ ID NO: 22595 - DNA, 60 bp, Artificial
  Synthetic oligonucleotide
tcctaattgccctcagtctcctggcgatactaaaggggatttacaatgttgctacctgtg

SEQ ID NO: 22596 - DNA, 60 bp, Artificial
  Synthetic oligonucleotide
gaaagctctctcctcaatgactgtgtccaaaggaatgatttcacctccttggaagcactc

SEQ ID NO: 22597 - DNA, 60 bp, Artificial
  Synthetic oligonucleotide
cagtcccaagtccgtcagtgctaggacagcatcatttaggtcaacttgaccctgtttagt

SEQ ID NO: 22598 - DNA, 60 bp, Artificial
  Synthetic oligonucleotide
aggttgataaagagctatctccacagggtcttctggacgaccttcaatgtctatccaagt

SEQ ID NO: 22599 - DNA, 60 bp, Artificial
  Synthetic oligonucleotide
ccaagttttggcacttgggtcaagctgcatcattgagtctttaagagtcatcagctgtga

SEQ ID NO: 22600 - DNA, 60 bp, Artificial
  Synthetic oligonucleotide
catctttctccatctggtcaagatcccaactcacaggcacatcgtggggaaaccttgccc

SEQ ID NO: 22601 - DNA, 60 bp, Artificial
  Synthetic oligonucleotide
cttttacctcataagcatctttctccatctggtcaagatcccaactcacaggcacatcgt

SEQ ID NO: 22602 - DNA, 60 bp, Artificial
  Synthetic oligonucleotide
caggggaaaacacctttagggttagtggacctttttgtctttagcactagcttttacctc

SEQ ID NO: 22603 - DNA, 60 bp, Artificial
  Synthetic oligonucleotide
gacagggaagacatcactgccaagatgttggcttgtgtcaaatggttcctacctaaacga

SEQ ID NO: 22604 - DNA, 60 bp, Artificial
  Synthetic oligonucleotide
ggtctgtataaacatcccggtgttccagtaaaatggaagagataagaggacccacccatg

SEQ ID NO: 22605 - DNA, 60 bp, Artificial
  Synthetic oligonucleotide
ggcacatcgtggggaaaccttgccctaagccacacagactcaaccacatgggcatctgct

SEQ ID NO: 22606 - DNA, 60 bp, Artificial
  Synthetic oligonucleotide
gaggatggcttggggtggcagttacatagcacttgattccggaaaagggaactgggattg

SEQ ID NO: 22607 - DNA, 60 bp, Artificial
  Synthetic oligonucleotide
taagtcaaccctgttggaaaccctgcggactgcaaagacttattggacccagcagttccc

SEQ ID NO: 22608 - DNA, 60 bp, Artificial
  Synthetic oligonucleotide
gacttctcggaactttcacttggaccctttctgattctgaaggtaatgaagcacctggtg

SEQ ID NO: 22609 - DNA, 60 bp, Artificial
  Synthetic oligonucleotide
gggaagatcactgccagttttctcgcccatctcctattggttacttaggactattgtcac

SEQ ID NO: 22610 - DNA, 60 bp, Artificial
  Synthetic oligonucleotide
cacttatctattccaaactttaatcagtatgaagcaatgagttgtgacttcaatggaggg

SEQ ID NO: 22611 - DNA, 60 bp, Artificial
  Synthetic oligonucleotide
ttgtgacttcaatggagggaaaataagtgttcagtacaacctcagtcactcctttgctgt

SEQ ID NO: 22612 - DNA, 60 bp, Artificial
  Synthetic oligonucleotide
gacgttgcacattgttgacctcagagaagtcaaggccgtgaaggagggcctgggcatcct

SEQ ID NO: 22613 - DNA, 60 bp, Artificial
  Synthetic oligonucleotide
gagcttagtggtctttctgttctgatgacttttgacttcagtttctctaagtcagctgcc

SEQ ID NO: 22614 - DNA, 60 bp, Artificial
  Synthetic oligonucleotide
gcaatgcccttctctgctcaagctgctgtgtacttaaattccccatgtacacacccgagc

SEQ ID NO: 22615 - DNA, 60 bp, Artificial
  Synthetic oligonucleotide
ggttgggtgccctgtgctccaccaaccatgccaatcatgttcagcaatgcccttctctgc

SEQ ID NO: 22616 - DNA, 55 bp, Artificial
  Synthetic oligonucleotide
ttttgacatcccacaccctaacaactccgtctcttccaggttgggtgccctgtgc

SEQ ID NO: 22617 - DNA, 60 bp, Artificial
  Synthetic oligonucleotide
cgagatccacagtagtattctcccaagccctgcccacaatggaggttcttgaggctatgt

SEQ ID NO: 22618 - DNA, 60 bp, Artificial
  Synthetic oligonucleotide
gttgtttaagagatctggatttttgacatcccacaccctaacaactccgtctcttccagg

SEQ ID NO: 22619 - DNA, 59 bp, Artificial
  Synthetic oligonucleotide
tctcataagggttcctctcaccaggtgtatctgagacaaacattcccaaagatcttttc

SEQ ID NO: 22620 - DNA, 60 bp, Artificial
  Synthetic oligonucleotide
tattctcccaagccctgcccacaatggaggttcttgaggctatgtagggccagccatcac

SEQ ID NO: 22621 - DNA, 60 bp, Artificial
  Synthetic oligonucleotide
agacttattggacccagcagttcccactttttgtggcttcccatctgactcgagatccac

SEQ ID NO: 22622 - DNA, 60 bp, Artificial
  Synthetic oligonucleotide
gggcctgggcatccttaacaacttgaagctttatgttagaacaataacctgaaagctctc

SEQ ID NO: 22623 - DNA, 60 bp, Artificial
  Synthetic oligonucleotide
cctgaccatgcccaacgcatgttcagccaacaactcccaccattacatcagtatggggac

SEQ ID NO: 22624 - DNA, 60 bp, Artificial
  Synthetic oligonucleotide
aaaggagtttaccaatttaagtcagtggagtttgatatgtcacatctgaacctgaccatg

SEQ ID NO: 22625 - DNA, 60 bp, Artificial
  Synthetic oligonucleotide
ccacacactcatgagtatagtttcgagcctacacctcagtatcagagggaactccaacta

SEQ ID NO: 22626 - DNA, 60 bp, Artificial
  Synthetic oligonucleotide
agtcacaacttttgcaatctgacctctgccttcaacaaaaagacctttgaccacacactc

SEQ ID NO: 22627 - DNA, 60 bp, Artificial
  Synthetic oligonucleotide
tacctgattatacaaaatagaacctgggaaaaccactgcacatatgcaggtccttttggg

SEQ ID NO: 22628 - DNA, 60 bp, Artificial
  Synthetic oligonucleotide
tgcttgtctttcagcctttcaagatcattaagatttggatacttgactgtgtaaagcaag

SEQ ID NO: 22629 - DNA, 60 bp, Artificial
  Synthetic oligonucleotide
gccaaggtctgtgagcgcttgtacaacgtcattgagcggagtctgtgactgtttggccat

SEQ ID NO: 22630 - DNA, 60 bp, Artificial
  Synthetic oligonucleotide
agtgatgagtctttcacatcccaaactcttaccacaccacttgcaccctgctgaggcttt

SEQ ID NO: 22631 - DNA, 60 bp, Artificial
  Synthetic oligonucleotide
cccatatatacccctgaagcctggggcctttcagacctcatgatcttggccttcagcttc

SEQ ID NO: 22632 - DNA, 60 bp, Artificial
  Synthetic oligonucleotide
ctgaccaaatggatgattcttgctgcagagcttaagtgtttcgggaacacagcagttgcg

SEQ ID NO: 22633 - DNA, 60 bp, Artificial
  Synthetic oligonucleotide
aaatgagacccacttcagtgaccaaatcgaacaggaagccgataacatgattacagagat

SEQ ID NO: 22634 - DNA, 60 bp, Artificial
  Synthetic oligonucleotide
ctgatgttttccacatctgcatatctagtcagcatcttcctgcaccttgtcaaaatacca

SEQ ID NO: 22635 - DNA, 60 bp, Artificial
  Synthetic oligonucleotide
gcttgatcaaaattgactctaacatgttacccccatccaacagggctgcccctgccttca

SEQ ID NO: 22636 - DNA, 60 bp, Artificial
  Synthetic oligonucleotide
gctctccccacaatcgatgttctacaagctatgtatggccatccttcacctgaaaggcaa

SEQ ID NO: 22637 - DNA, 60 bp, Artificial
  Synthetic oligonucleotide
cctgccttcacggcagcaccaagactaaagttatagccagaaatgttgatgctggactgc

SEQ ID NO: 22638 - DNA, 60 bp, Artificial
  Synthetic oligonucleotide
agatctgggagccttgctttggaggcgctttcaaaaatgatgcagtccatgagtgcacag

SEQ ID NO: 22639 - DNA, 60 bp, Artificial
  Synthetic oligonucleotide
gggttcctgtccccaacttggtctgaaacaaacatgttgagttttctcttggccccgaga

SEQ ID NO: 22640 - DNA, 60 bp, Artificial
  Synthetic oligonucleotide
agttgactgcaggtttctcgcttgtgagatcaattgttgtgttttcccatgctctcccca

SEQ ID NO: 22641 - DNA, 60 bp, Artificial
  Synthetic oligonucleotide
taagttcctcactaggagactagcgggcacattcacctggactttgtcagactcttcagg

SEQ ID NO: 22642 - DNA, 60 bp, Artificial
  Synthetic oligonucleotide
acatgctgcgactaattgactacaacaaggctgctttgagtaagttcaaagaggacgtag

SEQ ID NO: 22643 - DNA, 55 bp, Artificial
  Synthetic oligonucleotide
ttttggattgcgctttcctctagatcaactgggtgtcaggccctatcctacagaa

SEQ ID NO: 22644 - DNA, 60 bp, Artificial
  Synthetic oligonucleotide
agatcaactactgatgaggaaccacttgagagatctgatgggggtgccatattgcaatta

SEQ ID NO: 22645 - DNA, 60 bp, Artificial
  Synthetic oligonucleotide
tggctggcaggtcctgtggcatgtacggtcttaagggacccgacatttacaaaggagttt

SEQ ID NO: 22646 - DNA, 60 bp, Artificial
  Synthetic oligonucleotide
gccacctgtgggatattcgcattgatcagtttcctacttctggctggcaggtcctgtggc

SEQ ID NO: 22647 - DNA, 60 bp, Artificial
  Synthetic oligonucleotide
cttccttagacaaggacatcttgttgctcaatggtttctcaagacaaatgcgcaatcaaa

SEQ ID NO: 22648 - DNA, 60 bp, Artificial
  Synthetic oligonucleotide
gtgaagctctgcaattctcttctcaatgcttgcgtccattggaagctcttaacttcctta

SEQ ID NO: 22649 - DNA, 60 bp, Artificial
  Synthetic oligonucleotide
ttccttcctcatgatcctctgaacattgctgacctcagagaagtccaacccattcagaag

SEQ ID NO: 22650 - DNA, 60 bp, Artificial
  Synthetic oligonucleotide
actcaaagttttggtacctagaacatgcaaagaccggcgaaactagtgtccccaagtgct

SEQ ID NO: 22651 - DNA, 60 bp, Artificial
  Synthetic oligonucleotide
ggatcattaaatctaccctcaatgtcaatccatgtaggagcgttggggtcaattcctccc

SEQ ID NO: 22652 - DNA, 60 bp, Artificial
  Synthetic oligonucleotide
gacgaggtcaacccgggttgcgcattgaagaggtcggcaagatccatgccgtgtgagtac

SEQ ID NO: 22653 - DNA, 60 bp, Artificial
  Synthetic oligonucleotide
ggttccctgtaaaagtgtatgaactgcccgttctgtggttggaaaattgctatttccact

SEQ ID NO: 22654 - DNA, 60 bp, Artificial
  Synthetic oligonucleotide
cttgacagcttagaaccatcccctgcggaagagcacctataactgacgaggtcaacccgg

SEQ ID NO: 22655 - DNA, 60 bp, Artificial
  Synthetic oligonucleotide
actagtgtccccaagtgctggcttgtcaccaatggttcttacttaaatgagacccacttc

SEQ ID NO: 22656 - DNA, 60 bp, Artificial
  Synthetic oligonucleotide
cagtatgcatcttacacaaccagccatatttgtcccacactttgtcttcatactccctcg

SEQ ID NO: 22657 - DNA, 60 bp, Artificial
  Synthetic oligonucleotide
ggcttgacagcccaaaagagatttggattacttaaaataggaggtgcagaaggagatttc

SEQ ID NO: 22658 - DNA, 60 bp, Artificial
  Synthetic oligonucleotide
gagacaggctgaacctagtctgtatggaagacacaactgcaggtgctgctggttcgccaa

SEQ ID NO: 22659 - DNA, 60 bp, Artificial
  Synthetic oligonucleotide
catacatccaggaatttgacatgtgatgggttcatcatctgattgaattgcaaatcactc

SEQ ID NO: 22660 - DNA, 60 bp, Artificial
  Synthetic oligonucleotide
ggtgcccatcgaaccaagtgctccacctccagaagactaaatcgtgtccgggtacacccc

SEQ ID NO: 22661 - DNA, 60 bp, Artificial
  Synthetic oligonucleotide
ctgaggacttaaaccaagctcatggtccacatagtcagattgccttatgtgtgcagaagc

SEQ ID NO: 22662 - DNA, 60 bp, Artificial
  Synthetic oligonucleotide
gcgaggttggaacacacataacccattgttatgtcatcagctgtcatggccctattcaga

SEQ ID NO: 22663 - DNA, 60 bp, Artificial
  Synthetic oligonucleotide
taacttaacccaaatttcagattgccagtgttggtgcttacactagtgaattcagttggg

SEQ ID NO: 22664 - DNA, 60 bp, Artificial
  Synthetic oligonucleotide
aaagtaatgcgtccttttgatatgcaagctcaattacatctggtatggtttttctaacca

SEQ ID NO: 22665 - DNA, 50 bp, Artificial
  Synthetic oligonucleotide
catgactgccagaagtttaagttacggttctgcctaggatccactgtgcg

SEQ ID NO: 22666 - DNA, 60 bp, Artificial
  Synthetic oligonucleotide
gccgtctctcacacatttactacccatacttttacagaaccctatgaaacctgaggccac

SEQ ID NO: 22667 - DNA, 60 bp, Artificial
  Synthetic oligonucleotide
gcttttcccagagctctaaatcataccttttaagaacactgctacaaattgaaagccact

SEQ ID NO: 22668 - DNA, 60 bp, Artificial
  Synthetic oligonucleotide
cctgcattctttaggttcctgataactgtgctatcttttaccatctcatcaacaacgaag

SEQ ID NO: 22669 - DNA, 60 bp, Artificial
  Synthetic oligonucleotide
gaggatgtccaacacccgatcattgacaagtaatatcatttgtccaactattaatcctgc

SEQ ID NO: 22670 - DNA, 60 bp, Artificial
  Synthetic oligonucleotide
gaaacacaactccaaaattctagaggaacaaaaggcacagtctaggctatcattctcctc

SEQ ID NO: 22671 - DNA, 60 bp, Artificial
  Synthetic oligonucleotide
ctgaatgcaaccttaaaactggcaaattcaacccaatctccaaactgagcaattgattcc

SEQ ID NO: 22672 - DNA, 60 bp, Artificial
  Synthetic oligonucleotide
cccggggtggtgtggtttactcaatgtcttcaacggactgctgctgtctaaatagtctgc

SEQ ID NO: 22673 - DNA, 60 bp, Artificial
  Synthetic oligonucleotide
tttctcttgtgctaactcttgcattctcttgtaccttaagtgcctctgaactcagcccta

SEQ ID NO: 22674 - DNA, 60 bp, Artificial
  Synthetic oligonucleotide
gattttaacggttcatcaaggaaaaacagtgacttttgtgatgaattatacacctcatga

SEQ ID NO: 22675 - DNA, 60 bp, Artificial
  Synthetic oligonucleotide
gagaacctcattgatcctgtgaccacttctgagaaatcctctaccaatctagtcataagc

SEQ ID NO: 22676 - DNA, 60 bp, Artificial
  Synthetic oligonucleotide
gtcataagcttagtgttaagatctcccacataaagctccctgttagacccaacctgttct

SEQ ID NO: 22677 - DNA, 60 bp, Artificial
  Synthetic oligonucleotide
atcaatcgattcaccctctctgatattcttgagacaatatccactcctacaccattggcc

SEQ ID NO: 22678 - DNA, 60 bp, Artificial
  Synthetic oligonucleotide
tctctggagacgataacccctcgatccatctgtccaatctttgacatcttggttgacaat

SEQ ID NO: 22679 - DNA, 60 bp, Artificial
  Synthetic oligonucleotide
cagagcccatgtagaagactcccaatctccctggggctgtccagtgccccaagtgcctta

SEQ ID NO: 22680 - DNA, 60 bp, Artificial
  Synthetic oligonucleotide
ggacggattcaaccatttatgccttaaagcctcaacaatgtcattttcagcaaatcctgc

SEQ ID NO: 22681 - DNA, 60 bp, Artificial
  Synthetic oligonucleotide
cccctgccaatcaaaccaatcaaattttcttcaaacacatgacccttctttatttccaaa

SEQ ID NO: 22682 - DNA, 60 bp, Artificial
  Synthetic oligonucleotide
gcagctaaatcgttatccattagaatctgagctaaattcactgccttcttccctctcagc

SEQ ID NO: 22683 - DNA, 60 bp, Artificial
  Synthetic oligonucleotide
ttgtgtaatgctaactgtacttcatccctcacctgttcgaatgcagaaatttggtcctca

SEQ ID NO: 22684 - DNA, 60 bp, Artificial
  Synthetic oligonucleotide
gaagcagtcctcaagtggtagagcacagagtgccttaagagtataaacaatcttcctact

SEQ ID NO: 22685 - DNA, 60 bp, Artificial
  Synthetic oligonucleotide
gcatgcatttaccttacaggactccaactccaccaacaaagataaaagtttaaacccctc

SEQ ID NO: 22686 - DNA, 65 bp, Artificial
  Synthetic oligonucleotide
ggtcttggccaaactatggattaatctatgatattcttgttcttcaatttctagttctgaagtag

SEQ ID NO: 22687 - DNA, 60 bp, Artificial
  Synthetic oligonucleotide
ctgtggtccaatcagacacgaagctggtattgtaattgctgcggccatctacaacgggga

SEQ ID NO: 22688 - DNA, 60 bp, Artificial
  Synthetic oligonucleotide
agtagtcttcatacctttcaacacctctattaacaaccacctcaacctttctgtggtcca

SEQ ID NO: 22689 - DNA, 60 bp, Artificial
  Synthetic oligonucleotide
gcgcacagtggatcctaggcattgctttcacgctttgaggtgaaccacctcactggagca

SEQ ID NO: 22690 - DNA, 60 bp, Artificial
  Synthetic oligonucleotide
ccaacaagatgagagtctttcccatcaggttgtaaccatctggcaccaccttaggcagag

SEQ ID NO: 22691 - DNA, 60 bp, Artificial
  Synthetic oligonucleotide
gccttccatttcttttcaaagtcgtctggatttactctaacaaaagtctccaacaagatg

SEQ ID NO: 22692 - DNA, 60 bp, Artificial
  Synthetic oligonucleotide
gaatcaaagttcaaccagttgatcatttcttcacacattgatgtgatcacagcttcagaa

SEQ ID NO: 22693 - DNA, 60 bp, Artificial
  Synthetic oligonucleotide
cgtcagtgaagttctccattgctttatggcaacattgtcgttcctctgctttgtgaacag

SEQ ID NO: 22694 - DNA, 60 bp, Artificial
  Synthetic oligonucleotide
tcctcaggaccaactaatgagtagcagaatttgtcacctagttcatcatgaaatttggtg

SEQ ID NO: 22695 - DNA, 66 bp, Artificial
  Synthetic oligonucleotide
gtaacatctagatctttctcctgtcttttggtaaaacagtaaacctattatgttgtttgtgatagg

SEQ ID NO: 22696 - DNA, 59 bp, Artificial
  Synthetic oligonucleotide
ttttatggctctgtttacctgatgaggtgaccaaagagattccagtatcttcccttttg

SEQ ID NO: 22697 - DNA, 60 bp, Artificial
  Synthetic oligonucleotide
ccctctcagcaaaggcaaaactgaaaccatggttacaccatccaactgcaggtgtcctcc

SEQ ID NO: 22698 - DNA, 60 bp, Artificial
  Synthetic oligonucleotide
attcttcttgagacttttcttgaggtacatttgcacttaccaagtttgtgaggtttttta

SEQ ID NO: 22699 - DNA, 60 bp, Artificial
  Synthetic oligonucleotide
gtggggtccccactttgagtggtccatggaaagactaaagtcaccattgtttactgccat

SEQ ID NO: 22700 - DNA, 60 bp, Artificial
  Synthetic oligonucleotide
catctaattttgggacaacaacacttttattgctcgagatgtctaaagcagtacttgtga

SEQ ID NO: 22701 - DNA, 60 bp, Artificial
  Synthetic oligonucleotide
cagtaagcctgtgcaacattaaaaggaacctctactgttttgtgtaagtgccacttcagt

SEQ ID NO: 22702 - DNA, 60 bp, Artificial
  Synthetic oligonucleotide
ctttgcaattggatttctgagctagacttacactcaactgccaacttagacataaggtca

SEQ ID NO: 22703 - DNA, 60 bp, Artificial
  Synthetic oligonucleotide
aatgttcagtagaaacttgaatcttcttgtgaacccatattctatctcattgtcaccaga

SEQ ID NO: 22704 - DNA, 60 bp, Artificial
  Synthetic oligonucleotide
ctcgatttgaactcagcaacaaaattccccaccacactctttggacttacaaatttgttc

SEQ ID NO: 22705 - DNA, 60 bp, Artificial
  Synthetic oligonucleotide
tggtgttttacacttcacattatgtaatgctgcggccacaaacttggtcaacaagggagt

SEQ ID NO: 22706 - DNA, 60 bp, Artificial
  Synthetic oligonucleotide
gtctgacaaattgtgtaggatgccttggcccatgtcaagtacagacattatatgacttgg

SEQ ID NO: 22707 - DNA, 60 bp, Artificial
  Synthetic oligonucleotide
aagcactggtagatgattccggaattcaattttggagggtccctctgaaagtaaggcagg

SEQ ID NO: 22708 - DNA, 60 bp, Artificial
  Synthetic oligonucleotide
ggcaggagtttgaggacgtggctggttacttccgacctttgctgtgggattacatgtgta

SEQ ID NO: 22709 - DNA, 60 bp, Artificial
  Synthetic oligonucleotide
tgggattacatgtgtatttctctgtcaaccgcaattgaattaggagcatgggtcctgggg

SEQ ID NO: 22710 - DNA, 60 bp, Artificial
  Synthetic oligonucleotide
ggagccgaaggagtcaaccccaatggagttctttaagcataacccatgtgattatttccc

SEQ ID NO: 22711 - DNA, 60 bp, Artificial
  Synthetic oligonucleotide
gtcccatttgcaagatgcccctacccacaaagctcaagacatccaccactccaactgctc

SEQ ID NO: 22712 - DNA, 60 bp, Artificial
  Synthetic oligonucleotide
gagatcttaccagagggtttctatgaggaattctgtaatgccatttataaagactgtagt

SEQ ID NO: 22713 - DNA, 60 bp, Artificial
  Synthetic oligonucleotide
ctgatgaacggaaataagcttatgggcaaatactcccactataagtccaggtgcctaaac

SEQ ID NO: 22714 - DNA, 60 bp, Artificial
  Synthetic oligonucleotide
cctttcaaatgaacattcatcctcacttaaaaatctctgtgacatgatgggtgttgagcc

SEQ ID NO: 22715 - DNA, 60 bp, Artificial
  Synthetic oligonucleotide
gtcaatgatacttctcacaacatgttggttggggcattagccgccatgatggcagatagg

SEQ ID NO: 22716 - DNA, 60 bp, Artificial
  Synthetic oligonucleotide
gttcttaacggatgcaaagcaattggggcctgttactcctcttgagattgacgttgatgc

SEQ ID NO: 22717 - DNA, 60 bp, Artificial
  Synthetic oligonucleotide
gtctgcatttcaaagttcaattgcatctggcttcgttggtttgtgtaggacactgggcag

SEQ ID NO: 22718 - DNA, 60 bp, Artificial
  Synthetic oligonucleotide
catctacattcactagaggtgcacagaagctcttatccgaagctatcaacaagtctgcat

SEQ ID NO: 22719 - DNA, 60 bp, Artificial
  Synthetic oligonucleotide
gggagagcaattcggaagctcttagtaaggccctgtctttgacaaactgtaccacagcaa

SEQ ID NO: 22720 - DNA, 60 bp, Artificial
  Synthetic oligonucleotide
ggtgcagtgaattcatgtgttctgccagattgttggaggctggtgctatctggtcccacc

SEQ ID NO: 22721 - DNA, 60 bp, Artificial
  Synthetic oligonucleotide
gtgctgcagaatttggttgtcttgtcaaaagacttgcaggcagatatcaaaggacgtgat

SEQ ID NO: 22722 - DNA, 60 bp, Artificial
  Synthetic oligonucleotide
cgctattctctcaatgaagctgaatgtgtccttggctcatgtgtcttacagtatggatca

SEQ ID NO: 22723 - DNA, 60 bp, Artificial
  Synthetic oligonucleotide
gtgtaaagagccacatcagttggcagaaacaattgacacaattattgatcaatcagtcgc

SEQ ID NO: 22724 - DNA, 60 bp, Artificial
  Synthetic oligonucleotide
gaacactgtcactgttgcagtatgccagatacccgattgacccatttcttctaaactgtg

SEQ ID NO: 22725 - DNA, 60 bp, Artificial
  Synthetic oligonucleotide
gactcaagggcagaacatgtgaagagttgatctggggaacaagactagtggaggatatcg

SEQ ID NO: 22726 - DNA, 60 bp, Artificial
  Synthetic oligonucleotide
cagtgtggatcattatggggtgagcatggatgtgtttgactgcaatgtttatgattcgat

SEQ ID NO: 22727 - DNA, 60 bp, Artificial
  Synthetic oligonucleotide
gctttgtgagtccctctctatgacatccggtagactttctggtgtggagagcctaaatgt

SEQ ID NO: 22728 - DNA, 60 bp, Artificial
  Synthetic oligonucleotide
ctcattccacttattgacggcagaacatcattttacaatgagcaaatccctgattgggtt

SEQ ID NO: 22729 - DNA, 60 bp, Artificial
  Synthetic oligonucleotide
aagaggagaaatttccatacacactggggactgttgagattttagatcccacagacttgg

SEQ ID NO: 22730 - DNA, 60 bp, Artificial
  Synthetic oligonucleotide
gaagacctcttcgactgtgaagataaggcagaatgaacatggagcagctaggtaccaagt

SEQ ID NO: 22731 - DNA, 60 bp, Artificial
  Synthetic oligonucleotide
caggtgagtgctcaaagtgttatgcagttaacaatgatgcggttggtgaggtctgctcat

SEQ ID NO: 22732 - DNA, 60 bp, Artificial
  Synthetic oligonucleotide
gaggagtaccaggtgttcagaaacagaattagacaaggggaggtggagtgtcagtttgtc

SEQ ID NO: 22733 - DNA, 60 bp, Artificial
  Synthetic oligonucleotide
cctggatctgtaaagttgggacagactattagatttcagattagaagtcaagaggctagc

SEQ ID NO: 22734 - DNA, 60 bp, Artificial
  Synthetic oligonucleotide
aaggccaatgttcaagtatgacttgatgatggggtatgcatggatcgattatgacattga

SEQ ID NO: 22735 - DNA, 60 bp, Artificial
  Synthetic oligonucleotide
cgtatgtgaggtcatttgtagcaacaacgaggaccctgggttcttttacatggttcccac

SEQ ID NO: 22736 - DNA, 60 bp, Artificial
  Synthetic oligonucleotide
agcgggaggaacattacatcgtcttgtcatctgaactgcgagtatctcacagtagaacac

SEQ ID NO: 22737 - DNA, 60 bp, Artificial
  Synthetic oligonucleotide
gtgaagcattgtccctcgtctctcacatagttaagtggaagcgggaggaacattacatcg

SEQ ID NO: 22738 - DNA, 60 bp, Artificial
  Synthetic oligonucleotide
gagagctttacataggggacttgaggacaaaaatgtttacaaggttaattgaggattact

SEQ ID NO: 22739 - DNA, 60 bp, Artificial
  Synthetic oligonucleotide
aatatcctccacgactttggaattccgaccccttctctctgttttgtcgtccccgatggt

SEQ ID NO: 22740 - DNA, 60 bp, Artificial
  Synthetic oligonucleotide
gactatgagtacaaaattcagcaggcaatgagtagtctggtgatgggttccaaagggcaa

SEQ ID NO: 22741 - DNA, 60 bp, Artificial
  Synthetic oligonucleotide
gacagttgagaaaattgtggaacagtacaaggaaccggcaaaacaaaactcacatcttgc

SEQ ID NO: 22742 - DNA, 60 bp, Artificial
  Synthetic oligonucleotide
ctgaggttctatgcacaactgtggaaaccatggtgagttggatagaagactgtaatgaac

SEQ ID NO: 22743 - DNA, 60 bp, Artificial
  Synthetic oligonucleotide
ttttgctatttaggctcctaaggtctttgttgaacatagtgttgcatgaagatgtaaaga

SEQ ID NO: 22744 - DNA, 60 bp, Artificial
  Synthetic oligonucleotide
cccattgttacaagtggttgtgcaacagctctggatttggccagtaacaagagtgtggtc

SEQ ID NO: 22745 - DNA, 60 bp, Artificial
  Synthetic oligonucleotide
gagtgatcagttgaataaatttgtgagtcccaaaagtgttattgggagatttgttgcaga

SEQ ID NO: 22746 - DNA, 60 bp, Artificial
  Synthetic oligonucleotide
ttgcctctcattgctcctgagtgtcagcagcaggtgtcccatttgcaagatgcccctacc

SEQ ID NO: 22747 - DNA, 60 bp, Artificial
  Synthetic oligonucleotide
gatgaagtcttttatcaaagcacaactaggtctaagaacaagcacatcacagaccacaac

SEQ ID NO: 22748 - DNA, 60 bp, Artificial
  Synthetic oligonucleotide
tgcccctacccacaaagctcaagacatccaccactccaactgctccctccatcagagagg

SEQ ID NO: 22749 - DNA, 60 bp, Artificial
  Synthetic oligonucleotide
ccaactgctccctccatcagagaggccaacaccacaagtcccccaccatatagtccctaa

SEQ ID NO: 22750 - DNA, 60 bp, Artificial
  Synthetic oligonucleotide
ctcactgaactcctaggaagccatggaagatgaggttgccactgtcaaagacttagtggc

SEQ ID NO: 22751 - DNA, 60 bp, Artificial
  Synthetic oligonucleotide
ccaactgtagactggtgtcaaatgcaatgctggagatcgttcttgaacaaggtgaagtcc

SEQ ID NO: 22752 - DNA, 60 bp, Artificial
  Synthetic oligonucleotide
gcagaggcaggagctcaaaagggtggcttggttcttgtttcatcagtgtaaatgatcggt

SEQ ID NO: 22753 - DNA, 60 bp, Artificial
  Synthetic oligonucleotide
ggttagtttccttagagtcaacaaaacgagacttaaagaaatggatagaaaggaggcagc

SEQ ID NO: 22754 - DNA, 60 bp, Artificial
  Synthetic oligonucleotide
gcagcaacttgaggtttccaagtcgtccacactggtgtgtagaaatgagattctgaggtc

SEQ ID NO: 22755 - DNA, 60 bp, Artificial
  Synthetic oligonucleotide
cagctcatcacccattaagaatggtactgagacagaaaatcatttactcaggtgcagtca

SEQ ID NO: 22756 - DNA, 60 bp, Artificial
  Synthetic oligonucleotide
gcggccgaacactgtgggacagttgccaacggagtgttgcaaacatttatgagaatggcc

SEQ ID NO: 22757 - DNA, 60 bp, Artificial
  Synthetic oligonucleotide
ttgccaacggagtgttgcaaacatttatgagaatggcctggggtggaagatacattgcat

SEQ ID NO: 22758 - DNA, 60 bp, Artificial
  Synthetic oligonucleotide
ctcataaatgtttgcaacactccgttggcaactgtcccacagtgttcggccgcatcccca

SEQ ID NO: 22759 - DNA, 60 bp, Artificial
  Synthetic oligonucleotide
ccacagctgtattcccaaaacacttgagttctgcttcaattagcatccacctggttaaac

SEQ ID NO: 22760 - DNA, 60 bp, Artificial
  Synthetic oligonucleotide
ccaccccaggccattctcataaatgtttgcaacactccgttggcaactgtcccacagtgt

SEQ ID NO: 22761 - DNA, 60 bp, Artificial
  Synthetic oligonucleotide
ctcattcctatgctggggatgcggccgaacactgtgggacagttgccaacggagtgttgc

SEQ ID NO: 22762 - DNA, 60 bp, Artificial
  Synthetic oligonucleotide
tatgagaatggcctggggtggaagatgcattgcattagactcaggaaagggaaactggga

SEQ ID NO: 22763 - DNA, 60 bp, Artificial
  Synthetic oligonucleotide
cggagtgttgcaaacatttatgagaatggcctggggtggaagatacattgcattagactc

SEQ ID NO: 22764 - DNA, 60 bp, Artificial
  Synthetic oligonucleotide
ccaggtggatgctaattgaagcagaactcaagtgttttgggaatacagctgtggcaaagt

SEQ ID NO: 22765 - DNA, 60 bp, Artificial
  Synthetic oligonucleotide
caggtggatgctaattgaagcagaactcaagtgttttgggaatacagctgtggcaaaatg

SEQ ID NO: 22766 - DNA, 60 bp, Artificial
  Synthetic oligonucleotide
caacctctctcattcctatgctggggatgcggccgaacactgtgggacagttgccaacgg

SEQ ID NO: 22767 - DNA, 60 bp, Artificial
  Synthetic oligonucleotide
catccacctggttaaacaataaccacctggtgtttcattgccctcagaatctgacaatgt

SEQ ID NO: 22768 - DNA, 53 bp, Artificial
  Synthetic oligonucleotide
aatgaaacaccaggtggttattgtttaaccaggtggatgctaattgaagcaga

SEQ ID NO: 22769 - DNA, 60 bp, Artificial
  Synthetic oligonucleotide
cattttgccacagctgtattcccaaaacacttgagttctgcttcaattagcatccacctg

SEQ ID NO: 22770 - DNA, 60 bp, Artificial
  Synthetic oligonucleotide
ccaggtggatgctaattgaagcagaactcaagtgttttgggaatacagctgtggcaaaat

SEQ ID NO: 22771 - DNA, 60 bp, Artificial
  Synthetic oligonucleotide
cagtcccagtttccctttcctgagtctaatgcaatgtatcttccaccccaggccattctc

SEQ ID NO: 22772 - DNA, 60 bp, Artificial
  Synthetic oligonucleotide
gagaatggcctggggtggaagatgcattgcattagactcaggaaagggaaactgggactg

SEQ ID NO: 22773 - DNA, 60 bp, Artificial
  Synthetic oligonucleotide
tcattatacagtcccagtttccctttcctgagtctaatgcaatgtatcttccaccccagg

SEQ ID NO: 22774 - DNA, 60 bp, Artificial
  Synthetic oligonucleotide
gacattgtcagattctgagggcaatgaaacaccaggtggttattgtttaaccaggtggat

SEQ ID NO: 22775 - DNA, 60 bp, Artificial
  Synthetic oligonucleotide
gtgaaagtcaagagcagataacagtgttcttgtgtccgacaacacatcagccttcacagg

SEQ ID NO: 22776 - DNA, 60 bp, Artificial
  Synthetic oligonucleotide
ttcggctctttgttccagttgagtgtttgtgagattgcccccataaacaccaggctgaga

SEQ ID NO: 22777 - DNA, 60 bp, Artificial
  Synthetic oligonucleotide
ccttcctcattttggctggcagaagttgtgatggcatgatgattgataggaggcacaatc

SEQ ID NO: 22778 - DNA, 60 bp, Artificial
  Synthetic oligonucleotide
caaaggaccatctaacacaacatggggaattgaactcactttgacaaacacatccattgc

SEQ ID NO: 22779 - DNA, 60 bp, Artificial
  Synthetic oligonucleotide
ctgggcaacatgtcccaggtggttactgtttggagcaatgggctattgtttgggctggaa

SEQ ID NO: 22780 - DNA, 60 bp, Artificial
  Synthetic oligonucleotide
gtgttatccttgatgtcccagatcttcacaaccccatctctgttgcctgtgggtctagca

SEQ ID NO: 22781 - DNA, 60 bp, Artificial
  Synthetic oligonucleotide
cgagtcagtgaagaagtgaacgtacggcgtgatctagaatcgcctaggatccactgtgcg

SEQ ID NO: 22782 - DNA, 60 bp, Artificial
  Synthetic oligonucleotide
ccatcacaggaagacattctttaccgcagtgttggttagttcacaatggctcgtacctca

SEQ ID NO: 22783 - DNA, 60 bp, Artificial
  Synthetic oligonucleotide
cctacaaatgggtgagactgggtaaataagccctagcctcgacatgggcctcgacgtcac

SEQ ID NO: 22784 - DNA, 60 bp, Artificial
  Synthetic oligonucleotide
ggtgctggggtgttgatccagtacaacttgacagttggggatagaggaggtgaggttggc

SEQ ID NO: 22785 - DNA, 60 bp, Artificial
  Synthetic oligonucleotide
tgttttacaccatcacagtgtttctccacttagttggaatacccactcataggcacatca

SEQ ID NO: 22786 - DNA, 60 bp, Artificial
  Synthetic oligonucleotide
tgctctttgaaggacttctcatcgtggggaaatctgtaacaatgtatgtagttgcccgtg

SEQ ID NO: 22787 - DNA, 60 bp, Artificial
  Synthetic oligonucleotide
gtgcgtgcttgctcggcactgagtttcacgtcaagcacttttaagtctcttctcccatgc

SEQ ID NO: 22788 - DNA, 60 bp, Artificial
  Synthetic oligonucleotide
ggatttctctgtccgggtgtagtgctcacaaacataccttcacgattctttatttgcaat

SEQ ID NO: 22789 - DNA, 60 bp, Artificial
  Synthetic oligonucleotide
cgaatctaaatctacagtggtgttatcccaagccctcccttgaacttgagaccttgagcc

SEQ ID NO: 22790 - DNA, 60 bp, Artificial
  Synthetic oligonucleotide
ttgtttaaggtccggtgatcctccgtctcttactggtggctggatagcactcggcttcga

SEQ ID NO: 22791 - DNA, 60 bp, Artificial
  Synthetic oligonucleotide
ctgagattgtaccctgagatgtttatggctgatggctcattactaatgatttttagggca

SEQ ID NO: 22792 - DNA, 60 bp, Artificial
  Synthetic oligonucleotide
gtggagggtcttgcagactaacaaactgtgaaggtgggacacattacaatttcctgatca

SEQ ID NO: 22793 - DNA, 60 bp, Artificial
  Synthetic oligonucleotide
gcaagctccattagctcctctttggctaagcctcccaccttaagcacattgtccctctgg

SEQ ID NO: 22794 - DNA, 60 bp, Artificial
  Synthetic oligonucleotide
cgtttggaagagacgctgagcaacagcgcctccctgactctccacctcagaagaggtgga

SEQ ID NO: 22795 - DNA, 60 bp, Artificial
  Synthetic oligonucleotide
aaggaccgtttggaagagacgctgagcaacagcgcctccctgactctccacctcagaaga

SEQ ID NO: 22796 - DNA, 60 bp, Artificial
  Synthetic oligonucleotide
gtgagatcagcttcagatcgtttgtccttcctcatcattctctgaacttgtgccacctga

SEQ ID NO: 22797 - DNA, 60 bp, Artificial
  Synthetic oligonucleotide
gcagatccgctctctgctggagctgtgatgttgttaagttgccttgatagacacctggtg

SEQ ID NO: 22798 - DNA, 61 bp, Artificial
  Synthetic oligonucleotide
gactctccaacttaatacagagaatgcagttaacttactcaagagatcaataaatggattg

SEQ ID NO: 22799 - DNA, 60 bp, Artificial
  Synthetic oligonucleotide
caacgcggtgatggccaagtgcaacaaagagcatgatgttgagttttgtgacacaatgag

SEQ ID NO: 22800 - DNA, 60 bp, Artificial
  Synthetic oligonucleotide
actcatccttagatagccctcctatcttcaacaccacatctctctgaactgatctcattg

SEQ ID NO: 22801 - DNA, 60 bp, Artificial
  Synthetic oligonucleotide
ctccgccctgctctgtcatacaggcaatggttaatgctggcatggagccaaactgattga

SEQ ID NO: 22802 - DNA, 60 bp, Artificial
  Synthetic oligonucleotide
ttgttcggtcagcttttccaagtcatccaagtttgggaacttcacagtgtacacaagccc

SEQ ID NO: 22803 - DNA, 60 bp, Artificial
  Synthetic oligonucleotide
ctttaactaccccacctcttgattgttgcagaggcttcatgccaaccagcttaagcagat

SEQ ID NO: 22804 - DNA, 60 bp, Artificial
  Synthetic oligonucleotide
agggtccaacagcctcacagctcctttcacttgatcttcctggtctctgcttagtgggtt

SEQ ID NO: 22805 - DNA, 60 bp, Artificial
  Synthetic oligonucleotide
gagagcttgagtccaacgaaacgcaggaatatttgagtcactcatggtgattcaatgcgc

SEQ ID NO: 22806 - DNA, 60 bp, Artificial
  Synthetic oligonucleotide
tatgctcttgtggttattacaacctaccaggcaaacaagtcaggtgggtcaggaaaggga

SEQ ID NO: 22807 - DNA, 60 bp, Artificial
  Synthetic oligonucleotide
ggccgtgtgagaatttactttggtccttgaatgattgctcattgtgagggcgcctgtaac

SEQ ID NO: 22808 - DNA, 60 bp, Artificial
  Synthetic oligonucleotide
ccggggagcagatgcagctcacaggtgtatcaggttttcagttcggtatagtaaatcaat

SEQ ID NO: 22809 - DNA, 60 bp, Artificial
  Synthetic oligonucleotide
tgggagcaactgctgaggttttgcatcagctatgtagccagtaattgtggcgtcaaacat

SEQ ID NO: 22810 - DNA, 60 bp, Artificial
  Synthetic oligonucleotide
catgtccctggtgggtactgtttggagcagtgggccgttgtttgggctgggatcaagtgt

SEQ ID NO: 22811 - DNA, 60 bp, Artificial
  Synthetic oligonucleotide
tgctctcccagaaacttgtgatctggagccaatgtatggccacccttcaccactcaggca

SEQ ID NO: 22812 - DNA, 60 bp, Artificial
  Synthetic oligonucleotide
gcttagtgggttaatttgtggagttccaccatttctcactggagggtggttgggtgaggg

SEQ ID NO: 22813 - DNA, 60 bp, Artificial
  Synthetic oligonucleotide
gaagacatgtgctgtcatctgtggaactcaacctaacgaggatgtttgacaattttcctc

SEQ ID NO: 22814 - DNA, 60 bp, Artificial
  Synthetic oligonucleotide
caattttcctcagtcctgttccaagaataacacacaccactattataaaggccctgaagg

SEQ ID NO: 22815 - DNA, 60 bp, Artificial
  Synthetic oligonucleotide
caagactggtgaggcaggtcacactctcaaatggcttttaaatgagctacacttcaatgt

SEQ ID NO: 22816 - DNA, 60 bp, Artificial
  Synthetic oligonucleotide
atgtgacgagacatgtgggtgcaagatgcatgacaacagagggtgcaggacttctgattc

SEQ ID NO: 22817 - DNA, 60 bp, Artificial
  Synthetic oligonucleotide
acagagggtgcaggacttctgattcaatacaacctgacaattggagatcatgggggtgag

SEQ ID NO: 22818 - DNA, 60 bp, Artificial
  Synthetic oligonucleotide
aaacatgcttggggaaaccttaatggtctctaacatgttccctccgtcaatcatacaagc

SEQ ID NO: 22819 - DNA, 60 bp, Artificial
  Synthetic oligonucleotide
aatgacacagtcagtgggaaacattctctcccacagtgttggaaggttcacaatggaagc

SEQ ID NO: 22820 - DNA, 60 bp, Artificial
  Synthetic oligonucleotide
ccagcattgccaatgaacattccctctctgtttttcacttgaagaactgtctttataagt

SEQ ID NO: 22821 - DNA, 60 bp, Artificial
  Synthetic oligonucleotide
cattgttggcgatgcgtgccctaaaccacacagaataactaagaatgctctatgctcttg

SEQ ID NO: 22822 - DNA, 60 bp, Artificial
  Synthetic oligonucleotide
ccaggttgttactttagggtccaacagcctcacagctcctttcacttgatcttcctggtc

SEQ ID NO: 22823 - DNA, 60 bp, Artificial
  Synthetic oligonucleotide
gaaatgttgatctgtgattgttcttgggtgatgagcttcaagcagggatgttgttcggtc

SEQ ID NO: 22824 - DNA, 60 bp, Artificial
  Synthetic oligonucleotide
tgaaagattgcaaactccactaagtccccagggggcccctcaatgtcaacccaggttgtt

SEQ ID NO: 22825 - DNA, 60 bp, Artificial
  Synthetic oligonucleotide
ttcctccacctggtgggcatcccctcacacaggcacattgttggcgatgcgtgccctaaa

SEQ ID NO: 22826 - DNA, 60 bp, Artificial
  Synthetic oligonucleotide
ttcactagtacagttttcctccacctggtgggcatcccctcacacaggcacattgttggc

SEQ ID NO: 22827 - DNA, 60 bp, Artificial
  Synthetic oligonucleotide
caatggaagctacttaaatgagtcacagttcaagaatgagtggctcttagagagtgacca

SEQ ID NO: 22828 - DNA, 60 bp, Artificial
  Synthetic oligonucleotide
ctcaggcagatcttgtaaagcagattctcataaggatttctttgaggtccagcattgcca

SEQ ID NO: 22829 - DNA, 60 bp, Artificial
  Synthetic oligonucleotide
agagtgaccacctgtatagtgagatgttgctgaaagagtacgaagagagacaggggagga

SEQ ID NO: 22830 - DNA, 60 bp, Artificial
  Synthetic oligonucleotide
ttgatgacatcggctttgacagtctgtgtccagttggataggcctcttctgagagcttga

SEQ ID NO: 22831 - DNA, 60 bp, Artificial
  Synthetic oligonucleotide
agcaactagccaggattccctactgcaactacaccaaattttggtacattaatgacacag

SEQ ID NO: 22832 - DNA, 60 bp, Artificial
  Synthetic oligonucleotide
tgttccctccgtcaatcatacaagcacctgctttgacagctgcagaaagactcagattat

SEQ ID NO: 22833 - DNA, 60 bp, Artificial
  Synthetic oligonucleotide
gccacctgattgaagtcaagggcactcataatagcctttgcatctttgatgacatcggct

SEQ ID NO: 22834 - DNA, 60 bp, Artificial
  Synthetic oligonucleotide
ggcgtcaaacatgatgcagtccagcagggcacagtgtgcattggtcgatgttggggcagc

SEQ ID NO: 22835 - DNA, 59 bp, Artificial
  Synthetic oligonucleotide
gcattggtcgatgttggggcagcacccttctttttcttcttgatgacaaggcctttgtg

SEQ ID NO: 22836 - DNA, 60 bp, Artificial
  Synthetic oligonucleotide
gccttgtgctgtcaacaccattccttcaggtagggccctgatgattgcagacaccaaccc

SEQ ID NO: 22837 - DNA, 58 bp, Artificial
  Synthetic oligonucleotide
tctggcttgttcactagtgagagcaacgtccactaccttcaggtctctcctgccatgc

SEQ ID NO: 22838 - DNA, 60 bp, Artificial
  Synthetic oligonucleotide
gcagacaccaaccctggttgtgcagactcaaggtccttaagcagaaggccgtgtgagaat

SEQ ID NO: 22839 - DNA, 60 bp, Artificial
  Synthetic oligonucleotide
ggtctttctcttgcttgcggggaaaaggtgtgatgctcttaacattgatagaagacatgt

SEQ ID NO: 22840 - DNA, 60 bp, Artificial
  Synthetic oligonucleotide
taccctccatcaggatggcattgaacaaagtggcctacagttctgtcagtagatcactcc

SEQ ID NO: 22841 - DNA, 60 bp, Artificial
  Synthetic oligonucleotide
tctcattatccagaacaccacatgggctcaacattgcacatacagtcctctaccctccat

SEQ ID NO: 22842 - DNA, 60 bp, Artificial
  Synthetic oligonucleotide
tgggggtgaggtagggagacatctgatagcatcacttgctcagatcatcggtgacaataa

SEQ ID NO: 22843 - DNA, 60 bp, Artificial
  Synthetic oligonucleotide
gtgacaataaagcagcttgggtggggaaatgtgactccagatgttccaacgatggtaagt

SEQ ID NO: 22844 - DNA, 60 bp, Artificial
  Synthetic oligonucleotide
tctaattcaactgatggtctttctcttgcttgcggggaaaaggtgtgatgctcttaacat

SEQ ID NO: 22845 - DNA, 60 bp, Artificial
  Synthetic oligonucleotide
gcaacattctgactccttgaaagatgggtcaggtggtgactttctttcaatcaattcctg

SEQ ID NO: 22846 - DNA, 60 bp, Artificial
  Synthetic oligonucleotide
gccttgcaggcaggaattgtgatagcctaatgatcgataggagacatgaactttcacatg

SEQ ID NO: 22847 - DNA, 60 bp, Artificial
  Synthetic oligonucleotide
ctttcacatgttgaactaaatttgaccagaatgtttgacaatcttcctcaatcttgcagt

SEQ ID NO: 22848 - DNA, 58 bp, Artificial
  Synthetic oligonucleotide
cgcaccggggatcctaggcatttccttgatcacgcctgtgtgactccaaaatggggca

SEQ ID NO: 22849 - DNA, 60 bp, Artificial
  Synthetic oligonucleotide
tgctctcctccttgttgggtcatacaagcaatggtgagcgctggcatagaaccaaactgg

SEQ ID NO: 22850 - DNA, 60 bp, Artificial
  Synthetic oligonucleotide
ggccccaaggggaccaactggggaattgagctgaccctcacaaacacctctttagacagc

SEQ ID NO: 22851 - DNA, 60 bp, Artificial
  Synthetic oligonucleotide
ggagcttagcgtttggaaacatcaccaactgtgacaagacaggtgaagctgggcacacac

SEQ ID NO: 22852 - DNA, 60 bp, Artificial
  Synthetic oligonucleotide
atcgacacctaattggcgaaggatgcccgaagcctcatagaatcacatcaaattcactgt

SEQ ID NO: 22853 - DNA, 60 bp, Artificial
  Synthetic oligonucleotide
ggccttcaatgtccacccaagttgttcctctcggatctagttgctcaatagcccttatta

SEQ ID NO: 22854 - DNA, 60 bp, Artificial
  Synthetic oligonucleotide
ctggctgaaacaaagcaagttcgacaggatcacccggtgggccttcaatgtccacccaag

SEQ ID NO: 22855 - DNA, 60 bp, Artificial
  Synthetic oligonucleotide
ttgcatcaaacattatgcaatccaataatgcacaatgagggttggctgatcctggggcag

SEQ ID NO: 22856 - DNA, 60 bp, Artificial
  Synthetic oligonucleotide
gacgggcttggtctgatgataactttacatctagcactttgatgtctcttctcccatgca

SEQ ID NO: 22857 - DNA, 60 bp, Artificial
  Synthetic oligonucleotide
tcacacaaagcatgttgtaacgttcccacacaacgtcttccatgagacgggcttggtctg

SEQ ID NO: 22858 - DNA, 60 bp, Artificial
  Synthetic oligonucleotide
ataagtcctggttgtgtgtcagctagatccttgagcaacaatccgtgagagaatttactt

SEQ ID NO: 22859 - DNA, 60 bp, Artificial
  Synthetic oligonucleotide
ctgcgcagtcagcaccatgttgtttgggaggtgtcttatgatacatgaaataagtcctgg

SEQ ID NO: 22860 - DNA, 60 bp, Artificial
  Synthetic oligonucleotide
caccgattgctctaactgacatttgcttttggtccttggttttcttcactagcacagtgt

SEQ ID NO: 22861 - DNA, 60 bp, Artificial
  Synthetic oligonucleotide
aggcaaggcaaaacaccgattgctctaactgacatttgcttttggtccttggttttcttc

SEQ ID NO: 22862 - DNA, 60 bp, Artificial
  Synthetic oligonucleotide
cacagtgtttctgcagctcattggaatcccaacccatcgacacctaattggcgaaggatg

SEQ ID NO: 22863 - DNA, 60 bp, Artificial
  Synthetic oligonucleotide
ggttttcttcactagcacagtgtttctgcagctcattggaatcccaacccatcgacacct

SEQ ID NO: 22864 - DNA, 53 bp, Artificial
  Synthetic oligonucleotide
acatgttccaggtggatactgtttagagcagtgggcaatagtttgggcaggga

SEQ ID NO: 22865 - DNA, 58 bp, Artificial
  Synthetic oligonucleotide
gagaatagtgtgaatcttctgaagagaagcatcaatggtctaatctcagatagcctgg

SEQ ID NO: 22866 - DNA, 60 bp, Artificial
  Synthetic oligonucleotide
gatgagctttaggcaaggatgtttctcagtcagtttctccaagtcagacaggtttgggta

SEQ ID NO: 22867 - DNA, 60 bp, Artificial
  Synthetic oligonucleotide
ggctcaaattgtatcctgatatgttaatctgtgcaggctcttgtgtgatgagctttaggc

SEQ ID NO: 22868 - DNA, 60 bp, Artificial
  Synthetic oligonucleotide
ggtttgggtatttcactgtatacacaagccccaatgatgtcaaagcttgaacaacatcat

SEQ ID NO: 22869 - DNA, 60 bp, Artificial
  Synthetic oligonucleotide
ggcgaaggatgcccgaagcctcatagaatcacatcaaattcactgtgtgcctgtggctac

SEQ ID NO: 22870 - DNA, 60 bp, Artificial
  Synthetic oligonucleotide
acaacatcattcatctgctctcctccttgttgggtcatacaagcaatggtgagcgctggc

SEQ ID NO: 22871 - DNA, 60 bp, Artificial
  Synthetic oligonucleotide
tatcccagactttcacaacacctccagctggacctcttggacccatacccatccccatca

SEQ ID NO: 22872 - DNA, 60 bp, Artificial
  Synthetic oligonucleotide
gagcgctggcatagaaccaaactggtttacaagaaggctactatccttaatatcccagac

SEQ ID NO: 22873 - DNA, 60 bp, Artificial
  Synthetic oligonucleotide
cagacatctcattgcttccctcgctcagattattggtgacaacaaagcagcctgggtagg

SEQ ID NO: 22874 - DNA, 60 bp, Artificial
  Synthetic oligonucleotide
aggtgaagttggcagacatctcattgcttccctcgctcagattattggtgacaacaaagc

SEQ ID NO: 22875 - DNA, 60 bp, Artificial
  Synthetic oligonucleotide
gggcacacactgaaatggttgctcaatgaactccacttcaatgttcttcatgtcaccaga

SEQ ID NO: 22876 - DNA, 60 bp, Artificial
  Synthetic oligonucleotide
tgtcaacaattcggatggttctaaacaaagtgggctacagttctgtgtcgagacagttgc

SEQ ID NO: 22877 - DNA, 60 bp, Artificial
  Synthetic oligonucleotide
ggcaagtgcaactacaccaactgtgagggttttacacattacaactaccttatcattcag

SEQ ID NO: 22878 - DNA, 60 bp, Artificial
  Synthetic oligonucleotide
acaacaaagcagcctgggtaggaaagtgcgacagccgttgttcgatggacggcaagtgca

SEQ ID NO: 22879 - DNA, 60 bp, Artificial
  Synthetic oligonucleotide
atccccatcatcttcaggatttctgatctttgattcagctgagacgaggttaagttccct

SEQ ID NO: 22880 - DNA, 60 bp, Artificial
  Synthetic oligonucleotide
agacagttgctcggatttttcacatgggacatctcggactcaagtggggcacatgttcca

SEQ ID NO: 22881 - DNA, 60 bp, Artificial
  Synthetic oligonucleotide
tctcccatgctcttcctttgatttgtgaccttgaacctatgtatggccaaccatctcctg

SEQ ID NO: 22882 - DNA, 60 bp, Artificial
  Synthetic oligonucleotide
taagggtgctgaacattgaaggttttacctgcaaagtctccaacatgtttccgccatcaa

SEQ ID NO: 22883 - DNA, 60 bp, Artificial
  Synthetic oligonucleotide
catcttccttagccttaggtatctgtttcaagtctggtgaaccaccattcctcactgggg

SEQ ID NO: 22884 - DNA, 60 bp, Artificial
  Synthetic oligonucleotide
tgaaccaccattcctcactggggggtgatctgctgatggcctcccttccaggtctacagt

SEQ ID NO: 22885 - DNA, 60 bp, Artificial
  Synthetic oligonucleotide
ggtcttaaaggttgattaagttggcattgtctctgtacaaggtatcaagtgggagaagcc

SEQ ID NO: 22886 - DNA, 60 bp, Artificial
  Synthetic oligonucleotide
aattcactgtgtgcctgtggctactacaagattccaaagaaaccggttagatgggttaga

SEQ ID NO: 22887 - DNA, 60 bp, Artificial
  Synthetic oligonucleotide
taagttccctccgtacacacctggtagcccacctccttctgtcctctgcaccttctttct

SEQ ID NO: 22888 - DNA, 60 bp, Artificial
  Synthetic oligonucleotide
catgagagcatcaacctccttgttcatgtctctcagtctggtcaggtctgcctcacccct

SEQ ID NO: 22889 - DNA, 58 bp, Artificial
  Synthetic oligonucleotide
gcatccgcaagaacatctccctttacagcatgggtccagttggatagacctcttctga

SEQ ID NO: 22890 - DNA, 60 bp, Artificial
  Synthetic oligonucleotide
acatcattgagtggggtctgtgactgtttagccatgcaagccattgtcaggcttggcatt

SEQ ID NO: 22891 - DNA, 60 bp, Artificial
  Synthetic oligonucleotide
gccatacaagccatagttagacttggcattgtgccaaattgattgttcaaaagtgatgag

SEQ ID NO: 22892 - DNA, 60 bp, Artificial
  Synthetic oligonucleotide
aggctcaagaaacttctcaaaacactttatttgatctgtcagtctatctggtgtctcttt

SEQ ID NO: 22893 - DNA, 60 bp, Artificial
  Synthetic oligonucleotide
ggcccagcccgggtcggcggggccccccagtccgcggctctgccgcggactggggaggca

SEQ ID NO: 22894 - DNA, 60 bp, Artificial
  Synthetic oligonucleotide
tgtatgactgtccagggtggagaaacgatgaacagcgtggtccaagcactaacttctctg

SEQ ID NO: 22895 - DNA, 60 bp, Artificial
  Synthetic oligonucleotide
gagaccatgagaaaaatgctttcaaagacctctcaaagttgagatgtgtcttacttctca

SEQ ID NO: 22896 - DNA, 60 bp, Artificial
  Synthetic oligonucleotide
tccgcggcagagccgcggactggggggccccgccgacccgggctgggcccgggtcggcag

SEQ ID NO: 22897 - DNA, 60 bp, Artificial
  Synthetic oligonucleotide
tctcattacactttgccacggctgtgttgccaaagcactttaactcagcttcaatcagca

SEQ ID NO: 22898 - DNA, 60 bp, Artificial
  Synthetic oligonucleotide
acaggcggtgggtcacgggggccctggtagggtcttaccttttccatctcacaggtacac

SEQ ID NO: 22899 - DNA, 60 bp, Artificial
  Synthetic oligonucleotide
ggaaataacccctcactgtgccctaatggactgtatcatgtttgatgcagcagtgtcagg

SEQ ID NO: 22900 - DNA, 60 bp, Artificial
  Synthetic oligonucleotide
atgcagtcccagttgccacgacctgaatcaagggcaatgtaactcccgccccaagccatc

SEQ ID NO: 22901 - DNA, 60 bp, Artificial
  Synthetic oligonucleotide
ggagcttgcatgctggatggtggcaacatgttagagacaatcaaagtgtcaccccaaaca

SEQ ID NO: 22902 - DNA, 60 bp, Artificial
  Synthetic oligonucleotide
aacctttcagcacagctagtatggacagtgcgataagtacaatgttcatgacctcctcta

SEQ ID NO: 22903 - DNA, 60 bp, Artificial
  Synthetic oligonucleotide
aacaggaagggcatgggaaaacactgttgttgatttggaatcaggcgagaagccacaaaa

SEQ ID NO: 22904 - DNA, 60 bp, Artificial
  Synthetic oligonucleotide
cgatatcatcagagaagtgggtctcatttaggtatgatccatttgacacaagccaacact

SEQ ID NO: 22905 - DNA, 60 bp, Artificial
  Synthetic oligonucleotide
ggtgaccaggacagaaaggccattgagcgctggtatttacatgggtaatctaagctcaca

SEQ ID NO: 22906 - DNA, 60 bp, Artificial
  Synthetic oligonucleotide
gtggcgggaatcaaggggctcagactgggagagacggagtggtgaggatttgggatgtga

SEQ ID NO: 22907 - DNA, 60 bp, Artificial
  Synthetic oligonucleotide
cccgccccaagccatcctcatgaaggtctgcaaaacaccatttgccactgtgccacaatg

SEQ ID NO: 22908 - DNA, 60 bp, Artificial
  Synthetic oligonucleotide
agaagggatgacaacgacttgaaacgactgagagacctaaaccaggcagttaacaatctt

SEQ ID NO: 22909 - DNA, 60 bp, Artificial
  Synthetic oligonucleotide
aggttgtattgcacactgatcttacccccattaaagtcacaactcattgcttcatactga

SEQ ID NO: 22910 - DNA, 60 bp, Artificial
  Synthetic oligonucleotide
cgcacagtggatcctaggctattggattgcgctttgtaccaattactacagcagataatt

SEQ ID NO: 22911 - DNA, 60 bp, Artificial
  Synthetic oligonucleotide
ttcaggcattgacagacctgggcttgatctacacagcaaagtatcccaacacctcagacc

SEQ ID NO: 22912 - DNA, 60 bp, Artificial
  Synthetic oligonucleotide
ctgaacacaaagaggtcaaccaaacccaatggtgttttgccttgtctttccatgtattcc

SEQ ID NO: 22913 - DNA, 60 bp, Artificial
  Synthetic oligonucleotide
gctcacaacaacttgatcaacgacgagctcttttgaatatgatagggatgagtggcggga

SEQ ID NO: 22914 - DNA, 60 bp, Artificial
  Synthetic oligonucleotide
ttctcctgaaaggcagattttgtacagaaggttttcataagggtttctatttccaggttt

SEQ ID NO: 22915 - DNA, 60 bp, Artificial
  Synthetic oligonucleotide
cctgaaaggcagattttgtacagaaggttttcataagggtttctatttccaggtttctca

SEQ ID NO: 22916 - DNA, 60 bp, Artificial
  Synthetic oligonucleotide
gtttggatattttgctgtataaagtagacccaaatctgttaatccttgaacaacatcatt

SEQ ID NO: 22917 - DNA, 60 bp, Artificial
  Synthetic oligonucleotide
tatgtaaggccatccttctccagagagacacaatttataaagaatgttctcataagggtt

SEQ ID NO: 22918 - DNA, 60 bp, Artificial
  Synthetic oligonucleotide
cataagggttcctttgaccaggaaccgaacttacaaacattctttcccttgctttcactt

SEQ ID NO: 22919 - DNA, 60 bp, Artificial
  Synthetic oligonucleotide
cacttctaggagtgttttgataactgtggtgaaagtggacgtgtcaatcttgatggtctc

SEQ ID NO: 22920 - DNA, 60 bp, Artificial
  Synthetic oligonucleotide
atcaagcatgcacctgccttcacagctgcagacaaactcaagttataacctgagatgtta

SEQ ID NO: 22921 - DNA, 60 bp, Artificial
  Synthetic oligonucleotide
tgagatgttaatctgtgactcctcttgggtgattacctttaagcaagggtgtttttctga

SEQ ID NO: 22922 - DNA, 60 bp, Artificial
  Synthetic oligonucleotide
acctggtccaatcagtgtcatgaagatcatatcggctccatgcaactcattctacaaaat

SEQ ID NO: 22923 - DNA, 60 bp, Artificial
  Synthetic oligonucleotide
gagactattgttcaaaggttggaaagaaattggttataatcagaaatgcaacctggtcca

SEQ ID NO: 22924 - DNA, 60 bp, Artificial
  Synthetic oligonucleotide
ctttgcgaagtccaatccagacagtaaagccctcgtatcattgaggacgtcagccttcac

SEQ ID NO: 22925 - DNA, 60 bp, Artificial
  Synthetic oligonucleotide
gatgaaagtgtcactgtcttcagaatccaaatgaacctaaccgaaagaatgtactgtgat

SEQ ID NO: 22926 - DNA, 60 bp, Artificial
  Synthetic oligonucleotide
catgtccaattggagagtcctctcctgagtgactgagtccagcggaaggagtgcaccacc

SEQ ID NO: 22927 - DNA, 60 bp, Artificial
  Synthetic oligonucleotide
gtccagcggaaggagtgcaccacctgatcagacatgatgaaggtagaagttgatgcgtag

SEQ ID NO: 22928 - DNA, 60 bp, Artificial
  Synthetic oligonucleotide
cgcacggaggatcctaggcgatttttgttcacgcttcctgtttctctatcatttcaatgg

SEQ ID NO: 22929 - DNA, 60 bp, Artificial
  Synthetic oligonucleotide
tgtcatgaagatcatatcggctccatgcaactcattctacaaaatgcccataatcaagtc

SEQ ID NO: 22930 - DNA, 60 bp, Artificial
  Synthetic oligonucleotide
cagtgagcatttgtagatgcaggttttgagcctttctttttgcttttgatcacaattccc

SEQ ID NO: 22931 - DNA, 60 bp, Artificial
  Synthetic oligonucleotide
ccacaaatcccaccagaactgcattgaacatgatgcaatccatcaatgcacagtgagcat

SEQ ID NO: 22932 - DNA, 60 bp, Artificial
  Synthetic oligonucleotide
cacaattcccttatgcctgtcacaaagatgttcaaatttcttccaaacaagttcctcaaa

SEQ ID NO: 22933 - DNA, 57 bp, Artificial
  Synthetic oligonucleotide
cggcgagggctgtcctaaacctcacagactgacatctgattcactctgtgcatgtgg

SEQ ID NO: 22934 - DNA, 60 bp, Artificial
  Synthetic oligonucleotide
catcttctgcatattcccacccacagacacatcatcggcgagggctgtcctaaacctcac

SEQ ID NO: 22935 - DNA, 60 bp, Artificial
  Synthetic oligonucleotide
gcctcccaatgcttagaggaccacagttgtgtctggttctctgaagagaatgtcaatagg

SEQ ID NO: 22936 - DNA, 60 bp, Artificial
  Synthetic oligonucleotide
ccaaactggttgatcataagtgaagaatccttgacatcccacactttcacaactccgttc

SEQ ID NO: 22937 - DNA, 60 bp, Artificial
  Synthetic oligonucleotide
agtggggccttgatatattcattggtgacctcaccattttagtaaaccctgagccaggta

SEQ ID NO: 22938 - DNA, 60 bp, Artificial
  Synthetic oligonucleotide
gtcctggtcgagcattctccacgtccttcaacaatatcccatggcaatacttgctctgat

SEQ ID NO: 22939 - DNA, 60 bp, Artificial
  Synthetic oligonucleotide
ctctagattgctctgcacttagtttcacatcaacaatctttaaatcttggcgtccgtgca

SEQ ID NO: 22940 - DNA, 60 bp, Artificial
  Synthetic oligonucleotide
ccaatccagacagtaaagccctcgtatcattgaggacgtcagccttcactggacatgtcc

SEQ ID NO: 22941 - DNA, 60 bp, Artificial
  Synthetic oligonucleotide
ggtgtgcatcatgatttccatttagacccaacaattctttgtgatgaaagtgtcactgtc

SEQ ID NO: 22942 - DNA, 60 bp, Artificial
  Synthetic oligonucleotide
cttatccctcctcatcattctctggacactggccacctttgcgaagtccaatccagacag

SEQ ID NO: 22943 - DNA, 60 bp, Artificial
  Synthetic oligonucleotide
gagccaggtagcaagacaaaacggatgaccgcaaccaacattactggctgtttcccaaat

SEQ ID NO: 22944 - DNA, 60 bp, Artificial
  Synthetic oligonucleotide
gggacagcttgtctccttcattggagaaataccagccattgtccacgaagccctgaatgt

SEQ ID NO: 22945 - DNA, 60 bp, Artificial
  Synthetic oligonucleotide
ccacgaagccctgaatgtagctttaatcgcagtaagtatcattgcgattatgaagggcct

SEQ ID NO: 22946 - DNA, 60 bp, Artificial
  Synthetic oligonucleotide
atgtctggaaaagtgggttattccaattgataatgttcctcatacttgctgggagatcct

SEQ ID NO: 22947 - DNA, 60 bp, Artificial
  Synthetic oligonucleotide
ttcctcatacttgctgggagatcctgttcaatttccattggacaccatctggaacttcaa

SEQ ID NO: 22948 - DNA, 60 bp, Artificial
  Synthetic oligonucleotide
cgttcgtcccgactctccctgccttttgaataccaatgaattgtagtagttcacctctcc

SEQ ID NO: 22949 - DNA, 60 bp, Artificial
  Synthetic oligonucleotide
cctccgtttctcactggaacaggggcccttggtggagcactatcaaactcaaccacagtg

SEQ ID NO: 22950 - DNA, 60 bp, Artificial
  Synthetic oligonucleotide
cggacctggtcttctaattccggccttaatggtcctagtaagggtgcacctccgtttctc

SEQ ID NO: 22951 - DNA, 60 bp, Artificial
  Synthetic oligonucleotide
cataagtgaagaatccttgacatcccacactttcacaactccgttcgtcccgactctccc

SEQ ID NO: 22952 - DNA, 60 bp, Artificial
  Synthetic oligonucleotide
ccttcaatgtcaatccaagttgtgaggtttggagataggccttcgactccctttcggacc

SEQ ID NO: 22953 - DNA, 60 bp, Artificial
  Synthetic oligonucleotide
caggttggtagattgccagttctactgggtcgttaggtggtccttcaatgtcaatccaag

SEQ ID NO: 22954 - DNA, 60 bp, Artificial
  Synthetic oligonucleotide
ggtggtctttcagtcctctgcactttgtctttcaacttattgagatcaccagacaactcc

SEQ ID NO: 22955 - DNA, 60 bp, Artificial
  Synthetic oligonucleotide
tcactttcatctctcttatccctcctcatcattctctggacactggccacctttgcgaag

SEQ ID NO: 22956 - DNA, 60 bp, Artificial
  Synthetic oligonucleotide
caacttctttattaaggtctctcaaacttgtaagatcactttcatctctcttatccctcc

SEQ ID NO: 22957 - DNA, 60 bp, Artificial
  Synthetic oligonucleotide
tcccatgctcttccttttatttgtgaacgagaagctatgtaaggccatccttctccagag

SEQ ID NO: 22958 - DNA, 60 bp, Artificial
  Synthetic oligonucleotide
tcaaccacagtgttatcccatgctcttccttttatttgtgaacgagaagctatgtaaggc

SEQ ID NO: 22959 - DNA, 60 bp, Artificial
  Synthetic oligonucleotide
acacaggtctgaatgttcattctttgcctaaatgttggcatgtgaggaatggcagttacc

SEQ ID NO: 22960 - DNA, 60 bp, Artificial
  Synthetic oligonucleotide
actcatgaatattccttattgcaattacacaaagttttggtatgtgaaccacacaggtct

SEQ ID NO: 22961 - DNA, 60 bp, Artificial
  Synthetic oligonucleotide
ggagaaatggatgttggtagcaagtgaattgaagtgctttggtaatacagctgttgctaa

SEQ ID NO: 22962 - DNA, 55 bp, Artificial
  Synthetic oligonucleotide
gcaattgttaaccttcaagacaaaacaaaagcgcaagttgattcacttattgatg

SEQ ID NO: 22963 - DNA, 60 bp, Artificial
  Synthetic oligonucleotide
cccataatcaagtcatgagattcagaaaactgcaaaatttcttctcttggtcattggttg

SEQ ID NO: 22964 - DNA, 60 bp, Artificial
  Synthetic oligonucleotide
gcagttacctaaatgagtcagactttagaaatgagtggatcatcgagagtgatcatcttg

SEQ ID NO: 22965 - DNA, 60 bp, Artificial
  Synthetic oligonucleotide
gcatcaatcttcctacatcttctgcatattcccacccacagacacatcatcggcgagggc

SEQ ID NO: 22966 - DNA, 60 bp, Artificial
  Synthetic oligonucleotide
tggctcttggatcaagcatctgaattgaggacacaacagtgtcttctttttccttaggga

SEQ ID NO: 22967 - DNA, 50 bp, Artificial
  Synthetic oligonucleotide
tggctcttggatcaagcatctgaattgaggacacaacagtgtcttctttt

SEQ ID NO: 22968 - DNA, 60 bp, Artificial
  Synthetic oligonucleotide
ggacttgagcaactttgtgaaagtcaagagcagacaacagtgctcttgtgtctgacagca

SEQ ID NO: 22969 - DNA, 60 bp, Artificial
  Synthetic oligonucleotide
cacatcaatcagaagtcttgggtttgggaacataaccaactgtgacaagacaggtgaggc

SEQ ID NO: 22970 - DNA, 60 bp, Artificial
  Synthetic oligonucleotide
caactgtgacaagacaggtgaggcaggccacactctgaaatggctcctgaacgagcttca

SEQ ID NO: 22971 - DNA, 60 bp, Artificial
  Synthetic oligonucleotide
actggatcattaggtgtcccttcaatgtcaatccaggtagttgccttgctgtccagtctt

SEQ ID NO: 22972 - DNA, 60 bp, Artificial
  Synthetic oligonucleotide
ccacttggggtgttgagctcacactcaccaatacttcagtgatgaatagatctgatgaga

SEQ ID NO: 22973 - DNA, 60 bp, Artificial
  Synthetic oligonucleotide
ctgtcacatgtagagtttaacctaactaggatgtttgacaatctgccacaatcctgctct

SEQ ID NO: 22974 - DNA, 60 bp, Artificial
  Synthetic oligonucleotide
attcaccaatgtctactgtaaggatgataattcaaaaaacagcatacagctcagtttcca

SEQ ID NO: 22975 - DNA, 60 bp, Artificial
  Synthetic oligonucleotide
atcctgctctatcaacaatacccaccattactataagggaccagaaaacaccacttgggg

SEQ ID NO: 22976 - DNA, 60 bp, Artificial
  Synthetic oligonucleotide
tgcacaacatcatttagtgattcaccaccctgctcagtcatgcatgccattgtcacagca

SEQ ID NO: 22977 - DNA, 60 bp, Artificial
  Synthetic oligonucleotide
catcagaaacagtctcaaacaactggccaaaattccgtactgtaactacaccaagttttg

SEQ ID NO: 22978 - DNA, 60 bp, Artificial
  Synthetic oligonucleotide
ggccaacatgtgcctggaggatactgtttggaacagtgggcaattgtctgggcaggaatc

SEQ ID NO: 22979 - DNA, 60 bp, Artificial
  Synthetic oligonucleotide
ctcttgggattcttcacatgggacatttcagactcatcaggccaacatgtgcctggagga

SEQ ID NO: 22980 - DNA, 60 bp, Artificial
  Synthetic oligonucleotide
gttgagagagtcttggtgagcctccattccgcactggtggatgattgggactaccagtgt

SEQ ID NO: 22981 - DNA, 60 bp, Artificial
  Synthetic oligonucleotide
gttaagtccacagtggtgttgtcccaagctctccctttgacctgtgatctagacccgatg

SEQ ID NO: 22982 - DNA, 60 bp, Artificial
  Synthetic oligonucleotide
ctaccagtgtctgttaagtccacagtggtgttgtcccaagctctccctttgacctgtgat

SEQ ID NO: 22983 - DNA, 60 bp, Artificial
  Synthetic oligonucleotide
ggattggtccaatttgagagacctctcctcagagcctgagtccacctgaaggatgccacg

SEQ ID NO: 22984 - DNA, 60 bp, Artificial
  Synthetic oligonucleotide
ctcaagcatgttgcctccgtctagcatgcaggcccctgcctttacagcagcagaaagact

SEQ ID NO: 22985 - DNA, 60 bp, Artificial
  Synthetic oligonucleotide
tgtcaaagtcaagagctgcaagcagagccctggtgtcagtgatgacatcagacttcacag

SEQ ID NO: 22986 - DNA, 60 bp, Artificial
  Synthetic oligonucleotide
tgtaatgtaacccaaacaaggatattggtcagcaagtttttctaaatctgacatatttgg

SEQ ID NO: 22987 - DNA, 60 bp, Artificial
  Synthetic oligonucleotide
ggtgtcccttcaatgtcaatccaggtagttgccttgctgtccagtcttttgagaccctcg

SEQ ID NO: 22988 - DNA, 60 bp, Artificial
  Synthetic oligonucleotide
gatcaacctctggaaatgcgggatcattcaactcctaatgtttcttgcattagcaggaag

SEQ ID NO: 22989 - DNA, 60 bp, Artificial
  Synthetic oligonucleotide
gtagttgccgctctcaggctggaatattgctaattccactggatcattaggtgtcccttc

SEQ ID NO: 22990 - DNA, 60 bp, Artificial
  Synthetic oligonucleotide
tgtagcagtggatgtagttgccgctctcaggctggaatattgctaattccactggatcat

SEQ ID NO: 22991 - DNA, 60 bp, Artificial
  Synthetic oligonucleotide
ctgatctttgaagctctttacatcatggggctccctgtagcagtggatgtagttgccgct

SEQ ID NO: 22992 - DNA, 60 bp, Artificial
  Synthetic oligonucleotide
atgtgagtatttactctgatctttgaagctctttacatcatggggctccctgtagcagtg

SEQ ID NO: 22993 - DNA, 60 bp, Artificial
  Synthetic oligonucleotide
aaggatatcaacccaggttgtgtgtttgtaagatccttcaagagcattccatgtgagtat

SEQ ID NO: 22994 - DNA, 60 bp, Artificial
  Synthetic oligonucleotide
acgagcttcacttcacagtgctccacgtcacgaggcatataggggctctttgcagaacaa

SEQ ID NO: 22995 - DNA, 60 bp, Artificial
  Synthetic oligonucleotide
caggtgaggcaggccacactctgaaatggctcctgaacgagcttcacttcacagtgctcc

SEQ ID NO: 22996 - DNA, 60 bp, Artificial
  Synthetic oligonucleotide
gtgattcaaaacaccacatggccaaatcattgctcctattcaccaatgtctactgtaagg

SEQ ID NO: 22997 - DNA, 60 bp, Artificial
  Synthetic oligonucleotide
accctcgagaatctgttcttctttagcatgactaagttgagagagtcttggtgagcctcc

SEQ ID NO: 22998 - DNA, 60 bp, Artificial
  Synthetic oligonucleotide
cagtgctccacgtcacgaggcatataggggctctttgcagaacaacagcaggtgctggcc

SEQ ID NO: 22999 - DNA, 52 bp, Artificial
  Synthetic oligonucleotide
tgttcttcacaacaacagtattctttcagttgattggcatccctactcacag

SEQ ID NO: 23000 - DNA, 60 bp, Artificial
  Synthetic oligonucleotide
gggaatacccctttagctctagctgacctttgcttctggtccttggtgttcttcacaaca

SEQ ID NO: 23001 - DNA, 60 bp, Artificial
  Synthetic oligonucleotide
gttgcccaaaacctcacagattgacttcaaattcattgtgttcatgtggcttttataaga

SEQ ID NO: 23002 - DNA, 60 bp, Artificial
  Synthetic oligonucleotide
atcctttctcatcagcctctgtacctgtgcaactctgtcaaagtcaagagctgcaagcag

SEQ ID NO: 23003 - DNA, 60 bp, Artificial
  Synthetic oligonucleotide
cgaaattctggtatgtgaatgacaccataactgggaaacatagtctgcctcaatgttggc

SEQ ID NO: 23004 - DNA, 56 bp, Artificial
  Synthetic oligonucleotide
tgcagaacaacagcaggtgctggcctgttgattcaatacaatctgacaacctctga

SEQ ID NO: 23005 - DNA, 60 bp, Artificial
  Synthetic oligonucleotide
tagcaggaagatcctgtgatggtgaatacaagatcgataggagacatgtcctgtcacatg

SEQ ID NO: 23006 - DNA, 60 bp, Artificial
  Synthetic oligonucleotide
gtgaatgacaccataactgggaaacatagtctgcctcaatgttggcttgtctcaaatggt

SEQ ID NO: 23007 - DNA, 60 bp, Artificial
  Synthetic oligonucleotide
cgcacagtggatcctaggcatacaagtctacgccttactcttgatcatggggcaattcat

SEQ ID NO: 23008 - DNA, 60 bp, Artificial
  Synthetic oligonucleotide
caagatctttgacctttgctctagttgtgtggtagttaaattaccagcatatacacccgg

SEQ ID NO: 23009 - DNA, 60 bp, Artificial
  Synthetic oligonucleotide
aactttgatgcaatcgataccagaagcattgaacatggctttcaatgttgctctagtgat

SEQ ID NO: 23010 - DNA, 60 bp, Artificial
  Synthetic oligonucleotide
gggattccctcttagttgagcaaaacccatgtctctcaagatctttgacctttgctctag

SEQ ID NO: 23011 - DNA, 60 bp, Artificial
  Synthetic oligonucleotide
gtgattgtgtcactgttatgtgttaccaagggactgatcaacctctggaaatgcgggatc

SEQ ID NO: 23012 - DNA, 55 bp, Artificial
  Synthetic oligonucleotide
gtaagtcagaagcaagttccatcagctcatctttagataaaccaccaaccctcaa

SEQ ID NO: 23013 - DNA, 60 bp, Artificial
  Synthetic oligonucleotide
ctctagttgtgtggtagttaaattaccagcatatacacccggttgtccactaccctctac

SEQ ID NO: 23014 - DNA, 60 bp, Artificial
  Synthetic oligonucleotide
ggtacttaactgtgtacaagagcccaagtgctgacaaaccctgcacaacatcatttagtg

SEQ ID NO: 23015 - DNA, 60 bp, Artificial
  Synthetic oligonucleotide
ggtgtcagtcctcttatcctttctcatcagcctctgtacctgtgcaactctgtcaaagtc

SEQ ID NO: 23016 - DNA, 60 bp, Artificial
  Synthetic oligonucleotide
gcttgttctgaggttaatctcacatctatgattgatatgtctctccttgcatgcatctcc

SEQ ID NO: 23017 - DNA, 60 bp, Artificial
  Synthetic oligonucleotide
caaggagtttagagctcaatcagtgaggcttgctctctatagaggaggtccagcggtaaa

SEQ ID NO: 23018 - DNA, 60 bp, Artificial
  Synthetic oligonucleotide
cagaagagcacagtgtgggtttttactaccaggaggagagcctttcttctttcttgcaag

SEQ ID NO: 23019 - DNA, 60 bp, Artificial
  Synthetic oligonucleotide
ctctggtcccctaggggctgtgcatccttccttacttaagaactttttcgcatggtaagc

SEQ ID NO: 23020 - DNA, 60 bp, Artificial
  Synthetic oligonucleotide
gcttgctaaatccaaggcagtggcacaaccacttgtaatgatagggtccctcaactcctt

SEQ ID NO: 23021 - DNA, 60 bp, Artificial
  Synthetic oligonucleotide
gcactcccttcaagcagaatctcatccaggtcagaccggtcaacattgacaccttgctgc

SEQ ID NO: 23022 - DNA, 60 bp, Artificial
  Synthetic oligonucleotide
gacaccttgctgctgagaccctaagaccaagttgctcattgcttgttgaaccttatactc

SEQ ID NO: 23023 - DNA, 60 bp, Artificial
  Synthetic oligonucleotide
ggttcactattccctcccttcattgagcctaaaccagcaggttctctatattggtccaca

SEQ ID NO: 23024 - DNA, 60 bp, Artificial
  Synthetic oligonucleotide
gcaccttgggccacagttctgcaagagctgctggttcgaaaacaaaggtttagttgagtg

SEQ ID NO: 23025 - DNA, 60 bp, Artificial
  Synthetic oligonucleotide
cactgggaaggtgctgtagacttagaactctcaacttgctgtctccgttctatccacttc

SEQ ID NO: 23026 - DNA, 60 bp, Artificial
  Synthetic oligonucleotide
accactatctttgcctcaactgcctctccttgcttttaagcgtcagcaacaggtgcccta

SEQ ID NO: 23027 - DNA, 60 bp, Artificial
  Synthetic oligonucleotide
aggtgccctatctgcaagatgccccttcccacgaggctgagaccgacaaccacaccaaca

SEQ ID NO: 23028 - DNA, 60 bp, Artificial
  Synthetic oligonucleotide
gatgttctgccgtctatcaatggtataagattgatgtcaacgcttttcaagtcttctctt

SEQ ID NO: 23029 - DNA, 60 bp, Artificial
  Synthetic oligonucleotide
cacaaaacattccaacaagattaaaacattgccagtcaacttgtacccatctggcaccac

SEQ ID NO: 23030 - DNA, 60 bp, Artificial
  Synthetic oligonucleotide
gtggaactttacaacctgggcccatcaacatggggaacagacaagccaaaaatccagagg

SEQ ID NO: 23031 - DNA, 60 bp, Artificial
  Synthetic oligonucleotide
gcaagtggtctttgttgaccctcatgaactggcactttatctcccctcctcttagcctgt

SEQ ID NO: 23032 - DNA, 60 bp, Artificial
  Synthetic oligonucleotide
ggtcggaacgattgtccaatagggtattcaaactctcaattcctgaaagtctccctgaag

SEQ ID NO: 23033 - DNA, 60 bp, Artificial
  Synthetic oligonucleotide
gcatttgatgctccttgattgcttgagtattcctcctgtcctcttctccctcaatatctg

SEQ ID NO: 23034 - DNA, 60 bp, Artificial
  Synthetic oligonucleotide
gcacctgagtatataaccttctgtctcaaaaccattcttagagggtggtaagcagccagg

SEQ ID NO: 23035 - DNA, 60 bp, Artificial
  Synthetic oligonucleotide
cccagtcttcagcttgttgaacaatttcctcagcatagatctaatcttaccacatgcctc

SEQ ID NO: 23036 - DNA, 60 bp, Artificial
  Synthetic oligonucleotide
cagaaggaatgggtcaataggatatctagcatactgcaagagactcaaagttctcagctg

SEQ ID NO: 23037 - DNA, 60 bp, Artificial
  Synthetic oligonucleotide
ttgtgtagggccgcagcaacaaattttgtcaataaaggaacttcatccccccatacatag

SEQ ID NO: 23038 - DNA, 60 bp, Artificial
  Synthetic oligonucleotide
gcatagaagtctgatgtgttgtgcagtataccctgacccatgtcaagtatggagctaaca

SEQ ID NO: 23039 - DNA, 60 bp, Artificial
  Synthetic oligonucleotide
cctcaccctctggaatacttgtcttgtgagggaaccatgtgaatgaccccaaagtcctag

SEQ ID NO: 23040 - DNA, 60 bp, Artificial
  Synthetic oligonucleotide
ctgcaccagagtacatgaccgctacatcttgaaccaaatatttgccttgctcattcattg

SEQ ID NO: 23041 - DNA, 60 bp, Artificial
  Synthetic oligonucleotide
gttcaacatcaaagtctatccaggcataacccatcatcaaatcatacttgaacattggcc

SEQ ID NO: 23042 - DNA, 60 bp, Artificial
  Synthetic oligonucleotide
tgtcaactgcatcactagtactcacaactctttcttcaaccatgggttcgtgtgatctgc

SEQ ID NO: 23043 - DNA, 60 bp, Artificial
  Synthetic oligonucleotide
ttgactatgtgtgacacaagagacaaagcctcacaattcacatccagtgccacacagaga

SEQ ID NO: 23044 - DNA, 60 bp, Artificial
  Synthetic oligonucleotide
cctcaccaaccttgtcattattgatggcataacatttggaacattctcctgttttctgat

SEQ ID NO: 23045 - DNA, 60 bp, Artificial
  Synthetic oligonucleotide
ttcttgacagtatgcctccttgcacctcaccacctgatatctagctgccccgaattcatt

SEQ ID NO: 23046 - DNA, 60 bp, Artificial
  Synthetic oligonucleotide
gcttgggtgggccaagatcaacaccagaatcatctttgtcaacaacttaatgtgagtcaa

SEQ ID NO: 23047 - DNA, 60 bp, Artificial
  Synthetic oligonucleotide
gcattgcatgagtcaacttctatacaaagagacaaaagcttcaacccttccatcaagagc

SEQ ID NO: 23048 - DNA, 60 bp, Artificial
  Synthetic oligonucleotide
gaactcattgattgcttcagtgtccacataccatgctgatttccccttaaaggttggtcc

SEQ ID NO: 23049 - DNA, 60 bp, Artificial
  Synthetic oligonucleotide
cgtccttaggcatgaccttcttcaacacagacacgatgtccactcctgaccattgcattc

SEQ ID NO: 23050 - DNA, 54 bp, Artificial
  Synthetic oligonucleotide
ccccgccatacacaccctaacccacccaacacacaccacaaccaacacctcccc

SEQ ID NO: 23051 - DNA, 60 bp, Artificial
  Synthetic oligonucleotide
accaccaaccccccgccatacacaccctaacccacccaacacacaccacaaccaacacct

SEQ ID NO: 23052 - DNA, 60 bp, Artificial
  Synthetic oligonucleotide
cccccatggcatatgggaaagtctcctcttgtgatttctgataactgattgtgggagtca

SEQ ID NO: 23053 - DNA, 60 bp, Artificial
  Synthetic oligonucleotide
gcctcagagcaggggcccaccaagacaaaatcatgttctacaaattgcaatctatcaatg

SEQ ID NO: 23054 - DNA, 60 bp, Artificial
  Synthetic oligonucleotide
tttaatctgtcaagcatcatagcactcaatgccccaatcagcaaatcaggagatgtgtca

SEQ ID NO: 23055 - DNA, 60 bp, Artificial
  Synthetic oligonucleotide
cggacacatttactacccaaagttctgcacaagcccacgaagccggacgcaatagagctc

SEQ ID NO: 23056 - DNA, 60 bp, Artificial
  Synthetic oligonucleotide
acactggaaatattcttgctcaaaatatgtccttgttgtcacagctttagacagttcccc

SEQ ID NO: 23057 - DNA, 60 bp, Artificial
  Synthetic oligonucleotide
ctaatggtttggctgccttgggttcccccaagacccatgcacccaattctattgcggttg

SEQ ID NO: 23058 - DNA, 60 bp, Artificial
  Synthetic oligonucleotide
tgatccatgctgtaggagacgtgtgccaaagagacattgagtttcatagacaagatagca

SEQ ID NO: 23059 - DNA, 60 bp, Artificial
  Synthetic oligonucleotide
ccagctacactaatcttttcttctttaaggtttaatggcaccctccaatactgaattcca

SEQ ID NO: 23060 - DNA, 59 bp, Artificial
  Synthetic oligonucleotide
tcagacctagctgggcttttatgaatgatttcatcatggctgacacaacattaaaaggt

SEQ ID NO: 23061 - DNA, 60 bp, Artificial
  Synthetic oligonucleotide
caccaacctgttccttgtatgataaggagaactttaatcgccctgtatcaggccccactg

SEQ ID NO: 23062 - DNA, 60 bp, Artificial
  Synthetic oligonucleotide
aatgcccaatgcgtgctcagccaacaattcccaccattacatcagcatgggaaaatctgg

SEQ ID NO: 23063 - DNA, 60 bp, Artificial
  Synthetic oligonucleotide
ccaatgcgtgctcagccaacaattcccaccattacatcagcatgggaaaatctggcctgg

SEQ ID NO: 23064 - DNA, 60 bp, Artificial
  Synthetic oligonucleotide
gatatgttcagaactgcttttgggggaaagtacatgaggagtggctggggctggacaggt

SEQ ID NO: 23065 - DNA, 53 bp, Artificial
  Synthetic oligonucleotide
ggggaaagtacatgaggagtggctggggctggacaggttcagatggcaagacc

SEQ ID NO: 23066 - DNA, 60 bp, Artificial
  Synthetic oligonucleotide
agatatgtttagaactgccttcggggggaaatacatgaggagtggctggggctggacagg

SEQ ID NO: 23067 - DNA, 51 bp, Artificial
  Synthetic oligonucleotide
ggggaaatacatgaggagtggctggggctggacaggctcagatggcaagac

SEQ ID NO: 23068 - DNA, 60 bp, Artificial
  Synthetic oligonucleotide
ggccacagttctgcaagagctgctggttcgaaaacaagggcctggtcgagtgcaacaacc

SEQ ID NO: 23069 - DNA, 60 bp, Artificial
  Synthetic oligonucleotide
acaacacatcagccttcacaggatgggtccagttggatagacccctcctaagggactgta

SEQ ID NO: 23070 - DNA, 60 bp, Artificial
  Synthetic oligonucleotide
agtgctcttgtgtctgacagcacatcagccttcacaggatgggtccagttggacaagccc

SEQ ID NO: 23071 - DNA, 60 bp, Artificial
  Synthetic oligonucleotide
tctgacagcacatcagccttcacaggatgggtccagttggacaagcccctcctaagggat

SEQ ID NO: 23072 - DNA, 60 bp, Artificial
  Synthetic oligonucleotide
gcttttccagatctgtcatgttcgggaacttgacagtgtaaagcaaaccaagtgcactca

SEQ ID NO: 23073 - DNA, 60 bp, Artificial
  Synthetic oligonucleotide
ttaacttgtccaaatcagatgcaagctccatgagctcctctttagctaagcctcccactt

SEQ ID NO: 23074 - DNA, 60 bp, Artificial
  Synthetic oligonucleotide
ttgtttaaggtccggtgatcctccgtttcttactggtggctggatagcactcggcttcga

SEQ ID NO: 23075 - DNA, 60 bp, Artificial
  Synthetic oligonucleotide
cgaatctaaatccacagtggtgttgtcccaagccctcccttgaacttgagaccttgagcc

SEQ ID NO: 23076 - DNA, 60 bp, Artificial
  Synthetic oligonucleotide
tcaagcatctgaattgaggacacaacagtgtcttctttctccttagggatttgtttaagg

SEQ ID NO: 23077 - DNA, 60 bp, Artificial
  Synthetic oligonucleotide
gcctggttgggcatcagccaagtcctttaaaaggagaccatgtgagtacttgctttgctc

SEQ ID NO: 23078 - DNA, 60 bp, Artificial
  Synthetic oligonucleotide
ggctggttcacaatggctcgtacctcaatgaaacgcatttcaagaatgattggttgtggg

SEQ ID NO: 23079 - DNA, 60 bp, Artificial
  Synthetic oligonucleotide
gttggctggttcacaatggctcgtacctcaatgaaacgcatttcaagaatgattggttgt

SEQ ID NO: 23080 - DNA, 60 bp, Artificial
  Synthetic oligonucleotide
atttctgactcacttgtgattagaaacagtctcaaacaacttgctaaaattccttactgc

SEQ ID NO: 23081 - DNA, 57 bp, Artificial
  Synthetic oligonucleotide
acttatttctgactcacttgtgattagaaacagtctcaaacagcttgccaaaatccc

SEQ ID NO: 23082 - DNA, 60 bp, Artificial
  Synthetic oligonucleotide
aggaaatcaggcctggttgggcatcagccaagtcctttaaaaggagaccatgtgagtact

SEQ ID NO: 23083 - DNA, 60 bp, Artificial
  Synthetic oligonucleotide
cttggtgcagagttggttgtatctctcccagatctcatcctcaaaggtgcgtgcctgctc

SEQ ID NO: 23084 - DNA, 60 bp, Artificial
  Synthetic oligonucleotide
tttggtgcagagtagattatatctctcccagatctcatcctcaaaggtgcgtgcttgctc

SEQ ID NO: 23085 - DNA, 60 bp, Artificial
  Synthetic oligonucleotide
ttcacaatggctcgtacctcaatgaaacgcattttaagaatgattggttgtgggagagcc

SEQ ID NO: 23086 - DNA, 60 bp, Artificial
  Synthetic oligonucleotide
gaggaggtgaggttggcagacatcttattgcgtcgcttgctcaaatcattggggacccaa

SEQ ID NO: 23087 - DNA, 60 bp, Artificial
  Synthetic oligonucleotide
taaaaagactatcaacggacttatttctgactcacttgtgattagaaacagtctcaaaca

SEQ ID NO: 23088 - DNA, 60 bp, Artificial
  Synthetic oligonucleotide
gcaccggggatcctaggcataccttggacgcgcatattacttgatcaaagatgggacaag

SEQ ID NO: 23089 - DNA, 60 bp, Artificial
  Synthetic oligonucleotide
gcatcatcaaaggatttgtcaatctgatgagatgtggcctattccaactcatcaccttcc

SEQ ID NO: 23090 - DNA, 60 bp, Artificial
  Synthetic oligonucleotide
gttggggacagaggaggtgaggttggcagacatcttattgcatcactcgctcaaatcatc

SEQ ID NO: 23091 - DNA, 60 bp, Artificial
  Synthetic oligonucleotide
gggacagaggaggtgaggttggcagacatcttattgcatcactcgctcaaatcatcgggg

SEQ ID NO: 23092 - DNA, 60 bp, Artificial
  Synthetic oligonucleotide
cgcaccggggatcctaggcataccttggacgcgcatattacttgatcaaagatgggacaa

SEQ ID NO: 23093 - DNA, 60 bp, Artificial
  Synthetic oligonucleotide
cgcaccggggatcctaggcataccttggacgcgcatatttcttgatcaaagatgggacaa

SEQ ID NO: 23094 - DNA, 60 bp, Artificial
  Synthetic oligonucleotide
ctggtggaagaactcttcactcagactggtggaaccgcagcccatcaatccaagggacct

SEQ ID NO: 23095 - DNA, 60 bp, Artificial
  Synthetic oligonucleotide
aatgtgactgggaatctgaccatttaactgcatggtctggtggaagaactcttcactcag

SEQ ID NO: 23096 - DNA, 60 bp, Artificial
  Synthetic oligonucleotide
tctggtggaagaactcttcactcagactggtggaaccgcagcccatcaatccaagggacc

SEQ ID NO: 23097 - DNA, 60 bp, Artificial
  Synthetic oligonucleotide
cactgttgtcagccatcttggctaaggcaacttgtacatcatgtttaatttcgttgaatg

SEQ ID NO: 23098 - DNA, 60 bp, Artificial
  Synthetic oligonucleotide
acactgttgtcagccatcttggctaaggcaacttgtacatcatgtttaatttcgttgaat

SEQ ID NO: 23099 - DNA, 60 bp, Artificial
  Synthetic oligonucleotide
gatggaagaattcttcactcaaactggtggaaccgcagcccatcaatccaagggaccttt

SEQ ID NO: 23100 - DNA, 60 bp, Artificial
  Synthetic oligonucleotide
aagctctttgagtgatttactataggcaaccttaaagttggtgaattcaatccattcacc

SEQ ID NO: 23101 - DNA, 60 bp, Artificial
  Synthetic oligonucleotide
caaccccaagctttgattcttgacgtttgatagactatgaattaatcgttgatattcctg

SEQ ID NO: 23102 - DNA, 60 bp, Artificial
  Synthetic oligonucleotide
ccaccacttctgaacttgacttgcattccactaccaatttagatatcaggtcgacatgat

SEQ ID NO: 23103 - DNA, 60 bp, Artificial
  Synthetic oligonucleotide
ctcaaaacacttgatttgatctgttagtcgatcaggcgtttcttttgtgattaaatggca

SEQ ID NO: 23104 - DNA, 60 bp, Artificial
  Synthetic oligonucleotide
cactgttgtcagccatcttggctaaggcaacttgtacatcatgcttaatttcgttaaatg

SEQ ID NO: 23105 - DNA, 60 bp, Artificial
  Synthetic oligonucleotide
gaccactatttgtgcctgagatgtcatcaaacaatgctcaggaactctgaactctgtcat

SEQ ID NO: 23106 - DNA, 60 bp, Artificial
  Synthetic oligonucleotide
ccggtagcagtggatgtattttagtgagtcgggctggtaaattgccatttcaacagggtc

SEQ ID NO: 23107 - DNA, 60 bp, Artificial
  Synthetic oligonucleotide
ggtcactgcaggggttgatccaaattggttgatgaggagtgccggttctttgatgtccca

SEQ ID NO: 23108 - DNA, 60 bp, Artificial
  Synthetic oligonucleotide
ccccatctggggtgcagcaacgagggcccagttaggtccagatctagagaacaactgttg

SEQ ID NO: 23109 - DNA, 60 bp, Artificial
  Synthetic oligonucleotide
acaactgttgtgtcaggttctctgaataagatgtctagtggtagaagccttctgggttta

SEQ ID NO: 23110 - DNA, 60 bp, Artificial
  Synthetic oligonucleotide
cccgccatcaaccaaacatgcgcctgccttcacagcagcagagagactcaggttaaagcc

SEQ ID NO: 23111 - DNA, 60 bp, Artificial
  Synthetic oligonucleotide
cttgcaacaacatcattcaaagtctctcctccctgttctgccatgcaggagatggtcact

SEQ ID NO: 23112 - DNA, 60 bp, Artificial
  Synthetic oligonucleotide
tattgtctcaagcatgttcccgccatcaaccaaacatgcgcctgccttcacagcagcaga

SEQ ID NO: 23113 - DNA, 60 bp, Artificial
  Synthetic oligonucleotide
ccggcggctttcttggtgagacatcaaactcaatgacagtgttgtcccaagctcgaccct

SEQ ID NO: 23114 - DNA, 60 bp, Artificial
  Synthetic oligonucleotide
ctgtgcatgtgggttatacaaacaaaaaagaaggcctcttaagtgggttaggtccaacta

SEQ ID NO: 23115 - DNA, 60 bp, Artificial
  Synthetic oligonucleotide
acagtgttgtcccaagctcgacccttgatctgtgatcgtgacgctatatatggccacccc

SEQ ID NO: 23116 - DNA, 59 bp, Artificial
  Synthetic oligonucleotide
ctcatctctgagatcctgagcagagagtatgaggagaggcaggggcggacacccctatc

SEQ ID NO: 23117 - DNA, 60 bp, Artificial
  Synthetic oligonucleotide
gaggcaggggcggacacccctatcattggtcgacgtctgcttttggagcactttgtttta

SEQ ID NO: 23118 - DNA, 60 bp, Artificial
  Synthetic oligonucleotide
ggggcgtggcagtaaggcctccgaccggttcatgtgaacgcagtccatgatcaacaaacc

SEQ ID NO: 23119 - DNA, 60 bp, Artificial
  Synthetic oligonucleotide
tcaacaaaccacatatgtgaaattgctgtcctatggcccccgttgctgcaccccatctgg

SEQ ID NO: 23120 - DNA, 60 bp, Artificial
  Synthetic oligonucleotide
tgatgtcccaaattttaacaacacctccccttctattcagtccaggcctttggatgccaa

SEQ ID NO: 23121 - DNA, 60 bp, Artificial
  Synthetic oligonucleotide
agacacattaaaaaactgataatcatcagaaaccttacatggagtcagcagtgtcacgag

SEQ ID NO: 23122 - DNA, 60 bp, Artificial
  Synthetic oligonucleotide
agcagcactactggttacttggttgttcaacagtctgcaccatgattacaaaaatgaccc

SEQ ID NO: 23123 - DNA, 60 bp, Artificial
  Synthetic oligonucleotide
tcgattccagatcaacataagtgaaccagagtactgtgagaaaattctctctaggatggc

SEQ ID NO: 23124 - DNA, 60 bp, Artificial
  Synthetic oligonucleotide
acagggtcaaatggtggtccctcaatgtcaatccaagtagtgtcatgaactgagagggac

SEQ ID NO: 23125 - DNA, 60 bp, Artificial
  Synthetic oligonucleotide
ctaggatggccaacctatttggcagctttgaaaactactgcttaaacaatagacacatta

SEQ ID NO: 23126 - DNA, 60 bp, Artificial
  Synthetic oligonucleotide
acagggtgtttcgagggcaaccccgatccagattcagcagcactactggttacttggttg

SEQ ID NO: 23127 - DNA, 60 bp, Artificial
  Synthetic oligonucleotide
gcacaggtgagccaccattcctgataggaaccggcggctttcttggtgagacatcaaact

SEQ ID NO: 23128 - DNA, 60 bp, Artificial
  Synthetic oligonucleotide
acatcaaactcaatgacagtgttgtcccaagctcgacccttgatctgtgatcgtgacgct

SEQ ID NO: 23129 - DNA, 60 bp, Artificial
  Synthetic oligonucleotide
gtgtcacgagaatcacatgagtgccatgcagcttataacctccaatatccacacccaggt

SEQ ID NO: 23130 - DNA, 60 bp, Artificial
  Synthetic oligonucleotide
cgcacagtggatcctaggcgtttcttgagcttgcgcaaatagtgattcagttaattttca

SEQ ID NO: 23131 - DNA, 60 bp, Artificial
  Synthetic oligonucleotide
ggcctttggatgccaactagctgaagaatctctgatcttctagtaagttgtgttgtggtg

SEQ ID NO: 23132 - DNA, 60 bp, Artificial
  Synthetic oligonucleotide
taacaacacctccccttctattcagtccaggcctttggatgccaactagctgaagaatct

SEQ ID NO: 23133 - DNA, 60 bp, Artificial
  Synthetic oligonucleotide
ctcatcatgcgttgcacacttgcaacctttgagaaatcaagaccagacaaaagggctcta

SEQ ID NO: 23134 - DNA, 59 bp, Artificial
  Synthetic oligonucleotide
ccaccattcacttcccagatgttggttagtgaaaaatgggagttacctcaatgaatcag

SEQ ID NO: 23135 - DNA, 60 bp, Artificial
  Synthetic oligonucleotide
gaaggttttcatatggatttctctgacctggcgtgatatcaacaaacatcctttcctttg

SEQ ID NO: 23136 - DNA, 60 bp, Artificial
  Synthetic oligonucleotide
ctttcctttgattttatctccaatagtgttttgatgattgttgtgaaggttgattcttca

SEQ ID NO: 23137 - DNA, 60 bp, Artificial
  Synthetic oligonucleotide
tcgtgacgctatatatggccacccctctccagacaaacaaagcttgtacagaaggttttc

SEQ ID NO: 23138 - DNA, 60 bp, Artificial
  Synthetic oligonucleotide
ccaagctcgacccttgatctgtgatcgtgacgctatatatggccacccctctccagacaa

SEQ ID NO: 23139 - DNA, 60 bp, Artificial
  Synthetic oligonucleotide
ctccagacaaacaaagcttgtacagaaggttttcatatggatttctctgacctggcgtga

SEQ ID NO: 23140 - DNA, 60 bp, Artificial
  Synthetic oligonucleotide
gtctaccatgcatatcaaagagcctccttatatcctcacttccctgagctgtgaaaacca

SEQ ID NO: 23141 - DNA, 60 bp, Artificial
  Synthetic oligonucleotide
tgcaatccattaacgcgcagtgagcattggtacttgctggtgtggtccctttcttcttgc

SEQ ID NO: 23142 - DNA, 60 bp, Artificial
  Synthetic oligonucleotide
acctggtcgttgtcagatgctgtgggaaacgacatgccaggagggtattgtttagaaaaa

SEQ ID NO: 23143 - DNA, 60 bp, Artificial
  Synthetic oligonucleotide
ctcagactttttgacttcaacagaaaagcgattgagactctgcagaacaaaacaaggagc

SEQ ID NO: 23144 - DNA, 60 bp, Artificial
  Synthetic oligonucleotide
tctgggtttatcattagggattgctcccaacaaaacaccactaaacataatgcaatccat

SEQ ID NO: 23145 - DNA, 60 bp, Artificial
  Synthetic oligonucleotide
tgattcttcaacttttattgtctcaagcatgttcccgccatcaaccaaacatgcgcctgc

SEQ ID NO: 23146 - DNA, 60 bp, Artificial
  Synthetic oligonucleotide
tgacagagacccaacctttaagaacatatttttctgtgatgacctcattgtcattaaaga

SEQ ID NO: 23147 - DNA, 60 bp, Artificial
  Synthetic oligonucleotide
gactcttgattgctcagctgtgaacttaacatcaacaatctttaaatcttgtctaccatg

SEQ ID NO: 23148 - DNA, 60 bp, Artificial
  Synthetic oligonucleotide
taggcagcacaacggttgcagttgaaaatgcaacgaaaacctacaccctgaagtctaaaa

SEQ ID NO: 23149 - DNA, 60 bp, Artificial
  Synthetic oligonucleotide
ccttgaacttgagcatataatactgaatagttcttcaatcctaccattcaccccaaccct

SEQ ID NO: 23150 - DNA, 60 bp, Artificial
  Synthetic oligonucleotide
cttccttgtgaggggacctttccaggctcactggggggtcgatcttgcaataggcagcac

SEQ ID NO: 23151 - DNA, 60 bp, Artificial
  Synthetic oligonucleotide
gggtgtcgtgaatgtctggaaaagtggtctcatccagctgctcatgtttgttatgttggc

SEQ ID NO: 23152 - DNA, 60 bp, Artificial
  Synthetic oligonucleotide
gctgctcatgtttgttatgttggctgggaggtcatgctcagtgcagatagggcatcacct

SEQ ID NO: 23153 - DNA, 60 bp, Artificial
  Synthetic oligonucleotide
gaggctctcaacattgcactcattgcagtcagcatcattgcaaccatcaagggtgtcgtg

SEQ ID NO: 23154 - DNA, 60 bp, Artificial
  Synthetic oligonucleotide
caaagtctctcctccctgttctgccatgcaggagatggtcactgcaggggttgatccaaa

SEQ ID NO: 23155 - DNA, 60 bp, Artificial
  Synthetic oligonucleotide
ctccttaatatctgacaacctgttgatgaagaatagagttaaggaattgatggatatacc

SEQ ID NO: 23156 - DNA, 60 bp, Artificial
  Synthetic oligonucleotide
gtgaatcatgatgaagagttctgtgatatgctacggctgattgattacaacaaggctgct

SEQ ID NO: 23157 - DNA, 60 bp, Artificial
  Synthetic oligonucleotide
ttgctgcagagctcaaatgttttgggaacacagctgtagcaaagtgcaatgtgaatcatg

SEQ ID NO: 23158 - DNA, 60 bp, Artificial
  Synthetic oligonucleotide
tcatttaagagacttgatgggagtgccatactgcaattactcgaaattctggtatctaga

SEQ ID NO: 23159 - DNA, 52 bp, Artificial
  Synthetic oligonucleotide
ctttcagacctcatgattttggccttcagtttttcaaggtcagctgcaaggg

SEQ ID NO: 23160 - DNA, 50 bp, Artificial
  Synthetic oligonucleotide
taagtccacaagagaatacacagtttggttgaggcttctgagtctctgca

SEQ ID NO: 23161 - DNA, 60 bp, Artificial
  Synthetic oligonucleotide
tactcgaaattctggtatctagagcatgcaaggactggtgagactagtgtccccaagtgc

SEQ ID NO: 23162 - DNA, 60 bp, Artificial
  Synthetic oligonucleotide
attgttcagaagtgatgaatccttcacatcccagaccctcaccacaccatttgcaccctg

SEQ ID NO: 23163 - DNA, 60 bp, Artificial
  Synthetic oligonucleotide
ctgtgtaaagcagcccaaggtctgtgagtgcttgtacaacgtcattgagtgaggtctgtg

SEQ ID NO: 23164 - DNA, 60 bp, Artificial
  Synthetic oligonucleotide
ttgagtgaggtctgtgattgtttagccatgcaagccatggttaagcttggcattgtgcca

SEQ ID NO: 23165 - DNA, 60 bp, Artificial
  Synthetic oligonucleotide
gccagatatgttgatgctggactgctgctcagtgataactcccaagactgggtgcttgtc

SEQ ID NO: 23166 - DNA, 60 bp, Artificial
  Synthetic oligonucleotide
tgatcatacaaaacagaacttgggaaaaccactgcagatacgcaggccctttcggaatgt

SEQ ID NO: 23167 - DNA, 60 bp, Artificial
  Synthetic oligonucleotide
caagctgttgtgctgttaagttccccatgtagactccagaagttagaggcctttcagacc

SEQ ID NO: 23168 - DNA, 60 bp, Artificial
  Synthetic oligonucleotide
tctgctctgcatctgtttaagacaacagtgaattctctgatttctgatcagcttttgatg

SEQ ID NO: 23169 - DNA, 60 bp, Artificial
  Synthetic oligonucleotide
atgggccaaattgtgacgatgtttgaggctctgcctcacatcattgatgaggtcattaac

SEQ ID NO: 23170 - DNA, 60 bp, Artificial
  Synthetic oligonucleotide
acacacttatgagcatagtcacaagtctgcacctcagcatcagaggaagcaccaaccgca

SEQ ID NO: 23171 - DNA, 60 bp, Artificial
  Synthetic oligonucleotide
gggcggctcatgcccaaaaccacatcggttaaccagcatgggaatctgtagttgtggcac

SEQ ID NO: 23172 - DNA, 60 bp, Artificial
  Synthetic oligonucleotide
atgcacagagcgctctgagtcaatgcaggactttcagagggagagtcctggatatgttca

SEQ ID NO: 23173 - DNA, 60 bp, Artificial
  Synthetic oligonucleotide
catagtcacaagtctgcacctcagcatcagaggaagcaccaaccgcaaagcagtgtcctg

SEQ ID NO: 23174 - DNA, 60 bp, Artificial
  Synthetic oligonucleotide
gtgaccaaattgagcaggaagcagacaatatgatcacagaaatgctgagaaaggactaca

SEQ ID NO: 23175 - DNA, 60 bp, Artificial
  Synthetic oligonucleotide
ccccaagtgctggcttgtcagcaatggttcttatttgaatgaaacccatttcagtgacca

SEQ ID NO: 23176 - DNA, 60 bp, Artificial
  Synthetic oligonucleotide
gaacttgggaaaaccactgcagatacgcaggccctttcggaatgtccagaatcctcttcg

SEQ ID NO: 23177 - DNA, 60 bp, Artificial
  Synthetic oligonucleotide
taggaggcttgcaggcacattcacttggactttatcagactcatcaggagtggagaatcc

SEQ ID NO: 23178 - DNA, 60 bp, Artificial
  Synthetic oligonucleotide
gtccagaatcctcttcgctcaagaaaagacaaggtttctaactaggaggcttgcaggcac

SEQ ID NO: 23179 - DNA, 60 bp, Artificial
  Synthetic oligonucleotide
caaagtgccaggtgtggaaaccacctggaagagacgctgaacagtagcgcctccctgact

SEQ ID NO: 23180 - DNA, 60 bp, Artificial
  Synthetic oligonucleotide
ccataggcctctcgtttgtcagatcaattgttgtgttctcccatgctctccctacaactg

SEQ ID NO: 23181 - DNA, 60 bp, Artificial
  Synthetic oligonucleotide
ctgcaggctatgtatggccacccttcccctgaaagacagactttgtagaggatgttctcg

SEQ ID NO: 23182 - DNA, 60 bp, Artificial
  Synthetic oligonucleotide
ctgggtcattgaatctgccctcaatgtcaatccatgtaggagcgttagggtcaatacctc

SEQ ID NO: 23183 - DNA, 60 bp, Artificial
  Synthetic oligonucleotide
gtaggagcgttagggtcaatacctcccatgaggtccttcaacaacattgtttggctgaag

SEQ ID NO: 23184 - DNA, 60 bp, Artificial
  Synthetic oligonucleotide
ttcaagagatcctcgctgttgcttggcttaattaaaatggattccagcatgttgccccca

SEQ ID NO: 23185 - DNA, 60 bp, Artificial
  Synthetic oligonucleotide
acatgttgagtttcttcttggccccaagaactgctttcaagagatcctcgctgttgcttg

SEQ ID NO: 23186 - DNA, 60 bp, Artificial
  Synthetic oligonucleotide
caagtcagtagagtttgacatgtctcaccttaatctgacgatgcccaatgcatgttcggc

SEQ ID NO: 23187 - DNA, 60 bp, Artificial
  Synthetic oligonucleotide
gaagaggtcagcaaggtccattccatgtgagtatttggagtcctgcttgaattgtttttg

SEQ ID NO: 23188 - DNA, 60 bp, Artificial
  Synthetic oligonucleotide
tgacgatgcccaatgcatgttcggcaaacaactcccatcattatataagtatggggactt

SEQ ID NO: 23189 - DNA, 60 bp, Artificial
  Synthetic oligonucleotide
atggggacttctggattggagttaaccttcacaaatgactccatcatcagtaacaaacct

SEQ ID NO: 23190 - DNA, 60 bp, Artificial
  Synthetic oligonucleotide
ttcgccacttgcgggatatttgcattaatcagctttcttctcctggctggcaggtcctgt

SEQ ID NO: 23191 - DNA, 60 bp, Artificial
  Synthetic oligonucleotide
cagggaggcccagagggtcttagagtgttactacatttggacctctgaagatcaggtcat

SEQ ID NO: 23192 - DNA, 60 bp, Artificial
  Synthetic oligonucleotide
atcaggtcatgtggtaggatgttgtggacagttttcaagtcggggagccctgccctggag

SEQ ID NO: 23193 - DNA, 60 bp, Artificial
  Synthetic oligonucleotide
tctgtcttcctccttccagaaggaaacttttgaccacacacttatgagcatagtcacaag

SEQ ID NO: 23194 - DNA, 60 bp, Artificial
  Synthetic oligonucleotide
gtccttcactattccagtgtgcatcttgcatagccagccatatctgtcccaaactttgtc

SEQ ID NO: 23195 - DNA, 60 bp, Artificial
  Synthetic oligonucleotide
cagtgtgcatcttgcatagccagccatatctgtcccaaactttgtcctcatattctctcg

SEQ ID NO: 23196 - DNA, 60 bp, Artificial
  Synthetic oligonucleotide
gagcacctattacagaagatgtcagcccaggttgtgcattgaagaggtcagcaaggtcca

SEQ ID NO: 23197 - DNA, 60 bp, Artificial
  Synthetic oligonucleotide
ctgattgaagttggggatggacaagtggaaagttgagattatgctcataagagcgtggtc

SEQ ID NO: 23198 - DNA, 54 bp, Artificial
  Synthetic oligonucleotide
aaaagaacctctatgaccacgctcttatgagcataatctcaactttccacttgt

SEQ ID NO: 23199 - DNA, 60 bp, Artificial
  Synthetic oligonucleotide
ctgatgctcacaagaagaacctttatgaccacgctcttatgagcataatctcaactttcc

SEQ ID NO: 23200 - DNA, 60 bp, Artificial
  Synthetic oligonucleotide
agcataatctcaactttccacttgtccatccccaacttcaatcagtatgaggcaatgagc

SEQ ID NO: 23201 - DNA, 60 bp, Artificial
  Synthetic oligonucleotide
ttgcctcatactgattgaagttggggatggacaagtggaaagttgagattatgctcataa

SEQ ID NO: 23202 - DNA, 60 bp, Artificial
  Synthetic oligonucleotide
ttatgagcataatctcaactttccacttgtccatcccaaacttcaatcagtatgaggcaa

SEQ ID NO: 23203 - DNA, 60 bp, Artificial
  Synthetic oligonucleotide
caggttataattttagcttgggtgcagctgtgaaggcaggagcttgcatgctggatggtg

SEQ ID NO: 23204 - DNA, 60 bp, Artificial
  Synthetic oligonucleotide
gctctttgaatatctcaggttataattttagcttgggtgcagctgtgaaggcaggagctt

SEQ ID NO: 23205 - DNA, 60 bp, Artificial
  Synthetic oligonucleotide
cttaaccacacaactactggaaaaacatcactgcccaaatgttggcttgtatcaaatggt

SEQ ID NO: 23206 - DNA, 59 bp, Artificial
  Synthetic oligonucleotide
tttgttgatcaactgaatgctcatttgtgcttcagctttcaacctttgaatggcttgtt

SEQ ID NO: 23207 - DNA, 60 bp, Artificial
  Synthetic oligonucleotide
tgttgaccgcttgatttaggtccctcaaccgtttcaaatcattgtcatcccttctctcct

SEQ ID NO: 23208 - DNA, 60 bp, Artificial
  Synthetic oligonucleotide
gtatactgagagttgggactctaacctcagatgacttattaatcttagccgctgatctag

SEQ ID NO: 23209 - DNA, 60 bp, Artificial
  Synthetic oligonucleotide
cttctctccttgcgcatcaaccgttgaacattactgacttcggagaagtcaagtccatgt

SEQ ID NO: 23210 - DNA, 60 bp, Artificial
  Synthetic oligonucleotide
ttgcgcatcagccgttgaacattactgacttcggagaagtcaagtccatgcagaagagct

SEQ ID NO: 23211 - DNA, 60 bp, Artificial
  Synthetic oligonucleotide
tcaatgtccatccaggtcttagcatttgggtcaagttgcagcattgcatccttgagggtc

SEQ ID NO: 23212 - DNA, 60 bp, Artificial
  Synthetic oligonucleotide
gcatccttgagggtcatcagctgagaataggtaagcccagcggtaaaccctgccgactgc

SEQ ID NO: 23213 - DNA, 60 bp, Artificial
  Synthetic oligonucleotide
gctgcaacttgacccaaatgctaagacctggatggacattgaaggaagacctgaagatcc

SEQ ID NO: 23214 - DNA, 60 bp, Artificial
  Synthetic oligonucleotide
tcttcaggtcttccttcaatgtccatccaggtcttagcatttgggtcaagttgcagcatt

SEQ ID NO: 23215 - DNA, 60 bp, Artificial
  Synthetic oligonucleotide
tggccatatattgcatcaagaacctcaataacaggaagggcctgggaaaacactgtcgtt

SEQ ID NO: 23216 - DNA, 60 bp, Artificial
  Synthetic oligonucleotide
ccaggctcttcctgttattgaggttcttgatgcaatatatggccacccgtcccctgacag

SEQ ID NO: 23217 - DNA, 60 bp, Artificial
  Synthetic oligonucleotide
gcagtcggcagggtttaccgctgggcttacctattctcagctgatgaccctcaaggatgc

SEQ ID NO: 23218 - DNA, 60 bp, Artificial
  Synthetic oligonucleotide
ctgcagtcggcagggtttaccgctgggcttacctattctcagctgatgaccctcaaggat

SEQ ID NO: 23219 - DNA, 60 bp, Artificial
  Synthetic oligonucleotide
cttcctgttattgaggttcttgatgcaatatatggccatccatctcctgacaaacaaatc

SEQ ID NO: 23220 - DNA, 60 bp, Artificial
  Synthetic oligonucleotide
ggaatccttatgaaaacatactctacaagatttgtttgtcaggagatggatggccatata

SEQ ID NO: 23221 - DNA, 60 bp, Artificial
  Synthetic oligonucleotide
gaaatgaacatcccaagagccttcttgacctttaaaatggatttgaggatgccatccatt

SEQ ID NO: 23222 - DNA, 60 bp, Artificial
  Synthetic oligonucleotide
cagaacgactctaggtgtcgatgttctgaacaccatatctctgggcagcactgctctcaa

SEQ ID NO: 23223 - DNA, 60 bp, Artificial
  Synthetic oligonucleotide
gacgactctaggtgtcgatgttctgaacaccatgtctctgggtagcactgctctcaggac

SEQ ID NO: 23224 - DNA, 60 bp, Artificial
  Synthetic oligonucleotide
aggttcacggaagaagtgtatgtagcagcctgaacttggttgataaagggcaatttccac

SEQ ID NO: 23225 - DNA, 60 bp, Artificial
  Synthetic oligonucleotide
agtgtatgtagcagcctgaacttggttgatagagggcaatttccactggatcttcaggtc

SEQ ID NO: 23226 - DNA, 54 bp, Artificial
  Synthetic oligonucleotide
aaaacatcactgcccaaatgttggcttgtatcaaatggttcatacctgaacgag

SEQ ID NO: 23227 - DNA, 60 bp, Artificial
  Synthetic oligonucleotide
agaacatcactgcccaaatgttggcttgtatcaaatggttcatacttgaacgagacccac

SEQ ID NO: 23228 - DNA, 60 bp, Artificial
  Synthetic oligonucleotide
gggtctcgttcaagtatgaaccatttgatacaagccaacatttgggcagtgatgttctcc

SEQ ID NO: 23229 - DNA, 60 bp, Artificial
  Synthetic oligonucleotide
cactgcccaaatgttggcttgtatcaaatggttcatacttgaacgagacccacttttctg

SEQ ID NO: 23230 - DNA, 60 bp, Artificial
  Synthetic oligonucleotide
caatttccaccggatcttcaggtcttccttcaatgtccatccaagtcttagcatttgggt

SEQ ID NO: 23231 - DNA, 60 bp, Artificial
  Synthetic oligonucleotide
ggatcttcaggtcttccttcaatgtccatccaagtcttagcatttgggtcaagttgcagc

SEQ ID NO: 23232 - DNA, 60 bp, Artificial
  Synthetic oligonucleotide
cagccgttgaacattactgacttcggagaagtcaagtccatgcagaagagcttgggcatc

SEQ ID NO: 23233 - DNA, 60 bp, Artificial
  Synthetic oligonucleotide
catcccaagagccttcttgacctttaaaatggatttgaggatgccatccattgtctgagg

SEQ ID NO: 23234 - DNA, 60 bp, Artificial
  Synthetic oligonucleotide
acctcagacaatggatggtatcctcaaatccattttaaaggtcaagaaggctcttggaat

SEQ ID NO: 23235 - DNA, 60 bp, Artificial
  Synthetic oligonucleotide
aacatattgccaccatccagcatgcaagctcctgccttcacagctgcacccaagctaaag

SEQ ID NO: 23236 - DNA, 60 bp, Artificial
  Synthetic oligonucleotide
aacatattgccaccatccagcatgcaagctcctgccttcacagctgcacccaagctaaaa

SEQ ID NO: 23237 - DNA, 60 bp, Artificial
  Synthetic oligonucleotide
gccaccatccagcatgcaagctcctgccttcacagctgcacccaagctaaaattataacc

SEQ ID NO: 23238 - DNA, 60 bp, Artificial
  Synthetic oligonucleotide
gccaccatccagcatgcaagctcctgccttcacagctgcacccaagctaaagttataacc

SEQ ID NO: 23239 - DNA, 60 bp, Artificial
  Synthetic oligonucleotide
aaacatggagacactcaatatgaccatgcctctctcctgcacaaagaacaacagtcatca

SEQ ID NO: 23240 - DNA, 60 bp, Artificial
  Synthetic oligonucleotide
tgatgactgttgttctttgtgcaggagagaggcatggtcatattgagtgtctccatgttt

SEQ ID NO: 23241 - DNA, 60 bp, Artificial
  Synthetic oligonucleotide
caactcaacaaaagagtatactgagagttgggactctaacctcagatgacttattaatct

SEQ ID NO: 23242 - DNA, 60 bp, Artificial
  Synthetic oligonucleotide
gctaacagaagattatgacaaaaggcagggtagcacaccactctccttggttgatctatg

SEQ ID NO: 23243 - DNA, 60 bp, Artificial
  Synthetic oligonucleotide
gaaaggtattgttaacatatggaaatcaggtctgattcagctgttcatattcctcatcct

SEQ ID NO: 23244 - DNA, 60 bp, Artificial
  Synthetic oligonucleotide
ccctgtgcaattcaaagtcacagtttttgtgacagttagttgtcaaccccctttttgaca

SEQ ID NO: 23245 - DNA, 60 bp, Artificial
  Synthetic oligonucleotide
gcgcaccggggatcctaggcttttaactaacgcattacagagggattcaaccctgtgcaa

SEQ ID NO: 23246 - DNA, 60 bp, Artificial
  Synthetic oligonucleotide
ccattatgggtcaagtcattgggttcttccaatccttacccaacatcattaatgaggcac

SEQ ID NO: 23247 - DNA, 60 bp, Artificial
  Synthetic oligonucleotide
ggctacgcacccagctcctgttctgttaacaacactcatcactactttagaggtcctggc

SEQ ID NO: 23248 - DNA, 60 bp, Artificial
  Synthetic oligonucleotide
gcactttcctctcttgtgatgaattggagacaagtgtgttcagcagacagcttttcaaga

SEQ ID NO: 23249 - DNA, 60 bp, Artificial
  Synthetic oligonucleotide
tcctcatcctagcggggaggagctgttctcacacctttcagattggccgaaaccatgagt

SEQ ID NO: 23250 - DNA, 60 bp, Artificial
  Synthetic oligonucleotide
tcatagggattcctcatccctggtttttctgagacaaacattctttcttgatgcttcacc

SEQ ID NO: 23251 - DNA, 60 bp, Artificial
  Synthetic oligonucleotide
acacatctggcttaacatagattgtttccaacatgtttcccccatcaaccagacatgcac

SEQ ID NO: 23252 - DNA, 60 bp, Artificial
  Synthetic oligonucleotide
ccggctttcactgcagcagcaagactcagattgtacccagagatgttgttagcactttcc

SEQ ID NO: 23253 - DNA, 60 bp, Artificial
  Synthetic oligonucleotide
gtgggctgatacaaagcaagctcaacagggtctgttggtgggccctcaatatccacccag

SEQ ID NO: 23254 - DNA, 60 bp, Artificial
  Synthetic oligonucleotide
atcccaagctctgcctgtgatctgggatcttgagccaatgtatggccaaccttcaccaga

SEQ ID NO: 23255 - DNA, 60 bp, Artificial
  Synthetic oligonucleotide
caatgtatggccaaccttcaccagagaggcaaatcttgtaaaggatgttctcatagggat

SEQ ID NO: 23256 - DNA, 60 bp, Artificial
  Synthetic oligonucleotide
cattgcatctcgcgaagaaaagcactctgagtactggagccaacttctctatggtctatc

SEQ ID NO: 23257 - DNA, 60 bp, Artificial
  Synthetic oligonucleotide
atggtctatcaaaactattaggctccagtaagtcattgtggtttgattactgtcagagag

SEQ ID NO: 23258 - DNA, 60 bp, Artificial
  Synthetic oligonucleotide
catcacgcaagacatctcctttggtttgagtggtgtagtgactcaggcctcgcctcagtg

SEQ ID NO: 23259 - DNA, 60 bp, Artificial
  Synthetic oligonucleotide
tgtcagagagcagattgcatgatgcaagagcacagctcacacttgaagtgcaactactca

SEQ ID NO: 23260 - DNA, 60 bp, Artificial
  Synthetic oligonucleotide
ccacttgggagaaccattgtgagttcaaccatctaaacacaattcacctgttgatgagct

SEQ ID NO: 23261 - DNA, 60 bp, Artificial
  Synthetic oligonucleotide
tgagcttcaggagatcatcatcagacctccgttctttcctcatcactcgctgaacttgcg

SEQ ID NO: 23262 - DNA, 60 bp, Artificial
  Synthetic oligonucleotide
cacaattcacctgttgatgagctctactggtcagtctttcataactagaaggttgcaggc

SEQ ID NO: 23263 - DNA, 60 bp, Artificial
  Synthetic oligonucleotide
catcttgttggtttcccaacacacagacacatcttagatggtccttgccctaaaccccac

SEQ ID NO: 23264 - DNA, 60 bp, Artificial
  Synthetic oligonucleotide
cctgtggacattttggaataccgggcaaacctgttcgatgggtgaaacgatcacggtgag

SEQ ID NO: 23265 - DNA, 60 bp, Artificial
  Synthetic oligonucleotide
ggaataccgggcaaacctgttcgatgggtgaaacgatcacggtgagtcttcaggctcccc

SEQ ID NO: 23266 - DNA, 60 bp, Artificial
  Synthetic oligonucleotide
ctcaggcctcgcctcagtgactgagtccatctgaagctgggtatgtcacttgcaccagac

SEQ ID NO: 23267 - DNA, 60 bp, Artificial
  Synthetic oligonucleotide
gtgcatttacattgcaaccactgattcagacttaaacactagagcacttggaagtagagg

SEQ ID NO: 23268 - DNA, 60 bp, Artificial
  Synthetic oligonucleotide
ttctaacaaatacaataaattcactgatttcggataatctgttgatgaaaaacaagttgg

SEQ ID NO: 23269 - DNA, 60 bp, Artificial
  Synthetic oligonucleotide
caggcctgatcttgcgttctcgatgtctctcagtaaaattccatgagagtatttgcttcc

SEQ ID NO: 23270 - DNA, 60 bp, Artificial
  Synthetic oligonucleotide
gtcaagcagtgcacaatgaggttcacctgaattgccacctttcttctttcttgaaagcac

SEQ ID NO: 23271 - DNA, 60 bp, Artificial
  Synthetic oligonucleotide
gaagtagaggcttgggctctatgcttggcacattgccctcaaatgctgcttgaaacatga

SEQ ID NO: 23272 - DNA, 60 bp, Artificial
  Synthetic oligonucleotide
gaaccttgacatgtcaaaactaattttgaaggcagcttgattagaattctgctcagcagg

SEQ ID NO: 23273 - DNA, 60 bp, Artificial
  Synthetic oligonucleotide
tgcttggtctgttgggaagctgagatcaattgtggagatgtcaggtcttccattcagttc

SEQ ID NO: 23274 - DNA, 60 bp, Artificial
  Synthetic oligonucleotide
cttctgatccttaatgtcccagatccttaccacaccgttgttttgaccttgtctggactg

SEQ ID NO: 23275 - DNA, 60 bp, Artificial
  Synthetic oligonucleotide
ctggactgaaacccaagggatctcagtatagctgagcgcctgtccagttgagcagttgtg

SEQ ID NO: 23276 - DNA, 60 bp, Artificial
  Synthetic oligonucleotide
caagatcatcaaggttggggtatttgactgtgtaaaggagcccaagtgtggtcaaacctt

SEQ ID NO: 23277 - DNA, 60 bp, Artificial
  Synthetic oligonucleotide
tccttgcactgacatgcaagcaattgtcaaagcaggcattgatccaaactgattgatcaa

SEQ ID NO: 23278 - DNA, 60 bp, Artificial
  Synthetic oligonucleotide
atcctgtgtgagaaagacaaagggttactaattgaatacaacctaaccaacattgcatct

SEQ ID NO: 23279 - DNA, 60 bp, Artificial
  Synthetic oligonucleotide
actgcctagagcagtgggccatagtttgggcaggcatcaagtgctttgggaacacagcag

SEQ ID NO: 23280 - DNA, 60 bp, Artificial
  Synthetic oligonucleotide
ggttgcaggcttttctaacttggactttgtcagatgctacaggcaatgacctccctgggg

SEQ ID NO: 23281 - DNA, 60 bp, Artificial
  Synthetic oligonucleotide
gaggtcctggcaatgtctcttggggcatcgagctcacattgaccaacaactccgtgatca

SEQ ID NO: 23282 - DNA, 60 bp, Artificial
  Synthetic oligonucleotide
ggagcccaagtgtggtcaaaccttgtaccacatcattcatctgttcagctccttgcactg

SEQ ID NO: 23283 - DNA, 60 bp, Artificial
  Synthetic oligonucleotide
tgctcctttcattcgtgttgatcttcctcttcagtttttccagatcagttgctaactcca

SEQ ID NO: 23284 - DNA, 60 bp, Artificial
  Synthetic oligonucleotide
gcgcctgtccagttgagcagttgtgagattcccttggtaaacaccaggggtgctcctttc

SEQ ID NO: 23285 - DNA, 60 bp, Artificial
  Synthetic oligonucleotide
caacgacactaggactggaaggcacacccttccccaatgctggttaatctcaaatgggtc

SEQ ID NO: 23286 - DNA, 60 bp, Artificial
  Synthetic oligonucleotide
tgcgttcagaatatcgatgagcaagaccacctaatgaaatggctcatagaaacaatgcat

SEQ ID NO: 23287 - DNA, 60 bp, Artificial
  Synthetic oligonucleotide
ctctgaattctgtgacatgttgaggctctttgattacaataggaatgctattaagagtct

SEQ ID NO: 23288 - DNA, 60 bp, Artificial
  Synthetic oligonucleotide
cctgacagctcaaaaccatcccctgtggaagggcaccaaggacagatgaggtcaacccag

SEQ ID NO: 23289 - DNA, 60 bp, Artificial
  Synthetic oligonucleotide
cctcgtactcccttgaggcttccttggtcatttccacatctataagctttatatcccttc

SEQ ID NO: 23290 - DNA, 60 bp, Artificial
  Synthetic oligonucleotide
gagatgctgaggaaggactatatcaagaggcagggaagcacccccttagccttaatggat

SEQ ID NO: 23291 - DNA, 60 bp, Artificial
  Synthetic oligonucleotide
gtatgaattgcccagtctgtggttggaacagtgctatttccactgggtcattggatctgc

SEQ ID NO: 23292 - DNA, 60 bp, Artificial
  Synthetic oligonucleotide
aacaatggcatcaccattcaatacaacttgacattttcagacgcacagagtgctttgagc

SEQ ID NO: 23293 - DNA, 60 bp, Artificial
  Synthetic oligonucleotide
gtaaattctttgatttccgaccaagtgctcatgaggaatcacttaagagacttgatggga

SEQ ID NO: 23294 - DNA, 60 bp, Artificial
  Synthetic oligonucleotide
gaggtggtcctgctgctccaggtgatggtctgggtaagttagccacaggtctctcatttg

SEQ ID NO: 23295 - DNA, 60 bp, Artificial
  Synthetic oligonucleotide
gggagaaccactgtagatatgcagggccctttggaatgtccagaatcctctttgctcagg

SEQ ID NO: 23296 - DNA, 60 bp, Artificial
  Synthetic oligonucleotide
gctcaggaaaagacaaagttcctcactagaaggcttgccggtacattcacctggactctg

SEQ ID NO: 23297 - DNA, 55 bp, Artificial
  Synthetic oligonucleotide
ttttggattgcgctttcctctagatcaactgtgtgttggactctatcctgtcgaa

SEQ ID NO: 23298 - DNA, 60 bp, Artificial
  Synthetic oligonucleotide
ccaggttgtgcattaaagagatcagcaagatccataccatgtgagtacttagaatcttgc

SEQ ID NO: 23299 - DNA, 60 bp, Artificial
  Synthetic oligonucleotide
ctgccttcaatgtcaatccatgtaggggcattagggtcgatccctcccatgaggtctttc

SEQ ID NO: 23300 - DNA, 60 bp, Artificial
  Synthetic oligonucleotide
gtacaaccttgccacctgtgggatatttgcattggtcagcttcctcctcttggctgggag

SEQ ID NO: 23301 - DNA, 60 bp, Artificial
  Synthetic oligonucleotide
cctcatgattctctggacattgctgacttcagagaagtccaatccgttcaggaggctagt

SEQ ID NO: 23302 - DNA, 60 bp, Artificial
  Synthetic oligonucleotide
gtgtaaagtaggccaaggtctgtgagtgcttgcacgacatcattgagtggggtctgtgac

SEQ ID NO: 23303 - DNA, 60 bp, Artificial
  Synthetic oligonucleotide
cagaccctcaccacgccattcgtgccttgctgaggtctcctcatcccaaccatctgcaag

SEQ ID NO: 23304 - DNA, 60 bp, Artificial
  Synthetic oligonucleotide
gtgccaaattgattgttcagaagtgatgagtctctcacatcccagaccctcaccacgcca

SEQ ID NO: 23305 - DNA, 60 bp, Artificial
  Synthetic oligonucleotide
ttgttgcaccgtcaagttccccatgtagaccccagaagcctgaggtctctcagttctcat

SEQ ID NO: 23306 - DNA, 60 bp, Artificial
  Synthetic oligonucleotide
agcttcctcctcttggctgggagatcatgtggcatgtatggtctcagtgggcctgacatc

SEQ ID NO: 23307 - DNA, 60 bp, Artificial
  Synthetic oligonucleotide
ggagcacgcaaagactggtgaaaccagtgttcctaagtgttggcttgtcactaacggctc

SEQ ID NO: 23308 - DNA, 60 bp, Artificial
  Synthetic oligonucleotide
gccccgagaactgctttcaagaggtcctcactgttgcctggtttgatcagaatggactcc

SEQ ID NO: 23309 - DNA, 60 bp, Artificial
  Synthetic oligonucleotide
agactgaagttgtagccagaaatgttgattcctgattgctgttcagtgataacccctaag

SEQ ID NO: 23310 - DNA, 60 bp, Artificial
  Synthetic oligonucleotide
ttcataaggattccgatctccaacttggtctgaaacaaacatattgagctttctttttgc

SEQ ID NO: 23311 - DNA, 60 bp, Artificial
  Synthetic oligonucleotide
cccggtgtgcatcttgcacagccagccatacttgtcccacaccttgtcctcgtactccct

SEQ ID NO: 23312 - DNA, 60 bp, Artificial
  Synthetic oligonucleotide
gagggtcttagagtgtcacaacatttggacctctgaagatcaggtcatgtggcagtatgt

SEQ ID NO: 23313 - DNA, 60 bp, Artificial
  Synthetic oligonucleotide
gccacatcgtttgaccaacaaggggatctgtggctgtggtgcattcagggtacccggtgt

SEQ ID NO: 23314 - DNA, 60 bp, Artificial
  Synthetic oligonucleotide
gacatgtcacacctgaacttaacaatgcccaatgcatgctcagccaacaattcccaccat

SEQ ID NO: 23315 - DNA, 60 bp, Artificial
  Synthetic oligonucleotide
aaataccaacgcacagacacataaagggcggttcatgcccaaagccacatcgtttgacca

SEQ ID NO: 23316 - DNA, 60 bp, Artificial
  Synthetic oligonucleotide
attcccaccattacatcagcatggggacttcagggctggaattgactttcaccaatgact

SEQ ID NO: 23317 - DNA, 60 bp, Artificial
  Synthetic oligonucleotide
tagtgtccagcctacaccttagtatcagagggaattcgaattacaaagcagtatcttgtg

SEQ ID NO: 23318 - DNA, 60 bp, Artificial
  Synthetic oligonucleotide
gatgttttccacgtcagcctatctaattagtgtcttcctgcatcttatgaaaataccaac

SEQ ID NO: 23319 - DNA, 60 bp, Artificial
  Synthetic oligonucleotide
ttctgcaactcccttcttaacgcctgtgtccattgaaaactcttgatttctttggacaag

SEQ ID NO: 23320 - DNA, 60 bp, Artificial
  Synthetic oligonucleotide
tttggacaaggacatcttgtcgctcaatgattcaccaagacaaatgcgcaatcaaatgcc

SEQ ID NO: 23321 - DNA, 60 bp, Artificial
  Synthetic oligonucleotide
tcctcttatctttgcgcactattctttggacttgagcaactttgtgaaagtcaagagcag

SEQ ID NO: 23322 - DNA, 60 bp, Artificial
  Synthetic oligonucleotide
gctgaatcagagatcagaaatcctgaagatgatggggatgggtacaggtccaagaggccc

SEQ ID NO: 23323 - DNA, 60 bp, Artificial
  Synthetic oligonucleotide
ggtctacagtggtgttctcccatgctcttcctttgatttgtgaccttgaacctatgtatg

SEQ ID NO: 23324 - DNA, 60 bp, Artificial
  Synthetic oligonucleotide
gagcaagagaagcaatgagatgtctgccgacttcacctccatgatctccaatagtgaggt

SEQ ID NO: 23325 - DNA, 60 bp, Artificial
  Synthetic oligonucleotide
ggtgctggattgcttatacaatacaacctcactattggagatcatggaggtgaagttggc

SEQ ID NO: 23326 - DNA, 60 bp, Artificial
  Synthetic oligonucleotide
cctaacttcatctcagctgaatcagagatcagaaatcctgaagatgatggggatgggtac

SEQ ID NO: 23327 - DNA, 60 bp, Artificial
  Synthetic oligonucleotide
ggcggtgctggattgcttatacaatacaacctcactattggagatcatggaggtgaagtt

SEQ ID NO: 23328 - DNA, 60 bp, Artificial
  Synthetic oligonucleotide
gtgaacatcttggtcctcagatcaccaatgtacaactccctgttaccaccaacctgttcc

SEQ ID NO: 23329 - DNA, 60 bp, Artificial
  Synthetic oligonucleotide
accaatgtacaactccctgttaccaccaacctgctccttatatgacaaggagaactttag

SEQ ID NO: 23330 - DNA, 60 bp, Artificial
  Synthetic oligonucleotide
cgagacatcatggggattccatattgtaattacagcaagtattggtacctcaatcataca

SEQ ID NO: 23331 - DNA, 60 bp, Artificial
  Synthetic oligonucleotide
catactgtaattacagcaagtattggtacctcaaccacacaactactgggagaacatcac

SEQ ID NO: 23332 - DNA, 60 bp, Artificial
  Synthetic oligonucleotide
cgcaccggggatcctaggctttttggattgcgctttcctctagatcaactgtgtgttgga

SEQ ID NO: 23333 - DNA, 55 bp, Artificial
  Synthetic oligonucleotide
tccacctcgaaagaggtggagagtcagggaggcccagagggtcttagagtgtcac

SEQ ID NO: 23334 - DNA, 60 bp, Artificial
  Synthetic oligonucleotide
ccacctcgaaagaggtggagagtcagggaggcccagagggtcttagagtgtcacaacatt

SEQ ID NO: 23335 - DNA, 60 bp, Artificial
  Synthetic oligonucleotide
gcgcaccggggatcctaggctttttggattgcgctttcctctagatcaactgggtgtcag

SEQ ID NO: 23336 - DNA, 60 bp, Artificial
  Synthetic oligonucleotide
cgcctccctgactctccacctcgaaagaggtggagagtcagggaggcccagagggtctta

SEQ ID NO: 23337 - DNA, 60 bp, Artificial
  Synthetic oligonucleotide
ggcccagagggtcttagagtgtcacaacatttgggcctctaaaaattaggtcatgtggca

SEQ ID NO: 23338 - DNA, 60 bp, Artificial
  Synthetic oligonucleotide
cttgtcgctcaatgattcaccaagacaaatgcgcaatcaaatgcctaggatccccggtgc

SEQ ID NO: 23339 - DNA, 60 bp, Artificial
  Synthetic oligonucleotide
tctcatgttcaaaaaacaactctcaccactacattcaagtgggcaatgaaactggtctag

SEQ ID NO: 23340 - DNA, 60 bp, Artificial
  Synthetic oligonucleotide
gttcctttctctagaccttgacatgtcatcgctgaacgccacaatgcctctctcatgttc

SEQ ID NO: 23341 - DNA, 51 bp, Artificial
  Synthetic oligonucleotide
gaccttgacatgtcatcgctgaacgccacaatgcctctctcatgttcaaaa

SEQ ID NO: 23342 - DNA, 60 bp, Artificial
  Synthetic oligonucleotide
cccagtcctttctctagaccttgacatgtcatcgctgaacgccacaatgcctctctcatg

SEQ ID NO: 23343 - DNA, 60 bp, Artificial
  Synthetic oligonucleotide
cacagcgactatcttgacgcgagcaatcattgcggcaccattgctaatggcattatggat

SEQ ID NO: 23344 - DNA, 60 bp, Artificial
  Synthetic oligonucleotide
cacttgagcatccctgacttcaatcaatacgaaaagatgtcctgtgatttcaatggcggc

SEQ ID NO: 23345 - DNA, 60 bp, Artificial
  Synthetic oligonucleotide
gcgactatcttgacgcgagcaatcattgcggcaccattgctaatggcattatggatgtgt

SEQ ID NO: 23346 - DNA, 60 bp, Artificial
  Synthetic oligonucleotide
ctctataattgaccacaaattctgcaacttgagtgatgctcataggaagaacctctatga

SEQ ID NO: 23347 - DNA, 50 bp, Artificial
  Synthetic oligonucleotide
aaaacaactctcaccactacattcaagtgggcaatgaaactggtctagag

SEQ ID NO: 23348 - DNA, 60 bp, Artificial
  Synthetic oligonucleotide
acattccacttgagcatccctgacttcaatcaatacgaaaagatgtcctgtgatttcaat

SEQ ID NO: 23349 - DNA, 60 bp, Artificial
  Synthetic oligonucleotide
ttgaccacaaattctgcaacttgagtgatgctcataggaagaacctctatgataaagcat

SEQ ID NO: 23350 - DNA, 60 bp, Artificial
  Synthetic oligonucleotide
ggcagcattacacacaacatctcccattcggtaagagaaccacccaaaaccaaactgcaa

SEQ ID NO: 23351 - DNA, 60 bp, Artificial
  Synthetic oligonucleotide
tagttcctggaggattacacttatctctgaacccaacaaatgttcaccagttctgaatcg

SEQ ID NO: 23352 - DNA, 60 bp, Artificial
  Synthetic oligonucleotide
gggagatgttgtgtgtaatgctgccatgttgattaggcagggcctgacaaacccaaaggc

SEQ ID NO: 23353 - DNA, 60 bp, Artificial
  Synthetic oligonucleotide
ggcacccatctttacagtcagtggcacaggctcccactcaggtccaactctctcaaagtc

SEQ ID NO: 23354 - DNA, 60 bp, Artificial
  Synthetic oligonucleotide
gcccaacaactcaagctcaagagaatcaccaagtatcaagggatcttccatgtaatcctc

SEQ ID NO: 23355 - DNA, 60 bp, Artificial
  Synthetic oligonucleotide
gacctcgcatctttcagaattttcatagagtccataccggagcgcttgtcgatagtagtc

SEQ ID NO: 23356 - DNA, 60 bp, Artificial
  Synthetic oligonucleotide
gaagacaccattaggctaaaggcttccagattaacacctggagttgtatgctgacagtca

SEQ ID NO: 23357 - DNA, 60 bp, Artificial
  Synthetic oligonucleotide
gagacccatgggcacgaaaggggaagtgagactagcactgaatatgagaggctcctctct

SEQ ID NO: 23358 - DNA, 60 bp, Artificial
  Synthetic oligonucleotide
gggaggcagtcgaatcctgtcctttgatgagattcataactgcagagacccatgggcacg

SEQ ID NO: 23359 - DNA, 60 bp, Artificial
  Synthetic oligonucleotide
cactttgttaacttggcacatgcataagcttgtcgaggtcccctttcctgttgtgaatgc

SEQ ID NO: 23360 - DNA, 60 bp, Artificial
  Synthetic oligonucleotide
caaggtgctactccatacaaggcccggatggtcatttaatttccttctatgcagatccta

SEQ ID NO: 23361 - DNA, 60 bp, Artificial
  Synthetic oligonucleotide
caatttctttactagtgaatctcttcatttgctcatagaacacacattcttcctcaggag

SEQ ID NO: 23362 - DNA, 60 bp, Artificial
  Synthetic oligonucleotide
gcctctggtctttcgccaaagataacaccaatgcagtagttgatgaacctctcgctaagc

SEQ ID NO: 23363 - DNA, 60 bp, Artificial
  Synthetic oligonucleotide
atgaacctctcgctaagcaaaccatagaagtcagaagcattatgcaagattccctgcccc

SEQ ID NO: 23364 - DNA, 58 bp, Artificial
  Synthetic oligonucleotide
ggttccacagagctgtcacctttgtatttcacctcagtcattaaagatcagtgtggcc

SEQ ID NO: 23365 - DNA, 60 bp, Artificial
  Synthetic oligonucleotide
ccatctcctttgtcattggccctcctacctcttctgtaccgtgctattgtggtgttgacc

SEQ ID NO: 23366 - DNA, 60 bp, Artificial
  Synthetic oligonucleotide
ggcaaaacacttctttgcattctaccacttgatatctcacagaccctatttgattttgcc

SEQ ID NO: 23367 - DNA, 60 bp, Artificial
  Synthetic oligonucleotide
tatcgtcgtggttgtgtgtgcagccactcttgtctgcactgtctatttcaatgcagcgtg

SEQ ID NO: 23368 - DNA, 60 bp, Artificial
  Synthetic oligonucleotide
atgtatggggggaggaagtccctcttctcacaaagtttgtatctgcagcgctacacaatg

SEQ ID NO: 23369 - DNA, 60 bp, Artificial
  Synthetic oligonucleotide
tggttaggtgccaattacagaatccaggtgtggctgaacttttatcatgctctcacctct

SEQ ID NO: 23370 - DNA, 60 bp, Artificial
  Synthetic oligonucleotide
acactccagaacaaactttgtagtaaattcacaaggggtgcacagaagctgctgtcagaa

SEQ ID NO: 23371 - DNA, 60 bp, Artificial
  Synthetic oligonucleotide
aagaccgaggaggtctcccaattgaagaatggcctcctttttatctctgttaaataggtc

SEQ ID NO: 23372 - DNA, 60 bp, Artificial
  Synthetic oligonucleotide
gctcaaggctactggaggacaaagtgaatttgaaccaagtgattcaatctgtgaggcggc

SEQ ID NO: 23373 - DNA, 60 bp, Artificial
  Synthetic oligonucleotide
cagagtctgtcctcagtaagtggaggcattcatccaacattcttctatctatctcaccct

SEQ ID NO: 23374 - DNA, 60 bp, Artificial
  Synthetic oligonucleotide
cccagccaatcgtcgcaggacctccccttgagtctaaacctgccccccactgtttcatac

SEQ ID NO: 23375 - DNA, 60 bp, Artificial
  Synthetic oligonucleotide
aacgaccatctactattggaactaatgtgacacccgcaacagcaaggtcttccctgatgc

SEQ ID NO: 23376 - DNA, 60 bp, Artificial
  Synthetic oligonucleotide
gaataaactctcttttcagcaggtttagaagagatttagaaagtgggaaattaaagagaa

SEQ ID NO: 23377 - DNA, 60 bp, Artificial
  Synthetic oligonucleotide
agtgctcctagatttgctaaaacaaagtctgcaatccttaaaggcgaaccagtctggcaa

SEQ ID NO: 23378 - DNA, 60 bp, Artificial
  Synthetic oligonucleotide
gcacagagcagctgaagaacatacagagcctgagaagattatcatctgtttgtctggcct

SEQ ID NO: 23379 - DNA, 60 bp, Artificial
  Synthetic oligonucleotide
cccaggactaccacttatcattcctgatggttacaagctgatagacaattctctcattct

SEQ ID NO: 23380 - DNA, 60 bp, Artificial
  Synthetic oligonucleotide
caaaacatccagatttaacaactgtctccttctagtattcaacagtttcaaactcttgac

SEQ ID NO: 23381 - DNA, 60 bp, Artificial
  Synthetic oligonucleotide
tgtggcattcttgctcaaggtgttcagacagtccgtaatgctcgaaactcagtcccacca

SEQ ID NO: 23382 - DNA, 60 bp, Artificial
  Synthetic oligonucleotide
taagggactcagaattactttccctctcactgattctcacgtcttcttccagtttgtccc

SEQ ID NO: 23383 - DNA, 60 bp, Artificial
  Synthetic oligonucleotide
ggaggctgagtgacctggttgtaagtgatccggaggaagtccttgtcctgttggaattcc

SEQ ID NO: 23384 - DNA, 60 bp, Artificial
  Synthetic oligonucleotide
ggaatctaagcagcttatacaccaccttctcagcaggtgtgatcagatcctccctcaact

SEQ ID NO: 23385 - DNA, 60 bp, Artificial
  Synthetic oligonucleotide
gtgtaaagagccacatcaactttgtgaaacaatagatacaattgcagatcaagccatcgc

SEQ ID NO: 23386 - DNA, 60 bp, Artificial
  Synthetic oligonucleotide
ctccgtaatttgactcacagcactaacaagcaatttgttaaagtcatattccagaagtcg

SEQ ID NO: 23387 - DNA, 60 bp, Artificial
  Synthetic oligonucleotide
agccatcgcaaatggcgtcccagtctccctagttaatagtatccaaaggagaacactgga

SEQ ID NO: 23388 - DNA, 60 bp, Artificial
  Synthetic oligonucleotide
tctacaaaatctcaaactaggtgatgaccagtatgtgcgttccgggaaagatcatgttag

SEQ ID NO: 23389 - DNA, 60 bp, Artificial
  Synthetic oligonucleotide
ctgtctcaccgacattgaggttgcactgaggaccctattgttgctaatgctcaccaaccc

SEQ ID NO: 23390 - DNA, 60 bp, Artificial
  Synthetic oligonucleotide
agagacagggagatcggaagacaacctggcagaaatatgttttgatggagaagaagagac

SEQ ID NO: 23391 - DNA, 60 bp, Artificial
  Synthetic oligonucleotide
ctcaactacacaaaaggggtattggagttttcaatttcagtggactttacgcacaatcag

SEQ ID NO: 23392 - DNA, 60 bp, Artificial
  Synthetic oligonucleotide
tgcagtttccttacaagctttcttacaacctttgtttcattaggacacagttcctcaatg

SEQ ID NO: 23393 - DNA, 60 bp, Artificial
  Synthetic oligonucleotide
ggtgtcttcatttaacaacggcactttaattttcaaaggagagaagaagctaaacagcct

SEQ ID NO: 23394 - DNA, 60 bp, Artificial
  Synthetic oligonucleotide
gctttataggcctttgcaaaactctaggaagcaggtgtgtgagaaacaaaaatagggaaa

SEQ ID NO: 23395 - DNA, 60 bp, Artificial
  Synthetic oligonucleotide
gagtctttgtattctgtaacctctagaaccatccagccaatctttcacatcagtgttggt

SEQ ID NO: 23396 - DNA, 60 bp, Artificial
  Synthetic oligonucleotide
ggtgggcttctggatgagactgtttgtcacaaatgtacagcgttataccatcccgattgc

SEQ ID NO: 23397 - DNA, 60 bp, Artificial
  Synthetic oligonucleotide
gagttgggtgtttgggtcctagcagaaccgaccaaagggaagaataacagtgagaaccta

SEQ ID NO: 23398 - DNA, 51 bp, Artificial
  Synthetic oligonucleotide
tgagcctgaacctgcccccaactgtctcatacatcaccgtattctttgact

SEQ ID NO: 23399 - DNA, 60 bp, Artificial
  Synthetic oligonucleotide
gaaaggcacaaaacatccagattcaacaattgcctccttctggtgttcagcaatttcaag

SEQ ID NO: 23400 - DNA, 60 bp, Artificial
  Synthetic oligonucleotide
ggagcctttcatactcagcactggtctcattccttctttgatgcccatgagtctttgctg

SEQ ID NO: 23401 - DNA, 60 bp, Artificial
  Synthetic oligonucleotide
gtcttcagggttgatcttctgaaagtttcttctaaggctcccactttccagatccctcct

SEQ ID NO: 23402 - DNA, 60 bp, Artificial
  Synthetic oligonucleotide
ttcatcgttatgagttgatcttgcgtctttcagaatcctcatggaatccatgccagagcg

SEQ ID NO: 23403 - DNA, 60 bp, Artificial
  Synthetic oligonucleotide
gttatgccattgcatttctgaacccttgtcacatgctcatccataatcaagtcctcgagt

SEQ ID NO: 23404 - DNA, 60 bp, Artificial
  Synthetic oligonucleotide
ggtcacgatgagcttctgggtgattttgtctgtcacagatgtacagtgttatgccattgc

SEQ ID NO: 23405 - DNA, 60 bp, Artificial
  Synthetic oligonucleotide
ttgcctctgatagtaacttctgtgcacctcttgtgaatttgctgcaaagcttgttctgaa

SEQ ID NO: 23406 - DNA, 60 bp, Artificial
  Synthetic oligonucleotide
caagaatgttccctaactgaaggatggccgctctcttatctctattgaataagtctaaga

SEQ ID NO: 23407 - DNA, 60 bp, Artificial
  Synthetic oligonucleotide
ctgatgggtacaccactttctgcctcaagaccatcctcaatgggaacatctcattcaggt

SEQ ID NO: 23408 - DNA, 60 bp, Artificial
  Synthetic oligonucleotide
gagcctttgaattcgataacctctggaaccatcaagccaatccttcacgtcagtgttggt

SEQ ID NO: 23409 - DNA, 55 bp, Artificial
  Synthetic oligonucleotide
aaaacttccaaattgacacctggggttgtttcctgacaattagtttctttactgg

SEQ ID NO: 23410 - DNA, 60 bp, Artificial
  Synthetic oligonucleotide
cccttcaaaacacatgctaactggttcttcctctggtctctctgctcttgcctccttaga

SEQ ID NO: 23411 - DNA, 60 bp, Artificial
  Synthetic oligonucleotide
ttctgcacaaagttcctcccctcaaagagagcacccactctcacagtcaagggcacaggc

SEQ ID NO: 23412 - DNA, 60 bp, Artificial
  Synthetic oligonucleotide
ccttcctcacttccccattcattggccttcttgcctcttctatactgtattattgtggag

SEQ ID NO: 23413 - DNA, 60 bp, Artificial
  Synthetic oligonucleotide
caggatggatcaaaatcttccactaaatgaaacgatagctctgataaaatgaccttcctc

SEQ ID NO: 23414 - DNA, 60 bp, Artificial
  Synthetic oligonucleotide
gaccatcgactattggaactagtgtgatgcctgcaatggcgaggtcctccttgatgcatg

SEQ ID NO: 23415 - DNA, 60 bp, Artificial
  Synthetic oligonucleotide
cccatcaagtgctcaccagttctgaatcggtgtaggaaaagagtgccaagaacatcacca

SEQ ID NO: 23416 - DNA, 56 bp, Artificial
  Synthetic oligonucleotide
ttcctccgggtcactgtcaaccaactcacttattcttttatcgaacaaggtgattt

SEQ ID NO: 23417 - DNA, 60 bp, Artificial
  Synthetic oligonucleotide
ggcagccctgggcacacaattccggactcgactaagatcgtttcaacagacttatcatcg

SEQ ID NO: 23418 - DNA, 60 bp, Artificial
  Synthetic oligonucleotide
ccctttgccccaggaagttgagtttctgtcttgataacctctcatcctgctctatatagt

SEQ ID NO: 23419 - DNA, 60 bp, Artificial
  Synthetic oligonucleotide
atgtttattcacaaccacacttttattgctggcaagatccagtgccgttgcacagccaga

SEQ ID NO: 23420 - DNA, 60 bp, Artificial
  Synthetic oligonucleotide
gcgaccccgcggagacgccaatcagtcgatctcctcgacgtccgaccccgccaaccaatc

SEQ ID NO: 23421 - DNA, 60 bp, Artificial
  Synthetic oligonucleotide
ccaggccacattgttctttaagtgatgaggtgaaatacaatggtgacaactctgtggagc

SEQ ID NO: 23422 - DNA, 60 bp, Artificial
  Synthetic oligonucleotide
gacgacaatcttcttaaactctgcacatcccttagctgctctatttcagattggaaattg

SEQ ID NO: 23423 - DNA, 60 bp, Artificial
  Synthetic oligonucleotide
gaagcattgtgcaagattccctgtcccatgtcaatgagactagatatgtgggatggtact

SEQ ID NO: 23424 - DNA, 60 bp, Artificial
  Synthetic oligonucleotide
caagggaatcagacaacccgtagtgttcaaaactaagtcccaccagtgacagacaatttt

SEQ ID NO: 23425 - DNA, 60 bp, Artificial
  Synthetic oligonucleotide
caaattttaatcttccagagtcaggacccactgaagtgtaagatgttggtgactcttctg

SEQ ID NO: 23426 - DNA, 60 bp, Artificial
  Synthetic oligonucleotide
atctatcattcacgctactgtaacaacaacctacccagtgtttctcactttctgagcctt

SEQ ID NO: 23427 - DNA, 60 bp, Artificial
  Synthetic oligonucleotide
ttcccagtgttttttcctttcacaggttctgctaagacccaaacacccaactcaaaagaa

SEQ ID NO: 23428 - DNA, 60 bp, Artificial
  Synthetic oligonucleotide
ttgcccagggtccttgtcgttgcgacaaattcccgtacaaatgattcaaagtacacctgc

SEQ ID NO: 23429 - DNA, 60 bp, Artificial
  Synthetic oligonucleotide
gttcagaaaatagcacagtgtagtgttcatctcttttccacttaactacgtgagaaatga

SEQ ID NO: 23430 - DNA, 60 bp, Artificial
  Synthetic oligonucleotide
cctctattttataagagaaccatccaaacccaaactgtaaatcgtttctaaacataggcc

SEQ ID NO: 23431 - DNA, 60 bp, Artificial
  Synthetic oligonucleotide
cccacacataaaatctagatttgaattctgcagcgaacctcccaaccacacttttgggac

SEQ ID NO: 23432 - DNA, 60 bp, Artificial
  Synthetic oligonucleotide
gatgttatcatttaccctgaaaatggggtccgtcctcagtaagcatagacattcatccag

SEQ ID NO: 23433 - DNA, 60 bp, Artificial
  Synthetic oligonucleotide
tgatcactacctttgcagaaattgcctgaaccttctcttaacagtgtctgacaggtgccc

SEQ ID NO: 23434 - DNA, 52 bp, Artificial
  Synthetic oligonucleotide
cacgatctcaacagccccgagctcaccgcctccctacgaggagtgacgcccc

SEQ ID NO: 23435 - DNA, 60 bp, Artificial
  Synthetic oligonucleotide
ttgtcgggttggtgagcataagtaagagcagagtccttgaagcagtttcaatgtcaagga

SEQ ID NO: 23436 - DNA, 60 bp, Artificial
  Synthetic oligonucleotide
ggcaagatggacagagctgagattctgccagataccacctaccttggacccttgaactgc

SEQ ID NO: 23437 - DNA, 60 bp, Artificial
  Synthetic oligonucleotide
aaggtaagatacattcagcatgaacttaaactttgcactcaacagcactttttcacctgt

SEQ ID NO: 23438 - DNA, 60 bp, Artificial
  Synthetic oligonucleotide
catactgtgcagcacttcatccgagaaaattggtagaaagaaccttttcgggtctgcgta

SEQ ID NO: 23439 - DNA, 60 bp, Artificial
  Synthetic oligonucleotide
cgattgtgtctattgtttcacaaagttgatgcggctctttacacttcacattgtgtagcg

SEQ ID NO: 23440 - DNA, 60 bp, Artificial
  Synthetic oligonucleotide
aatccaccgtgattgaaaactccaacatcccctttgtgttagtaagcatgtagtcccaca

SEQ ID NO: 23441 - DNA, 60 bp, Artificial
  Synthetic oligonucleotide
ccagtcaaacttaaaattcaagctctgcctttgcatatgtctgtactttcctgagtacgc

SEQ ID NO: 23442 - DNA, 60 bp, Artificial
  Synthetic oligonucleotide
gaggtgagagcatgatacaaattcagctgtgcctgcactctgcaagtgacactttaccaa

SEQ ID NO: 23443 - DNA, 60 bp, Artificial
  Synthetic oligonucleotide
cgggtctgcgtaaaaggaaatcaagtgaccacctgggccctgtatggagtagcaccttga

SEQ ID NO: 23444 - DNA, 57 bp, Artificial
  Synthetic oligonucleotide
ttttatcacttgacaaaacacttctttgcactccaccacttgataccttccagaccc

SEQ ID NO: 23445 - DNA, 58 bp, Artificial
  Synthetic oligonucleotide
ccccacttactatgatccatactgtagttcaagaacccctctcgcacattgatggtca

SEQ ID NO: 23446 - DNA, 60 bp, Artificial
  Synthetic oligonucleotide
tctcttggagcccatcaactcaagctcaagtgaatcaccaagtatcagagggtcttccat

SEQ ID NO: 23447 - DNA, 60 bp, Artificial
  Synthetic oligonucleotide
gccgcggactggggaggcatttgcctacatcacaaatgcattccttgcctgatacaccag

SEQ ID NO: 23448 - DNA, 60 bp, Artificial
  Synthetic oligonucleotide
gacccaaactgattgtttaatttagacggatcagaaacatcccagagtctcacaattcct

SEQ ID NO: 23449 - DNA, 60 bp, Artificial
  Synthetic oligonucleotide
actttctgactcatcagggaatgacatgccaggtgggtactgtcttgaggaatggatgct

SEQ ID NO: 23450 - DNA, 60 bp, Artificial
  Synthetic oligonucleotide
tagtctcccctccttgaacagtcatacatgcaatggtcaatgcaggcattgacccaaact

SEQ ID NO: 23451 - DNA, 60 bp, Artificial
  Synthetic oligonucleotide
ctctaaatcatccagattagggtacttcactgtgtaaagaagacctaaagatgtcaaggc

SEQ ID NO: 23452 - DNA, 60 bp, Artificial
  Synthetic oligonucleotide
ggtcctactgttggtttggtgtttaagtcaacacttgtgttgtcccatgatctccccaca

SEQ ID NO: 23453 - DNA, 60 bp, Artificial
  Synthetic oligonucleotide
ctcggaggcatacaaatgaccactacagggaaagaattgaaacaggaataaggcacatgt

SEQ ID NO: 23454 - DNA, 60 bp, Artificial
  Synthetic oligonucleotide
tgttggatggatctaacttttgcattgcctctctcacaattgcttcctgcagctcagaaa

SEQ ID NO: 23455 - DNA, 60 bp, Artificial
  Synthetic oligonucleotide
agcaagttccacggggtccgtggggggcccctctatatccatccatatggtgttggatgg

SEQ ID NO: 23456 - DNA, 60 bp, Artificial
  Synthetic oligonucleotide
ccaaatcactggccaaatccatgagttcgtctttccccagatcgccaactttcagtactg

SEQ ID NO: 23457 - DNA, 60 bp, Artificial
  Synthetic oligonucleotide
caggaataaggcacatgtttggtccgttcaagattttgactaaagaagggaaggattgtg

SEQ ID NO: 23458 - DNA, 60 bp, Artificial
  Synthetic oligonucleotide
tgtaggagaagcatgtccattgccccataagatcaacagacatggagcttgtgcctgtgg

SEQ ID NO: 23459 - DNA, 58 bp, Artificial
  Synthetic oligonucleotide
tgcccagttcccgtctcagggcctgagtccagcggaagctgggaatctctttggagtt

SEQ ID NO: 23460 - DNA, 53 bp, Artificial
  Synthetic oligonucleotide
gttcaaaaattcgtgattgttctccagtgagtcttacatccaccaattttaga

SEQ ID NO: 23461 - DNA, 60 bp, Artificial
  Synthetic oligonucleotide
gttcaaatctctcagtttgtcgagatcggcatcggttctcttcgttttgcgaagaagcct

SEQ ID NO: 23462 - DNA, 57 bp, Artificial
  Synthetic oligonucleotide
gtcaccgtcctggctatcattaaggggcttgtgaacctttggaaatcaggtctcttc

SEQ ID NO: 23463 - DNA, 60 bp, Artificial
  Synthetic oligonucleotide
acagccacagtctaattcaactgtctcacaacagtagtttagctttgtctgtcgaatatg

SEQ ID NO: 23464 - DNA, 60 bp, Artificial
  Synthetic oligonucleotide
aggacatacaactctttttccaagaggctctcaatgtggctctagctgttgtcaccgtcc

SEQ ID NO: 23465 - DNA, 60 bp, Artificial
  Synthetic oligonucleotide
ttttccaagaggctctcaatgtggctctagctgttgtcaccgtcctggctatcattaagg

SEQ ID NO: 23466 - DNA, 60 bp, Artificial
  Synthetic oligonucleotide
ggatttgtgtgtcgttctagagtcagaccagtatttagtggctggggattactccaactg

SEQ ID NO: 23467 - DNA, 60 bp, Artificial
  Synthetic oligonucleotide
tattgactggacgctaaagggtctgggtcacggtcttgagggcgaccccaagctgcactg

SEQ ID NO: 23468 - DNA, 60 bp, Artificial
  Synthetic oligonucleotide
gtcgaatatgtggatttgtgtgtcgttctagagtcagaccagtatttagtggctggggat

SEQ ID NO: 23469 - DNA, 60 bp, Artificial
  Synthetic oligonucleotide
aaagggtctgggtcacggtcttgagggcgaccccaagctgcactgtcagccaaagagatc

SEQ ID NO: 23470 - DNA, 60 bp, Artificial
  Synthetic oligonucleotide
ccctccaacttaatatatctcggaggcatacaaatgaccactacagggaaagaattgaaa

SEQ ID NO: 23471 - DNA, 60 bp, Artificial
  Synthetic oligonucleotide
taggaacgaatggatcttggagagtgatcacttgattgcagagatacttagtaaggaata

SEQ ID NO: 23472 - DNA, 60 bp, Artificial
  Synthetic oligonucleotide
acagccaactctctcccaaagagaaggcccttggccttttttagttggtcactttctgac

SEQ ID NO: 23473 - DNA, 60 bp, Artificial
  Synthetic oligonucleotide
ctaatttctgatgaccttttgatgaaaaacaaattaagagaatttcttaaggtcccatac

SEQ ID NO: 23474 - DNA, 60 bp, Artificial
  Synthetic oligonucleotide
agtgctattttcttcgacaacaagtctctcttacacttggttggatttccaactcacaga

SEQ ID NO: 23475 - DNA, 60 bp, Artificial
  Synthetic oligonucleotide
tggggctctttttgaggaccattgtccttgtgcttctttttaggaactatcacaccattg

SEQ ID NO: 23476 - DNA, 60 bp, Artificial
  Synthetic oligonucleotide
gtttaatttagacggatcagaaacatcccagagtctcacaattccttgattaggtcctct

SEQ ID NO: 23477 - DNA, 60 bp, Artificial
  Synthetic oligonucleotide
ctgcaactacacaaagttttggtatgtaaatcacacaaaatctggtgaacattctctgcc

SEQ ID NO: 23478 - DNA, 60 bp, Artificial
  Synthetic oligonucleotide
tcctattcccaggtttctcatccacgaacatgccttctctctttttcactttcagtgtgg

SEQ ID NO: 23479 - DNA, 60 bp, Artificial
  Synthetic oligonucleotide
ccttctccagagagacacaacttgtagagaaggttctcataggggttcctattcccaggt

SEQ ID NO: 23480 - DNA, 60 bp, Artificial
  Synthetic oligonucleotide
aacttggcgtccttcaggacacttcccttggtgggctctgtgaagctgcccagttcccgt

SEQ ID NO: 23481 - DNA, 60 bp, Artificial
  Synthetic oligonucleotide
ttcagtgtggccatgataatggatgaaaagttgtccggtgtcactttgatggtttctaac

SEQ ID NO: 23482 - DNA, 60 bp, Artificial
  Synthetic oligonucleotide
tttgtcgagatcggcatcggttctcttcgttttgcgaagaagcctctggacttgggagac

SEQ ID NO: 23483 - DNA, 60 bp, Artificial
  Synthetic oligonucleotide
ggtttctaacatgttacccccatctataagggaagcaccagcttttgttgctgctgaaag

SEQ ID NO: 23484 - DNA, 60 bp, Artificial
  Synthetic oligonucleotide
ctcatcagggaatgacatgccaggtgggtactgtcttgaggaatggatgctcattgcagc

SEQ ID NO: 23485 - DNA, 60 bp, Artificial
  Synthetic oligonucleotide
gcactctcatctcttgtaataatctgaaggcagtcatgctcaactgtaagtttctctaaa

SEQ ID NO: 23486 - DNA, 60 bp, Artificial
  Synthetic oligonucleotide
ccagactacctggtagtaagggcttcaggctgagttcaggtaagtgaccatcaagtacag

SEQ ID NO: 23487 - DNA, 60 bp, Artificial
  Synthetic oligonucleotide
caccattgtgtgccttgcagagctcgccatatctctcccaaacttcctgttcaaaaattc

SEQ ID NO: 23488 - DNA, 66 bp, Artificial
  Synthetic oligonucleotide
gtgcaacttaaatcatgattctgaattttgtgacatgttgaaactgtacgaattcaacaagaatgc

SEQ ID NO: 23489 - DNA, 60 bp, Artificial
  Synthetic oligonucleotide
aacagtgtgtcaaaagtcattacaacacactagcatttctattaaaaaacacagccaact

SEQ ID NO: 23490 - DNA, 60 bp, Artificial
  Synthetic oligonucleotide
agctcagaaagattggaaagtctcatgttttgaccattcctttcaggaccccttggtcct

SEQ ID NO: 23491 - DNA, 52 bp, Artificial
  Synthetic oligonucleotide
tgttttgaggtagaagcccgatgatgtaacttagaagtccaggttgggcatc

SEQ ID NO: 23492 - DNA, 60 bp, Artificial
  Synthetic oligonucleotide
ccgtgggagtgtctactgccatttttgaaacctttttcatcatgtggttttctgtaacaa

SEQ ID NO: 23493 - DNA, 60 bp, Artificial
  Synthetic oligonucleotide
aatggatgctcattgcagcaaaactcaaatgctttggaaacacagctcttgctaagtgca

SEQ ID NO: 23494 - DNA, 60 bp, Artificial
  Synthetic oligonucleotide
cgcacagtggatcctaggcgcaattgttcacgcaattttgcatatctattaacaattgat

SEQ ID NO: 23495 - DNA, 60 bp, Artificial
  Synthetic oligonucleotide
aactcacagacatattgtaggagaagcatgtccattgccccataagatcaacagacatgg

SEQ ID NO: 23496 - DNA, 60 bp, Artificial
  Synthetic oligonucleotide
gaaagtctcatgttttgaccattcctttcaggaccccttggtcctactgttggtttggtg

SEQ ID NO: 23497 - DNA, 60 bp, Artificial
  Synthetic oligonucleotide
atttttcacatcccaaactctcaccaccccatctctcccagcccgagctccttgattgct

SEQ ID NO: 23498 - DNA, 60 bp, Artificial
  Synthetic oligonucleotide
gcctccatcaagtaagctggctcctgctttcacagctgcatttagactaaagttgtagcc

SEQ ID NO: 23499 - DNA, 60 bp, Artificial
  Synthetic oligonucleotide
cggcattgtcccaaactgattgtttagaagatcagggtttcgaacgtcccacactctgac

SEQ ID NO: 23500 - DNA, 60 bp, Artificial
  Synthetic oligonucleotide
gtgtcaaactcggcattgtcccaaactgattgtttagaagatcagggtttcgaacgtccc

SEQ ID NO: 23501 - DNA, 60 bp, Artificial
  Synthetic oligonucleotide
tctcagagggcaagagaaatctacatttctagaaggctcatggggacatttacttggact

SEQ ID NO: 23502 - DNA, 60 bp, Artificial
  Synthetic oligonucleotide
tgtagcctgaaatattgatagcactcttgttcccatcaatgagtcccaaaactgggtgag

SEQ ID NO: 23503 - DNA, 60 bp, Artificial
  Synthetic oligonucleotide
cgcacagtggatcctaggcattttgaactgcgctacaaaattggttcactgaaccagttt

SEQ ID NO: 23504 - DNA, 60 bp, Artificial
  Synthetic oligonucleotide
ctccaacatgttgcctccatcaagtaagctggctcctgctttcacagctgcatttagact

SEQ ID NO: 23505 - DNA, 60 bp, Artificial
  Synthetic oligonucleotide
cacctaagcatcccaaatttcaatcattatgaggctatggcttgtgatttcaatggtggc

SEQ ID NO: 23506 - DNA, 60 bp, Artificial
  Synthetic oligonucleotide
tgtgaactcactaataaatgaccagctaatcatgaggaatcatctgagggacattatggg

SEQ ID NO: 23507 - DNA, 60 bp, Artificial
  Synthetic oligonucleotide
tgcacccactgtgacactccgctaggagcaagcatagctggcttcaactgtgtcagaaca

SEQ ID NO: 23508 - DNA, 60 bp, Artificial
  Synthetic oligonucleotide
gtggcaccgtagctaacggtgttcttgaagtttttcgcaggatgacatggtgcacccact

SEQ ID NO: 23509 - DNA, 60 bp, Artificial
  Synthetic oligonucleotide
tctcctccttcccacctcgtttcttcttttccactacaatccctgtgtgcatggagcaca

SEQ ID NO: 23510 - DNA, 60 bp, Artificial
  Synthetic oligonucleotide
gccttttgcattgagacatcaattagtttaatgtccttccttccttgagagtccagcagc

SEQ ID NO: 23511 - DNA, 60 bp, Artificial
  Synthetic oligonucleotide
gtccagactgttccttgtagtggcctcaaacatgaggcagtccaaaagagcgcaatgtgg

SEQ ID NO: 23512 - DNA, 60 bp, Artificial
  Synthetic oligonucleotide
aggtccttgctgagcacaggtcttggtatgacaatgtccagactgttccttgtagtggcc

SEQ ID NO: 23513 - DNA, 60 bp, Artificial
  Synthetic oligonucleotide
agatcttgaacatcaataccatgtgaatacttggcatcctgtctgaactgcttaatgtca

SEQ ID NO: 23514 - DNA, 60 bp, Artificial
  Synthetic oligonucleotide
ccttgagagtccagcagctttctgatatcttcgacaccttggcaagtcaggaccatgttc

SEQ ID NO: 23515 - DNA, 60 bp, Artificial
  Synthetic oligonucleotide
tgctcacaagaaagacacttatgaccacacattaatgtctattatttcaacttttcacct

SEQ ID NO: 23516 - DNA, 60 bp, Artificial
  Synthetic oligonucleotide
tgtcagaacaagttacaagtacctaatcatacagaatactacatgggaagaccactgcac

SEQ ID NO: 23517 - DNA, 60 bp, Artificial
  Synthetic oligonucleotide
accactgcactatgtctagaccatcacctatgggttatttgtccctgctttctcagaggg

SEQ ID NO: 23518 - DNA, 60 bp, Artificial
  Synthetic oligonucleotide
ttaacacttgtgtgagttcaagaacaatgggtcaaatagtgacattctttcaagaggtgc

SEQ ID NO: 23519 - DNA, 60 bp, Artificial
  Synthetic oligonucleotide
taatcacactgtcgctcttggctatattgaagggcatttacaatgtgatgacatgtggac

SEQ ID NO: 23520 - DNA, 52 bp, Artificial
  Synthetic oligonucleotide
ctatcggctcatgcagctaaatttggacatgagtgggttgaatgcaacaatg

SEQ ID NO: 23521 - DNA, 60 bp, Artificial
  Synthetic oligonucleotide
acaattctcaccactacatccaggtctttaacaccactggcctggaactaacactgacaa

SEQ ID NO: 23522 - DNA, 60 bp, Artificial
  Synthetic oligonucleotide
aagacacactttaaaatagtgtcaatgttttttggtgtgacctttatagtctccaacatg

SEQ ID NO: 23523 - DNA, 60 bp, Artificial
  Synthetic oligonucleotide
cactgacaaatgactcactaattggacataaatggtgcaacctttcagatgctcacaaga

SEQ ID NO: 23524 - DNA, 60 bp, Artificial
  Synthetic oligonucleotide
ttgtcccaagctctccctgatatcgatgtcctacacgctatgtagggccagccatctcct

SEQ ID NO: 23525 - DNA, 60 bp, Artificial
  Synthetic oligonucleotide
gcctccagagatggatgctcatagaagccgaaatgaagtgctttggaaacactgctgttg

SEQ ID NO: 23526 - DNA, 60 bp, Artificial
  Synthetic oligonucleotide
gccatctcctgaaagacaaattttgtaaaggatgttctcgtaggggttcctctcccctgg

SEQ ID NO: 23527 - DNA, 60 bp, Artificial
  Synthetic oligonucleotide
tctcccctggtgtgtctgacacaaacatccccacagatctcttgaccttcaagacacact

SEQ ID NO: 23528 - DNA, 60 bp, Artificial
  Synthetic oligonucleotide
gattaagagttgaggccgagaagagcattagcttgatcaacaaagctgtgaactcactaa

SEQ ID NO: 23529 - DNA, 60 bp, Artificial
  Synthetic oligonucleotide
gcacgaccctctatgtccacccaagtttttgctgttgggtcaatctgtagcatggagtct

SEQ ID NO: 23530 - DNA, 60 bp, Artificial
  Synthetic oligonucleotide
gctccatcatttgggagtaagtcagtcctgcattaaatccagcagccccagctgttttgt

SEQ ID NO: 23531 - DNA, 60 bp, Artificial
  Synthetic oligonucleotide
cgtgcccaaagcctcatcgtctcaaccatatgggtgtgtgtagctgtggtctgtacaagc

SEQ ID NO: 23532 - DNA, 60 bp, Artificial
  Synthetic oligonucleotide
tgtggtctgtacaagcaaccagggttacccactaaatggaagagataatgccccaaaagg

SEQ ID NO: 23533 - DNA, 60 bp, Artificial
  Synthetic oligonucleotide
tttgattaaaattccaactcaccgtcacctggttggtaagccgtgcccaaagcctcatcg

SEQ ID NO: 23534 - DNA, 60 bp, Artificial
  Synthetic oligonucleotide
gtaagccgtgcccaaagcctcatcgtctcaaccatatgggtgtgtgtagctgtggtctgt

SEQ ID NO: 23535 - DNA, 60 bp, Artificial
  Synthetic oligonucleotide
gagatgttgagaaaagaatatgaaaggagacaagggacgacacctttgggtttagttgac

SEQ ID NO: 23536 - DNA, 60 bp, Artificial
  Synthetic oligonucleotide
tttgcggtgtacactaggcctaaatctgtcaatgccttgacaacatcactaaggtcttct

SEQ ID NO: 23537 - DNA, 60 bp, Artificial
  Synthetic oligonucleotide
ctggtatctgaatgacactagaagtggtagaacctccttacctaaatgttggatggtgtc

SEQ ID NO: 23538 - DNA, 60 bp, Artificial
  Synthetic oligonucleotide
cacccaccctcagtgtgttcttttgttgactggatttcagttcaacaagattgttgactg

SEQ ID NO: 23539 - DNA, 60 bp, Artificial
  Synthetic oligonucleotide
gtggaactctactgccccccattccaacaagctgcaacaaaatctttctttggtctagct

SEQ ID NO: 23540 - DNA, 59 bp, Artificial
  Synthetic oligonucleotide
ccccattccaacaagctgcaacaaaatctttctttggtctagctgttgttgtgtcaggt

SEQ ID NO: 23541 - DNA, 60 bp, Artificial
  Synthetic oligonucleotide
gagtccaaaggaatgacttgatttccttggagttgctcatcactgtggtttccaattagc

SEQ ID NO: 23542 - DNA, 55 bp, Artificial
  Synthetic oligonucleotide
ctcatcactgtggtttccaattagcgcaaccaattcgcctaggatccactgtgcg

SEQ ID NO: 23543 - DNA, 54 bp, Artificial
  Synthetic oligonucleotide
cattagtctctggatgttgctcacttcagagaagtctagaccatgaagcaggga

SEQ ID NO: 23544 - DNA, 60 bp, Artificial
  Synthetic oligonucleotide
taaggcggtgggtcacgggggcatcctcttacaggatgaccttgggtgttgctgacctga

SEQ ID NO: 23545 - DNA, 60 bp, Artificial
  Synthetic oligonucleotide
tacttggactctctcagattctgagggcaatgatctaccaggtggttattgcctccagag

SEQ ID NO: 23546 - DNA, 60 bp, Artificial
  Synthetic oligonucleotide
ctaaggtcttcttggccttgtttgcaaagacacgccagtgtcaaactcggcattgtccca

SEQ ID NO: 23547 - DNA, 60 bp, Artificial
  Synthetic oligonucleotide
tagtgtgttcttacatttgattaaaattccaactcaccgtcacctggttggtaagccgtg

SEQ ID NO: 23548 - DNA, 60 bp, Artificial
  Synthetic oligonucleotide
cttgttgctagataagtctaatgcagtgcttgtgaaactgggtctataggggtctgtacc

SEQ ID NO: 23549 - DNA, 60 bp, Artificial
  Synthetic oligonucleotide
gactgtaacgtcttgataagagttggaatttgctctctttcaagcacccttcttgttgac

SEQ ID NO: 23550 - DNA, 60 bp, Artificial
  Synthetic oligonucleotide
gtgctcatataacaatgacaactcttccttcttgctgctgtcaagttttcttgcagacaa

SEQ ID NO: 23551 - DNA, 60 bp, Artificial
  Synthetic oligonucleotide
agttttgtcctcaacacaagccttaagtcaccatttgcagataaatttagccagcggtac

SEQ ID NO: 23552 - DNA, 60 bp, Artificial
  Synthetic oligonucleotide
gtacctcagtcttgtgaaatcagtagtgcgactaacctgtaggtcattcatgaacggtac

SEQ ID NO: 23553 - DNA, 60 bp, Artificial
  Synthetic oligonucleotide
cccatttacaaacatgggcaattcaaaatctaaatccaacccatccagttcctcagagtc

SEQ ID NO: 23554 - DNA, 60 bp, Artificial
  Synthetic oligonucleotide
ctgccattcacagtctctatgggaggtacaactgcaagtgttgctggtttgctgacaaga

SEQ ID NO: 23555 - DNA, 60 bp, Artificial
  Synthetic oligonucleotide
gaggttgtactgaagagaacacccattctcctaactcacaggcatttgttaacaccagag

SEQ ID NO: 23556 - DNA, 60 bp, Artificial
  Synthetic oligonucleotide
ggccacactcaagttcccttgagagcctcattttgcttaaagtgatctcaacttcatact

SEQ ID NO: 23557 - DNA, 60 bp, Artificial
  Synthetic oligonucleotide
tcactcccttgtaggtagtgttcaatattcctttgtaatctgtaacctcttgagccatca

SEQ ID NO: 23558 - DNA, 60 bp, Artificial
  Synthetic oligonucleotide
cataccctctgcttatttaaaacctcacgaatgtacatgaaacctccactgccatctcta

SEQ ID NO: 23559 - DNA, 60 bp, Artificial
  Synthetic oligonucleotide
gctcactctcacatcctcctttagcctaaaagcttcctctgagagccccaatctggacct

SEQ ID NO: 23560 - DNA, 60 bp, Artificial
  Synthetic oligonucleotide
gccatctctaacacacttgctacccatactcttacaaaaaccgatgaaacctgaagcaac

SEQ ID NO: 23561 - DNA, 60 bp, Artificial
  Synthetic oligonucleotide
gaaacataaaagctctaaccaatcaaaaccgtctaacccatcttcacttgaagacatagt

SEQ ID NO: 23562 - DNA, 60 bp, Artificial
  Synthetic oligonucleotide
ggggattcctccgaataaaagcacaagttccttagagcagcactggtgaagaaactcttg

SEQ ID NO: 23563 - DNA, 60 bp, Artificial
  Synthetic oligonucleotide
ctagtctgtcagctatggcttctgaattactctgtctattgctcactctcacatcctcct

SEQ ID NO: 23564 - DNA, 60 bp, Artificial
  Synthetic oligonucleotide
acgagagaaagtgatatatgcgacagacatttaaataaactctcaaactctccatctgac

SEQ ID NO: 23565 - DNA, 60 bp, Artificial
  Synthetic oligonucleotide
cgcccaatctggcagcaaatctgtgttgtagttgcctctaccgtcaaccacaggaaccag

SEQ ID NO: 23566 - DNA, 60 bp, Artificial
  Synthetic oligonucleotide
cgtcaaccacaggaaccagtgtaatacccgttctgtgaatgtcctcttttaaactaagca

SEQ ID NO: 23567 - DNA, 60 bp, Artificial
  Synthetic oligonucleotide
aggattcacacggacaaatgtttcaaggagtatcaatgtcttattgaagaacctgtaacc

SEQ ID NO: 23568 - DNA, 60 bp, Artificial
  Synthetic oligonucleotide
ttgacatacgccatgatgaaataccttaatccttgtagaaatgtttgactcctttttgtt

SEQ ID NO: 23569 - DNA, 60 bp, Artificial
  Synthetic oligonucleotide
gggttactgcgtcaaccaacttctcatcaaaatctaaccagcttaacatctctgcgcatg

SEQ ID NO: 23570 - DNA, 60 bp, Artificial
  Synthetic oligonucleotide
ggagcttgaagccctctgttaagaccattggtacttcgacttgagaaagtaatgcctcct

SEQ ID NO: 23571 - DNA, 60 bp, Artificial
  Synthetic oligonucleotide
cataacaggcttctctgaacagagctcctcagctaaagatagcaacaactcaaagtctgg

SEQ ID NO: 23572 - DNA, 60 bp, Artificial
  Synthetic oligonucleotide
actcacaagaattcttcctgcaggattcaatctcgaccaggcatgataggagcttgaagc

SEQ ID NO: 23573 - DNA, 60 bp, Artificial
  Synthetic oligonucleotide
ctccaaagaatgcatgaaaaagagctggactcatgaaagggccccattttgaatgatcta

SEQ ID NO: 23574 - DNA, 60 bp, Artificial
  Synthetic oligonucleotide
gattctctcagcagatcaataagcaaccatctgaatctttcagtcgcccaatctggcagc

SEQ ID NO: 23575 - DNA, 60 bp, Artificial
  Synthetic oligonucleotide
ctacaccctcaatcatgacatcttcttgttccttagacagaaagccatttaaagatgggt

SEQ ID NO: 23576 - DNA, 58 bp, Artificial
  Synthetic oligonucleotide
aaaagcctttcaaagcatcatccccatctttccctattagctgaactaagtattcctc

SEQ ID NO: 23577 - DNA, 58 bp, Artificial
  Synthetic oligonucleotide
aaaactctgatctttgcaacatttgttgggagcagctgcccacatgcatcacagttcc

SEQ ID NO: 23578 - DNA, 60 bp, Artificial
  Synthetic oligonucleotide
ttatgaattgctcagtaatcaaaccataaagatcagatgaattgtgaagtatgccctgtc

SEQ ID NO: 23579 - DNA, 60 bp, Artificial
  Synthetic oligonucleotide
ccctgtgcatctcatacattaaaaggaagtcctcctgagccatcttcacttttagattgt

SEQ ID NO: 23580 - DNA, 59 bp, Artificial
  Synthetic oligonucleotide
agatttgctatagcagacactaaagtccacaaactcgcaccattcgctgaagacctcaa

SEQ ID NO: 23581 - DNA, 60 bp, Artificial
  Synthetic oligonucleotide
ctcccacaatgtctttaagcaattgctcattgagtctttcctcataattcagatgaaccc

SEQ ID NO: 23582 - DNA, 60 bp, Artificial
  Synthetic oligonucleotide
cagcacaggtccccattgttcacagccatcttcatatcacagattgccctctcaaactct

SEQ ID NO: 23583 - DNA, 60 bp, Artificial
  Synthetic oligonucleotide
gagcctccatcgagcactagaggggaatcggaacactcaggccccacaatttcataagca

SEQ ID NO: 23584 - DNA, 60 bp, Artificial
  Synthetic oligonucleotide
ctaatgaatggccacaaccctgtcagcaggctttgcacttccttttctgattctagggcc

SEQ ID NO: 23585 - DNA, 60 bp, Artificial
  Synthetic oligonucleotide
cccaaccttcttttcaacatgcctgtgcaatatgcctcagcaacactgattggtacttct

SEQ ID NO: 23586 - DNA, 60 bp, Artificial
  Synthetic oligonucleotide
gtgacacacaataactcagtagctctctagaaacccctggtctctttaaatcttccacag

SEQ ID NO: 23587 - DNA, 60 bp, Artificial
  Synthetic oligonucleotide
cctgtcgttgggaagtaataacatctcaccgataatcagacctgcttttttcaaggtttc

SEQ ID NO: 23588 - DNA, 60 bp, Artificial
  Synthetic oligonucleotide
acaggctcttctttccttaacaaatgtctacacctgtccaaccaattgcagcaggactca

SEQ ID NO: 23589 - DNA, 60 bp, Artificial
  Synthetic oligonucleotide
ccctcgatggatccagatgctctcagcaccacattctttacagttgctaagcttggttct

SEQ ID NO: 23590 - DNA, 60 bp, Artificial
  Synthetic oligonucleotide
tcaaggtttccatttcagaaggttgtgtcttataaacatgtgccacaaagttcaaaatga

SEQ ID NO: 23591 - DNA, 60 bp, Artificial
  Synthetic oligonucleotide
cgattgtatcgggatctagattataccttccctttgtcttaaatctttctgccattgaag

SEQ ID NO: 23592 - DNA, 60 bp, Artificial
  Synthetic oligonucleotide
gggttgtgggaagaggaggttcatcaaaattattctccagtgatgtttggtttgcaattc

SEQ ID NO: 23593 - DNA, 60 bp, Artificial
  Synthetic oligonucleotide
gcacatgggacactcaggggccaatgagtcagagtgggcactcgacaacaccaaagtctg

SEQ ID NO: 23594 - DNA, 60 bp, Artificial
  Synthetic oligonucleotide
tttacacttgacattatgcaatgctgcagatacaaacttggttaacagaggtgtttcctc

SEQ ID NO: 23595 - DNA, 60 bp, Artificial
  Synthetic oligonucleotide
caaagtctggaacatttgtgaactctgacacacagtcccatagaacaggctcttctttcc

SEQ ID NO: 23596 - DNA, 60 bp, Artificial
  Synthetic oligonucleotide
gtcaggatcaaaatccctaatttcatgaacacttgtctcactcctaattactttcaagac

SEQ ID NO: 23597 - DNA, 60 bp, Artificial
  Synthetic oligonucleotide
tggtacttctacagctttatgtaaatgccactttaacacatttagaactggcccgagatc

SEQ ID NO: 23598 - DNA, 60 bp, Artificial
  Synthetic oligonucleotide
ccagtccaggaatccaagacagacaaggactctgttatgaaatccttataatttgtaggc

SEQ ID NO: 23599 - DNA, 60 bp, Artificial
  Synthetic oligonucleotide
gttcaataaatttctcgaagcatttgatctgatctgtcaatctatcaggggtctctttgg

SEQ ID NO: 23600 - DNA, 60 bp, Artificial
  Synthetic oligonucleotide
gcccagagttctgcaagagttgctggtttgagaggaaggggcttattaagtgccagaacc

SEQ ID NO: 23601 - DNA, 60 bp, Artificial
  Synthetic oligonucleotide
gtgccagaaccattatctgtgcatgacatgtctcacactcctcctcactgtctccaacag

SEQ ID NO: 23602 - DNA, 60 bp, Artificial
  Synthetic oligonucleotide
tcaggcttgagaagtctccaacagcccctcctccagaggcaacgaaccctccaccctaca

SEQ ID NO: 23603 - DNA, 57 bp, Artificial
  Synthetic oligonucleotide
ggggcccacgccagggatgagttcactcgatgtcctccacatgcacagggtcatcaa

SEQ ID NO: 23604 - DNA, 60 bp, Artificial
  Synthetic oligonucleotide
caagtcatctatagaacattcacttttaagggtggctgaagactctgaaccggaccatga

SEQ ID NO: 23605 - DNA, 60 bp, Artificial
  Synthetic oligonucleotide
gaacctctcagaaattaggccgtaaaaatcagatgtattttgcagaattccttgaccctt

SEQ ID NO: 23606 - DNA, 60 bp, Artificial
  Synthetic oligonucleotide
cccaactttgacttgataaaggacttcatcatagccgtaacaacattaaagggaacctca

SEQ ID NO: 23607 - DNA, 60 bp, Artificial
  Synthetic oligonucleotide
taaactcagcagcaaagttccccttcacacttttagggctgataaatttgttcagctgat

SEQ ID NO: 23608 - DNA, 60 bp, Artificial
  Synthetic oligonucleotide
ggtctattggatactgagcatacctaaggagattcaaagtgcgttcctgaacaatgttac

SEQ ID NO: 23609 - DNA, 60 bp, Artificial
  Synthetic oligonucleotide
ccgtctttcaggtaatccttaatgttagccgtgttcagatgccagatgactttgtctcct

SEQ ID NO: 23610 - DNA, 60 bp, Artificial
  Synthetic oligonucleotide
cagcaatctagaactgcagacctgtttatggcaccactgtactgaaccccaatgttgtta

SEQ ID NO: 23611 - DNA, 60 bp, Artificial
  Synthetic oligonucleotide
cagttcattcctgattagcctcagctgtgccttatcttgtagtgccaaactcaagtcatc

SEQ ID NO: 23612 - DNA, 60 bp, Artificial
  Synthetic oligonucleotide
agcactgaaagtattcctcatcatggaatgtccttgtacagacagcctgggccatcttag

SEQ ID NO: 23613 - DNA, 59 bp, Artificial
  Synthetic oligonucleotide
aaactatgccactgcaaaccctgagaacccctaacagtgatcatcttctgaatcatatc

SEQ ID NO: 23614 - DNA, 60 bp, Artificial
  Synthetic oligonucleotide
gctcttgtaatggttaaatttcccagacaatttgttagcattcatctgcagcaataggga

SEQ ID NO: 23615 - DNA, 60 bp, Artificial
  Synthetic oligonucleotide
accatagtggagaagacttcataagcactctggctctggtgtgaatgtgacaatcgattc

SEQ ID NO: 23616 - DNA, 60 bp, Artificial
  Synthetic oligonucleotide
cccatccactcagattctaccaagtgaccattaacacttaaatccttcatgtgagcaagt

SEQ ID NO: 23617 - DNA, 60 bp, Artificial
  Synthetic oligonucleotide
gagctgtggttgagttggtgggatcaacactacagcagattgccgatcctgcagaacaca

SEQ ID NO: 23618 - DNA, 60 bp, Artificial
  Synthetic oligonucleotide
atagtcagctgctccgccctctatcagaacttcatcgacctcttcacaagaattcaaccc

SEQ ID NO: 23619 - DNA, 60 bp, Artificial
  Synthetic oligonucleotide
gccagtgaaatgcttgagagtctctttaaatctgattgattatcaggatccatcgcttga

SEQ ID NO: 23620 - DNA, 60 bp, Artificial
  Synthetic oligonucleotide
caccttcaaagatgtaaccatccttcacaaccaaaggcaccacatttacatcaggtccca

SEQ ID NO: 23621 - DNA, 58 bp, Artificial
  Synthetic oligonucleotide
aggggtaatatgcagataagttcaaccacgacaatcctagctcttcatcattaagtat

SEQ ID NO: 23622 - DNA, 60 bp, Artificial
  Synthetic oligonucleotide
ggaacacaactctcctacaaccgcatcgtttacagaataacactttgagcattccccagt

SEQ ID NO: 23623 - DNA, 60 bp, Artificial
  Synthetic oligonucleotide
ggcaagatcaccccttatcatgggacagaagccttccaagccaaaggcacctccaaccac

SEQ ID NO: 23624 - DNA, 60 bp, Artificial
  Synthetic oligonucleotide
gcaccggggatcctaggcaattttggaagtcaaaacctgagagtgacgtttcggagcatc

SEQ ID NO: 23625 - DNA, 60 bp, Artificial
  Synthetic oligonucleotide
gaaaccacgtgaatgagcccaaggtcctagatgttgcaacaaaaggcctagcaaaagact

SEQ ID NO: 23626 - DNA, 60 bp, Artificial
  Synthetic oligonucleotide
cctctgtgctaactaccctttcatctgctagggattcatgtgacctatcatgagaaattg

SEQ ID NO: 23627 - DNA, 60 bp, Artificial
  Synthetic oligonucleotide
gttggctcaacaccgtttacttccaaagacatcatttctgtaaaactggattcagacaag

SEQ ID NO: 23628 - DNA, 60 bp, Artificial
  Synthetic oligonucleotide
agttttctctctcaggtcctctgacacatttactacccaatgtcctacagaggccaacaa

SEQ ID NO: 23629 - DNA, 60 bp, Artificial
  Synthetic oligonucleotide
gtggtaaagggcttttaagtttgggttcacctaagacccaagaaccaatctccaaagctg

SEQ ID NO: 23630 - DNA, 60 bp, Artificial
  Synthetic oligonucleotide
gcgactgatacggatcgcctgacaaataggctgcagtgaactcttcatgaagaaggcccg

SEQ ID NO: 23631 - DNA, 61 bp, Artificial
  Synthetic oligonucleotide
catggcttcacaatttacatccaacattacacataaatccagaaatttaactctaggtgac

SEQ ID NO: 23632 - DNA, 53 bp, Artificial
  Synthetic oligonucleotide
tccaaccgtcatgagatcctcttttaatgagttcagcttcaccaggtcttccc

SEQ ID NO: 23633 - DNA, 60 bp, Artificial
  Synthetic oligonucleotide
tcccattcaatttgaaaccatctggaaccaccatcggcaatccaggacacaacactcgat

SEQ ID NO: 23634 - DNA, 64 bp, Artificial
  Synthetic oligonucleotide
cgaaatatctcatctcagttaggccgtattgaatcaatttgcttgaatttatatagaactctcc

SEQ ID NO: 23635 - DNA, 60 bp, Artificial
  Synthetic oligonucleotide
ctgctcttagcatctgaaagtgtgtctagagaaggccaattaatgttctgtaatgttgcc

SEQ ID NO: 23636 - DNA, 60 bp, Artificial
  Synthetic oligonucleotide
ccacatttacatcaggtcccactctttcaaagtcaagggtatctaatctcagtgcatccc

SEQ ID NO: 23637 - DNA, 60 bp, Artificial
  Synthetic oligonucleotide
ggtccaggctataagatagaaggcccagtgacacattgaacttcatagagaaaacggcgt

SEQ ID NO: 23638 - DNA, 60 bp, Artificial
  Synthetic oligonucleotide
attaatcttgtgaacattttggttctcaggtctcctatgtacagctctctgttccctcca

SEQ ID NO: 23639 - DNA, 55 bp, Artificial
  Synthetic oligonucleotide
ggagatccttgtgatggtattcagagacatatgccatggtgaagtatcttaagtt

SEQ ID NO: 23640 - DNA, 59 bp, Artificial
  Synthetic oligonucleotide
cagcagacattaataaagacctcaactcctcttggtcagctggttctaatggatttaca

SEQ ID NO: 23641 - DNA, 60 bp, Artificial
  Synthetic oligonucleotide
gttgcgaaatgcttgaaactcttgaattatttccctcttcacatccaagctgctcatatg

SEQ ID NO: 23642 - DNA, 60 bp, Artificial
  Synthetic oligonucleotide
gacaacaacactcttattgctggctagatctagtgcagtagcacacccactaaccaccag

SEQ ID NO: 23643 - DNA, 60 bp, Artificial
  Synthetic oligonucleotide
tatctggcccctgtgaattgtaagactgaggggattcttgactataaaaacaaagattct

SEQ ID NO: 23644 - DNA, 60 bp, Artificial
  Synthetic oligonucleotide
agaaaaggctaaaagactgaacaacagggttctaaatctctcatttgcccactccggaag

SEQ ID NO: 23645 - DNA, 60 bp, Artificial
  Synthetic oligonucleotide
cttaccctttctcgagaaaacttcagacaactggcagacagccgttgcaaccaatttgtc

SEQ ID NO: 23646 - DNA, 57 bp, Artificial
  Synthetic oligonucleotide
gagttactctccctttcacttatcctggtctcattgaacaacctgtccctatctaac

SEQ ID NO: 23647 - DNA, 60 bp, Artificial
  Synthetic oligonucleotide
aatcattcaataggctgtccaataactctggtttatccccaactcttagtgtgtacatct

SEQ ID NO: 23648 - DNA, 60 bp, Artificial
  Synthetic oligonucleotide
cctctctactcttctcatgtggcacatgcataaaatggtggaaataccttttaatgtggt

SEQ ID NO: 23649 - DNA, 60 bp, Artificial
  Synthetic oligonucleotide
ttcatcatagctgataccacattaaaaggtatttccaccattttatgcatgtgccacatg

SEQ ID NO: 23650 - DNA, 60 bp, Artificial
  Synthetic oligonucleotide
gacttcatcatagctgttaccacattaaaaggtatttccaccattttatgcatgtgccac

SEQ ID NO: 23651 - DNA, 53 bp, Artificial
  Synthetic oligonucleotide
ctgagtgtcagcaacaggtgccccatctgcaagatgcctctccccacaaaact

SEQ ID NO: 23652 - DNA, 60 bp, Artificial
  Synthetic oligonucleotide
ccacattaaaaggtatttccaccattttatgcatgtgccacatgagaagagtagagaggt

SEQ ID NO: 23653 - DNA, 60 bp, Artificial
  Synthetic oligonucleotide
accacattaaaaggtatttccaccattttatgcatgtgccacatgagaagagtagagagg

SEQ ID NO: 23654 - DNA, 60 bp, Artificial
  Synthetic oligonucleotide
tgtccaaaacagacataatgtgactaggaatctgaccatttaactgcatggtctgatgga

SEQ ID NO: 23655 - DNA, 60 bp, Artificial
  Synthetic oligonucleotide
gttatgtagtatcccttgccccatgtccaaaacagacataatgtgactaggaatctgacc

SEQ ID NO: 23656 - DNA, 60 bp, Artificial
  Synthetic oligonucleotide
gtctcaccactttaggcttcacagcccaaaagaagttttggttgttcaacaccagcggct

SEQ ID NO: 23657 - DNA, 60 bp, Artificial
  Synthetic oligonucleotide
ctcaatttgtctcaccactttaggcttcacagcccaaaagaagttttggttgttcaacac

SEQ ID NO: 23658 - DNA, 60 bp, Artificial
  Synthetic oligonucleotide
gatattctggacactattttagtgctgactccatttgcaatgcattgatcacagatagta

SEQ ID NO: 23659 - DNA, 60 bp, Artificial
  Synthetic oligonucleotide
actcttctacttgtcatcaactttgtcctcaaaactaacctaagatctccaaaacttgat

SEQ ID NO: 23660 - DNA, 60 bp, Artificial
  Synthetic oligonucleotide
atacaaatcagaagtgttatgtagtatcccttgccccatgtccaaaacagacataatgtg

SEQ ID NO: 23661 - DNA, 60 bp, Artificial
  Synthetic oligonucleotide
tattcttgccactattttggtgctgactccatttgcaatgcattgatcacagatggtatc

SEQ ID NO: 23662 - DNA, 60 bp, Artificial
  Synthetic oligonucleotide
aaatcagaagtgttgtgtagtatcccttgccccatgtccaaaacagacataatgtgactg

SEQ ID NO: 23663 - DNA, 60 bp, Artificial
  Synthetic oligonucleotide
caaatcagaagtgttatgtagtatcccttgccccatgtccaaaacagacataatgtgact

SEQ ID NO: 23664 - DNA, 60 bp, Artificial
  Synthetic oligonucleotide
ccctttcaattcttggacacattcatccatggccaagtgtcgcctaggatccactgtgcg

SEQ ID NO: 23665 - DNA, 60 bp, Artificial
  Synthetic oligonucleotide
cccaagctttgattcttaacgtttgataggctatgaattaatcgttgatattcctggtcc

SEQ ID NO: 23666 - DNA, 60 bp, Artificial
  Synthetic oligonucleotide
caccaccaagtagtctaatgaagagtcccactgcaagcctttgaaccaccacttctgaac

SEQ ID NO: 23667 - DNA, 60 bp, Artificial
  Synthetic oligonucleotide
gcatctgactcaccaccaagaagcctaataaagagtcccactgcaagcctttgaaccacc

SEQ ID NO: 23668 - DNA, 60 bp, Artificial
  Synthetic oligonucleotide
gcacttctacaactttgtgaaggtgccatttcagtatacttttaacagaatcaagatcaa

SEQ ID NO: 23669 - DNA, 60 bp, Artificial
  Synthetic oligonucleotide
gcacttccacaactttgtgaagatgccatttcagtatacttttaacagaatcaagatcta

SEQ ID NO: 23670 - DNA, 60 bp, Artificial
  Synthetic oligonucleotide
accccaagctttgattcttaacgtttgatagactatgaattaatcgttgatattcctggt

SEQ ID NO: 23671 - DNA, 60 bp, Artificial
  Synthetic oligonucleotide
agaagaatctctttggatcacaataaaatgaaccctgttctgacatcacaccgttgtcag

SEQ ID NO: 23672 - DNA, 60 bp, Artificial
  Synthetic oligonucleotide
gagtcccactgcaagcctttgaaccaccacttctgaacttgacttgcattccactaccaa

SEQ ID NO: 23673 - DNA, 60 bp, Artificial
  Synthetic oligonucleotide
taatgaagagtcccactgcaagcctttgaaccaccacttctgaacttgacttgcattcca

SEQ ID NO: 23674 - DNA, 60 bp, Artificial
  Synthetic oligonucleotide
gaacatggttcattcccagttggtcttcaatttgtctcaccactttaggcttcacagccc

SEQ ID NO: 23675 - DNA, 55 bp, Artificial
  Synthetic oligonucleotide
tcattcccagttggtcttcaatttgtctcaccactttaggcttcacagcccaaaa

SEQ ID NO: 23676 - DNA, 60 bp, Artificial
  Synthetic oligonucleotide
gaccactacttgtgcctgagatgtcatcaaacaatgctcaggaattctgaactctgtcac

SEQ ID NO: 23677 - DNA, 60 bp, Artificial
  Synthetic oligonucleotide
cctgacccagacacagactgatcgactgccaccaccttcaaaatgacctctttgttctgg

SEQ ID NO: 23678 - DNA, 60 bp, Artificial
  Synthetic oligonucleotide
acaccctcgaagttagagacaacataccccattgcgatatcctccacaaacatagctctg

SEQ ID NO: 23679 - DNA, 60 bp, Artificial
  Synthetic oligonucleotide
gggggccccaacggggcccccacgggggatccccgggggtcttgggctgcgtcactcaat

SEQ ID NO: 23680 - DNA, 60 bp, Artificial
  Synthetic oligonucleotide
cctgacccagacacagactgatcgactgccaccaccttcaaaataacctctttgttctgg

SEQ ID NO: 23681 - DNA, 60 bp, Artificial
  Synthetic oligonucleotide
caggtgactaatgatgccaaggttttcattcatcatgtctaaagcaatgcaaacatccag

SEQ ID NO: 23682 - DNA, 60 bp, Artificial
  Synthetic oligonucleotide
gtcttcaacaggtgactaatgatgccaaggttttcattcatcatgtctaaagcaatgcaa

SEQ ID NO: 23683 - DNA, 51 bp, Artificial
  Synthetic oligonucleotide
ttttaattcttgtgttcacactgttgtcagccatcttggctaaggcaactt

SEQ ID NO: 23684 - DNA, 60 bp, Artificial
  Synthetic oligonucleotide
caaaaaaagttttggttgttcaacactaatggcttttggggctctttaactgtagaaaac

SEQ ID NO: 23685 - DNA, 60 bp, Artificial
  Synthetic oligonucleotide
tcataatgtcttcctgatctacagtcagttttccatttagagatgggttcaccacagcac

SEQ ID NO: 23686 - DNA, 60 bp, Artificial
  Synthetic oligonucleotide
atagtttaaaagttctttacacacacctggtgtctgcacatcctcagtgtcccttaagga

SEQ ID NO: 23687 - DNA, 60 bp, Artificial
  Synthetic oligonucleotide
aatcatggtgtcttcctgatctacagtcagttttccattcagagatgggttcaccacagc

SEQ ID NO: 23688 - DNA, 60 bp, Artificial
  Synthetic oligonucleotide
gtcttaggttcccctaagacccatgcacccagttctattgcagttgataaggagatgcac

SEQ ID NO: 23689 - DNA, 60 bp, Artificial
  Synthetic oligonucleotide
tctcctaagacccatgcacccagttctattgcagttgataaagagatgcacatgtagtcc

SEQ ID NO: 23690 - DNA, 60 bp, Artificial
  Synthetic oligonucleotide
ctgcggttaccgtctacccagtctctaacatctgtctcgcaattcaaaaggaatgggtca

SEQ ID NO: 23691 - DNA, 60 bp, Artificial
  Synthetic oligonucleotide
ctacggttgccatctacccagtctctaacatctgtctcgcaattcaataagaatgggtca

SEQ ID NO: 23692 - DNA, 60 bp, Artificial
  Synthetic oligonucleotide
ctgcggttgccatctacccagtctctaacatctgtctcgcaattcaaaaggaatgggtca

SEQ ID NO: 23693 - DNA, 60 bp, Artificial
  Synthetic oligonucleotide
ctataactacggttgccatctacccagtctctaacatctgtctcgcaattcaataagaat

SEQ ID NO: 23694 - DNA, 60 bp, Artificial
  Synthetic oligonucleotide
ccttttgaattgcgagacagatgttagagactgggtagatggcaaccgcagttacaggat

SEQ ID NO: 23695 - DNA, 60 bp, Artificial
  Synthetic oligonucleotide
ctctgttgtgggactacatgtgcatctctttatcaactgcaatagaactgggtgcatggg

SEQ ID NO: 23696 - DNA, 60 bp, Artificial
  Synthetic oligonucleotide
tggtaactagtcatgatgcagtcccagttgccacgacctgaatcaagggcaatgtaactc

SEQ ID NO: 23697 - DNA, 56 bp, Artificial
  Synthetic oligonucleotide
ggggtacattgcccttgattcaggtcgtggcaactgggactgcatcatgactagtt

SEQ ID NO: 23698 - DNA, 60 bp, Artificial
  Synthetic oligonucleotide
agtcatgatgcagtcccagttgccacgacctgaatcaagggcaatgtaacttccgcccca

SEQ ID NO: 23699 - DNA, 60 bp, Artificial
  Synthetic oligonucleotide
catgacctgtcaggggtctgatgacataagaaagctccttgagtcacaaggaaggaagga

SEQ ID NO: 23700 - DNA, 60 bp, Artificial
  Synthetic oligonucleotide
catgacctgtcaggggtctgatgacataagaaagctccttgaatcacaaggaaggaagga

SEQ ID NO: 23701 - DNA, 60 bp, Artificial
  Synthetic oligonucleotide
tgatatccttccttccttgtgattcaaggagctttcttatgtcatcagacccctgacagg

SEQ ID NO: 23702 - DNA, 60 bp, Artificial
  Synthetic oligonucleotide
acactttgccacggctgtgttgccaaagcactttaactcagcttcaatcagcatccacct

SEQ ID NO: 23703 - DNA, 60 bp, Artificial
  Synthetic oligonucleotide
gaccaggtggatgctgattgaagctgagttaaagtgctttggcaacacagccgtggcagt

SEQ ID NO: 23704 - DNA, 60 bp, Artificial
  Synthetic oligonucleotide
ccacggctgtgttgccaaagcactttaactcagcttcaatcagcatccacctggtcaaac

SEQ ID NO: 23705 - DNA, 60 bp, Artificial
  Synthetic oligonucleotide
tcaatcagcatccacctggtcaaacagtacccccctggtgtgtccttaccttcagaatct

SEQ ID NO: 23706 - DNA, 60 bp, Artificial
  Synthetic oligonucleotide
gtgtccatgtgaatgttcccagcaatctcctgctgatgtaaatatctctggttctctgtg

SEQ ID NO: 23707 - DNA, 60 bp, Artificial
  Synthetic oligonucleotide
gaaacatggtcatgacctgtcaggggtctgatgacataagaaagctccttgaatcacaag

SEQ ID NO: 23708 - DNA, 60 bp, Artificial
  Synthetic oligonucleotide
gaaacatggtcatgacctgtcaggggtctgatgacataagaaagctccttgagtcacaag

SEQ ID NO: 23709 - DNA, 60 bp, Artificial
  Synthetic oligonucleotide
gggaagaccattgtcagttctcaaggccatctcccatcggctatcttgggctcctttcac

SEQ ID NO: 23710 - DNA, 60 bp, Artificial
  Synthetic oligonucleotide
ctctggttctctgtgaaaggagcccaagatagccgatgggagatggtcttgagaactgac

SEQ ID NO: 23711 - DNA, 60 bp, Artificial
  Synthetic oligonucleotide
cagttcaaacaagatgctaagtattcacacggaattgatgttacagacctttttgctgca

SEQ ID NO: 23712 - DNA, 60 bp, Artificial
  Synthetic oligonucleotide
gtgaaaggagcccaagatagccgatgggagatggccttgagaactgacaatggtcttccc

SEQ ID NO: 23713 - DNA, 60 bp, Artificial
  Synthetic oligonucleotide
gggctcctttcacaaagaaccagagatatttacatcagcaggagattgctgggaacattc

SEQ ID NO: 23714 - DNA, 60 bp, Artificial
  Synthetic oligonucleotide
gtgaatgttcccagcaatctcctgctgatgtaaatatctctggttctttgtgaaaggagc

SEQ ID NO: 23715 - DNA, 60 bp, Artificial
  Synthetic oligonucleotide
ttttgctgcacagccaggtttgaccagtgctgttatagaggcactcccccgaaacatggt

SEQ ID NO: 23716 - DNA, 60 bp, Artificial
  Synthetic oligonucleotide
ctctataacagcactggtcaaacctggctgtgcagcaaaaaggtctgtaacatcaattcc

SEQ ID NO: 23717 - DNA, 60 bp, Artificial
  Synthetic oligonucleotide
gatggtcttgagaactgacaatggtcttcccaggttgtgttctgaattacaagatattgg

SEQ ID NO: 23718 - DNA, 60 bp, Artificial
  Synthetic oligonucleotide
cagttcaagcaagatgctaagtattcacacggaattgatgttacagacctttttgctgca

SEQ ID NO: 23719 - DNA, 60 bp, Artificial
  Synthetic oligonucleotide
ggtcttcccaggttgtgttctgaattataagatattggtaactagtcatgatgcagtccc

SEQ ID NO: 23720 - DNA, 60 bp, Artificial
  Synthetic oligonucleotide
ttgagaactgacaatggtcttcccaggttgtgttctgaattataagatattggtaactag

SEQ ID NO: 23721 - DNA, 60 bp, Artificial
  Synthetic oligonucleotide
aagatattggtaactagtcatgatgcagtcccagttgccacgacctgaatcaagggcaat

SEQ ID NO: 23722 - DNA, 60 bp, Artificial
  Synthetic oligonucleotide
gggactgcatcatgactagttaccaatatcttataattcagaacacaacctgggaagacc

SEQ ID NO: 23723 - DNA, 51 bp, Artificial
  Synthetic oligonucleotide
cagttcaagcaagatgctaagtattcacacggaattgatgttacagacctt

SEQ ID NO: 23724 - DNA, 60 bp, Artificial
  Synthetic oligonucleotide
tcggcttcgaatctaaatctacagtggtgttatcccaagccctcccttgaacttgagacc

SEQ ID NO: 23725 - DNA, 60 bp, Artificial
  Synthetic oligonucleotide
gtgctccatgtcactcgtcatgtaggtgccagatgcaaaacagttgagggtgctggggtg

SEQ ID NO: 23726 - DNA, 60 bp, Artificial
  Synthetic oligonucleotide
gactagagagcaacttgaagccttctgtgagcaagggactgggatgcacctgagatagga

SEQ ID NO: 23727 - DNA, 60 bp, Artificial
  Synthetic oligonucleotide
ggtcttcttggttttcaggtcccgagagcctgtaggaatatttgtcactcaactctgggg

SEQ ID NO: 23728 - DNA, 60 bp, Artificial
  Synthetic oligonucleotide
ctgaatgacccctgggtgtctgatatcacaagctctttgagtgatttactataggcaacc

SEQ ID NO: 23729 - DNA, 60 bp, Artificial
  Synthetic oligonucleotide
gaccactacttgtgtctgagatgtcatcaaacaatgctcaggaattctgaactctgtcac

SEQ ID NO: 23730 - DNA, 60 bp, Artificial
  Synthetic oligonucleotide
acaataggcttcagccacattaataggtacttctacaactttgtgaaggtgccatttcag

SEQ ID NO: 23731 - DNA, 55 bp, Artificial
  Synthetic oligonucleotide
aaaatcctccaccaatcttgtcatcagttttgtgttgaggtctcctacatagagc

SEQ ID NO: 23732 - DNA, 60 bp, Artificial
  Synthetic oligonucleotide
ctcgtctttgagtcttaatgtctcatcggtgaaacccagtctagatctgcttttgtgctc

SEQ ID NO: 23733 - DNA, 60 bp, Artificial
  Synthetic oligonucleotide
gtgtgtggtgctaaactgctggtccactgtggctacaccatcggtcctttcaacacagct

SEQ ID NO: 23734 - DNA, 60 bp, Artificial
  Synthetic oligonucleotide
cccgctatccattgttctgctgacctgaagatcattcataaatggagtcaagtgttcgtc

SEQ ID NO: 23735 - DNA, 60 bp, Artificial
  Synthetic oligonucleotide
gttggcacttcctccctttcaagaactcttctacttgtcatcaactttgtcctcaaaact

SEQ ID NO: 23736 - DNA, 60 bp, Artificial
  Synthetic oligonucleotide
aacgagattctaacaccctcgaagttagagacaacataccccattgcgatatcctccaca

SEQ ID NO: 23737 - DNA, 60 bp, Artificial
  Synthetic oligonucleotide
gccaaatcaaaactggcctgcccagtaaataatgggaggcttgcaacaaccgacacacca

SEQ ID NO: 23738 - DNA, 60 bp, Artificial
  Synthetic oligonucleotide
ttcgttgacattcttacatgatcgatctgcaccactaggcccacaatgacattctcagcc

SEQ ID NO: 23739 - DNA, 60 bp, Artificial
  Synthetic oligonucleotide
cacctacatcaggagccttctccttaggcggcaattgaacaccatcaaccatcacgttgc

SEQ ID NO: 23740 - DNA, 60 bp, Artificial
  Synthetic oligonucleotide
atagaattgattagtgacaaggatattgaggacaaagtcttgaataacctcatttgctca

SEQ ID NO: 23741 - DNA, 60 bp, Artificial
  Synthetic oligonucleotide
gcacctaagctcgatagggactctaataactcccttctgtcagtcaatttgaatttgccc

SEQ ID NO: 23742 - DNA, 60 bp, Artificial
  Synthetic oligonucleotide
taatccggtgtcaaaatccagccagcttgtcatttcttcacacattccagccaaaacttc

SEQ ID NO: 23743 - DNA, 60 bp, Artificial
  Synthetic oligonucleotide
gctcaatgaacttctcaaaacacttgatctgatctgttaatcggtcaggcgtttcttttg

SEQ ID NO: 23744 - DNA, 60 bp, Artificial
  Synthetic oligonucleotide
gcctaactcatctagttttggtataacaacactcttgttacttgataagtccaaagcagt

SEQ ID NO: 23745 - DNA, 60 bp, Artificial
  Synthetic oligonucleotide
ctaccatcaacaataggaaccaaagtcacgcccgacttctgcagatcatgcttcaggttt

SEQ ID NO: 23746 - DNA, 60 bp, Artificial
  Synthetic oligonucleotide
atagcctccaaaatgtccagcactctatcattcactaacataaccatctgacccactatc

SEQ ID NO: 23747 - DNA, 60 bp, Artificial
  Synthetic oligonucleotide
gtagacggtaaccccttgagccatccacccagtctttcacatcttggtcttcaatggccc

SEQ ID NO: 23748 - DNA, 56 bp, Artificial
  Synthetic oligonucleotide
tgacagaaactcatggaagcagatcatctcgagccactccgcagcatctgaacccc

SEQ ID NO: 23749 - DNA, 60 bp, Artificial
  Synthetic oligonucleotide
ctagagcacgaatgcttgcagatcgtaactaaggacgagagctccatcaacatctctggc

SEQ ID NO: 23750 - DNA, 60 bp, Artificial
  Synthetic oligonucleotide
gccagagatgttgatggagctctcgtccttagttacgatctgcaagcattcgtgctctag

SEQ ID NO: 23751 - DNA, 60 bp, Artificial
  Synthetic oligonucleotide
ccgtccatgaatgtctaaaagtttccttatgtcgtcagaaccttgagttgtaatcaccat

SEQ ID NO: 23752 - DNA, 60 bp, Artificial
  Synthetic oligonucleotide
cgtccatgaatgtctaaaagcttccttatgtcgtcagaaccttgagttgtaatcaccatg

SEQ ID NO: 23753 - DNA, 60 bp, Artificial
  Synthetic oligonucleotide
acctcctggcatgtcctttcctgaggagtctgtcagagaccatgagaagaatgctttcaa

SEQ ID NO: 23754 - DNA, 60 bp, Artificial
  Synthetic oligonucleotide
atccttccgtccatgaatgtctaaaagtttccttatgtcgtcagaaccttgagttgtaat

SEQ ID NO: 23755 - DNA, 60 bp, Artificial
  Synthetic oligonucleotide
ggttcaagatcacaaattcttggaagatcttgggacaacacaagtgttgatctaacaaag

SEQ ID NO: 23756 - DNA, 60 bp, Artificial
  Synthetic oligonucleotide
tagccagagatgttgatggagctctcgtccttagttacgatctgcaagcattcgtgctct

SEQ ID NO: 23757 - DNA, 60 bp, Artificial
  Synthetic oligonucleotide
cacaagacatggtgattacaactcaaggttctgacgacataaggaaacttttggatattc

SEQ ID NO: 23758 - DNA, 59 bp, Artificial
  Synthetic oligonucleotide
ttttgaatcccttctcatcatgtggctttctaaaacaatgaatgtaatgcttgttggct

SEQ ID NO: 23759 - DNA, 60 bp, Artificial
  Synthetic oligonucleotide
gctatgagcttggcatctttcaacacatctgttttcacagtgtgggtgaactgactcagg

SEQ ID NO: 23760 - DNA, 60 bp, Artificial
  Synthetic oligonucleotide
cactgtgaaaacagatgtgttgaaagatgccaagctcatagctgacagcatcgacttcaa

SEQ ID NO: 23761 - DNA, 60 bp, Artificial
  Synthetic oligonucleotide
ccaccacagtattttcccatgctcttcccacaatcgaggtccttgatgcaatatagggcc

SEQ ID NO: 23762 - DNA, 60 bp, Artificial
  Synthetic oligonucleotide
ggccttacattgcatcaaggacttcgattgtgggaagagcatgggaaaatactgtggttg

SEQ ID NO: 23763 - DNA, 60 bp, Artificial
  Synthetic oligonucleotide
ccttcctcaagtctgtcaaggacttctcctctgacccatttcccacagggaacttcctgt

SEQ ID NO: 23764 - DNA, 60 bp, Artificial
  Synthetic oligonucleotide
ggggccgaggttgtcaagcccttccgactcaggaattgaagatctatgtggaaaccaagt

SEQ ID NO: 23765 - DNA, 60 bp, Artificial
  Synthetic oligonucleotide
gaatttcgttaacaatggaacttcatcaccccagacataaaaccttgatttgaactcagc

SEQ ID NO: 23766 - DNA, 60 bp, Artificial
  Synthetic oligonucleotide
ggtgtccacctcattttcgttgatgctaggtcactcatgaagggcaagaggtgtctctca

SEQ ID NO: 23767 - DNA, 60 bp, Artificial
  Synthetic oligonucleotide
ggagaacactctagtaaggaagttttcgtagccttcaggcatgcatcgtcccacaacccc

SEQ ID NO: 23768 - DNA, 60 bp, Artificial
  Synthetic oligonucleotide
agtcaacatagtgctcaccccttcacccaggatgatgttgagaatgctcctcaccacact

SEQ ID NO: 23769 - DNA, 60 bp, Artificial
  Synthetic oligonucleotide
gaggggcctgcacagcctccctcttaatctaaacttcccctctgaagactggatcatcag

SEQ ID NO: 23770 - DNA, 60 bp, Artificial
  Synthetic oligonucleotide
tagattcagtgttctctcctgaatagcgttacatagtgtgacaggcacaccattggccac

SEQ ID NO: 23771 - DNA, 60 bp, Artificial
  Synthetic oligonucleotide
gcttcctcagctgcctttgtgtgctccttacccaagatccaaagatcgacgcccttaact

SEQ ID NO: 23772 - DNA, 60 bp, Artificial
  Synthetic oligonucleotide
gcaaagacctatgaaacctgatgctatcccactctgaaaggcacttttgttgacggcttc

SEQ ID NO: 23773 - DNA, 60 bp, Artificial
  Synthetic oligonucleotide
tccctccaacttgttctttgtaagataaggaaaacttgagccttccagtatcaggaccca

SEQ ID NO: 23774 - DNA, 60 bp, Artificial
  Synthetic oligonucleotide
aaacagaagcagccactagtttatcatgatcgtaattaagtatcctctctccgtcagtat

SEQ ID NO: 23775 - DNA, 60 bp, Artificial
  Synthetic oligonucleotide
tggctagaatggcattgtggaattccttttcattattaagacagctccctctatattgct

SEQ ID NO: 23776 - DNA, 60 bp, Artificial
  Synthetic oligonucleotide
gagacctctcatgtgctattgctaaatctgaagacagaaccacataatgctcttctctct

SEQ ID NO: 23777 - DNA, 60 bp, Artificial
  Synthetic oligonucleotide
ctgtctcccatcgcaaattttgaagaaacaccaggaaaagaaaaggggacatcataggcc

SEQ ID NO: 23778 - DNA, 60 bp, Artificial
  Synthetic oligonucleotide
cccaccttgtcttccaagagttttgtggtagtgggcttcattgggaaatagtcacatggc

SEQ ID NO: 23779 - DNA, 60 bp, Artificial
  Synthetic oligonucleotide
gagccattgttaaaagaagacgtcatcattgagaagaattttcttgacacaccaggaact

SEQ ID NO: 23780 - DNA, 55 bp, Artificial
  Synthetic oligonucleotide
cctacacctcccttcttcttcattgcactcaccattctcctttcaatccactttt

SEQ ID NO: 23781 - DNA, 60 bp, Artificial
  Synthetic oligonucleotide
gagccaagccattctgatcctaacagctcgccgtgacatttaagatcctttaagtgggcc

SEQ ID NO: 23782 - DNA, 60 bp, Artificial
  Synthetic oligonucleotide
ttgtgtttcttgtagtgacaccaatctgtcgttcacacttaagaatgaggagccaagcca

SEQ ID NO: 23783 - DNA, 60 bp, Artificial
  Synthetic oligonucleotide
acagagtgacaacaacttaaggccctcaattaatagcattctcggctctgtctgaactag

SEQ ID NO: 23784 - DNA, 60 bp, Artificial
  Synthetic oligonucleotide
cggacagcaactcctccatcaccacacacttgttcctcagaagagagagtcacaatgcct

SEQ ID NO: 23785 - DNA, 60 bp, Artificial
  Synthetic oligonucleotide
caggcacagagctttggaagtgattctgcaagcagctgtctcgatcaactccctcttgcc

SEQ ID NO: 23786 - DNA, 60 bp, Artificial
  Synthetic oligonucleotide
cacccaacacccaggaacccagctcaagtgatgtagataaggctatgcagaagtaatccc

SEQ ID NO: 23787 - DNA, 60 bp, Artificial
  Synthetic oligonucleotide
ttgctcaaagtttattggtgaagtcctgacaaagcattccagtaatattaatgtgttccc

SEQ ID NO: 23788 - DNA, 60 bp, Artificial
  Synthetic oligonucleotide
gcaccacaaatggtagaccagggcacagaacaccttgtctctgcagaaggatttcaacag

SEQ ID NO: 23789 - DNA, 60 bp, Artificial
  Synthetic oligonucleotide
cccgagttcaacagcacctgtgtaaatgaccttctgtctcatgaccatctttaaagggtg

SEQ ID NO: 23790 - DNA, 60 bp, Artificial
  Synthetic oligonucleotide
caccacactatacaagaggtgctccggctctgttatgagatcctccctcaacttttccat

SEQ ID NO: 23791 - DNA, 60 bp, Artificial
  Synthetic oligonucleotide
gctatgcagaagtaatcccaaaggacaggtctcaagaaacctaacgcttcctcagctgcc

SEQ ID NO: 23792 - DNA, 60 bp, Artificial
  Synthetic oligonucleotide
caggagccccttgtgaattgggatttgaggaacctgacttcttccccacaacaaggtcac

SEQ ID NO: 23793 - DNA, 59 bp, Artificial
  Synthetic oligonucleotide
aagtcagaagcattgtgcaagatcccttgccccatgtcaattattgagctgagatgtga

SEQ ID NO: 23794 - DNA, 60 bp, Artificial
  Synthetic oligonucleotide
tctgcactcaaagccgcatccggcaagagtcatggggaaaacgcagtccaagggacagcc

SEQ ID NO: 23795 - DNA, 60 bp, Artificial
  Synthetic oligonucleotide
gactagagctccagacccagccgacagcaccaccagaaatcccaccatcccaaaatcccc

SEQ ID NO: 23796 - DNA, 60 bp, Artificial
  Synthetic oligonucleotide
cgcagtccaagggacagcccagcacaaatctcctcaaggagacagaaccaaggcatccag

SEQ ID NO: 23797 - DNA, 60 bp, Artificial
  Synthetic oligonucleotide
atgcgcgagctgttctcggagcacctactcaatgtcgaggggaggccccacctcttcaaa

SEQ ID NO: 23798 - DNA, 53 bp, Artificial
  Synthetic oligonucleotide
ccccaccctacagcccctgaggcagaactccgccccgaagcccctcccaaaca

SEQ ID NO: 23799 - DNA, 60 bp, Artificial
  Synthetic oligonucleotide
ttgaaaggtacctcaattaacttgtgaatgtgccacgacagcaaagtggacacgtaatcc

SEQ ID NO: 23800 - DNA, 60 bp, Artificial
  Synthetic oligonucleotide
ctgtcaaactccaacttgggctccaaatacttctcaaagcacttaatctgatctgtcaac

SEQ ID NO: 23801 - DNA, 60 bp, Artificial
  Synthetic oligonucleotide
aactgctggtcattgaatgttctggtggagacagcttgggtgatgcatgttattgggcaa

SEQ ID NO: 23802 - DNA, 60 bp, Artificial
  Synthetic oligonucleotide
accactgtaagttacatcaagggaatgaggcttgaataatccaccttccaacaccacccc

SEQ ID NO: 23803 - DNA, 60 bp, Artificial
  Synthetic oligonucleotide
cagctcacttaccgactcaaagacgtgctgctcggttaatcctgatgctatgagctgtcc

SEQ ID NO: 23804 - DNA, 60 bp, Artificial
  Synthetic oligonucleotide
gtggtgtgctatctctgcctggatcagtctgtagtaaacacagcccacatcttcagtacc

SEQ ID NO: 23805 - DNA, 60 bp, Artificial
  Synthetic oligonucleotide
attttgagcactctcctgttttctgataaattaagttgaaattcccgcttcccatgataa

SEQ ID NO: 23806 - DNA, 60 bp, Artificial
  Synthetic oligonucleotide
ctcaagagctgtcgcctatctgtcctgacaaattgtctttctatctcaccctctttaagc

SEQ ID NO: 23807 - DNA, 60 bp, Artificial
  Synthetic oligonucleotide
ggccattatgaagtatcgcagaccttgcaagaacttctgtgctcttttgctagggttcac

SEQ ID NO: 23808 - DNA, 60 bp, Artificial
  Synthetic oligonucleotide
ctgctgcgagaattcaagtaagctaaataggatatgcctaaacctctcattggcccattc

SEQ ID NO: 23809 - DNA, 60 bp, Artificial
  Synthetic oligonucleotide
ggctctcaatgcccgatgttctcactcctgcttttgttaaagattcacaaagccttgagt

SEQ ID NO: 23810 - DNA, 60 bp, Artificial
  Synthetic oligonucleotide
catgctcaggccctatatgcgtgaaatcatgttcctccaggtccaggatctcctcattca

SEQ ID NO: 23811 - DNA, 60 bp, Artificial
  Synthetic oligonucleotide
agcctctcgtaactgtcctcctccagtatatcttcctctttaacataatctctaaagcac

SEQ ID NO: 23812 - DNA, 60 bp, Artificial
  Synthetic oligonucleotide
aggcggtggacctatctgagaatcgaacacatttgctacctagtgtcttgcaaagaccta

SEQ ID NO: 23813 - DNA, 60 bp, Artificial
  Synthetic oligonucleotide
aatgtccttcctattctgtgagtccagaagctttctgatgtcatcggagccttgacagct

SEQ ID NO: 23814 - DNA, 53 bp, Artificial
  Synthetic oligonucleotide
ccgcggctttgccgcggactggggaggcactgcttacagtgcgaaggctgcct

SEQ ID NO: 23815 - DNA, 60 bp, Artificial
  Synthetic oligonucleotide
ttctatttctacccaaggcagcctttgcactgtaagcagtgcctccccagtccgcggcag

SEQ ID NO: 23816 - DNA, 60 bp, Artificial
  Synthetic oligonucleotide
ctcttctttgttccagttgctgactagttaggttgcccatatagactcctgaagcaagtg

SEQ ID NO: 23817 - DNA, 60 bp, Artificial
  Synthetic oligonucleotide
gcaggttacgctctgaagtccagcaaagtgtcaacttgatcaataaagcaatgaactcac

SEQ ID NO: 23818 - DNA, 58 bp, Artificial
  Synthetic oligonucleotide
gtggtgaccctgatggtctccagcatatttcccccgtctatgaggcaagccccagcct

SEQ ID NO: 23819 - DNA, 60 bp, Artificial
  Synthetic oligonucleotide
gactcagttttccacagacattgagcaggaggccaacaacatgctaaccgacatgctgcg

SEQ ID NO: 23820 - DNA, 60 bp, Artificial
  Synthetic oligonucleotide
taaccgacatgctgcgaaaggaatatgcagagaggcagggcaagacacctctgggcttag

SEQ ID NO: 23821 - DNA, 60 bp, Artificial
  Synthetic oligonucleotide
cgcaccggggatcctaggcttttttgattgcgcaaatttcgagcacctcaaaaatgggac

SEQ ID NO: 23822 - DNA, 60 bp, Artificial
  Synthetic oligonucleotide
ttgtccaaatctgacatattggggaactttgctgtgtagacgagtcccaagtcagtcagt

SEQ ID NO: 23823 - DNA, 60 bp, Artificial
  Synthetic oligonucleotide
ggtcagaattccaacacatagacacataaaaggtaaaccttgccctaaaccccacaggat

SEQ ID NO: 23824 - DNA, 60 bp, Artificial
  Synthetic oligonucleotide
ctattgggccttttcacatggaccttaagtgattctgaagggaatgacatgccaggtggt

SEQ ID NO: 23825 - DNA, 60 bp, Artificial
  Synthetic oligonucleotide
gagtaagttagaccggccggcataccctgagcttgagcaagtctattggaatttccctta

SEQ ID NO: 23826 - DNA, 60 bp, Artificial
  Synthetic oligonucleotide
ctcgtatgggtttctctcacctggagtgtcggatacaaacattcctaaggatcgctttac

SEQ ID NO: 23827 - DNA, 60 bp, Artificial
  Synthetic oligonucleotide
gcgctcgtcagtcccggttgcacagagaacaggtcttggatgtcaatcccatgagaatgc

SEQ ID NO: 23828 - DNA, 60 bp, Artificial
  Synthetic oligonucleotide
agctcagggttccgaacatcccagacccttatgatgccatcctttgtggtgtttcccatc

SEQ ID NO: 23829 - DNA, 60 bp, Artificial
  Synthetic oligonucleotide
ccgcattagtctctgaacattggcgacctcagaaaagtctaatccatgaagaagtgcctg

SEQ ID NO: 23830 - DNA, 60 bp, Artificial
  Synthetic oligonucleotide
ggactaactgcattcagaccaactatcagtacttgatcatacagaacaccacatgggagg

SEQ ID NO: 23831 - DNA, 60 bp, Artificial
  Synthetic oligonucleotide
ctggcatgtcaagaccatgttctttggcaggctttcaattacagcgctcgtcagtcccgg

SEQ ID NO: 23832 - DNA, 60 bp, Artificial
  Synthetic oligonucleotide
agtctcttgcacagaaaatttcctattagcgcaatcgattagcctaggatccccggtgcg

SEQ ID NO: 23833 - DNA, 60 bp, Artificial
  Synthetic oligonucleotide
gtccaggtcggcagcaagaactaaaagatcatctgaagttaacatccccaccctcaagac

SEQ ID NO: 23834 - DNA, 60 bp, Artificial
  Synthetic oligonucleotide
ctgcctggttcaagtctctcaggcgctttaggtcggagtcatccctcttttccttccgca

SEQ ID NO: 23835 - DNA, 60 bp, Artificial
  Synthetic oligonucleotide
tcagaagtaaatattgagaccctaggcatgaccatgcccttatcatgcaccaagaacagc

SEQ ID NO: 23836 - DNA, 60 bp, Artificial
  Synthetic oligonucleotide
gctgttcttggtgcatgataagggcatggtcatgtttagggtctccatatttaattctaa

SEQ ID NO: 23837 - DNA, 60 bp, Artificial
  Synthetic oligonucleotide
aaccttagaattaaatatggagaccctaaacatgaccatgcccttatcatgcaccaagaa

SEQ ID NO: 23838 - DNA, 60 bp, Artificial
  Synthetic oligonucleotide
ttagaattaaatatggagaccctaaacatgaccatgcccttatcatgcaccaagaacagc

SEQ ID NO: 23839 - DNA, 60 bp, Artificial
  Synthetic oligonucleotide
tggatagatggaatgttgagatgatgctcatgagagcatgatcataaagattctttttgt

SEQ ID NO: 23840 - DNA, 60 bp, Artificial
  Synthetic oligonucleotide
gcaacttatccgatgctcacaaaaagaatctttatgatcatgctctcatgagcatcatct

SEQ ID NO: 23841 - DNA, 60 bp, Artificial
  Synthetic oligonucleotide
cctctgagtcagtaaagaagtgaacgtacagcgtgatctagtgtcgcctaggatccactg

SEQ ID NO: 23842 - DNA, 60 bp, Artificial
  Synthetic oligonucleotide
gggttcctttgcccgggtgtagtactcacaaacataccctcacggttcttaatctgcagt

SEQ ID NO: 23843 - DNA, 60 bp, Artificial
  Synthetic oligonucleotide
ggctgatggctcatggctgatgatttttagggcgctgtgttgttgtgtgagcttttccag

SEQ ID NO: 23844 - DNA, 60 bp, Artificial
  Synthetic oligonucleotide
aaccatgttctggggcaaatgtctgatgattgaggagatcagacccggttgagcatcagc

SEQ ID NO: 23845 - DNA, 60 bp, Artificial
  Synthetic oligonucleotide
ctctttgttcatgtccctcagcttggtcagatcagaatcagtcctcttatctttgcgcac

SEQ ID NO: 23846 - DNA, 60 bp, Artificial
  Synthetic oligonucleotide
gactaagcccttgtgcttggtgcagagttggttgtatctctcccagatctcatcctcaaa

SEQ ID NO: 23847 - DNA, 60 bp, Artificial
  Synthetic oligonucleotide
acagtgtgtcaataggtaaacatctcatgggtttctgatctctgacccagcctgtcactg

SEQ ID NO: 23848 - DNA, 60 bp, Artificial
  Synthetic oligonucleotide
gccctttgctccagctgagtgtttgtaagattgccttcatagacaccaggctgagacagg

SEQ ID NO: 23849 - DNA, 60 bp, Artificial
  Synthetic oligonucleotide
ggccatttccaccgggtcatttggtgtcccctcaatatcaatccacgtagtggctcttgg

SEQ ID NO: 23850 - DNA, 60 bp, Artificial
  Synthetic oligonucleotide
tcaaatcatcggggatcctaaaatcgcatgggttgggaagtgcttcaacaactgcagtgg

SEQ ID NO: 23851 - DNA, 60 bp, Artificial
  Synthetic oligonucleotide
caatgtgctccatgtgactcgtcatataggtgccagatgtaagacagttgaaggtgctgg

SEQ ID NO: 23852 - DNA, 60 bp, Artificial
  Synthetic oligonucleotide
atgagatgtggccttttccagctcgtcaccttcctcattttgtctggcagaagttgtgac

SEQ ID NO: 23853 - DNA, 60 bp, Artificial
  Synthetic oligonucleotide
gcagcaagaacaacacacaccattactataaaggaccatccaacacgacatggggaattg

SEQ ID NO: 23854 - DNA, 60 bp, Artificial
  Synthetic oligonucleotide
gttctgttagcaggaaacttcttggcttcttcacttgggacttgagtgattcctctgggc

SEQ ID NO: 23855 - DNA, 60 bp, Artificial
  Synthetic oligonucleotide
gctaaaattccttactgcaactacacaaaattttggtacatcaatgacactatcacagga

SEQ ID NO: 23856 - DNA, 60 bp, Artificial
  Synthetic oligonucleotide
ccttacaaatgggtaaggttgggaaaataagctccgcttccgacatgggcctcgacgtca

SEQ ID NO: 23857 - DNA, 60 bp, Artificial
  Synthetic oligonucleotide
aaggcatttataatgtgatgacatgtggaataattgggttggttacattcttgctcttgt

SEQ ID NO: 23858 - DNA, 60 bp, Artificial
  Synthetic oligonucleotide
gtgatgacatgtggaataattgggttggttacattcttgctcttgtgtggaaaatcctgt

SEQ ID NO: 23859 - DNA, 56 bp, Artificial
  Synthetic oligonucleotide
cctgtggatattacaagcagccaggattgccaacacagtggaagagataggagggg

SEQ ID NO: 23860 - DNA, 60 bp, Artificial
  Synthetic oligonucleotide
gctgatcaccctctcaatcctagccattctgaaaggcatttataatgtgatgacatgtgg

SEQ ID NO: 23861 - DNA, 60 bp, Artificial
  Synthetic oligonucleotide
gaaaatcctgttcaagtatctacaaggataactaccagttcctttctctagaccttgaca

SEQ ID NO: 23862 - DNA, 60 bp, Artificial
  Synthetic oligonucleotide
ggaaaatcctgttcaagtatctacaaggataactaccagttcctttctctagaccttgac

SEQ ID NO: 23863 - DNA, 60 bp, Artificial
  Synthetic oligonucleotide
cattatggatgtgtttagaagaatgtattggagcacctccctttcggttgcctctgacat

SEQ ID NO: 23864 - DNA, 60 bp, Artificial
  Synthetic oligonucleotide
gtatctacaaggataactaccagttcctttctctagaccttgacatgtcatcgctgaacg

SEQ ID NO: 23865 - DNA, 51 bp, Artificial
  Synthetic oligonucleotide
cgtcaatcaacttgatgtctcttctgccctgggaatcaaggagcttcttga

SEQ ID NO: 23866 - DNA, 60 bp, Artificial
  Synthetic oligonucleotide
tagcactggtctggggaccggcaattgtgggctccctatgactgctgcttcgaacatgag

SEQ ID NO: 23867 - DNA, 60 bp, Artificial
  Synthetic oligonucleotide
gcttgggtgagcttgttctgaagaccaagtctttgcttagcactggtctggggaccggca

SEQ ID NO: 23868 - DNA, 60 bp, Artificial
  Synthetic oligonucleotide
gacatgtggaataattgggttggttacattcttgctcttgtgtggaaaatcctgttcaag

SEQ ID NO: 23869 - DNA, 60 bp, Artificial
  Synthetic oligonucleotide
ttgctcttgtgtggaaaatcctgttcaagtatctacaaggataactaccagttcctttct

SEQ ID NO: 23870 - DNA, 60 bp, Artificial
  Synthetic oligonucleotide
caagcagccaggattgccaacacagtggaagagataggagggggtgccctccagaccctc

SEQ ID NO: 23871 - DNA, 60 bp, Artificial
  Synthetic oligonucleotide
gcactggtctggggaccggcaattgtgggctccctatgactgctgcttcgaacatgagac

SEQ ID NO: 23872 - DNA, 60 bp, Artificial
  Synthetic oligonucleotide
gtcccagatgttgtcttcaaatttccttgcatcttccttttgcattgagacgtcaatcaa

SEQ ID NO: 23873 - DNA, 60 bp, Artificial
  Synthetic oligonucleotide
cccagatgttgtcttcaaatttccttgcatcttccttttgcattgagacgtcaatcaact

SEQ ID NO: 23874 - DNA, 60 bp, Artificial
  Synthetic oligonucleotide
cgtcaatcaacttgatgtctcttctgccctgggaatcaaggagcttcttgatgtcatctg

SEQ ID NO: 23875 - DNA, 60 bp, Artificial
  Synthetic oligonucleotide
ctctacaggacgagcttgggtgagcttgttctgaagaccaagtctttgcttagcactggt

SEQ ID NO: 23876 - DNA, 60 bp, Artificial
  Synthetic oligonucleotide
cattatggatgtgtttagaagaatgtattggagcacttctctatcagtcgcctctgatat

SEQ ID NO: 23877 - DNA, 53 bp, Artificial
  Synthetic oligonucleotide
gcgcttgcaggaagatcctgcacagaagaagctttcaaaatcggactgcacac

SEQ ID NO: 23878 - DNA, 60 bp, Artificial
  Synthetic oligonucleotide
cttgttgcagtcagtctcattgccatcattaagggtatagtgaatttgtacaaaagtggt

SEQ ID NO: 23879 - DNA, 60 bp, Artificial
  Synthetic oligonucleotide
ctcttgttgcagtcagtctcattgccatcattaagggtatagtgaatttgtacaaaagtg

SEQ ID NO: 23880 - DNA, 60 bp, Artificial
  Synthetic oligonucleotide
cttgttgcagtcagtctcattgccatcattaagggtatagtgaacttgtacaaaagtggt

SEQ ID NO: 23881 - DNA, 60 bp, Artificial
  Synthetic oligonucleotide
ctcttgttgcagtcagtctcattgccatcattaagggtatagtgaacttgtacaaaagtg

SEQ ID NO: 23882 - DNA, 60 bp, Artificial
  Synthetic oligonucleotide
ccaatataaggccaaccatcgccagaaagacaaagtttgtacagaaggttttcataaggg

SEQ ID NO: 23883 - DNA, 60 bp, Artificial
  Synthetic oligonucleotide
gtcaaggtcacttaagtttggatacttcacagtgtatagaagcccaagagaggttaaagc

SEQ ID NO: 23884 - DNA, 60 bp, Artificial
  Synthetic oligonucleotide
cgtaactaagaactcctggcattgcatcttctatgtctttcattaggatgccgtgagaat

SEQ ID NO: 23885 - DNA, 60 bp, Artificial
  Synthetic oligonucleotide
ccgatcacgtaactaagaactcctggcattgcatcttctatgtccttcattaagatgccg

SEQ ID NO: 23886 - DNA, 60 bp, Artificial
  Synthetic oligonucleotide
agtgcataggctgccttcgggaggaacagcaagctcgatggtaataggggtgtgagttcc

SEQ ID NO: 23887 - DNA, 60 bp, Artificial
  Synthetic oligonucleotide
ggaggcactgcttacagtgcataggctgccttcgggaggaacagcaagcttggtggtagt

SEQ ID NO: 23888 - DNA, 60 bp, Artificial
  Synthetic oligonucleotide
ggaggcactgcttacagtgcataggctgccttcgggaggaacagcaagctcgatggtaat

SEQ ID NO: 23889 - DNA, 60 bp, Artificial
  Synthetic oligonucleotide
gggaggcactgcttacagtgcataggctgccttcgggaggaacagcaagctcggtggtaa

SEQ ID NO: 23890 - DNA, 60 bp, Artificial
  Synthetic oligonucleotide
actggggaggcactgcttacagtgcataggctgccttcgggaggaacagcaagctcggtg

SEQ ID NO: 23891 - DNA, 60 bp, Artificial
  Synthetic oligonucleotide
ttctgaaatgctaagcaaagagtattcggacaggcagggtaaaactcccttgactttagt

SEQ ID NO: 23892 - DNA, 60 bp, Artificial
  Synthetic oligonucleotide
tttctgaaatgctaagcaaagagtattcggacaggcagggtaaaactcctttgactttag

SEQ ID NO: 23893 - DNA, 60 bp, Artificial
  Synthetic oligonucleotide
cttaatttctgaaatgctaagcaaagagtattcggacaggcagggtaaaactcctttgac

SEQ ID NO: 23894 - DNA, 60 bp, Artificial
  Synthetic oligonucleotide
ctggggtgactctgattgtttccaacatgtttccaccatcaagaatagatgctccagcct

SEQ ID NO: 23895 - DNA, 60 bp, Artificial
  Synthetic oligonucleotide
agagtgacttcttgatttctgaaatgctaagcaaagagtattcggacagacagggcaaaa

SEQ ID NO: 23896 - DNA, 60 bp, Artificial
  Synthetic oligonucleotide
cttgatttctgaaatgctaagcaaagagtattcggacagacagggcaaaactcctttgac

SEQ ID NO: 23897 - DNA, 60 bp, Artificial
  Synthetic oligonucleotide
aaagtgacttcttaatttctgaaatgctaagcaaagagtattcggacaggcagggtaaaa

SEQ ID NO: 23898 - DNA, 60 bp, Artificial
  Synthetic oligonucleotide
aagtgacttcttaatttctgaaatgctaagcaaagagtattcggacaggcagggtaaaac

SEQ ID NO: 23899 - DNA, 60 bp, Artificial
  Synthetic oligonucleotide
accatacactttcaggacaacactcattaccaaggtgctggttaataaagaacaacagtt

SEQ ID NO: 23900 - DNA, 60 bp, Artificial
  Synthetic oligonucleotide
gacaacactcattaccaaggtgctggttaataaagaacaacagttacttgaacatctctg

SEQ ID NO: 23901 - DNA, 60 bp, Artificial
  Synthetic oligonucleotide
aatcacacactttcaggacaacactcattaccaaggtgctggttaataaaaaacaacagc

SEQ ID NO: 23902 - DNA, 51 bp, Artificial
  Synthetic oligonucleotide
aaccacacactttcaggacaacactcattaccaaggtgctggttaataaaa

SEQ ID NO: 23903 - DNA, 60 bp, Artificial
  Synthetic oligonucleotide
tggcaatactgctgtagcaaaatgcaatttgaatcatgactctgaattctgtgacatgtt

SEQ ID NO: 23904 - DNA, 60 bp, Artificial
  Synthetic oligonucleotide
aaccacacactttcaggacaacactcattaccaaggtgctggttaataaaaaacaacagc

SEQ ID NO: 23905 - DNA, 60 bp, Artificial
  Synthetic oligonucleotide
ccaatataaggccaaccatcgccagaaagacaaagtttgtacaaaaggttttcataagga

SEQ ID NO: 23906 - DNA, 60 bp, Artificial
  Synthetic oligonucleotide
ccgtgagaatgcctgctaccattcttaaaccctttctcatcatgtggttttctaaagcag

SEQ ID NO: 23907 - DNA, 60 bp, Artificial
  Synthetic oligonucleotide
gtgatctagaaccaatataaggccaaccatcgccagaaagacaaagtttgtacagaaggt

SEQ ID NO: 23908 - DNA, 60 bp, Artificial
  Synthetic oligonucleotide
gatctagaaccaatataaggccaaccatcgccagaaagacaaagtttgtacaaaaggttt

SEQ ID NO: 23909 - DNA, 60 bp, Artificial
  Synthetic oligonucleotide
gatctagaaccaatgtaaggccaaccatcgccagaaagacaaagtttgtacaaaaggttt

SEQ ID NO: 23910 - DNA, 60 bp, Artificial
  Synthetic oligonucleotide
cagcaattagcttagcatccttcaaaacatctgacttgacagtctgagtgaattgactca

SEQ ID NO: 23911 - DNA, 60 bp, Artificial
  Synthetic oligonucleotide
gctgtcagcaatcagcttggcgtccttcagaacatctgacttgacagtctgagtgaattg

SEQ ID NO: 23912 - DNA, 60 bp, Artificial
  Synthetic oligonucleotide
ccaatgtaaggccaaccatcgccagaaagacaaagtttgtacaaaaggttttcataagga

SEQ ID NO: 23913 - DNA, 60 bp, Artificial
  Synthetic oligonucleotide
aggatttctattgcctggtttctcatcaataaacatgccttctcttcgtttaacctgaat

SEQ ID NO: 23914 - DNA, 56 bp, Artificial
  Synthetic oligonucleotide
tcatccctccccagatcccccgccttgaaaactgtgtttcgttgaacactcctcat

SEQ ID NO: 23915 - DNA, 60 bp, Artificial
  Synthetic oligonucleotide
gaagggtctttaacatcccatatcctcaccacaccatttcctccagtcccttgctgttga

SEQ ID NO: 23916 - DNA, 60 bp, Artificial
  Synthetic oligonucleotide
ctctttattcaggtccctcaacttattgaggtcttcttccccctttttagtctttctgag

SEQ ID NO: 23917 - DNA, 60 bp, Artificial
  Synthetic oligonucleotide
agttcatccctccccagatctcccaccttgaaaactgtgtttcgttgaacactcttcatg

SEQ ID NO: 23918 - DNA, 60 bp, Artificial
  Synthetic oligonucleotide
tttagctttgaagggtctttaacatcccatatcctcaccacaccatttcccccagtccct

SEQ ID NO: 23919 - DNA, 60 bp, Artificial
  Synthetic oligonucleotide
actgattgttaagcttcgaagggtctttaacatcccatatcctcaccacaccatttcccc

SEQ ID NO: 23920 - DNA, 52 bp, Artificial
  Synthetic oligonucleotide
tttagctttgaagggtctttaacatcccatatcctcaccacaccatttcccc

SEQ ID NO: 23921 - DNA, 60 bp, Artificial
  Synthetic oligonucleotide
tttagctttgaagggtctttaacatcccatatcctcaccacaccatttcctccagtccct

SEQ ID NO: 23922 - DNA, 60 bp, Artificial
  Synthetic oligonucleotide
ctcataaggatttctgtttccaggtctttcgtcgacaaacatgttctcttttcttttggc

SEQ ID NO: 23923 - DNA, 60 bp, Artificial
  Synthetic oligonucleotide
gggtgaccattatcagaacaaaattaagacagcgttgacccatctatttggcccatttgc

SEQ ID NO: 23924 - DNA, 60 bp, Artificial
  Synthetic oligonucleotide
agtctccagcatatttcctccatcaataagtgaggctcctgctttcacagctgcagatag

SEQ ID NO: 23925 - DNA, 60 bp, Artificial
  Synthetic oligonucleotide
ggcccatttgcatacaatgagaaagacccgaagatattcgttaccatgaggaataccaca

SEQ ID NO: 23926 - DNA, 55 bp, Artificial
  Synthetic oligonucleotide
ctgactcattaaggttgctagccagtaatgggggcaattcattctcagggagagg

SEQ ID NO: 23927 - DNA, 60 bp, Artificial
  Synthetic oligonucleotide
caactgggttcttgactgggtcctgagaggtctacaacatgattttagcagagatccggt

SEQ ID NO: 23928 - DNA, 60 bp, Artificial
  Synthetic oligonucleotide
gaagaaaacaaatgctgagtttcagtttcgattaaacctgacgcagcgtcataagggtga

SEQ ID NO: 23929 - DNA, 60 bp, Artificial
  Synthetic oligonucleotide
aggtttcctgaaacagtggaaatagtagccacttgtaggttggaaaacagctagctctac

SEQ ID NO: 23930 - DNA, 60 bp, Artificial
  Synthetic oligonucleotide
cttcaatgtccatccagatggtgtttgtcggatcaagtttttgcatggcctctttgatga

SEQ ID NO: 23931 - DNA, 60 bp, Artificial
  Synthetic oligonucleotide
tcaagagaccaggttgagcgtcctcaagatcctttagtagaataccgtgagaatgtctgc

SEQ ID NO: 23932 - DNA, 60 bp, Artificial
  Synthetic oligonucleotide
gacatccaagagttttcttatgtcatctgcaccctgcgtcgtgatgacaatgttctgagg

SEQ ID NO: 23933 - DNA, 60 bp, Artificial
  Synthetic oligonucleotide
actgcactttcatcccttgtaattatttggaggcagtcgtgctcctgtgtcagtttttcc

SEQ ID NO: 23934 - DNA, 56 bp, Artificial
  Synthetic oligonucleotide
tacatcacgaatgctggtttggcctgatgcaccaggttgtcggggagtagtggctt

SEQ ID NO: 23935 - DNA, 60 bp, Artificial
  Synthetic oligonucleotide
ccaggtggttattgtctagaaaagtggatgttgattgcttctgaattgaagtgttttggg

SEQ ID NO: 23936 - DNA, 60 bp, Artificial
  Synthetic oligonucleotide
tcaggtgagccttgtccactcccccacagactcaacaggcatggtgcctgtaactgcggg

SEQ ID NO: 23937 - DNA, 60 bp, Artificial
  Synthetic oligonucleotide
ctgtcatacaggctattgtaagtgctggcattgacccaaactgattgtttagtttagctg

SEQ ID NO: 23938 - DNA, 60 bp, Artificial
  Synthetic oligonucleotide
gcatcgctcctcttagctttccggaggactctttgtacctgagacacctgattgaagtcc

SEQ ID NO: 23939 - DNA, 60 bp, Artificial
  Synthetic oligonucleotide
tacctgagacacctgattgaagtccaggctatcagctatcattttagcatcctttaagac

SEQ ID NO: 23940 - DNA, 60 bp, Artificial
  Synthetic oligonucleotide
gagtgtcttggtttgctgtgtgtagctactcagttctcttctcagagattgagtccagcg

SEQ ID NO: 23941 - DNA, 60 bp, Artificial
  Synthetic oligonucleotide
cagtttttccaaatcctccaaattcgggtatttgactgtgtataaaagcccaagggatgt

SEQ ID NO: 23942 - DNA, 60 bp, Artificial
  Synthetic oligonucleotide
cctatgtagggccaaccttctccggagagacaaactttgtaaaggagattctcataagga

SEQ ID NO: 23943 - DNA, 60 bp, Artificial
  Synthetic oligonucleotide
agtttgtctagatcagcatcgctcctcttagctttccggaggactctttgtacctgagac

SEQ ID NO: 23944 - DNA, 60 bp, Artificial
  Synthetic oligonucleotide
gaagaatagattaagggagcttttgaaagttccttactgcaactatactagattctggta

SEQ ID NO: 23945 - DNA, 60 bp, Artificial
  Synthetic oligonucleotide
caattgaggctgtcaatcagttgacaaaaacagtcaacagcctcatctctgataatctac

SEQ ID NO: 23946 - DNA, 60 bp, Artificial
  Synthetic oligonucleotide
gggtgtgactcttatagtctccagcatatttcctccatcaataagtgaggctcctgcttt

SEQ ID NO: 23947 - DNA, 60 bp, Artificial
  Synthetic oligonucleotide
ctgtttccaggtctttcgtcgacaaacatgttctcttttcttttggcagtcaaagtggcc

SEQ ID NO: 23948 - DNA, 60 bp, Artificial
  Synthetic oligonucleotide
attcccttccaaagtgctggttggtcaacaacggaagctaccttaatgaaagtgatttta

SEQ ID NO: 23949 - DNA, 60 bp, Artificial
  Synthetic oligonucleotide
gattctggtatgtaaaccacacaagaactggagaacattcccttccaaagtgctggttgg

SEQ ID NO: 23950 - DNA, 60 bp, Artificial
  Synthetic oligonucleotide
tatcccatgacctaccgttgatttgtgaccttgaacctatgtagggccaaccttctccgg

SEQ ID NO: 23951 - DNA, 60 bp, Artificial
  Synthetic oligonucleotide
ggtcaacactggtgttatcccatgacctaccgttgatttgtgaccttgaacctatgtagg

SEQ ID NO: 23952 - DNA, 55 bp, Artificial
  Synthetic oligonucleotide
gaccccactgacacttgtggacctctgtttctggagtgccgtcttctacacgact

SEQ ID NO: 23953 - DNA, 60 bp, Artificial
  Synthetic oligonucleotide
agaaatgagtggattttggaaagtgaccaccttatttcggaaatgttgagcaaggaatat

SEQ ID NO: 23954 - DNA, 60 bp, Artificial
  Synthetic oligonucleotide
tctttgatgactgcttcttgcatttcagtgaggttgctaagtcttaaattttgcccattt

SEQ ID NO: 23955 - DNA, 60 bp, Artificial
  Synthetic oligonucleotide
ttgcccatttttctcaggcgccctgggcccagggtccggcttggggttaaggtcaacact

SEQ ID NO: 23956 - DNA, 60 bp, Artificial
  Synthetic oligonucleotide
gcacactcttcataaccataagtttgtccacctcttgatttagatcccttagtttgtcta

SEQ ID NO: 23957 - DNA, 60 bp, Artificial
  Synthetic oligonucleotide
catgagctcgtctttccccaggtctccaagtttaagaattgtgtttttttgcacactctt

SEQ ID NO: 23958 - DNA, 60 bp, Artificial
  Synthetic oligonucleotide
ccactgtcaccaattttccgcttcaatttttccagatctgttgctagatccatgagctcg

SEQ ID NO: 23959 - DNA, 60 bp, Artificial
  Synthetic oligonucleotide
gtaaggtttcccatgtaggggcgaggaccatccctgccactgtcaccaattttccgcttc

SEQ ID NO: 23960 - DNA, 60 bp, Artificial
  Synthetic oligonucleotide
ctagttgtgactgtgtaaggtttcccatgtaggggcgaggaccatccctgccactgtcac

SEQ ID NO: 23961 - DNA, 60 bp, Artificial
  Synthetic oligonucleotide
cccagtctgctgctggaaccccaggacccttaaaatttgtgtcctcttgtctagttgtga

SEQ ID NO: 23962 - DNA, 60 bp, Artificial
  Synthetic oligonucleotide
gagacatcccagagtctaacaactcctctactgaccccagtctgctgctggaaccccagg

SEQ ID NO: 23963 - DNA, 60 bp, Artificial
  Synthetic oligonucleotide
cacagctgcagataggctaaagttgtagcctgagatgttcactgcactttcatcccttgt

SEQ ID NO: 23964 - DNA, 60 bp, Artificial
  Synthetic oligonucleotide
ccataagtttgtccacctcttgatttagatcccttagtttgtctagatcagcatcgctcc

SEQ ID NO: 23965 - DNA, 60 bp, Artificial
  Synthetic oligonucleotide
ctcttttagaattgggtatcacaccagctttgagtctttcaccatgaccattgggggtgt

SEQ ID NO: 23966 - DNA, 60 bp, Artificial
  Synthetic oligonucleotide
ctgttgtcaccctactggccatcgtcaagggggttctgaatctctggaaatcaggtctct

SEQ ID NO: 23967 - DNA, 60 bp, Artificial
  Synthetic oligonucleotide
tcaggtctcttccagctgttgatgtttttaatcttggcaggaaggtcatgctcttttaga

SEQ ID NO: 23968 - DNA, 60 bp, Artificial
  Synthetic oligonucleotide
gcacagtggatcctaggcgacattgacgacgcattgcttggagattcttaacaatgggcc

SEQ ID NO: 23969 - DNA, 57 bp, Artificial
  Synthetic oligonucleotide
aacaatgggccagttagtgagcttctttcaggagataccagtgttctttcaggaagc

SEQ ID NO: 23970 - DNA, 60 bp, Artificial
  Synthetic oligonucleotide
ccatgagttacccgctctgtgcaaggtgaatgacacctataacttggttaggctctctca

SEQ ID NO: 23971 - DNA, 60 bp, Artificial
  Synthetic oligonucleotide
aactacaccgaatgcactggagcttccgaggaatacaactgggttcttgactgggtcctg

SEQ ID NO: 23972 - DNA, 60 bp, Artificial
  Synthetic oligonucleotide
ctgctgtagcaaaatgcaatttgaatcatgactctgaattctgtgacatgttgaggctct

SEQ ID NO: 23973 - DNA, 60 bp, Artificial
  Synthetic oligonucleotide
ggcaatactgctgtagcaaagtgcaatttgaatcatgactctgaattctgtgacatgttg

SEQ ID NO: 23974 - DNA, 60 bp, Artificial
  Synthetic oligonucleotide
ggcaacactgctgtagcaaaatgcaatctgaatcatgactctgaattctgtgacatgttg

SEQ ID NO: 23975 - DNA, 60 bp, Artificial
  Synthetic oligonucleotide
ggcccctgtgggatttttatctcttccatctgacgggcacccctggctgtttgtataaac

SEQ ID NO: 23976 - DNA, 60 bp, Artificial
  Synthetic oligonucleotide
gtcttcccttgtctatctaggtattccttttgcagcatctcagttatcatgttatcagct

SEQ ID NO: 23977 - DNA, 60 bp, Artificial
  Synthetic oligonucleotide
tcaaataaaaacttgtgctaaagacaaaaagatcaactaaccctaaaggggtcttccctt

SEQ ID NO: 23978 - DNA, 60 bp, Artificial
  Synthetic oligonucleotide
cacaatgtgcctatgggttggtattttgatcagatggaggaagatactgatcaaataaaa

SEQ ID NO: 23979 - DNA, 60 bp, Artificial
  Synthetic oligonucleotide
tttatctcttccatctgacgggcacccctggctgtttgtataaaccacaagagcagatgc

SEQ ID NO: 23980 - DNA, 60 bp, Artificial
  Synthetic oligonucleotide
atgacccgtttgaaacaagccaacatctaggcaatgaagtcttccctgttgatgtgtgat

SEQ ID NO: 23981 - DNA, 60 bp, Artificial
  Synthetic oligonucleotide
ttaatgaccctcaaagactcaatgcttcaacttgaccccaattcaaaaacctggatggat

SEQ ID NO: 23982 - DNA, 60 bp, Artificial
  Synthetic oligonucleotide
gttatcagcttgttgttcaatatcatcagagaagtgagtttcattaaggtatgacccgtt

SEQ ID NO: 23983 - DNA, 60 bp, Artificial
  Synthetic oligonucleotide
gggcctgcatgcttgatggtggcaatatgttggagaccataaaggtttcacctcagacca

SEQ ID NO: 23984 - DNA, 50 bp, Artificial
  Synthetic oligonucleotide
accggaaatggaggttcaaacaagtcattgcagtctgcaggttttgctgc

SEQ ID NO: 23985 - DNA, 60 bp, Artificial
  Synthetic oligonucleotide
ccttatgagaatatactgtacaaaatttgtctctcaggggatggatggccttacattgca

SEQ ID NO: 23986 - DNA, 60 bp, Artificial
  Synthetic oligonucleotide
ctgaccctggcatgcctgaccaaacaaggacaagtagatctgaatgatgctgttcaagcc

SEQ ID NO: 23987 - DNA, 59 bp, Artificial
  Synthetic oligonucleotide
aacggctgagagaccttaatcaggcagtcaacaatcttgttgagctaaagtcaactcag

SEQ ID NO: 23988 - DNA, 60 bp, Artificial
  Synthetic oligonucleotide
ctgaatgatgctgttcaagccttaacggacttaggactaatctacacagcaaagtacccc

SEQ ID NO: 23989 - DNA, 60 bp, Artificial
  Synthetic oligonucleotide
gagaactgtctggctattgctccaacataaagttgcaggtggtgaaagatgctcaggctc

SEQ ID NO: 23990 - DNA, 58 bp, Artificial
  Synthetic oligonucleotide
ccaaggaagtgaaatcattcctgtggactcagtctctgagaagagaactgtctggcta

SEQ ID NO: 23991 - DNA, 60 bp, Artificial
  Synthetic oligonucleotide
gctgagagcctgtcatatccaacaaccagacagctttcataacaatgagtgcttccaagg

SEQ ID NO: 23992 - DNA, 60 bp, Artificial
  Synthetic oligonucleotide
aggctattggattgcgctttgcacagctcacacttgtggaacaattgtgctgagagcctg

SEQ ID NO: 23993 - DNA, 60 bp, Artificial
  Synthetic oligonucleotide
cgcacagtggatcctaggctattggattgcgctttgcacagctcacacttgtggaacaat

SEQ ID NO: 23994 - DNA, 60 bp, Artificial
  Synthetic oligonucleotide
tgatgtgacagatttgtttgctgcacagccagggttgacaagtgcagtgatagaggctct

SEQ ID NO: 23995 - DNA, 53 bp, Artificial
  Synthetic oligonucleotide
tgctgtgtgggatcagttcaaggacttatgccacatgcatactggggttgttg

SEQ ID NO: 23996 - DNA, 60 bp, Artificial
  Synthetic oligonucleotide
caggctcttcttcatggcctggacttctctgaagtcagcaatgttcaacgcttgatgcgt

SEQ ID NO: 23997 - DNA, 60 bp, Artificial
  Synthetic oligonucleotide
ggcatagtcatgttcaatgtctccatgttcaattcaagggtctgtagttcataaactcct

SEQ ID NO: 23998 - DNA, 60 bp, Artificial
  Synthetic oligonucleotide
gcaacttgatcaaagaagggctcttctaaacatgattggcatgactggtggaaacagagg

SEQ ID NO: 23999 - DNA, 60 bp, Artificial
  Synthetic oligonucleotide
ttgctgcatcaactgcataactgtgacttaggttgtattgcactgtgatcttcccaccat

SEQ ID NO: 24000 - DNA, 60 bp, Artificial
  Synthetic oligonucleotide
ctgcaacacaccatttgctactgtgccgcagtgttttgctgcatcaactgcataactgtg

SEQ ID NO: 24001 - DNA, 60 bp, Artificial
  Synthetic oligonucleotide
taaagttggggatggatagatggaaagtagaaatgatgctcatgagggcatgatcataaa

SEQ ID NO: 24002 - DNA, 60 bp, Artificial
  Synthetic oligonucleotide
ttggcatgactggtggaaacagaggggggggtacctccagtgatggcattgtgagagtct

SEQ ID NO: 24003 - DNA, 60 bp, Artificial
  Synthetic oligonucleotide
gtatcatttcccacacggatgtaatgatgactggtgttctttgtgcaggacaatggcata

SEQ ID NO: 24004 - DNA, 60 bp, Artificial
  Synthetic oligonucleotide
gtgagagtctgggacgtcaaaaatgcagagctactcaacaaccagtttgggacaatgcca

SEQ ID NO: 24005 - DNA, 60 bp, Artificial
  Synthetic oligonucleotide
gtccctggttctttgtgagaggagcccgagataaccaataggagatggtctggagaactg

SEQ ID NO: 24006 - DNA, 60 bp, Artificial
  Synthetic oligonucleotide
gtgagaggagcccgagataaccaataggagatggtctggagaactggcagtggtcttccc

SEQ ID NO: 24007 - DNA, 60 bp, Artificial
  Synthetic oligonucleotide
gcacttggcaactgctgtgtttccaaaacacttcagctcagcctcaattaacatccacct

SEQ ID NO: 24008 - DNA, 56 bp, Artificial
  Synthetic oligonucleotide
ccagggacatggtattcagaacctcaacacctaaagtcgtcctgtaaatggacgcc

SEQ ID NO: 24009 - DNA, 60 bp, Artificial
  Synthetic oligonucleotide
ccacctggtgagacagtatcctcctggcgtctcatttccttcagagtcagagagtgtcca

SEQ ID NO: 24010 - DNA, 60 bp, Artificial
  Synthetic oligonucleotide
tgcagcagtctcgggagggctcgatgcaaaggtcctaagagctgtgctccccagggacat

SEQ ID NO: 24011 - DNA, 60 bp, Artificial
  Synthetic oligonucleotide
gatgcgtaaacagaggagagatgatggtgatctaaaacggctgagagaccttaatcaggc

SEQ ID NO: 24012 - DNA, 60 bp, Artificial
  Synthetic oligonucleotide
caggggtcagaggacatcagaaaacttctggagtcacaaggaagaagggatataaagctg

SEQ ID NO: 24013 - DNA, 60 bp, Artificial
  Synthetic oligonucleotide
tcaaaggtcattagaacagagagacccttgagctcaggaatctacatggggaatctaagt

SEQ ID NO: 24014 - DNA, 60 bp, Artificial
  Synthetic oligonucleotide
tcccagttcccatgtctagaatcaagggcaatatagctgcctccccaagccattctcata

SEQ ID NO: 24015 - DNA, 60 bp, Artificial
  Synthetic oligonucleotide
gcagtgatagaggctctccccagaaacatggtcatcacctgtcaggggtcagaggacatc

SEQ ID NO: 24016 - DNA, 60 bp, Artificial
  Synthetic oligonucleotide
tattgaggggagaccagaggatccagtcgagatagctctgtatcaaccaaactcaggctg

SEQ ID NO: 24017 - DNA, 60 bp, Artificial
  Synthetic oligonucleotide
gtattcacatggtattgatgtgacagatttgtttgctgcacagccagggttgacaagtgc

SEQ ID NO: 24018 - DNA, 60 bp, Artificial
  Synthetic oligonucleotide
tcagagagtgtccaagtaaacgttcctaataatctcctactaatgtaaatgtccctggtt

SEQ ID NO: 24019 - DNA, 60 bp, Artificial
  Synthetic oligonucleotide
cggacaatgctatgaggacgatgttcattacctcctcaatgacatgagggacttcttgga

SEQ ID NO: 24020 - DNA, 60 bp, Artificial
  Synthetic oligonucleotide
tgtagatcattgagcatgacctcccagaaagtaggaggaatgttacaaggcctatcaagc

SEQ ID NO: 24021 - DNA, 60 bp, Artificial
  Synthetic oligonucleotide
gacttcttggaagaatgtcacaatctgtcccatcctgattgtctgatctccaaacaaggc

SEQ ID NO: 24022 - DNA, 55 bp, Artificial
  Synthetic oligonucleotide
ctccaaacaaggcttctaaaatgcgcaatcctaaatgcctaggatccactgtgcg

SEQ ID NO: 24023 - DNA, 60 bp, Artificial
  Synthetic oligonucleotide
tctgctgccatttttgaagcccttctcatcatgtggctttctaaaacaatgaatataatg

SEQ ID NO: 24024 - DNA, 60 bp, Artificial
  Synthetic oligonucleotide
gaatgtctgctaccatttttgaatcccttctcatcatgtggctttctaaaacaatgaatg

SEQ ID NO: 24025 - DNA, 56 bp, Artificial
  Synthetic oligonucleotide
cacaagtgttgatctaacaaagaaacctcaagttggaccgagacaacccgagaaaa

SEQ ID NO: 24026 - DNA, 60 bp, Artificial
  Synthetic oligonucleotide
gaagcccttctcatcatgtggctttctaaaacaatgaatataatgcttgttggctggctg

SEQ ID NO: 24027 - DNA, 60 bp, Artificial
  Synthetic oligonucleotide
ctcgggttgtcttggtccaacttgaggtttctttgttagatcaacacttgtgttgtccca

SEQ ID NO: 24028 - DNA, 60 bp, Artificial
  Synthetic oligonucleotide
tctcgggttgtcttggtccaacttgaggtttctttgttagatcaacacttgtattgtccc

SEQ ID NO: 24029 - DNA, 60 bp, Artificial
  Synthetic oligonucleotide
cgggttgtctcggtccaacttgaggtttctttgttagatcaacacttgtgttgtcccaag

SEQ ID NO: 24030 - DNA, 60 bp, Artificial
  Synthetic oligonucleotide
ctcgggttgtctcggtccaacttgaggtttctttgttagatcaacacttgtgttgtccca

SEQ ID NO: 24031 - DNA, 60 bp, Artificial
  Synthetic oligonucleotide
cgggttgtcttggtccaacttgaggtttctttgttagatcaacacttgtattgtcccaag

SEQ ID NO: 24032 - DNA, 60 bp, Artificial
  Synthetic oligonucleotide
cgggttgtcttggtccaacttgaggtttctttgttagatcaacacttgtgttgtcccaag

SEQ ID NO: 24033 - DNA, 60 bp, Artificial
  Synthetic oligonucleotide
attcttggaagatcttgggacaacacaagtgttgatctaacaaagaaacctcaagttggg

SEQ ID NO: 24034 - DNA, 60 bp, Artificial
  Synthetic oligonucleotide
aagtcgatgctgtcagctatgagcttggcatctttcaacacatctgttttcacagtgtgg

SEQ ID NO: 24035 - DNA, 60 bp, Artificial
  Synthetic oligonucleotide
gtgtgcaatacaacctctctcattcctatgctggggatgcggccgaacactgtgggacag

SEQ ID NO: 24036 - DNA, 60 bp, Artificial
  Synthetic oligonucleotide
cccacagtgttcggccgcatccccagcataggaatgagagaggttgtattgcacactgat

SEQ ID NO: 24037 - DNA, 60 bp, Artificial
  Synthetic oligonucleotide
tgtgatttcaatggagggaaaatcagtgtgcaatacaacctctctcattcctatgctggg

SEQ ID NO: 24038 - DNA, 60 bp, Artificial
  Synthetic oligonucleotide
tatgaagccatgagttgtgatttcaatggagggaaaatcagtgtgcaatacaacctctct

SEQ ID NO: 24039 - DNA, 56 bp, Artificial
  Synthetic oligonucleotide
aaaactgtttggaagagacgctgagcaacagcgcctccctgactctccacctcgaa

SEQ ID NO: 24040 - DNA, 60 bp, Artificial
  Synthetic oligonucleotide
gggaacacagcagttgcaaagtgtaatcaaaatcatgactctgaattctgtgacatgttg

SEQ ID NO: 24041 - DNA, 60 bp, Artificial
  Synthetic oligonucleotide
tatttccactggatcattaaatctaccctcaatgtcaatccatgtaggagcgttggggtc

SEQ ID NO: 24042 - DNA, 60 bp, Artificial
  Synthetic oligonucleotide
ggctcaataaacttctcaaaacactttatttgatctgtcaggcgatcaggtgtctctttg

SEQ ID NO: 24043 - DNA, 57 bp, Artificial
  Synthetic oligonucleotide
cattttaagggaaatacttgaattgcgcaaccaaaaatgcctaggatccactgtgcg

SEQ ID NO: 24044 - DNA, 60 bp, Artificial
  Synthetic oligonucleotide
gcgcaccggggatcctaggcatttttggttgcgcaattcaagtgtcctatttaaaatggg

SEQ ID NO: 24045 - DNA, 60 bp, Artificial
  Synthetic oligonucleotide
tgcatcaaacatgatgcagtccatcagtgcacagtgaggggttatttcctctttgccgcc

SEQ ID NO: 24046 - DNA, 60 bp, Artificial
  Synthetic oligonucleotide
agggtggcaaagaggaaataacccctcactgtgccctaatggactgtatcatgtttgatg

SEQ ID NO: 24047 - DNA, 60 bp, Artificial
  Synthetic oligonucleotide
tatataatgatgactgttgttctttgtgcaggagagaggcatggtcatattgagtgtctc

SEQ ID NO: 24048 - DNA, 60 bp, Artificial
  Synthetic oligonucleotide
ccaaaggaatgacttcacttctttggaattggccattgctggagatttttgacagtgaaa

SEQ ID NO: 24049 - DNA, 60 bp, Artificial
  Synthetic oligonucleotide
cagtactgcccaagttctctcctgagtgcctgggtccaaaggaatgacttcacttctttg

SEQ ID NO: 24050 - DNA, 60 bp, Artificial
  Synthetic oligonucleotide
caaatgtcaagaccaactcccattggctttgctagcattctgagccaacggattaggagc

SEQ ID NO: 24051 - DNA, 60 bp, Artificial
  Synthetic oligonucleotide
ctgagccaacggattaggagcatttacatttcaagacgactgatgagcacattcacttgg

SEQ ID NO: 24052 - DNA, 60 bp, Artificial
  Synthetic oligonucleotide
attcacttggtctctatccgacagttcaggtactgagaatccaggtggctattgtctcac

SEQ ID NO: 24053 - DNA, 60 bp, Artificial
  Synthetic oligonucleotide
tcctgctctctaatctacaaggacacatataacttctcatccattgaacttgacctctca

SEQ ID NO: 24054 - DNA, 58 bp, Artificial
  Synthetic oligonucleotide
attgtctcaccagatggatgctttttgcggctgacttgaaatgctttggaaacacagc

SEQ ID NO: 24055 - DNA, 60 bp, Artificial
  Synthetic oligonucleotide
gaagagttctgcgacatgttgaggcttattgacttcaacaagcaagccttgaaaacattc

SEQ ID NO: 24056 - DNA, 60 bp, Artificial
  Synthetic oligonucleotide
caagccttgaaaacattcaaatcggaggttaaccatggtctacaactaattacaaaggcg

SEQ ID NO: 24057 - DNA, 60 bp, Artificial
  Synthetic oligonucleotide
actcacaccactatgtcttcttcaacggatctggcttagagatgacattcactaacgatt

SEQ ID NO: 24058 - DNA, 60 bp, Artificial
  Synthetic oligonucleotide
gtcccaaactggttgtttaagagtgaggagtctttcacatcccacacccgcaccactccg

SEQ ID NO: 24059 - DNA, 60 bp, Artificial
  Synthetic oligonucleotide
agctctcccttctatgtcaatccacgtcttggcatttggatccacggcggccatcagatc

SEQ ID NO: 24060 - DNA, 60 bp, Artificial
  Synthetic oligonucleotide
gagctagtatctgagacattgtgagaccagaaggcatcccgtgtccggcccctttgggtt

SEQ ID NO: 24061 - DNA, 60 bp, Artificial
  Synthetic oligonucleotide
cgcacagtggatcctaggcattttggttgcgcttatttcttgtccaattatgggacagat

SEQ ID NO: 24062 - DNA, 60 bp, Artificial
  Synthetic oligonucleotide
tggagtcctgtttgaactgtttggcgtctgtgggttctctgtagaagtgtatgtaagctc

SEQ ID NO: 24063 - DNA, 60 bp, Artificial
  Synthetic oligonucleotide
actgtttggcgtctgtgggttctctgtagaagtgtatgtaagctcctgtttgtggctggt

SEQ ID NO: 24064 - DNA, 60 bp, Artificial
  Synthetic oligonucleotide
gctcctgtttgtggctggtaaaaggctatctccacggggtcctcagctctcccttctatg

SEQ ID NO: 24065 - DNA, 60 bp, Artificial
  Synthetic oligonucleotide
cccaggctgcacgttgaagagatctccaatgtcaataccatgggagtatttggagtcctg

SEQ ID NO: 24066 - DNA, 60 bp, Artificial
  Synthetic oligonucleotide
gcaacgggacctatctaaatgagactcatttttctgatgagattgaacaggaagcagaca

SEQ ID NO: 24067 - DNA, 60 bp, Artificial
  Synthetic oligonucleotide
ttttattcaatcacagtgttcctccatctcataaagattccaacgcacagacacatcgtg

SEQ ID NO: 24068 - DNA, 60 bp, Artificial
  Synthetic oligonucleotide
aaatgacacaagaacaggtagagtctctctgcctaagtgctggatgatcagcaacgggac

SEQ ID NO: 24069 - DNA, 58 bp, Artificial
  Synthetic oligonucleotide
atgccttgatcaatgaccaactcattatgaagaatcacttaagggacctaatgggtat

SEQ ID NO: 24070 - DNA, 60 bp, Artificial
  Synthetic oligonucleotide
acatcccacacccgcaccactccgtctgcaccaggcctgggtgcattcctcgcattgcta

SEQ ID NO: 24071 - DNA, 60 bp, Artificial
  Synthetic oligonucleotide
gcctatcatgtccagaagccgttttctctgatcaagttgttgatttgttagattgcccat

SEQ ID NO: 24072 - DNA, 60 bp, Artificial
  Synthetic oligonucleotide
cattcttctgctgtgtagatttcagttcaacaaggttgaacactgcttggtttaggtccc

SEQ ID NO: 24073 - DNA, 60 bp, Artificial
  Synthetic oligonucleotide
ggtttaggtcccttagcctcttgaggtctgagtcattccttttgtctttcctcatgagcc

SEQ ID NO: 24074 - DNA, 60 bp, Artificial
  Synthetic oligonucleotide
gtctgtccaagtcagctgcgagaaccaagaggtcgtcagacgttagcttcccaactctca

SEQ ID NO: 24075 - DNA, 60 bp, Artificial
  Synthetic oligonucleotide
cttttgtctttcctcatgagcctttgaatattggagacttctgagaagtccagactgtgc

SEQ ID NO: 24076 - DNA, 60 bp, Artificial
  Synthetic oligonucleotide
tgtggtgcctataaacagccgggactacccaccaagtggaagcgctgatctccacagggg

SEQ ID NO: 24077 - DNA, 60 bp, Artificial
  Synthetic oligonucleotide
caatctgctcctgtggtgcctataaacagccgggactacccaccaagtggaagcgctgat

SEQ ID NO: 24078 - DNA, 60 bp, Artificial
  Synthetic oligonucleotide
gccacaagttataagtacctggttatccaaaacattagctgggctgatcattgtcaaatg

SEQ ID NO: 24079 - DNA, 60 bp, Artificial
  Synthetic oligonucleotide
ggacaagggtgtcccaagccacacagactaaacagtagagcaatctgctcctgtggtgcc

SEQ ID NO: 24080 - DNA, 60 bp, Artificial
  Synthetic oligonucleotide
acctacatcgctcagttgccaaatggcgacggcactggcagatggacattctgttatgcc

SEQ ID NO: 24081 - DNA, 60 bp, Artificial
  Synthetic oligonucleotide
ctaatggtgtactggatgctttttataggttccattggggcagaaatataacctacatcg

SEQ ID NO: 24082 - DNA, 60 bp, Artificial
  Synthetic oligonucleotide
gccacaatgatcgaacagatgcaatgaaccactgtggcactgtagctaatggtgtactgg

SEQ ID NO: 24083 - DNA, 60 bp, Artificial
  Synthetic oligonucleotide
acgatcatgcgctaatgggcattgtcacaactttccacttgtcaatcccgaacttcaatc

SEQ ID NO: 24084 - DNA, 51 bp, Artificial
  Synthetic oligonucleotide
ctaacgattcacttcttaaccacaaattctgcaatctttcagacgcccata

SEQ ID NO: 24085 - DNA, 60 bp, Artificial
  Synthetic oligonucleotide
tcctgtcagacttgttctgcatgctatataaggccaaccgttgccagagagacatacttt

SEQ ID NO: 24086 - DNA, 60 bp, Artificial
  Synthetic oligonucleotide
taccaccatctagcatacatgcgcctgccttcactgctgcactcaagctgaagttgtacc

SEQ ID NO: 24087 - DNA, 60 bp, Artificial
  Synthetic oligonucleotide
gcagattttcatatgggtttctgtcgcctggtgtatctgacacaaacatactgtgggctc

SEQ ID NO: 24088 - DNA, 60 bp, Artificial
  Synthetic oligonucleotide
tttggaggtaaaagctccaaaaccgctgatgttaacccaggctgcacgttgaagagatct

SEQ ID NO: 24089 - DNA, 60 bp, Artificial
  Synthetic oligonucleotide
cacaacatcatttaactcatactgtccctgtttactcatacaggctagagtgagactagg

SEQ ID NO: 24090 - DNA, 60 bp, Artificial
  Synthetic oligonucleotide
gcattaggatacttggctgcgtaaactagaccaagatcagtgagagattgcacaacatca

SEQ ID NO: 24091 - DNA, 60 bp, Artificial
  Synthetic oligonucleotide
aagttgtacccagagacattgatagatgatttggaaacatcaataatgcttaagactggg

SEQ ID NO: 24092 - DNA, 60 bp, Artificial
  Synthetic oligonucleotide
gacctctcacacctcaacatgacattgcccatgtcctgcagccgaaacaactcacaccac

SEQ ID NO: 24093 - DNA, 60 bp, Artificial
  Synthetic oligonucleotide
ctcccctgagaatccaggagcctccttatgtcttcagacccttggcaggttaagaccata

SEQ ID NO: 24094 - DNA, 60 bp, Artificial
  Synthetic oligonucleotide
ccttctttcaggaagtgcctcacattatagaggaagtcatgaacattgttctgatcaccc

SEQ ID NO: 24095 - DNA, 60 bp, Artificial
  Synthetic oligonucleotide
gacttgtggtctgattggattgatttcctttctcttactgtgtgggaagtcctgctctct

SEQ ID NO: 24096 - DNA, 56 bp, Artificial
  Synthetic oligonucleotide
aaaatccgaatttatcccacacttcatcttcaaattttctggcctcagatttggac

SEQ ID NO: 24097 - DNA, 60 bp, Artificial
  Synthetic oligonucleotide
ctgggcaacacagccctgatggaacccgggctgaatctgcctgtggatgctgcttcatac

SEQ ID NO: 24098 - DNA, 60 bp, Artificial
  Synthetic oligonucleotide
cttattttcagctgaagtgtatgaagatcttgtgaatttgatttatgaggatgtcactgc

SEQ ID NO: 24099 - DNA, 60 bp, Artificial
  Synthetic oligonucleotide
acaccaatgtcaaacccgacttgaagactccgtgtccgttggagaggttgtgccctaaat

SEQ ID NO: 24100 - DNA, 60 bp, Artificial
  Synthetic oligonucleotide
ttacaaactcatctttacgaaacctttgtttctattcagatgaatccccaacagagaggt

SEQ ID NO: 24101 - DNA, 60 bp, Artificial
  Synthetic oligonucleotide
aaaaccaaaggtaagtacaagctggacccaaaagagataaacttcaaaattctaaagagg

SEQ ID NO: 24102 - DNA, 60 bp, Artificial
  Synthetic oligonucleotide
acttggattcacagatgcagcactacaaataagggagacatcacgcattagttcaagaga

SEQ ID NO: 24103 - DNA, 60 bp, Artificial
  Synthetic oligonucleotide
attttactgtgatcctaagaggtttttcttgccgatctttagtgcagatgtgattcaaag

SEQ ID NO: 24104 - DNA, 60 bp, Artificial
  Synthetic oligonucleotide
gttgaaagcattgtcaagtctaagtttgtcactcattaacagcatgaagacagcagcagt

SEQ ID NO: 24105 - DNA, 60 bp, Artificial
  Synthetic oligonucleotide
tacaaatcttgttcgagtctatgttggtgcctgtgatcatgtcaacgtctcaatttaaaa

SEQ ID NO: 24106 - DNA, 60 bp, Artificial
  Synthetic oligonucleotide
ggaccaagttgatgagcaccacaagaactgtgcaacgggaagaaatacctagtcttgtta

SEQ ID NO: 24107 - DNA, 60 bp, Artificial
  Synthetic oligonucleotide
ttactatggcatatccacaagatggtagaagtgcctttcaatgttgtagaagcatacatg

SEQ ID NO: 24108 - DNA, 60 bp, Artificial
  Synthetic oligonucleotide
ccaaagtagtgtggcatcaggattcataggagtctgtaaaagcatgggttcaagatgcgt

SEQ ID NO: 24109 - DNA, 60 bp, Artificial
  Synthetic oligonucleotide
gactcaaaggtggtcatcattcgactggaagcactggaacctgagaaaaggtcaaagttc

SEQ ID NO: 24110 - DNA, 60 bp, Artificial
  Synthetic oligonucleotide
cacacaggtaagatcaccttacatcgtgattgtcaccactgtaatcagcgcaagggtgtt

SEQ ID NO: 24111 - DNA, 60 bp, Artificial
  Synthetic oligonucleotide
gtgctgaccaatgcttgtgagctaggcaattgggtgtttcaaaaggctgaagtgccaaag

SEQ ID NO: 24112 - DNA, 60 bp, Artificial
  Synthetic oligonucleotide
ttcggactttcttacaaggagcaagtaggtggtaacagagagctttatgtcggtgacttg

SEQ ID NO: 24113 - DNA, 60 bp, Artificial
  Synthetic oligonucleotide
gttgtatattgtaaagcaaaatgagcttgcaatgtctcacagtagggagtctcacccact

SEQ ID NO: 24114 - DNA, 60 bp, Artificial
  Synthetic oligonucleotide
gcagacagcaatacttattgacgatctcatactcctagtactcaacaattcaagagagga

SEQ ID NO: 24115 - DNA, 60 bp, Artificial
  Synthetic oligonucleotide
gccacacatgtcaccagtcatctttgccgcattattgaagggccttgagttcaatctcaa

SEQ ID NO: 24116 - DNA, 60 bp, Artificial
  Synthetic oligonucleotide
gttgtcagacaaagcggccttgcagtgtcaatggaccactcaaaatgggggccacacatg

SEQ ID NO: 24117 - DNA, 60 bp, Artificial
  Synthetic oligonucleotide
gtctggtgtgtagtgaatttcctcttgatgacatcttgcctcttctaagggaaccagaca

SEQ ID NO: 24118 - DNA, 60 bp, Artificial
  Synthetic oligonucleotide
acaaatcttctccaggcactgtgttcagagaggtgctcttaatgcaagggctgccgtctg

SEQ ID NO: 24119 - DNA, 60 bp, Artificial
  Synthetic oligonucleotide
tttgttcagtacatattttaggcataatagaccaacttaggcaatctgaaatcaggcacc

SEQ ID NO: 24120 - DNA, 57 bp, Artificial
  Synthetic oligonucleotide
atgttgcaactctctggccaacatgataggaaactgcaagctacagatagagaagat

SEQ ID NO: 24121 - DNA, 60 bp, Artificial
  Synthetic oligonucleotide
taagttccctgtcatctttggaaaatcagagtcttggtttagaatcactacttgccgtga

SEQ ID NO: 24122 - DNA, 60 bp, Artificial
  Synthetic oligonucleotide
gaggtagaccagggagggggcaacctgattatgcaattatgggtgaaagtgagtttgagg

SEQ ID NO: 24123 - DNA, 60 bp, Artificial
  Synthetic oligonucleotide
ccctgacttctttgctgtatctaagtcccatcctaaatcccaaccaagatttgagctggg

SEQ ID NO: 24124 - DNA, 60 bp, Artificial
  Synthetic oligonucleotide
cagtatggagctccctattgaggaggaagagaaaatggtgcatgacatggagagactact

SEQ ID NO: 24125 - DNA, 66 bp, Artificial
  Synthetic oligonucleotide
catactatgcactccttccaagcgtattcaaatttacttacaaggctttagatattatattatggc

SEQ ID NO: 24126 - DNA, 60 bp, Artificial
  Synthetic oligonucleotide
catagggaggtgcagacggactctccagaaactccatcttggttggaagtgagtgtccgc

SEQ ID NO: 24127 - DNA, 58 bp, Artificial
  Synthetic oligonucleotide
ggtcaaagttcattgctaacctcttccaatacctctcaagtgcacagtctcacaataa

SEQ ID NO: 24128 - DNA, 60 bp, Artificial
  Synthetic oligonucleotide
gtgaaaccctcatcttcttgcgaccctatgaccccctccttcacaagcacagctctggac

SEQ ID NO: 24129 - DNA, 59 bp, Artificial
  Synthetic oligonucleotide
aaaagctggaatctaaatgcgaagggagaccagggatcaacaaggatgtgcttagtgtt

SEQ ID NO: 24130 - DNA, 60 bp, Artificial
  Synthetic oligonucleotide
gacctaaggtacatgatcgagaactttcctgaagtcttcgaacatatgttgcatgatgct

SEQ ID NO: 24131 - DNA, 60 bp, Artificial
  Synthetic oligonucleotide
gacacagatagtggtctttgcacctgataagacccttgttgacaaaccaacaggacttgc

SEQ ID NO: 24132 - DNA, 60 bp, Artificial
  Synthetic oligonucleotide
tgtgcctagaagagatggatgtgctagattgggtcaacgggtcgagagggtacagactcc

SEQ ID NO: 24133 - DNA, 60 bp, Artificial
  Synthetic oligonucleotide
cgggaaagatgtgttagactttaatgatttgttagaagatcaagatgttcgtttcaagtc

SEQ ID NO: 24134 - DNA, 60 bp, Artificial
  Synthetic oligonucleotide
gggtcatagggacccttcccaccacatcctcgtcgccatgactctccctgacttctttgc

SEQ ID NO: 24135 - DNA, 60 bp, Artificial
  Synthetic oligonucleotide
aaactaagatttcttattgaaaggggttcattgctggattcattagactgtgatggctat

SEQ ID NO: 24136 - DNA, 60 bp, Artificial
  Synthetic oligonucleotide
cctctgatctgtatggcctaatcactgagcaattcattaactatgcattggagctctgct

SEQ ID NO: 24137 - DNA, 60 bp, Artificial
  Synthetic oligonucleotide
ctggatgaatagagatgactatgagaatatggagcaacacatcttagcatcaccctcgga

SEQ ID NO: 24138 - DNA, 60 bp, Artificial
  Synthetic oligonucleotide
agagatgagctaaatgttgacctggtgttagattgtatggagtttcactactttttatca

SEQ ID NO: 24139 - DNA, 60 bp, Artificial
  Synthetic oligonucleotide
gggctctctcacactattgtaccaaaagacaggagagagatccaggtgttatgctgttgc

SEQ ID NO: 24140 - DNA, 60 bp, Artificial
  Synthetic oligonucleotide
acaacacctctagaacaatgaatctagatgacttggacgttggctttgttagcagcaacc

SEQ ID NO: 24141 - DNA, 59 bp, Artificial
  Synthetic oligonucleotide
gtccccctccttacaaagtttgttgctgcggccttacacaatataaaggctaaagcacc

SEQ ID NO: 24142 - DNA, 60 bp, Artificial
  Synthetic oligonucleotide
cgcaccgaggatcctaggcatttcttgatcatggaggaatacgtttccgaatttaaagac

SEQ ID NO: 24143 - DNA, 60 bp, Artificial
  Synthetic oligonucleotide
gggaagagttatctgagcagaagaataacgtgcttgcacaggttaaagacagagccatca

SEQ ID NO: 24144 - DNA, 60 bp, Artificial
  Synthetic oligonucleotide
caatcaggacttcttgaaattgatgcagcttagttctgatctcaagaggcagaatataac

SEQ ID NO: 24145 - DNA, 60 bp, Artificial
  Synthetic oligonucleotide
ggttgtagagaggcttcggtggttgctcttgaagcttatggatggactgaggacatctgg

SEQ ID NO: 24146 - DNA, 60 bp, Artificial
  Synthetic oligonucleotide
cacatgtcctacactaccggatgtcacaccagatggctactgcatggttggagatgtcct

SEQ ID NO: 24147 - DNA, 60 bp, Artificial
  Synthetic oligonucleotide
gaggacatctggtgaagaagttgaggaattggagtacgaacgccttataagttccctgtc

SEQ ID NO: 24148 - DNA, 60 bp, Artificial
  Synthetic oligonucleotide
tcactacagcctgcatactgcaaaaaaccagtcaaggcctcatcaccacccctaccaatc

SEQ ID NO: 24149 - DNA, 60 bp, Artificial
  Synthetic oligonucleotide
cctgtagagccaagcgctcccccaccatgaccaaccacaaacccggtccatcagaccccc

SEQ ID NO: 24150 - DNA, 60 bp, Artificial
  Synthetic oligonucleotide
agcccggcatcaaaatccaaccagcttgtcatttcctcacacatcccagctaaaacctca

SEQ ID NO: 24151 - DNA, 60 bp, Artificial
  Synthetic oligonucleotide
gcaggcgtgtgcttcgcaggactcaagttcaacaaggctagagagcagcttgaagccttc

SEQ ID NO: 24152 - DNA, 60 bp, Artificial
  Synthetic oligonucleotide
ctataacctcttgaaccatcaacccagtctctcacatcactctcctctagacacaagaat

SEQ ID NO: 24153 - DNA, 60 bp, Artificial
  Synthetic oligonucleotide
gatgaaatcttgtctctcacttccttgctccaaagcctcttcaaatgtgcttcagctccc

SEQ ID NO: 24154 - DNA, 60 bp, Artificial
  Synthetic oligonucleotide
gacttgaattcactggcaaaagtaccagctactgttttaggactgacgaatttattcaac

SEQ ID NO: 24155 - DNA, 60 bp, Artificial
  Synthetic oligonucleotide
gttcttgttgctcacaaaagattgcttgattattgtcaaaactttgaacatgtgaatcat

SEQ ID NO: 24156 - DNA, 60 bp, Artificial
  Synthetic oligonucleotide
gtctctaggatctaatttatattttcctttagtcttaaaatgctctgtcaagtccaccac

SEQ ID NO: 24157 - DNA, 60 bp, Artificial
  Synthetic oligonucleotide
gtgataagaccgtataagtcagacatattgtgtagtattccttgtcccatatcaaccaca

SEQ ID NO: 24158 - DNA, 60 bp, Artificial
  Synthetic oligonucleotide
atgctttaaacatacagtcctgaactactctcttcagtttcccatgaaccttttccagcc

SEQ ID NO: 24159 - DNA, 60 bp, Artificial
  Synthetic oligonucleotide
tgtgcaagcattgttatcgccaaatccctgaaagtaaacttcttcacagtggacaattcc

SEQ ID NO: 24160 - DNA, 60 bp, Artificial
  Synthetic oligonucleotide
gtcagcataaaatgaaatcttgctgccataatcaatctgttgctcattgtcagaaaatgc

SEQ ID NO: 24161 - DNA, 60 bp, Artificial
  Synthetic oligonucleotide
gttgctggacaaatctaatgcagtgctagtgaaagatggggttaatggatcatggttcag

SEQ ID NO: 24162 - DNA, 60 bp, Artificial
  Synthetic oligonucleotide
cagtaagggtttcaccaatctcattcaactttggcacaactacacttttgttgctggaca

SEQ ID NO: 24163 - DNA, 60 bp, Artificial
  Synthetic oligonucleotide
atcagatttgaggagagcccatctgctccaccatacgaaccctaactgcccaccgggccc

SEQ ID NO: 24164 - DNA, 60 bp, Artificial
  Synthetic oligonucleotide
gacacaagaatggattcaatgggtgcccagaataacagactagagaatttgtgcgcttgg

SEQ ID NO: 24165 - DNA, 60 bp, Artificial
  Synthetic oligonucleotide
gctcgtccataaaagattcatcaggggccacaacctcaccagactcgctctttctattgc

SEQ ID NO: 24166 - DNA, 60 bp, Artificial
  Synthetic oligonucleotide
gcttcagctcccttttctttactttgctttctattcagctcatccttggacatcccctca

SEQ ID NO: 24167 - DNA, 60 bp, Artificial
  Synthetic oligonucleotide
cagccagctggtttggtgctttggcttttatgttatgaagagcagcggcaacaaattttg

SEQ ID NO: 24168 - DNA, 60 bp, Artificial
  Synthetic oligonucleotide
gccacatcaacattcaaagaaccatcttcatgattcaaggctgacgaggttgataacatg

SEQ ID NO: 24169 - DNA, 60 bp, Artificial
  Synthetic oligonucleotide
tttctaccacccagtctggcatgaactcaacataataggatgacctaccatcaatcatag

SEQ ID NO: 24170 - DNA, 60 bp, Artificial
  Synthetic oligonucleotide
gatttgcttttgcacaatgaaaatgatccacaattcaaccagtcatttgtggcatccaac

SEQ ID NO: 24171 - DNA, 60 bp, Artificial
  Synthetic oligonucleotide
gcagttcactccttttagtttaaaggggcccctctcatctgcaatcatgacacaaccaag

SEQ ID NO: 24172 - DNA, 60 bp, Artificial
  Synthetic oligonucleotide
ctaggttggattcagtcatggatatacgatgctcttctcctctaagtgatcctatataca

SEQ ID NO: 24173 - DNA, 60 bp, Artificial
  Synthetic oligonucleotide
gaggtaagagacccacaccatccaggctaatgtggttgccacctgattgtgaaacaaagt

SEQ ID NO: 24174 - DNA, 60 bp, Artificial
  Synthetic oligonucleotide
cctcatcttcgagaacagtggactttcagcagagaaatttacatcttcatgtctgagaac

SEQ ID NO: 24175 - DNA, 60 bp, Artificial
  Synthetic oligonucleotide
tctctaagacaatcctggttaagtcgtccatccaaatcatcacttgcctctctgaagccg

SEQ ID NO: 24176 - DNA, 60 bp, Artificial
  Synthetic oligonucleotide
atggacgcttcaactgtaagtcttgctggtttgcaaacagaggtctcatagcctgctcag

SEQ ID NO: 24177 - DNA, 60 bp, Artificial
  Synthetic oligonucleotide
gactagactcaggtctcagtctcaattctgtggaatctgcggcaagcctctgccaacaaa

SEQ ID NO: 24178 - DNA, 60 bp, Artificial
  Synthetic oligonucleotide
gtcgtgcaattcgttaacgtgttcctccatgttcaaggaaagcgtaggatccactgtgcg

SEQ ID NO: 24179 - DNA, 60 bp, Artificial
  Synthetic oligonucleotide
cattcatcaggggaaccttgtatggatgcaacaaggaattcttcttcaatcttcccagac

SEQ ID NO: 24180 - DNA, 60 bp, Artificial
  Synthetic oligonucleotide
gagacacggagacaaagatctggaagggagagtccccatgacactcaatctcccacaggg

SEQ ID NO: 24181 - DNA, 60 bp, Artificial
  Synthetic oligonucleotide
gactcctggttagagcgcacaaacacctctagtagtataagtacatctccaatcaaccta

SEQ ID NO: 24182 - DNA, 60 bp, Artificial
  Synthetic oligonucleotide
gggattcaagtccgagactttgattttccaaggcagaaagactagatacaagcctctcat

SEQ ID NO: 24183 - DNA, 60 bp, Artificial
  Synthetic oligonucleotide
cccgtatgaaactagtcaatctcgacagcttgggagtccgggagcaatcttctgcagttc

SEQ ID NO: 24184 - DNA, 60 bp, Artificial
  Synthetic oligonucleotide
cacttgcctctctgaagccgtcaatgcatccacttccaactttgcaaagaggtcattaca

SEQ ID NO: 24185 - DNA, 60 bp, Artificial
  Synthetic oligonucleotide
cctctgatagtgttgctccacctctatccatgagtcccaatcctctcttaacaaatccac

SEQ ID NO: 24186 - DNA, 60 bp, Artificial
  Synthetic oligonucleotide
ccccattttgaatgatccatgctcaccgcgaatccaccctgcctgacaacagatttcata

SEQ ID NO: 24187 - DNA, 60 bp, Artificial
  Synthetic oligonucleotide
taagttttccaacatcagttgccaccccagtcctcgttgtaggtgattcatcagagtaga

SEQ ID NO: 24188 - DNA, 60 bp, Artificial
  Synthetic oligonucleotide
ccaaccttttggctatggattctgagttactttcccttgtactaatgcgggcttcttctc

SEQ ID NO: 24189 - DNA, 60 bp, Artificial
  Synthetic oligonucleotide
gtagtctatgtaaaccctcacaaacttggtcctcttgctcacttgtcaactctggtgtag

SEQ ID NO: 24190 - DNA, 60 bp, Artificial
  Synthetic oligonucleotide
acatgtctagcggacaagggtttaagtacttctctagaaagtagaagtcatgggcagact

SEQ ID NO: 24191 - DNA, 60 bp, Artificial
  Synthetic oligonucleotide
aaataatcccagaagataggtcttgaatactctgaaacacttcgcagtgcatcctcacag

SEQ ID NO: 24192 - DNA, 60 bp, Artificial
  Synthetic oligonucleotide
ttaggtgcacttgaggtcttcatagagttcactaatgataagctaagacttgataaaatc

SEQ ID NO: 24193 - DNA, 60 bp, Artificial
  Synthetic oligonucleotide
ggcatctgtcagtattcttttggctcctcttacaaagttctttgataattttgattgaac

SEQ ID NO: 24194 - DNA, 60 bp, Artificial
  Synthetic oligonucleotide
caagaccagtctaagatcaccatatgccctgaggttgagccaccggtaaccagcaaggtc

SEQ ID NO: 24195 - DNA, 60 bp, Artificial
  Synthetic oligonucleotide
ccagtattatctctcacacactttgaccccatacttttgcaaacgccaataaacccagac

SEQ ID NO: 24196 - DNA, 60 bp, Artificial
  Synthetic oligonucleotide
gccaataaacccagacgatatgcaactttgaaatgccgacttattgatggcatctgtcag

SEQ ID NO: 24197 - DNA, 60 bp, Artificial
  Synthetic oligonucleotide
ggtctgtgagcctatcaggggtttcttttgtaattagatgacataggtaagacaaattca

SEQ ID NO: 24198 - DNA, 60 bp, Artificial
  Synthetic oligonucleotide
gggacatggatagctcttgctgcttgacaatataaagctcctctctcttcctcctcatga

SEQ ID NO: 24199 - DNA, 60 bp, Artificial
  Synthetic oligonucleotide
gtgcacctctcatatctgaacttgtgactggatctaatatgactaaaagtcatgctgaac

SEQ ID NO: 24200 - DNA, 60 bp, Artificial
  Synthetic oligonucleotide
tccgactttatcttccaactctgtctgactggagggttttatcggccagaagtggtttgg

SEQ ID NO: 24201 - DNA, 60 bp, Artificial
  Synthetic oligonucleotide
ttggtaaaattggtgcaccgaatacccaattccctaactcacaagcattggacaagacta

SEQ ID NO: 24202 - DNA, 60 bp, Artificial
  Synthetic oligonucleotide
aagcactcaacattgcattggtggcagtcagcctcatctgtatagtgaaaggcttggtga

SEQ ID NO: 24203 - DNA, 60 bp, Artificial
  Synthetic oligonucleotide
caggacagcactctcttccaagatgctggatgataagaaacaattcttacctcaactcat

SEQ ID NO: 24204 - DNA, 60 bp, Artificial
  Synthetic oligonucleotide
gttcagaggaaacatttaagataggtatgcacacaaaattccaagaggtgtccctctctt

SEQ ID NO: 24205 - DNA, 60 bp, Artificial
  Synthetic oligonucleotide
tgtaccttattgcaactacacacgattttggtatgtcaatcacacactttcaggacagca

SEQ ID NO: 24206 - DNA, 60 bp, Artificial
  Synthetic oligonucleotide
gggaacactgcaattgccaagtgcaaccaaaatcacgactcagagttttgtgacatgcta

SEQ ID NO: 24207 - DNA, 60 bp, Artificial
  Synthetic oligonucleotide
cactgaatgaggagactaagacgagggtgaatgtcctgagccacaccatcaatgctctga

SEQ ID NO: 24208 - DNA, 60 bp, Artificial
  Synthetic oligonucleotide
ctacacacgattttggtatgtcaatcacacactttcaggacagcactctcttccaagatg

SEQ ID NO: 24209 - DNA, 60 bp, Artificial
  Synthetic oligonucleotide
catggggcaattcattagtttcatgcaggagatacctattttcttgcaagaagcactcaa

SEQ ID NO: 24210 - DNA, 60 bp, Artificial
  Synthetic oligonucleotide
ggtagatccagtttcaaaatcaacattgatagtgtcactgtgttaacaagatctgaagtg

SEQ ID NO: 24211 - DNA, 60 bp, Artificial
  Synthetic oligonucleotide
agtgatttcctcatttctgagatgctgggtaaggagtattcagagagacaggggagaact

SEQ ID NO: 24212 - DNA, 60 bp, Artificial
  Synthetic oligonucleotide
aattccaagaggtgtccctctctttaagtgcacttttgaccaatcagtctcatgaacttc

SEQ ID NO: 24213 - DNA, 60 bp, Artificial
  Synthetic oligonucleotide
catgaacttcctatgttatgtttagccaacaaaacacatctctatctaaagagtggtaga

SEQ ID NO: 24214 - DNA, 60 bp, Artificial
  Synthetic oligonucleotide
ctcatgaacacattcgaggggaaggttgccctctcccccatagattgaacagcatgggag

SEQ ID NO: 24215 - DNA, 60 bp, Artificial
  Synthetic oligonucleotide
gactctcaaggcatttttctcctggtcgcttactgaccctttagggaacgaagcccctgg

SEQ ID NO: 24216 - DNA, 59 bp, Artificial
  Synthetic oligonucleotide
ttgactcaatccctttctaagagactgggtccatctgaagcttggcacttccttggatt

SEQ ID NO: 24217 - DNA, 60 bp, Artificial
  Synthetic oligonucleotide
gtagagtaaattttcgtaggggttcctacttccaggtctgtcgtcaataaacataccctc

SEQ ID NO: 24218 - DNA, 60 bp, Artificial
  Synthetic oligonucleotide
cgccccataatttgcgatcgagagcctatatagggccagccatcacctgacaaacacagt

SEQ ID NO: 24219 - DNA, 60 bp, Artificial
  Synthetic oligonucleotide
gttaccaccatcaaggatggaggctcctgcttttactgctgccaacagactgaggttgta

SEQ ID NO: 24220 - DNA, 60 bp, Artificial
  Synthetic oligonucleotide
gaagttgtcgggactcactctgattgtctccaacatgttaccaccatcaaggatggaggc

SEQ ID NO: 24221 - DNA, 60 bp, Artificial
  Synthetic oligonucleotide
gtctgtcgtcaataaacataccctcccttctcttgacttgtaaggtgtttttgatcaggc

SEQ ID NO: 24222 - DNA, 60 bp, Artificial
  Synthetic oligonucleotide
ttcttttggtctttctaagcactcgttgaacttgagcaacctggttgaagtcaatgctgt

SEQ ID NO: 24223 - DNA, 60 bp, Artificial
  Synthetic oligonucleotide
agcatgggaggatgtaggtgtgggaagtatctgcctctgaagaagccaactatttggcat

SEQ ID NO: 24224 - DNA, 60 bp, Artificial
  Synthetic oligonucleotide
atttggcatcgtagacattaggacagcacatttgcgctcccacgcgctttgcccgggccg

SEQ ID NO: 24225 - DNA, 60 bp, Artificial
  Synthetic oligonucleotide
tacagtgttcttcactagcacactattcttgcacctcattggtttcccaactcatgaaca

SEQ ID NO: 24226 - DNA, 60 bp, Artificial
  Synthetic oligonucleotide
aagcccctgggggatactgtcttgaaaagtggatgcttgttgctagcgaattaaagtgtt

SEQ ID NO: 24227 - DNA, 60 bp, Artificial
  Synthetic oligonucleotide
tagcacactattcttgcacctcattggtttcccaactcatgaacacattcgaggggaagg

SEQ ID NO: 24228 - DNA, 60 bp, Artificial
  Synthetic oligonucleotide
aacacattccgctttttatcaaggagccaaaaaagcatagctgtaggaaggactctcaag

SEQ ID NO: 24229 - DNA, 60 bp, Artificial
  Synthetic oligonucleotide
ttcaacctgaagactggccgactgactgtaaggctgaccacacaaacacattccgctttt

SEQ ID NO: 24230 - DNA, 60 bp, Artificial
  Synthetic oligonucleotide
tgaagaaccctgttttgagggtgagcagtgtcttatcaaaattcaacctgaagactggcc

SEQ ID NO: 24231 - DNA, 60 bp, Artificial
  Synthetic oligonucleotide
tatttacagaggacgtgaagaaccctgttttgagggtgagcagtgtcttatcaaaattca

SEQ ID NO: 24232 - DNA, 51 bp, Artificial
  Synthetic oligonucleotide
ccagattaacatttcaagagctgatggcaatgttcactatggatggagatt

SEQ ID NO: 24233 - DNA, 60 bp, Artificial
  Synthetic oligonucleotide
ggcatttcttgtccatatttgcctaactgaaccaggtgaatcactcccaccatggggcaa

SEQ ID NO: 24234 - DNA, 60 bp, Artificial
  Synthetic oligonucleotide
acttaacatcaattaatttgacgagatcgatcgatgtctttgttcactctcctaaacttg

SEQ ID NO: 24235 - DNA, 60 bp, Artificial
  Synthetic oligonucleotide
cactctcctaaacttggttcttgttttgaaagtgatgaggagtgggttgttgcttggtgg

SEQ ID NO: 24236 - DNA, 50 bp, Artificial
  Synthetic oligonucleotide
cacctgtggtgcggaagtcttacagctcacagtgcaaaagctgttttggg

SEQ ID NO: 24237 - DNA, 60 bp, Artificial
  Synthetic oligonucleotide
cagtggatgtattgtttctttgcaggttgatataatgcaagctctactgggtcaagttgg

SEQ ID NO: 24238 - DNA, 60 bp, Artificial
  Synthetic oligonucleotide
tgactgtttgggtgaattgactcaatccctttctaagagactgggtccatctgaagcttg

SEQ ID NO: 24239 - DNA, 60 bp, Artificial
  Synthetic oligonucleotide
ccattgggacgacctccctgctgagcaaatccgagtgttctcaaaatctcactcctcctg

SEQ ID NO: 24240 - DNA, 60 bp, Artificial
  Synthetic oligonucleotide
ttcaagatcggaggccagttccattagttcatcccttgccaggtcaccaactttgaagat

SEQ ID NO: 24241 - DNA, 60 bp, Artificial
  Synthetic oligonucleotide
gaaggcctaaagaggtcaatgcttgaactacattgttcatagtctcccctccttggacag

SEQ ID NO: 24242 - DNA, 60 bp, Artificial
  Synthetic oligonucleotide
ctctaacaattccattgggacgacctccctgctgagcaaatccgagtgttctcaaaatct

SEQ ID NO: 24243 - DNA, 60 bp, Artificial
  Synthetic oligonucleotide
ctggcactgcatccggcttcttggtcagatctacgctcgtgttgtcccaggatcgcccca

SEQ ID NO: 24244 - DNA, 60 bp, Artificial
  Synthetic oligonucleotide
cggaggccagttccattagttcatcccttgccaggtcaccaactttgaagattgtgttct

SEQ ID NO: 24245 - DNA, 60 bp, Artificial
  Synthetic oligonucleotide
cctgtcgacctctatattgagatccctcaatttgttcaagtcatcatcggttcttttggt

SEQ ID NO: 24246 - DNA, 60 bp, Artificial
  Synthetic oligonucleotide
ctgatgtcatcagatccttgtgttgtaatcaccatgttgggaggtagtaaccctatgaca

SEQ ID NO: 24247 - DNA, 60 bp, Artificial
  Synthetic oligonucleotide
gtggctttctgaagcagtggatgtattgtttctttgcaggttgatataatgcaagctcta

SEQ ID NO: 24248 - DNA, 60 bp, Artificial
  Synthetic oligonucleotide
taagcactcgttgaacttgagcaacctggttgaagtcaatgctgtcggcaatcagcttag

SEQ ID NO: 24249 - DNA, 60 bp, Artificial
  Synthetic oligonucleotide
gcaagctctactgggtcaagttggaggtcctcgatgtccaaccaaatagtgttggagggg

SEQ ID NO: 24250 - DNA, 60 bp, Artificial
  Synthetic oligonucleotide
tagtagtggtattggttcctccttgggtagttctccactcacggctgagtggaacattat

SEQ ID NO: 24251 - DNA, 60 bp, Artificial
  Synthetic oligonucleotide
ggaacattatgcagtccagcagtgcacagtgaggttcatcaggactggggcttggtggag

SEQ ID NO: 24252 - DNA, 60 bp, Artificial
  Synthetic oligonucleotide
caatgtagccttggctgtggttacactgcttgctattataaagggcattgtgaatgtttg

SEQ ID NO: 24253 - DNA, 60 bp, Artificial
  Synthetic oligonucleotide
gagtcatttacagttaagctaggaggtgtcttccatgaattaccttcactatgtagggtc

SEQ ID NO: 24254 - DNA, 60 bp, Artificial
  Synthetic oligonucleotide
cgcacagtggatcctaggcgtttttactcacgcaaaaatttgtccacactattgttgggt

SEQ ID NO: 24255 - DNA, 60 bp, Artificial
  Synthetic oligonucleotide
tgtttggaaatcaggaattcttcagctgtttgtgttcttggttctggcgggaaggtcatg

SEQ ID NO: 24256 - DNA, 59 bp, Artificial
  Synthetic oligonucleotide
attgttgggtgtgacctagcataatgggacagttaatcagtttctttcaggacataccg

SEQ ID NO: 24257 - DNA, 60 bp, Artificial
  Synthetic oligonucleotide
aggagtctttgaacttgagaaacttgtgtgaaatcaagggagtctgcaatgagctttgca

SEQ ID NO: 24258 - DNA, 60 bp, Artificial
  Synthetic oligonucleotide
taggcatccggcatttattcgggaactacataactaatgatagctattcaaaaatgtctg

SEQ ID NO: 24259 - DNA, 60 bp, Artificial
  Synthetic oligonucleotide
aaaatgtctgtggttatgaggaacacctcctgggaaggtcaatgctcaaatagtcatgtg

SEQ ID NO: 24260 - DNA, 60 bp, Artificial
  Synthetic oligonucleotide
ttggagtgagccatagttcgcgttgtgtagaagactaagacaaaaatgcctaggatccac

SEQ ID NO: 24261 - DNA, 60 bp, Artificial
  Synthetic oligonucleotide
ggaaagtgatcacctaatagcagagatgttaagcaaagaataccaagacaggcaggggaa

SEQ ID NO: 24262 - DNA, 60 bp, Artificial
  Synthetic oligonucleotide
ggcgggccttcaatgtccatccagattgtgtctgatgaatctaatttcctcattgcttcc

SEQ ID NO: 24263 - DNA, 60 bp, Artificial
  Synthetic oligonucleotide
gaatttaacagatagtcctgagacccatcactataggagcaagattgaggtaggcatccg

SEQ ID NO: 24264 - DNA, 60 bp, Artificial
  Synthetic oligonucleotide
ctggtacataaaccacacgaaatctggtgagcactcactgcctcggtgttggctggtcag

SEQ ID NO: 24265 - DNA, 60 bp, Artificial
  Synthetic oligonucleotide
acaggctcgatagaaatggtgcttgcaggtgtggcaggtatcaaaaacttggaaaacaag

SEQ ID NO: 24266 - DNA, 60 bp, Artificial
  Synthetic oligonucleotide
gtgtttggtagcagttgaatgggaatggtgtcgggaagatgaccatcaagaacagactgg

SEQ ID NO: 24267 - DNA, 60 bp, Artificial
  Synthetic oligonucleotide
agatgaccatcaagaacagactggaacataatgcaatcgagaagagcacagtgtggctcc

SEQ ID NO: 24268 - DNA, 60 bp, Artificial
  Synthetic oligonucleotide
gcagttgaatgggaatggtgtcgggaagatgaccatcaagaacagactgaaacatgatgc

SEQ ID NO: 24269 - DNA, 60 bp, Artificial
  Synthetic oligonucleotide
gataactgaaccctgtggcaataagccaatgacgtaactcaatagaccaggttgagcatc

SEQ ID NO: 24270 - DNA, 60 bp, Artificial
  Synthetic oligonucleotide
tctggactgttccccagtcagtctgacatcaacaagttttaaatctttccttccatgtat

SEQ ID NO: 24271 - DNA, 60 bp, Artificial
  Synthetic oligonucleotide
gaccaggttgagcatcttcgaggtcctttaatagtatgccgtgtgagtgcctacttccat

SEQ ID NO: 24272 - DNA, 60 bp, Artificial
  Synthetic oligonucleotide
tctcataacagcaatcaggcattatcagttgagtatgtggatgtgcaccctgtcctctgt

SEQ ID NO: 24273 - DNA, 60 bp, Artificial
  Synthetic oligonucleotide
gaaggagattttgaaggtcccatattgcaactacacaagattctggtacataaaccacac

SEQ ID NO: 24274 - DNA, 60 bp, Artificial
  Synthetic oligonucleotide
acatagtttcctgaagaaggttggaaaactgccaactccacaggatcagttggcgggcct

SEQ ID NO: 24275 - DNA, 60 bp, Artificial
  Synthetic oligonucleotide
caagataggcaggggaagactcccctaacactggttgatctatgtttctggagtgcaatc

SEQ ID NO: 24276 - DNA, 60 bp, Artificial
  Synthetic oligonucleotide
gatgagaaacaaactgaaagaggttttgaaagtcccatattgcaactacacaagattctg

SEQ ID NO: 24277 - DNA, 60 bp, Artificial
  Synthetic oligonucleotide
ggaaaacaagtaacctggaagagaaagcattgatttcatcagccctccagctctgtcggc

SEQ ID NO: 24278 - DNA, 60 bp, Artificial
  Synthetic oligonucleotide
ttgggtggacaattaagggattgggacatgactttttgagggatccaagaatctgctgtg

SEQ ID NO: 24279 - DNA, 60 bp, Artificial
  Synthetic oligonucleotide
caatgctcaaatagtcatgtgaatacactgagatttcttgttaaaaatgcaggttacctt

SEQ ID NO: 24280 - DNA, 60 bp, Artificial
  Synthetic oligonucleotide
ctatgtagggtcaacaactcttacagtctaattaggctttctcataacagcaatcaggca

SEQ ID NO: 24281 - DNA, 60 bp, Artificial
  Synthetic oligonucleotide
gtccctaagtttatcaagatcagtgtctcctcgtttggacttacgtaggagtctttgaac

SEQ ID NO: 24282 - DNA, 60 bp, Artificial
  Synthetic oligonucleotide
caggcattatcagttgagtatgtggatgtgcaccctgtcctctgttcgtccagtccaacc

SEQ ID NO: 24283 - DNA, 59 bp, Artificial
  Synthetic oligonucleotide
aacacagctgtcgccaagtgtaatttgaatcatgactctgagttctgtgacatgttgag

SEQ ID NO: 24284 - DNA, 60 bp, Artificial
  Synthetic oligonucleotide
gaggccaagtccattaattcatctttgcccaaatcaccaaccttcagaactgtgttgttc

SEQ ID NO: 24285 - DNA, 60 bp, Artificial
  Synthetic oligonucleotide
tgtttctggagtgcaatctttttcaccacaagtctctttttacacctggttgggttccca

SEQ ID NO: 24286 - DNA, 60 bp, Artificial
  Synthetic oligonucleotide
actgtcttgaaaggtggatgttggttgctggagatttgaagtgctttggcaacacagctg

SEQ ID NO: 24287 - DNA, 60 bp, Artificial
  Synthetic oligonucleotide
gtcctgagacccatcactataggagcaagattgaggtaggcatccggcatttattcggga

SEQ ID NO: 24288 - DNA, 60 bp, Artificial
  Synthetic oligonucleotide
gggttcccaacgcatagacatatacagggtgacccgtgccctttgcctcacaggctcgat

SEQ ID NO: 24289 - DNA, 60 bp, Artificial
  Synthetic oligonucleotide
gttattcagtttggagggatcagatacatcccacaacctgacaaccccacctgcagcccc

SEQ ID NO: 24290 - DNA, 60 bp, Artificial
  Synthetic oligonucleotide
cagactgaaacatgatgcaatcgagaagagcacagtgtggctccttcgtggagttagcct

SEQ ID NO: 24291 - DNA, 60 bp, Artificial
  Synthetic oligonucleotide
acaatgacaccattgtgtgctctgcagaggtggccaaatttttcccaaacttcctgttca

SEQ ID NO: 24292 - DNA, 60 bp, Artificial
  Synthetic oligonucleotide
cagcagctgaaagactgaaattatagccagatatgttgagtgcactctcatcctttgtta

SEQ ID NO: 24293 - DNA, 60 bp, Artificial
  Synthetic oligonucleotide
tcctccctgaactgtcatgcaggcaatggtaagagctggcattgaaccaaattggttgtt

SEQ ID NO: 24294 - DNA, 60 bp, Artificial
  Synthetic oligonucleotide
caaagggtaatgacatgccaggtggttactgtcttgaaaggtggatgttggttgctgggg

SEQ ID NO: 24295 - DNA, 60 bp, Artificial
  Synthetic oligonucleotide
cttttattgtctccagcatgttgccaccatctataagtgatgcaccagcttttacagcag

SEQ ID NO: 24296 - DNA, 60 bp, Artificial
  Synthetic oligonucleotide
aatgccgcggactgggagggcatctgcctacatcacaaatgcgctcttggcttggaacac

SEQ ID NO: 24297 - DNA, 60 bp, Artificial
  Synthetic oligonucleotide
aactcaatagaccaggttgagcatcttcgaggtcctttaatagtatgccgtgtgagtgcc

SEQ ID NO: 24298 - DNA, 60 bp, Artificial
  Synthetic oligonucleotide
gtttttctagatctgaggccaagtccattaattcatctttgcccaaatcaccaaccttca

SEQ ID NO: 24299 - DNA, 60 bp, Artificial
  Synthetic oligonucleotide
ggtggatgttggttgctggagatttgaagtgctttggcaacacagctgtcgccaagtgta

SEQ ID NO: 24300 - DNA, 60 bp, Artificial
  Synthetic oligonucleotide
cttggaacactaatgtgtttggtagcagttgaatgggaatggtgtcgggaagatgaccat

SEQ ID NO: 24301 - DNA, 60 bp, Artificial
  Synthetic oligonucleotide
gcaaagagatggaagttcatttgagtggttggccaaaagcctctgcatggtaaaggtgac

SEQ ID NO: 24302 - DNA, 60 bp, Artificial
  Synthetic oligonucleotide
gctttaattcaaatcctttggttgcaagtcattatggctcactccaaggaaatacccagc

SEQ ID NO: 24303 - DNA, 59 bp, Artificial
  Synthetic oligonucleotide
aacttccattccttatcaaccagcatcttggtaaagtgtgttgccctgtcaaggtatga

SEQ ID NO: 24304 - DNA, 60 bp, Artificial
  Synthetic oligonucleotide
gttgccccatttgctggcaggtgtgtcagcacttctacaccaagccaagctgttcagcca

SEQ ID NO: 24305 - DNA, 60 bp, Artificial
  Synthetic oligonucleotide
gccagtcatgtcctaaggcaattgagaaccagtggatggcccaacttgagtcagacttgt

SEQ ID NO: 24306 - DNA, 60 bp, Artificial
  Synthetic oligonucleotide
cagtgccactcttgcctctcagccttctgttcctgcccaaagcagccttcgcactgtaaa

SEQ ID NO: 24307 - DNA, 60 bp, Artificial
  Synthetic oligonucleotide
aacatactttcccttcctcacatgggtcgtagaagcccctaaagaggtgcctcattccat

SEQ ID NO: 24308 - DNA, 58 bp, Artificial
  Synthetic oligonucleotide
gaggccgtaaagaagttagatcccactaatacactgtggcttgacatcgaaggacccc

SEQ ID NO: 24309 - DNA, 60 bp, Artificial
  Synthetic oligonucleotide
gactgtccagggtggagaaacgatgaacagcgtggtccaagcactaacttctctgggttt

SEQ ID NO: 24310 - DNA, 60 bp, Artificial
  Synthetic oligonucleotide
ccagaagaaccccatattcaagataggagatctgggaagggatgaactgatggagcttgc

SEQ ID NO: 24311 - DNA, 60 bp, Artificial
  Synthetic oligonucleotide
tgaagctcacatccgatcaggcaagactctatgatcagcagatttgggagaagtttgggc

SEQ ID NO: 24312 - DNA, 60 bp, Artificial
  Synthetic oligonucleotide
gcctcattgatcacctcgggtagagactgtagaaatgtgacaacttgtcccattttggag

SEQ ID NO: 24313 - DNA, 60 bp, Artificial
  Synthetic oligonucleotide
ctacctgcaaggcaaaggaaaattgcgagttgcacaaccccacacttccaaaagttgacc

SEQ ID NO: 24314 - DNA, 60 bp, Artificial
  Synthetic oligonucleotide
gacactctgcatctcgctccaacatgtctggtgacatggagcacattgaagtgaagctca

SEQ ID NO: 24315 - DNA, 60 bp, Artificial
  Synthetic oligonucleotide
cttcacctgtcttgtcacagttggtgatgttcccgaatgccaaacttctgatcctgctca

SEQ ID NO: 24316 - DNA, 60 bp, Artificial
  Synthetic oligonucleotide
atagtgaggttgtattgtatgagcagcccagcaccctctgacactctgcatctcgctcca

SEQ ID NO: 24317 - DNA, 60 bp, Artificial
  Synthetic oligonucleotide
gcataactgtcaagagaagtgtttgtaagagtcagttcaattccccaggtggttcctttt

SEQ ID NO: 24318 - DNA, 60 bp, Artificial
  Synthetic oligonucleotide
gctgcaagattgagggaggttgtcaaacattctagttaggtttagttcgacgtgtgagag

SEQ ID NO: 24319 - DNA, 60 bp, Artificial
  Synthetic oligonucleotide
gtgtgtgaatccctcacagttggtataattgcatttgccatccattgtgcaatggctgtc

SEQ ID NO: 24320 - DNA, 60 bp, Artificial
  Synthetic oligonucleotide
cgaattacttgccttttctgacccatctagtcggtctttttggaattttatagtaaccgc

SEQ ID NO: 24321 - DNA, 60 bp, Artificial
  Synthetic oligonucleotide
acaatgctaatctaattaacctttaaaaccttctaattgaaggcctcgatgtcacacccc

SEQ ID NO: 24322 - DNA, 60 bp, Artificial
  Synthetic oligonucleotide
aggctatcttcgagaccaaaaaccgaaaagacttcttccacttgacactctatacagaga

SEQ ID NO: 24323 - DNA, 60 bp, Artificial
  Synthetic oligonucleotide
ccaccctccagtgaggaatggtggttcaccagatctaaaacaaatacccaagacaaagga

SEQ ID NO: 24324 - DNA, 60 bp, Artificial
  Synthetic oligonucleotide
gcacccttcgccgactaagtgtcgatgtgttgggatgccaacaagctgcaagaacactgt

SEQ ID NO: 24325 - DNA, 60 bp, Artificial
  Synthetic oligonucleotide
ccgcaggcacacaatgagtttgatgtaatcctatggggttttgggcacccttcgccgact

SEQ ID NO: 24326 - DNA, 60 bp, Artificial
  Synthetic oligonucleotide
caggagatggttggccgtacattggctcaagatcacaaatcaaaggaagagcatgggaga

SEQ ID NO: 24327 - DNA, 60 bp, Artificial
  Synthetic oligonucleotide
ggcaacatgttggaaactttacaggttaaaccctcaatgtttagcacccttatcaagaca

SEQ ID NO: 24328 - DNA, 60 bp, Artificial
  Synthetic oligonucleotide
gcatgggagaacaccactgttgatcttgagggcaaaccatcagtgaaccaccctccagtg

SEQ ID NO: 24329 - DNA, 60 bp, Artificial
  Synthetic oligonucleotide
acacaagagcctgctcagatcaacatttcggggtacaatctaagcttgtctgctgcagtc

SEQ ID NO: 24330 - DNA, 60 bp, Artificial
  Synthetic oligonucleotide
ctgctgcagtcaaggcggatgcttgtatgattgatggtggcaacatgttggaaactttac

SEQ ID NO: 24331 - DNA, 60 bp, Artificial
  Synthetic oligonucleotide
gttcttgcggatgcgagggccatagtctctgcgcttgacttccaccaagttgcacaagtg

SEQ ID NO: 24332 - DNA, 60 bp, Artificial
  Synthetic oligonucleotide
gtctgtccaactggacccatgctgtgaagggagacgttcttgcggatgcgagggccatag

SEQ ID NO: 24333 - DNA, 60 bp, Artificial
  Synthetic oligonucleotide
aacgatctcgaacatgagttctgagaatgtaccctcattccgctggactcaatcccttag

SEQ ID NO: 24334 - DNA, 51 bp, Artificial
  Synthetic oligonucleotide
tgcagctccaggatcagccaatccccattgcgcattgttggactgtataat

SEQ ID NO: 24335 - DNA, 60 bp, Artificial
  Synthetic oligonucleotide
gtgcaaagaatgatgaggaaggataaaaggagcgaggcggatctgaccagattgagagac

SEQ ID NO: 24336 - DNA, 60 bp, Artificial
  Synthetic oligonucleotide
cctccatgatctccaatagtgaggttgtattgtatgagcagcccagcaccctctgacact

SEQ ID NO: 24337 - DNA, 60 bp, Artificial
  Synthetic oligonucleotide
tgtcaccaatgatctgagcaagagaagcaatgagatgtctgccgacttcacctccatgat

SEQ ID NO: 24338 - DNA, 60 bp, Artificial
  Synthetic oligonucleotide
gagtaagagcaatgattctcccaggttgtattctgaatgatgaggtaattatagtgtgtg

SEQ ID NO: 24339 - DNA, 60 bp, Artificial
  Synthetic oligonucleotide
ctcgacacagaactataagctactttgttcaaagccatccgaattgttgacattggtgag

SEQ ID NO: 24340 - DNA, 60 bp, Artificial
  Synthetic oligonucleotide
gactgcacaaggtaatgatgacataatcaaactacttgagatgcatggaagaagagacat

SEQ ID NO: 24341 - DNA, 60 bp, Artificial
  Synthetic oligonucleotide
tgaagaaaaccaaggaccagaagcagatgtcagttaaggcaatgggtgtctttccctgcc

SEQ ID NO: 24342 - DNA, 60 bp, Artificial
  Synthetic oligonucleotide
gcaatggctgtcacactttcccacccaagctgctttgttgtcaccaatgatctgagcaag

SEQ ID NO: 24343 - DNA, 60 bp, Artificial
  Synthetic oligonucleotide
aaggtccagaggacagaagggggtggtcaaccaggtgtatatgcagggaacctaacttca

SEQ ID NO: 24344 - DNA, 60 bp, Artificial
  Synthetic oligonucleotide
acatgtgctccgcttgagtccgagatgtcccatgtgaagaatccaagtagttgtctcgac

SEQ ID NO: 24345 - DNA, 60 bp, Artificial
  Synthetic oligonucleotide
tcctcttcagaagatttacactgttctcaacattcagctgaagggttttaatggcgtttt

SEQ ID NO: 24346 - DNA, 58 bp, Artificial
  Synthetic oligonucleotide
gtgtgtctcatttaagtaagagccattgcgcataagccaacattgaggcaaactatgt

SEQ ID NO: 24347 - DNA, 60 bp, Artificial
  Synthetic oligonucleotide
aaggtgttggatgtgaagttgtcatcagatcaagctcgtctaatggaggatgtggtatgg

SEQ ID NO: 24348 - DNA, 60 bp, Artificial
  Synthetic oligonucleotide
cttcaaactattcctaatcaccaaactatctgatatcaaaccattaatgctcctcttcag

SEQ ID NO: 24349 - DNA, 60 bp, Artificial
  Synthetic oligonucleotide
gatgatgaggtctgcacaaaaagacaatatcttgaaagtgggtggattgtcaaaagatga

SEQ ID NO: 24350 - DNA, 60 bp, Artificial
  Synthetic oligonucleotide
caaaagatgagttgatggagctggcttctgacctagacaaactgaggaagaaggtccaga

SEQ ID NO: 24351 - DNA, 60 bp, Artificial
  Synthetic oligonucleotide
tgaagtatccgaacttgtctgacttagagaaattgaccgagaaacatccctgtctgaagc

SEQ ID NO: 24352 - DNA, 60 bp, Artificial
  Synthetic oligonucleotide
aagtcaaacagtctcattgtgtcacaaaactcaacattgtggtccttgttgcactttgcc

SEQ ID NO: 24353 - DNA, 60 bp, Artificial
  Synthetic oligonucleotide
acagccaggactcatctcgtgcataataagacaccttccaaacaacatggtgttgactgc

SEQ ID NO: 24354 - DNA, 60 bp, Artificial
  Synthetic oligonucleotide
gttcaagccctaacatctctgggacttgtgtacacagtgaagtatccgaacttgtctgac

SEQ ID NO: 24355 - DNA, 60 bp, Artificial
  Synthetic oligonucleotide
aactggcaattacttgcattgctacagaagaccacacaatgaaaacgcattcaaggacca

SEQ ID NO: 24356 - DNA, 60 bp, Artificial
  Synthetic oligonucleotide
tgaccactgaacaggctttaaactgttagccgccagcggcttgacccgctgtggccgcgg

SEQ ID NO: 24357 - DNA, 60 bp, Artificial
  Synthetic oligonucleotide
ggatgtgtggtgaatggcactgattgatattgtgcctctaagtcacctattcaattaggg

SEQ ID NO: 24358 - DNA, 60 bp, Artificial
  Synthetic oligonucleotide
cgacctcgtgctgtatgccgagtctcccaccatgccaaactaccactggtgggttgaaca

SEQ ID NO: 24359 - DNA, 60 bp, Artificial
  Synthetic oligonucleotide
cgacctcgtactgtatgccgagtctcccaccatgccaaactaccactggtgggttgaaca

SEQ ID NO: 24360 - DNA, 60 bp, Artificial
  Synthetic oligonucleotide
ggcgccacatttgatgtggttacactgcatttgcccactaaagattcactcaacaggcaa

SEQ ID NO: 24361 - DNA, 60 bp, Artificial
  Synthetic oligonucleotide
cactgtcagtttcatgcttccaacgcatgccactgttcggctaattaatgcttctgctaa

SEQ ID NO: 24362 - DNA, 60 bp, Artificial
  Synthetic oligonucleotide
ggattgtaatgttactgcgtctacccaggtctgtctttggtttcctatccatgagacggg

SEQ ID NO: 24363 - DNA, 60 bp, Artificial
  Synthetic oligonucleotide
caggtagtacccttgtgaacgggcagttggtcccggactttcaaagactcgtgcttgggg

SEQ ID NO: 24364 - DNA, 60 bp, Artificial
  Synthetic oligonucleotide
ttacaccgtatgatgtgcacctggtgacctccacaccccgcggcgcgagctctttggctt

SEQ ID NO: 24365 - DNA, 60 bp, Artificial
  Synthetic oligonucleotide
cttcacaggcttttcggtgcaagtgttgctgttgcgcctagtaatagcagctttgaatcg

SEQ ID NO: 24366 - DNA, 60 bp, Artificial
  Synthetic oligonucleotide
gagtttctgattcctgcaacatgacacctgaggggttgaccgccgccctggcgatcacct

SEQ ID NO: 24367 - DNA, 60 bp, Artificial
  Synthetic oligonucleotide
gaccaagatatgtatcaattggtcatgacggccagactccccgccacccttggccactgt

SEQ ID NO: 24368 - DNA, 60 bp, Artificial
  Synthetic oligonucleotide
tgccatgcggggtggttatggcgtgtcgcacctgattgtgggcaccggtgattttgctga

SEQ ID NO: 24369 - DNA, 60 bp, Artificial
  Synthetic oligonucleotide
gggtccccgaagttaagaaggtttcaaaagtcccatacaaggccccattcttcccaaacg

SEQ ID NO: 24370 - DNA, 60 bp, Artificial
  Synthetic oligonucleotide
gttgatgaggatggcaaccttatcggtgtccacactggttcaaacaaacgcggctcagga

SEQ ID NO: 24371 - DNA, 60 bp, Artificial
  Synthetic oligonucleotide
ctgcttggctgtctagtcctgtgagttgtggacgaggaaccaacgacccctggtgcaaga

SEQ ID NO: 24372 - DNA, 60 bp, Artificial
  Synthetic oligonucleotide
gagtgtacccctgcctgattccatcatgtcaactgggaggattcggctcaatgtgcgcga

SEQ ID NO: 24373 - DNA, 60 bp, Artificial
  Synthetic oligonucleotide
gcttgctacaggcttgttctctgagctcgtggagcccatggagacttcaacgtctaagca

SEQ ID NO: 24374 - DNA, 60 bp, Artificial
  Synthetic oligonucleotide
atcatctggaatccaactgaatctggggttaaatgcttgaccatcgttgaggatgtgcgg

SEQ ID NO: 24375 - DNA, 60 bp, Artificial
  Synthetic oligonucleotide
aacacctaccccgcctgaaaccccaacccgggaggtccctggcgcgattgaagttgtgag

SEQ ID NO: 24376 - DNA, 60 bp, Artificial
  Synthetic oligonucleotide
ttgcagcgtggactcagactccatgcgacgtccaagcctggctcgcctgcctcagtgagt

SEQ ID NO: 24377 - DNA, 60 bp, Artificial
  Synthetic oligonucleotide
tgcatacatttacaaacgtgggccatccacctataccacaagtaattttgcccgccttgt

SEQ ID NO: 24378 - DNA, 60 bp, Artificial
  Synthetic oligonucleotide
acaaggccacccaattgaggttaagaccgttgtgctcgatggtgtgaaagccgtgcgggc

SEQ ID NO: 24379 - DNA, 60 bp, Artificial
  Synthetic oligonucleotide
gctttgaagcttcgaccggcccactttctttcccctagtgtagtgaaatggggaacggtt

SEQ ID NO: 24380 - DNA, 60 bp, Artificial
  Synthetic oligonucleotide
taaccttgtgtgagctgaatgtgaccgggtttcaacaacatttcggttacgcggtagaga

SEQ ID NO: 24381 - DNA, 60 bp, Artificial
  Synthetic oligonucleotide
ctggttggtcttgaatgtctcctactttctcaggcgctccactgccggccgtgctacacg

SEQ ID NO: 24382 - DNA, 60 bp, Artificial
  Synthetic oligonucleotide
gggaggcgtgcacatatctaatgtctcggcttcccgccattcaggccgcttctgcagtgt

SEQ ID NO: 24383 - DNA, 60 bp, Artificial
  Synthetic oligonucleotide
cattttccttgatgcccgggagacagctgattgaggttttccgtttcggacctgctgtgg

SEQ ID NO: 24384 - DNA, 60 bp, Artificial
  Synthetic oligonucleotide
ttgcattgacccgagccaggcattatgttttcatctatgacccatatgatcagttgcagc

SEQ ID NO: 24385 - DNA, 60 bp, Artificial
  Synthetic oligonucleotide
aagcatgaaccctccctggtagacgtcatcttgactggtgaggatgcggagttcttcccc

SEQ ID NO: 24386 - DNA, 60 bp, Artificial
  Synthetic oligonucleotide
atgcccaacacatggtgttatcagcattcaggtgtggtcacaaaattggaggcttgtttt

SEQ ID NO: 24387 - DNA, 60 bp, Artificial
  Synthetic oligonucleotide
tccccgatgatgtccagttgttgtcctcaatatatggcacaatcgccatcaatgccctgg

SEQ ID NO: 24388 - DNA, 60 bp, Artificial
  Synthetic oligonucleotide
ttgagcaacctcccgttgcctcagcagcccctccgcaaaggtttgtgtccgttctcggat

SEQ ID NO: 24389 - DNA, 60 bp, Artificial
  Synthetic oligonucleotide
gcgcctattacataccccaccaaggaatgtcgaccgggtggactatgctggttgtcgggc

SEQ ID NO: 24390 - DNA, 60 bp, Artificial
  Synthetic oligonucleotide
cgggtgtgcatcctatccgccatccacctataaccatgcagtcgggattcgaccggtgct

SEQ ID NO: 24391 - DNA, 60 bp, Artificial
  Synthetic oligonucleotide
tctgaaactttggtggctacgactctaccccacggttttgagttgtatgttccgacattg

SEQ ID NO: 24392 - DNA, 60 bp, Artificial
  Synthetic oligonucleotide
gaacgcctgtgaagatcccagtggactcgtcaagacctcaaagaaacaacgtcgccgcca

SEQ ID NO: 24393 - DNA, 60 bp, Artificial
  Synthetic oligonucleotide
ccccgaccatgagcctctggagtggaccattaccatcggagattctgatctggaagcaga

SEQ ID NO: 24394 - DNA, 60 bp, Artificial
  Synthetic oligonucleotide
gccagcactatggcggctctggcgtgcctgtttcaactgtccgattgcccaagcatctga

SEQ ID NO: 24395 - DNA, 60 bp, Artificial
  Synthetic oligonucleotide
cgcacccttggcacgtcagcaattggccggtttcaagaattcatcagaaaacatggcagc

SEQ ID NO: 24396 - DNA, 60 bp, Artificial
  Synthetic oligonucleotide
cacctctggccttgaacgctgctctagaggtggtgtcactgtgtccaaggacgcggtcaa

SEQ ID NO: 24397 - DNA, 60 bp, Artificial
  Synthetic oligonucleotide
gctacgcacctgctgtcagatggtaaggctagggtttcctgtgtcggcttctctcagtgc

SEQ ID NO: 24398 - DNA, 60 bp, Artificial
  Synthetic oligonucleotide
ggccttcagccttggtgttgagccttattgtgactgctggaactttaccaactcagtgct

SEQ ID NO: 24399 - DNA, 60 bp, Artificial
  Synthetic oligonucleotide
gaggcagtttgtgacatgtatagtgcaccccgcgttgatcccatccttgtggctaccggc

SEQ ID NO: 24400 - DNA, 60 bp, Artificial
  Synthetic oligonucleotide
cccctatttggcgcgccgcctgcaataccgcgggttgagagctgtggttaaacctgaaca

SEQ ID NO: 24401 - DNA, 60 bp, Artificial
  Synthetic oligonucleotide
ccgtggcaggatttgttgctcgcgtggtgggcggcccacggcattattggttttacttcc

SEQ ID NO: 24402 - DNA, 60 bp, Artificial
  Synthetic oligonucleotide
cctcgccatgtggtctgtcgtgctcggatctcgccaaaagcttaattgggctgattatgt

SEQ ID NO: 24403 - DNA, 60 bp, Artificial
  Synthetic oligonucleotide
ccgagcccacaccgtccaagcgggatctaggagttagccttggcgaccagctttcacaag

SEQ ID NO: 24404 - DNA, 60 bp, Artificial
  Synthetic oligonucleotide
ccccgctaagaactcgatggcaggcatcaacggtggcagattcccactcacgtggttgca

SEQ ID NO: 24405 - DNA, 60 bp, Artificial
  Synthetic oligonucleotide
aaacattggcccgtcgtaacggcccagaatagaactgagtggcccgacaggctggtgtgc

SEQ ID NO: 24406 - DNA, 60 bp, Artificial
  Synthetic oligonucleotide
agtgtgcagatttgatccaccaaaagacaccccgctggaattccccgtccctggccggac

SEQ ID NO: 24407 - DNA, 60 bp, Artificial
  Synthetic oligonucleotide
gaaagaataaattcaccccattgccggtcaggattggcggccgttgtctggaggctgacc

SEQ ID NO: 24408 - DNA, 60 bp, Artificial
  Synthetic oligonucleotide
cgtcagttgtccaggaaaggccgcaaaagggctgtgtactgtgactgatgtctacctacc

SEQ ID NO: 24409 - DNA, 60 bp, Artificial
  Synthetic oligonucleotide
ttgccctgttgtactcccatgtgggcatgctgtaggatcaggcgtctgtgaacagtgctc

SEQ ID NO: 24410 - DNA, 60 bp, Artificial
  Synthetic oligonucleotide
tcttggtgccgcaacgggatcgtatcgtcgcggcgctagcgtatcaaatgaaggccagct

SEQ ID NO: 24411 - DNA, 60 bp, Artificial
  Synthetic oligonucleotide
cggccatagaaacctggaaattcatcacctccagatgccgtttgtgcttgctaggccgca

SEQ ID NO: 24412 - DNA, 60 bp, Artificial
  Synthetic oligonucleotide
gccatagaaacctggaaattcatcacctccagatgccgtttgtgcttgctaggccgcaag

SEQ ID NO: 24413 - DNA, 60 bp, Artificial
  Synthetic oligonucleotide
attttacaggcccgaagagccactccggtggacgttgccacgtgcattccccactgtcga

SEQ ID NO: 24414 - DNA, 60 bp, Artificial
  Synthetic oligonucleotide
tttataggcccgaagagccactccggtggacgttgccacgtgctttccccactgtcgagt

SEQ ID NO: 24415 - DNA, 56 bp, Artificial
  Synthetic oligonucleotide
caggcccgaagagccactccggtggacgttgccacgtgcattccccactgttgagt

SEQ ID NO: 24416 - DNA, 60 bp, Artificial
  Synthetic oligonucleotide
ttataggcctgaagagccactccggtggacgttgccacgtgcattccccactgtcgagtg

SEQ ID NO: 24417 - DNA, 60 bp, Artificial
  Synthetic oligonucleotide
ttgtcgtccggcgtcccggctccactacggtcaacggcacattggtgcccgggttgaaaa

SEQ ID NO: 24418 - DNA, 60 bp, Artificial
  Synthetic oligonucleotide
tttgtcgtccggcgtcccggctccactacggtcaacggcacattggtgcccgggttaaaa

SEQ ID NO: 24419 - DNA, 55 bp, Artificial
  Synthetic oligonucleotide
aatggcactgattggcactgtgcctctaagtcacctattcaattagggcgaccgt

SEQ ID NO: 24420 - DNA, 60 bp, Artificial
  Synthetic oligonucleotide
atggcactgattgacactgtgcctctaagtcacctattcaattagggcgaccgtgtgggg

SEQ ID NO: 24421 - DNA, 60 bp, Artificial
  Synthetic oligonucleotide
ttcatcacctccagatgccgtctgtgcttgctaggccgcaagtacattctggcccctgcc

SEQ ID NO: 24422 - DNA, 60 bp, Artificial
  Synthetic oligonucleotide
cggcgacagcctacaagctacaatgacctactgcgcatgtttggtcagatgcgggtccgc

SEQ ID NO: 24423 - DNA, 60 bp, Artificial
  Synthetic oligonucleotide
atgtttggtcagatgcgggtccgcaaaccgcccgctcaacccactcaggctatcatcgca

SEQ ID NO: 24424 - DNA, 60 bp, Artificial
  Synthetic oligonucleotide
aagcttgtcgatggcgtcaagacgatcacgtccgcaggccgcctcttttcgaaacggacg

SEQ ID NO: 24425 - DNA, 60 bp, Artificial
  Synthetic oligonucleotide
ccgcctcttttcgaaacggacggcggcgacagcctacaagctacaatgacctactgcgca

SEQ ID NO: 24426 - DNA, 53 bp, Artificial
  Synthetic oligonucleotide
aatgctaccccggtgactgatgggcgctccgtcttggctacaaccatgccctc

SEQ ID NO: 24427 - DNA, 60 bp, Artificial
  Synthetic oligonucleotide
gccatagaaacctggagattcatcacctccagatgccgtttgtgcttgctaggccgcaag

SEQ ID NO: 24428 - DNA, 60 bp, Artificial
  Synthetic oligonucleotide
cagctatagaaacctggaaattcatcacttccagatgccgtttgtgcttgctaggccgca

SEQ ID NO: 24429 - DNA, 60 bp, Artificial
  Synthetic oligonucleotide
ttcatcacctccagatgccgtttgtgcttgctaggccgcaagtacatcctggcccctgcc

SEQ ID NO: 24430 - DNA, 60 bp, Artificial
  Synthetic oligonucleotide
gggtttcatccgattgcggcaaatgataaccacgcatttgtcgtccggcgtcccggctcc

SEQ ID NO: 24431 - DNA, 60 bp, Artificial
  Synthetic oligonucleotide
ggctttcatccgattgcggcaaatgataaccacgcatttgtcgtccggcgtcccggctcc

SEQ ID NO: 24432 - DNA, 60 bp, Artificial
  Synthetic oligonucleotide
tgtttaaactgctagccgccagcggcttgacccgctgtggtcgcggcggcttggttgtta

SEQ ID NO: 24433 - DNA, 60 bp, Artificial
  Synthetic oligonucleotide
gcaggctttcatccgattgcggcaaatgataaccacgcatttgtcgtccggcgtcccggc

SEQ ID NO: 24434 - DNA, 60 bp, Artificial
  Synthetic oligonucleotide
gtgtttaaactgctagccgccagcggcttgacccgctgtggtcgcggcggcttggttatt

SEQ ID NO: 24435 - DNA, 60 bp, Artificial
  Synthetic oligonucleotide
ggctttcatccgattgcggcaagtgataaccacgcatttgtcgtccggcgtcccggttcc

SEQ ID NO: 24436 - DNA, 60 bp, Artificial
  Synthetic oligonucleotide
ggctttcatccgattacggcaaatgataaccacgcatttgtcgtccggcgtcccggctcc

SEQ ID NO: 24437 - DNA, 60 bp, Artificial
  Synthetic oligonucleotide
ggcaaatgataaccacgcatttgtcgtccggcgtcccggctccactacggttaacggcac

SEQ ID NO: 24438 - DNA, 60 bp, Artificial
  Synthetic oligonucleotide
gctttcatccgatcgcggcaaatgataaccacgcatttgtcgtccggcgtcccggctcca

SEQ ID NO: 24439 - DNA, 60 bp, Artificial
  Synthetic oligonucleotide
gcaaatgataaccacgcatttgtcgtccggcgtcccggctccactacggtcaacggcaca

SEQ ID NO: 24440 - DNA, 60 bp, Artificial
  Synthetic oligonucleotide
gggtgtactcagccatagaaacctggaaattcatcacttccagatgccgtttgtgcttgc

SEQ ID NO: 24441 - DNA, 60 bp, Artificial
  Synthetic oligonucleotide
caggtagtggttcgcggcaacgggtacaccgcagttggtaacaagcttgtcgatggcgtc

SEQ ID NO: 24442 - DNA, 60 bp, Artificial
  Synthetic oligonucleotide
cttctcatactacaccgctcagcgcttcacagacttcaccttgtgtatgctgacggatcg

SEQ ID NO: 24443 - DNA, 60 bp, Artificial
  Synthetic oligonucleotide
caccttgtgtatgctgacggatcgcggcgttattgccaatttgctgcgttatgacgagca

SEQ ID NO: 24444 - DNA, 60 bp, Artificial
  Synthetic oligonucleotide
cgcggcaacgggtacaccgcagttggcaacaagcttgtcgatggcgtcaagacgattacg

SEQ ID NO: 24445 - DNA, 60 bp, Artificial
  Synthetic oligonucleotide
cgcgcgccacccgttcctctcttgtatccttgtgtgatcgattccaaacgccaaaagggg

SEQ ID NO: 24446 - DNA, 60 bp, Artificial
  Synthetic oligonucleotide
ggataagttacactgtggagtttagtttgcctacgcatcatactgtgcgcctgatccgcg

SEQ ID NO: 24447 - DNA, 60 bp, Artificial
  Synthetic oligonucleotide
ccactgagcaggctttaaactgttagccgccagcggcttgacccgctgtggccgcggcgg

SEQ ID NO: 24448 - DNA, 60 bp, Artificial
  Synthetic oligonucleotide
gtgtttaaactgttagccgccagcggcttgacccgctgtggtcgcggcggcttggttatt

SEQ ID NO: 24449 - DNA, 60 bp, Artificial
  Synthetic oligonucleotide
ttgtgcttgctaggccgcaagtacattctggcccctgcccaccacgttgaaagtgccgca

SEQ ID NO: 24450 - DNA, 60 bp, Artificial
  Synthetic oligonucleotide
tttgtgcttgctaggccgcaagtacattctggcccctgcccaccacgtcgaaagtgccgc

SEQ ID NO: 24451 - DNA, 60 bp, Artificial
  Synthetic oligonucleotide
tcccaaccaaggacattcagagcgtccctgaaatcgacgttctgtgcgcacaggctgtgc

SEQ ID NO: 24452 - DNA, 52 bp, Artificial
  Synthetic oligonucleotide
agggacattcagagcgtccctgaaatcgacgttctgtgcgcacaggctgtgc

SEQ ID NO: 24453 - DNA, 60 bp, Artificial
  Synthetic oligonucleotide
tttgtcgtccggcgtcccggctccactacggtcaacggcacattggtacccgggttaaaa

SEQ ID NO: 24454 - DNA, 57 bp, Artificial
  Synthetic oligonucleotide
caaccaaggacatccagagcgtccctgaaatcgacgttctgtgcgcacaggctgtgc

SEQ ID NO: 24455 - DNA, 53 bp, Artificial
  Synthetic oligonucleotide
caaggatattcagagcgtccctgaaatcgacgttctgtgcgcacaggctgtgc

SEQ ID NO: 24456 - DNA, 60 bp, Artificial
  Synthetic oligonucleotide
gtttgtggcggagggccaagtctactgcacacgatgtctcagtgcacggtctctccttcc

SEQ ID NO: 24457 - DNA, 52 bp, Artificial
  Synthetic oligonucleotide
aacaagcttgtcgatggcgtcaagacgatcacgtccgcaggccgcctctttt

SEQ ID NO: 24458 - DNA, 60 bp, Artificial
  Synthetic oligonucleotide
cagcttatatttggtttgttatagttggaagagccttttctactgcttatgcttttgtgc

SEQ ID NO: 24459 - DNA, 60 bp, Artificial
  Synthetic oligonucleotide
ggcccgtgtgatgggcttagtgtggtcactgatttcaaattctattcagactattattgc

SEQ ID NO: 24460 - DNA, 60 bp, Artificial
  Synthetic oligonucleotide
ggcccgtgtgatgggcttagtgtggtcactgatatcaaattctatccaaactattgtagc

SEQ ID NO: 24461 - DNA, 60 bp, Artificial
  Synthetic oligonucleotide
gtcacaggcacaactcggctgtacatacccaaggaaggcgggatggtgtttgaagggcta

SEQ ID NO: 24462 - DNA, 60 bp, Artificial
  Synthetic oligonucleotide
atacaagattaggagcattctgggcaccaacaattacattggcctaggtttgcgtgcctg

SEQ ID NO: 24463 - DNA, 60 bp, Artificial
  Synthetic oligonucleotide
aggagcattctgggcaccaacaattacattggcctaggtttgcgtgcctgcctttcgggg

SEQ ID NO: 24464 - DNA, 60 bp, Artificial
  Synthetic oligonucleotide
ggagcattctgggcaccaacaattacattggcctgggtttgcgtgcctgcctttcagggg

SEQ ID NO: 24465 - DNA, 60 bp, Artificial
  Synthetic oligonucleotide
cagggaggataagttacactgtggagtttagtttgcctacgcatcatactgtgcgcctga

SEQ ID NO: 24466 - DNA, 60 bp, Artificial
  Synthetic oligonucleotide
gcccatgccacccttcatgtcaaaggcatcacttcagctgagtacacctacaacgtttcg

SEQ ID NO: 24467 - DNA, 60 bp, Artificial
  Synthetic oligonucleotide
agtcatgctgtctgacaagtgctacgctgccccagaggacttcccgggcatgctctgcac

SEQ ID NO: 24468 - DNA, 60 bp, Artificial
  Synthetic oligonucleotide
cgaccccgtgatcctcttgggtagcacctctgctgagctcgtttccgtctttagtggcga

SEQ ID NO: 24469 - DNA, 60 bp, Artificial
  Synthetic oligonucleotide
cctttcaccctgaactctttggtctcagccgcaactacactcgttccctaacaatcaagc

SEQ ID NO: 24470 - DNA, 60 bp, Artificial
  Synthetic oligonucleotide
accgggaacacaacgtgacagcagttttccagcaacaggatggccatatcgtcctctgct

SEQ ID NO: 24471 - DNA, 60 bp, Artificial
  Synthetic oligonucleotide
gcattttgaccaaaatctgccgcctcatgttggagctatcctgtccaaagcaccccgctt

SEQ ID NO: 24472 - DNA, 60 bp, Artificial
  Synthetic oligonucleotide
gtctcacggcccgattcggcgcctttgacgaggggttcgatttaggattcggaacgcgtt

SEQ ID NO: 24473 - DNA, 60 bp, Artificial
  Synthetic oligonucleotide
ccctccacagtcccttccaacgactctcacgctggtatcaatggcttgtctttctctact

SEQ ID NO: 24474 - DNA, 60 bp, Artificial
  Synthetic oligonucleotide
tgatggggtctatcgcgtcgcccctgagctgacgcccatgattggcaataggaggttgga

SEQ ID NO: 24475 - DNA, 60 bp, Artificial
  Synthetic oligonucleotide
gctagattatttggattcacgccctgactgcccaacctactacacacagcatggttgcga

SEQ ID NO: 24476 - DNA, 60 bp, Artificial
  Synthetic oligonucleotide
tgctcccatctggtgctcgcccttctacccctcgcctgctgggctgctacttctctatgg

SEQ ID NO: 24477 - DNA, 60 bp, Artificial
  Synthetic oligonucleotide
gctgggaaagttctcgctgaccaccctgactacaaactggaaaatgatggtcgtttcccc

SEQ ID NO: 24478 - DNA, 60 bp, Artificial
  Synthetic oligonucleotide
cctggggtcgctcacaaagcactctgtacggtaactgatatctacctcccgatgctgggc

SEQ ID NO: 24479 - DNA, 60 bp, Artificial
  Synthetic oligonucleotide
ccgcgccccacctttccatgaagtatattgctttcttctgctgcaccaccgcctttgttg

SEQ ID NO: 24480 - DNA, 60 bp, Artificial
  Synthetic oligonucleotide
agtccagaggagggaataggcttccccaacgacctcgccgcagcactcaacaacgtagag

SEQ ID NO: 24481 - DNA, 60 bp, Artificial
  Synthetic oligonucleotide
gctcttcttctgcactcactgaagtacttcccagttcttttcaacgccacttctgtccag

SEQ ID NO: 24482 - DNA, 60 bp, Artificial
  Synthetic oligonucleotide
ggctcggccggcaatacataaccgccccttccagtatggttgagtcatcccttggccgtt

SEQ ID NO: 24483 - DNA, 60 bp, Artificial
  Synthetic oligonucleotide
cctgtgggtctggtggtttgttttccgatggcaacaatactgtctgcttgaccgcgacgc

SEQ ID NO: 24484 - DNA, 60 bp, Artificial
  Synthetic oligonucleotide
gtggggtatctatctcccgctcatgtgggccgcgattggtttgagggtgctactcatgct

SEQ ID NO: 24485 - DNA, 60 bp, Artificial
  Synthetic oligonucleotide
gctggcctgaatggaagtacgatgagcagcttctgtatgccgactccctcactgctgggt

SEQ ID NO: 24486 - DNA, 60 bp, Artificial
  Synthetic oligonucleotide
ggccctccgcttcgcgtggactaggcacaccaatttcatcattgacgaccgaggtagatt

SEQ ID NO: 24487 - DNA, 60 bp, Artificial
  Synthetic oligonucleotide
tccacggcgattctcaacgacgcctcggcactctcagccttcgagcctgactggtttgat

SEQ ID NO: 24488 - DNA, 60 bp, Artificial
  Synthetic oligonucleotide
cccatccaaatcgcacttctttgacttttgaccttgcggaacaaagttcgaacacgagac

SEQ ID NO: 24489 - DNA, 60 bp, Artificial
  Synthetic oligonucleotide
gtgctccatccctatcctcaaagacagaacaaaatttgctgagctcctcgcatctgatca

SEQ ID NO: 24490 - DNA, 60 bp, Artificial
  Synthetic oligonucleotide
gctccacgaggcaaagtactcaccccatatcacagggacagagttggtgcagcggtcaca

SEQ ID NO: 24491 - DNA, 60 bp, Artificial
  Synthetic oligonucleotide
ctacagacacctcgcagcaacctacacctctctatccccgagagcagcgtaggctccttt

SEQ ID NO: 24492 - DNA, 60 bp, Artificial
  Synthetic oligonucleotide
ccgcttcagaatccgaccgtgctaagtatggacccatcgtgcaatacgtggaagcccgcg

SEQ ID NO: 24493 - DNA, 60 bp, Artificial
  Synthetic oligonucleotide
tttcagccacccggctgtcacctctatcacatccggccgtgtgcgcaggttactacgtgg

SEQ ID NO: 24494 - DNA, 60 bp, Artificial
  Synthetic oligonucleotide
gtggaattgttgcggccctttcttctgtgcctgctaattctaatgctgagcgatgtatga

SEQ ID NO: 24495 - DNA, 60 bp, Artificial
  Synthetic oligonucleotide
caagcccgagtgcagaagtcaaattggctatcccgccacagtacacgcaggtactcgaga

SEQ ID NO: 24496 - DNA, 60 bp, Artificial
  Synthetic oligonucleotide
gaggagatgctcccggctgctacccctataagctgcaccccgtcagaggagatccataca

SEQ ID NO: 24497 - DNA, 60 bp, Artificial
  Synthetic oligonucleotide
cgcttgcctagaaatgtccacaacgacaccaagtctgtgcctcagccactggcacgcctg

SEQ ID NO: 24498 - DNA, 60 bp, Artificial
  Synthetic oligonucleotide
gtgcttttctttgtctctattacattcagcagcaccggcgcatccgagaacaacaccggt

SEQ ID NO: 24499 - DNA, 60 bp, Artificial
  Synthetic oligonucleotide
ctcactgcagccctcaacagaaaccccacagctctcatctgccatgcttgctttgccggc

SEQ ID NO: 24500 - DNA, 60 bp, Artificial
  Synthetic oligonucleotide
cgtgcgtcttccggtgggctctgggcagatcttagcatctgggaaaggccaaggtctgta

SEQ ID NO: 24501 - DNA, 60 bp, Artificial
  Synthetic oligonucleotide
cacaccttagttcttgttttcttcacacttacactggacaccacatcaataacactaggc

SEQ ID NO: 24502 - DNA, 60 bp, Artificial
  Synthetic oligonucleotide
aaatccccgaaaaggacatgaatcgcttgcgcgctatcatctctaagctccaaggccttg

SEQ ID NO: 24503 - DNA, 60 bp, Artificial
  Synthetic oligonucleotide
tgtactgtgcatggatggctattgtttcaggtgcttctccagatgtgttaggaaggctcc

SEQ ID NO: 24504 - DNA, 60 bp, Artificial
  Synthetic oligonucleotide
gctcatctatatggctgttatcattcttgctctgctggttggtaaaatgctctcactcac

SEQ ID NO: 24505 - DNA, 56 bp, Artificial
  Synthetic oligonucleotide
gtgcccacaacgagcaaaaggttgagaaggtcgacgcactcccgtgcaagaacccc

SEQ ID NO: 24506 - DNA, 60 bp, Artificial
  Synthetic oligonucleotide
tattgggcacatgatttgctccaccgagacacctgccgctcttgagccttgcctgcacgc

SEQ ID NO: 24507 - DNA, 60 bp, Artificial
  Synthetic oligonucleotide
ggtgtggctgccaaagagagtgaacctaaggctgtagctgccccttccataccgatcacg

SEQ ID NO: 24508 - DNA, 60 bp, Artificial
  Synthetic oligonucleotide
tctcctttgagcatggccgctgctggctgaagttgttcccggatcccgcctgtgaactca

SEQ ID NO: 24509 - DNA, 60 bp, Artificial
  Synthetic oligonucleotide
aactgtgtgccttgcattgccccaccatcgcaggtccgtaccgttgatccatcacagccc

SEQ ID NO: 24510 - DNA, 60 bp, Artificial
  Synthetic oligonucleotide
gcgggatcgggaccaatgaccccttctgcaagtcctctttcggcgttcctacttatgtca

SEQ ID NO: 24511 - DNA, 60 bp, Artificial
  Synthetic oligonucleotide
ctcactaacccatggatgtccgtggtcctcaagtcacacaggcctgcggtcgtcttctgc

SEQ ID NO: 24512 - DNA, 60 bp, Artificial
  Synthetic oligonucleotide
ggacgggaggcaaatttactcagacaagcacacgtcgaagagtggtcatggtagtatccc

SEQ ID NO: 24513 - DNA, 60 bp, Artificial
  Synthetic oligonucleotide
ggtcccacctcagcacacatcaaacagctgctgatcaggtactacgacaacggaggcgga

SEQ ID NO: 24514 - DNA, 60 bp, Artificial
  Synthetic oligonucleotide
gacccaaccttcctctctcgctatgttcgcgagggcaaaccccagggagtaagctcagga

SEQ ID NO: 24515 - DNA, 60 bp, Artificial
  Synthetic oligonucleotide
gacacttcgccactaagctgctctttgagatggcttgtgctgagcgcgctttgccattgt

SEQ ID NO: 24516 - DNA, 60 bp, Artificial
  Synthetic oligonucleotide
atcgcagagcctggagaccttaggcatgagttaaatcagcaggagcgcgccaccctttcg

SEQ ID NO: 24517 - DNA, 60 bp, Artificial
  Synthetic oligonucleotide
tagccctacaccttctgagggtgccgtcagtgatccagccaccaccccgccagtgccgaa

SEQ ID NO: 24518 - DNA, 60 bp, Artificial
  Synthetic oligonucleotide
cgcccaatcagcactacgcggccagttttgaccggtgggttcctcacttgcaagcactgt

SEQ ID NO: 24519 - DNA, 56 bp, Artificial
  Synthetic oligonucleotide
cactgattgacattgtgcctctaagtcacctattcaattagggcgaccgtgtgggg

SEQ ID NO: 24520 - DNA, 60 bp, Artificial
  Synthetic oligonucleotide
tttgtcgtccggcgtcccggctccactacggttaacggcacattggtgcccgggttgaaa

SEQ ID NO: 24521 - DNA, 60 bp, Artificial
  Synthetic oligonucleotide
ggccacttgaccagtgtttacgcctggttggcgttcttgtccttcagttacacggcccag

SEQ ID NO: 24522 - DNA, 60 bp, Artificial
  Synthetic oligonucleotide
ggtgcccgggttgaaaagcctcgtgttgggtggcagaaaagctgttaagcagggagtggt

SEQ ID NO: 24523 - DNA, 60 bp, Artificial
  Synthetic oligonucleotide
cggtcaacggcacattggtgcccgggttgaaaagcctcgtgttgggtggcagaaaagctg

SEQ ID NO: 24524 - DNA, 60 bp, Artificial
  Synthetic oligonucleotide
gggccaagtctactgcacacgatgtctcagtgcacggtctctccttcccctgaacctcca

SEQ ID NO: 24525 - DNA, 60 bp, Artificial
  Synthetic oligonucleotide
gccgcaggctttcatccgattgcggcaaatgataaccacgcatttgtcgtccggcgtccc

SEQ ID NO: 24526 - DNA, 60 bp, Artificial
  Synthetic oligonucleotide
agtgccgcaggctttcatccgattgcggcaaatgataaccacgcatttgtcgtccggcgt

SEQ ID NO: 24527 - DNA, 60 bp, Artificial
  Synthetic oligonucleotide
gccagtggcttgacccgctgtggtcgcggcggcttggttgttactgagacagcggtaaaa

SEQ ID NO: 24528 - DNA, 60 bp, Artificial
  Synthetic oligonucleotide
acctgactaaggagcagtgtttaaactgctagccgccagcggcttgacccgctgtggtcg

SEQ ID NO: 24529 - DNA, 60 bp, Artificial
  Synthetic oligonucleotide
ttgactaaggagcagtgtttaaactgctagccgccagcggcttgacccgctgtggtcgcg

SEQ ID NO: 24530 - DNA, 60 bp, Artificial
  Synthetic oligonucleotide
tgactaaggagcagtgtttaaactgctagccgccagcggcttgacccgctgtggtcgcgg

SEQ ID NO: 24531 - DNA, 60 bp, Artificial
  Synthetic oligonucleotide
aggcctgactaaggagcagtgtttaaactgctagccgccagcggcttgacccgctgtggt

SEQ ID NO: 24532 - DNA, 60 bp, Artificial
  Synthetic oligonucleotide
gcccactaaagattcactcaacaggcaaagagcccttgttgctattaccagggcaagaca

SEQ ID NO: 24533 - DNA, 60 bp, Artificial
  Synthetic oligonucleotide
gccatagaaacctggaagttcatcacctccagatgccgtttgtgcttgctaggccgcaag

SEQ ID NO: 24534 - DNA, 60 bp, Artificial
  Synthetic oligonucleotide
ccaggaacaagatgggttctgctggttaaaacttttgccacctgaccgccgtgaggctgg

SEQ ID NO: 24535 - DNA, 60 bp, Artificial
  Synthetic oligonucleotide
gcattcgctcagctgcgtgtggttgatgctaggttagccattgaagaggcaagtgtattc

SEQ ID NO: 24536 - DNA, 60 bp, Artificial
  Synthetic oligonucleotide
ggtgccatatacggctcaccaccatatacactgcaagaattactattcttgtgggcccct

SEQ ID NO: 24537 - DNA, 60 bp, Artificial
  Synthetic oligonucleotide
ggtgccatataaggctcaccgccatatacactgcaagaattactattcttgtgggcccct

SEQ ID NO: 24538 - DNA, 60 bp, Artificial
  Synthetic oligonucleotide
gtcacaggcacaactcggctgtacatacccaaagaaggcgggatggtgtttgagggattg

SEQ ID NO: 24539 - DNA, 60 bp, Artificial
  Synthetic oligonucleotide
acagtttgatgggcttgcgagtgaaagtgaatgtgcccatgtgtgtgacacctgcccatt

SEQ ID NO: 24540 - DNA, 52 bp, Artificial
  Synthetic oligonucleotide
aaaacttttgccacctgaccgccgtgaggctggtctgcggttgtactacaac

SEQ ID NO: 24541 - DNA, 54 bp, Artificial
  Synthetic oligonucleotide
ttaaaacttttgccacctgaccgccgtgaggctggtctgcggttgtactacaac

SEQ ID NO: 24542 - DNA, 60 bp, Artificial
  Synthetic oligonucleotide
ggcagcaataatactactatttgcatgcataccactagtgacacgagtgtacatctcttt

SEQ ID NO: 24543 - DNA, 60 bp, Artificial
  Synthetic oligonucleotide
gctagcagcaataatactactatttgcatgcataccactggtgacacgagcgtacatctc

SEQ ID NO: 24544 - DNA, 60 bp, Artificial
  Synthetic oligonucleotide
tttatatcagctgaggggaaagtgtaccccgttgaccccggactcccgattgccgctgcg

SEQ ID NO: 24545 - DNA, 60 bp, Artificial
  Synthetic oligonucleotide
acgcttcacgcgtcctttatatcagctgaggggaaagtgtaccccgtagaccccggactc

SEQ ID NO: 24546 - DNA, 60 bp, Artificial
  Synthetic oligonucleotide
cttggagtcttctagctatgctccatttatcaatgcctatcggcaggcaattttgagcca

SEQ ID NO: 24547 - DNA, 57 bp, Artificial
  Synthetic oligonucleotide
ccccacatctttcccggcgatgtggggcgtcgaacttttgctgactccaaagacaag

SEQ ID NO: 24548 - DNA, 60 bp, Artificial
  Synthetic oligonucleotide
gtggaggtgctggcagcaataatactactatttgcatgcataccactagtgacacgagcg

SEQ ID NO: 24549 - DNA, 60 bp, Artificial
  Synthetic oligonucleotide
ccatctggagtcttctagctatgctccatttatcaatgcctatcggcaggcaattttgag

SEQ ID NO: 24550 - DNA, 51 bp, Artificial
  Synthetic oligonucleotide
ccccacatctttcccggcgatgtggggcgtcggacctttgctgactctaaa

SEQ ID NO: 24551 - DNA, 60 bp, Artificial
  Synthetic oligonucleotide
gccttccaatatcatgcctatgcccggtcttactcctgattgctttgaccatctggagtc

SEQ ID NO: 24552 - DNA, 60 bp, Artificial
  Synthetic oligonucleotide
gccctccaatatcatgcctatgcccggtcttactcctgattgctttgaccatctggagtc

SEQ ID NO: 24553 - DNA, 60 bp, Artificial
  Synthetic oligonucleotide
gccctccaacgtcatgcctatgcccggtcttactcctgattgctttgatcacttggagtc

SEQ ID NO: 24554 - DNA, 60 bp, Artificial
  Synthetic oligonucleotide
gctgcaggattggttgcttgctgcgcaccgcaaggaagttatgccctccaatatcatgcc

SEQ ID NO: 24555 - DNA, 60 bp, Artificial
  Synthetic oligonucleotide
gccctccgatgtcatgcctatgcccggtcttactcctgattgctttgatcacttggagtc

SEQ ID NO: 24556 - DNA, 60 bp, Artificial
  Synthetic oligonucleotide
cgtatttgctgcaggattggttgcttgctgcgcaccgcaaagaagttatgccctccaacg

SEQ ID NO: 24557 - DNA, 60 bp, Artificial
  Synthetic oligonucleotide
gctgcaggattggttgcttgctgcgcaccgcaaggaagttatgccttccaatatcatgcc

SEQ ID NO: 24558 - DNA, 60 bp, Artificial
  Synthetic oligonucleotide
cgcgccaaagatgccttcccgagtctgggatatgctctctcgattggccagtcaaggcta

SEQ ID NO: 24559 - DNA, 60 bp, Artificial
  Synthetic oligonucleotide
cgtatttgctgcaggattggttgcttgctgcgcaccgcaaagaagtcatgccctccgatg

SEQ ID NO: 24560 - DNA, 60 bp, Artificial
  Synthetic oligonucleotide
gccatcggccgcagcttggtggcgcggtgttcacgaggtgcgcgttacagacctgtttaa

SEQ ID NO: 24561 - DNA, 60 bp, Artificial
  Synthetic oligonucleotide
gtacacgaggtgcgcgttacagacctgtttaaagatttgcagtgcgacaacctacgcgcc

SEQ ID NO: 24562 - DNA, 58 bp, Artificial
  Synthetic oligonucleotide
gccctccattgattatgcggtggcctacggcagcaaagtcaaccttgtgaggttgggg

SEQ ID NO: 24563 - DNA, 60 bp, Artificial
  Synthetic oligonucleotide
gctctgttctattcacttgtgttagcagcttatatttggtttgttatagttggaagagct

SEQ ID NO: 24564 - DNA, 60 bp, Artificial
  Synthetic oligonucleotide
aacaagcttgtcgatggcgtcaagacgatcacgtccgcaggccgcctcttttcgaaacgg

SEQ ID NO: 24565 - DNA, 60 bp, Artificial
  Synthetic oligonucleotide
caagctacaatgacctactgcgcatgtttggtcagatgcgggtccgcaaaccgcccgctc

SEQ ID NO: 24566 - DNA, 60 bp, Artificial
  Synthetic oligonucleotide
ctacaatgacctactgcgtatgtttggtcagatgcgggtccgcaaaccgcccgcgcaacc

SEQ ID NO: 24567 - DNA, 60 bp, Artificial
  Synthetic oligonucleotide
gcctggagaccttaggcatgagttaaatcagcaggagcgcgccaccctttcgtcgaacgt

SEQ ID NO: 24568 - DNA, 60 bp, Artificial
  Synthetic oligonucleotide
gaccttaggcatgatttaaatcaacaggagcgcgccaccctttcgtcgaacgtacaacgg

SEQ ID NO: 24569 - DNA, 60 bp, Artificial
  Synthetic oligonucleotide
gcaggagcgcgccaccctttcgtcgaacgtacaacggttctttatgattggtcatggctc

SEQ ID NO: 24570 - DNA, 60 bp, Artificial
  Synthetic oligonucleotide
aggcccactatcgattatgcagtggcctacggcagcaaagtcaaccttgtgaggttgggg

SEQ ID NO: 24571 - DNA, 60 bp, Artificial
  Synthetic oligonucleotide
tttatatcagctgaggggaaagtgtaccccgttgaccccggactcccgattgccgtcgcg

SEQ ID NO: 24572 - DNA, 54 bp, Artificial
  Synthetic oligonucleotide
aatgctactccggtgactgatgggcgctccgtcttggctacaaccatgccctct

SEQ ID NO: 24573 - DNA, 60 bp, Artificial
  Synthetic oligonucleotide
agggcctgactaaggagcagtgtttaaactgctagccgccagcgacttgacccgctgtgg

SEQ ID NO: 24574 - DNA, 60 bp, Artificial
  Synthetic oligonucleotide
ctttcagagtacaaataaggtcgcgctcactatgggagcagtagttgcactcctttgggg

SEQ ID NO: 24575 - DNA, 55 bp, Artificial
  Synthetic oligonucleotide
atagcacaaataaggtcgcgctcactatgggagcagtagttgcacttctttgggg

SEQ ID NO: 24576 - DNA, 60 bp, Artificial
  Synthetic oligonucleotide
tgactaaggagcagtgtttaaactgctagccgccagcgacttgacccgctgtggtcgcgg

SEQ ID NO: 24577 - DNA, 60 bp, Artificial
  Synthetic oligonucleotide
cactttcagagtacaaataaggtcgcgctcactatgggagcagtagttgcactcctttgg

SEQ ID NO: 24578 - DNA, 60 bp, Artificial
  Synthetic oligonucleotide
aacgacccttgtgagagagcaaacacccgacaacccaggttctgatgccggtgccctccc

SEQ ID NO: 24579 - DNA, 60 bp, Artificial
  Synthetic oligonucleotide
ggctgggaaagctgctaaagctgcttgcagcgtcgttgacgtctatgctccatcatttga

SEQ ID NO: 24580 - DNA, 60 bp, Artificial
  Synthetic oligonucleotide
ccggctctactacggtcaacggcacattggtgcccgggttgaaaagcctcgtgttgggtg

SEQ ID NO: 24581 - DNA, 60 bp, Artificial
  Synthetic oligonucleotide
tgactaaagagcagtgtttaaactgctagccgccagcggcttgacccgctgtggtcgcgg

SEQ ID NO: 24582 - DNA, 60 bp, Artificial
  Synthetic oligonucleotide
cgggttgaaaagcctcgtgttgggtggcagaaaagctgttaaacagggagtggtaaacct

SEQ ID NO: 24583 - DNA, 60 bp, Artificial
  Synthetic oligonucleotide
ttcatcacctccagatgccgtttgtgcttgctaggccgcaagtacattctggcccctgcc

SEQ ID NO: 24584 - DNA, 57 bp, Artificial
  Synthetic oligonucleotide
ccagatgccgtttgtgcttgctaggccgcaagtacattctggcccctgcccaccacg

SEQ ID NO: 24585 - DNA, 60 bp, Artificial
  Synthetic oligonucleotide
ccgcaagtacattctggcccctgcccaccacgttgaaagtgccgcagggtttcatccgat

SEQ ID NO: 24586 - DNA, 60 bp, Artificial
  Synthetic oligonucleotide
taggccgcaagtacattctggcccctgcccaccacgttgagagtgccgcaggctttcatc

SEQ ID NO: 24587 - DNA, 60 bp, Artificial
  Synthetic oligonucleotide
taggccgcaagtacattctggcccctgcccaccacgttgaaagtgccgcaggctttcatc

SEQ ID NO: 24588 - DNA, 60 bp, Artificial
  Synthetic oligonucleotide
tgcattgaccatgaccctgagtggtatgaggacctcatctgcggtattgcccggtgcgcc

SEQ ID NO: 24589 - DNA, 60 bp, Artificial
  Synthetic oligonucleotide
gtgctgggcggcaaacgagctgttaaacgaggagtggttaacctcgtcaagtatggccgg

SEQ ID NO: 24590 - DNA, 60 bp, Artificial
  Synthetic oligonucleotide
cccgagcacttgtagccatcactcgggcaagacacgggttgttcatttatgaccctcaca

SEQ ID NO: 24591 - DNA, 60 bp, Artificial
  Synthetic oligonucleotide
cggtcatcatgccggttcaagggaatgttcgcagtgtcagtcacctgttggggctggcag

SEQ ID NO: 24592 - DNA, 60 bp, Artificial
  Synthetic oligonucleotide
ggaatgttcgcagtgtcagtcacctgttggggctggcagatcccctcttgatgccgtgct

SEQ ID NO: 24593 - DNA, 60 bp, Artificial
  Synthetic oligonucleotide
attgatcatgaccctgagtggtatgaggacctcatctgcggtatcgcccgatgcgcccgc

SEQ ID NO: 24594 - DNA, 60 bp, Artificial
  Synthetic oligonucleotide
atgaccctgagtggtatgaggacctcatctgcggtattgcccaatgcgcccgccaggatg

SEQ ID NO: 24595 - DNA, 60 bp, Artificial
  Synthetic oligonucleotide
caacctgtggcctttggtcaggtgctgacaccatatcataaagaccgcactggctccgcg

SEQ ID NO: 24596 - DNA, 60 bp, Artificial
  Synthetic oligonucleotide
gttcgcagtgtcagtcacctgttggggctggcagatctcctcttgatgccgtgctaaaac

SEQ ID NO: 24597 - DNA, 60 bp, Artificial
  Synthetic oligonucleotide
tgccatgaccttgtggcaacacaggatggtgccttcacaaaacgcggtggcctgtcgtcc

SEQ ID NO: 24598 - DNA, 60 bp, Artificial
  Synthetic oligonucleotide
gtggcctgtcgtccggggaccccgtcaccagtgtgtccaacaccgtatattcactggtaa

SEQ ID NO: 24599 - DNA, 52 bp, Artificial
  Synthetic oligonucleotide
aatgatatacgcccttaaggtgtcacgcggccgactcctggggctgttgcac

SEQ ID NO: 24600 - DNA, 60 bp, Artificial
  Synthetic oligonucleotide
cgtctggtaaccgagcatacgctgtgagaaagcccggactaacatcagtgaacggcactc

SEQ ID NO: 24601 - DNA, 60 bp, Artificial
  Synthetic oligonucleotide
cccttaccatgctttgggtgcactcattcttggtgttttgtctcccagcagccggcgtcc

SEQ ID NO: 24602 - DNA, 60 bp, Artificial
  Synthetic oligonucleotide
ctttgggtgcactcattcttggtgttttgtctgccagcagccggcatcctctcactaggg

SEQ ID NO: 24603 - DNA, 60 bp, Artificial
  Synthetic oligonucleotide
ttttcaggacaggtcagccgactacagagacagggactatgaaggtgtgcaaaccgcccc

SEQ ID NO: 24604 - DNA, 60 bp, Artificial
  Synthetic oligonucleotide
gcccaaaaccaggaccatcctgggcaccaacaactttattgccctggctcaccgatcggc

SEQ ID NO: 24605 - DNA, 56 bp, Artificial
  Synthetic oligonucleotide
tcccgtgcacttggcaacgggttggcgcgggtgttggcgtggtgagagtcccatcc

SEQ ID NO: 24606 - DNA, 60 bp, Artificial
  Synthetic oligonucleotide
tgcattgcactgtcgccggcaggtgtcttgaggccgacttggcctcctgtgaccgcagca

SEQ ID NO: 24607 - DNA, 60 bp, Artificial
  Synthetic oligonucleotide
gcaggatgtgaagagtacttgcctagctatgtgcttaactgctgccatgaccttgtggca

SEQ ID NO: 24608 - DNA, 60 bp, Artificial
  Synthetic oligonucleotide
aaaggagttgatcccgtgcacttggcaacgggttggcgcgggtgctggcgtggtgaaagt

SEQ ID NO: 24609 - DNA, 60 bp, Artificial
  Synthetic oligonucleotide
ctacgtttatgcatgcttgcagatttggccctttctcttgtttatgtggtgtcccagggg

SEQ ID NO: 24610 - DNA, 60 bp, Artificial
  Synthetic oligonucleotide
ccaggacttcggggcctcgtgttgggcggcaaacgagctgttaaacgaggagtggttaac

SEQ ID NO: 24611 - DNA, 60 bp, Artificial
  Synthetic oligonucleotide
ttcaccctctcaccatgctttgggtgcactcattcttggtgttttgtctgccagcggccg

SEQ ID NO: 24612 - DNA, 60 bp, Artificial
  Synthetic oligonucleotide
cagaacgcctcagagtattatgcgtctgctgccgcaatcctgatggattcatgtgcttgc

SEQ ID NO: 24613 - DNA, 60 bp, Artificial
  Synthetic oligonucleotide
ttttattctcgactccatccaacccagtcggttcttcttgtgaccacgattcgccggagt

SEQ ID NO: 24614 - DNA, 60 bp, Artificial
  Synthetic oligonucleotide
atgtgcaccccggctgcccgggtattttggaacgccggccaagtcttttgcacacggtgt

SEQ ID NO: 24615 - DNA, 60 bp, Artificial
  Synthetic oligonucleotide
ctttatgctcacacttttctcgccgcggggctctatggctccaggtgattggttgtttgc

SEQ ID NO: 24616 - DNA, 60 bp, Artificial
  Synthetic oligonucleotide
actcggatgccttcccttattgggtgtcttttctggttctttgcggcgtgttcgtctggg

SEQ ID NO: 24617 - DNA, 55 bp, Artificial
  Synthetic oligonucleotide
atcacctcaagtgtgtggccgaggaaccgctgacccatggtgttcaaatcctttt

SEQ ID NO: 24618 - DNA, 60 bp, Artificial
  Synthetic oligonucleotide
cctcgaaggggttaaagctcaacccttgacgaggacttcggctgagcaatgggaggccta

SEQ ID NO: 24619 - DNA, 60 bp, Artificial
  Synthetic oligonucleotide
ttcatagtgctttggctgcgaattccagctctacgctatgtttttggtttccattggccc

SEQ ID NO: 24620 - DNA, 60 bp, Artificial
  Synthetic oligonucleotide
caacgcggacttgctgatgctttctgcgtgccttttctacgcctcggaaatgagcgagaa

SEQ ID NO: 24621 - DNA, 60 bp, Artificial
  Synthetic oligonucleotide
aagccctgtttctcgacgcatctatcagatattaagaccaacacgaccgcggctgccggt

SEQ ID NO: 24622 - DNA, 60 bp, Artificial
  Synthetic oligonucleotide
cgatttcgagtatcagacccgaggtgcaagtctctcttagccgcttgttcggccagtctg

SEQ ID NO: 24623 - DNA, 60 bp, Artificial
  Synthetic oligonucleotide
cagggacgtccgactaatggtctggaaaggagccaccgcctatttccagttggaagggct

SEQ ID NO: 24624 - DNA, 60 bp, Artificial
  Synthetic oligonucleotide
agacccgaggtgcaagtctctcttagccgcttgttcggccagtctggaggggagctgtat

SEQ ID NO: 24625 - DNA, 60 bp, Artificial
  Synthetic oligonucleotide
gggcgattggccgctttacccaggttgccggaattattacaccttatgatatccaccagt

SEQ ID NO: 24626 - DNA, 60 bp, Artificial
  Synthetic oligonucleotide
cccttcttgaaggtgctttcaggactcataaaccctgccttaacaccgtgaatgttgtgg

SEQ ID NO: 24627 - DNA, 60 bp, Artificial
  Synthetic oligonucleotide
cccaggttgccggaattattacaccttatgacatccaccagtacacctctgggccacgtg

SEQ ID NO: 24628 - DNA, 60 bp, Artificial
  Synthetic oligonucleotide
ccaatggtgattatgcctggtcccatgctgatgactggcagggcgttgctcctgtggtca

SEQ ID NO: 24629 - DNA, 60 bp, Artificial
  Synthetic oligonucleotide
cgccatcaaagaaaccaagctctctgacctttccagacattttgcgggcccgagcgtccc

SEQ ID NO: 24630 - DNA, 60 bp, Artificial
  Synthetic oligonucleotide
ccctcggtgtgattctgtggttgttcaaataccggtgcctccacaacatgctggttggtg

SEQ ID NO: 24631 - DNA, 60 bp, Artificial
  Synthetic oligonucleotide
ggctgctcttgcatatcacatgaaggcgcagaacgcctcagagtattatgcgtctgctgc

SEQ ID NO: 24632 - DNA, 60 bp, Artificial
  Synthetic oligonucleotide
ttgctgccatgacctcgtggcaacacaggatggtgccttcacaaaacgcggtggcctgtc

SEQ ID NO: 24633 - DNA, 60 bp, Artificial
  Synthetic oligonucleotide
gcttgcattgaccatgaccctgagtggtatgaggacctcatctgcggtattgcccggtgc

SEQ ID NO: 24634 - DNA, 60 bp, Artificial
  Synthetic oligonucleotide
gcgtctgctgccgcaatcctgatggattcatgtgcttgcattgaccatgaccctgagtgg

SEQ ID NO: 24635 - DNA, 60 bp, Artificial
  Synthetic oligonucleotide
gactgcaaaatagttttaacacaaaagcgaaagggcatgtaacgtggaccgtcccctatg

SEQ ID NO: 24636 - DNA, 60 bp, Artificial
  Synthetic oligonucleotide
gccgtaagcacccaatgctccatttctcccagacgaagacctccgtgcgatcgtttgccg

SEQ ID NO: 24637 - DNA, 60 bp, Artificial
  Synthetic oligonucleotide
tcatggcttctcccctacgtctttgaggacggccagcgggcggaaccagagtactacgtg

SEQ ID NO: 24638 - DNA, 60 bp, Artificial
  Synthetic oligonucleotide
gagccattatggggcccaaccatgcaattaagcttgagcggcagtacggcctcgcctttg

SEQ ID NO: 24639 - DNA, 60 bp, Artificial
  Synthetic oligonucleotide
cctgttgcggtctacgatgccatacaaagcaatacctgcttagcgtgcatttcgggcacc

SEQ ID NO: 24640 - DNA, 60 bp, Artificial
  Synthetic oligonucleotide
catccccgcgaaaacgctgtagaatattatacgttcgatttcctaggtttgcgtccaagc

SEQ ID NO: 24641 - DNA, 60 bp, Artificial
  Synthetic oligonucleotide
atgaaagatcagcaacccagacaaagtccgtgcgcacccgcatggtctgcacatggatgg

SEQ ID NO: 24642 - DNA, 60 bp, Artificial
  Synthetic oligonucleotide
ccgcctctgttccctcgctcctctacggctcctccaaactaaaccacaagccctaccaac

SEQ ID NO: 24643 - DNA, 60 bp, Artificial
  Synthetic oligonucleotide
caggcatccgtttaaggaccctcccgcctttatgatctgctgccccatgttgtaagcgtc

SEQ ID NO: 24644 - DNA, 60 bp, Artificial
  Synthetic oligonucleotide
agaatggcggcagaggaaggaaacaatgaagtagtaaagctcttgttactgtgggaggga

SEQ ID NO: 24645 - DNA, 60 bp, Artificial
  Synthetic oligonucleotide
gcttcatgccactttctagccgggacgaacatcaataaggccaaggactgtatcaagggg

SEQ ID NO: 24646 - DNA, 60 bp, Artificial
  Synthetic oligonucleotide
agcggggaggagccaggccgctttcccatatgtgcggtaattcttggtgtttatgcttgc

SEQ ID NO: 24647 - DNA, 60 bp, Artificial
  Synthetic oligonucleotide
cgcacggcctgaaagttcaaaccctccacaatcaccttggacccgatgagaatacgcagc

SEQ ID NO: 24648 - DNA, 60 bp, Artificial
  Synthetic oligonucleotide
ccccgctgttacaaaccaagcgataagatgaatgtgccgttccttgcaagctatcgcaaa

SEQ ID NO: 24649 - DNA, 60 bp, Artificial
  Synthetic oligonucleotide
ccacgcatttcctaccagtttagaaccatcatcaagtattaccgcgacatgattgccacc

SEQ ID NO: 24650 - DNA, 60 bp, Artificial
  Synthetic oligonucleotide
acggcccgacacaacctttcccttatgcacccgctagaagccatggggcttacctttggg

SEQ ID NO: 24651 - DNA, 60 bp, Artificial
  Synthetic oligonucleotide
ccctatcttgccaaatcggtctccttgctgtctttcttgtcgctcaaccatcccaccgag

SEQ ID NO: 24652 - DNA, 60 bp, Artificial
  Synthetic oligonucleotide
gtactccgggcatatctgagagctgtaccggatcatttcccagtaattttcttgtgccgt

SEQ ID NO: 24653 - DNA, 60 bp, Artificial
  Synthetic oligonucleotide
gcccgcgggagcattatccgtaaagacgttggagtcgttgcctgcggaggtgggaaaact

SEQ ID NO: 24654 - DNA, 60 bp, Artificial
  Synthetic oligonucleotide
ggcgtgtcttctgtaggagtctcgcggtaaaagagcagcggggaccatatggcaaacccc

SEQ ID NO: 24655 - DNA, 60 bp, Artificial
  Synthetic oligonucleotide
ccttgttgggatcggcgggccagctctcaaatgaggtgtgaatgtaagggtcctgttctt

SEQ ID NO: 24656 - DNA, 60 bp, Artificial
  Synthetic oligonucleotide
cgtggagaccggacaaagacaacaaagcggtccaaatctttatgtctcgcatgcacgctc

SEQ ID NO: 24657 - DNA, 60 bp, Artificial
  Synthetic oligonucleotide
tggtcgtgtgggtgggttttgaataggagggcatccattcctgcagagctttgaagacgt

SEQ ID NO: 24658 - DNA, 60 bp, Artificial
  Synthetic oligonucleotide
tgcggttggtttagggtcgaatactggcaggaggtatatatattaataagtccgcggtcg

SEQ ID NO: 24659 - DNA, 60 bp, Artificial
  Synthetic oligonucleotide
gccgatgacgcccacatctgccgtacgatcctcttgaataaaatgggccagctcttcgcc

SEQ ID NO: 24660 - DNA, 60 bp, Artificial
  Synthetic oligonucleotide
gcccgggagagctgtaggccgagatgtcatccatggagctatcttccccagagcacacaa

SEQ ID NO: 24661 - DNA, 60 bp, Artificial
  Synthetic oligonucleotide
ccagcaaaagtcacaatattttccatgagtacaccaatgttcaagctctctttcgggagg

SEQ ID NO: 24662 - DNA, 60 bp, Artificial
  Synthetic oligonucleotide
gcaactttccatgtaggcgcaccagtattcgagttcttcctctggaggatcctctgttgg

SEQ ID NO: 24663 - DNA, 60 bp, Artificial
  Synthetic oligonucleotide
gctcgttttacctcctgccgaccattgctgtagtgcgccgttaaaataacctcagcggcc

SEQ ID NO: 24664 - DNA, 60 bp, Artificial
  Synthetic oligonucleotide
ctgttccccgttacacagcgcaaccaaaactactttccggtacaattccagccatccgat

SEQ ID NO: 24665 - DNA, 60 bp, Artificial
  Synthetic oligonucleotide
cggagttaaagtcgtggcgctcgttttctgaccaattgctttcgataaagtagtgcccgt

SEQ ID NO: 24666 - DNA, 60 bp, Artificial
  Synthetic oligonucleotide
cagcgctgtcaggaccttctggtgcgccacaatgttatccccgatcgcagagaggtagga

SEQ ID NO: 24667 - DNA, 60 bp, Artificial
  Synthetic oligonucleotide
gccaacatttactggaaccgtgatagcgaggagcctgagtacgtctgctgttgtgccacc

SEQ ID NO: 24668 - DNA, 60 bp, Artificial
  Synthetic oligonucleotide
cgggtataacgaccaatgtttgcgacgaggcctgcacaaagccctcacagatggacggag

SEQ ID NO: 24669 - DNA, 60 bp, Artificial
  Synthetic oligonucleotide
ctttggcgagggtcaccgcagttaggactcttggctgggtacaaataaccgagcgcccca

SEQ ID NO: 24670 - DNA, 60 bp, Artificial
  Synthetic oligonucleotide
ggtcgccgcgtccaactataacttcatcattgacacgacggaccacggcacctggagaag

SEQ ID NO: 24671 - DNA, 60 bp, Artificial
  Synthetic oligonucleotide
ggtcgacagaaggggaaatcaacgacttaaactcctttcttcgcgccaactgctgcaaaa

SEQ ID NO: 24672 - DNA, 60 bp, Artificial
  Synthetic oligonucleotide
tggaaggctcatcgagggcgcgtgtttgtacttctctgtaggtgcacatacgctgcttgc

SEQ ID NO: 24673 - DNA, 60 bp, Artificial
  Synthetic oligonucleotide
ggtgataaagcgctcgccgaagggaatggataccgagggaatagcaaggttcacgttctc

SEQ ID NO: 24674 - DNA, 60 bp, Artificial
  Synthetic oligonucleotide
gctttggttacctccgtcaccatgcgctcgtgaagttgcttaatggcgtcgtttaacagc

SEQ ID NO: 24675 - DNA, 58 bp, Artificial
  Synthetic oligonucleotide
ccccatgacgatcccacgctttcctgtgcctccctgggttgcggtggtggaaacggaa

SEQ ID NO: 24676 - DNA, 60 bp, Artificial
  Synthetic oligonucleotide
ccagggtagtaggttgtgtttcatgaagttgtatgccgtagtgatcaccgtggactccag

SEQ ID NO: 24677 - DNA, 60 bp, Artificial
  Synthetic oligonucleotide
cattcgctccccaacacaaaagccgataagccagcatgtagttatcacgttttaccgcgt

SEQ ID NO: 24678 - DNA, 60 bp, Artificial
  Synthetic oligonucleotide
tccttactgcagctgggtgaagtatattggccgcacctgtatgaaatgtaaccgacataa

SEQ ID NO: 24679 - DNA, 60 bp, Artificial
  Synthetic oligonucleotide
gccaagctctatgttgctcaaaacgcggccacccaattcagagacatttgtaaggactgt

SEQ ID NO: 24680 - DNA, 60 bp, Artificial
  Synthetic oligonucleotide
tcatctatgtccttacacatgtccacctcctgcgccgtccacgtcaaactttctaatttt

SEQ ID NO: 24681 - DNA, 60 bp, Artificial
  Synthetic oligonucleotide
tgttgacccacatatctacccgtatcgtatcatcaggcacattgagcatttcaagcgcat

SEQ ID NO: 24682 - DNA, 60 bp, Artificial
  Synthetic oligonucleotide
aagaccaagaagttgcgttaacccaatggatggacgcaggacatcacgaccagaaaacgg

SEQ ID NO: 24683 - DNA, 60 bp, Artificial
  Synthetic oligonucleotide
cccgcagggaatggtccttttccgcgcttgttaacggtactgaggaggcgttgaaatctt

SEQ ID NO: 24684 - DNA, 60 bp, Artificial
  Synthetic oligonucleotide
ggagtacatggtccctatgcgaggaacagagcccataagggtaggcgcggcaatcccgta

SEQ ID NO: 24685 - DNA, 60 bp, Artificial
  Synthetic oligonucleotide
ggcctcccggccagactcacagaagagcaactccatcgcatttggaggggaggaccaaag

SEQ ID NO: 24686 - DNA, 60 bp, Artificial
  Synthetic oligonucleotide
tggcctcccggccagactcacagaagagcaactccatcgcatttggaggggaggaccaaa

SEQ ID NO: 24687 - DNA, 60 bp, Artificial
  Synthetic oligonucleotide
gctaccagttgcttgctgcgttcatggcagaagatcatccttttaaggtatatgtagagc

SEQ ID NO: 24688 - DNA, 60 bp, Artificial
  Synthetic oligonucleotide
gcctcccggccagactcacagaagagcaactccatcgcatttggaggggaggaccaaaga

SEQ ID NO: 24689 - DNA, 60 bp, Artificial
  Synthetic oligonucleotide
agcagtatttgagctcgacaaagcagcttatgaagcaggtttggaaggttttctccaaag

SEQ ID NO: 24690 - DNA, 59 bp, Artificial
  Synthetic oligonucleotide
agcagtatttgagctcgacaaagcagcttatgaagcaggtttggaaggttttctccaaa

SEQ ID NO: 24691 - DNA, 61 bp, Artificial
  Synthetic oligonucleotide
cccagaattatagtgcactacctgaagctgtgtttgagctcgacaaagcagcttatgaagc

SEQ ID NO: 24692 - DNA, 60 bp, Artificial
  Synthetic oligonucleotide
cagaattatagtgcactacctgaagctgtgtttgagctcgacaaagcagcttatgaagca

SEQ ID NO: 24693 - DNA, 60 bp, Artificial
  Synthetic oligonucleotide
ccagaattatagtgcactacctgaagctgtgtttgagctcgacaaagcagcttatgaagc

SEQ ID NO: 24694 - DNA, 60 bp, Artificial
  Synthetic oligonucleotide
agaattatagtgcactacctgaagctgtgtttgagctcgacaaagcagcttatgaagcag

SEQ ID NO: 24695 - DNA, 60 bp, Artificial
  Synthetic oligonucleotide
gcagtatttgagctcgacaaagcagcttatgaagcaggtttggaaggtttcctccaaagg

SEQ ID NO: 24696 - DNA, 60 bp, Artificial
  Synthetic oligonucleotide
ctgaagcagtatttgagctcgacaaagcagcttatgaagcaggtttggaaggtttcctcc

SEQ ID NO: 24697 - DNA, 60 bp, Artificial
  Synthetic oligonucleotide
cctgaagcagtatttgagctcgacaaagcagcttatgaagcaggtttggaaggtttcctc

SEQ ID NO: 24698 - DNA, 60 bp, Artificial
  Synthetic oligonucleotide
aagcagtatttgagctcgacaaagcagcttatgaagcaggtttggaaggttttctccaaa

SEQ ID NO: 24699 - DNA, 61 bp, Artificial
  Synthetic oligonucleotide
aagcagtatttgagctcgacaaagcagcttatgaagcaggtttggaaggttttctccaaag

SEQ ID NO: 24700 - DNA, 59 bp, Artificial
  Synthetic oligonucleotide
gcagtatttgagctcgacaaagcagcttatgaagcaggtttggaaggttttctccaaag

SEQ ID NO: 24701 - DNA, 60 bp, Artificial
  Synthetic oligonucleotide
cagtatttgagctcgacaaagcagcttatgaagcaggtttggaaggtttcctccaaaggg

SEQ ID NO: 24702 - DNA, 61 bp, Artificial
  Synthetic oligonucleotide
gcagtatttgagctcgacaaagcagcttatgaagcaggtttggaaggtttcctccaaaggg

SEQ ID NO: 24703 - DNA, 60 bp, Artificial
  Synthetic oligonucleotide
ctgaaatagtgctggaacagaggaagaaaacttgtagaacatgtggtgagactagaccac

SEQ ID NO: 24704 - DNA, 60 bp, Artificial
  Synthetic oligonucleotide
ctgataggactacacacactacaccagttggggtctacttccttgttgcttatggagcga

SEQ ID NO: 24705 - DNA, 60 bp, Artificial
  Synthetic oligonucleotide
ggaggttttgtttctggtgtggggtggtccacagtgatgtagaagggcactcgagagatc

SEQ ID NO: 24706 - DNA, 60 bp, Artificial
  Synthetic oligonucleotide
tggctatcatggttaatgagaaaatcaccaccacacagccagttacgctgacaaacctgt

SEQ ID NO: 24707 - DNA, 60 bp, Artificial
  Synthetic oligonucleotide
ggaacacagaccctagcggcaggagatgtgtatgttacccagcttacacagccaaatgtc

SEQ ID NO: 24708 - DNA, 58 bp, Artificial
  Synthetic oligonucleotide
gaagtgggatggcggctgccgccgcttcggcgcttggcgcttcggcgcccaaggctct

SEQ ID NO: 24709 - DNA, 60 bp, Artificial
  Synthetic oligonucleotide
cgcgtgagcgtgagcttcatctgctcaaagagctgggaaaacgcagttcgattaggacta

SEQ ID NO: 24710 - DNA, 61 bp, Artificial
  Synthetic oligonucleotide
ctgagatcaagcctgtgactactggtgctaagacagttcaggaatacccaaaggatgcaag

SEQ ID NO: 24711 - DNA, 60 bp, Artificial
  Synthetic oligonucleotide
tcttcttccttttcctacattacacgagtgctgaatgtgtcaaaccagacttcgggtgcc

SEQ ID NO: 24712 - DNA, 56 bp, Artificial
  Synthetic oligonucleotide
tgtctgctagagttaaccaacttgagtctcagcttaaggacctctatgagttttcg

SEQ ID NO: 24713 - DNA, 61 bp, Artificial
  Synthetic oligonucleotide
ggtaattggcaaactacaaaggtagagtgtcagcctgagcgagaagaggcctataaggagc

SEQ ID NO: 24714 - DNA, 61 bp, Artificial
  Synthetic oligonucleotide
gttccaattggttctaggtttgtgtggaaggtcccaccaagaatgctcacaggccccaggg

SEQ ID NO: 24715 - DNA, 60 bp, Artificial
  Synthetic oligonucleotide
ttgcttgcaggaacatgactatatgtctgggtcacagattgtgcccattacttcaactga

SEQ ID NO: 24716 - DNA, 60 bp, Artificial
  Synthetic oligonucleotide
cacatctgtaggcatcttccgtaaattttctgacggctgctcttggtgtccaacaggggc

SEQ ID NO: 24717 - DNA, 60 bp, Artificial
  Synthetic oligonucleotide
aaagtttaaagtgttttctacagaaagggaatacctgtccacatgtggctgggatgaata

SEQ ID NO: 24718 - DNA, 54 bp, Artificial
  Synthetic oligonucleotide
gtttctcgccatgccaaggaagccggcattgcgttaccgaaaatcgggcccgat

SEQ ID NO: 24719 - DNA, 60 bp, Artificial
  Synthetic oligonucleotide
tgatgctgccaggctacgtgaagagtgtgaacagagtgctaataagtttcttggcacgca

SEQ ID NO: 24720 - DNA, 60 bp, Artificial
  Synthetic oligonucleotide
agatggagtgaagttgttagtgtcagtgtccactgcacttgttcaggttgtgtttcttgc

SEQ ID NO: 24721 - DNA, 60 bp, Artificial
  Synthetic oligonucleotide
tgattcactcacgcgtcagcttaaggtgtttgtaaatccacttctgatgaagaaccaaga

SEQ ID NO: 24722 - DNA, 60 bp, Artificial
  Synthetic oligonucleotide
cgccacaacatctaatctgatcgcaagggcgatgcgagcggaatctgaactcaagcgcgc

SEQ ID NO: 24723 - DNA, 61 bp, Artificial
  Synthetic oligonucleotide
gatgtgtttggtatgtgggttaagcctgataacattaaggtgttcccctctcttgaaggag

SEQ ID NO: 24724 - DNA, 61 bp, Artificial
  Synthetic oligonucleotide
caaccacaggcattatatttctcggtggccagaataggtcaggtggggccatacacacagc

SEQ ID NO: 24725 - DNA, 60 bp, Artificial
  Synthetic oligonucleotide
accaaggaatttcagcacataaaaccacttaggcttgcaaagaaggttgaagacagctac

SEQ ID NO: 24726 - DNA, 60 bp, Artificial
  Synthetic oligonucleotide
acagttagtggttctaatgagatgtttggtgtggagaataataccatgtcacgagcaaat

SEQ ID NO: 24727 - DNA, 60 bp, Artificial
  Synthetic oligonucleotide
tcgtcaaggcatcttgaggaggaactccagttttggaaatctaaagcaacacagctgatg

SEQ ID NO: 24728 - DNA, 60 bp, Artificial
  Synthetic oligonucleotide
tgtcaacattgagtgatcctgtgtcaaggttgccagacatacaatctctgtggggaaaac

SEQ ID NO: 24729 - DNA, 60 bp, Artificial
  Synthetic oligonucleotide
ttcaattcttttaacacacagtttggaaatagtggtgcaccgtatgttgattctgatggt

SEQ ID NO: 24730 - DNA, 60 bp, Artificial
  Synthetic oligonucleotide
tgggtcattcggaaaatctttggagcagcaaatacgacatccacttacgctatctatgcg

SEQ ID NO: 24731 - DNA, 60 bp, Artificial
  Synthetic oligonucleotide
aacctctttgtggcatgggtatggatggtgtgccaggccttcttttcttcagatggagtg

SEQ ID NO: 24732 - DNA, 60 bp, Artificial
  Synthetic oligonucleotide
tcgaggccatgcgaggggcttatggtgaagatccagcatggaaaggcttgatgtcttgtg

SEQ ID NO: 24733 - DNA, 60 bp, Artificial
  Synthetic oligonucleotide
tggttgagaggagaaatgtgataacagacccactccttaagttggtagaaccctggagac

SEQ ID NO: 24734 - DNA, 61 bp, Artificial
  Synthetic oligonucleotide
ggcgggtagaagctgcactagaagataggggtgaacttgcatatcaaaagatcaggcgaac

SEQ ID NO: 24735 - DNA, 60 bp, Artificial
  Synthetic oligonucleotide
gctcacaggccccagggaaggatggtggaatatggattcaggagatgatcccactaattc

SEQ ID NO: 24736 - DNA, 61 bp, Artificial
  Synthetic oligonucleotide
caatgatattggtgaagatgatgatctcgactggtatgatgatatgttagaagatgaacgc

SEQ ID NO: 24737 - DNA, 61 bp, Artificial
  Synthetic oligonucleotide
agggcatcacagtatggactttggaaaattgccaagctacatgtgtatttcacacccctgg

SEQ ID NO: 24738 - DNA, 60 bp, Artificial
  Synthetic oligonucleotide
ccagcaccaactggctcctatttgccactaccacaagcggcgggcgtgccaggtattccg

SEQ ID NO: 24739 - DNA, 60 bp, Artificial
  Synthetic oligonucleotide
tgctaagattgaacaggatgacataagaatgatcctgtgtactgacccagtgtttactag

SEQ ID NO: 24740 - DNA, 55 bp, Artificial
  Synthetic oligonucleotide
aaaacacacagattggatttgttatggtgatgaccggcttttagcagttgacaag

SEQ ID NO: 24741 - DNA, 61 bp, Artificial
  Synthetic oligonucleotide
gataaggttgtccttctccctacaggtgaggtttgtaagatctatggtggcaatccatctg

SEQ ID NO: 24742 - DNA, 60 bp, Artificial
  Synthetic oligonucleotide
ccatactagccctttccaccgccactacaacatcgtaccttggctcgcttttcctgatag

SEQ ID NO: 24743 - DNA, 60 bp, Artificial
  Synthetic oligonucleotide
agctgctgatgcaactggcacaaactgggctatgccaagttgggttggatttcccgtgcc

SEQ ID NO: 24744 - DNA, 60 bp, Artificial
  Synthetic oligonucleotide
tggcacgcatattggtgatccagcacataaagtatggtgtgagaataggcttgagacact

SEQ ID NO: 24745 - DNA, 60 bp, Artificial
  Synthetic oligonucleotide
actagccttatgaccttatataatgtggatgccggtagagcacctatcaccgccgggtta

SEQ ID NO: 24746 - DNA, 61 bp, Artificial
  Synthetic oligonucleotide
gtgtcaaaccagacttcgggtgcctagttgtgaacagcaatttgcctgtcccgtccctgac

SEQ ID NO: 24747 - DNA, 60 bp, Artificial
  Synthetic oligonucleotide
aaaactctgattgtggcacttaaaacagccacgaccaaggctccatggctagctgctgat

SEQ ID NO: 24748 - DNA, 60 bp, Artificial
  Synthetic oligonucleotide
ccaaacagcagaaacctaggaaagttcggctacagaaggttgagcgccaggtcaaaaccc

SEQ ID NO: 24749 - DNA, 53 bp, Artificial
  Synthetic oligonucleotide
gttgctacgttgacggtgtcagttggggttaagtttgcaaattcaactataac

SEQ ID NO: 24750 - DNA, 60 bp, Artificial
  Synthetic oligonucleotide
tggaggtatacatagaagggccacccggttatatggtgaacataggtactatgtcgaact

SEQ ID NO: 24751 - DNA, 61 bp, Artificial
  Synthetic oligonucleotide
ctcaaattgatgatcagttgatggaacgtatcatagagggtactaaggtatcacatgcagc

SEQ ID NO: 24752 - DNA, 60 bp, Artificial
  Synthetic oligonucleotide
tataccatctggaccaaataggtttgactctatagtggttgttgaaggacaaggaggctc

SEQ ID NO: 24753 - DNA, 56 bp, Artificial
  Synthetic oligonucleotide
acacttgcaacatcccacttgtctggttttaggatggctgttttacccacaattcc

SEQ ID NO: 24754 - DNA, 57 bp, Artificial
  Synthetic oligonucleotide
acacttgcaacatcccacttgtctggttttaggatggctgttttacccacaattcca

SEQ ID NO: 24755 - DNA, 60 bp, Artificial
  Synthetic oligonucleotide
ctggaggtgctgtcataatagacccagcagatttccatccagtgaaggccccatctcagg

SEQ ID NO: 24756 - DNA, 58 bp, Artificial
  Synthetic oligonucleotide
acacttgcaacatcccacttgtctggttttaggatggctgttttacccacaattccat

SEQ ID NO: 24757 - DNA, 60 bp, Artificial
  Synthetic oligonucleotide
ggccttccagctagactcacagaagagcaactccatcgcatttggaggggaggaccaaag

SEQ ID NO: 24758 - DNA, 61 bp, Artificial
  Synthetic oligonucleotide
cttgatctcatagaccgtatcattggtgagaggtctggctaccctgactatgatgatgagg

SEQ ID NO: 24759 - DNA, 60 bp, Artificial
  Synthetic oligonucleotide
cgcaacatcccacttgtctggttttaggatggctgttctacccacaattccatttcacac

SEQ ID NO: 24760 - DNA, 60 bp, Artificial
  Synthetic oligonucleotide
gcaacttcccacttgtctggttttaggatggctgttttacccacaattccatttcatacc

SEQ ID NO: 24761 - DNA, 60 bp, Artificial
  Synthetic oligonucleotide
ctcgcaacatcccacttgtctggttttaggatggctgttctacccacaattccatttcac

SEQ ID NO: 24762 - DNA, 60 bp, Artificial
  Synthetic oligonucleotide
gcaacatcccacttgtctggttttaggatggctgttctacccacaattccatttcacacc

SEQ ID NO: 24763 - DNA, 60 bp, Artificial
  Synthetic oligonucleotide
cacttgcaacttcccacttgtctggttttaggatggctgttttacccacaattccatttc

SEQ ID NO: 24764 - DNA, 56 bp, Artificial
  Synthetic oligonucleotide
cacttgcaacatcccacttgtctggttttaggatggctgttttacccacaattcca

SEQ ID NO: 24765 - DNA, 60 bp, Artificial
  Synthetic oligonucleotide
cactcgcaacatcccacttgtctggttttaggatggctgttctacccacaattccatttc

SEQ ID NO: 24766 - DNA, 57 bp, Artificial
  Synthetic oligonucleotide
cacttgcaacatcccacttgtctggttttaggatggctgttttacccacaattccat

SEQ ID NO: 24767 - DNA, 60 bp, Artificial
  Synthetic oligonucleotide
cgctgattgggcaacttatcgcgagtttcggtatctagaggatactagagtgatacacat

SEQ ID NO: 24768 - DNA, 60 bp, Artificial
  Synthetic oligonucleotide
tcgctgattgggcaacttatcgcgagtttcggtatctagaggatactagagtgatacaca

SEQ ID NO: 24769 - DNA, 60 bp, Artificial
  Synthetic oligonucleotide
ttcgctgattgggcaacttatcgcgagtttcggtatctagaggatactagagtgatacac

SEQ ID NO: 24770 - DNA, 60 bp, Artificial
  Synthetic oligonucleotide
ccatgggaagctcctatgctatcagttgcttgctgcgttcatggcggaagaccacccttt

SEQ ID NO: 24771 - DNA, 60 bp, Artificial
  Synthetic oligonucleotide
ccatgggaagctcctatgctatcagttgcttgctgcgttcatggcagaagatcacccttt

SEQ ID NO: 24772 - DNA, 60 bp, Artificial
  Synthetic oligonucleotide
ctccatgggaagctcctatgctatcagttgcttgctgcgttcatggcagaagatcaccct

SEQ ID NO: 24773 - DNA, 60 bp, Artificial
  Synthetic oligonucleotide
ctccatgggaaactcctatgctatcagttgcttgctgcgttcatggcagaggaccacccc

SEQ ID NO: 24774 - DNA, 60 bp, Artificial
  Synthetic oligonucleotide
ctccatgggaagctcctatgctatcagttgcttgctgcgttcatggcagaggaccacccc

SEQ ID NO: 24775 - DNA, 60 bp, Artificial
  Synthetic oligonucleotide
ctccatgggaagctcctatgctatcagttgcttgctgcgttcatggcagaagaccaccct

SEQ ID NO: 24776 - DNA, 60 bp, Artificial
  Synthetic oligonucleotide
tccatgggaaactcctatgctatcagttgcttgctgcgttcatggcagaggaccacccct

SEQ ID NO: 24777 - DNA, 60 bp, Artificial
  Synthetic oligonucleotide
tccatgggaagctcctatgctatcagttgcttgctgcgttcatggcagaggaccacccct

SEQ ID NO: 24778 - DNA, 60 bp, Artificial
  Synthetic oligonucleotide
ccatgggaagctcctatgctatcagttgcttgctgcgttcatggcagaggaccacccctt

SEQ ID NO: 24779 - DNA, 60 bp, Artificial
  Synthetic oligonucleotide
ccatgggaaactcctatgctatcagttgcttgctgcgttcatggcagaggaccacccctt

SEQ ID NO: 24780 - DNA, 60 bp, Artificial
  Synthetic oligonucleotide
cttgaatcgctccatgggaagctcctatgctatcagttgcttgctgcgttcatggcagaa

SEQ ID NO: 24781 - DNA, 60 bp, Artificial
  Synthetic oligonucleotide
ttgaatcgctccatgggaagctcctatgctatcagttgcttgctgcgttcatggcagaag

SEQ ID NO: 24782 - DNA, 60 bp, Artificial
  Synthetic oligonucleotide
tcttgaatcgctccatgggaagctcctatgctatcagttgcttgctgcgttcatggcaga

SEQ ID NO: 24783 - DNA, 60 bp, Artificial
  Synthetic oligonucleotide
cactccatgggaagctcctatgctatcagttgcttgctgcgttcatggcagaggaccacc

SEQ ID NO: 24784 - DNA, 60 bp, Artificial
  Synthetic oligonucleotide
cactccatgggaaactcctatgctatcagttgcttgctgcgttcatggcagaggaccacc

SEQ ID NO: 24785 - DNA, 60 bp, Artificial
  Synthetic oligonucleotide
gcaactccatcgcatttggaggggaggaccaaaggagtgtgatggctagcaagtctgaca

SEQ ID NO: 24786 - DNA, 60 bp, Artificial
  Synthetic oligonucleotide
gcaactccatcgcatttggaggggaggaccaaagaagtgtgatggctagcaagtccaaca

SEQ ID NO: 24787 - DNA, 60 bp, Artificial
  Synthetic oligonucleotide
agcaactccatcgcatttggaggggaggaccaaaggagtgtgatggctagcaagtctgac

SEQ ID NO: 24788 - DNA, 60 bp, Artificial
  Synthetic oligonucleotide
agcaactccatcgcatttggaggggaggaccaaagaagtgtgatggctagcaagtccaac

SEQ ID NO: 24789 - DNA, 60 bp, Artificial
  Synthetic oligonucleotide
actccatcgcatttggaggggaggaccaaaggagtgtgatggctagcaagtctgacaagc

SEQ ID NO: 24790 - DNA, 60 bp, Artificial
  Synthetic oligonucleotide
ctccatcgcatttggaggggaggaccaaagaagtgtgatggctagcaagtctgacaagca

SEQ ID NO: 24791 - DNA, 60 bp, Artificial
  Synthetic oligonucleotide
actccatgggaagctcctatgctatcagttgcttgctgcgttcatggcagaggaccaccc

SEQ ID NO: 24792 - DNA, 60 bp, Artificial
  Synthetic oligonucleotide
actccatgggaagctcctatgctatcagttgcttgctgcgttcatggcagaagaccaccc

SEQ ID NO: 24793 - DNA, 60 bp, Artificial
  Synthetic oligonucleotide
actccatgggaagctcctatgctatcagttgcttgctgcgttcatggcagaagatcaccc

SEQ ID NO: 24794 - DNA, 60 bp, Artificial
  Synthetic oligonucleotide
actccatgggaagctcctatgctatcagttgcttgctgcgttcatggcggaagaccaccc

SEQ ID NO: 24795 - DNA, 61 bp, Artificial
  Synthetic oligonucleotide
cactccatgggaagctcctatgctatcagttgcttgctgcgttcatggcggaagaccaccc

SEQ ID NO: 24796 - DNA, 61 bp, Artificial
  Synthetic oligonucleotide
cactccatgggaagctcctatgctatcagttgcttgctgcgttcatggcagaagaccaccc

SEQ ID NO: 24797 - DNA, 60 bp, Artificial
  Synthetic oligonucleotide
cactccatgggaagctcctatgctatcagttgcttgctgcgttcatggcggaagaccacc

SEQ ID NO: 24798 - DNA, 61 bp, Artificial
  Synthetic oligonucleotide
cactccatgggaagctcctatgctatcagttgcttgctgcgttcatggcagaagatcaccc

SEQ ID NO: 24799 - DNA, 60 bp, Artificial
  Synthetic oligonucleotide
ctccatgggaagctcctatgctatcagttgcttgctgcgttcatggcggaagaccaccct

SEQ ID NO: 24800 - DNA, 60 bp, Artificial
  Synthetic oligonucleotide
actccatgggaaactcctatgctatcagttgcttgctgcgttcatggcagaggaccaccc

SEQ ID NO: 24801 - DNA, 60 bp, Artificial
  Synthetic oligonucleotide
cagaagagcaactccatcgcatttggaggggaggaccaaagaagtgtgatggctagcaag

SEQ ID NO: 24802 - DNA, 60 bp, Artificial
  Synthetic oligonucleotide
gctcctatgctatcagttgcttgctgcgttcatggcagaagatcacccttttaaggtgta

SEQ ID NO: 24803 - DNA, 60 bp, Artificial
  Synthetic oligonucleotide
aagagcaactccatcgcatttggaggggaggaccaaagaagtgtgatggctagcaagtcc

SEQ ID NO: 24804 - DNA, 60 bp, Artificial
  Synthetic oligonucleotide
gaagagcaactccatcgcatttggaggggaggaccaaagaagtgtgatggctagcaagtc

SEQ ID NO: 24805 - DNA, 61 bp, Artificial
  Synthetic oligonucleotide
gggaagctcctatgctatcagttgcttgctgcgttcatggcagaagatcacccttttaagg

SEQ ID NO: 24806 - DNA, 60 bp, Artificial
  Synthetic oligonucleotide
catgggaagctcctatgctatcagttgcttgctgcgttcatggcagaagatcaccctttt

SEQ ID NO: 24807 - DNA, 60 bp, Artificial
  Synthetic oligonucleotide
ggaagctcctatgctatcagttgcttgctgcgttcatggcagaagatcacccttttaagg

SEQ ID NO: 24808 - DNA, 60 bp, Artificial
  Synthetic oligonucleotide
gagcaactccatcgcatttggaggggaggaccaaagaagtgtgatggctagcaagtccaa

SEQ ID NO: 24809 - DNA, 60 bp, Artificial
  Synthetic oligonucleotide
agagcaactccatcgcatttggaggggaggaccaaagaagtgtgatggctagcaagtcca

SEQ ID NO: 24810 - DNA, 61 bp, Artificial
  Synthetic oligonucleotide
ccttggacgttgggagttcactaactacaatgctaaaccggcacttggcacactcgaccgc

SEQ ID NO: 24811 - DNA, 60 bp, Artificial
  Synthetic oligonucleotide
gcccaaataaagaacaaggcccagagttgcagattgccacctttctgcatccatccctga

SEQ ID NO: 24812 - DNA, 60 bp, Artificial
  Synthetic oligonucleotide
ccagatctaatgccagttccaacagactgcgataagttagttgcatccttagtgacaccc

SEQ ID NO: 24813 - DNA, 61 bp, Artificial
  Synthetic oligonucleotide
cctgcctgcacatgacaccacagtatggccctacataccactcccttatgtctcagcaggg

SEQ ID NO: 24814 - DNA, 60 bp, Artificial
  Synthetic oligonucleotide
atgaagagggcgggcagtcttgcggtccgatgctcgagatccatggtctcggtaagacgt

SEQ ID NO: 24815 - DNA, 60 bp, Artificial
  Synthetic oligonucleotide
gggcctggcattatggtgggcgacgacggtgtcatgaaaatgacgctgccgacagcttca

SEQ ID NO: 24816 - DNA, 60 bp, Artificial
  Synthetic oligonucleotide
acagttcgtcaaccacaggttcgtagtggcacctttatgctggtctattcgattggcact

SEQ ID NO: 24817 - DNA, 61 bp, Artificial
  Synthetic oligonucleotide
ccttagttgggtcgagtgctgttactggttccatctacaggatgtcattgaatttgacaca

SEQ ID NO: 24818 - DNA, 53 bp, Artificial
  Synthetic oligonucleotide
tttgaccacactaagaaggccaccacccttacggtcacgcaggtgaactcccc

SEQ ID NO: 24819 - DNA, 61 bp, Artificial
  Synthetic oligonucleotide
tgtgttgccgttatggctaacaacactaccagcgctcttcaccctcgtggctctggccagc

SEQ ID NO: 24820 - DNA, 60 bp, Artificial
  Synthetic oligonucleotide
cgttggtggtgattgatgctaaggatggtaggggcactggcttccgggtgagaaactacc

SEQ ID NO: 24821 - DNA, 60 bp, Artificial
  Synthetic oligonucleotide
tccgggtgagaaactaccttgtcactgctggccacgttgttggcgcggacactactgtcc

SEQ ID NO: 24822 - DNA, 60 bp, Artificial
  Synthetic oligonucleotide
acgccttttgtcgcgtaagaatagtgtattcattgagtttgactggacacgctacgatgg

SEQ ID NO: 24823 - DNA, 60 bp, Artificial
  Synthetic oligonucleotide
ttcacgcctggacctaacgagtggcgcgaagttgatccccgcatcgacaagcgcacagca

SEQ ID NO: 24824 - DNA, 60 bp, Artificial
  Synthetic oligonucleotide
tgttgagacatgactatgagcgcttggtccgtgaaaagcctggtcctgctatgagaactt

SEQ ID NO: 24825 - DNA, 60 bp, Artificial
  Synthetic oligonucleotide
ggctggtgcctgacgactatccagtgatcggcaaattgcccataaataggcccatctccg

SEQ ID NO: 24826 - DNA, 60 bp, Artificial
  Synthetic oligonucleotide
actgggctacttcccctactttgctaactggcacatggcggctttccttgttggcactgc

SEQ ID NO: 24827 - DNA, 61 bp, Artificial
  Synthetic oligonucleotide
ggacatgccgtcctcaattggtttgtgggttacaatggtcttgtttgccattgatcaggcc

SEQ ID NO: 24828 - DNA, 61 bp, Artificial
  Synthetic oligonucleotide
ccccgcagcattgtcgttgtgaatgcaaccgcacgaccctttggctatgtcaaatacaaca

SEQ ID NO: 24829 - DNA, 61 bp, Artificial
  Synthetic oligonucleotide
tcgcttctcgtgtctagcggaggagtttcagacagatgcaaacagggcaatgtatcagtgg

SEQ ID NO: 24830 - DNA, 60 bp, Artificial
  Synthetic oligonucleotide
ggctctccgtgattccgactggactcacgttgatgcagaggcgctgcttgcggcaatttc

SEQ ID NO: 24831 - DNA, 60 bp, Artificial
  Synthetic oligonucleotide
cagtgggagtgaagaggaaccctgcggagaagagcccacacctcctcagcctacacctag

SEQ ID NO: 24832 - DNA, 60 bp, Artificial
  Synthetic oligonucleotide
cgccaccggcgaggatatcgtcggcttggttcgagttgccatacagcgggagatggaagt

SEQ ID NO: 24833 - DNA, 60 bp, Artificial
  Synthetic oligonucleotide
tcgggtggcaagcgtaagccgggcaaggtctggaccgaggaagagtacaagaaactcctc

SEQ ID NO: 24834 - DNA, 60 bp, Artificial
  Synthetic oligonucleotide
tcttgtgagtttcttgcacgcgccaggctggtttacgataattgccatcctcatctatcg

SEQ ID NO: 24835 - DNA, 59 bp, Artificial
  Synthetic oligonucleotide
atactgatttcccgcaaccgaagaagccacagcgtgaggcagacttggaggctaaggtg

SEQ ID NO: 24836 - DNA, 60 bp, Artificial
  Synthetic oligonucleotide
aaaattaatgattcagacatccgccagattgtctgtgctgacccaatctttgccagaatt

SEQ ID NO: 24837 - DNA, 60 bp, Artificial
  Synthetic oligonucleotide
acctagctggaccaaggcagacttggtggatgaccgacaccaatgaagagggcgggcagt

SEQ ID NO: 24838 - DNA, 60 bp, Artificial
  Synthetic oligonucleotide
tatgtctcaggtgttcaagagggtaacgattatgtcacttttgccttcacgcctggacct

SEQ ID NO: 24839 - DNA, 60 bp, Artificial
  Synthetic oligonucleotide
tgggatctctgaaggtgtcattgtaggtgagagtatgacctacgcgataaacacggccga

SEQ ID NO: 24840 - DNA, 61 bp, Artificial
  Synthetic oligonucleotide
cacggagcgactgcttgataaactttggaggggaggaccaaagtgagctatggcgtccgcc

SEQ ID NO: 24841 - DNA, 60 bp, Artificial
  Synthetic oligonucleotide
cgcttgaggtcttagctaggcacatccgcaacttgggcggcgaggagcccgtccatgtca

SEQ ID NO: 24842 - DNA, 60 bp, Artificial
  Synthetic oligonucleotide
cctacaggcattaccgtccactatcgcaatgagtcatctgcgttcggccgggtccttgcc

SEQ ID NO: 24843 - DNA, 60 bp, Artificial
  Synthetic oligonucleotide
cggcccgctccacttcgcttttggtgatcttaaagtgatgaaggtggcgggtggtgtggt

SEQ ID NO: 24844 - DNA, 60 bp, Artificial
  Synthetic oligonucleotide
aggaaatagggtgacggggtgctatgaccctggctggatggagcctacaggcattaccgt

SEQ ID NO: 24845 - DNA, 61 bp, Artificial
  Synthetic oligonucleotide
cgtgagtggaagttcgcttgtcaagtcctacggcgtgagtttgatttcctcgagggctcag

SEQ ID NO: 24846 - DNA, 60 bp, Artificial
  Synthetic oligonucleotide
tgggaagaggttaaatcttttagcctccaggttgcccttgcagacttctggaacatgacc

SEQ ID NO: 24847 - DNA, 61 bp, Artificial
  Synthetic oligonucleotide
ggctatcaggattatgtgagtgagtacaagcgtattcacggcggggctcgccccaaggtcc

SEQ ID NO: 24848 - DNA, 60 bp, Artificial
  Synthetic oligonucleotide
gggaagctgacgacgactttgatgactatgaggaagagaagaatgaggttgactaccctg

SEQ ID NO: 24849 - DNA, 60 bp, Artificial
  Synthetic oligonucleotide
tggcgcgctcctacgcggctgtgttactctggttagcgccactgtcttttcacatcttgt

SEQ ID NO: 24850 - DNA, 60 bp, Artificial
  Synthetic oligonucleotide
ttgatggcacccaatatcatttcacccttaagcgtggtagcacggtgagctacgcgtctg

SEQ ID NO: 24851 - DNA, 60 bp, Artificial
  Synthetic oligonucleotide
ccccagcacctgattcgtcagcctatggccctgcggtctggggcccagaagcatatgtca

SEQ ID NO: 24852 - DNA, 55 bp, Artificial
  Synthetic oligonucleotide
tggtctgattttgagccagagttggatcctgatgtcaccaagacgctgccctgcc

SEQ ID NO: 24853 - DNA, 60 bp, Artificial
  Synthetic oligonucleotide
ccacaccatgtggaagaatggggtggctcctttcatgcagaggaagaagcagaagccaaa

SEQ ID NO: 24854 - DNA, 60 bp, Artificial
  Synthetic oligonucleotide
ctgacgagatgcggcttgaccactgggagaaaatgatggccccgcctgacgctggtcgca

SEQ ID NO: 24855 - DNA, 60 bp, Artificial
  Synthetic oligonucleotide
ccaagatgagtggcctgaagaacttcttccagcgtgctttccgacagaaggtacgtacgg

SEQ ID NO: 24856 - DNA, 60 bp, Artificial
  Synthetic oligonucleotide
actgtccgtgtccgctgggctgatgtcacatccttcgcccacgtggtctatcgtgtcccg

SEQ ID NO: 24857 - DNA, 61 bp, Artificial
  Synthetic oligonucleotide
cccgctgaatataacagtttacactcctacaagcttgcaaaagaggttgttgatggcacgg

SEQ ID NO: 24858 - DNA, 61 bp, Artificial
  Synthetic oligonucleotide
cattgaagagctacgggagtcgtgggacaggtgtgactcgctaatttatggtgatgaccgc

SEQ ID NO: 24859 - DNA, 60 bp, Artificial
  Synthetic oligonucleotide
ttaagggccctgatggtaagattaaagagacacagaatgccaacccatcttggatcacca

SEQ ID NO: 24860 - DNA, 60 bp, Artificial
  Synthetic oligonucleotide
tatgttgccgctgttcaacccgataaccaatatgttgtccaccactttgtaccaggccgg

SEQ ID NO: 24861 - DNA, 60 bp, Artificial
  Synthetic oligonucleotide
tgtaccaggccggaacgagtgggtagagactgatgcttcaacccaccagcctacagccct

SEQ ID NO: 24862 - DNA, 60 bp, Artificial
  Synthetic oligonucleotide
ggccccttcaaatcaggctccctttgaggtaacaattggtcaaaccacataccaggccca

SEQ ID NO: 24863 - DNA, 60 bp, Artificial
  Synthetic oligonucleotide
tcccatagtcaaaccttttaaaccacttaaggtactgctcttctcattgctcctgggctt

SEQ ID NO: 24864 - DNA, 60 bp, Artificial
  Synthetic oligonucleotide
acacggcgaaccagccgtcgggcagcccttctatctcatgtcaacagtttccactggggt

SEQ ID NO: 24865 - DNA, 60 bp, Artificial
  Synthetic oligonucleotide
aagtctaatgggaagcagcatcctcagaagaatgtccccgcgcgcaagtggcggcctcgc

SEQ ID NO: 24866 - DNA, 60 bp, Artificial
  Synthetic oligonucleotide
gggtcttccgcagttactggttctgtcacaagagcctccctcaatctcacccagtcccct

SEQ ID NO: 24867 - DNA, 59 bp, Artificial
  Synthetic oligonucleotide
gaatatttggcaaagcgtggctatgccgattacgtctccgagtggaaccgaatcagggg

SEQ ID NO: 24868 - DNA, 60 bp, Artificial
  Synthetic oligonucleotide
acctaacgatggctcgaattttgggccattgcaagctgcggctgcccaatggggcttgtg

SEQ ID NO: 24869 - DNA, 60 bp, Artificial
  Synthetic oligonucleotide
catcccactatagttgccgcggatgttggggaatacatacttgcactagtatggtgccgt

SEQ ID NO: 24870 - DNA, 61 bp, Artificial
  Synthetic oligonucleotide
cttccagacagtgtttaactggtacttttgtgccaccgcacttgctgtctactacatggcc

SEQ ID NO: 24871 - DNA, 60 bp, Artificial
  Synthetic oligonucleotide
gctatgatgatcaagggtcacgctgtggtcttcgccatagtctgctattcacatgtggcc

SEQ ID NO: 24872 - DNA, 61 bp, Artificial
  Synthetic oligonucleotide
tggtgcagacatcccagaggtgacgagtgaagtgaaacctgctctcaacgggtggtacacg

SEQ ID NO: 24873 - DNA, 60 bp, Artificial
  Synthetic oligonucleotide
acgacaagcccaagtgtgcccaatgattatgtcaccagagttgttgccatgtacaaggac

SEQ ID NO: 24874 - DNA, 57 bp, Artificial
  Synthetic oligonucleotide
gccgccaatgccggctcccaatatctggtctatgcctcacttgccgacgcccagaac

SEQ ID NO: 24875 - DNA, 61 bp, Artificial
  Synthetic oligonucleotide
cttcaacatataaggattctgattggactggggatttgtttatagttgagcttcatgggac

SEQ ID NO: 24876 - DNA, 60 bp, Artificial
  Synthetic oligonucleotide
tcgttggttcggacgatgcagtcaagattaggtggggtgcccaagaagacatggcacgtg

SEQ ID NO: 24877 - DNA, 61 bp, Artificial
  Synthetic oligonucleotide
gggttactgtctctgctactattggcaaggttggccctaataaggaacagggacctgagct

SEQ ID NO: 24878 - DNA, 60 bp, Artificial
  Synthetic oligonucleotide
gagtagacactgaggggcagatcaccatgaccatccctgagaatagcccgatggctcgcc

SEQ ID NO: 24879 - DNA, 61 bp, Artificial
  Synthetic oligonucleotide
ccactggggtttatcgtgaagccatgcctgtctgggtcaagtacaattaccctggggcccc

SEQ ID NO: 24880 - DNA, 60 bp, Artificial
  Synthetic oligonucleotide
tgacttggttcgtgaggctgttcaacgtgagatgaaggtcttgcgtactgagttggccaa

SEQ ID NO: 24881 - DNA, 59 bp, Artificial
  Synthetic oligonucleotide
ggggattaatcacaccttatgggagcatggactaatgcctttcactcagcgtaggaagc

SEQ ID NO: 24882 - DNA, 60 bp, Artificial
  Synthetic oligonucleotide
gagcaatcttggaaagaacttgaaccagcaaaatcaggagtggttgtgaataccctaccc

SEQ ID NO: 24883 - DNA, 61 bp, Artificial
  Synthetic oligonucleotide
ggcaaatcttttgttagtggccgttacagagggtgtccgtgtggaggaccacatgacatac

SEQ ID NO: 24884 - DNA, 60 bp, Artificial
  Synthetic oligonucleotide
tacagcaaatctatgagggcgtacgcggccttcgtggccacgcagaagcggttgccgttg

SEQ ID NO: 24885 - DNA, 60 bp, Artificial
  Synthetic oligonucleotide
actaacctccagactatgccagcttataagtttgctaaggctattactgatggccccata

SEQ ID NO: 24886 - DNA, 60 bp, Artificial
  Synthetic oligonucleotide
tcagcagatggtaaagtcctccacactgtgccaacacatccgaattggactgccaaggtg

SEQ ID NO: 24887 - DNA, 60 bp, Artificial
  Synthetic oligonucleotide
tgaggagggtggccaatcttgtggcccaatgctagaggtgcatggactcggtaagacaac

SEQ ID NO: 24888 - DNA, 60 bp, Artificial
  Synthetic oligonucleotide
acgtaaccggcttgaggacatttatgcaggctccgggccattggtctttggctttggacc

SEQ ID NO: 24889 - DNA, 60 bp, Artificial
  Synthetic oligonucleotide
ttggctactttgtcacagtttcagttgctggctgttgccgttctacctcttttagatttt

SEQ ID NO: 24890 - DNA, 60 bp, Artificial
  Synthetic oligonucleotide
accagcctacagcccttgtcggtgtacttgtgcaagatcataaggcgaagacacgtgagg

SEQ ID NO: 24891 - DNA, 60 bp, Artificial
  Synthetic oligonucleotide
agtatggtgccgtggcaatggcttttctgcaggtgtcatcaattcttatggtgccttggc

SEQ ID NO: 24892 - DNA, 60 bp, Artificial
  Synthetic oligonucleotide
tcccagcagatctccatcctagtgtccttctgtgtgttggtgctttcagtgatgattggc

SEQ ID NO: 24893 - DNA, 60 bp, Artificial
  Synthetic oligonucleotide
gggtgcgtctcaaccggcacttgctgcctacgagatgtttccctactttccacacggcga

SEQ ID NO: 24894 - DNA, 60 bp, Artificial
  Synthetic oligonucleotide
atggtgccttggctgacacctccttcaatctagactccctgcgtgcagattccaacggag

SEQ ID NO: 24895 - DNA, 61 bp, Artificial
  Synthetic oligonucleotide
ggggtttcaatgacaggattcagcgcctcgttgccaagggcaatccttattggattgagtt

SEQ ID NO: 24896 - DNA, 60 bp, Artificial
  Synthetic oligonucleotide
ccgacgcccagaacggcaagccagcaatgtccacttctcgtggttatgtccgcgaggtta

SEQ ID NO: 24897 - DNA, 60 bp, Artificial
  Synthetic oligonucleotide
tgaggagaaggacacttgcctctattgggaatggaaggatagtagagaggttgcttggta

SEQ ID NO: 24898 - DNA, 61 bp, Artificial
  Synthetic oligonucleotide
ctcctcttgtcaacgcgtacgccgcagcaacttcagatgccaatcccatacagtttacacc

SEQ ID NO: 24899 - DNA, 60 bp, Artificial
  Synthetic oligonucleotide
aagcgcaaacgtaaggccgtttggactgaggaggagtacaaagccatgctagagaagggc

SEQ ID NO: 24900 - DNA, 60 bp, Artificial
  Synthetic oligonucleotide
tctcacccagtcccctggggccacctcgtggggtggtctcggcgcgcgtaagcatcttga

SEQ ID NO: 24901 - DNA, 60 bp, Artificial
  Synthetic oligonucleotide
ggttgatggccgggtgattgcagtacaccagaccaatacaggctttacgggaggcgctgt

SEQ ID NO: 24902 - DNA, 60 bp, Artificial
  Synthetic oligonucleotide
agcatcttgacgtgccaactggtgtgtccaaggtgtggaagctccgccgtggtgacctca

SEQ ID NO: 24903 - DNA, 60 bp, Artificial
  Synthetic oligonucleotide
ccgtttgtggagggtctgttttgtatttccagccgagcgtttggagataagatcagcaga

SEQ ID NO: 24904 - DNA, 61 bp, Artificial
  Synthetic oligonucleotide
tgttggtggcctacttagttagggttaccaccgcgctacctaacgcgttgaggggttcccc

SEQ ID NO: 24905 - DNA, 61 bp, Artificial
  Synthetic oligonucleotide
cccatctctaaacaggacatacaggctgtggccaaggagctcaaaatctatgagaaagcca

SEQ ID NO: 24906 - DNA, 60 bp, Artificial
  Synthetic oligonucleotide
acctccctaatgacaataagttcaggaattacatcttagtggctttggaggtgatggctc

SEQ ID NO: 24907 - DNA, 60 bp, Artificial
  Synthetic oligonucleotide
tccgttgttaaagatataaccgcaacatctaagaattcggagtctacaccaggtttccca

SEQ ID NO: 24908 - DNA, 60 bp, Artificial
  Synthetic oligonucleotide
tgctgccagagcctgagtcacctgatttaggttttgagccggcagtttggggcccagagg

SEQ ID NO: 24909 - DNA, 61 bp, Artificial
  Synthetic oligonucleotide
ccactggtacgttgataacatcctgcgccggtatgtttgtatgccatcaggtgagatcacc

SEQ ID NO: 24910 - DNA, 61 bp, Artificial
  Synthetic oligonucleotide
cgcaacatcccacttgtctggttttaggatggctgttctacccacaattccatttcacacc

SEQ ID NO: 24911 - DNA, 60 bp, Artificial
  Synthetic oligonucleotide
gcaacatcccacttgtctggttttaggatggctgtcctacccacaattccatttcacacc

SEQ ID NO: 24912 - DNA, 60 bp, Artificial
  Synthetic oligonucleotide
caaagaacccagattatagttgtgtcacagttatggcttatgtgaatgaggatcttgtgg

SEQ ID NO: 24913 - DNA, 60 bp, Artificial
  Synthetic oligonucleotide
tcaaagaacccagattatagttgtgtcacagttatggcttatgtgaatgaggatcttgtg

SEQ ID NO: 24914 - DNA, 60 bp, Artificial
  Synthetic oligonucleotide
caaagaacccagattatagttgtgtcacagttatggcttatgtgaatgaagatcttgtgg

SEQ ID NO: 24915 - DNA, 61 bp, Artificial
  Synthetic oligonucleotide
cgcaggctgccagaccttgaatccctgtggggcaagctcgtgtcgctgaagattatgtgct

SEQ ID NO: 24916 - DNA, 61 bp, Artificial
  Synthetic oligonucleotide
ctttgggatgtgggtcaaacctgaaaacattaagctctttgactcgccaactggttcttcc

SEQ ID NO: 24917 - DNA, 61 bp, Artificial
  Synthetic oligonucleotide
gtcaacaaactccttcagagtcttaaaacacccacgcgcaggctgccagaccttgaatccc

SEQ ID NO: 24918 - DNA, 61 bp, Artificial
  Synthetic oligonucleotide
ggagaaccatggcattattccaacagtcagagactaccgggccaacgttgactttctttgc

SEQ ID NO: 24919 - DNA, 60 bp, Artificial
  Synthetic oligonucleotide
tgtctctacaatgttgactgtgggcgtgctccacaaacgccctaccccacctttcagtca

SEQ ID NO: 24920 - DNA, 60 bp, Artificial
  Synthetic oligonucleotide
ctcaggctgggctaatattgacggcgattacctgaatgctcccttcgaaacctatgcagg

SEQ ID NO: 24921 - DNA, 60 bp, Artificial
  Synthetic oligonucleotide
ttcttctcacaggaataccagctcacaagcgagttactggaaatctcgcaaaatttggag

SEQ ID NO: 24922 - DNA, 61 bp, Artificial
  Synthetic oligonucleotide
ggctctaacgcagcgtgtacccttgtcgatgttccatccccaatgaaagttggttatgaca

SEQ ID NO: 24923 - DNA, 60 bp, Artificial
  Synthetic oligonucleotide
actgcacttgagatctatgactttacagactttggagtcttctttggtacgggaagctac

SEQ ID NO: 24924 - DNA, 60 bp, Artificial
  Synthetic oligonucleotide
agtcactaccgtggttgtttgtacggctgggttcggcttccgttatctaactggtacggt

SEQ ID NO: 24925 - DNA, 60 bp, Artificial
  Synthetic oligonucleotide
accaaaataactatggctggcggtgccaccgcacctgcgggcgctaagcccaagcaacct

SEQ ID NO: 24926 - DNA, 60 bp, Artificial
  Synthetic oligonucleotide
agcaaagagcgatgcttcgtttcattcaacttggccggcaacaacaggtggccactgtct

SEQ ID NO: 24927 - DNA, 60 bp, Artificial
  Synthetic oligonucleotide
catgggcggtattaggatttcctttgcttcactcacatcagagctcgagaagcagcgcga

SEQ ID NO: 24928 - DNA, 60 bp, Artificial
  Synthetic oligonucleotide
taaagaccaacttgagaaggagagaaccaaacacggctggaagggcttgaaaacactgtg

SEQ ID NO: 24929 - DNA, 60 bp, Artificial
  Synthetic oligonucleotide
agaggaccgttcgtgggcagaaacataagaccaaagcgatctctaaggctgccttcatga

SEQ ID NO: 24930 - DNA, 60 bp, Artificial
  Synthetic oligonucleotide
gttgttcgctttgcaatggacttcagtcttgcatacccaatttgtgtcatgttcgtgctc

SEQ ID NO: 24931 - DNA, 60 bp, Artificial
  Synthetic oligonucleotide
tggtggttctgctggagttggctttagacttggcaactacatctacacagcaggccatgt

SEQ ID NO: 24932 - DNA, 61 bp, Artificial
  Synthetic oligonucleotide
tatgactaccaatagccaacaagtcctagcactcctaacacccagggtggcgggtcagagg

SEQ ID NO: 24933 - DNA, 60 bp, Artificial
  Synthetic oligonucleotide
tacaggcacactctggcaagtcgaaatgagggttacctatgcattctccacttacaaccc

SEQ ID NO: 24934 - DNA, 56 bp, Artificial
  Synthetic oligonucleotide
acaaaatgagcgcatgaaggagagaacagaaacgcatcatgctcaggtgggctgga

SEQ ID NO: 24935 - DNA, 61 bp, Artificial
  Synthetic oligonucleotide
ggcacttgagtgttccaagcaaatggactatatggattgcaaagaagttataaccgactcg

SEQ ID NO: 24936 - DNA, 61 bp, Artificial
  Synthetic oligonucleotide
ggcgatgcggttgattttgtgcaggactatcctgaactcactgctttcgcagatgcagctg

SEQ ID NO: 24937 - DNA, 60 bp, Artificial
  Synthetic oligonucleotide
gctctgctgtcgatgccgctgccacagtgcttggaccatggggctaccttctaaaaggtg

SEQ ID NO: 24938 - DNA, 60 bp, Artificial
  Synthetic oligonucleotide
tgcttgaacaaccaaaatgtgagggctttacatcaacaacttggactcgtaaagcgtaca

SEQ ID NO: 24939 - DNA, 60 bp, Artificial
  Synthetic oligonucleotide
tgactttcccgaggccacggcgagtagcatcgagggtacaggaaagctgggaccattgca

SEQ ID NO: 24940 - DNA, 60 bp, Artificial
  Synthetic oligonucleotide
tcatcaggcggggaagaggttaaacttcaaacatgttaagatacacccagataagacttt

SEQ ID NO: 24941 - DNA, 60 bp, Artificial
  Synthetic oligonucleotide
acagtgggcactcttgttggacaaacacaaagtggattaaatcgccaactcagggtctct

SEQ ID NO: 24942 - DNA, 60 bp, Artificial
  Synthetic oligonucleotide
gcagattcaattgacaccataaaagccagaagacatgtccagatggcgcttggcaggccg

SEQ ID NO: 24943 - DNA, 60 bp, Artificial
  Synthetic oligonucleotide
tcgttgacacttctgaggcacctgccgatgcgtatggcccagctgttgatctcatgctgg

SEQ ID NO: 24944 - DNA, 61 bp, Artificial
  Synthetic oligonucleotide
agaatcactcttcttccaactggagaggtaactcatgtcaagaaaggcaacccatctgggc

SEQ ID NO: 24945 - DNA, 60 bp, Artificial
  Synthetic oligonucleotide
agccaaggttctcggtcacattgagttaccactcttcacagatacgcttgctcgtcttga

SEQ ID NO: 24946 - DNA, 61 bp, Artificial
  Synthetic oligonucleotide
gagaaggggtggaccgtaaaccactggttggctgactacagcaactgactttcccgaggcc

SEQ ID NO: 24947 - DNA, 60 bp, Artificial
  Synthetic oligonucleotide
tgtgcccttgttgccaagtgttgtggattaagacttttaccattcactttagttctcact

SEQ ID NO: 24948 - DNA, 60 bp, Artificial
  Synthetic oligonucleotide
tcagtcactggtatgggattaaggggacgacttactatgagcttactgtcgcactcggcc

SEQ ID NO: 24949 - DNA, 56 bp, Artificial
  Synthetic oligonucleotide
tggggtggatgcaaaatctgatcccgactccgacgatgacatctcactcgcggggt

SEQ ID NO: 24950 - DNA, 61 bp, Artificial
  Synthetic oligonucleotide
ggcttcactaaagatgagatcaaggacatcgttgacaatctcagagagcaggcgtggctcg

SEQ ID NO: 24951 - DNA, 60 bp, Artificial
  Synthetic oligonucleotide
tctcgaagcacatgggatgaaagagtacattgatactcagttaggtgtgcaatctggcaa

SEQ ID NO: 24952 - DNA, 60 bp, Artificial
  Synthetic oligonucleotide
ataaggcgtgttgaagaatacgctcgtgctgaagggattgaacttcctgaagtcgggccc

SEQ ID NO: 24953 - DNA, 61 bp, Artificial
  Synthetic oligonucleotide
ggtactcagagtgtcactgtgccaatttgccacatcactgaagttgtgaaccccaatgcgg

SEQ ID NO: 24954 - DNA, 61 bp, Artificial
  Synthetic oligonucleotide
aggctattctcgttcccgatgattgctatataggtactagggtgtcacatgcacttgcctg

SEQ ID NO: 24955 - DNA, 60 bp, Artificial
  Synthetic oligonucleotide
tccggccggcttaaatagcatcctcgctagagggaaagaaaagtttggaggcacccaagc

SEQ ID NO: 24956 - DNA, 60 bp, Artificial
  Synthetic oligonucleotide
gtcaatcaaaccgccactcacgcaacttggagcctgctaaaacctacgctcctgtgcgct

SEQ ID NO: 24957 - DNA, 60 bp, Artificial
  Synthetic oligonucleotide
taatgtctggccaaacaccaaatccttggctagcagcaaaccaatctggcactacgtggt

SEQ ID NO: 24958 - DNA, 60 bp, Artificial
  Synthetic oligonucleotide
agcactactccactctccattcgtgcctcaatgtacgagatgtggaaaccactgagtgtg

SEQ ID NO: 24959 - DNA, 60 bp, Artificial
  Synthetic oligonucleotide
acaacaactcatactacatctgtgaatgtgtacttcctagtggcttaccgccagtctcga

SEQ ID NO: 24960 - DNA, 60 bp, Artificial
  Synthetic oligonucleotide
acagtacctgaaaactatcctattctgggtcatatcgccatagataaattggttgaacgt

SEQ ID NO: 24961 - DNA, 60 bp, Artificial
  Synthetic oligonucleotide
tctcgaacgcgaaagagaagacctaatgaggaggctcagagatctagacctccggcgctt

SEQ ID NO: 24962 - DNA, 60 bp, Artificial
  Synthetic oligonucleotide
tggacgcgattcgatggcaccattccggttcagctcttccaaagaatgcgtgagctgcgt

SEQ ID NO: 24963 - DNA, 61 bp, Artificial
  Synthetic oligonucleotide
gtcctctgcaaggaacacaacaacaaggcagtaccagatttatccatcggtcgagtcagct

SEQ ID NO: 24964 - DNA, 61 bp, Artificial
  Synthetic oligonucleotide
ggtgcaaaagcgaaatgcctcgattgtggcgagactttcgttgaaaggcaagacttccacg

SEQ ID NO: 24965 - DNA, 60 bp, Artificial
  Synthetic oligonucleotide
ggctcacagaagagcaactccatcgcatttggaggggaggaccaaagaagtgtgatggct

SEQ ID NO: 24966 - DNA, 60 bp, Artificial
  Synthetic oligonucleotide
tgaatcgctccatgggaagctcctatgctatcagttgcttgctgcgttcatggcagaaga

SEQ ID NO: 24967 - DNA, 60 bp, Artificial
  Synthetic oligonucleotide
cactccatgggaagctcctatgctatcagttgcttgctgcgttcatggcagaagatcacc

SEQ ID NO: 24968 - DNA, 60 bp, Artificial
  Synthetic oligonucleotide
cactccatgggaagctcctatgctatcagttgcttgctgcgttcatggcagaagaccacc

SEQ ID NO: 24969 - DNA, 60 bp, Artificial
  Synthetic oligonucleotide
tcactccatgggaagctcctatgctatcagttgcttgctgcgttcatggcagaagaccac

SEQ ID NO: 24970 - DNA, 60 bp, Artificial
  Synthetic oligonucleotide
cggccaggctcacagaagagcaactccatcgcatttggaggggaggaccaaagaagtgtg

SEQ ID NO: 24971 - DNA, 60 bp, Artificial
  Synthetic oligonucleotide
aggctcacagaagagcaactccatcgcatttggaggggaggaccaaagaagtgtgatggc

SEQ ID NO: 24972 - DNA, 61 bp, Artificial
  Synthetic oligonucleotide
cggccaggctcacagaagagcaactccatcgcatttggaggggaggaccaaagaagtgtga

SEQ ID NO: 24973 - DNA, 60 bp, Artificial
  Synthetic oligonucleotide
ggccaggctcacagaagagcaactccatcgcatttggaggggaggaccaaagaagtgtga

SEQ ID NO: 24974 - DNA, 61 bp, Artificial
  Synthetic oligonucleotide
caggccatgatgcatttgattcaagtgagcaaggagagaagccagactgctaaactagaag

SEQ ID NO: 24975 - DNA, 61 bp, Artificial
  Synthetic oligonucleotide
gagatggactggacacggtatgatgggactataccaaaatcactattttggagaattaggc

SEQ ID NO: 24976 - DNA, 60 bp, Artificial
  Synthetic oligonucleotide
aaaaggtagtcacgacattgcagacaagaggcgttataccagcaacgcctgcgaaaacag

SEQ ID NO: 24977 - DNA, 60 bp, Artificial
  Synthetic oligonucleotide
cgcagctatttgcggaaccaagtttgcatgcacaacaataacagtgcaacacccagatgg

SEQ ID NO: 24978 - DNA, 60 bp, Artificial
  Synthetic oligonucleotide
tccagtacgtaggctaccagatgttgagtctctttggggtaaattggtttccctgcgcat

SEQ ID NO: 24979 - DNA, 60 bp, Artificial
  Synthetic oligonucleotide
aggtgtcggtgaagtgttctgggcagtgtccactgaagtagtcaatacagtagcagatgc

SEQ ID NO: 24980 - DNA, 60 bp, Artificial
  Synthetic oligonucleotide
ttagcaatgttgaggagttcgccgccagagaaaacatacaacttcctgaggtcgggcccg

SEQ ID NO: 24981 - DNA, 60 bp, Artificial
  Synthetic oligonucleotide
accaacttggtcacccgacattggagcaaacttgataactttgggcgaaaaggcctgttt

SEQ ID NO: 24982 - DNA, 60 bp, Artificial
  Synthetic oligonucleotide
cagcttaggcggattcgtaagaaagtgcagggaccgccagtaaattccaggatgacaaca

SEQ ID NO: 24983 - DNA, 60 bp, Artificial
  Synthetic oligonucleotide
gggaagacgaagaaaacagtcagaggccgtaaacaccttgttaccaaaagagctcttggg

SEQ ID NO: 24984 - DNA, 60 bp, Artificial
  Synthetic oligonucleotide
ttttcttgtggaggtcttggtcacttatgagttttcaaactatggcccaaagcctgcact

SEQ ID NO: 24985 - DNA, 61 bp, Artificial
  Synthetic oligonucleotide
aagttatgcccttgtgtataccatcggctttgttttatggtcccttggactagctgtgggg

SEQ ID NO: 24986 - DNA, 60 bp, Artificial
  Synthetic oligonucleotide
agtggtgtgaagggaagctcgttgatcttgtaccaagaaagtgtggcgagcaacatgtct

SEQ ID NO: 24987 - DNA, 60 bp, Artificial
  Synthetic oligonucleotide
tcaccaaagcaaagaacatcccagttgacggggaaattaggagagagatcatccctggaa

SEQ ID NO: 24988 - DNA, 61 bp, Artificial
  Synthetic oligonucleotide
gcatgggaagatgacatattaccacctgaaggtaaaactgccttaccagaaaatgttactc

SEQ ID NO: 24989 - DNA, 60 bp, Artificial
  Synthetic oligonucleotide
tatgccacagtttgttttggtaaatgcctttcttctatggttaacactcactttaacagc

SEQ ID NO: 24990 - DNA, 60 bp, Artificial
  Synthetic oligonucleotide
ggagagaaaccgagaaaagatgcaggaatacatggtaaggttgcataacacgcagaaaga

SEQ ID NO: 24991 - DNA, 60 bp, Artificial
  Synthetic oligonucleotide
ccaagcctatgacagcgaagccgagtatttggaagattgtgggtggcaagagtacctgga

SEQ ID NO: 24992 - DNA, 57 bp, Artificial
  Synthetic oligonucleotide
gagcagttgaagcagagattgaacctggcagagggtgacccggtcatctcaatgggg

SEQ ID NO: 24993 - DNA, 60 bp, Artificial
  Synthetic oligonucleotide
tatactcttcagtggcagatgcacaaggtgacaacaggatatacacatcagtgaaacaga

SEQ ID NO: 24994 - DNA, 60 bp, Artificial
  Synthetic oligonucleotide
ccgctgttgatgaagagtcaggaaactggtcaaactgcaacacccttatctgttagggca

SEQ ID NO: 24995 - DNA, 60 bp, Artificial
  Synthetic oligonucleotide
ccagcccaatgtgaaccaagcagcagtaggtggcagtgttggtgcggcaaactccatcta

SEQ ID NO: 24996 - DNA, 61 bp, Artificial
  Synthetic oligonucleotide
gggaaagggtgtcaaccaccgagactggggtattttgtctggcagccataccagctgcgac

SEQ ID NO: 24997 - DNA, 60 bp, Artificial
  Synthetic oligonucleotide
gcgtgaagcctatcaaattagcaaagaaggttcaaagtgactatctgacactgacagcct

SEQ ID NO: 24998 - DNA, 60 bp, Artificial
  Synthetic oligonucleotide
cacagcagccggttgacgtcaaggatgataaacccgtagccttggaacaacgtaagccta

SEQ ID NO: 24999 - DNA, 60 bp, Artificial
  Synthetic oligonucleotide
gtgggatcttttaggctggatagttatttcagtgcttgtattcggcctgatttcactcgc

SEQ ID NO: 25000 - DNA, 60 bp, Artificial
  Synthetic oligonucleotide
cgcccgaaagatggaggaggttgagcccaagggtaggcgctcaaatgcgcaaacatcagg

SEQ ID NO: 25001 - DNA, 61 bp, Artificial
  Synthetic oligonucleotide
cactcgcagacgcgcaaaacttgactccaccagccaagattgtgataactccagggcaagc

SEQ ID NO: 25002 - DNA, 60 bp, Artificial
  Synthetic oligonucleotide
tcaaaaggagaatgaagcccaactagtgaagatgtttgagcggtgtgtcacagatgagaa

SEQ ID NO: 25003 - DNA, 60 bp, Artificial
  Synthetic oligonucleotide
atctgacactgacagcctatgatccaaattttcaacatgccgccacttttaccgggtggt

SEQ ID NO: 25004 - DNA, 61 bp, Artificial
  Synthetic oligonucleotide
gcgtggtagactgccaacagagaaagagctgcaagagaactgctccatgatatgctacggg

SEQ ID NO: 25005 - DNA, 60 bp, Artificial
  Synthetic oligonucleotide
gtttgccaggtcaagaaaggaaatccaagtggtcagttttcaacaactgtggataataat

SEQ ID NO: 25006 - DNA, 60 bp, Artificial
  Synthetic oligonucleotide
tcgtggtgagttctaccagaagaaatcccgccttacctttgttgaacaggccatgatgca

SEQ ID NO: 25007 - DNA, 60 bp, Artificial
  Synthetic oligonucleotide
ctcaaaagagagaaaattgaggacagtgacattcgaatgatattgtgcaccgacccgatt

SEQ ID NO: 25008 - DNA, 55 bp, Artificial
  Synthetic oligonucleotide
tcagcagaggaaataagggaggcagtcaacgcactccgagaacaagcatggctta

SEQ ID NO: 25009 - DNA, 61 bp, Artificial
  Synthetic oligonucleotide
gcaggaacaaaagtgtcacatgcagcgatcctaaaagaactggaagaacttagagaagagg

SEQ ID NO: 25010 - DNA, 60 bp, Artificial
  Synthetic oligonucleotide
ggcttacaccaaaatgtttgagaaattccattaccacgacccagttgactttgtggaaca

SEQ ID NO: 25011 - DNA, 60 bp, Artificial
  Synthetic oligonucleotide
ccctttcgggcacctcacagcctcttgtccggtttgagaaagctggacctagggcagacc

SEQ ID NO: 25012 - DNA, 61 bp, Artificial
  Synthetic oligonucleotide
agtggtgcaccttattgtgatcatgatggtaggctagttggtatccacctaggcacacagg

SEQ ID NO: 25013 - DNA, 60 bp, Artificial
  Synthetic oligonucleotide
ggggcacagtatcaaaatctgaaaatgttgtacttctggaactggtcctattctgacaca

SEQ ID NO: 25014 - DNA, 60 bp, Artificial
  Synthetic oligonucleotide
tggcagtgttagtgtgaaatccaaagtcatcaaaacgatcccaatatttgagagtgttga

SEQ ID NO: 25015 - DNA, 60 bp, Artificial
  Synthetic oligonucleotide
ccggcttggacggccctcatgaagtgtaacgccatatacttgaaagattttaaaacagca

SEQ ID NO: 25016 - DNA, 60 bp, Artificial
  Synthetic oligonucleotide
agcctagagcttgtaaatggtgcggttcatcacagaaacatgattaccgggaatgtcggt

SEQ ID NO: 25017 - DNA, 60 bp, Artificial
  Synthetic oligonucleotide
cacagcaggaccagaatcagtagataccatcaaggcaagaccccatgttgaagttcccat

SEQ ID NO: 25018 - DNA, 60 bp, Artificial
  Synthetic oligonucleotide
aaagtaccgactggatagttgtgaattaccacctgagaaaggttgcgtgttgtacaagga

SEQ ID NO: 25019 - DNA, 60 bp, Artificial
  Synthetic oligonucleotide
gtggctggtttgtccttaggaaaatctttggggccgcaaatgaccagaatggcacttact

SEQ ID NO: 25020 - DNA, 60 bp, Artificial
  Synthetic oligonucleotide
tggagttgatggccaaatgttcaaaacctgactgggtctcggagagcagttacaatgaaa

SEQ ID NO: 25021 - DNA, 60 bp, Artificial
  Synthetic oligonucleotide
ggacctagacaggggtggtggaatgttgaccctggtgacagcccaactgattctcttggg

SEQ ID NO: 25022 - DNA, 60 bp, Artificial
  Synthetic oligonucleotide
ggtgtcatgcagacaatgaagactctcaaacagcatatcaaggattacacagagcctgca

SEQ ID NO: 25023 - DNA, 60 bp, Artificial
  Synthetic oligonucleotide
ggtgaggaagattggtatgatgacatggtagagacagatagagttaaccaggagatcgat

SEQ ID NO: 25024 - DNA, 60 bp, Artificial
  Synthetic oligonucleotide
gaccaaccgacatggacaaaatcagacgcctagccaacagtgtctacggcctgccccacc

SEQ ID NO: 25025 - DNA, 60 bp, Artificial
  Synthetic oligonucleotide
cccgaccaaccgacatggacaaaatcagacgcctagccaacagtgtctacggcctgcccc

SEQ ID NO: 25026 - DNA, 60 bp, Artificial
  Synthetic oligonucleotide
aagacccacggacatggacaaaatcagacgcctagccaacagtgtctacggacttcccca

SEQ ID NO: 25027 - DNA, 60 bp, Artificial
  Synthetic oligonucleotide
caagacccacggacatggacaaaatcagacgcctagccaacagtgtctacggacttcccc

SEQ ID NO: 25028 - DNA, 61 bp, Artificial
  Synthetic oligonucleotide
caagacccacggacatggacaaaatcagacgcctagccaacagtgtctacggacttcccca

SEQ ID NO: 25029 - DNA, 60 bp, Artificial
  Synthetic oligonucleotide
acaagacccacggacatggacaaaatcagacgcctagccaacagtgtctacggacttccc

SEQ ID NO: 25030 - DNA, 61 bp, Artificial
  Synthetic oligonucleotide
acaagacccacggacatggacaaaatcagacgcctagccaacagtgtctacggacttcccc

SEQ ID NO: 25031 - DNA, 60 bp, Artificial
  Synthetic oligonucleotide
accgataacccgaccaaccgacatggacaaaatcagacgcctagccaacagtgtctacgg

SEQ ID NO: 25032 - DNA, 60 bp, Artificial
  Synthetic oligonucleotide
tactaaaacaagagacctcgtcatacaacttagaggtctcagactccggaagtgggcttc

SEQ ID NO: 25033 - DNA, 60 bp, Artificial
  Synthetic oligonucleotide
catactaaaacaagagacctcgtcatacaacttagaggtctcagactccggaagtgggct

SEQ ID NO: 25034 - DNA, 61 bp, Artificial
  Synthetic oligonucleotide
cacatactaaaacaagagacctcgtcatacaacttagaggtctcagactccggaagtgggc

SEQ ID NO: 25035 - DNA, 60 bp, Artificial
  Synthetic oligonucleotide
acatactaaaacaagagacctcgtcatacaacttagaggtctcagactccggaagtgggc

SEQ ID NO: 25036 - DNA, 60 bp, Artificial
  Synthetic oligonucleotide
cggacgacataacagagaggcatatactaaaacaagagacctcgtcatacaacttagagg

SEQ ID NO: 25037 - DNA, 60 bp, Artificial
  Synthetic oligonucleotide
cacatactaaaacaagagacctcgtcatacaacttagaggtctcagactccggaagtggg

SEQ ID NO: 25038 - DNA, 60 bp, Artificial
  Synthetic oligonucleotide
gcattccggacgacataacagagaggcatatactaaaacaagagacctcgtcatacaact

SEQ ID NO: 25039 - DNA, 60 bp, Artificial
  Synthetic oligonucleotide
ccggacgacataacagagaggcatatactaaaacaagagacctcgtcatacaacttagag

SEQ ID NO: 25040 - DNA, 60 bp, Artificial
  Synthetic oligonucleotide
ccagcaagcattccggacgacataacagagagacacatactaaaacaagagacctcgtca

SEQ ID NO: 25041 - DNA, 60 bp, Artificial
  Synthetic oligonucleotide
agcattccggacgacataacagagaggcatatactaaaacaagagacctcgtcatacaac

SEQ ID NO: 25042 - DNA, 60 bp, Artificial
  Synthetic oligonucleotide
gtccagcaagcattccggacgacataacagagagacacatactaaaacaagagacctcgt

SEQ ID NO: 25043 - DNA, 60 bp, Artificial
  Synthetic oligonucleotide
tccagcaagcattccggacgacataacagagagacacatactaaaacaagagacctcgtc

SEQ ID NO: 25044 - DNA, 60 bp, Artificial
  Synthetic oligonucleotide
ccgaccaaccgacatggacaaaatcagacgcctagccaacagtgtctacggcctgcccca

SEQ ID NO: 25045 - DNA, 60 bp, Artificial
  Synthetic oligonucleotide
cgaccaaccgacatggacaaaatcagacgcctagccaacagtgtctacggcctgccccac

SEQ ID NO: 25046 - DNA, 60 bp, Artificial
  Synthetic oligonucleotide
acccgaccaaccgacatggacaaaatcagacgcctagccaacagtgtctacggcctgccc

SEQ ID NO: 25047 - DNA, 50 bp, Artificial
  Synthetic oligonucleotide
ggacatggacaaaatcagacgcctagccaacagtgtctacggacttcccc

SEQ ID NO: 25048 - DNA, 51 bp, Artificial
  Synthetic oligonucleotide
ggacatggacaaaatcagacgcctagccaacagtgtctacggacttcccca

SEQ ID NO: 25049 - DNA, 50 bp, Artificial
  Synthetic oligonucleotide
gacatggacaaaatcagacgcctagccaacagtgtctacggacttcccca

SEQ ID NO: 25050 - DNA, 60 bp, Artificial
  Synthetic oligonucleotide
gaccaaatgcaagacctgagggacttggcaaggcagatgaaacgacgaccccgaccagct

SEQ ID NO: 25051 - DNA, 60 bp, Artificial
  Synthetic oligonucleotide
caaatgcaagacctgagggacttggcaaggcagatgaaacgacgaccccgaccagctgag

SEQ ID NO: 25052 - DNA, 60 bp, Artificial
  Synthetic oligonucleotide
ccaaatgcaagacctgagggacttggcaaggcagatgaaacgacgaccccgaccagctga

SEQ ID NO: 25053 - DNA, 60 bp, Artificial
  Synthetic oligonucleotide
accaaatgcaagacctgagggacttggcaaggcagatgaaacgacgaccccgaccagctg

SEQ ID NO: 25054 - DNA, 60 bp, Artificial
  Synthetic oligonucleotide
ggtccagcaagcattccggacgacataacagagagacacatactaaaacaagagacctcg

SEQ ID NO: 25055 - DNA, 60 bp, Artificial
  Synthetic oligonucleotide
tggtccagcaagcattccggacgacataacagagagacacatactaaaacaagagacctc

SEQ ID NO: 25056 - DNA, 60 bp, Artificial
  Synthetic oligonucleotide
gcaacctacttgagatccattatgcttcccgagaatgggccagcaagcattccggacgac

SEQ ID NO: 25057 - DNA, 60 bp, Artificial
  Synthetic oligonucleotide
cgcaacctacttgagatccattatgcttcccgagaatgggccagcaagcattccggacga

SEQ ID NO: 25058 - DNA, 60 bp, Artificial
  Synthetic oligonucleotide
gatccattatgcttcccgagaatggtccagcaagcattccggacgacataacagagagac

SEQ ID NO: 25059 - DNA, 60 bp, Artificial
  Synthetic oligonucleotide
gagatccattatgcttcccgagaatggtccagcaagcattccggacgacataacagagag

SEQ ID NO: 25060 - DNA, 60 bp, Artificial
  Synthetic oligonucleotide
caaccgcaacctacttgagatccattatgcttcccgagaatgggccagcaagcattccgg

SEQ ID NO: 25061 - DNA, 60 bp, Artificial
  Synthetic oligonucleotide
ccgcaacctacttgagatccattatgcttcccgagaatgggccagcaagcattccggacg

SEQ ID NO: 25062 - DNA, 60 bp, Artificial
  Synthetic oligonucleotide
accgcaacctacttgagatccattatgcttcccgagaatgggccagcaagcattccggac

SEQ ID NO: 25063 - DNA, 56 bp, Artificial
  Synthetic oligonucleotide
gcgagccattccaaccatggtcgaactagagacagatgccgctctgcctcgactgc

SEQ ID NO: 25064 - DNA, 57 bp, Artificial
  Synthetic oligonucleotide
cgcgagccattccaaccatggtcgaactagagacagatgccgctctgcctcgactgc

SEQ ID NO: 25065 - DNA, 56 bp, Artificial
  Synthetic oligonucleotide
cgcgagccattccaaccatggtcgaactagagacagatgccgctctgcctcgactg

SEQ ID NO: 25066 - DNA, 57 bp, Artificial
  Synthetic oligonucleotide
cgcgagccattccaaccatggtcgaactagagacagatgccgctctgcctcgactac

SEQ ID NO: 25067 - DNA, 56 bp, Artificial
  Synthetic oligonucleotide
ccgcgagccattccaaccatggtcgaactagagacagatgccgctctgcctcgact

SEQ ID NO: 25068 - DNA, 58 bp, Artificial
  Synthetic oligonucleotide
ccgcgagccattccaaccatggtcgaactagagacagatgccgctctgcctcgactgc

SEQ ID NO: 25069 - DNA, 57 bp, Artificial
  Synthetic oligonucleotide
ccgcgagccattccaaccatggtcgaactagagacagatgccgctctgcctcgactg

SEQ ID NO: 25070 - DNA, 58 bp, Artificial
  Synthetic oligonucleotide
ccgcgagccattccaaccatggtcgaactagagacagatgccgctctgcctcgactac

SEQ ID NO: 25071 - DNA, 60 bp, Artificial
  Synthetic oligonucleotide
gcctcgactgcgacaaatggtggaagacggcaagcttaaggacacggtaagcgtcccaga

SEQ ID NO: 25072 - DNA, 60 bp, Artificial
  Synthetic oligonucleotide
tgcctcgactgcgacaaatggtggaagacggcaagcttaaggacacggtaagcgtcccag

SEQ ID NO: 25073 - DNA, 56 bp, Artificial
  Synthetic oligonucleotide
gcgagccattccaaccatggtcgaactagagacagatgccgctctgcctcgactac

SEQ ID NO: 25074 - DNA, 57 bp, Artificial
  Synthetic oligonucleotide
ccgcgagccattccaaccatggtcgaactagagacagatgccgctctgcctcgacta

SEQ ID NO: 25075 - DNA, 60 bp, Artificial
  Synthetic oligonucleotide
ccgcgagccattccaaccatggtcgaactagagacagatgccgctctgcctcgactacga

SEQ ID NO: 25076 - DNA, 60 bp, Artificial
  Synthetic oligonucleotide
taccggatacttaggccgcgagccatcccgaccatggtcgaactagagacagatgccgct

SEQ ID NO: 25077 - DNA, 60 bp, Artificial
  Synthetic oligonucleotide
atacttaggccgcgagccatcccgaccatggtcgaactagagacagatgccgctctgcct

SEQ ID NO: 25078 - DNA, 60 bp, Artificial
  Synthetic oligonucleotide
gatacttaggccgcgagccatcccgaccatggtcgaactagagacagatgccgctctgcc

SEQ ID NO: 25079 - DNA, 60 bp, Artificial
  Synthetic oligonucleotide
tacttaggccgcgagccatcccgaccatggtcgaactagagacagatgccgctctgcctc

SEQ ID NO: 25080 - DNA, 60 bp, Artificial
  Synthetic oligonucleotide
gcgggaggctacaggagagaaccaaaagtctagggaatcaatgacaagggttaagatacg

SEQ ID NO: 25081 - DNA, 60 bp, Artificial
  Synthetic oligonucleotide
agggttaagatacgaggattattggaaaacatggaaagacagttagaaagcaatggcaga

SEQ ID NO: 25082 - DNA, 60 bp, Artificial
  Synthetic oligonucleotide
agaggttggacatcgaaacagggtacacctatatacaattacacatgggcatacttagcc

SEQ ID NO: 25083 - DNA, 60 bp, Artificial
  Synthetic oligonucleotide
agaggcaaaaccaaaggttagcaacccgctatacaaacgggataaagagacctaccacga

SEQ ID NO: 25084 - DNA, 60 bp, Artificial
  Synthetic oligonucleotide
cgaggctaactgtacacgcgatgtggcaatgacaacagccatgtacctattaacaagagg

SEQ ID NO: 25085 - DNA, 61 bp, Artificial
  Synthetic oligonucleotide
gaaggacaaggtgactcggacatcagagaggtattcaatgaattagcaagacctcaagccg

SEQ ID NO: 25086 - DNA, 60 bp, Artificial
  Synthetic oligonucleotide
aactctatccgcgggaggctacaggagagaaccaaaagtctagggaatcaatgacaaggg

SEQ ID NO: 25087 - DNA, 60 bp, Artificial
  Synthetic oligonucleotide
gagataggtaagccacaaccctccccggatgttatcgagaagttggcatcaatgacagga

SEQ ID NO: 25088 - DNA, 60 bp, Artificial
  Synthetic oligonucleotide
cttgacaaggctataggaaaagccgtagaggctagcccatttagcgaagttatcagcctg

SEQ ID NO: 25089 - DNA, 61 bp, Artificial
  Synthetic oligonucleotide
gcgaagttatcagcctgttaagcttggatagaccgatgcatgagcaaaattacgcacaggt

SEQ ID NO: 25090 - DNA, 61 bp, Artificial
  Synthetic oligonucleotide
aaaagcaagtcacctgctctcatcaggcaggagatcccaaatgtaaattgggacggctccc

SEQ ID NO: 25091 - DNA, 61 bp, Artificial
  Synthetic oligonucleotide
ggttggtcctcagtgggaaccaataataaacctggttaccaaactctatccgcgggaggct

SEQ ID NO: 25092 - DNA, 60 bp, Artificial
  Synthetic oligonucleotide
agcaagacctcaagccgaagttggccgagacatagaatattcagaacttagtcaggcatt

SEQ ID NO: 25093 - DNA, 60 bp, Artificial
  Synthetic oligonucleotide
ccaattctcccgacaggtactcgatagaatcattaaagagtactcttacacaatgatggg

SEQ ID NO: 25094 - DNA, 60 bp, Artificial
  Synthetic oligonucleotide
tgaggcgtatctttacgacacgaattccctagaatacaaccggatagcatacgtaagcaa

SEQ ID NO: 25095 - DNA, 60 bp, Artificial
  Synthetic oligonucleotide
tcaggcattaaatgacaatagcgttaaagtctttagaccgcagccgtatgatgaattggt

SEQ ID NO: 25096 - DNA, 59 bp, Artificial
  Synthetic oligonucleotide
acggtttggtgaggagatactagacgatgagccaactggcaagaagtcatcatcagaaa

SEQ ID NO: 25097 - DNA, 60 bp, Artificial
  Synthetic oligonucleotide
agccaggccatgaggtcaccccacccctcctcactttacctaactcgctttcctatgagt

SEQ ID NO: 25098 - DNA, 60 bp, Artificial
  Synthetic oligonucleotide
cgactattcaaatcaatagcctgcccacaaccaccaagtagcacctttcaaacgagcgtg

SEQ ID NO: 25099 - DNA, 60 bp, Artificial
  Synthetic oligonucleotide
ccagaacaattgtagagatggacatgctgggctgggacgtaactcacacggagtttggct

SEQ ID NO: 25100 - DNA, 60 bp, Artificial
  Synthetic oligonucleotide
tcaatagcctgcccacaaccaccaagtagcacctttcaaacgagcgtggcaaaacaggta

SEQ ID NO: 25101 - DNA, 61 bp, Artificial
  Synthetic oligonucleotide
ccgtggaccttcttgaacaatcatgtattaaccacgatactgatgaacaagtggtctgaga

SEQ ID NO: 25102 - DNA, 60 bp, Artificial
  Synthetic oligonucleotide
taatgacacgtgggacaagcagatttatgagacccttaaagaactacttgtagctcaagc

SEQ ID NO: 25103 - DNA, 60 bp, Artificial
  Synthetic oligonucleotide
aagttgcagagacaagctgcaacaggcacaacatttgttagaaaaccattaaattaaccc

SEQ ID NO: 25104 - DNA, 60 bp, Artificial
  Synthetic oligonucleotide
gcgaatatgctgataaaagacgtgtcacaacttctgaaagaaaacctctttactggatcc

SEQ ID NO: 25105 - DNA, 60 bp, Artificial
  Synthetic oligonucleotide
tccttacatcaacatcaaggacgccatccctagctaagttttctccaactcagggaggga

SEQ ID NO: 25106 - DNA, 60 bp, Artificial
  Synthetic oligonucleotide
tcgctttcctatgagtacatgcattacatagctaactcagctaatgacacgtgggacaag

SEQ ID NO: 25107 - DNA, 60 bp, Artificial
  Synthetic oligonucleotide
gggtacccgcccatagataaatctcccgttccatctcttacatctgatgaggcgtatctt

SEQ ID NO: 25108 - DNA, 61 bp, Artificial
  Synthetic oligonucleotide
gctttaaagaaatggggataactccatatcgtgtgatggagtggcttgatgagtacatgcc

SEQ ID NO: 25109 - DNA, 61 bp, Artificial
  Synthetic oligonucleotide
ccaactcagggagggatggaggctcttattaatattatcctcaacgcaacagatatagtgg

SEQ ID NO: 25110 - DNA, 61 bp, Artificial
  Synthetic oligonucleotide
ttggccagaactgagatcaatgaacgtcgagggcgcatcggatccttatcaagtgaagggc

SEQ ID NO: 25111 - DNA, 61 bp, Artificial
  Synthetic oligonucleotide
ggcagatcaatggatgtatggtacaatgcatacctaacaggaaagaaaccaagtggagtcg

SEQ ID NO: 25112 - DNA, 60 bp, Artificial
  Synthetic oligonucleotide
acattttcaatcaacagggactgaaatccaaattttcgaacattgtcaagaatgaaggac

SEQ ID NO: 25113 - DNA, 60 bp, Artificial
  Synthetic oligonucleotide
tgtacgtgggtgcctgggcttatccatgcatagcacagaccatagaggggtatgctctaa

SEQ ID NO: 25114 - DNA, 66 bp, Artificial
  Synthetic oligonucleotide
tgctctaaatcattggaacactataaatataatgatccgaaacaaagagtatgatcttgacaaggc

SEQ ID NO: 25115 - DNA, 60 bp, Artificial
  Synthetic oligonucleotide
agactaggaatatttggagcgccagttatgtcacacacctaatcgggtcaacaatatcag

SEQ ID NO: 25116 - DNA, 61 bp, Artificial
  Synthetic oligonucleotide
cctaccacgaatacacaacgcgtatggcgagaatgaggatcaatgacgacatggttggtcc

SEQ ID NO: 25117 - DNA, 60 bp, Artificial
  Synthetic oligonucleotide
tctcccctggctgggtaagaagaagggcgaagttgccgtatctgctctgattacggcgaa

SEQ ID NO: 25118 - DNA, 56 bp, Artificial
  Synthetic oligonucleotide
gtatacacgccagaagaggctgaattgatgggggtcccagactcgttaccagacat

SEQ ID NO: 25119 - DNA, 60 bp, Artificial
  Synthetic oligonucleotide
agaacttccagataaagaatcctggacagggcagtggcaatccgtggaccttcttgaaca

SEQ ID NO: 25120 - DNA, 61 bp, Artificial
  Synthetic oligonucleotide
gggtctacttttcccgaaaggagagcggtatgccatagctgaccatttaaccaagactagg

SEQ ID NO: 25121 - DNA, 61 bp, Artificial
  Synthetic oligonucleotide
gaccatccgccactggcttaagaaccaggtcccttagccgttagactaaaagcaagtcacc

SEQ ID NO: 25122 - DNA, 60 bp, Artificial
  Synthetic oligonucleotide
tggcatcaatgacaggaattgatttcaaggttgaactagtagtgacaaacttccgagaga

SEQ ID NO: 25123 - DNA, 60 bp, Artificial
  Synthetic oligonucleotide
ccagacaaagtagattggccagaactgagatcaatgaacgtcgagggcgcatcggatcct

SEQ ID NO: 25124 - DNA, 61 bp, Artificial
  Synthetic oligonucleotide
gctacaaataggttctctactggttccctacttggtcaagtgaagagggttgcggccggcc

SEQ ID NO: 25125 - DNA, 61 bp, Artificial
  Synthetic oligonucleotide
ccgagagaaactaatagcagcttcaaggcattcgatccctacaagtaacagggttgaaccc

SEQ ID NO: 25126 - DNA, 61 bp, Artificial
  Synthetic oligonucleotide
gaattggttaatattccctttatagaggccgcatctcctagaatgatggccctgtacgggg

SEQ ID NO: 25127 - DNA, 61 bp, Artificial
  Synthetic oligonucleotide
gagggttgcggccggccaagatgtggcatatggaagaaaaggtcaccataagaataagagc

SEQ ID NO: 25128 - DNA, 60 bp, Artificial
  Synthetic oligonucleotide
aacagggttgaacccagaacaattgtagagatggacatgctgggctgggacgtaactcac

SEQ ID NO: 25129 - DNA, 60 bp, Artificial
  Synthetic oligonucleotide
cctataagccaggccatgaggtcaccccacccctcctcactttacctaactcgctttcct

SEQ ID NO: 25130 - DNA, 60 bp, Artificial
  Synthetic oligonucleotide
aaggtggcatccagatcagagacagtctccgggaatggcgggacgttccacttcagcacg

SEQ ID NO: 25131 - DNA, 60 bp, Artificial
  Synthetic oligonucleotide
gcagctccatcgccctcgccctagcctcatccctcccgttcgttccaaaggcagcataca

SEQ ID NO: 25132 - DNA, 60 bp, Artificial
  Synthetic oligonucleotide
atgagggctccaagtcccaacgaaggaaacacggccccgcaccagagagcagagaatcaa

SEQ ID NO: 25133 - DNA, 60 bp, Artificial
  Synthetic oligonucleotide
cccgaactgatctgaccatccttccagtagcagatgtcttctggcgggccgatggaagcg

SEQ ID NO: 25134 - DNA, 60 bp, Artificial
  Synthetic oligonucleotide
tgatgtcgatgtcgtctggaacgacatgccagcagtggctggccaaagcagctccatcgc

SEQ ID NO: 25135 - DNA, 60 bp, Artificial
  Synthetic oligonucleotide
tctgaccatccttccagtagcagatgtcttctggcgggccgatggaagcgctgatgtcga

SEQ ID NO: 25136 - DNA, 61 bp, Artificial
  Synthetic oligonucleotide
caggagacgaccacaaggtttggggagcaacacaccatacatactacgttgagggagcgcc

SEQ ID NO: 25137 - DNA, 60 bp, Artificial
  Synthetic oligonucleotide
ggcccaaaccccgcacaagccaagtactacaaagcaacaggccttgacccagaacccgga

SEQ ID NO: 25138 - DNA, 60 bp, Artificial
  Synthetic oligonucleotide
gcgaccacagagacctaatgtcgcccgacgtgcgagactcatatgccctaacaggagacg

SEQ ID NO: 25139 - DNA, 60 bp, Artificial
  Synthetic oligonucleotide
tcgacagcatggagtcaacagtcacccgcccagagagcgtcggacaccaggctgcatttc

SEQ ID NO: 25140 - DNA, 60 bp, Artificial
  Synthetic oligonucleotide
tggaagtctcagcgagatcaaggacctggactacaattcacttctctctgcaacggccaa

SEQ ID NO: 25141 - DNA, 61 bp, Artificial
  Synthetic oligonucleotide
gagggagcgcccaagaagcccctgaagttcaacgtcaaaacccgaactgatctgaccatcc

SEQ ID NO: 25142 - DNA, 60 bp, Artificial
  Synthetic oligonucleotide
gcttgacgacggcggagtgcgaatgagaaacatgctgaggaacctgccacatgagggctc

SEQ ID NO: 25143 - DNA, 55 bp, Artificial
  Synthetic oligonucleotide
ttgtgcaggtgcggagctcaacgctccccgcgggtgtctacgcactcaacgggac

SEQ ID NO: 25144 - DNA, 60 bp, Artificial
  Synthetic oligonucleotide
ccacatgagggctccaagtcccaacgaaggaaacacggccccgcaccagagagcagagaa

SEQ ID NO: 25145 - DNA, 60 bp, Artificial
  Synthetic oligonucleotide
agaaagcgtacaactatgccagacttgtcagccgcattgtgcaggtgcggagctcaacgc

SEQ ID NO: 25146 - DNA, 60 bp, Artificial
  Synthetic oligonucleotide
gcccagcttgacgacggcggagtgcgaatgagaaacatgctgaggaacctgccacatgag

SEQ ID NO: 25147 - DNA, 60 bp, Artificial
  Synthetic oligonucleotide
acgcaacaacacccacagaggtcacggtcgacatgcagatagctcagatagccgcaggga

SEQ ID NO: 25148 - DNA, 57 bp, Artificial
  Synthetic oligonucleotide
cccgcaccagagagcagagaatcaaccagaatggaggtgctgagacgggaggcggcc

SEQ ID NO: 25149 - DNA, 61 bp, Artificial
  Synthetic oligonucleotide
ccgcagggaagaccctcacggtaactgtcaaactaatgggtctgactggagccaaggtggc

SEQ ID NO: 25150 - DNA, 60 bp, Artificial
  Synthetic oligonucleotide
gtccaggtcggcacgaccgacaccaagaccaatgggttcaacatcgacgcaacaacaccc

SEQ ID NO: 25151 - DNA, 60 bp, Artificial
  Synthetic oligonucleotide
tcggacaccaggctgcatttcagggctggttctactgcggagcagctgacgaggaaacca

SEQ ID NO: 25152 - DNA, 60 bp, Artificial
  Synthetic oligonucleotide
cttggcaggaactcgaggattgtccatttcaccgacggggccttgttccccgtcgttgca

SEQ ID NO: 25153 - DNA, 60 bp, Artificial
  Synthetic oligonucleotide
gctacggcaaactcaatcctgcagagatgacctacacgaaagtggtactctcacacaggg

SEQ ID NO: 25154 - DNA, 61 bp, Artificial
  Synthetic oligonucleotide
cctaccacataggccacttccaaaaccaatattcaacactgctaactgattttgaccaagc

SEQ ID NO: 25155 - DNA, 61 bp, Artificial
  Synthetic oligonucleotide
gcctacgagtcagtggcaacaggcagcgttctcacactcagcggcatttccaactacgagc

SEQ ID NO: 25156 - DNA, 60 bp, Artificial
  Synthetic oligonucleotide
agatttggccagcgggtggataaagaacaagtatccggaggctgcgtccgggagaccgct

SEQ ID NO: 25157 - DNA, 60 bp, Artificial
  Synthetic oligonucleotide
tctttccagtcgtggacaccctgctacccgcagcgagaccattgacagatttggccagcg

SEQ ID NO: 25158 - DNA, 60 bp, Artificial
  Synthetic oligonucleotide
acaatccccgggacgcacccgaaactagttccaccaactgaaagagaaccaaacagcact

SEQ ID NO: 25159 - DNA, 60 bp, Artificial
  Synthetic oligonucleotide
acgggaggcgacgtcaccgttgtcaagcctctggactggctgttcaaactgccatgcctg

SEQ ID NO: 25160 - DNA, 57 bp, Artificial
  Synthetic oligonucleotide
gagaccgggtccacatccattccagatgacactcttgacagacattgtctgaaaaca

SEQ ID NO: 25161 - DNA, 60 bp, Artificial
  Synthetic oligonucleotide
gggagaggacacacggatctgcacgctagacgacgcagcagaccacgccttcgacagcat

SEQ ID NO: 25162 - DNA, 60 bp, Artificial
  Synthetic oligonucleotide
agctccatcgccctcgccctagcctcatccctcccgttcgttccaaaggcagcatacacc

SEQ ID NO: 25163 - DNA, 61 bp, Artificial
  Synthetic oligonucleotide
ggccaggaaggacccacaaatgagcaagatactagtcatacttgggtgggtggaaggggca

SEQ ID NO: 25164 - DNA, 60 bp, Artificial
  Synthetic oligonucleotide
tgaagagcttgaggactttctcgacagcatagaactacattcaaagcccaccgtcgaaca

SEQ ID NO: 25165 - DNA, 57 bp, Artificial
  Synthetic oligonucleotide
ccaacggatcagcgaagacgccatggacaacggatttgagttcgcaactattgactg

SEQ ID NO: 25166 - DNA, 61 bp, Artificial
  Synthetic oligonucleotide
ccccgtcgttgcattcggtgacaatcactcaacaagtgagctctacatcgcagtaaggggc

SEQ ID NO: 25167 - DNA, 60 bp, Artificial
  Synthetic oligonucleotide
ccacaacagaaaatctagtggcagctctgggagggagcggactaatcgttctctttccaa

SEQ ID NO: 25168 - DNA, 51 bp, Artificial
  Synthetic oligonucleotide
acgttcaagcccagaaacagacgaccagcacaggaataccaaccacgcccc

SEQ ID NO: 25169 - DNA, 60 bp, Artificial
  Synthetic oligonucleotide
aacaaggcggcaaaactagcagccaccatctacgggtcacccaaccaggccccagcacca

SEQ ID NO: 25170 - DNA, 60 bp, Artificial
  Synthetic oligonucleotide
agaacccggactgaccgaattcctaccggaaccgacccatgcacctgaaaacaaggcggc

SEQ ID NO: 25171 - DNA, 60 bp, Artificial
  Synthetic oligonucleotide
ctgctggagtcgcgagatgctctccctccgacagacctaggcactacaatgccaacaaca

SEQ ID NO: 25172 - DNA, 60 bp, Artificial
  Synthetic oligonucleotide
cgcgagatgctctccctccgacagacctaggcactacaatgccaacaacaaacaggtcca

SEQ ID NO: 25173 - DNA, 60 bp, Artificial
  Synthetic oligonucleotide
acggccaacatcaatgacaaggtcggcaatgtacttgttggagacggtgtcgcagtgctc

SEQ ID NO: 25174 - DNA, 61 bp, Artificial
  Synthetic oligonucleotide
tgtcctacttcagggaagtttcagaccgatcatcacccctcaagatagcaggggccttcgg

SEQ ID NO: 25175 - DNA, 60 bp, Artificial
  Synthetic oligonucleotide
agggcagggaggttcctcaacatcagtacgactctgagctagaactgcggatggggtgcc

SEQ ID NO: 25176 - DNA, 60 bp, Artificial
  Synthetic oligonucleotide
aggggccttcggttggggcgacctcctttctggaatcaggaagtgggtctttccagtcgt

SEQ ID NO: 25177 - DNA, 60 bp, Artificial
  Synthetic oligonucleotide
accgctagccgcgtctggcaggcccatggcggcgtcagggaccttctccaagagaatacc

SEQ ID NO: 25178 - DNA, 60 bp, Artificial
  Synthetic oligonucleotide
tacccctggccagctcagacgaaattgactaccaatcggttttagcattgacaatccccg

SEQ ID NO: 25179 - DNA, 60 bp, Artificial
  Synthetic oligonucleotide
accccgcacaagccaagtactacaaagcaacaggccttgacccagaacccggactgaccg

SEQ ID NO: 25180 - DNA, 60 bp, Artificial
  Synthetic oligonucleotide
cagccggcctaccatacataggcaaaaccaaaggagacacgactgcagaagcgctcgttc

SEQ ID NO: 25181 - DNA, 60 bp, Artificial
  Synthetic oligonucleotide
cctcagccggcctaccatacataggcaaaaccaaaggagacacgactgcagaagcgctcg

SEQ ID NO: 25182 - DNA, 60 bp, Artificial
  Synthetic oligonucleotide
tgactgtcaagtcctcagccggcctaccatacataggcaaaaccaaaggagacacgactg

SEQ ID NO: 25183 - DNA, 60 bp, Artificial
  Synthetic oligonucleotide
gtgactgtcaagtcctcagccggcctaccatacataggcaaaaccaaaggagacacgact

SEQ ID NO: 25184 - DNA, 60 bp, Artificial
  Synthetic oligonucleotide
aagtcctcagccggcctaccatacataggcaaaaccaaaggagacacgactgcagaagcg

SEQ ID NO: 25185 - DNA, 60 bp, Artificial
  Synthetic oligonucleotide
gactgtcaagtcctcagccggcctaccatacataggcaaaaccaaaggagacacgactgc

SEQ ID NO: 25186 - DNA, 60 bp, Artificial
  Synthetic oligonucleotide
gacaagtcatatctgccacatgtgaccataaagtcctcagccggcctaccatacataggc

SEQ ID NO: 25187 - DNA, 60 bp, Artificial
  Synthetic oligonucleotide
cgacgatggcaagcttaaggacacggtaagcgtcccagaaggaaccaccgcattctatcc

SEQ ID NO: 25188 - DNA, 60 bp, Artificial
  Synthetic oligonucleotide
tgtgactgtcaagtcctcagccggcctaccatacataggcaaaaccaaaggagacacgac

SEQ ID NO: 25189 - DNA, 60 bp, Artificial
  Synthetic oligonucleotide
catgtgactgtcaagtcctcagccggcctaccatacataggcaaaaccaaaggagacacg

SEQ ID NO: 25190 - DNA, 60 bp, Artificial
  Synthetic oligonucleotide
acagatggtcgacgatggcaagcttaaggacacggtaagcgtcccagaaggaaccaccgc

SEQ ID NO: 25191 - DNA, 58 bp, Artificial
  Synthetic oligonucleotide
gcctaccatacataggcaaaaccaaaggagacacgacggcagaagcgctcgtactggc

SEQ ID NO: 25192 - DNA, 60 bp, Artificial
  Synthetic oligonucleotide
gcctaccatacataggcaaaaccaaaggagacacgacggcagaagcgctcgtactggctg

SEQ ID NO: 25193 - DNA, 59 bp, Artificial
  Synthetic oligonucleotide
gcctaccatacataggcaaaaccaaaggagacacgacggcagaagcgctcgtactggct

SEQ ID NO: 25194 - DNA, 59 bp, Artificial
  Synthetic oligonucleotide
cctaccatacataggcaaaaccaaaggagacacgacggcagaagcgctcgtactggctg

SEQ ID NO: 25195 - DNA, 58 bp, Artificial
  Synthetic oligonucleotide
ctaccatacataggcaaaaccaaaggagacacgacggcagaagcgctcgtactggctg

SEQ ID NO: 25196 - DNA, 60 bp, Artificial
  Synthetic oligonucleotide
gccggcctaccatacataggcaaaaccaaaggagacacgactgcagaagcgctcgttctg

SEQ ID NO: 25197 - DNA, 60 bp, Artificial
  Synthetic oligonucleotide
ccggcctaccatacataggcaaaaccaaaggagacacgactgcagaagcgctcgttctgg

SEQ ID NO: 25198 - DNA, 60 bp, Artificial
  Synthetic oligonucleotide
cggcctaccatacataggcaaaaccaaaggagacacgactgcagaagcgctcgttctggc

SEQ ID NO: 25199 - DNA, 60 bp, Artificial
  Synthetic oligonucleotide
cagatggtcgacgatggcaagcttaaggacacggtaagcgtcccagaaggaaccaccgca

SEQ ID NO: 25200 - DNA, 60 bp, Artificial
  Synthetic oligonucleotide
gacagatggtcgacgatggcaagcttaaggacacggtaagcgtcccagaaggaaccaccg

SEQ ID NO: 25201 - DNA, 61 bp, Artificial
  Synthetic oligonucleotide
gacagatggtcgacgatggcaagcttaaggacacggtaagcgtcccagaaggaaccaccgc

SEQ ID NO: 25202 - DNA, 60 bp, Artificial
  Synthetic oligonucleotide
cgacagatggtcgacgatggcaagcttaaggacacggtaagcgtcccagaaggaaccacc

SEQ ID NO: 25203 - DNA, 60 bp, Artificial
  Synthetic oligonucleotide
gcgacagatggtcgacgatggcaagcttaaggacacggtaagcgtcccagaaggaaccac

SEQ ID NO: 25204 - DNA, 60 bp, Artificial
  Synthetic oligonucleotide
tcgactgcgacagatggtcgacgatggcaagcttaaggacacggtaagcgtcccagaagg

SEQ ID NO: 25205 - DNA, 60 bp, Artificial
  Synthetic oligonucleotide
ggaaagagagtttcaacgttagtggtaacccacgagcggagagctcttacggaggagctc

SEQ ID NO: 25206 - DNA, 58 bp, Artificial
  Synthetic oligonucleotide
ggaaagagagtttcaacgttagtggtaacccacgagcggagagctcttacggaggagc

SEQ ID NO: 25207 - DNA, 57 bp, Artificial
  Synthetic oligonucleotide
ggaaagagtgtttcaacgttagtggtaacccacgagcggagagctcctacggaggag

SEQ ID NO: 25208 - DNA, 59 bp, Artificial
  Synthetic oligonucleotide
ggaaagagagtttcaacgttagtggtaacccacgagcggagagctcttacggaggagct

SEQ ID NO: 25209 - DNA, 60 bp, Artificial
  Synthetic oligonucleotide
ggaaagagtgtttcaacgttagtggtaacccacgagcggagagctcctacggaggagctc

SEQ ID NO: 25210 - DNA, 58 bp, Artificial
  Synthetic oligonucleotide
ggaaagagtgtttcaacgttagtggtaacccacgagcggagagctcctacggaggagc

SEQ ID NO: 25211 - DNA, 56 bp, Artificial
  Synthetic oligonucleotide
gaaagagtgtttcaacgttagtggtaacccacgagcggagagctcctacggaggag

SEQ ID NO: 25212 - DNA, 59 bp, Artificial
  Synthetic oligonucleotide
gaaagagagtttcaacgttagtggtaacccacgagcggagagctcttacggaggagctc

SEQ ID NO: 25213 - DNA, 57 bp, Artificial
  Synthetic oligonucleotide
gaaagagtgtttcaacgttagtggtaacccacgagcggagagctcctacggaggagc

SEQ ID NO: 25214 - DNA, 56 bp, Artificial
  Synthetic oligonucleotide
aaagagtgtttcaacgttagtggtaacccacgagcggagagctcctacggaggagc

SEQ ID NO: 25215 - DNA, 58 bp, Artificial
  Synthetic oligonucleotide
aaagagagtttcaacgttagtggtaacccacgagcggagagctcttacggaggagctc

SEQ ID NO: 25216 - DNA, 60 bp, Artificial
  Synthetic oligonucleotide
ctcacttgtcaaccaaccggcaactgctcctagagtccccccacgccgaattgtatcagc

SEQ ID NO: 25217 - DNA, 60 bp, Artificial
  Synthetic oligonucleotide
cgtcccaccagcttgccatttatgcagcagacgacttactaaagagtggagttttgggga

SEQ ID NO: 25218 - DNA, 60 bp, Artificial
  Synthetic oligonucleotide
acggactctcttgggattccactacttgggaactcaccaggattagttcaagtaaagacc

SEQ ID NO: 25219 - DNA, 61 bp, Artificial
  Synthetic oligonucleotide
gtgttggttggagacggcatagaggttctaagcctgccgcaggggttcaacaacccctacg

SEQ ID NO: 25220 - DNA, 61 bp, Artificial
  Synthetic oligonucleotide
gctcggaagaaccaaaaggatgcaaagttacggagaatctatagcaataacgcctcgatcc

SEQ ID NO: 25221 - DNA, 60 bp, Artificial
  Synthetic oligonucleotide
tgtcaaaccgagaacagttgggacttaggtcagtgatgaccttggccgactacaatagga

SEQ ID NO: 25222 - DNA, 60 bp, Artificial
  Synthetic oligonucleotide
accgaacctcaatgacatgccatactatgagatgggtggccatagggtgtacaactccgt

SEQ ID NO: 25223 - DNA, 60 bp, Artificial
  Synthetic oligonucleotide
gccgtgcccttggcagctacacttgccccccagttcgcaccaataatcggtgctgccgat

SEQ ID NO: 25224 - DNA, 61 bp, Artificial
  Synthetic oligonucleotide
gggtagtgccaactacactaacaaaccactagactattgaagtcgcctggtctcattagcc

SEQ ID NO: 25225 - DNA, 60 bp, Artificial
  Synthetic oligonucleotide
tgtcaagaggaagaatatcgaaagaagacacggaactagcaatgaggattgctcggaaga

SEQ ID NO: 25226 - DNA, 60 bp, Artificial
  Synthetic oligonucleotide
gatgcttgggccgtcaccaacccaagaacaagccgatgctgttaaggaccttgtcgacga

SEQ ID NO: 25227 - DNA, 60 bp, Artificial
  Synthetic oligonucleotide
ggacgaatggactgtaactgcaaattatcaaccattgaacatctctggcacgctaattgc

SEQ ID NO: 25228 - DNA, 60 bp, Artificial
  Synthetic oligonucleotide
accacctcgtgtccaaagacgacactatgacagctacattatgatgcttgggccgtcacc

SEQ ID NO: 25229 - DNA, 57 bp, Artificial
  Synthetic oligonucleotide
ggggcgccaccattggcgtcaactctccaacagtcggtgttggttaccaaggagtag

SEQ ID NO: 25230 - DNA, 60 bp, Artificial
  Synthetic oligonucleotide
acttcgaaacttggaaaatcaagggatatatgttgatgagagcaaaataatgtcaagagg

SEQ ID NO: 25231 - DNA, 60 bp, Artificial
  Synthetic oligonucleotide
gtggactccgtagggccagttgacatcttgtggtctggtcaaatgactatgcaggacgaa

SEQ ID NO: 25232 - DNA, 60 bp, Artificial
  Synthetic oligonucleotide
ggaacacaaggagttagaggaggcaatgttcagcttgataagccaagggagaggccggtc

SEQ ID NO: 25233 - DNA, 60 bp, Artificial
  Synthetic oligonucleotide
caagagaagattgccacaatacacgagtacctcctggaacacaaggagttagaggaggca

SEQ ID NO: 25234 - DNA, 60 bp, Artificial
  Synthetic oligonucleotide
tgaagtcaggggcctctggcaccggcctgatcgtggtctatccaaacaccccgtcgagta

SEQ ID NO: 25235 - DNA, 60 bp, Artificial
  Synthetic oligonucleotide
tgcagtctggttccaagggaccttgagtgaagtgtctgactactcttacgataggatcct

SEQ ID NO: 25236 - DNA, 60 bp, Artificial
  Synthetic oligonucleotide
ggtgtacaactccgtttcctcaaacgtaagatctggaaattttttaagaagcgattacat

SEQ ID NO: 25237 - DNA, 60 bp, Artificial
  Synthetic oligonucleotide
tcgctaagcattaagtccagcaccttacctgcgggtgtttatgcactgaatggcacattc

SEQ ID NO: 25238 - DNA, 60 bp, Artificial
  Synthetic oligonucleotide
ggccgacaaggccgaccgatttatcagggtagagggaccttacaaaccagtgaaacctcc

SEQ ID NO: 25239 - DNA, 60 bp, Artificial
  Synthetic oligonucleotide
aaaggatgcaaagttacggagaatctatagcaataacgcctcgatccaagagtcgtacac

SEQ ID NO: 25240 - DNA, 60 bp, Artificial
  Synthetic oligonucleotide
cacgaacccattcctggaagagttggaccagccgataccaagcaacgctgcaaagccaat

SEQ ID NO: 25241 - DNA, 61 bp, Artificial
  Synthetic oligonucleotide
cagttcctgggcaaggattccataacaaggaattcagcattaatgtggactccgtagggcc

SEQ ID NO: 25242 - DNA, 60 bp, Artificial
  Synthetic oligonucleotide
gacgtaaagagaagaaccccaaaacagaccctcccgcactggacagccgggtccgcgagc

SEQ ID NO: 25243 - DNA, 60 bp, Artificial
  Synthetic oligonucleotide
gggagacgtaaagagaagaaccccaaaacagaccctcccgcactggacagccgggtccgc

SEQ ID NO: 25244 - DNA, 61 bp, Artificial
  Synthetic oligonucleotide
gcggtatcaacaactatgagctggtacccaatccggacttgcaaaagaacctgccaatgac

SEQ ID NO: 25245 - DNA, 60 bp, Artificial
  Synthetic oligonucleotide
tggtcccagccaataccacctcgtgtccaaagacgacactatgacagctacattatgatg

SEQ ID NO: 25246 - DNA, 60 bp, Artificial
  Synthetic oligonucleotide
gtcgacgacatatacgacagaaatcaagggaaggggccatcccaggaacaagctcgggaa

SEQ ID NO: 25247 - DNA, 60 bp, Artificial
  Synthetic oligonucleotide
caggaacaagctcgggaattaagtcatgctgtccgcaggcttatttcgcactcacttgtc

SEQ ID NO: 25248 - DNA, 60 bp, Artificial
  Synthetic oligonucleotide
gacatatggcacttgtgatccacatgatttgacttacatcaagtacatactgtcaaaccg

SEQ ID NO: 25249 - DNA, 59 bp, Artificial
  Synthetic oligonucleotide
aattaagtcatgctgtccgcaggcttatttcgcactcacttgtcaaccaaccggcaact

SEQ ID NO: 25250 - DNA, 60 bp, Artificial
  Synthetic oligonucleotide
agtcataatgatggaacatgacaaagtcattccatccgaccctgaggagctgtatattgc

SEQ ID NO: 25251 - DNA, 60 bp, Artificial
  Synthetic oligonucleotide
ggcatacaaatcgcaatgtggttaaagggtgacgattggtcccagccaataccacctcgt

SEQ ID NO: 25252 - DNA, 60 bp, Artificial
  Synthetic oligonucleotide
acaacccctacgttaggctgggtgacaagtcaccgtccactctatcctctccaacccaca

SEQ ID NO: 25253 - DNA, 60 bp, Artificial
  Synthetic oligonucleotide
tgaggagctgtatattgctgtatcactaacagaatccctcaggaagcaaataccgaacct

SEQ ID NO: 25254 - DNA, 60 bp, Artificial
  Synthetic oligonucleotide
agtcattgcctactggcatacaaatcgcaatgtggttaaagggtgacgattggtcccagc

SEQ ID NO: 25255 - DNA, 60 bp, Artificial
  Synthetic oligonucleotide
ggcctgttggcaattccgctagcggtatgcccatttcaatgagtaggcgtcttagaaacg

SEQ ID NO: 25256 - DNA, 61 bp, Artificial
  Synthetic oligonucleotide
ctctggcacgctaattgcaaacagtcagcgaaccctaacatggtccaacactggtgtatcc

SEQ ID NO: 25257 - DNA, 60 bp, Artificial
  Synthetic oligonucleotide
tggaagagttggaccagccgataccaagcaacgctgcaaagccaatctccgaggagactc

SEQ ID NO: 25258 - DNA, 61 bp, Artificial
  Synthetic oligonucleotide
cagctcaggagttgaaggactcatatgactatggcagactgatttcaggctcgctaagcat

SEQ ID NO: 25259 - DNA, 60 bp, Artificial
  Synthetic oligonucleotide
ggaaacaacaccaatggtgacagctcgttcagtgtggactcatcatttaccatcaatgtc

SEQ ID NO: 25260 - DNA, 60 bp, Artificial
  Synthetic oligonucleotide
attgcaaacagtcagcgaaccctaacatggtccaacactggtgtatccaatggcagccac

SEQ ID NO: 25261 - DNA, 61 bp, Artificial
  Synthetic oligonucleotide
gccaatctccgaggagactcgggatttgtttctatcggacggtcaaaccatcccaagctct

SEQ ID NO: 25262 - DNA, 60 bp, Artificial
  Synthetic oligonucleotide
cccagtctcgagaagtcaccggcgaaagaaggcaaagactagaacgaaaacttcgaaact

SEQ ID NO: 25263 - DNA, 60 bp, Artificial
  Synthetic oligonucleotide
accatcccaagctctcaagagaagattgccacaatacacgagtacctcctggaacacaag

SEQ ID NO: 25264 - DNA, 60 bp, Artificial
  Synthetic oligonucleotide
tgctgccgatgggttagccaatgcaatattgggtgatagcgccagcggaaggcctgttgg

SEQ ID NO: 25265 - DNA, 61 bp, Artificial
  Synthetic oligonucleotide
aggatcctgtcaataacatccaatcctctggataaggttggaaatgtgttggttggagacg

SEQ ID NO: 25266 - DNA, 60 bp, Artificial
  Synthetic oligonucleotide
ccaacgcagccggaggccgctacctaacacatgcagcaggaggacgctacactgacgtaa

SEQ ID NO: 25267 - DNA, 60 bp, Artificial
  Synthetic oligonucleotide
cctgaagaaggcattcaactacgggaggctggtctcacggaaatacgacgtccagagctc

SEQ ID NO: 25268 - DNA, 60 bp, Artificial
  Synthetic oligonucleotide
acaacaaaggcaaccgcaacttacttgagatccattatgcttcccgagaatggtccagca

SEQ ID NO: 25269 - DNA, 60 bp, Artificial
  Synthetic oligonucleotide
atgcaagacctgagggacttggcccggcagatgaaacgacgaccccgaccagctgagaca

SEQ ID NO: 25270 - DNA, 60 bp, Artificial
  Synthetic oligonucleotide
tcgacctcccatccgcacgcctccccacagtaccagcgactgggaccctcacaacaatct

SEQ ID NO: 25271 - DNA, 60 bp, Artificial
  Synthetic oligonucleotide
gtccatcaccaggccagttcaagtactacgtcatcacagggcgcgtcccagacccacgag

SEQ ID NO: 25272 - DNA, 61 bp, Artificial
  Synthetic oligonucleotide
acaacgtccccgtcgtgtcaataaccagctctacgctggccacaaccgacaactacagggg

SEQ ID NO: 25273 - DNA, 60 bp, Artificial
  Synthetic oligonucleotide
cacacctgatccagagcggagcactaccagtgcagaaaacacaaggcgccagcaggagga

SEQ ID NO: 25274 - DNA, 61 bp, Artificial
  Synthetic oligonucleotide
ccccagtcgatcctgacggtagctggagtgtcaaactatgagctgatcccaaaccccgaac

SEQ ID NO: 25275 - DNA, 60 bp, Artificial
  Synthetic oligonucleotide
atcatcccaggagcacacccagaacttcttgacccaaaccagcaggtcctgtcccacttc

SEQ ID NO: 25276 - DNA, 61 bp, Artificial
  Synthetic oligonucleotide
gtcaacgacatcgacaagggcgtacccagaatggtgttcactggagagatcgcagacgacg

SEQ ID NO: 25277 - DNA, 60 bp, Artificial
  Synthetic oligonucleotide
ggaccccctcgacagcccgcaagcagcagcacagttcctgaaggacaacaagtaccggat

SEQ ID NO: 25278 - DNA, 60 bp, Artificial
  Synthetic oligonucleotide
tgccattcaatattgtgattccaaccagcgagataacccagccaatcacatccatcaaac

SEQ ID NO: 25279 - DNA, 54 bp, Artificial
  Synthetic oligonucleotide
cccctggtcggttgggccgctggatcagggctgtctctgatgaggaccttgagt

SEQ ID NO: 25280 - DNA, 60 bp, Artificial
  Synthetic oligonucleotide
gcaggtggggtaacaatcacactgttctcagctaatatcgatgccatcacaagcctcagc

SEQ ID NO: 25281 - DNA, 56 bp, Artificial
  Synthetic oligonucleotide
ggggagaactcgtgtttcaaacaagcgtccaaggccttatactgggtgctaccatc

SEQ ID NO: 25282 - DNA, 60 bp, Artificial
  Synthetic oligonucleotide
gggattgtgactgatatggccaacttcgcactcagcgacccgaacgcccatcggatgcgc

SEQ ID NO: 25283 - DNA, 60 bp, Artificial
  Synthetic oligonucleotide
agctacgtcgatctacggggctccaggacaggcagagccaccccaagccttcatagacga

SEQ ID NO: 25284 - DNA, 60 bp, Artificial
  Synthetic oligonucleotide
ccccgaactcgagagcgccgtcagagccatggaagcagcagccaacgtggacccactgtt

SEQ ID NO: 25285 - DNA, 61 bp, Artificial
  Synthetic oligonucleotide
acctcgactgcgtgttgagagagggtgccacgctattccctgtggtcatcacgacagtgga

SEQ ID NO: 25286 - DNA, 61 bp, Artificial
  Synthetic oligonucleotide
cgtgcatgcagagaagagccggttggcgtcagaaggacaaatcctaagggcagctacgtcg

SEQ ID NO: 25287 - DNA, 60 bp, Artificial
  Synthetic oligonucleotide
aggcgggggatcagatgtcatggtcagcaagtgggagcctagcagtgacgatccacggtg

SEQ ID NO: 25288 - DNA, 60 bp, Artificial
  Synthetic oligonucleotide
cgaacgcccatcggatgcgcaattttctcgcaaacgcaccacaagcaggcagcaagtcgc

SEQ ID NO: 25289 - DNA, 61 bp, Artificial
  Synthetic oligonucleotide
ggcgtgcgagaagatctccaacctccatctcaaagaggatccttcatacgaactctctccg

SEQ ID NO: 25290 - DNA, 60 bp, Artificial
  Synthetic oligonucleotide
acgcgactgggacaggctcccctacctcaaccttccataccttccacccaatgcaggacg

SEQ ID NO: 25291 - DNA, 60 bp, Artificial
  Synthetic oligonucleotide
acccaatgcaggacgccagtacgacctggccatggccgcttcagagttcaaagagacccc

SEQ ID NO: 25292 - DNA, 61 bp, Artificial
  Synthetic oligonucleotide
ggcttccctggctcaattgtgggtgctcactacacactgcagagcaatgggaactacaagt

SEQ ID NO: 25293 - DNA, 60 bp, Artificial
  Synthetic oligonucleotide
tgtagtcgacgggattctcgcttcacccgggatactccgcggtgcacacaacctcgactg

SEQ ID NO: 25294 - DNA, 60 bp, Artificial
  Synthetic oligonucleotide
gcgtttatgcactaaatggcaccataaacgccgtgaccttccaaggaagcctgagtgaac

SEQ ID NO: 25295 - DNA, 60 bp, Artificial
  Synthetic oligonucleotide
cctcaggccgcataaggcagctaactctcgccgccgacaaggggtacgaggtagtcgcga

SEQ ID NO: 25296 - DNA, 60 bp, Artificial
  Synthetic oligonucleotide
cttctgatgccaacaaccggaccggcgtccattccggacgacaccctagagaagcacact

SEQ ID NO: 25297 - DNA, 60 bp, Artificial
  Synthetic oligonucleotide
cccctagcccatgcaattggggaaggtgtagactacctgctgggcgatgaggcacaggct

SEQ ID NO: 25298 - DNA, 61 bp, Artificial
  Synthetic oligonucleotide
cccaaatcctgaactagcaaagaacctggtcacagaatacggccgatttgacccaggagcc

SEQ ID NO: 25299 - DNA, 60 bp, Artificial
  Synthetic oligonucleotide
gatgaagcatcgcaatcccaggcgggccccaccaaagcccaagccaaaacccaatgttcc

SEQ ID NO: 25300 - DNA, 60 bp, Artificial
  Synthetic oligonucleotide
tcgcaatcccaggcgggccccaccaaagcccaagccaaaacccaatgttccaacacagag

SEQ ID NO: 25301 - DNA, 58 bp, Artificial
  Synthetic oligonucleotide
gccaatcacatccatcaaactggagatagtaacctccaaaagtggtggtcaggcgggg

SEQ ID NO: 25302 - DNA, 61 bp, Artificial
  Synthetic oligonucleotide
ccaaggaagcctgagtgaactgacagatgttagctacaatgggttgatgtctgcaacagcc

SEQ ID NO: 25303 - DNA, 60 bp, Artificial
  Synthetic oligonucleotide
aggcagcaagtcgcaaagagccaagtacgggacagcaggctacggagtggaggcccgggg

SEQ ID NO: 25304 - DNA, 61 bp, Artificial
  Synthetic oligonucleotide
gtgctaccatctaccttataggctttgatgggactgcggtaatcaccagagctgtggccgc

SEQ ID NO: 25305 - DNA, 60 bp, Artificial
  Synthetic oligonucleotide
tcgacccaaagtccccatccatgtggccatgacaggagccctcaacgcctatggcgagat

SEQ ID NO: 25306 - DNA, 61 bp, Artificial
  Synthetic oligonucleotide
gtctacaccataactgcagccgacgattaccaattctcatcacagtaccaagcaggtgggg

SEQ ID NO: 25307 - DNA, 59 bp, Artificial
  Synthetic oligonucleotide
gcattatgctgtccaaagaccccatacctcctattgtgggaagcagcggaaacctagcc

SEQ ID NO: 25308 - DNA, 61 bp, Artificial
  Synthetic oligonucleotide
ccactggagactgggagagtttacaccgtggtcccaatagatggtgtctgggacgacagca

SEQ ID NO: 25309 - DNA, 60 bp, Artificial
  Synthetic oligonucleotide
ggcaactatccaggggccctccgtcccgtcacactagtagcctacgaaagagtggcaaca

SEQ ID NO: 25310 - DNA, 52 bp, Artificial
  Synthetic oligonucleotide
cacatcatatgatcttgggtatgtgagactcggtgaccccattcccgctata

SEQ ID NO: 25311 - DNA, 53 bp, Artificial
  Synthetic oligonucleotide
tagtagagatcagacaaacgatcgcagcgatgacaaacctgcaagatcaaacc

SEQ ID NO: 25312 - DNA, 60 bp, Artificial
  Synthetic oligonucleotide
ctcacaatccacgcgactgggacaggctcccctacctcaaccttccataccttccaccca

SEQ ID NO: 25313 - DNA, 60 bp, Artificial
  Synthetic oligonucleotide
acgtggacccactgttccaatctgcgctcagcgtgttcatgtggctggaagagaatggga

SEQ ID NO: 25314 - DNA, 60 bp, Artificial
  Synthetic oligonucleotide
tgtcatggtcagcaagtgggagcctagcagtgacgatccacggtggcaactatccagggg

SEQ ID NO: 25315 - DNA, 60 bp, Artificial
  Synthetic oligonucleotide
gcgagattgagaatgtgagctttagaagcaccaagctcgccactgcacaccgacttggcc

SEQ ID NO: 25316 - DNA, 51 bp, Artificial
  Synthetic oligonucleotide
ggccaagccccggccagctgaagtactggcagaacacacgagaaatacctg

SEQ ID NO: 25317 - DNA, 60 bp, Artificial
  Synthetic oligonucleotide
agagtggcaacaggatctgtcgttacggtcgccggggtgagcaacttcgagctgatccca

SEQ ID NO: 25318 - DNA, 60 bp, Artificial
  Synthetic oligonucleotide
acctcaactctcccctgaagattgcaggagcatttggcttcaaagacataatccgggccc

SEQ ID NO: 25319 - DNA, 60 bp, Artificial
  Synthetic oligonucleotide
ctactgcaggctagtgagtcggagtctcacagtgaggtcaagcacactccctggtggcgt

SEQ ID NO: 25320 - DNA, 60 bp, Artificial
  Synthetic oligonucleotide
tgggcgatgaggcacaggctgcttcaggaactgctcgagccgcgtcaggaaaagcaagag

SEQ ID NO: 25321 - DNA, 60 bp, Artificial
  Synthetic oligonucleotide
ttctcgcttcacccgggatactccgcggtgcacacaacctcgactgcgtgttgagagagg

SEQ ID NO: 25322 - DNA, 60 bp, Artificial
  Synthetic oligonucleotide
aggatagctgtgccggtggtctctacactgttcccacccgccgctcccctagcccatgca

SEQ ID NO: 25323 - DNA, 60 bp, Artificial
  Synthetic oligonucleotide
acgaagtcgccaaagtctatgaagtcaaccatgggcgtggccccaaccaagaacagatga

SEQ ID NO: 25324 - DNA, 60 bp, Artificial
  Synthetic oligonucleotide
ggccgatttgacccaggagccatgaactacacaaaattgatactgagtgagagggaccgt

SEQ ID NO: 25325 - DNA, 61 bp, Artificial
  Synthetic oligonucleotide
tggagactatgggcatctactttgcaacaccagaatgggtagcactcaatgggcaccgggg

SEQ ID NO: 25326 - DNA, 60 bp, Artificial
  Synthetic oligonucleotide
gagggaccgtcttggcatcaagaccgtatggccaacaagggagtacactgactttcgcga

SEQ ID NO: 25327 - DNA, 60 bp, Artificial
  Synthetic oligonucleotide
gttcgatcagatgctcctgactgcccagaacctaccggccagctacaactactgcaggct

SEQ ID NO: 25328 - DNA, 60 bp, Artificial
  Synthetic oligonucleotide
aagaactcctgatccctaaggtctgggtgccacctgaggatcccttggccagccctagtc

SEQ ID NO: 25329 - DNA, 60 bp, Artificial
  Synthetic oligonucleotide
acggctacaagattctgcagccacggtctctacctgagaatgaggagtatgagaccgatc

SEQ ID NO: 25330 - DNA, 61 bp, Artificial
  Synthetic oligonucleotide
tgggtacacctttgagagcatagcccagctacttgacatcactttaccggtaggcccaccc

SEQ ID NO: 25331 - DNA, 60 bp, Artificial
  Synthetic oligonucleotide
accctatctctccccattggggaccaggagtacttcccaaaatactacccaacacaccgc

SEQ ID NO: 25332 - DNA, 61 bp, Artificial
  Synthetic oligonucleotide
gttcccgaggccacagataacctcaaagatgaggtcaccctactaacccaaaacattagag

SEQ ID NO: 25333 - DNA, 60 bp, Artificial
  Synthetic oligonucleotide
tcactttaccggtaggcccacccggtgaggatgacaagccctgggtaccactcacaaggg

SEQ ID NO: 25334 - DNA, 60 bp, Artificial
  Synthetic oligonucleotide
actaagtggcctcgtcctcctagccaccgcccgcagccgactacaggacgctgtcaaggc

SEQ ID NO: 25335 - DNA, 60 bp, Artificial
  Synthetic oligonucleotide
agttcctcgccgagtggtcagagttgtccgagttcggagaagctttcgaaggcttcaaca

SEQ ID NO: 25336 - DNA, 60 bp, Artificial
  Synthetic oligonucleotide
agccgacattgccagcaaggtcgctcactcagcactcgtggaaacaagcgacgctcttga

SEQ ID NO: 25337 - DNA, 60 bp, Artificial
  Synthetic oligonucleotide
gtgggctaaaggcagtcagcaatgccctcaagaccggtcggtatagaaatgaagccggac

SEQ ID NO: 25338 - DNA, 60 bp, Artificial
  Synthetic oligonucleotide
caagttcaacccgtttagaggtgggctaaacaggatcgtggagtggataatggctccgga

SEQ ID NO: 25339 - DNA, 60 bp, Artificial
  Synthetic oligonucleotide
tcagcaatgccctcaagaccggtcggtatagaaatgaagccggactaagtggcctcgtcc

SEQ ID NO: 25340 - DNA, 61 bp, Artificial
  Synthetic oligonucleotide
gctctgctgcgtatcccaaaggggtagagaataaaagcctcaaatccaaggttgggatcga

SEQ ID NO: 25341 - DNA, 60 bp, Artificial
  Synthetic oligonucleotide
ctactggtacttatcatgtgggcttttgtttcccaaggctgagaggtacgacaaaagcac

SEQ ID NO: 25342 - DNA, 60 bp, Artificial
  Synthetic oligonucleotide
tgggcatcaacttcaagattgagaggtccattgatgacattaggggcaagctcagacagc

SEQ ID NO: 25343 - DNA, 60 bp, Artificial
  Synthetic oligonucleotide
tcaagtggactgccctatgttggtcgcaccaaaggagaaactattggggagatgatagcc

SEQ ID NO: 25344 - DNA, 61 bp, Artificial
  Synthetic oligonucleotide
gcccgtgatgtccaatagcccaaacaacgtgttgaacattgaggggtgtccgtcactctac

SEQ ID NO: 25345 - DNA, 60 bp, Artificial
  Synthetic oligonucleotide
agcaacctagtccagacagcgaagagttcaagtcaattgaagacaagctgggcatcaact

SEQ ID NO: 25346 - DNA, 60 bp, Artificial
  Synthetic oligonucleotide
accttcagatcaagacatatggtcaaggcagtgggaatgcagccaccttcatcaacaacc

SEQ ID NO: 25347 - DNA, 60 bp, Artificial
  Synthetic oligonucleotide
acattgccccagccctagttgtggactcatcatgtctgattatgaaccttcagatcaaga

SEQ ID NO: 25348 - DNA, 60 bp, Artificial
  Synthetic oligonucleotide
acgagcagaccaatggggatggaggccccaacacggtccaagaacgccgtaaaaatggcc

SEQ ID NO: 25349 - DNA, 60 bp, Artificial
  Synthetic oligonucleotide
ggcggcatctggaggccaaggggttcccgctcgatgagttcctcgccgagtggtcagagt

SEQ ID NO: 25350 - DNA, 60 bp, Artificial
  Synthetic oligonucleotide
aagcacatgctgcaccaagacccgtaacaaatggtcagctcaatcgtcaacacacctgat

SEQ ID NO: 25351 - DNA, 60 bp, Artificial
  Synthetic oligonucleotide
cgaaccagtttcttcgagagctatcagcgctgctgaagcagggtgcagggacaaaagggt

SEQ ID NO: 25352 - DNA, 59 bp, Artificial
  Synthetic oligonucleotide
ccccttgcacaaccagggtacctgagtggaggggtcgaaccagagcaacccagcccaac

SEQ ID NO: 25353 - DNA, 60 bp, Artificial
  Synthetic oligonucleotide
gaggtacgacaaaagcacatgctgcaccaagacccgtaacaaatggtcagctcaatcgtc

SEQ ID NO: 25354 - DNA, 60 bp, Artificial
  Synthetic oligonucleotide
actacccaacacaccgcccgagcaaggaaaagcccaatgcgtacccgcccgatatcgcat

SEQ ID NO: 25355 - DNA, 60 bp, Artificial
  Synthetic oligonucleotide
agcctacgggagtgggacctacatgggacaggccaccagacttgttgctatgaaagaggt

SEQ ID NO: 25356 - DNA, 60 bp, Artificial
  Synthetic oligonucleotide
tgaaagaggttgccactgggagaaacccaaacaaagatcctctaaagcttgggtacacct

SEQ ID NO: 25357 - DNA, 60 bp, Artificial
  Synthetic oligonucleotide
ccccaaacctccaaatgtcaacagaccagtcaacaccggtgggctaaaggcagtcagcaa

SEQ ID NO: 25358 - DNA, 60 bp, Artificial
  Synthetic oligonucleotide
tgcccgccaagagggccaccggtgtccaggcagctcttctcggagcagggacgagcagac

SEQ ID NO: 25359 - DNA, 60 bp, Artificial
  Synthetic oligonucleotide
cagaccagtaccccccaaacctccaaatgtcaacagaccagtcaacaccggtgggctaaa

SEQ ID NO: 25360 - DNA, 60 bp, Artificial
  Synthetic oligonucleotide
tccacaggcgcgaagcaagatatcagcagcgttcggcataaagcctacagctggacaaga

SEQ ID NO: 25361 - DNA, 60 bp, Artificial
  Synthetic oligonucleotide
ttcactccaacacgtggtactcaattgacctagagaagggtgaggcaaactgcacgcgtc

SEQ ID NO: 25362 - DNA, 60 bp, Artificial
  Synthetic oligonucleotide
cgaaccagagcaacccagcccaactgtagagctggacctactcggatggtctgcaactta

SEQ ID NO: 25363 - DNA, 60 bp, Artificial
  Synthetic oligonucleotide
caaggccatggcagaggccgagaaactccacaagtctaagcccgatgaccccgatgcaga

SEQ ID NO: 25364 - DNA, 61 bp, Artificial
  Synthetic oligonucleotide
caaagatcttgggatctatgtgccggtgcttgacaaggaacgcttattttgctctgctgcg

SEQ ID NO: 25365 - DNA, 61 bp, Artificial
  Synthetic oligonucleotide
gcccgatgaccccgatgcagactggtttgaacgatcagaaaccctgtcagacctgctggag

SEQ ID NO: 25366 - DNA, 60 bp, Artificial
  Synthetic oligonucleotide
aaaaatggccaaaaggcggcaacgccaaaaagagagccgccaatagccatgatgggaacc

SEQ ID NO: 25367 - DNA, 60 bp, Artificial
  Synthetic oligonucleotide
cagggtgcagggacaaaagggtcgaacaagaagaagctgctcagcatgctaagtgactac

SEQ ID NO: 25368 - DNA, 61 bp, Artificial
  Synthetic oligonucleotide
cttcttagcacccttgtgctagaccagtggaacttgatgaagcaacctagtccagacagcg

SEQ ID NO: 25369 - DNA, 60 bp, Artificial
  Synthetic oligonucleotide
ccaccggtgtccaggcagctcttctcggagcagggacgagcagaccaatggggatggagg

SEQ ID NO: 25370 - DNA, 61 bp, Artificial
  Synthetic oligonucleotide
gacatatggtcaaggcagtgggaatgcagccaccttcatcaacaaccatcttcttagcacc

SEQ ID NO: 25371 - DNA, 61 bp, Artificial
  Synthetic oligonucleotide
gtgaccccatgttcaatcagacatgggccacctttgcgatgaacattgccccagccctagt

SEQ ID NO: 25372 - DNA, 60 bp, Artificial
  Synthetic oligonucleotide
atgcaggccgccatgtactacatccttaccagaggatggtccgataacggtgaccccatg

SEQ ID NO: 25373 - DNA, 61 bp, Artificial
  Synthetic oligonucleotide
ggttggaactacccactcctgaacaaagcttgcaagaacaatgcaagtgcagctcggcggc

SEQ ID NO: 25374 - DNA, 60 bp, Artificial
  Synthetic oligonucleotide
tgcaagtgcagctcggcggcatctggaggccaaggggttcccgctcgatgagttcctcgc

SEQ ID NO: 25375 - DNA, 60 bp, Artificial
  Synthetic oligonucleotide
acaagcgacgctcttgaagcggtccagtcaacctcagtgtacaccccaaagtacccagag

SEQ ID NO: 25376 - DNA, 61 bp, Artificial
  Synthetic oligonucleotide
tggtactcaattgacctagagaagggtgaggcaaactgcacgcgtcaacacatgcaggccg

SEQ ID NO: 25377 - DNA, 60 bp, Artificial
  Synthetic oligonucleotide
tcaacatcaagctgacagtaacaccggagagcctcgccgaacttaacagaccagtacccc

SEQ ID NO: 25378 - DNA, 60 bp, Artificial
  Synthetic oligonucleotide
ctcatgatatgtcggacatcttcaactcacctcagaacaaggcgtcaatcttgagtgctc

SEQ ID NO: 25379 - DNA, 60 bp, Artificial
  Synthetic oligonucleotide
actcatgatatgtcggacatcttcaactcaccacaaaacaaggcatccatcttgactgct

SEQ ID NO: 25380 - DNA, 60 bp, Artificial
  Synthetic oligonucleotide
ctcatgatatgtcggacatcttcaactcaccacaaaacaaggcatccatcttgactgctc

SEQ ID NO: 25381 - DNA, 60 bp, Artificial
  Synthetic oligonucleotide
aactcatgatatgtcggacatcttcaactcacctcagaacaaggcgtcaatcttgagtgc

SEQ ID NO: 25382 - DNA, 60 bp, Artificial
  Synthetic oligonucleotide
actcatgatatgtcggacatcttcaactcacctcagaacaaggcgtcaatcttgagtgct

SEQ ID NO: 25383 - DNA, 60 bp, Artificial
  Synthetic oligonucleotide
tacaactcatgatatgtcggacatcttcaactcacctcagaacaaggcgtcaatcttgag

SEQ ID NO: 25384 - DNA, 60 bp, Artificial
  Synthetic oligonucleotide
aactcatgatatgtcggacatcttcaactcaccacaaaacaaggcatccatcttgactgc

SEQ ID NO: 25385 - DNA, 61 bp, Artificial
  Synthetic oligonucleotide
ccctcaaaccagcatcatccacagtggaaaactgggccgaagcaacggaggaactagcagc

SEQ ID NO: 25386 - DNA, 60 bp, Artificial
  Synthetic oligonucleotide
agccaacacgctgctcaagagcagtctcacagagaccagagaagcgctggagaccgtcca

SEQ ID NO: 25387 - DNA, 61 bp, Artificial
  Synthetic oligonucleotide
cgggaagtatccgaaatgacctagctggactcatatgtaagctccgcgccgcacggcaagc

SEQ ID NO: 25388 - DNA, 60 bp, Artificial
  Synthetic oligonucleotide
ccacgcttcagtatggctcaggcagctactcaggacagctaaacagactcctggcgatga

SEQ ID NO: 25389 - DNA, 60 bp, Artificial
  Synthetic oligonucleotide
aatctacgggaagtcatcatggaggccgtcgaaacagcaccccaggacggctacctggcc

SEQ ID NO: 25390 - DNA, 60 bp, Artificial
  Synthetic oligonucleotide
gggacttacaaggaccccaagagtgccgtgtggaggctgctcgaccagaggaccaagcta

SEQ ID NO: 25391 - DNA, 60 bp, Artificial
  Synthetic oligonucleotide
ggccgatggctcagacctcccaccacacaaacccgggagagccgtggagctagacctact

SEQ ID NO: 25392 - DNA, 61 bp, Artificial
  Synthetic oligonucleotide
caccggtgatggaggagtccaagctcaacatcaccaacacccagactccgtccctgtacgg

SEQ ID NO: 25393 - DNA, 60 bp, Artificial
  Synthetic oligonucleotide
gaatccaaacaaaactcccaagacagtgggctacagcaatgagcagctggccaaactcct

SEQ ID NO: 25394 - DNA, 61 bp, Artificial
  Synthetic oligonucleotide
ggcacccgacataccacgactgtttacgtatgcacgcaagtgccccttttaaaacctctac

SEQ ID NO: 25395 - DNA, 60 bp, Artificial
  Synthetic oligonucleotide
acctttctcaacaaccacctaatgtcaacaatcgtagttgccgagtgggtaaaggccgga

SEQ ID NO: 25396 - DNA, 60 bp, Artificial
  Synthetic oligonucleotide
acgcgaggatggacaaatgaggatggctcaccccgctacaacccaacatgggcgaccttc

SEQ ID NO: 25397 - DNA, 60 bp, Artificial
  Synthetic oligonucleotide
gcagcacagttcctaaaggacaacaagtaccgcatacttaggccgcgagccattccaacc

SEQ ID NO: 25398 - DNA, 60 bp, Artificial
  Synthetic oligonucleotide
aaaatcatcgctggaaaatcgaaccccgagaagaaccccggcaacgcagccaaccccgtg

SEQ ID NO: 25399 - DNA, 60 bp, Artificial
  Synthetic oligonucleotide
tggagatgtttgtgccagtcctcgagaacgagcgactaattgcatcagctgcctacccaa

SEQ ID NO: 25400 - DNA, 60 bp, Artificial
  Synthetic oligonucleotide
agcgctcgttctggctgactccttcataagagacctcggaaaagccgcaacatcagctga

SEQ ID NO: 25401 - DNA, 60 bp, Artificial
  Synthetic oligonucleotide
tcagaactcgggggtgacctcgaagggataaccctagctgaacccctgacaaaccaaacc

SEQ ID NO: 25402 - DNA, 60 bp, Artificial
  Synthetic oligonucleotide
agacactaccgatcaaccctccaaagaacgaggacccagacctccggtgggcccccagct

SEQ ID NO: 25403 - DNA, 61 bp, Artificial
  Synthetic oligonucleotide
gggctgctattcccaaagggcgagagatacacccaagtggactgggacaagaagacccgga

SEQ ID NO: 25404 - DNA, 61 bp, Artificial
  Synthetic oligonucleotide
ccagaaggaaccaccgcattctatccaaaatactacccattccacaagccagatcatgacg

SEQ ID NO: 25405 - DNA, 59 bp, Artificial
  Synthetic oligonucleotide
aagaagacccggaacatatggagcgcgccctacccaacacacctattgctatcaatggt

SEQ ID NO: 25406 - DNA, 61 bp, Artificial
  Synthetic oligonucleotide
agcaccgacaagtcatatctgccacacgtgactgtcaagtcctcagccggcctaccataca

SEQ ID NO: 25407 - DNA, 60 bp, Artificial
  Synthetic oligonucleotide
gactttccaacaggcccagagactttacggcaagtcagagaagccatagccacgcttcag

SEQ ID NO: 25408 - DNA, 60 bp, Artificial
  Synthetic oligonucleotide
gcctattgatgaacctgcagctcaagacatacgggcaaggcagcggaaacgccttcacct

SEQ ID NO: 25409 - DNA, 60 bp, Artificial
  Synthetic oligonucleotide
tgacgatcataagagacagtctggacacaggagaggacctggtgatgatctacgcagaca

SEQ ID NO: 25410 - DNA, 60 bp, Artificial
  Synthetic oligonucleotide
acatgtgggtcccagtcctggacaaagagaggctcctgagctcagcagcctaccccaagg

SEQ ID NO: 25411 - DNA, 60 bp, Artificial
  Synthetic oligonucleotide
actggggtggtccgccacgtactcgcgtcacatggacatgtgggtcccagtcctggacaa

SEQ ID NO: 25412 - DNA, 60 bp, Artificial
  Synthetic oligonucleotide
ggcttcctaggcgacgggaccacgaaccccccagagaaagaagggcccacagtggacctc

SEQ ID NO: 25413 - DNA, 60 bp, Artificial
  Synthetic oligonucleotide
agtggacctcgacctactggggtggtccgccacgtactcgcgtcacatggacatgtgggt

SEQ ID NO: 25414 - DNA, 60 bp, Artificial
  Synthetic oligonucleotide
accccaagggacttgagaacaaagacctaaaaggaaagcccggggccgagatagcctaca

SEQ ID NO: 25415 - DNA, 60 bp, Artificial
  Synthetic oligonucleotide
agcccggtctgcactggaagacgtccacaactccctactagccctgtcgggagaaacagt

SEQ ID NO: 25416 - DNA, 60 bp, Artificial
  Synthetic oligonucleotide
cctacagcggaaccagtacaggatgctaaagccccgggcaatacccgaaaacacacccct

SEQ ID NO: 25417 - DNA, 55 bp, Artificial
  Synthetic oligonucleotide
aaaaggagaagccaacgcaacaccagaacacgcccaggcagtgtcctactaccta

SEQ ID NO: 25418 - DNA, 60 bp, Artificial
  Synthetic oligonucleotide
tggacgacgcagacagactcatgaaggccaacaacctgtacatgagggaagcccggtctg

SEQ ID NO: 25419 - DNA, 60 bp, Artificial
  Synthetic oligonucleotide
ctgtacatgagggaagcccggtctgcactggaagacgtccacaactccctactagccctg

SEQ ID NO: 25420 - DNA, 60 bp, Artificial
  Synthetic oligonucleotide
caacacccttcgggcactacgacgtggcacttctcaaacagatgacttaccaacttacaa

SEQ ID NO: 25421 - DNA, 60 bp, Artificial
  Synthetic oligonucleotide
gatactaccccacacacaagcccgagcacaacaaaccaacacccttcgggcactacgacg

SEQ ID NO: 25422 - DNA, 60 bp, Artificial
  Synthetic oligonucleotide
cccacgatactaccccacacacaagcccgagcacaacaaaccaacacccttcgggcacta

SEQ ID NO: 25423 - DNA, 60 bp, Artificial
  Synthetic oligonucleotide
cggaaccagtacaggatgctaaagccccgggcaatacccgaaaacacacccctagacact

SEQ ID NO: 25424 - DNA, 60 bp, Artificial
  Synthetic oligonucleotide
aaaacacacccctagacacttcagagctgtttccacacttggcagagttcgtaggatcag

SEQ ID NO: 25425 - DNA, 55 bp, Artificial
  Synthetic oligonucleotide
cacattcctaagagaggtctcggagtgtgtcaaagagggagctatggccagcgac

SEQ ID NO: 25426 - DNA, 61 bp, Artificial
  Synthetic oligonucleotide
ccccttcccaacccaccttctgctctccacgataagctggcccataatgaactcatcaaag

SEQ ID NO: 25427 - DNA, 60 bp, Artificial
  Synthetic oligonucleotide
ggaaagtgtgggtcgactccccgtgacaatcggcacagggaccactctgcagtgccggct

SEQ ID NO: 25428 - DNA, 60 bp, Artificial
  Synthetic oligonucleotide
actcatcaaagaataacatcctaaatgtgccagaatgcgtgtccctatacgggttcaacc

SEQ ID NO: 25429 - DNA, 60 bp, Artificial
  Synthetic oligonucleotide
acatcctaaatgtgccagaatgcgtgtccctatacgggttcaacccattctcaggcggaa

SEQ ID NO: 25430 - DNA, 50 bp, Artificial
  Synthetic oligonucleotide
gggttcaacccattctcaggcggaatggacgccgttgtgacgaacatact

SEQ ID NO: 25431 - DNA, 60 bp, Artificial
  Synthetic oligonucleotide
cgcccaggcagtgtcctactacctattgaccagaggctggactcaagacgatgggtcccc

SEQ ID NO: 25432 - DNA, 60 bp, Artificial
  Synthetic oligonucleotide
ggtccccagccttcaatgccacctgggcaaccatagcaatgatgattgcgccctccctgg

SEQ ID NO: 25433 - DNA, 60 bp, Artificial
  Synthetic oligonucleotide
agtgccggctgtcccggctactttaaacccccaaataatagattgaagatgagtgacgta

SEQ ID NO: 25434 - DNA, 61 bp, Artificial
  Synthetic oligonucleotide
cgtatcggacagaacacaggactggctactaccagaaccatggaacccgcctatggatccc

SEQ ID NO: 25435 - DNA, 60 bp, Artificial
  Synthetic oligonucleotide
tctgatcaaccacacactctcaaccattcttgttgggaagtggattgaggctggtcaacc

SEQ ID NO: 25436 - DNA, 60 bp, Artificial
  Synthetic oligonucleotide
aagccgcaactggcatcaactttaaaatagagagagagatcgagggcctgccaaccagac

SEQ ID NO: 25437 - DNA, 61 bp, Artificial
  Synthetic oligonucleotide
cgacggtggcggggctaaagctgacggcctactccaaatcaaggattaacaaagccaaggc

SEQ ID NO: 25438 - DNA, 60 bp, Artificial
  Synthetic oligonucleotide
actggtctgacaggatggacgacgcagacagactcatgaaggccaacaacctgtacatga

SEQ ID NO: 25439 - DNA, 60 bp, Artificial
  Synthetic oligonucleotide
ggcatcaactttaaaatagagagagagatcgagggcctgccaaccagactacaggaggcg

SEQ ID NO: 25440 - DNA, 60 bp, Artificial
  Synthetic oligonucleotide
acacaccacatgctaggagaacaataacccaagcacttggtttgacgaacgtatcggaca

SEQ ID NO: 25441 - DNA, 60 bp, Artificial
  Synthetic oligonucleotide
gggtccggaaccagtcaggggcaactagccaggctagtcgccatgaaggaagtagcaaca

SEQ ID NO: 25442 - DNA, 60 bp, Artificial
  Synthetic oligonucleotide
aggatggacgacgcagacagactcatgaaggccaacaacctgtacatgagggaagcccgg

SEQ ID NO: 25443 - DNA, 60 bp, Artificial
  Synthetic oligonucleotide
tttggcacctcgacactggtcccggctgggagcactgagtacatcccacgatactacccc

SEQ ID NO: 25444 - DNA, 60 bp, Artificial
  Synthetic oligonucleotide
ttggtttgacgaacgtatcggacagaacacaggactggctactaccagaaccatggaacc

SEQ ID NO: 25445 - DNA, 60 bp, Artificial
  Synthetic oligonucleotide
gagactgggaaaagatgacggaattctcagacatcttcgaagacctaccaatagatacca

SEQ ID NO: 25446 - DNA, 60 bp, Artificial
  Synthetic oligonucleotide
acacccctagacacttcagagctgtttccacacttggcagagttcgtaggatcaggggca

SEQ ID NO: 25447 - DNA, 60 bp, Artificial
  Synthetic oligonucleotide
gataccaaactagaggtgacatcagagttcctacagaggctaaatctacgaggagagcgg

SEQ ID NO: 25448 - DNA, 60 bp, Artificial
  Synthetic oligonucleotide
gatgacggaattctcagacatcttcgaagacctaccaatagataccaaactagaggtgac

SEQ ID NO: 25449 - DNA, 60 bp, Artificial
  Synthetic oligonucleotide
gacacttcagagctgtttccacacttggcagagttcgtaggatcaggggcatttggcacc

SEQ ID NO: 25450 - DNA, 60 bp, Artificial
  Synthetic oligonucleotide
tacgaggagagcggaaacaaccaaacgtcaacaagcaccaccttagaacaaaggggctaa

SEQ ID NO: 25451 - DNA, 60 bp, Artificial
  Synthetic oligonucleotide
tggacagcccgggggggacgaagggtggccatccctgacaacaaccctcagcgagctcct

SEQ ID NO: 25452 - DNA, 60 bp, Artificial
  Synthetic oligonucleotide
agggcaccacgtttaggcagttcagggacaccatagtggaacaacaatacgggtccggaa

SEQ ID NO: 25453 - DNA, 60 bp, Artificial
  Synthetic oligonucleotide
taggcagttcagggacaccatagtggaacaacaatacgggtccggaaccagtcaggggca

SEQ ID NO: 25454 - DNA, 60 bp, Artificial
  Synthetic oligonucleotide
tctcctgcgggctattattcccgaaggccgagaggtacgagaagaaggcctggctgacca

SEQ ID NO: 25455 - DNA, 56 bp, Artificial
  Synthetic oligonucleotide
gctgacaacatttacatctacatggataggacatggttcagcatagacctagaaaa

SEQ ID NO: 25456 - DNA, 59 bp, Artificial
  Synthetic oligonucleotide
ggggacgaagggtggccatccctgacaacaaccctcagcgagctcctgaacccagctga

SEQ ID NO: 25457 - DNA, 61 bp, Artificial
  Synthetic oligonucleotide
tggccagcgacaaccagaaactacagaagctcctacaagactactggtacctctcctgcgg

SEQ ID NO: 25458 - DNA, 60 bp, Artificial
  Synthetic oligonucleotide
tagaggtgacatcagagttcctacagaggctaaatctacgaggagagcggaaacaaccaa

SEQ ID NO: 25459 - DNA, 60 bp, Artificial
  Synthetic oligonucleotide
tacatgagggaagcccggtctgcactggaagacgtccacaactccctactagccctgtcg

SEQ ID NO: 25460 - DNA, 60 bp, Artificial
  Synthetic oligonucleotide
atagggcatgagaaggatatcaggcagaacgcagtggcattgttagaccagtcacggcgc

SEQ ID NO: 25461 - DNA, 60 bp, Artificial
  Synthetic oligonucleotide
ggcatgagaaggatatcaggcagaacgcagtggcattgttagaccagtcacggcgcgata

SEQ ID NO: 25462 - DNA, 56 bp, Artificial
  Synthetic oligonucleotide
aaaagagattaggcagaacgcagtggcattgttagaccagtcacgacgtgacatgt

SEQ ID NO: 25463 - DNA, 60 bp, Artificial
  Synthetic oligonucleotide
agggcatgagaaggatatcaggcagaacgcagtggcattgttagaccagtcacggcgcga

SEQ ID NO: 25464 - DNA, 60 bp, Artificial
  Synthetic oligonucleotide
gggcatgagaaggatatcaggcagaacgcagtggcattgttagaccagtcacggcgcgat

SEQ ID NO: 25465 - DNA, 56 bp, Artificial
  Synthetic oligonucleotide
aaagagattaggcagaacgcagtggcattgttagaccagtcacgacgtgacatgtt

SEQ ID NO: 25466 - DNA, 57 bp, Artificial
  Synthetic oligonucleotide
aaaagagattaggcagaacgcagtggcattgttagaccagtcacgacgtgacatgtt

SEQ ID NO: 25467 - DNA, 60 bp, Artificial
  Synthetic oligonucleotide
cagacccagaccagcgaaccggaagggagcagctatcgaatgatgagcttatcaagaagc

SEQ ID NO: 25468 - DNA, 51 bp, Artificial
  Synthetic oligonucleotide
taatcgtccctggatggcccacactgatgcttgagatagactttgtagggg

SEQ ID NO: 25469 - DNA, 50 bp, Artificial
  Synthetic oligonucleotide
taatcgtccctggatggcccacactgatgcttgagatagactttgtaggg

SEQ ID NO: 25470 - DNA, 50 bp, Artificial
  Synthetic oligonucleotide
aatcgtccctggatggcccacactgatgcttgagatagactttgtagggg

SEQ ID NO: 25471 - DNA, 60 bp, Artificial
  Synthetic oligonucleotide
gagcctggtcgactccctggaggacgaagaagatccccagacactacgacgggaacgatc

SEQ ID NO: 25472 - DNA, 60 bp, Artificial
  Synthetic oligonucleotide
agcctggtcgactccctggaggacgaagaagatccccagacactacgacgggaacgatcg

SEQ ID NO: 25473 - DNA, 60 bp, Artificial
  Synthetic oligonucleotide
ctggtagactctctggaggacgaagaagatccccagacactacgacgggcgcggtcggga

SEQ ID NO: 25474 - DNA, 60 bp, Artificial
  Synthetic oligonucleotide
tggtagactctctggaggacgaagaagatccccagacactacgacgggcgcggtcgggat

SEQ ID NO: 25475 - DNA, 60 bp, Artificial
  Synthetic oligonucleotide
taataaatctctgtgtttccttgccagcctccttcgcgaggaggagacgcctcggccggt

SEQ ID NO: 25476 - DNA, 59 bp, Artificial
  Synthetic oligonucleotide
taataagtctttgtgtttccttaccagcctccttcgcgaggaggagacgcctcggccgg

SEQ ID NO: 25477 - DNA, 61 bp, Artificial
  Synthetic oligonucleotide
cttaataagtctttgtgtttccttaccagcctccttcgcgaggaggagacgcctcggccgg

SEQ ID NO: 25478 - DNA, 60 bp, Artificial
  Synthetic oligonucleotide
ttaataagtctttgtgtttccttaccagcctccttcgcgaggaggagacgcctcggccgg

SEQ ID NO: 25479 - DNA, 60 bp, Artificial
  Synthetic oligonucleotide
atcgtccctggatggcccacactgatgcttgagatagactttgtaggagggacttcacgg

SEQ ID NO: 25480 - DNA, 60 bp, Artificial
  Synthetic oligonucleotide
tcgtccctggatggcccacactgatgcttgagatagactttgtaggagggacttcacgga

SEQ ID NO: 25481 - DNA, 60 bp, Artificial
  Synthetic oligonucleotide
gatggcccacactgatgcttgagatagactttgtaggagggacttcacggaaccagttcc

SEQ ID NO: 25482 - DNA, 60 bp, Artificial
  Synthetic oligonucleotide
tacttaataagtctttgtgtttccttaccagcctccttcgcgaggaggagacgcctcggc

SEQ ID NO: 25483 - DNA, 59 bp, Artificial
  Synthetic oligonucleotide
acttaataagtctttgtgtttccttaccagcctccttcgcgaggaggagacgcctcggc

SEQ ID NO: 25484 - DNA, 60 bp, Artificial
  Synthetic oligonucleotide
cttaataagtctttgtgtttccttaccagcctccttcgcgaggaggagacgcctcggccg

SEQ ID NO: 25485 - DNA, 60 bp, Artificial
  Synthetic oligonucleotide
atcgagcctggtcgactccctggaggacgaagaagatccccagacactacgacgggaacg

SEQ ID NO: 25486 - DNA, 60 bp, Artificial
  Synthetic oligonucleotide
cagaacgcagtggcattgttagaccagtcacggcgcgatatgtttcacacagtaacgcct

SEQ ID NO: 25487 - DNA, 60 bp, Artificial
  Synthetic oligonucleotide
cgagtctggtagactctctggaggacgaagaagatccccagacactacgacgggcgcggt

SEQ ID NO: 25488 - DNA, 60 bp, Artificial
  Synthetic oligonucleotide
tcgagcctggtcgactccctggaggacgaagaagatccccagacactacgacgggaacga

SEQ ID NO: 25489 - DNA, 60 bp, Artificial
  Synthetic oligonucleotide
ggcagaacgcagtggcattgttagaccagtcacggcgcgatatgtttcacacagtaacgc

SEQ ID NO: 25490 - DNA, 55 bp, Artificial
  Synthetic oligonucleotide
aagagattaggcagaacgcagtggcattgttagaccagtcacgacgtgacatgtt

SEQ ID NO: 25491 - DNA, 60 bp, Artificial
  Synthetic oligonucleotide
gcagaacgcagtggcattgttagaccagtcacggcgcgatatgtttcacacagtaacgcc

SEQ ID NO: 25492 - DNA, 61 bp, Artificial
  Synthetic oligonucleotide
ggcagaacgcagtggcattgttagaccagtcacggcgcgatatgtttcacacagtaacgcc

SEQ ID NO: 25493 - DNA, 60 bp, Artificial
  Synthetic oligonucleotide
gagtctggtagactctctggaggacgaagaagatccccagacactacgacgggcgcggtc

SEQ ID NO: 25494 - DNA, 60 bp, Artificial
  Synthetic oligonucleotide
cgagcctggtcgactccctggaggacgaagaagatccccagacactacgacgggaacgat

SEQ ID NO: 25495 - DNA, 60 bp, Artificial
  Synthetic oligonucleotide
ctggatggcccacactgatgcttgagatagactttgtaggagggacttcacggaaccagt

SEQ ID NO: 25496 - DNA, 60 bp, Artificial
  Synthetic oligonucleotide
cctggatggcccacactgatgcttgagatagactttgtaggagggacttcacggaatcag

SEQ ID NO: 25497 - DNA, 60 bp, Artificial
  Synthetic oligonucleotide
cctggatggcccacactgatgcttgagatagactttgtaggagggacttcacggaaccag

SEQ ID NO: 25498 - DNA, 60 bp, Artificial
  Synthetic oligonucleotide
ccctggatggcccacactgatgcttgagatagactttgtaggagggacttcacggaacca

SEQ ID NO: 25499 - DNA, 60 bp, Artificial
  Synthetic oligonucleotide
ataaatctctgtgtttccttgccagcctccttcgcgaggaggagacgcctcggccggtgg

SEQ ID NO: 25500 - DNA, 60 bp, Artificial
  Synthetic oligonucleotide
tccctggatggcccacactgatgcttgagatagactttgtaggagggacttcacggaacc

SEQ ID NO: 25501 - DNA, 60 bp, Artificial
  Synthetic oligonucleotide
gtccctggatggcccacactgatgcttgagatagactttgtaggagggacttcacggaac

SEQ ID NO: 25502 - DNA, 60 bp, Artificial
  Synthetic oligonucleotide
cgtccctggatggcccacactgatgcttgagatagactttgtaggagggacttcacggaa

SEQ ID NO: 25503 - DNA, 61 bp, Artificial
  Synthetic oligonucleotide
ggatggcccacactgatgcttgagatagactttgtaggagggacttcacggaaccagttcc

SEQ ID NO: 25504 - DNA, 60 bp, Artificial
  Synthetic oligonucleotide
ggatggcccacactgatgcttgagatagactttgtaggagggacttcacggaaccagttc

SEQ ID NO: 25505 - DNA, 60 bp, Artificial
  Synthetic oligonucleotide
aataaatctctgtgtttccttgccagcctccttcgcgaggaggagacgcctcggccggtg

SEQ ID NO: 25506 - DNA, 60 bp, Artificial
  Synthetic oligonucleotide
ccctggatggcccacactgatgcttgagatagactttgtaggagggacttcacggaatca

SEQ ID NO: 25507 - DNA, 60 bp, Artificial
  Synthetic oligonucleotide
gtcctgtatatataccccacagtcgatcccgccgttgctctcgacctgtgccacctgcca

SEQ ID NO: 25508 - DNA, 60 bp, Artificial
  Synthetic oligonucleotide
tgttgccctcccatcctgcacctccgcgcatttatccccagctcccaagtgccccgacaa

SEQ ID NO: 25509 - DNA, 61 bp, Artificial
  Synthetic oligonucleotide
ccgaccagaactgcaggccccaatctgtcgtcagttggatcagatgttcaattgcgggtac

SEQ ID NO: 25510 - DNA, 60 bp, Artificial
  Synthetic oligonucleotide
agtctggtagactctctggaggacgaagaagatccccagacactacgacgggcgcggtcg

SEQ ID NO: 25511 - DNA, 60 bp, Artificial
  Synthetic oligonucleotide
tatcggcttcggaacattggtgttggccctctcggcccagacattcgatcttcagggcct

SEQ ID NO: 25512 - DNA, 60 bp, Artificial
  Synthetic oligonucleotide
tcggcttcggaacattggtgttggccctctcggcccagacattcgatcttcagggcctta

SEQ ID NO: 25513 - DNA, 60 bp, Artificial
  Synthetic oligonucleotide
tttggcgctggcaaaagattggagtgaccgtattgaacagtggttaagtgaaccttgtaa

SEQ ID NO: 25514 - DNA, 60 bp, Artificial
  Synthetic oligonucleotide
tttggcgctggcaaaagattggagtgaccgtattgagcagtggttaagtgaaccttgtaa

SEQ ID NO: 25515 - DNA, 60 bp, Artificial
  Synthetic oligonucleotide
ggggccctgcaacaaacagggattacctacggcagcgccaagtggcattgggcaatatgg

SEQ ID NO: 25516 - DNA, 60 bp, Artificial
  Synthetic oligonucleotide
agtctccacgggggccctgcaacaaacagggattacctacggcagcgccaagtggcattg

SEQ ID NO: 25517 - DNA, 60 bp, Artificial
  Synthetic oligonucleotide
aacatctgaggaaaagctacggaagaaatcatcattctatcagtcttatctcaggcgaac

SEQ ID NO: 25518 - DNA, 60 bp, Artificial
  Synthetic oligonucleotide
tatggaaacaaaagaatcaaaggccatacgtcaacatgctgaatctgcaggttgcagcat

SEQ ID NO: 25519 - DNA, 60 bp, Artificial
  Synthetic oligonucleotide
atctgaagagaaattacggaaaaaatcatcattctatcagtcttatctcaggcgaacaca

SEQ ID NO: 25520 - DNA, 60 bp, Artificial
  Synthetic oligonucleotide
catctgaggaaaagctacggaagaaatcatcattctatcagtcttatctcaggcgaaccc

SEQ ID NO: 25521 - DNA, 60 bp, Artificial
  Synthetic oligonucleotide
tgttagaatggggtaaagaaatggtggatcatttccatcttggtgatgatatggatcctg

SEQ ID NO: 25522 - DNA, 60 bp, Artificial
  Synthetic oligonucleotide
caaggtagccaaagtactttctgcttcacagattgaatttaaagctgaactagatgaaat

SEQ ID NO: 25523 - DNA, 60 bp, Artificial
  Synthetic oligonucleotide
aaggtagccaaagtactttctgcttcacagattgaatttaaagctgaactagatgaaatg

SEQ ID NO: 25524 - DNA, 60 bp, Artificial
  Synthetic oligonucleotide
ggtagccaaagtactttctgcttcacagattgaatttaaagctgaactagatgaaatgtt

SEQ ID NO: 25525 - DNA, 60 bp, Artificial
  Synthetic oligonucleotide
cagaaaagacagtggaagccgacccagatgatgttaacaaaagcacactacagagtagac

SEQ ID NO: 25526 - DNA, 60 bp, Artificial
  Synthetic oligonucleotide
ccgaaagagcagtggaggtggaccccgatgatgttaacaaaagcacactacagagtagac

SEQ ID NO: 25527 - DNA, 60 bp, Artificial
  Synthetic oligonucleotide
ttgtgtccaggaaaaagatggatactaagcctactgacccgactgggattgagcctgatg

SEQ ID NO: 25528 - DNA, 60 bp, Artificial
  Synthetic oligonucleotide
ccacttgaataacttgaagaccttgaacgagcttattgatacccagcctttcacttgtcg

SEQ ID NO: 25529 - DNA, 60 bp, Artificial
  Synthetic oligonucleotide
agtagtgtgctccacttgaataacttgaagaccttgaacgagcttattgatacccagcct

SEQ ID NO: 25530 - DNA, 60 bp, Artificial
  Synthetic oligonucleotide
tttgacgatcgggatgtatagggtccgacggtggtcaatggaccccaactgcctcgagaa

SEQ ID NO: 25531 - DNA, 60 bp, Artificial
  Synthetic oligonucleotide
cgatcgggatgtatagggtccgacggtggtcaatggaccccaactgcctcgagaaggcaa

SEQ ID NO: 25532 - DNA, 60 bp, Artificial
  Synthetic oligonucleotide
tcacaagtgcagctagagagttcgtgatccaatttggtatacgcttagcttaatatccat

SEQ ID NO: 25533 - DNA, 60 bp, Artificial
  Synthetic oligonucleotide
cacaagtgcagctagagagttcgtgatccaatttggtatacgcttagcttaatatccata

SEQ ID NO: 25534 - DNA, 57 bp, Artificial
  Synthetic oligonucleotide
tggccgaagagaacggtattacctggagggacggagtggaaatgtacttagcgtttt

SEQ ID NO: 25535 - DNA, 60 bp, Artificial
  Synthetic oligonucleotide
tggccgaagagaacggtattacctggagggacggagtggaaatgtacttagcgtttttgc

SEQ ID NO: 25536 - DNA, 60 bp, Artificial
  Synthetic oligonucleotide
gcgtttttgcctggtgcagagatgtttatgtctacttttgagttctaccctttgacgatc

SEQ ID NO: 25537 - DNA, 60 bp, Artificial
  Synthetic oligonucleotide
gcctggtgcagagatgtttatgtctacttttgagttctaccctttgacgatcgggatgta

SEQ ID NO: 25538 - DNA, 60 bp, Artificial
  Synthetic oligonucleotide
tacatcaacgcagcgaaggtcaaagcttacctcagaaggtcaagagaactcctggttttc

SEQ ID NO: 25539 - DNA, 60 bp, Artificial
  Synthetic oligonucleotide
cgcagcgaaggtcaaagcttacctcagaaggtcaagagaactcctggttttccttactct

SEQ ID NO: 25540 - DNA, 60 bp, Artificial
  Synthetic oligonucleotide
tcgaaagtgtatacggccaacaattggtggccgctgtcgtccgagtcttctacatcaacg

SEQ ID NO: 25541 - DNA, 60 bp, Artificial
  Synthetic oligonucleotide
gccaacaattggtggccgctgtcgtccgagtcttctacatcaacgcagcgaaggtcaaag

SEQ ID NO: 25542 - DNA, 60 bp, Artificial
  Synthetic oligonucleotide
caccggatttcgggttacttctcgagatgggccttgtatctaatagcgactaaccctgag

SEQ ID NO: 25543 - DNA, 60 bp, Artificial
  Synthetic oligonucleotide
ccggatttcgggttacttctcgagatgggccttgtatctaatagcgactaaccctgagtc

SEQ ID NO: 25544 - DNA, 60 bp, Artificial
  Synthetic oligonucleotide
cctggttttccttactcttggtggtgttaaccttgcggtacttaacacacatttccccgg

SEQ ID NO: 25545 - DNA, 60 bp, Artificial
  Synthetic oligonucleotide
tcttggtggtgttaaccttgcggtacttaacacacatttccccggaacccagtccattcc

SEQ ID NO: 25546 - DNA, 60 bp, Artificial
  Synthetic oligonucleotide
taaccctgagtcagatatcgctctggtccgatcaacttttgtcgtgccactggccgaaga

SEQ ID NO: 25547 - DNA, 60 bp, Artificial
  Synthetic oligonucleotide
gagtcagatatcgctctggtccgatcaacttttgtcgtgccactggccgaagagaacggt

SEQ ID NO: 25548 - DNA, 60 bp, Artificial
  Synthetic oligonucleotide
caagggttggggagaatgtgttgttgatcagtttagcacatttgatcaggaagcacagct

SEQ ID NO: 25549 - DNA, 60 bp, Artificial
  Synthetic oligonucleotide
ataagagctcaaagtcaagggttgttattgttcaaggaaatgtggagggcacagcagagg

SEQ ID NO: 25550 - DNA, 60 bp, Artificial
  Synthetic oligonucleotide
tgaaatattctgggacaaacaaacatacatccttgagacttcaataacacaaaaacatgt

SEQ ID NO: 25551 - DNA, 60 bp, Artificial
  Synthetic oligonucleotide
gtatgaaaaggaccctgatgaccttaacaaaagggcattgagtgaccgggaaagtgtcgc

SEQ ID NO: 25552 - DNA, 60 bp, Artificial
  Synthetic oligonucleotide
gagggatactacctccaagcattatagcaagtctcacagattttgcatctgccagaggca

SEQ ID NO: 25553 - DNA, 60 bp, Artificial
  Synthetic oligonucleotide
gctgcctttggcagatgcaaaatctgtgagacttgctataatgcttggaggtagtatccc

SEQ ID NO: 25554 - DNA, 60 bp, Artificial
  Synthetic oligonucleotide
gacatgactttcaggaggcttgatagcatgataagagtgaagctcatagaagagactgca

SEQ ID NO: 25555 - DNA, 60 bp, Artificial
  Synthetic oligonucleotide
gaaggcttgacagcatgataagagtgaagctcatagaagagactgcaatcaatgagaatc

SEQ ID NO: 25556 - DNA, 60 bp, Artificial
  Synthetic oligonucleotide
gcttgacagcatgataagagtgaagctcatagaagagactgcaatcaatgagaatcttgc

SEQ ID NO: 25557 - DNA, 60 bp, Artificial
  Synthetic oligonucleotide
cgggctgcctttggcagatgcaaaatctgtgagacttgctataatgcttggaggtagtat

SEQ ID NO: 25558 - DNA, 60 bp, Artificial
  Synthetic oligonucleotide
cagatgttgagtttgaagaagaccaaaaccaggtcgcattcaactttaagactttctgtc

SEQ ID NO: 25559 - DNA, 60 bp, Artificial
  Synthetic oligonucleotide
aggagctagggattgaaccgactaagtacaacactaaggaagctctggggaaggtttgca

SEQ ID NO: 25560 - DNA, 60 bp, Artificial
  Synthetic oligonucleotide
aggaaaagaatatgccaagatacttagttcttgcaatcccaatgctaagggaagcattgc

SEQ ID NO: 25561 - DNA, 60 bp, Artificial
  Synthetic oligonucleotide
agggaaagaatatgctaagatactcagttcttgcaatcccaatgctaagggaagcattgc

SEQ ID NO: 25562 - DNA, 60 bp, Artificial
  Synthetic oligonucleotide
gttgagtttgaagaagaccaaaaccaggtcgcattcaactttaagactttctgtcaggaa

SEQ ID NO: 25563 - DNA, 60 bp, Artificial
  Synthetic oligonucleotide
ttctttatcgtgaccttaccaaaagtaaaatcactttggttcacaactttcataatgcct

SEQ ID NO: 25564 - DNA, 60 bp, Artificial
  Synthetic oligonucleotide
tgcagtctcttctatgagcttcactcttatcatgctatcaagcctcctgaaagtcatatc

SEQ ID NO: 25565 - DNA, 60 bp, Artificial
  Synthetic oligonucleotide
atgcttcccttagcattgggattgcaagaactaagtatcttggcatattctttccctttg

SEQ ID NO: 25566 - DNA, 60 bp, Artificial
  Synthetic oligonucleotide
ttgtgggtgggtttagctccaggctaccttaagtagcctttttttgtatatatggatgta

SEQ ID NO: 25567 - DNA, 60 bp, Artificial
  Synthetic oligonucleotide
ggccaaacagcagattggtatacaattggagtgtatgtgatagggttcacacttcctatc

SEQ ID NO: 25568 - DNA, 60 bp, Artificial
  Synthetic oligonucleotide
cgccagaggtatggacagctgactgcagaagagtggatgacatctaagttagacgcagtc

SEQ ID NO: 25569 - DNA, 60 bp, Artificial
  Synthetic oligonucleotide
gagggtgggtcagttaatccgttgtgggtgggtttagtttcaagctgccttaagtagctt

SEQ ID NO: 25570 - DNA, 60 bp, Artificial
  Synthetic oligonucleotide
gtgaaatgggtgtctgctttggaacaatccctgtggccaatcccgatgatgctgcccagg

SEQ ID NO: 25571 - DNA, 60 bp, Artificial
  Synthetic oligonucleotide
gatgctctgtattggaggtcctctgcctctcttgtctagcataacaggtctggcaccaat

SEQ ID NO: 25572 - DNA, 60 bp, Artificial
  Synthetic oligonucleotide
cagctgtaaagctattgagtgaaagcaaccctggaacagccagctctatctcactcaaga

SEQ ID NO: 25573 - DNA, 60 bp, Artificial
  Synthetic oligonucleotide
gggacatcaacaaaccaggccgttcggggatagcacttgttgcaacaggccttgccaagc

SEQ ID NO: 25574 - DNA, 60 bp, Artificial
  Synthetic oligonucleotide
tctcaaagaaacacgtgccgcttacgcccacagtgttaccttgagtgttagcaaaatgga

SEQ ID NO: 25575 - DNA, 60 bp, Artificial
  Synthetic oligonucleotide
gtggtcaaacagcagattggtatacaattggagtgtatgttataggctttacacttccta

SEQ ID NO: 25576 - DNA, 60 bp, Artificial
  Synthetic oligonucleotide
aaccaagtggtcaaacagcagattggtatacaattggagtgtatgttataggctttacac

SEQ ID NO: 25577 - DNA, 60 bp, Artificial
  Synthetic oligonucleotide
ggcgcactcaatcaatgggaatacaactggaccaaaggattatcctgctttttatgatgg

SEQ ID NO: 25578 - DNA, 58 bp, Artificial
  Synthetic oligonucleotide
gctgcttgatggtgaaagacttgctgatagaagaattgccgaactattctccacaaaa

SEQ ID NO: 25579 - DNA, 60 bp, Artificial
  Synthetic oligonucleotide
gctgcttgatggtgaaagacttgctgatagaagaattgccgaactattctccacaaaaac

SEQ ID NO: 25580 - DNA, 60 bp, Artificial
  Synthetic oligonucleotide
gtgcggcagcctggtgatgggaactgcttctaccatagcatagctgagttaaccatgccc

SEQ ID NO: 25581 - DNA, 60 bp, Artificial
  Synthetic oligonucleotide
gtgcggcagcctggtgatgggaactgcttctaccacagcatagctgagctaaccatgccc

SEQ ID NO: 25582 - DNA, 60 bp, Artificial
  Synthetic oligonucleotide
gtgcggcagcctggtgatgggaactgcttctatcacagtatagctgaattaaccatgccc

SEQ ID NO: 25583 - DNA, 60 bp, Artificial
  Synthetic oligonucleotide
aagtatcatgcggaccaaaatcgatacagtttcatgcttgcttcaatcagcatatgtctt

SEQ ID NO: 25584 - DNA, 60 bp, Artificial
  Synthetic oligonucleotide
gtgcttgacattttcagataaaacatattgcaccaacttgaatgctataactcctattat

SEQ ID NO: 25585 - DNA, 60 bp, Artificial
  Synthetic oligonucleotide
gaaggtatagctaatcagttgaagggcttaggagttatatctgttttggatatcccgatg

SEQ ID NO: 25586 - DNA, 58 bp, Artificial
  Synthetic oligonucleotide
gattcgttattattcgttggagcatcggggacagactttgctgcatgtatagatgaga

SEQ ID NO: 25587 - DNA, 60 bp, Artificial
  Synthetic oligonucleotide
tgccagatgaaatatcaggttcactaaagtatatcgacagcttagagacgtatcatgagc

SEQ ID NO: 25588 - DNA, 66 bp, Artificial
  Synthetic oligonucleotide
ctacacaggccagaaagtgaagtttaataaggatttaaacttggcattattggtattacataaagc

SEQ ID NO: 25589 - DNA, 60 bp, Artificial
  Synthetic oligonucleotide
atacatcagagagaaagatgaaagatgcaagacctggatgtgtagagtccgagatgaagg

SEQ ID NO: 25590 - DNA, 60 bp, Artificial
  Synthetic oligonucleotide
cccgcatataagtacataactgtagaaggtgtcgaaactattgaaggaatcgaaaacgcc

SEQ ID NO: 25591 - DNA, 60 bp, Artificial
  Synthetic oligonucleotide
cttatattacacttgatcaaacatgtgagcatcttaaagtatcatgcggaccaaaatcga

SEQ ID NO: 25592 - DNA, 60 bp, Artificial
  Synthetic oligonucleotide
agctataggtttcaaaataaattcaagagaaggcaactatctaatggatgtgatagggta

SEQ ID NO: 25593 - DNA, 60 bp, Artificial
  Synthetic oligonucleotide
caaaagagaggaccagcacttggggttgtgaagagttcggttgcttagcagtcagtgatg

SEQ ID NO: 25594 - DNA, 60 bp, Artificial
  Synthetic oligonucleotide
gcggaccaaaatcgatacagtttcatgcttgcttcaatcagcatatgtcttgtgtgcgat

SEQ ID NO: 25595 - DNA, 60 bp, Artificial
  Synthetic oligonucleotide
agatcaggatgtaggtcatttctgtcttagccctagatgcactacaatacgttatccaat

SEQ ID NO: 25596 - DNA, 60 bp, Artificial
  Synthetic oligonucleotide
gcttgcttcaatcagcatatgtcttgtgtgcgattcttacatagaacgatactaccaggg

SEQ ID NO: 25597 - DNA, 60 bp, Artificial
  Synthetic oligonucleotide
catatgtcttgtgtgcgattcttacatagaacaatactaccaggatcgattgctaattct

SEQ ID NO: 25598 - DNA, 60 bp, Artificial
  Synthetic oligonucleotide
gagaaagatgaaagatgcaagacttggatgtgtagagtccgagatgaagggttccaggtg

SEQ ID NO: 25599 - DNA, 60 bp, Artificial
  Synthetic oligonucleotide
ggaccagcacttggggttgtgaagagtttggttgcttagcagtcagtgatggttgtgtat

SEQ ID NO: 25600 - DNA, 60 bp, Artificial
  Synthetic oligonucleotide
gagttggctgtttacaggaaaaccactgaagaactcactacagtagaactgtgcttgaca

SEQ ID NO: 25601 - DNA, 60 bp, Artificial
  Synthetic oligonucleotide
actgctcagatccgcttgcaaactgacaatacaaaccactttgaggttgctgggaccaca

SEQ ID NO: 25602 - DNA, 60 bp, Artificial
  Synthetic oligonucleotide
tcttgcataagcagagcgatggcttgaggagttgtagaataaaagatactggaaactgca

SEQ ID NO: 25603 - DNA, 60 bp, Artificial
  Synthetic oligonucleotide
tggaccattgtcttatgcgaaaatggcaactattactactctgaggtccacaaagactat

SEQ ID NO: 25604 - DNA, 60 bp, Artificial
  Synthetic oligonucleotide
ccatctgtatacatgatgccaaatgtcagtatctaccaatccaattcggaaaggagtcac

SEQ ID NO: 25605 - DNA, 60 bp, Artificial
  Synthetic oligonucleotide
cggaaaggagtcactattgtatagctggctctcattgccttgagaaatatgaagtggtag

SEQ ID NO: 25606 - DNA, 60 bp, Artificial
  Synthetic oligonucleotide
caaagactatgataaagatcaggatgtaggtcatttctgtcttagccctagatgcactac

SEQ ID NO: 25607 - DNA, 60 bp, Artificial
  Synthetic oligonucleotide
gggaccacagtaaaatcaggttggttcaaaagtacaacttatatcacacttgatcaaaca

SEQ ID NO: 25608 - DNA, 60 bp, Artificial
  Synthetic oligonucleotide
caccagggaacagtgacagttatagattataaaaagattctaggcactataaagatgaag

SEQ ID NO: 25609 - DNA, 60 bp, Artificial
  Synthetic oligonucleotide
agcatcttaaagtatcatgcggaccaaaatcgatacagtttcatgcttgcttcaatcagc

SEQ ID NO: 25610 - DNA, 60 bp, Artificial
  Synthetic oligonucleotide
tcttgcagagtccttcaagttatcgtttagaagagcaccaggggacagtgacagttatag

SEQ ID NO: 25611 - DNA, 60 bp, Artificial
  Synthetic oligonucleotide
catatgtatgttacttattaatgcctatcttcaccccaatagcttttatctatggatggg

SEQ ID NO: 25612 - DNA, 61 bp, Artificial
  Synthetic oligonucleotide
ccttccatgatagaatattgatcacaccagatgaacataagtatgcattgaagattgtatg

SEQ ID NO: 25613 - DNA, 60 bp, Artificial
  Synthetic oligonucleotide
gcttggtttaattttggcatacttcttcaaaaaatatcaacataaatttctagactttta

SEQ ID NO: 25614 - DNA, 60 bp, Artificial
  Synthetic oligonucleotide
tctggtttgacacactggggcgactttactaataaatgtagacagtgcacatgcggtcag

SEQ ID NO: 25615 - DNA, 60 bp, Artificial
  Synthetic oligonucleotide
ttatgcgatgtattgtgaggaatgcgatatgtatcatgagaaatctggtttgacacactg

SEQ ID NO: 25616 - DNA, 60 bp, Artificial
  Synthetic oligonucleotide
atgtgcaaatcaaaaggaccagcttctatcctatctataatgactgcaattctcatacta

SEQ ID NO: 25617 - DNA, 60 bp, Artificial
  Synthetic oligonucleotide
atcaggcttgtaaattcttgcagagtccttcaagttatcgtttagaagagcaccagggga

SEQ ID NO: 25618 - DNA, 60 bp, Artificial
  Synthetic oligonucleotide
ggaccagcttctatcctatctataatgactgcaattctcatactaacatttgtcactcct

SEQ ID NO: 25619 - DNA, 60 bp, Artificial
  Synthetic oligonucleotide
gctaataacatagctatgagaaaatggttggtcgcagattggcatgactgtaggccccaa

SEQ ID NO: 25620 - DNA, 60 bp, Artificial
  Synthetic oligonucleotide
ccactttgaggttgctgggaccacagtaaaatcaggttggttcaaaagtacaacttatat

SEQ ID NO: 25621 - DNA, 60 bp, Artificial
  Synthetic oligonucleotide
gacaatacaaaccactttgaggttgctgggaccacagtaaaatcaggttggttcaaaagt

SEQ ID NO: 25622 - DNA, 60 bp, Artificial
  Synthetic oligonucleotide
gatcacaccagatgaacataagtatgcattgaagattgtatgccatgataaaccaaaagt

SEQ ID NO: 25623 - DNA, 60 bp, Artificial
  Synthetic oligonucleotide
tgtatttcacccaggtcaaaggcaaaattcgaaaatattatagcatgtggagagcatgca

SEQ ID NO: 25624 - DNA, 60 bp, Artificial
  Synthetic oligonucleotide
ccagagccaacagaatcaacacctcaagctaggtcacacagaaatgatcagtataacttc

SEQ ID NO: 25625 - DNA, 60 bp, Artificial
  Synthetic oligonucleotide
gccacatttgaactcgatgaagattgggaagattttaaatataagccagagccaacagaa

SEQ ID NO: 25626 - DNA, 60 bp, Artificial
  Synthetic oligonucleotide
cataaagcatttagaggcactggaactgcatatgtcgcggaagctatggctcggaaagat

SEQ ID NO: 25627 - DNA, 60 bp, Artificial
  Synthetic oligonucleotide
agagcatgcaaatccatctgtatacatgatgccaaatgtcagtatctaccaatccaattc

SEQ ID NO: 25628 - DNA, 60 bp, Artificial
  Synthetic oligonucleotide
cgtattacaaatgcaggcaaatagacgggcgtattcaggaaagcaatatgatgcatattg

SEQ ID NO: 25629 - DNA, 60 bp, Artificial
  Synthetic oligonucleotide
aaacattagttaattgtacattttctaaagaatacgcatggagagactttttaaatgaag

SEQ ID NO: 25630 - DNA, 60 bp, Artificial
  Synthetic oligonucleotide
ggcatatcaacaaccattttgagcttaccaactaagaaatccttctccatgtatagcttg

SEQ ID NO: 25631 - DNA, 60 bp, Artificial
  Synthetic oligonucleotide
aggcatatcaacaaccattttgagcttaccaactaagaaatccttctccatgtatagctt

SEQ ID NO: 25632 - DNA, 60 bp, Artificial
  Synthetic oligonucleotide
aaggaattccatctatagtgatttgaggatgtccaaatgatgaccctgcaaaatccccta

SEQ ID NO: 25633 - DNA, 60 bp, Artificial
  Synthetic oligonucleotide
aaggaattccatctatagtgatttgagggtgtccaaatgatgaccctgcaaaatccccta

SEQ ID NO: 25634 - DNA, 60 bp, Artificial
  Synthetic oligonucleotide
cccataagctagaaatagaagtatcagagtggtgcttattctcatcgtgtgcacttttgt

SEQ ID NO: 25635 - DNA, 60 bp, Artificial
  Synthetic oligonucleotide
ggactggaacaactggaaagcttttgaattttaccttcttgaactccttttcatactgac

SEQ ID NO: 25636 - DNA, 60 bp, Artificial
  Synthetic oligonucleotide
ctgagaatgtagtatcagacgtgtaagttatattgcaatctatacctacagcacactgcg

SEQ ID NO: 25637 - DNA, 60 bp, Artificial
  Synthetic oligonucleotide
ccataagctagaaatagaagtatcagagtggtgcttattttcatcatgtgcacttttgtc

SEQ ID NO: 25638 - DNA, 60 bp, Artificial
  Synthetic oligonucleotide
tagacagtagacaagtagatagtatttcttcattcttatgaggtatttcaagaatattta

SEQ ID NO: 25639 - DNA, 60 bp, Artificial
  Synthetic oligonucleotide
gataataatctgtttgtatgggagatctgtctgaatgcctcttgcaagaatatccatcta

SEQ ID NO: 25640 - DNA, 60 bp, Artificial
  Synthetic oligonucleotide
gataataatctgtttgtatgggagatctgtctgaatgctttttacaagaatatccatcta

SEQ ID NO: 25641 - DNA, 60 bp, Artificial
  Synthetic oligonucleotide
atgtctcgcttttctaacgttttagaatctttccgtccttcaaacagctcaaacaaagag

SEQ ID NO: 25642 - DNA, 60 bp, Artificial
  Synthetic oligonucleotide
cttttctaacgttttagaatctttccgtccttcaaacagctcaaacaaagagctagtgcc

SEQ ID NO: 25643 - DNA, 60 bp, Artificial
  Synthetic oligonucleotide
cattcatcagtgtgatctttagatgctttgtcttgattacaaacacatttttctgtgcaa

SEQ ID NO: 25644 - DNA, 60 bp, Artificial
  Synthetic oligonucleotide
cagctcaaacaaagagctagtgcctgcagttaaaaaggaaaacaacagaagcattttggc

SEQ ID NO: 25645 - DNA, 60 bp, Artificial
  Synthetic oligonucleotide
aaacagtatgtttctagtggagattccagtgtactgggcacatactctagtgagtcagct

SEQ ID NO: 25646 - DNA, 60 bp, Artificial
  Synthetic oligonucleotide
gaaagccgagccacagtaggagatttcaagttcacttttgggtcaatgttgatcgggttg

SEQ ID NO: 25647 - DNA, 60 bp, Artificial
  Synthetic oligonucleotide
cttacagaaagccgagccacagtaggagatttcaagttcacttttgggtcaatgttgatc

SEQ ID NO: 25648 - DNA, 58 bp, Artificial
  Synthetic oligonucleotide
ccagatgaaccatgatatggggaatgcaaccatcaaaaacacaaaaatccatttgaag

SEQ ID NO: 25649 - DNA, 60 bp, Artificial
  Synthetic oligonucleotide
gtcaaaataccgatcacatcataccagatgctcaaagcatctttagttttccagatgaac

SEQ ID NO: 25650 - DNA, 55 bp, Artificial
  Synthetic oligonucleotide
aaaacgaaaagcatccgcagatcctgcattttaatgggaaatacggccacaacca

SEQ ID NO: 25651 - DNA, 60 bp, Artificial
  Synthetic oligonucleotide
agagaattggatatgtcaaaataccgatcacatcataccagatgcttaaagcatctttag

SEQ ID NO: 25652 - DNA, 60 bp, Artificial
  Synthetic oligonucleotide
aaaacactagagattgtctaggtaataagttctcaggaggtatgtcgtctacctttaggc

SEQ ID NO: 25653 - DNA, 58 bp, Artificial
  Synthetic oligonucleotide
aacactagagattgcctaggtaataagttctcaggaggtatgtcgtctacctttaggc

SEQ ID NO: 25654 - DNA, 60 bp, Artificial
  Synthetic oligonucleotide
cacacttacctgtgcatgttactagataatcagatactgttgtatcaatttttgcagtag

SEQ ID NO: 25655 - DNA, 60 bp, Artificial
  Synthetic oligonucleotide
gtagaaaacactagagattgtctaggtaataagttctcaggaggtatgtcgtctaccttt

SEQ ID NO: 25656 - DNA, 60 bp, Artificial
  Synthetic oligonucleotide
ttacaaacacatttttctgtgcaagagtgagttaaaaacgaaaagcatccgcagatcctg

SEQ ID NO: 25657 - DNA, 60 bp, Artificial
  Synthetic oligonucleotide
ttctgtgcaagaatgagttaaaaacgaaaagcatccgcagatcctgcattttaatgggaa

SEQ ID NO: 25658 - DNA, 60 bp, Artificial
  Synthetic oligonucleotide
tagtaaaaagatagcattcatcggtatgatctttagatgctttgtcttgattacaaacac

SEQ ID NO: 25659 - DNA, 60 bp, Artificial
  Synthetic oligonucleotide
gcttccaaagaaggaagctatccagttaaaaggtgctttaatccagtcccataagctaga

SEQ ID NO: 25660 - DNA, 60 bp, Artificial
  Synthetic oligonucleotide
ggactggaacaactggaaagcttttgaattttatcttcttgaactccttttcatactgac

SEQ ID NO: 25661 - DNA, 60 bp, Artificial
  Synthetic oligonucleotide
taggactggaacaactggaaagcttttgaattttaccttcttgaactccttttcatactg

SEQ ID NO: 25662 - DNA, 60 bp, Artificial
  Synthetic oligonucleotide
caagaggtatacttcagacacgaagaaaagcgaaactagacctagacagtagacaagtag

SEQ ID NO: 25663 - DNA, 60 bp, Artificial
  Synthetic oligonucleotide
actgtacaaatatttgcttaagcattattaaatatctagagaaaagtcatagcccttagg

SEQ ID NO: 25664 - DNA, 60 bp, Artificial
  Synthetic oligonucleotide
aacagagccaaggtcattcaatctgctgctctaattgaagcatgcaaattaatgatacct

SEQ ID NO: 25665 - DNA, 60 bp, Artificial
  Synthetic oligonucleotide
gctttgcttcagtcatgtattcatgggtcaagaacttctgcgatactcctatagctgccg

SEQ ID NO: 25666 - DNA, 60 bp, Artificial
  Synthetic oligonucleotide
gctttgcttcagttatgtattcatgggttaagaacttctgcgatactcctatagctgctg

SEQ ID NO: 25667 - DNA, 58 bp, Artificial
  Synthetic oligonucleotide
attggtcattcccaaaagagagaaatactccaaaacaatgcatgcagctcaacttaac

SEQ ID NO: 25668 - DNA, 60 bp, Artificial
  Synthetic oligonucleotide
ctaaattggtcattcccaaaagagagaaatactccaaaacaatgcatgcagctcaattta

SEQ ID NO: 25669 - DNA, 54 bp, Artificial
  Synthetic oligonucleotide
ttgagcaaagcactcatctgagtaactggaaaaatgattcactcgtaggcaatg

SEQ ID NO: 25670 - DNA, 60 bp, Artificial
  Synthetic oligonucleotide
ggaaacagtatgtttctagtggagattccagtgtcctgggcacttactctagcgagtcag

SEQ ID NO: 25671 - DNA, 60 bp, Artificial
  Synthetic oligonucleotide
agaagcttccaaagaaggaagctatccagttaaaaagtgctttaatccagtcccataagc

SEQ ID NO: 25672 - DNA, 60 bp, Artificial
  Synthetic oligonucleotide
agaagcttccaaagaaggaagctatccagttaaaaggtgctttaatccagtcccataagc

SEQ ID NO: 25673 - DNA, 60 bp, Artificial
  Synthetic oligonucleotide
atcaacaggtgcaaacggatttgatcccgatgcagggtatgtggcatttattgctgcaca

SEQ ID NO: 25674 - DNA, 60 bp, Artificial
  Synthetic oligonucleotide
aaaaaagctctccgtcaaagatacgggactatgacagcagataagtggatgtctactaag

SEQ ID NO: 25675 - DNA, 60 bp, Artificial
  Synthetic oligonucleotide
ctctccgtcaaagatacgggactatgacagcagataagtggatgtctactaagacaacag

SEQ ID NO: 25676 - DNA, 60 bp, Artificial
  Synthetic oligonucleotide
gtctactaagacaacagtaattgcaaagaccctgaagagagttgagagcttcaaatgggg

SEQ ID NO: 25677 - DNA, 60 bp, Artificial
  Synthetic oligonucleotide
caacagtaattgcaaagaccctgaagagagttgagagcttcaaatggggtaagggaggac

SEQ ID NO: 25678 - DNA, 60 bp, Artificial
  Synthetic oligonucleotide
tggcgagtggtcggtggaggtggtcaataatcattttcctggcaacaggaacaatccaat

SEQ ID NO: 25679 - DNA, 60 bp, Artificial
  Synthetic oligonucleotide
ggttagtattaaatttggcgagtggtcggtggaggtggtcaataatcattttcctggcaa

SEQ ID NO: 25680 - DNA, 60 bp, Artificial
  Synthetic oligonucleotide
cccagaaggacatcatccgctcaaccattgtgaacccaattgcagaatccaatgggatcc

SEQ ID NO: 25681 - DNA, 60 bp, Artificial
  Synthetic oligonucleotide
aagatgatgaagcccagaaggacatcatccgctcaaccattgtgaacccaattgcagaat

SEQ ID NO: 25682 - DNA, 60 bp, Artificial
  Synthetic oligonucleotide
ttgctgcacatgccggatcgtacgatctttctgctgttaggatcttcttcctcaatgctg

SEQ ID NO: 25683 - DNA, 60 bp, Artificial
  Synthetic oligonucleotide
cggatttgatcccgatgcagggtatgtggcatttattgctgcacatgccggatcgtacga

SEQ ID NO: 25684 - DNA, 60 bp, Artificial
  Synthetic oligonucleotide
ctcaatgctgccaaggccaagaatgctctctcgagaaaaccagaggggaaggttagtatt

SEQ ID NO: 25685 - DNA, 60 bp, Artificial
  Synthetic oligonucleotide
gccggatcgtacgatctttctgctgttaggatcttcttcctcaatgctgccaaggccaag

SEQ ID NO: 25686 - DNA, 60 bp, Artificial
  Synthetic oligonucleotide
ccaatgggatccactgggatagcggtgcagatgcctacctgtcattcttccctggcactg

SEQ ID NO: 25687 - DNA, 60 bp, Artificial
  Synthetic oligonucleotide
attgcagaatccaatgggatccactgggatagcggtgcagatgcctacctgtcattcttc

SEQ ID NO: 25688 - DNA, 60 bp, Artificial
  Synthetic oligonucleotide
ctgatttaacatttctacctccgtacacttatatatatgcacgtagcatatatataagtg

SEQ ID NO: 25689 - DNA, 60 bp, Artificial
  Synthetic oligonucleotide
ctgacctaacatgtctacctccgtacacttatatatatgcacgtagcatatatataagtg

SEQ ID NO: 25690 - DNA, 60 bp, Artificial
  Synthetic oligonucleotide
ctgattcaacatttctacctccgtacacttatatatatgcacgtagcatatatataagtg

SEQ ID NO: 25691 - DNA, 60 bp, Artificial
  Synthetic oligonucleotide
ctgacctaacatttctacctccgtacacttatatatatgcacgtagcatatatataagtg

SEQ ID NO: 25692 - DNA, 60 bp, Artificial
  Synthetic oligonucleotide
tggtgttatgcagaaatcttgatacccagttatcggttgttcttttctgcaatctgagca

SEQ ID NO: 25693 - DNA, 60 bp, Artificial
  Synthetic oligonucleotide
aaaagcctatattgagttctgtctctttaagctgtaagggatgtttcttatgtagccaag

SEQ ID NO: 25694 - DNA, 60 bp, Artificial
  Synthetic oligonucleotide
taaatttctggatggtcgcccctttcaacatgaatctttgcatctgtctcctttaatgcc

SEQ ID NO: 25695 - DNA, 60 bp, Artificial
  Synthetic oligonucleotide
ctttggctgaaatgctccagaatgcaacaggtaaaacccttagaccaacacgagatactc

SEQ ID NO: 25696 - DNA, 60 bp, Artificial
  Synthetic oligonucleotide
ctgaaagattgatccatatcatacacatttctacaaaacccacaagtggctccttcattg

SEQ ID NO: 25697 - DNA, 60 bp, Artificial
  Synthetic oligonucleotide
cctattgtgcggtgacaagtcttctaaagttcctttagtggacaaaagagttagagattg

SEQ ID NO: 25698 - DNA, 66 bp, Artificial
  Synthetic oligonucleotide
gctcccacaaatccagatatacatacttcagacttgattgttgatttaataacagaataaatcctg

SEQ ID NO: 25699 - DNA, 60 bp, Artificial
  Synthetic oligonucleotide
taacagaataaatcctgaaagattgatccatatcatacacatttctacaaaacccacaag

SEQ ID NO: 25700 - DNA, 60 bp, Artificial
  Synthetic oligonucleotide
aaacactttgctcccacaaatccagatacacatacttcagacttgattgttgatttaata

SEQ ID NO: 25701 - DNA, 60 bp, Artificial
  Synthetic oligonucleotide
tgaagtatgtatatctggatttgtgggagcaaagtgtttcactgtatctgaggaagtccc

SEQ ID NO: 25702 - DNA, 60 bp, Artificial
  Synthetic oligonucleotide
tttctgcataacaccaacatcttactggggttgtgaagaggtttggtgtttggctatcaa

SEQ ID NO: 25703 - DNA, 66 bp, Artificial
  Synthetic oligonucleotide
gaccataaataatttatcagtagtagtataggatacgttatcaatcccagaagatcatacccatag

SEQ ID NO: 25704 - DNA, 60 bp, Artificial
  Synthetic oligonucleotide
cctacctttgcattcttgataaggtatacaatccataggaccttctgtcacaacattggt

SEQ ID NO: 25705 - DNA, 60 bp, Artificial
  Synthetic oligonucleotide
gaggtacctcattattggcaagaacagtttgagtatctcgtgttggtctaagggttttac

SEQ ID NO: 25706 - DNA, 60 bp, Artificial
  Synthetic oligonucleotide
ctccagaatgcaacaggtaaaacccttagaccaacacgagatactcaaactgttcttgcc

SEQ ID NO: 25707 - DNA, 60 bp, Artificial
  Synthetic oligonucleotide
cactcggagattgaggtacctcattattggcaagaacggtttgagtatctcgtgttggtc

SEQ ID NO: 25708 - DNA, 60 bp, Artificial
  Synthetic oligonucleotide
cattgaatgttgaaactcctttaatgctacaagtcaaacttgaagcatttaggcatggat

SEQ ID NO: 25709 - DNA, 53 bp, Artificial
  Synthetic oligonucleotide
caggtgggggcacagttttctctcttaatgacaaaagttctagcactgctcag

SEQ ID NO: 25710 - DNA, 60 bp, Artificial
  Synthetic oligonucleotide
agtgtgggtgctttgtataggagctgtggtgtattgttcagaaacatcatactgtattcc

SEQ ID NO: 25711 - DNA, 60 bp, Artificial
  Synthetic oligonucleotide
caggacatttgtcatatctgtttgtaacaaagcggtcacaaccagggacataataacagc

SEQ ID NO: 25712 - DNA, 60 bp, Artificial
  Synthetic oligonucleotide
tgtaacaaagcggtcgcaaccagggacataataacagctatccaaacactgagcagtttg

SEQ ID NO: 25713 - DNA, 60 bp, Artificial
  Synthetic oligonucleotide
ctttttctgcaaggttaaccatgaaacaatgttcattgtcaacataccagatagcagtaa

SEQ ID NO: 25714 - DNA, 60 bp, Artificial
  Synthetic oligonucleotide
ccagggacataataacagctatccaaacactgagcagtttgagccatagacataggcatc

SEQ ID NO: 25715 - DNA, 60 bp, Artificial
  Synthetic oligonucleotide
ttttgtcacagatgcctatgtctatggctcaaactgctcagtgtttggatagctgttatt

SEQ ID NO: 25716 - DNA, 60 bp, Artificial
  Synthetic oligonucleotide
attgctgttcctcgtgtgcatgttggtcattttgatcaattatgttttctggttccagca

SEQ ID NO: 25717 - DNA, 60 bp, Artificial
  Synthetic oligonucleotide
cggtcgcaaccagggacataataacagctatccaaacactgagcagtttgagccatagac

SEQ ID NO: 25718 - DNA, 60 bp, Artificial
  Synthetic oligonucleotide
acataattgatcaaaatgaccaacatgcacacgaggaacagcaatataattctgacacat

SEQ ID NO: 25719 - DNA, 60 bp, Artificial
  Synthetic oligonucleotide
aacccacaagtggctccttcattgatagccaaacaccaaacctcttcacaaccccagtaa

SEQ ID NO: 25720 - DNA, 60 bp, Artificial
  Synthetic oligonucleotide
ttccataatgatggcttaacaataggccagctgatagctcatggacctgatagtcacgta

SEQ ID NO: 25721 - DNA, 60 bp, Artificial
  Synthetic oligonucleotide
gccatagacataggcatctgtgacaaaataagaaatcctatcaaagtttctgtgactgct

SEQ ID NO: 25722 - DNA, 60 bp, Artificial
  Synthetic oligonucleotide
cccgcatatacgtgactatcaggtccatgagctatcagctggcctattgttaagccatca

SEQ ID NO: 25723 - DNA, 60 bp, Artificial
  Synthetic oligonucleotide
gcctggaaatatcctgattcagatgggacttcctcagatacagtgaaacactttgctccc

SEQ ID NO: 25724 - DNA, 60 bp, Artificial
  Synthetic oligonucleotide
acacttattagcacctttctttactgctatctggtatgttgacaatgaacattgtttcat

SEQ ID NO: 25725 - DNA, 60 bp, Artificial
  Synthetic oligonucleotide
agccatcattatggaaatccgctaatatatcagcctggaaatatcctgattcagatggga

SEQ ID NO: 25726 - DNA, 60 bp, Artificial
  Synthetic oligonucleotide
agtagtattgctcatactctttgtatttgctcttgcttacctctgctctattgttgccac

SEQ ID NO: 25727 - DNA, 60 bp, Artificial
  Synthetic oligonucleotide
cctgattcagatgggacttcctcagatacagtgaaacactttgctcccacaaatccagat

SEQ ID NO: 25728 - DNA, 59 bp, Artificial
  Synthetic oligonucleotide
ctgttctagttattataggacattcttctgagtgttcttcagaggttttgtttttgtta

SEQ ID NO: 25729 - DNA, 60 bp, Artificial
  Synthetic oligonucleotide
aggcctctctttcctaaaagcagtcacagaaactttgataggatttctgattttgtcaca

SEQ ID NO: 25730 - DNA, 60 bp, Artificial
  Synthetic oligonucleotide
cttattttcccttgaaatgtaaggtctgtggaaatttatgtttggtaacccatgaatgct

SEQ ID NO: 25731 - DNA, 60 bp, Artificial
  Synthetic oligonucleotide
acaattatccaatcatgtacaattctagaccaactaatggcacagtctctctccagagtg

SEQ ID NO: 25732 - DNA, 60 bp, Artificial
  Synthetic oligonucleotide
aatcacctgagaatttcacactctggagagagactgtgccattagttggtctagaattgt

SEQ ID NO: 25733 - DNA, 60 bp, Artificial
  Synthetic oligonucleotide
tacagtttcattaactacacctgagaaaatcatgggttacgtcgtcaaaagagaaggaag

SEQ ID NO: 25734 - DNA, 60 bp, Artificial
  Synthetic oligonucleotide
gtatacaatccataggaccttctgtcacaacattggttagaaagttagattctacaatag

SEQ ID NO: 25735 - DNA, 60 bp, Artificial
  Synthetic oligonucleotide
ttaatagcacagaaacactggtctttttcaggacatttgtcatatctgtttgtaacaaag

SEQ ID NO: 25736 - DNA, 60 bp, Artificial
  Synthetic oligonucleotide
caaatgtcctgaaaaagaccaatgcttctgtgctattaaagaaaattctattgtagaatc

SEQ ID NO: 25737 - DNA, 60 bp, Artificial
  Synthetic oligonucleotide
tctagctatgtttcccgcatatacgtgactatcaggtccatgagctatcagctggcctat

SEQ ID NO: 25738 - DNA, 60 bp, Artificial
  Synthetic oligonucleotide
aatatccgatatttggttcaaacctgttttaaatctgtatgtgtcataaccgcatgattt

SEQ ID NO: 25739 - DNA, 60 bp, Artificial
  Synthetic oligonucleotide
ggtctttttcaggacatttgtcatatctgtttgtaacaaagcggtcacaaccagggacat

SEQ ID NO: 25740 - DNA, 60 bp, Artificial
  Synthetic oligonucleotide
accccagtaagatgttggtgttatgcagaaatcttgatacccagttatcggttgttcttt

SEQ ID NO: 25741 - DNA, 60 bp, Artificial
  Synthetic oligonucleotide
ggcagcacacctcagcccttggctacataagaaacatcccttacagcttaaagagacaga

SEQ ID NO: 25742 - DNA, 60 bp, Artificial
  Synthetic oligonucleotide
attttcctggcaaccggaacaacccaattcctgacgatggtcttaccctccaccgcctca

SEQ ID NO: 25743 - DNA, 60 bp, Artificial
  Synthetic oligonucleotide
cctggcaaccggaacaacccaattcctgacgatggtcttaccctccaccgcctcagtgga

SEQ ID NO: 25744 - DNA, 60 bp, Artificial
  Synthetic oligonucleotide
tggcaaccggaacaacccaattcctgacgatggtcttaccctccaccgcctcagtggata

SEQ ID NO: 25745 - DNA, 60 bp, Artificial
  Synthetic oligonucleotide
tttgcttactaacaacaacactctacctcaacacaaaactatctcaacctaactacctca

SEQ ID NO: 25746 - DNA, 60 bp, Artificial
  Synthetic oligonucleotide
ctagtgttgatcaaacatcctatatcaaagagtttgacaaaaaatgcgccacatggctat

SEQ ID NO: 25747 - DNA, 57 bp, Artificial
  Synthetic oligonucleotide
attcaagacagctatataacattctcaataccattaatgactggactatcgcagggt

SEQ ID NO: 25748 - DNA, 60 bp, Artificial
  Synthetic oligonucleotide
cggcacaaccaagtgtcgatcttacttttggtggggtcaaattcacagtggttaataacc

SEQ ID NO: 25749 - DNA, 60 bp, Artificial
  Synthetic oligonucleotide
caaccgagtgtcgatcttacatttgctggggtcaaattcacagtggttaataaccatttt

SEQ ID NO: 25750 - DNA, 60 bp, Artificial
  Synthetic oligonucleotide
cgagtgtcgatcttacatttgctggggtcaaattcacagtggttaataaccattttcccc

SEQ ID NO: 25751 - DNA, 60 bp, Artificial
  Synthetic oligonucleotide
ctggtactcgtccatttcagattttactaactcagattaactagggaactttgtgtcccc

SEQ ID NO: 25752 - DNA, 60 bp, Artificial
  Synthetic oligonucleotide
ctggtactcgtccatttcaaactcagctcactcagattaactagggaactttgtgtcccc

SEQ ID NO: 25753 - DNA, 60 bp, Artificial
  Synthetic oligonucleotide
ttctggtactcgtccatttcaaactcagctcactcagattaactagggaactttgtgtcc

SEQ ID NO: 25754 - DNA, 60 bp, Artificial
  Synthetic oligonucleotide
atccaaaagggttccccaagagcccacaataatagcagctaaatgggtgggtggtagggg

SEQ ID NO: 25755 - DNA, 60 bp, Artificial
  Synthetic oligonucleotide
agatggatactaagcctactgacccgactgggattgaacctgatgaccacctcaaggagc

SEQ ID NO: 25756 - DNA, 60 bp, Artificial
  Synthetic oligonucleotide
ttgtgtccaggaaaaagatggatactaagcctactgacccgactgggattgaacctgatg

SEQ ID NO: 25757 - DNA, 60 bp, Artificial
  Synthetic oligonucleotide
ctgtgtccaggaaaaagatggatactaagcctactgacccgactgggattgaacctgatg

SEQ ID NO: 25758 - DNA, 60 bp, Artificial
  Synthetic oligonucleotide
caattgcaagccaatagacgggcatactcaggtaagcaatatgatgcatactgtgtacag

SEQ ID NO: 25759 - DNA, 60 bp, Artificial
  Synthetic oligonucleotide
ctccaattgcaagccaatagacgggcatactcaggtaagcaatatgatgcatactgtgta

SEQ ID NO: 25760 - DNA, 60 bp, Artificial
  Synthetic oligonucleotide
tgtgtccaggaaaaagatggatactaagcctgttgacccgactgggattgaacctgatga

SEQ ID NO: 25761 - DNA, 60 bp, Artificial
  Synthetic oligonucleotide
agatggatactaagcctactgacccgactgggattgaacctgatgaccaccttaaggagc

SEQ ID NO: 25762 - DNA, 60 bp, Artificial
  Synthetic oligonucleotide
atgtcaagccaattcatttttgaagatgtaccacaacggaatgcagctacatttaacccg

SEQ ID NO: 25763 - DNA, 60 bp, Artificial
  Synthetic oligonucleotide
caacttgagaagcagaaagaaccttagctaccttgcaaacctgttcataagtagagaaat

SEQ ID NO: 25764 - DNA, 60 bp, Artificial
  Synthetic oligonucleotide
ctttctgttttcaccactatcatctttctttctacctcagtgtacttatatatatgcaag

SEQ ID NO: 25765 - DNA, 60 bp, Artificial
  Synthetic oligonucleotide
aataagcaaacaagtaatacatgctgaaatacaacatttaggccattggatggatgctac

SEQ ID NO: 25766 - DNA, 60 bp, Artificial
  Synthetic oligonucleotide
acctcagtgtacttatatatatgcaagtagcatatatataagtacacaatttactacctc

SEQ ID NO: 25767 - DNA, 60 bp, Artificial
  Synthetic oligonucleotide
cctggaagatacaggacggcaatttgtgggttatatcctgctcagattaaagctagacag

SEQ ID NO: 25768 - DNA, 60 bp, Artificial
  Synthetic oligonucleotide
aagagataacacctggaagatacaggacggcaatttgtgggttatatcctgctcagatta

SEQ ID NO: 25769 - DNA, 60 bp, Artificial
  Synthetic oligonucleotide
caacaggacagactgcagattggctgagcattgttgtttaccttacatccttcgtggttc

SEQ ID NO: 25770 - DNA, 60 bp, Artificial
  Synthetic oligonucleotide
caggacagactgcagattggctgagcattgttgtttaccttacatccttcgtggttccaa

SEQ ID NO: 25771 - DNA, 60 bp, Artificial
  Synthetic oligonucleotide
caggacagactgcagattggctgagcattgttgtttaccttacatccttcgtggttccga

SEQ ID NO: 25772 - DNA, 60 bp, Artificial
  Synthetic oligonucleotide
ggacagactgcagattggctgagcattgttgtttaccttacatccttcgtggttccgata

SEQ ID NO: 25773 - DNA, 60 bp, Artificial
  Synthetic oligonucleotide
aaaacatctctatgtgtccttgcccaatgcacaatctagcatgaaggcagaagagataac

SEQ ID NO: 25774 - DNA, 60 bp, Artificial
  Synthetic oligonucleotide
tagatgctggttgtaacatcattgaccatattgactcaccatcatcaatttgggtttttg

SEQ ID NO: 25775 - DNA, 58 bp, Artificial
  Synthetic oligonucleotide
tagatgctggttgtaacatcattgaccatattgactcaccatcatcaatttgggtttt

SEQ ID NO: 25776 - DNA, 60 bp, Artificial
  Synthetic oligonucleotide
ggagacaaaagaagcacaggctgtgaggaagcatgccatagatgctggttgtaacatcat

SEQ ID NO: 25777 - DNA, 60 bp, Artificial
  Synthetic oligonucleotide
ctgaaggctctttacatgttgacaactagagggaggcagactactaaagacaataaggga

SEQ ID NO: 25778 - DNA, 60 bp, Artificial
  Synthetic oligonucleotide
ggctccctaaagagcactatactgaagatggcaacactagaggaactccaaaaggagatc

SEQ ID NO: 25779 - DNA, 60 bp, Artificial
  Synthetic oligonucleotide
ctgaaggctctttacatgttgacaactagagggaggcaaactactaaagacaataaggga

SEQ ID NO: 25780 - DNA, 60 bp, Artificial
  Synthetic oligonucleotide
ccttaagtgactatttctgtatatatggatgtagatttcaattgatccgtactaacatct

SEQ ID NO: 25781 - DNA, 60 bp, Artificial
  Synthetic oligonucleotide
gtttaggatgtcaccttaagtgactatttctgtatatatggatgtagatttcaattgatc

SEQ ID NO: 25782 - DNA, 60 bp, Artificial
  Synthetic oligonucleotide
ctgggacaggaatagaaaggcatatgcagctgctacactctgaaatgatattggacatct

SEQ ID NO: 25783 - DNA, 60 bp, Artificial
  Synthetic oligonucleotide
gggttcacactgacatgtcaagtttccttaacagagtgtcctacttttctgacatcaatt

SEQ ID NO: 25784 - DNA, 60 bp, Artificial
  Synthetic oligonucleotide
ggcttcacactgacatgtcaagtttccttaacagagtgtcctacttttctgacatcaatt

SEQ ID NO: 25785 - DNA, 60 bp, Artificial
  Synthetic oligonucleotide
tgttggtttcacattgacttgtcaagtttccttaacagagtgtcctacttttctgacatc

SEQ ID NO: 25786 - DNA, 60 bp, Artificial
  Synthetic oligonucleotide
gttggtttcacattgacttgtcaagtttccttaacagagtgtcctacttttctgacatca

SEQ ID NO: 25787 - DNA, 60 bp, Artificial
  Synthetic oligonucleotide
tgtcctacttttctgacatcaattaaagcatgtgacaaagcaatctgttatggcgcagag

SEQ ID NO: 25788 - DNA, 60 bp, Artificial
  Synthetic oligonucleotide
cctacttttctgacatcaattaaagcatgtgacaaagcaatctgttatggcgcagagagc

SEQ ID NO: 25789 - DNA, 60 bp, Artificial
  Synthetic oligonucleotide
ggggctctggtgttggtttcacattgacttgtcaagtttccttaacagagtgtcctactt

SEQ ID NO: 25790 - DNA, 60 bp, Artificial
  Synthetic oligonucleotide
ggagagattgtgatgtctgtcaaagagatgctgtcagacatgattaggagaaggaaccag

SEQ ID NO: 25791 - DNA, 60 bp, Artificial
  Synthetic oligonucleotide
cctggtgagattgtgatgtctgtcaaagagatgctttcagacatgattagaaggaggaac

SEQ ID NO: 25792 - DNA, 60 bp, Artificial
  Synthetic oligonucleotide
ggtgagattgtgatgtctgtcaaagagatgctttcagacatgattagaaggaggaacctg

SEQ ID NO: 25793 - DNA, 60 bp, Artificial
  Synthetic oligonucleotide
ggcccaactcaattttgataccgttagagtcttcttcctcaatcagaagaaggccaagat

SEQ ID NO: 25794 - DNA, 60 bp, Artificial
  Synthetic oligonucleotide
tttggtggcatcaaatttacattggttaataaccattttccccaatacacagcaaatcct

SEQ ID NO: 25795 - DNA, 60 bp, Artificial
  Synthetic oligonucleotide
tttggaggcatcaaatttacattggttaataaccattttccccaatacacagcaaatcct

SEQ ID NO: 25796 - DNA, 60 bp, Artificial
  Synthetic oligonucleotide
tttacattggttaataaccattttccccaatacacagcaaatcctgtgccagacactgcc

SEQ ID NO: 25797 - DNA, 60 bp, Artificial
  Synthetic oligonucleotide
cactggttaataaccattttccccaatacacagcaaatcctgtgccagacactgccctca

SEQ ID NO: 25798 - DNA, 60 bp, Artificial
  Synthetic oligonucleotide
cattggttaataaccattttccccaatacacagcaaatcctgtgccagacactgccctca

SEQ ID NO: 25799 - DNA, 60 bp, Artificial
  Synthetic oligonucleotide
ggcccagctcaatttcgataccgttagagtcttcttcctcaatcagaagaaggccaagat

SEQ ID NO: 25800 - DNA, 60 bp, Artificial
  Synthetic oligonucleotide
ttttccccaatacacagcaaatcctgtgccagacactgccctcactctccatcgtctctc

SEQ ID NO: 25801 - DNA, 60 bp, Artificial
  Synthetic oligonucleotide
cattttccccaatacacagcaaatcctgtgccagacactgccctcaccctccaccgtctc

SEQ ID NO: 25802 - DNA, 60 bp, Artificial
  Synthetic oligonucleotide
ctggttaataaccattttccccaatacacagcaaatcctgtgccagacactgccctcact

SEQ ID NO: 25803 - DNA, 60 bp, Artificial
  Synthetic oligonucleotide
cattttccccaatacacagcaaatcctgtgccagacactgccctcactctccaccgcctc

SEQ ID NO: 25804 - DNA, 60 bp, Artificial
  Synthetic oligonucleotide
tttccccaatacacagcaaatcctgtgccagacactgccctcactctccaccgtctctca

SEQ ID NO: 25805 - DNA, 60 bp, Artificial
  Synthetic oligonucleotide
tctcaatgttagacattaaagatgcactaaagtggtgtgaaccaaacattaagagggctc

SEQ ID NO: 25806 - DNA, 60 bp, Artificial
  Synthetic oligonucleotide
aagcaaaatcagtcacccaaccggcaacagtttgctcatctatagactcagaggcaaact

SEQ ID NO: 25807 - DNA, 60 bp, Artificial
  Synthetic oligonucleotide
cttaaaatgtcagacaagggcaaggcaatggtgaatgagctcgtgttaaaatacaagctc

SEQ ID NO: 25808 - DNA, 60 bp, Artificial
  Synthetic oligonucleotide
agcttgtatttcaacacgagctcattcaccattgccttgcccttgtctgacattttaaga

SEQ ID NO: 25809 - DNA, 60 bp, Artificial
  Synthetic oligonucleotide
tccttgataagcaaaatcagtcacccaaccggcaacagcttgctcatctatagactcaga

SEQ ID NO: 25810 - DNA, 60 bp, Artificial
  Synthetic oligonucleotide
gtattttaatacgagctcattcaccattgccttgcccttgtctgacatcttgagaaccat

SEQ ID NO: 25811 - DNA, 60 bp, Artificial
  Synthetic oligonucleotide
gtatttcaatacgagctcattcaccattgccttgcccttgtctgacatcttgagaaccat

SEQ ID NO: 25812 - DNA, 60 bp, Artificial
  Synthetic oligonucleotide
attcttaaaatgtcagacaagggcaaggcaatggtgaatgagctcgtgttaaaatacaag

SEQ ID NO: 25813 - DNA, 60 bp, Artificial
  Synthetic oligonucleotide
cttgtatttcaacacgagctcattcaccattgccttgcccttgtctgacattttaagaac

SEQ ID NO: 25814 - DNA, 60 bp, Artificial
  Synthetic oligonucleotide
gcttgtattttaacacgagctcattcaccattgccttgcccttgtctgacattttaagaa

SEQ ID NO: 25815 - DNA, 60 bp, Artificial
  Synthetic oligonucleotide
agcttgtattttaacacgagctcattcaccattgccttgcccttgtctgacattttaaga

SEQ ID NO: 25816 - DNA, 60 bp, Artificial
  Synthetic oligonucleotide
agcttgtatttcaatacgagctcattcaccattgccttgcccttgtctgacatcttgaga

SEQ ID NO: 25817 - DNA, 60 bp, Artificial
  Synthetic oligonucleotide
agcttgtacttcaaaactagctcattcaccattgccttgcccttgtctgacatcttgaga

SEQ ID NO: 25818 - DNA, 60 bp, Artificial
  Synthetic oligonucleotide
agcttgtattttaatacgagctcattcaccattgccttgcccttgtctgacatcttgaga

SEQ ID NO: 25819 - DNA, 60 bp, Artificial
  Synthetic oligonucleotide
agtctgataactaaaatcctctcggacttagagctaaacatcactgagccatcatctcaa

SEQ ID NO: 25820 - DNA, 60 bp, Artificial
  Synthetic oligonucleotide
gatatccttcggaaaacaacagcctggcacttaggtcatcttattcgagacataacagaa

SEQ ID NO: 25821 - DNA, 60 bp, Artificial
  Synthetic oligonucleotide
tctagacactgtattagttgatggggattcgcaatggggtgtatcaaaagttatgagtat

SEQ ID NO: 25822 - DNA, 60 bp, Artificial
  Synthetic oligonucleotide
tttgaaaaggcattgattgctacagcaacttggtttcaatattatacagaagatcagggc

SEQ ID NO: 25823 - DNA, 60 bp, Artificial
  Synthetic oligonucleotide
gaaggattttctaaatggtgttcattgtgatgtcattccaacaaaacaagtacagagggc

SEQ ID NO: 25824 - DNA, 60 bp, Artificial
  Synthetic oligonucleotide
cagactggaaggtgattgggttacctttagagaggtcttagctgctgctaatagctatgc

SEQ ID NO: 25825 - DNA, 60 bp, Artificial
  Synthetic oligonucleotide
cagtggatgaaatgtcagatgtgttggacacagcccgatttcctgattcattgtctgttg

SEQ ID NO: 25826 - DNA, 60 bp, Artificial
  Synthetic oligonucleotide
ttggactgcttttttgaatttgcccaccactctgatgatgctctgttcatttatgggtac

SEQ ID NO: 25827 - DNA, 60 bp, Artificial
  Synthetic oligonucleotide
ttcagaatggcttgaccggtttacaagagtaggtgtaccaccaattgacccagagattca

SEQ ID NO: 25828 - DNA, 60 bp, Artificial
  Synthetic oligonucleotide
gtccagtggaaagtgttcactccaaagtcagagtttgagttttcagacatgtatacacct

SEQ ID NO: 25829 - DNA, 56 bp, Artificial
  Synthetic oligonucleotide
ggagccaatagggaaagtcttgttgtttgcaggagtaccaaataatgttatcacag

SEQ ID NO: 25830 - DNA, 60 bp, Artificial
  Synthetic oligonucleotide
ttatgggtacttagagcctgtagatgacgggacagattggttcctatacgtttcccagca

SEQ ID NO: 25831 - DNA, 60 bp, Artificial
  Synthetic oligonucleotide
cctatgctctataaatctgcaaagtcccgggttgtaattgtacaaggtaatgttgagggg

SEQ ID NO: 25832 - DNA, 60 bp, Artificial
  Synthetic oligonucleotide
cggtgtgtacagggaattaggtttggacatttcaataccagacgttatgaaaagggttgc

SEQ ID NO: 25833 - DNA, 60 bp, Artificial
  Synthetic oligonucleotide
caattaaagatgatggccttcgagccattgcccagcatgatgaagatagtcctagatttc

SEQ ID NO: 25834 - DNA, 60 bp, Artificial
  Synthetic oligonucleotide
ccgtgcattgtttataagaactgtgtcctccgtacaagcttgcggacaacacaagccatt

SEQ ID NO: 25835 - DNA, 60 bp, Artificial
  Synthetic oligonucleotide
ggtgttgtttaaaacagagtcaggctttgagtggggaaaaccaaatgtaccgtgcattgt

SEQ ID NO: 25836 - DNA, 60 bp, Artificial
  Synthetic oligonucleotide
ggtgtgggatgaggtttaacacggagcaggttcaaggtgttcgccatatggtgttgttta

SEQ ID NO: 25837 - DNA, 60 bp, Artificial
  Synthetic oligonucleotide
gttaggaagtatcagcgtactgaggccgatcgtggtttctttattacaacactacctact

SEQ ID NO: 25838 - DNA, 59 bp, Artificial
  Synthetic oligonucleotide
gtactgttatctctatgtctagtcggctgtggtcagaggagatgagcttagtagatgat

SEQ ID NO: 25839 - DNA, 60 bp, Artificial
  Synthetic oligonucleotide
gcaatgtcacttttatttaagcaggtttggagcagtttgtttccggagttggactgcttt

SEQ ID NO: 25840 - DNA, 60 bp, Artificial
  Synthetic oligonucleotide
gatttctttccagatggtcatcacggagaagtgaaaggaaactggttacaggggaacctc

SEQ ID NO: 25841 - DNA, 60 bp, Artificial
  Synthetic oligonucleotide
gccgagatcagttatgtaagggaacatctagtgaagcctgaggaacgagcagcccttgag

SEQ ID NO: 25842 - DNA, 60 bp, Artificial
  Synthetic oligonucleotide
tttcagtcagacaagaaatatcagtttaaaaggcatgtcagggcaggttcaagaagatgg

SEQ ID NO: 25843 - DNA, 60 bp, Artificial
  Synthetic oligonucleotide
gttgaaagaggacccaagattggctgaacagcaattatactgtcaagatgcagtggagct

SEQ ID NO: 25844 - DNA, 60 bp, Artificial
  Synthetic oligonucleotide
catgttctgaagataatgatggatgaagtctctaaggagttaattaggtgtgggatgagg

SEQ ID NO: 25845 - DNA, 60 bp, Artificial
  Synthetic oligonucleotide
acctaacacgtgatgatgtgattaacttttatgcacctagaattaactttcaacctaccc

SEQ ID NO: 25846 - DNA, 60 bp, Artificial
  Synthetic oligonucleotide
caacctacccagaatattaaggaacctggaacattcaagttaacttcaagtatgttgcgg

SEQ ID NO: 25847 - DNA, 60 bp, Artificial
  Synthetic oligonucleotide
gcacagaataataaagcgaggttttattcaaaagtaaagttgctgggtttaacagtggac

SEQ ID NO: 25848 - DNA, 59 bp, Artificial
  Synthetic oligonucleotide
acagtggaccagtcaactgttggtgcaagtggagtttatccctctttcatgtctcgagt

SEQ ID NO: 25849 - DNA, 60 bp, Artificial
  Synthetic oligonucleotide
caggctgtttctatattcaaccgtaaggaagatattggacagcaaaaggatctagcagca

SEQ ID NO: 25850 - DNA, 60 bp, Artificial
  Synthetic oligonucleotide
ggtgcaaatatagatgacttggttcaatactcccgtgagtggttgtctaaggcacagaat

SEQ ID NO: 25851 - DNA, 60 bp, Artificial
  Synthetic oligonucleotide
cagacacccaagaaatttcctcctaattcaatgctctttaataacaccttataaaccagc

SEQ ID NO: 25852 - DNA, 60 bp, Artificial
  Synthetic oligonucleotide
cagctactatactttcagaccagatagatagtcgcagagcctgttcattcattctgaatc

SEQ ID NO: 25853 - DNA, 60 bp, Artificial
  Synthetic oligonucleotide
gggtgattattctgtccttcaactccaagcaaatcgacgtgcatattctgggaagcagta

SEQ ID NO: 25854 - DNA, 60 bp, Artificial
  Synthetic oligonucleotide
gagttcatagaggtcacagtaacagcagatgttgatagaggaattagagagaagaggctc

SEQ ID NO: 25855 - DNA, 60 bp, Artificial
  Synthetic oligonucleotide
cagatgagaccttccagcatgagagactaggccagttctcatttattggcaaagtccagt

SEQ ID NO: 25856 - DNA, 60 bp, Artificial
  Synthetic oligonucleotide
cagcaaatacaagctggtaatctccattggttcagtgtaaatacagaaatgtggaagagc

SEQ ID NO: 25857 - DNA, 60 bp, Artificial
  Synthetic oligonucleotide
ttcaataaaaatctcccctaaaaagacaacagtatcccctactaatgcagagttcttatc

SEQ ID NO: 25858 - DNA, 60 bp, Artificial
  Synthetic oligonucleotide
ggtgtgttaaagtactagaccttggtgcctctccgcagatagctcagttggctgttgcac

SEQ ID NO: 25859 - DNA, 60 bp, Artificial
  Synthetic oligonucleotide
ggctgttgcactgtgtactagtaaggttgaaagattatatggaacagcagttggaatggt

SEQ ID NO: 25860 - DNA, 58 bp, Artificial
  Synthetic oligonucleotide
ttttacagttatggagtgagcagcatgtaacttatgattatattattcccaaggggag

SEQ ID NO: 25861 - DNA, 60 bp, Artificial
  Synthetic oligonucleotide
aagcatgctgatactcctattccgctgggtggtagtggggccatgtccataatggagtta

SEQ ID NO: 25862 - DNA, 60 bp, Artificial
  Synthetic oligonucleotide
cttcttaaaagagccctggtaggatatatgcataagagacaaaaatcaatgctttatatc

SEQ ID NO: 25863 - DNA, 60 bp, Artificial
  Synthetic oligonucleotide
gacaaagttatatgaaggagatttacgtgttacatttaattttggcctggattgtgcccg

SEQ ID NO: 25864 - DNA, 60 bp, Artificial
  Synthetic oligonucleotide
ctgactcactgttttcctttagacacaccatggttctattaagaagattatttcctcagg

SEQ ID NO: 25865 - DNA, 60 bp, Artificial
  Synthetic oligonucleotide
agtttccttattagatccgtatgatttgaccgaattagaaagtattgttcgaggttgggg

SEQ ID NO: 25866 - DNA, 60 bp, Artificial
  Synthetic oligonucleotide
ggaggcacagctgttggtgcagaataagggtatttgtccagaggatgtaatacctgactc

SEQ ID NO: 25867 - DNA, 60 bp, Artificial
  Synthetic oligonucleotide
ggaggcaaagattcatctggaaacagtggaatgggctctcaagtttcgagagaaggagga

SEQ ID NO: 25868 - DNA, 60 bp, Artificial
  Synthetic oligonucleotide
cataacccttccccttttctacctcacaacatactacctcacattcgatttttcttgatt

SEQ ID NO: 25869 - DNA, 60 bp, Artificial
  Synthetic oligonucleotide
gttatcccattattgtaatccatttaatcaaattaggtgttttaagtaagtcattaacta

SEQ ID NO: 25870 - DNA, 65 bp, Artificial
  Synthetic oligonucleotide
gggtttattattataagggtggtgttgggtcttattactaattacgggtaaattactatttgcac

SEQ ID NO: 25871 - DNA, 60 bp, Artificial
  Synthetic oligonucleotide
gccattgaaattgtaagtggataagggcagtatgatgcttggacggtttttcgggcttgt

SEQ ID NO: 25872 - DNA, 60 bp, Artificial
  Synthetic oligonucleotide
ctggctcaagctttgattgacacaaaagtaaaggagatttctaaccaagagccattgaaa

SEQ ID NO: 25873 - DNA, 60 bp, Artificial
  Synthetic oligonucleotide
tcgggcttgtgccacacaattaatcatctcagggctttactgtgaataacagggtttatt

SEQ ID NO: 25874 - DNA, 60 bp, Artificial
  Synthetic oligonucleotide
tataatcctctatatgttgtcatggggaaaggaggctgtcaatcattttcatcttggtga

SEQ ID NO: 25875 - DNA, 60 bp, Artificial
  Synthetic oligonucleotide
tctgctttctaccagtcatacttgcggagaacccagtcaatggggattcagttggatcag

SEQ ID NO: 25876 - DNA, 60 bp, Artificial
  Synthetic oligonucleotide
gcaccagatagatgcccgcctacagccctgtatgttgcaggagtaccagaacttggggcc

SEQ ID NO: 25877 - DNA, 60 bp, Artificial
  Synthetic oligonucleotide
tatttgcatgtgcaccagatagatgcccgcctacagccctgtatgttgcaggagtaccag

SEQ ID NO: 25878 - DNA, 60 bp, Artificial
  Synthetic oligonucleotide
attcacagaaattgcaagccctcattcagtatgggtatttgcatgtgcaccagatagatg

SEQ ID NO: 25879 - DNA, 60 bp, Artificial
  Synthetic oligonucleotide
tgagtcagcaactttattcacagaaattgcaagccctcattcagtatgggtatttgcatg

SEQ ID NO: 25880 - DNA, 60 bp, Artificial
  Synthetic oligonucleotide
gaatctcaagtcccagacatagcagaactgatagaacaggcggaatctgagtcagcaact

SEQ ID NO: 25881 - DNA, 60 bp, Artificial
  Synthetic oligonucleotide
gcaattggggcttatatactgggatttgcaattccaatcatactgaaagcactatacatg

SEQ ID NO: 25882 - DNA, 60 bp, Artificial
  Synthetic oligonucleotide
gatgaccatctgaaggagaaatcatctttgaggtatgggaatgtcttggatgtcaactcc

SEQ ID NO: 25883 - DNA, 60 bp, Artificial
  Synthetic oligonucleotide
gagcacattacaaagtagacgggcggctgtgtctacattggagaccaaacttggagagct

SEQ ID NO: 25884 - DNA, 60 bp, Artificial
  Synthetic oligonucleotide
caactccattgaccttgaagaaccgagtggtcaaacagctgattggaaagcaattggggc

SEQ ID NO: 25885 - DNA, 54 bp, Artificial
  Synthetic oligonucleotide
cgcacacgaacaacatctcgtcactgccaggcagaaacttaaagatgccgagaa

SEQ ID NO: 25886 - DNA, 60 bp, Artificial
  Synthetic oligonucleotide
ataaggcttatttcttaaacaggcagagacaggttgatgaatctcaagtcccagacatag

SEQ ID NO: 25887 - DNA, 60 bp, Artificial
  Synthetic oligonucleotide
caccaggcaggtttagaactattgcttgtgggcttttccctgcacaagttaaggccagga

SEQ ID NO: 25888 - DNA, 60 bp, Artificial
  Synthetic oligonucleotide
gctgcagagtgtccgtttctacctaagcctaaaaccacctctgaggcattcatgtcaact

SEQ ID NO: 25889 - DNA, 57 bp, Artificial
  Synthetic oligonucleotide
caaacagttaaggacaacaaaggcaccagaataaggttcaaagatgattcatccttt

SEQ ID NO: 25890 - DNA, 60 bp, Artificial
  Synthetic oligonucleotide
ggtaaatgggatccggaagccgaaacatctttatgtttcaatgccaacagcacagtccac

SEQ ID NO: 25891 - DNA, 50 bp, Artificial
  Synthetic oligonucleotide
aacgatatggccaaaagactgccgagcaatggatgcgtgaagaaatagtt

SEQ ID NO: 25892 - DNA, 50 bp, Artificial
  Synthetic oligonucleotide
aacgatatggccaaaaaactgccgagcaatggatgcgtgaagaaatagtt

SEQ ID NO: 25893 - DNA, 50 bp, Artificial
  Synthetic oligonucleotide
agaggtatggtcaaaagactgccgagcaatggatgcgtgaagaaatagtt

SEQ ID NO: 25894 - DNA, 50 bp, Artificial
  Synthetic oligonucleotide
ctttctctgcttactaacaacaacattctacctcaacacaaaactacctc

SEQ ID NO: 25895 - DNA, 60 bp, Artificial
  Synthetic oligonucleotide
gatgatgctctgcattggaggtcctctacctctcttgtctagcatgacaggtctggcacc

SEQ ID NO: 25896 - DNA, 60 bp, Artificial
  Synthetic oligonucleotide
gaggatgatgctctgcattggaggtcctctacctctcttgtctagcatgacaggtctggc

SEQ ID NO: 25897 - DNA, 60 bp, Artificial
  Synthetic oligonucleotide
caaagttgcagaggacttgaaagagtctctgaaaagcctcgtggcgtggatcaatgccca

SEQ ID NO: 25898 - DNA, 60 bp, Artificial
  Synthetic oligonucleotide
tcaatgcccacaaggatgaagtggagaatggcaaagaggttgttgacggtttgaccaagc

SEQ ID NO: 25899 - DNA, 60 bp, Artificial
  Synthetic oligonucleotide
cccacaaggatgaagtggagaatggcaaagaggttgttgacggtttgaccaagcacctgc

SEQ ID NO: 25900 - DNA, 60 bp, Artificial
  Synthetic oligonucleotide
cagaggacttgaaagagtctctgaaaagcctcgtggcgtggatcaatgcccacaaggatg

SEQ ID NO: 25901 - DNA, 60 bp, Artificial
  Synthetic oligonucleotide
gtggcatggatcaatgcacacaaggatgaagtggagaatggcaaagaggttgttgatagt

SEQ ID NO: 25902 - DNA, 60 bp, Artificial
  Synthetic oligonucleotide
tgatagcttcactgccaatcggatttacatgcaccctggagtcttgacagcgggaagaat

SEQ ID NO: 25903 - DNA, 60 bp, Artificial
  Synthetic oligonucleotide
tgacagcttcactgccaatcggatttacatgcaccctggtgtcctgacagcaggaagaat

SEQ ID NO: 25904 - DNA, 60 bp, Artificial
  Synthetic oligonucleotide
atgacagcttcactgccaatcggatttacatgcaccctggtgtcctgacagcaggaagaa

SEQ ID NO: 25905 - DNA, 60 bp, Artificial
  Synthetic oligonucleotide
agctactactggctttggaaggcaggtgtgacagcagagatgtttccgacagtctcacag

SEQ ID NO: 25906 - DNA, 60 bp, Artificial
  Synthetic oligonucleotide
tctaccagtcttatctcaggcgaacacaatcaatgggaatacaactggaccaaaggatta

SEQ ID NO: 25907 - DNA, 60 bp, Artificial
  Synthetic oligonucleotide
gtcgcccaaaacacctgtatgtctcaatgccaactgcacagtccacaatgaaggcagatg

SEQ ID NO: 25908 - DNA, 60 bp, Artificial
  Synthetic oligonucleotide
gtcgcccaaaacacttgtatgtctcaatgccaactgcacagtccacaatgaaggcagatg

SEQ ID NO: 25909 - DNA, 60 bp, Artificial
  Synthetic oligonucleotide
actggctgaggtgaagggttgcacctggagtgacgggtatgcaatgtacctgggatttgc

SEQ ID NO: 25910 - DNA, 60 bp, Artificial
  Synthetic oligonucleotide
ctggctgaggtgaagggttgcacctggagtgacgggtatgcaatgtacctgggatttgcc

SEQ ID NO: 25911 - DNA, 60 bp, Artificial
  Synthetic oligonucleotide
gggaaatcaatgcccacgagggtcaactggtgatagccaggcagaaggtgagggatgcag

SEQ ID NO: 25912 - DNA, 60 bp, Artificial
  Synthetic oligonucleotide
gggaaatcaatgcccatgagggtcaattagtgatagccaggcagaaggtgagggatgcag

SEQ ID NO: 25913 - DNA, 60 bp, Artificial
  Synthetic oligonucleotide
ctgagttaggtgccttcttttctatccttcaggatatgaggaacacaatcatggcttcaa

SEQ ID NO: 25914 - DNA, 60 bp, Artificial
  Synthetic oligonucleotide
ctgaattaggtgccttcttttctatccttcaggatatgaggaacacaatcatggcttcaa

SEQ ID NO: 25915 - DNA, 60 bp, Artificial
  Synthetic oligonucleotide
gcacttgcaaaaatggagacaaaggaagctcaggctgtgagaaaacatgccatagatgct

SEQ ID NO: 25916 - DNA, 60 bp, Artificial
  Synthetic oligonucleotide
agagtagacgggcagctgtgtcagcattggaggacaagctggcagacttcaagaggcagc

SEQ ID NO: 25917 - DNA, 60 bp, Artificial
  Synthetic oligonucleotide
tacagagtagacgggcagctgtgtcagcattggaggacaagctggcagacttcaagaggc

SEQ ID NO: 25918 - DNA, 60 bp, Artificial
  Synthetic oligonucleotide
gacaagttatcgccaacatacttgccagtgaattgagttctgtgaaacgagattctgaac

SEQ ID NO: 25919 - DNA, 60 bp, Artificial
  Synthetic oligonucleotide
cgccaatatacttgccagtgaattgagttctgtgaaacgagactctgaacgcgaaggtct

SEQ ID NO: 25920 - DNA, 60 bp, Artificial
  Synthetic oligonucleotide
gacaagttatcgccaacatacttgccagtgaattgagttctgtgaaacgagattctgagc

SEQ ID NO: 25921 - DNA, 60 bp, Artificial
  Synthetic oligonucleotide
ctacctcaacacaaaactacctcactttaactacctcatttgctttttccttgattgtct

SEQ ID NO: 25922 - DNA, 60 bp, Artificial
  Synthetic oligonucleotide
agcaacaaagtcctcgcagaatacaaagtccctggtgagattgtgatgtctgtcaaagag

SEQ ID NO: 25923 - DNA, 60 bp, Artificial
  Synthetic oligonucleotide
tggcaaccggaacaacccagttcctgacgatggtcttaccctccaccgactcagtggatt

SEQ ID NO: 25924 - DNA, 60 bp, Artificial
  Synthetic oligonucleotide
tccaatgatatgaatttgaagggttgggcacaaatttcacattaatgcatgattaaattc

SEQ ID NO: 25925 - DNA, 60 bp, Artificial
  Synthetic oligonucleotide
cggcaacctaggaaatgaactgttgtataaggcacccagaaaggccttagcaactgtctg

SEQ ID NO: 25926 - DNA, 60 bp, Artificial
  Synthetic oligonucleotide
ggggtaggtacaggttgcactgcctgtggtgtttacctggacaaactaaaatctgtaggg

SEQ ID NO: 25927 - DNA, 60 bp, Artificial
  Synthetic oligonucleotide
ggattagtttggtgtgtgcttttaacatgtgagcttattgtctgggcagctagtgcggaa

SEQ ID NO: 25928 - DNA, 60 bp, Artificial
  Synthetic oligonucleotide
tgtctgggcagctagtgcggaaactccactgctggaatcaggatggtcagatacagccca

SEQ ID NO: 25929 - DNA, 53 bp, Artificial
  Synthetic oligonucleotide
acttgatttttcacttccttcctcatcttcttacagctatagacgaaagctca

SEQ ID NO: 25930 - DNA, 56 bp, Artificial
  Synthetic oligonucleotide
taacattaagactgcatttcattgttatggggcatgccaaaaatattcatacccct

SEQ ID NO: 25931 - DNA, 60 bp, Artificial
  Synthetic oligonucleotide
acgaaacaggttggggctgcaaccctggggattgtcctggggtaggtacaggttgcactg

SEQ ID NO: 25932 - DNA, 60 bp, Artificial
  Synthetic oligonucleotide
gtgctatgatctcaactgcaaccaaacacgctgccagccaacagtttacttgattgcccc

SEQ ID NO: 25933 - DNA, 60 bp, Artificial
  Synthetic oligonucleotide
gcgcctttggagatccaggggatataatgtcaacaactagtggtatgagatgtccagagc

SEQ ID NO: 25934 - DNA, 60 bp, Artificial
  Synthetic oligonucleotide
gatgtccagagcatactggctcattcaggaagatctgtggatttgcaacaacacctgtat

SEQ ID NO: 25935 - DNA, 60 bp, Artificial
  Synthetic oligonucleotide
gtctgaccaactcaagttagtaaaaacatttgaaggaataattaccaaaactggctgtac

SEQ ID NO: 25936 - DNA, 60 bp, Artificial
  Synthetic oligonucleotide
cctcacacacgctaacacttgctcagcctgctcatacctatgagacagtaactctccctg

SEQ ID NO: 25937 - DNA, 60 bp, Artificial
  Synthetic oligonucleotide
ggaagtcactcagagcctctacatgtgccaagtctagaagatatccgttcagcagaggtt

SEQ ID NO: 25938 - DNA, 64 bp, Artificial
  Synthetic oligonucleotide
gggaaggcatataaaattatctcattgaagtatactcgaaaagtttgtatccaactaggaacag

SEQ ID NO: 25939 - DNA, 60 bp, Artificial
  Synthetic oligonucleotide
agtttgtatccaactaggaacagagcagacttgtaagcatattgatgcaaatgactgttt

SEQ ID NO: 25940 - DNA, 60 bp, Artificial
  Synthetic oligonucleotide
tccaagcttcagccttcggatacgctacttttccttgggccgttagagcaaggtggaata

SEQ ID NO: 25941 - DNA, 60 bp, Artificial
  Synthetic oligonucleotide
aatgttgtcatgatactgattgttcttctgaagggcttgttgcatcggctccacaccttg

SEQ ID NO: 25942 - DNA, 60 bp, Artificial
  Synthetic oligonucleotide
tgactctgataaggtctatgatgatggtgctcccccttgtacattcaggtgctggttcac

SEQ ID NO: 25943 - DNA, 60 bp, Artificial
  Synthetic oligonucleotide
gctggttcaccaaatctggggaatggcttctaggaatcttgaatggtaactggattgttg

SEQ ID NO: 25944 - DNA, 60 bp, Artificial
  Synthetic oligonucleotide
tactttactcacataaaattccattctcgcttaccgaggcttttgttcctgcggagcata

SEQ ID NO: 25945 - DNA, 55 bp, Artificial
  Synthetic oligonucleotide
agctgcattaatggacagtgcccgtactgcatgactatgactgaggcaactgaaa

SEQ ID NO: 25946 - DNA, 60 bp, Artificial
  Synthetic oligonucleotide
ttattggacaatgcatttatacattcacaagcctgttttcattaatgcctgatgttgccc

SEQ ID NO: 25947 - DNA, 60 bp, Artificial
  Synthetic oligonucleotide
gagcaagttgtgaggcctattcagagaatgggatctttaacataagttccccaacatgcc

SEQ ID NO: 25948 - DNA, 61 bp, Artificial
  Synthetic oligonucleotide
gcaacattctcatgctcacattatacaaatgaatctaagtttaagctcatactagagaagg

SEQ ID NO: 25949 - DNA, 60 bp, Artificial
  Synthetic oligonucleotide
agttgtatggcaagtgtgtctaacagcagaatccaaataatttatgaaaagacacattgt

SEQ ID NO: 25950 - DNA, 60 bp, Artificial
  Synthetic oligonucleotide
ttttggctggatcctaataccagcaattactctagttgtcctaaagttcttaaaaatggc

SEQ ID NO: 25951 - DNA, 60 bp, Artificial
  Synthetic oligonucleotide
cctgatgttgcccattctttggcagttgaattatgtgtgcctgggctgcacgggtgggcc

SEQ ID NO: 25952 - DNA, 60 bp, Artificial
  Synthetic oligonucleotide
gccaacagtttacttgattgcccctgtgatcacatgcatgtcaataaggagttgtatggc

SEQ ID NO: 25953 - DNA, 60 bp, Artificial
  Synthetic oligonucleotide
gaccgataacagcaaaggtaccaagcactagttctagtgacaccttacaaggaacggcat

SEQ ID NO: 25954 - DNA, 60 bp, Artificial
  Synthetic oligonucleotide
cttgcctgaatctaaccatagtgtatgtgataaaaagactctccctctcacatggacagg

SEQ ID NO: 25955 - DNA, 60 bp, Artificial
  Synthetic oligonucleotide
aaatggaaaaagtaactggatgcactgtcttttgtaccttagctggcccaggagcaagtt

SEQ ID NO: 25956 - DNA, 60 bp, Artificial
  Synthetic oligonucleotide
tcaacacttgtacggagtgcagacccagaatttgtgttttcaccagggatcttgcctgaa

SEQ ID NO: 25957 - DNA, 60 bp, Artificial
  Synthetic oligonucleotide
ctgctgctacgacatttgaatcacagacaaagactgtaaacctacgtgggacctgtatcc

SEQ ID NO: 25958 - DNA, 60 bp, Artificial
  Synthetic oligonucleotide
caagaagcctgtattgtgctatgatctcaactgcaaccaaacacgctgccagccaacagt

SEQ ID NO: 25959 - DNA, 60 bp, Artificial
  Synthetic oligonucleotide
agcagaggttgtcagtaggatgatagtacatcctcgaggtgaggatcatgacccaatcca

SEQ ID NO: 25960 - DNA, 60 bp, Artificial
  Synthetic oligonucleotide
ggctcgactgagcttaacttgatacccattggggctgcatcagacctgaagctagaaagt

SEQ ID NO: 25961 - DNA, 60 bp, Artificial
  Synthetic oligonucleotide
catcagacctgaagctagaaagttcatgcgattttgacttatacaccacgccaatgaccc

SEQ ID NO: 25962 - DNA, 60 bp, Artificial
  Synthetic oligonucleotide
ctggatgcactgtcttttgtaccttagctggcccaggagcaagttgtgaggcctattcag

SEQ ID NO: 25963 - DNA, 60 bp, Artificial
  Synthetic oligonucleotide
agcctgtgaccttgcaatgtgttacggatcaacagttactaacctggctagagggtctaa

SEQ ID NO: 25964 - DNA, 58 bp, Artificial
  Synthetic oligonucleotide
tggattgaccctgatggcaatacaagggatcatgtaaatctcgttttaaatagagacg

SEQ ID NO: 25965 - DNA, 60 bp, Artificial
  Synthetic oligonucleotide
gagggtctaatacagttaaggttgttggaaaaggtggacattcaggctcctcattcaaat

SEQ ID NO: 25966 - DNA, 60 bp, Artificial
  Synthetic oligonucleotide
acacctgtatgtgagtatcaagggaataccatctcaggctataaacgaatgatggcaaca

SEQ ID NO: 25967 - DNA, 60 bp, Artificial
  Synthetic oligonucleotide
atgactgtttagtaactccatctgtaaaagtatgtattgttgggactgtgtccaagcttc

SEQ ID NO: 25968 - DNA, 60 bp, Artificial
  Synthetic oligonucleotide
gccctccaggctcattttaaagtgtgtaaattgacatcaaggtttcaggataatttaagg

SEQ ID NO: 25969 - DNA, 60 bp, Artificial
  Synthetic oligonucleotide
gctcttcaggctcattttaaagtgtgtaaattgacatcaaggtttcaagacaatctaagg

SEQ ID NO: 25970 - DNA, 60 bp, Artificial
  Synthetic oligonucleotide
ccagaagactgattgtaatgcaaatggttttcagggctattatatttgtcttgtaggaag

SEQ ID NO: 25971 - DNA, 60 bp, Artificial
  Synthetic oligonucleotide
gcacagcaacccagcaatcattcacaaggtggacatgggaaatgaaggatgacctagctg

SEQ ID NO: 25972 - DNA, 60 bp, Artificial
  Synthetic oligonucleotide
ggacatgggaaatgaaggatgacctagctgaaaacactcaggcatcatcgacaagttttc

SEQ ID NO: 25973 - DNA, 60 bp, Artificial
  Synthetic oligonucleotide
agtccagaaaactgattgtaatgcaaatggttttcagggctattatatctgtcttgttag

SEQ ID NO: 25974 - DNA, 60 bp, Artificial
  Synthetic oligonucleotide
aagacaatctaaggaagtcattggcagcttatgaaccaaagcaaggatgttatcggacat

SEQ ID NO: 25975 - DNA, 60 bp, Artificial
  Synthetic oligonucleotide
ttgtaatgcaaatggttttcagggctattatatctgtcttgttaggagtagctcagaacc

SEQ ID NO: 25976 - DNA, 60 bp, Artificial
  Synthetic oligonucleotide
gtatcttctcactaatccctgggattgcacattcacttgctgtagaattatgcgtgccag

SEQ ID NO: 25977 - DNA, 60 bp, Artificial
  Synthetic oligonucleotide
atcagccctccaggctcattttaaagtgtgtaaattgacatcaaggtttcaggataattt

SEQ ID NO: 25978 - DNA, 60 bp, Artificial
  Synthetic oligonucleotide
atcagctcttcaggctcattttaaagtgtgtaaattgacatcaaggtttcaagacaatct

SEQ ID NO: 25979 - DNA, 60 bp, Artificial
  Synthetic oligonucleotide
gaagtcattggcagcttatgaaccaaagcaaggatgttatcgaacattatcccttttccg

SEQ ID NO: 25980 - DNA, 60 bp, Artificial
  Synthetic oligonucleotide
gaagtcattggcagcttatgaaccaaagcaaggatgttatcggacattatcccttttccg

SEQ ID NO: 25981 - DNA, 60 bp, Artificial
  Synthetic oligonucleotide
gtgacatggcaatttgttatggtgcagaaagtgtgacactctcacgagggcaaaatactg

SEQ ID NO: 25982 - DNA, 60 bp, Artificial
  Synthetic oligonucleotide
aaggcctgtgacatggcaatttgttatggtgcagaaagtgtgacactctcacgaggacaa

SEQ ID NO: 25983 - DNA, 60 bp, Artificial
  Synthetic oligonucleotide
aggcctgtgacatggcaatttgttatggtgcagaaagtgtgacactctcacgaggacaaa

SEQ ID NO: 25984 - DNA, 60 bp, Artificial
  Synthetic oligonucleotide
tttggctgagaatccttgtaaagtagggctccaggcagcaaacatagaaggtgcttgggg

SEQ ID NO: 25985 - DNA, 60 bp, Artificial
  Synthetic oligonucleotide
aataaaggcctgtgacatggcaatttgttatggtgcagaaagtgtgacactctcacgagg

SEQ ID NO: 25986 - DNA, 60 bp, Artificial
  Synthetic oligonucleotide
caacgtaccagatttcagggcagatagaggcaaaaatccctcatacagtgagctccaaaa

SEQ ID NO: 25987 - DNA, 60 bp, Artificial
  Synthetic oligonucleotide
atcgcaacataccagatttcagggcagatagaggcaaaaatccctcatacagtgagctct

SEQ ID NO: 25988 - DNA, 60 bp, Artificial
  Synthetic oligonucleotide
ttcgcaacataccagatttcagggcagatagaggcaaaaatccctcacacagtgagctct

SEQ ID NO: 25989 - DNA, 60 bp, Artificial
  Synthetic oligonucleotide
gactggggcaaagaagcagttgacagtttccatctaggcgatgatatggacccagagctt

SEQ ID NO: 25990 - DNA, 60 bp, Artificial
  Synthetic oligonucleotide
gggaatgaggattcgcttcaaggatgacagctcgtttgaggatgtgaacgggatccggaa

SEQ ID NO: 25991 - DNA, 60 bp, Artificial
  Synthetic oligonucleotide
ccgggaaagtgtcgcacagtcaatccagagcaagattgatgaactaaggagacagctggc

SEQ ID NO: 25992 - DNA, 60 bp, Artificial
  Synthetic oligonucleotide
ccaacatctttgaccaaaggcccatccaccaaccgtgattacttaaaccaacggcaagga

SEQ ID NO: 25993 - DNA, 60 bp, Artificial
  Synthetic oligonucleotide
ttgaactggaatcattatactactgattattgaatgtgtttgcactaggggacgggttgg

SEQ ID NO: 25994 - DNA, 60 bp, Artificial
  Synthetic oligonucleotide
tctaccagtcttaccttcgaaggacacaatcaatgggaatccagctggaccaacgcatta

SEQ ID NO: 25995 - DNA, 60 bp, Artificial
  Synthetic oligonucleotide
cagttatgggaatgttatcgatctcaaccaccttgacattgatgaaccaactgggcagac

SEQ ID NO: 25996 - DNA, 60 bp, Artificial
  Synthetic oligonucleotide
aaagatcaagtctcaggtatggaaatgtccttgatgtaaatgcaattgacattgaagaac

SEQ ID NO: 25997 - DNA, 60 bp, Artificial
  Synthetic oligonucleotide
ccttctgatccgactgggattgagccagatgatcatctcaaggaaagatcaagtctcagg

SEQ ID NO: 25998 - DNA, 60 bp, Artificial
  Synthetic oligonucleotide
gtggccaaactgcagactggtttactattggtgtttacatagtcagctttacacttccta

SEQ ID NO: 25999 - DNA, 60 bp, Artificial
  Synthetic oligonucleotide
attgaagaacctagtggccaaactgcagactggtttactattggtgtttacatagtcagc

SEQ ID NO: 26000 - DNA, 60 bp, Artificial
  Synthetic oligonucleotide
cagctttacacttcctataatcttgaaagccttatacatgctttccacccggggtagaca

SEQ ID NO: 26001 - DNA, 60 bp, Artificial
  Synthetic oligonucleotide
catagtcagctttacacttcctataatcttgaaagccttatacatgctttccacccgggg

SEQ ID NO: 26002 - DNA, 51 bp, Artificial
  Synthetic oligonucleotide
gaataaggcgaccaaaacatctctatgtatctatgccaacagcacagtcta

SEQ ID NO: 26003 - DNA, 60 bp, Artificial
  Synthetic oligonucleotide
ccacccggggtagacaaacagtaaaggagaataaagggactagaatccggtttaaggatg

SEQ ID NO: 26004 - DNA, 60 bp, Artificial
  Synthetic oligonucleotide
caccaggaaggttcaggacaatagtctgtggattattcccagcacagatacaggcacgca

SEQ ID NO: 26005 - DNA, 60 bp, Artificial
  Synthetic oligonucleotide
ctaacaccaggaaggttcaggacaatagtctgtggattattcccagcacagatacaggca

SEQ ID NO: 26006 - DNA, 59 bp, Artificial
  Synthetic oligonucleotide
gtatgattaggtataatcaattaggtaaaattagattgatcacatagaatttactaatc

SEQ ID NO: 26007 - DNA, 60 bp, Artificial
  Synthetic oligonucleotide
tcacacaaaatttgtagggttagtttgatattcaaatccacaaatcacatgtatgattag

SEQ ID NO: 26008 - DNA, 60 bp, Artificial
  Synthetic oligonucleotide
ataagatttagtagttaaattagttaatcactacacattatattacatattcacacaaaa

SEQ ID NO: 26009 - DNA, 60 bp, Artificial
  Synthetic oligonucleotide
ccactcaaaatatagacactaatacactataatgcattacacacactcacataagattta

SEQ ID NO: 26010 - DNA, 60 bp, Artificial
  Synthetic oligonucleotide
ggctcagtccttgattgatcagaaagtgaaggagatctcaaatcaagagccactcaaaat

SEQ ID NO: 26011 - DNA, 60 bp, Artificial
  Synthetic oligonucleotide
tggctcagtccttgattgatcagaaagtgaaggagatctcaaatcaagagccactcaaaa

SEQ ID NO: 26012 - DNA, 52 bp, Artificial
  Synthetic oligonucleotide
ttgttgccaggcagaaactccgggatgcagaaaagacagtcgaggtggaccc

SEQ ID NO: 26013 - DNA, 60 bp, Artificial
  Synthetic oligonucleotide
gcagacttcaaaagacagcttgcggatcatgtatctcgtcagaaaatggatgagaaacct

SEQ ID NO: 26014 - DNA, 60 bp, Artificial
  Synthetic oligonucleotide
caacctcaaagacatccaagatgagatcacacgctacgagcagcagcttattgttgccag

SEQ ID NO: 26015 - DNA, 60 bp, Artificial
  Synthetic oligonucleotide
ccaagatgagatcacacgctacgagcagcagcttattgttgccaggcagaaactccggga

SEQ ID NO: 26016 - DNA, 60 bp, Artificial
  Synthetic oligonucleotide
cagcttgcggatcatgtatctcgtcagaaaatggatgagaaaccttctgatccgactggg

SEQ ID NO: 26017 - DNA, 60 bp, Artificial
  Synthetic oligonucleotide
tgagaaaccttctgatccgactgggattgagccagatgatcatctcaaggaaagatcaag

SEQ ID NO: 26018 - DNA, 60 bp, Artificial
  Synthetic oligonucleotide
ctaatcagcatatcaatgaatgtattcaaatttgcactataatcatctcaggtattcgtc

SEQ ID NO: 26019 - DNA, 60 bp, Artificial
  Synthetic oligonucleotide
cggggaaatactggaacatatcagttacactactaattgtaaggcagctactaatcagca

SEQ ID NO: 26020 - DNA, 60 bp, Artificial
  Synthetic oligonucleotide
tcatatctattaccaaagtattatcaaactacatgtacacaaggggggaccggggaaata

SEQ ID NO: 26021 - DNA, 60 bp, Artificial
  Synthetic oligonucleotide
ctagaccaaagaattattttgctgtatatggttgagtggggaaaagaaatggttgaccac

SEQ ID NO: 26022 - DNA, 60 bp, Artificial
  Synthetic oligonucleotide
attttgctgtatatggttgagtggggaaaagaaatggttgaccacttccaccttggtgat

SEQ ID NO: 26023 - DNA, 60 bp, Artificial
  Synthetic oligonucleotide
catcattctaccagtcttacctgcgtcgtacacagtctatgggaatacaactagaccaaa

SEQ ID NO: 26024 - DNA, 60 bp, Artificial
  Synthetic oligonucleotide
cattctaccagtcttacctgcgtcgtacacagtctatgggaatacaactagaccaaagaa

SEQ ID NO: 26025 - DNA, 60 bp, Artificial
  Synthetic oligonucleotide
gcagaaatcagatttatttcatgagaaggcaggaagtgctggaagacaaccatattccag

SEQ ID NO: 26026 - DNA, 52 bp, Artificial
  Synthetic oligonucleotide
gctgggatggcagaactgggtgcctttttctcaatattgcaagacatgagga

SEQ ID NO: 26027 - DNA, 60 bp, Artificial
  Synthetic oligonucleotide
gtaaaagattggccagaaagaataaaaaacttccttgagagcaaatgtccctttattaaa

SEQ ID NO: 26028 - DNA, 60 bp, Artificial
  Synthetic oligonucleotide
ttaagcagaaatcagatttatttcatgagaaggcaggaagtgctggaagacaaccatatt

SEQ ID NO: 26029 - DNA, 60 bp, Artificial
  Synthetic oligonucleotide
ggttgaccacttccaccttggtgatgatatggaccctgatctcaggaatctggctcagtc

SEQ ID NO: 26030 - DNA, 60 bp, Artificial
  Synthetic oligonucleotide
gaccacttccaccttggtgatgatatggaccctgatctcaggaatctggctcagtccttg

SEQ ID NO: 26031 - DNA, 60 bp, Artificial
  Synthetic oligonucleotide
ccgtgcagccttcaatgctgttgggcagctaagctgggctaaatcaggattctcaccagc

SEQ ID NO: 26032 - DNA, 60 bp, Artificial
  Synthetic oligonucleotide
gcagccttcaatgctgttgggcaattgagctgggctaaatcaggattctcaccagcagct

SEQ ID NO: 26033 - DNA, 60 bp, Artificial
  Synthetic oligonucleotide
gcagccttcaatgctgttggacaattgagctgggctaaatcaggattctcaccagcagct

SEQ ID NO: 26034 - DNA, 60 bp, Artificial
  Synthetic oligonucleotide
tgccttaagtagcctttttctgtatatatggatgtagatttcatttgatccttaaactaa

SEQ ID NO: 26035 - DNA, 60 bp, Artificial
  Synthetic oligonucleotide
cagggttcaacatacaggacatggacattgtggcctctgagcacctgctgcaccaatccc

SEQ ID NO: 26036 - DNA, 60 bp, Artificial
  Synthetic oligonucleotide
gaaaacagggttcaacatacaggacatggacattgtggcctctgagcacctgctgcacca

SEQ ID NO: 26037 - DNA, 60 bp, Artificial
  Synthetic oligonucleotide
gatatggaaatgtccttgatgtgaatgccatagatattgaggaaccgagtggtcaaacag

SEQ ID NO: 26038 - DNA, 60 bp, Artificial
  Synthetic oligonucleotide
acccacaaaaatagcagctaaatgggtgggtggtaggggacagcaaaaaactataaatca

SEQ ID NO: 26039 - DNA, 60 bp, Artificial
  Synthetic oligonucleotide
aacccacaaaaatagcagctaaatgggtgggtggtaggggacagcaaaaaactataaatc

SEQ ID NO: 26040 - DNA, 60 bp, Artificial
  Synthetic oligonucleotide
ggttgcacttggagtgatgggtatgcaatgtacctagggtttgcccctggtgctgagatg

SEQ ID NO: 26041 - DNA, 60 bp, Artificial
  Synthetic oligonucleotide
cagaaccccatatttctacaagtgcacttgaatggattgatccggatagttctcttagag

SEQ ID NO: 26042 - DNA, 59 bp, Artificial
  Synthetic oligonucleotide
agaaccccatatttctacaagtgcacttgaatggattgatcctgacagctcacttaggg

SEQ ID NO: 26043 - DNA, 60 bp, Artificial
  Synthetic oligonucleotide
gttaaccttgcagtacttaacacgcatttccctggaacccagtccattccactgcctgac

SEQ ID NO: 26044 - DNA, 60 bp, Artificial
  Synthetic oligonucleotide
agcagcttgctacataagtacctcagatcaggaggtgtcagacagcggaacactgaggtg

SEQ ID NO: 26045 - DNA, 60 bp, Artificial
  Synthetic oligonucleotide
ctcaaatcaggaggtgtcagacagcggaacactgaagtgctcttcagagagaagctaaat

SEQ ID NO: 26046 - DNA, 58 bp, Artificial
  Synthetic oligonucleotide
ggacactttcacaaactcctactccttttgtgagagtgttccaaatctggacagattt

SEQ ID NO: 26047 - DNA, 51 bp, Artificial
  Synthetic oligonucleotide
gcagatctttgctgcttgtaaaagtggtaagtatgttttttgtggtaaaac

SEQ ID NO: 26048 - DNA, 59 bp, Artificial
  Synthetic oligonucleotide
tacactccagagcagacgggcagctgtgtcagcattggaagacaaattggcagaattca

SEQ ID NO: 26049 - DNA, 60 bp, Artificial
  Synthetic oligonucleotide
cactgcctgactacggactcaccatacatcggttgtcaggttacctggccagatgggctc

SEQ ID NO: 26050 - DNA, 60 bp, Artificial
  Synthetic oligonucleotide
ctctgctcactaacaacaacattctacctcaacacaaaactacctcactttaactacctc

SEQ ID NO: 26051 - DNA, 60 bp, Artificial
  Synthetic oligonucleotide
aatcagctgtaaagctattgagtgagagcaaccctggaacagccagctctatctcactca

SEQ ID NO: 26052 - DNA, 60 bp, Artificial
  Synthetic oligonucleotide
cagtctgtcaaccgttaggatcttcttccttaatgccgcaaaagccaaagctgctctcac

SEQ ID NO: 26053 - DNA, 60 bp, Artificial
  Synthetic oligonucleotide
ggagtcggctattgttcgagtcttctacatcaatgcagcgaaggtcaaagcttacctacg

SEQ ID NO: 26054 - DNA, 60 bp, Artificial
  Synthetic oligonucleotide
tggagtcggctattgttcgagtcttctacatcaatgcagcgaaggtcaaagcttacctac

SEQ ID NO: 26055 - DNA, 60 bp, Artificial
  Synthetic oligonucleotide
agcagtctccattccagaatgcctacaacgtcaagggcaatgccaccagtgccaacatca

SEQ ID NO: 26056 - DNA, 60 bp, Artificial
  Synthetic oligonucleotide
gggcactggagacatcctagttgactgttcaggtgggcagcaacatttcttaaaagataa

SEQ ID NO: 26057 - DNA, 60 bp, Artificial
  Synthetic oligonucleotide
gcactggagacatcctagttgactgttcaggtgggcagcaacatttcttaaaagataacc

SEQ ID NO: 26058 - DNA, 60 bp, Artificial
  Synthetic oligonucleotide
gttaaccttgctgtacttaacacgcatttccctggaacccagtccattccactgcctgac

SEQ ID NO: 26059 - DNA, 60 bp, Artificial
  Synthetic oligonucleotide
tctatcaatcatacctcagacgcacacaatcaatgggaatacaactggaccagagaataa

SEQ ID NO: 26060 - DNA, 60 bp, Artificial
  Synthetic oligonucleotide
ctctcttctatctcccaatcttttattgattcaccggggtgttgtcttgacatcttgcgg

SEQ ID NO: 26061 - DNA, 60 bp, Artificial
  Synthetic oligonucleotide
ggttgggttgggtgggccatttatccgttatataatctcagggtggtttaggatgtcacc

SEQ ID NO: 26062 - DNA, 60 bp, Artificial
  Synthetic oligonucleotide
atcacagcagatcaaagagattgtagatgatgatatcagagaagcgatggatgaattctt

SEQ ID NO: 26063 - DNA, 60 bp, Artificial
  Synthetic oligonucleotide
ggaagatgtaaaatccctagttaatggcaaagacagcttcgaaacagaggcttttagcaa

SEQ ID NO: 26064 - DNA, 60 bp, Artificial
  Synthetic oligonucleotide
catggaagatgtaaaatccctagttaatggcaaagacagcttcgaaacagaggcttttag

SEQ ID NO: 26065 - DNA, 52 bp, Artificial
  Synthetic oligonucleotide
ttgaaacagatgaagacaatttcttgcttagttatctaagaggggaagaaga

SEQ ID NO: 26066 - DNA, 57 bp, Artificial
  Synthetic oligonucleotide
ggttgttgaaacagatgaagacaatttcttgcttagttatctaagaggggaagaaga

SEQ ID NO: 26067 - DNA, 60 bp, Artificial
  Synthetic oligonucleotide
aatggcaaaccaatttattttccaagatgttcctcaacggaatctcgctacatttaaccc

SEQ ID NO: 26068 - DNA, 60 bp, Artificial
  Synthetic oligonucleotide
cacatttaggatagctatgtgtgctaataacaatgtctttgctatagtatttccttcggc

SEQ ID NO: 26069 - DNA, 60 bp, Artificial
  Synthetic oligonucleotide
ccaatataacagacacaacacatttaggatagctatgtgtgctaataacaatgtctttgc

SEQ ID NO: 26070 - DNA, 60 bp, Artificial
  Synthetic oligonucleotide
ataagcagccaaataagaatgagattagtgaggggtggacattaatggttgggagggttc

SEQ ID NO: 26071 - DNA, 60 bp, Artificial
  Synthetic oligonucleotide
gaacagagtaagaagatattgtccaaaagcaatgggttgaagccagataattttatactg

SEQ ID NO: 26072 - DNA, 60 bp, Artificial
  Synthetic oligonucleotide
caaatatgtatctagctagcctaaccatgatggaacagagtaagaagatattgtccaaaa

SEQ ID NO: 26073 - DNA, 60 bp, Artificial
  Synthetic oligonucleotide
gactttgatgacgcaaatatgtatctagctagcctaaccatgatggaacagagtaagaag

SEQ ID NO: 26074 - DNA, 60 bp, Artificial
  Synthetic oligonucleotide
gcccaaaatattagactttgatgacgcaaatatgtatctagctagcctaaccatgatgga

SEQ ID NO: 26075 - DNA, 60 bp, Artificial
  Synthetic oligonucleotide
taccaaacagacagtgaaccttaaaattttgatccattccttgtgcaagaatttactagc

SEQ ID NO: 26076 - DNA, 60 bp, Artificial
  Synthetic oligonucleotide
tgccttgaggttgggcactgcaattatgagatgctgaggaatgctatgccgaattataca

SEQ ID NO: 26077 - DNA, 60 bp, Artificial
  Synthetic oligonucleotide
caaacacagttttgataaagagaaattggctccaagggaatttcaactacacctcaagtt

SEQ ID NO: 26078 - DNA, 60 bp, Artificial
  Synthetic oligonucleotide
gaagttgggcactgcaattatgagatgctgaggaatgctatgccgaattatacagattat

SEQ ID NO: 26079 - DNA, 60 bp, Artificial
  Synthetic oligonucleotide
ttcctattaacatctgtgggtgattgtgcctatatagggccttatgaagatttagctagt

SEQ ID NO: 26080 - DNA, 60 bp, Artificial
  Synthetic oligonucleotide
cggttctgataaagagaaattggctccaagggaatttcaattacacctcaagttatgtcc

SEQ ID NO: 26081 - DNA, 60 bp, Artificial
  Synthetic oligonucleotide
cataacccaaaaaggtattaaagacaatagagagctaacaagtatatggttccccggtag

SEQ ID NO: 26082 - DNA, 60 bp, Artificial
  Synthetic oligonucleotide
gtgggtgattgtgcctatatagggccttatgaagatttagctagtcgaatatcatcagcc

SEQ ID NO: 26083 - DNA, 58 bp, Artificial
  Synthetic oligonucleotide
ggagccagcacgctacatgattatgaactcattagctatctccagcaatgttaaggat

SEQ ID NO: 26084 - DNA, 60 bp, Artificial
  Synthetic oligonucleotide
gttctatctttaacagagccagcacgctacatgattatgaactcattagctatctccagc

SEQ ID NO: 26085 - DNA, 60 bp, Artificial
  Synthetic oligonucleotide
cactagcctgtctatcacaaagagtgttctatctttaacggagccagcacgctacatgat

SEQ ID NO: 26086 - DNA, 60 bp, Artificial
  Synthetic oligonucleotide
atacactagcctgtctatcacaaagagtgttctatctttaacagagccagcacgctacat

SEQ ID NO: 26087 - DNA, 60 bp, Artificial
  Synthetic oligonucleotide
gatagctatgtgtgctaataacaatgtctttgctatagtatttccttcggctgacataaa

SEQ ID NO: 26088 - DNA, 60 bp, Artificial
  Synthetic oligonucleotide
gagaaacctgagttgttagtgactaaaggggaagatatgaaagattatatggaatctgtg

SEQ ID NO: 26089 - DNA, 60 bp, Artificial
  Synthetic oligonucleotide
tcccctgccctagttttgagagcatatagtaaaaataatcctgacatccagggcgctgat

SEQ ID NO: 26090 - DNA, 60 bp, Artificial
  Synthetic oligonucleotide
gcccgtaatagacttttctggcatcagggacaaatatataaacctacatgatagtagagc

SEQ ID NO: 26091 - DNA, 60 bp, Artificial
  Synthetic oligonucleotide
ctcacataagcccataatagacttttctggtatcagggacaaatatataaacctacatga

SEQ ID NO: 26092 - DNA, 65 bp, Artificial
  Synthetic oligonucleotide
gatgtgaaggttagcaaactttatgacataataaagaatgggtataatcgaactgacttcatacc

SEQ ID NO: 26093 - DNA, 60 bp, Artificial
  Synthetic oligonucleotide
ccagtacccgagcggaggctctttgaagaatctgtcaagtttaatgcttatgaatcagag

SEQ ID NO: 26094 - DNA, 60 bp, Artificial
  Synthetic oligonucleotide
atatcatagattataaggtctctgtatcgaatgaaagcagtgttataacatatgacaaat

SEQ ID NO: 26095 - DNA, 60 bp, Artificial
  Synthetic oligonucleotide
gggttaactagggacatatccgatagattaagtattccaatagaaatagttatcgtccgt

SEQ ID NO: 26096 - DNA, 60 bp, Artificial
  Synthetic oligonucleotide
gagatttgcatattaactctgatagatttaaagagctttaccctacaatagtggtggata

SEQ ID NO: 26097 - DNA, 60 bp, Artificial
  Synthetic oligonucleotide
gaaagttgcacatggtgacttcactcttacagcaccctggtgcaagactgggtgccctga

SEQ ID NO: 26098 - DNA, 60 bp, Artificial
  Synthetic oligonucleotide
gacttcactcttacagcaccctggtgcaagactgggtgccctgaattttggaagcacccc

SEQ ID NO: 26099 - DNA, 60 bp, Artificial
  Synthetic oligonucleotide
ttatgggtgagacaagcgacatgagagggagatctattttaacacctagaaaattcacaa

SEQ ID NO: 26100 - DNA, 60 bp, Artificial
  Synthetic oligonucleotide
aaattcacaacagcaggtagtttaaggaaattatattctttcagtaagtaccaggataga

SEQ ID NO: 26101 - DNA, 60 bp, Artificial
  Synthetic oligonucleotide
gatatttagttctagatgcagagatggaccctagtgatattatgggtgagacaagcgaca

SEQ ID NO: 26102 - DNA, 60 bp, Artificial
  Synthetic oligonucleotide
tttagttctagatgcagagatggaccctagtgatattatgggtgagacaagcgacatgag

SEQ ID NO: 26103 - DNA, 60 bp, Artificial
  Synthetic oligonucleotide
taaaatactcagatatttagttctagatgcagagatggaccctagtgatattatgggtga

SEQ ID NO: 26104 - DNA, 60 bp, Artificial
  Synthetic oligonucleotide
tttagctagtcgaatatcatcagcccagacagccataaagcatggttgtccacccagtct

SEQ ID NO: 26105 - DNA, 60 bp, Artificial
  Synthetic oligonucleotide
atcatcagcccagacagccataaagcatggttgtccacccagtctagcatgggtgtcgat

SEQ ID NO: 26106 - DNA, 60 bp, Artificial
  Synthetic oligonucleotide
cagacagtgaaccttaaaattttgatccattccttgtgcaagaatttactagcagacact

SEQ ID NO: 26107 - DNA, 60 bp, Artificial
  Synthetic oligonucleotide
caagttcgaagtcttgcctcaaaataggggactttagaaaagagaaagagctgcagtcag

SEQ ID NO: 26108 - DNA, 60 bp, Artificial
  Synthetic oligonucleotide
gtattaaagacaatagagagctaacaagtatatggttccccggtagcgtaacactaaagg

SEQ ID NO: 26109 - DNA, 60 bp, Artificial
  Synthetic oligonucleotide
gagatatggtctacaaattgtaccaaacagacagtgaaccttaaaattttgatccattcc

SEQ ID NO: 26110 - DNA, 60 bp, Artificial
  Synthetic oligonucleotide
ggtctacaaattgtaccaaacagacagtgaaccttaaaattttgatccattccttgtgta

SEQ ID NO: 26111 - DNA, 60 bp, Artificial
  Synthetic oligonucleotide
gcaggcagtttaaggaaattatattctttcagtaagtaccaggatagactgtcttcccct

SEQ ID NO: 26112 - DNA, 60 bp, Artificial
  Synthetic oligonucleotide
gattggcaaacatctcgtcacttggacatgggttcaattaatctaacaataaccggttac

SEQ ID NO: 26113 - DNA, 60 bp, Artificial
  Synthetic oligonucleotide
ctaggttcaaggcatgggcttaaatttgagaatatgtccaaaatccaaacatacccaggc

SEQ ID NO: 26114 - DNA, 60 bp, Artificial
  Synthetic oligonucleotide
ggatcacatgtaccattcatttgatgtccctaaatgttttatggggaatcctatcactag

SEQ ID NO: 26115 - DNA, 60 bp, Artificial
  Synthetic oligonucleotide
catttacaagttcgaagtcttgcctcaaaataggggactttagaaaagagaaagagctgc

SEQ ID NO: 26116 - DNA, 60 bp, Artificial
  Synthetic oligonucleotide
atcaagagtatcaacaattcttggctaggattaatactgcaagggatgcatgtgtagcca

SEQ ID NO: 26117 - DNA, 60 bp, Artificial
  Synthetic oligonucleotide
ggtttgctgctggtgctgagatgttcctgcaaacattcactttcttccctttggtgattg

SEQ ID NO: 26118 - DNA, 60 bp, Artificial
  Synthetic oligonucleotide
gggtttgctgctggtgctgagatgttcctgcaaacattcactttcttccctttggtgatt

SEQ ID NO: 26119 - DNA, 60 bp, Artificial
  Synthetic oligonucleotide
ggtgacgcaatgtacctggggtttgctgctggtgctgagatgttcctgcaaacattcact

SEQ ID NO: 26120 - DNA, 60 bp, Artificial
  Synthetic oligonucleotide
atgatggtgatgcaatgtacctggggtttgctgctggtgctgagatgttcctgcagacat

SEQ ID NO: 26121 - DNA, 60 bp, Artificial
  Synthetic oligonucleotide
atgatggtgacgcaatgtacctggggtttgctgctggtgctgagatgttcctgcagacat

SEQ ID NO: 26122 - DNA, 60 bp, Artificial
  Synthetic oligonucleotide
atgatggtgacgcaatgtacctggggtttgctgctggtgctgagatgttcctgcaaacat

SEQ ID NO: 26123 - DNA, 60 bp, Artificial
  Synthetic oligonucleotide
tttggtgattgagatgcatagggttctcaaggatggcatggatgtcaactttatgaagaa

SEQ ID NO: 26124 - DNA, 60 bp, Artificial
  Synthetic oligonucleotide
ctttcttccctttggtgattgagatgcatagggttctcaaggatggcatggatgtcaact

SEQ ID NO: 26125 - DNA, 60 bp, Artificial
  Synthetic oligonucleotide
actctggcctgggccagaactggattctccccagcagcaagagacttcttgcgccaatcc

SEQ ID NO: 26126 - DNA, 60 bp, Artificial
  Synthetic oligonucleotide
tctggcctgggccagaactggattctccccagcaggaagagacttcttgcgccaattcgg

SEQ ID NO: 26127 - DNA, 60 bp, Artificial
  Synthetic oligonucleotide
ggcactttcgcctgggccagaactggattctccccagcagcaagagacttcttgcgccaa

SEQ ID NO: 26128 - DNA, 60 bp, Artificial
  Synthetic oligonucleotide
tgaagctgtaggcactctggcctgggccagaactggattctccccagcagcaagagactt

SEQ ID NO: 26129 - DNA, 60 bp, Artificial
  Synthetic oligonucleotide
ccctgcaccgtctgtcaggatacctagctcgctgggcctttacccagatgcgatcaccaa

SEQ ID NO: 26130 - DNA, 53 bp, Artificial
  Synthetic oligonucleotide
ttggtgattgagatgcatagggttctcaaggatggcatggatgtcaactttat

SEQ ID NO: 26131 - DNA, 60 bp, Artificial
  Synthetic oligonucleotide
cgaaggttgttgacattgaggaactgattgttgatgcaagagctgagtctgcaactcttt

SEQ ID NO: 26132 - DNA, 60 bp, Artificial
  Synthetic oligonucleotide
aagtagatgaatcgaaggttgttgacattgaggaactgattgttgatgcaagagctgagt

SEQ ID NO: 26133 - DNA, 60 bp, Artificial
  Synthetic oligonucleotide
ggatgctgcattaggaacaaatagagcctattttataacacgtcaggcacaagtagatga

SEQ ID NO: 26134 - DNA, 60 bp, Artificial
  Synthetic oligonucleotide
gctgcattaggaacaaatagagcctattttataacacgtcaggcacaagtagatgaatcg

SEQ ID NO: 26135 - DNA, 60 bp, Artificial
  Synthetic oligonucleotide
gctgagcggtgcccattcctacctgagccaagagaccctaaggatgctgcatcaggaaca

SEQ ID NO: 26136 - DNA, 60 bp, Artificial
  Synthetic oligonucleotide
agagctgagtctgcaactcttttcacagacattgcaacgccccattcggtctgggtcttc

SEQ ID NO: 26137 - DNA, 60 bp, Artificial
  Synthetic oligonucleotide
gattttctagctgagcggtgcccattcctacctgagccaagagaccctaaggatgctgca

SEQ ID NO: 26138 - DNA, 60 bp, Artificial
  Synthetic oligonucleotide
ggcagatgagatcactccagggcgtttccgcacgattgcatgtggattgttccctgcaca

SEQ ID NO: 26139 - DNA, 60 bp, Artificial
  Synthetic oligonucleotide
gatgaaggcagatgagatcactccagggcgtttccgcacgattgcatgtggattgttccc

SEQ ID NO: 26140 - DNA, 58 bp, Artificial
  Synthetic oligonucleotide
ccaagtggccaaacagcagattggaaagctattggaatgtatatcctgagctttgcaa

SEQ ID NO: 26141 - DNA, 60 bp, Artificial
  Synthetic oligonucleotide
cgggaatgttcttgatgtgaattcaattgatttggaagaaccaagtggccaaacagcaga

SEQ ID NO: 26142 - DNA, 60 bp, Artificial
  Synthetic oligonucleotide
ctggatcaaaagataatcatcctttacatgattcattggggaaaggaagctgttaaccat

SEQ ID NO: 26143 - DNA, 60 bp, Artificial
  Synthetic oligonucleotide
atcatcctttacatgattcattggggaaaggaagctgttaaccatttccaccttggtgat

SEQ ID NO: 26144 - DNA, 60 bp, Artificial
  Synthetic oligonucleotide
actcttttcacagacattgcaacgccccattcggtctgggtcttcgcatgtgcacctgac

SEQ ID NO: 26145 - DNA, 60 bp, Artificial
  Synthetic oligonucleotide
cggcattctaccaatcctaccttagacgaactcagtcaatgggaattcaactggatcaaa

SEQ ID NO: 26146 - DNA, 60 bp, Artificial
  Synthetic oligonucleotide
acctacctcattatccaactcccctttcctatcacctcaacaaaactacctcattataag

SEQ ID NO: 26147 - DNA, 60 bp, Artificial
  Synthetic oligonucleotide
actgagatacgggaatgttcttgatgtgaattcaattgatttggaagaaccaagtggcca

SEQ ID NO: 26148 - DNA, 60 bp, Artificial
  Synthetic oligonucleotide
ctacctcatcatccaactccctttccctatcacctcaacaaaactacctcattataagta

SEQ ID NO: 26149 - DNA, 60 bp, Artificial
  Synthetic oligonucleotide
cagaaaaggcagtggaagtggacccagatgacgttaacaaaagcacattacagggtagac

SEQ ID NO: 26150 - DNA, 60 bp, Artificial
  Synthetic oligonucleotide
gaaaaggcagtggaagtggacccagatgacgttaacaaaagcacattacagggtagacgg

SEQ ID NO: 26151 - DNA, 60 bp, Artificial
  Synthetic oligonucleotide
cagggtagacgggcggctgtgtctgcattggaaaccaaactcggggagctcaaacgacag

SEQ ID NO: 26152 - DNA, 60 bp, Artificial
  Synthetic oligonucleotide
gggtagacgggcggctgtgtctgcattggaaaccaaactcggagaactcaaacgacagct

SEQ ID NO: 26153 - DNA, 60 bp, Artificial
  Synthetic oligonucleotide
ggcggctgtgtctgcattggaaaccaaactcggggagctcaaacgacagctggcagacct

SEQ ID NO: 26154 - DNA, 53 bp, Artificial
  Synthetic oligonucleotide
gagtttgaaaaaacaaagggttccatggtttgtgagatctgtaagtacgagtg

SEQ ID NO: 26155 - DNA, 60 bp, Artificial
  Synthetic oligonucleotide
ttatgacaaaactcaagatattggtcattattgcttaagccctggatgtactactgttcg

SEQ ID NO: 26156 - DNA, 60 bp, Artificial
  Synthetic oligonucleotide
aaaactcaagatattggtcattattgcttaagccctggatgtactactgtccggtaccct

SEQ ID NO: 26157 - DNA, 52 bp, Artificial
  Synthetic oligonucleotide
tctgtacagttccatgcctgcttcaatcagcatatgtcttgcgtcagatttt

SEQ ID NO: 26158 - DNA, 60 bp, Artificial
  Synthetic oligonucleotide
ctgtacagttccatgcctgcttcaatcagcatatgtcttgcgtcagattcttacacagga

SEQ ID NO: 26159 - DNA, 60 bp, Artificial
  Synthetic oligonucleotide
ggcccaaaatctgtacagttccatgcctgcttcaatcagcatatgtcttgcgtcagattt

SEQ ID NO: 26160 - DNA, 60 bp, Artificial
  Synthetic oligonucleotide
aatctgtacagttccatgcctgcttcaatcagcatatgtcttgcgtcagatttttacaca

SEQ ID NO: 26161 - DNA, 60 bp, Artificial
  Synthetic oligonucleotide
tgaaacttcacagagcttctggattgtgccctggttataaaagcctaagagctgccagag

SEQ ID NO: 26162 - DNA, 60 bp, Artificial
  Synthetic oligonucleotide
ggggacacatcaatgtaatagaagttggtgatgacctgtcactccatactgaatcatatg

SEQ ID NO: 26163 - DNA, 52 bp, Artificial
  Synthetic oligonucleotide
tctgtacaattccatgcctgcttcaatcagcatatgtcttgcgtcagatttt

SEQ ID NO: 26164 - DNA, 57 bp, Artificial
  Synthetic oligonucleotide
tctgtacagttccatgcctgcttcaatcagcatatgtcctgtgtcagattcttacac

SEQ ID NO: 26165 - DNA, 54 bp, Artificial
  Synthetic oligonucleotide
aatctgtacagttccatgcctgcttcaatcagcatatgtcttgcgtcagatttt

SEQ ID NO: 26166 - DNA, 60 bp, Artificial
  Synthetic oligonucleotide
aatctgtacagttccatgcctgcttcaatcagcatatgtcttgcgtcagattcttacaca

SEQ ID NO: 26167 - DNA, 60 bp, Artificial
  Synthetic oligonucleotide
tgaaactgcatagagcttctggattgtgccctggttataaaagcctaagagctgccagag

SEQ ID NO: 26168 - DNA, 60 bp, Artificial
  Synthetic oligonucleotide
tgaaactgcacagagcttctggattgtgccctggttataaaagcctaagagctgccagag

SEQ ID NO: 26169 - DNA, 60 bp, Artificial
  Synthetic oligonucleotide
gtgccctggttataaaagcctaagagctgccagagtcatgtgcaaatcaaaagggcctgc

SEQ ID NO: 26170 - DNA, 60 bp, Artificial
  Synthetic oligonucleotide
tcgtgcaaaaaatgcaaattatgtggcttagtgtatcatccattcacagagtgtggcaca

SEQ ID NO: 26171 - DNA, 60 bp, Artificial
  Synthetic oligonucleotide
cagagcttctggattgtgccctggttataaaagcctaagagctgccagagtcatgtgcaa

SEQ ID NO: 26172 - DNA, 60 bp, Artificial
  Synthetic oligonucleotide
gcttctggattgtgccctggttataaaagcctaagagctgccagagtcatgtgcaagtcg

SEQ ID NO: 26173 - DNA, 60 bp, Artificial
  Synthetic oligonucleotide
gcttctggattatgccctggttataaaagcctaagagctgccagagtcatgtgcaagtcg

SEQ ID NO: 26174 - DNA, 60 bp, Artificial
  Synthetic oligonucleotide
ctttacgcttcaccgcatctcgggctacttagctcgctgggttgctgagcagtgcaaggc

SEQ ID NO: 26175 - DNA, 60 bp, Artificial
  Synthetic oligonucleotide
agtgtcagacactgcctttacgcttcaccgcatctcgggctacttagctcgctgggttgc

SEQ ID NO: 26176 - DNA, 60 bp, Artificial
  Synthetic oligonucleotide
ctttacgctccatcgcatctcgggctacttagctcgctgggttgctgagcagtgcaaggc

SEQ ID NO: 26177 - DNA, 60 bp, Artificial
  Synthetic oligonucleotide
ttcatctctaattaaacatttctacctccgtacacttatatatatgcacgtagcatatat

SEQ ID NO: 26178 - DNA, 60 bp, Artificial
  Synthetic oligonucleotide
gtgttgaaccaggagaccatctgaaagagagatcaatgctcagctatgggaatgtgctgg

SEQ ID NO: 26179 - DNA, 60 bp, Artificial
  Synthetic oligonucleotide
atcataagatgcaggcacattcaacccataagcagcaactaatggtagttccatgatttt

SEQ ID NO: 26180 - DNA, 60 bp, Artificial
  Synthetic oligonucleotide
atcataagatgcgggcacattcaacccataagcagcaactaatggtagttccatgatttt

SEQ ID NO: 26181 - DNA, 60 bp, Artificial
  Synthetic oligonucleotide
gtgcaggaagcagatctttgctgcttgtaaaagtggtaagtatgttttctgtggtaaaac

SEQ ID NO: 26182 - DNA, 60 bp, Artificial
  Synthetic oligonucleotide
tagaggaaatgtttaaatcagctgtaaagctattgagtgagagcaaccctggaacagcca

SEQ ID NO: 26183 - DNA, 60 bp, Artificial
  Synthetic oligonucleotide
gccaactgcacaatcaacaatgaaggctgaagagataacacctggacggttcaggacaat

SEQ ID NO: 26184 - DNA, 60 bp, Artificial
  Synthetic oligonucleotide
gcctacagcacaatcaacaatgaaggctgaagagataacaccaggcagatttagaacaat

SEQ ID NO: 26185 - DNA, 60 bp, Artificial
  Synthetic oligonucleotide
cctactgatccgactgggattgaacctgatgaccacctcaaagagagatcaagcctcaga

SEQ ID NO: 26186 - DNA, 60 bp, Artificial
  Synthetic oligonucleotide
cgagtggccaaacagcagattggtatacaattggagtgtatgtaatagggttcacactgc

SEQ ID NO: 26187 - DNA, 60 bp, Artificial
  Synthetic oligonucleotide
gagtggccaaacagcagattggtatacaattggagtgtatgtaatagggttcacactgcc

SEQ ID NO: 26188 - DNA, 60 bp, Artificial
  Synthetic oligonucleotide
gtggccaaacagcagattggtatacaattggagtctatgtaataggatttacacttccca

SEQ ID NO: 26189 - DNA, 60 bp, Artificial
  Synthetic oligonucleotide
caagtggtcaaacagcagattggtatacaattggagtttatgtaataggattcacaatcc

SEQ ID NO: 26190 - DNA, 60 bp, Artificial
  Synthetic oligonucleotide
ggccaaacagcagattggtatacaattggagtttatgtgatgggattcacacttcctatc

SEQ ID NO: 26191 - DNA, 60 bp, Artificial
  Synthetic oligonucleotide
ggcgacgctatggttccttgactgcagacaaatggatgtcgcaaaaaactgttgccatag

SEQ ID NO: 26192 - DNA, 60 bp, Artificial
  Synthetic oligonucleotide
cagagtcaagcatggaatgatggatccacagtacctaaaaaaggcattaaggcgacgcta

SEQ ID NO: 26193 - DNA, 60 bp, Artificial
  Synthetic oligonucleotide
attccgttaggatctttttccttaatgccgctaaggccaaggctgctctcgctcgtaagc

SEQ ID NO: 26194 - DNA, 51 bp, Artificial
  Synthetic oligonucleotide
tgcagggtatgtggacttttgtgttaaacatggagaatcaatcaatctcca

SEQ ID NO: 26195 - DNA, 60 bp, Artificial
  Synthetic oligonucleotide
ccatccaccggctgtcagggtatctggctagatgggtgttagagcagtttaaggaaaatg

SEQ ID NO: 26196 - DNA, 60 bp, Artificial
  Synthetic oligonucleotide
tcttaccatccaccggctgtcagggtatctggctagatgggtgttagagcagtttaagga

SEQ ID NO: 26197 - DNA, 60 bp, Artificial
  Synthetic oligonucleotide
tcaacccaatagctgagtctaacggaatcagatgggacaatggggcagaaatatacctgg

SEQ ID NO: 26198 - DNA, 60 bp, Artificial
  Synthetic oligonucleotide
tgtcatcaacccaatagctgagtctaacggaatcagatgggacaatggggcagaaatata

SEQ ID NO: 26199 - DNA, 60 bp, Artificial
  Synthetic oligonucleotide
gttcttggaaacattcaacttttacccgctgacaattggcatctacagagtcaagcatgg

SEQ ID NO: 26200 - DNA, 60 bp, Artificial
  Synthetic oligonucleotide
gaaatgttcttggaaacattcaacttttacccgctgacaattggcatctacagagtcaag

SEQ ID NO: 26201 - DNA, 60 bp, Artificial
  Synthetic oligonucleotide
gggataccgagaggattaatttggaagtgtaatgtctgatttagtcttttatgatgtcgc

SEQ ID NO: 26202 - DNA, 60 bp, Artificial
  Synthetic oligonucleotide
tgcagggtatgtggacttttgtgttaaacatggagaatcaatcaatctccattccgttag

SEQ ID NO: 26203 - DNA, 60 bp, Artificial
  Synthetic oligonucleotide
gttataacttgggataccgagaggattaatttggaagtgtaatgtctgatttagtctttt

SEQ ID NO: 26204 - DNA, 50 bp, Artificial
  Synthetic oligonucleotide
ggattaggatgtcaacctaatgagaaatgtagtagagtatatttcttcga

SEQ ID NO: 26205 - DNA, 55 bp, Artificial
  Synthetic oligonucleotide
aggtggtctcagcgacaccgcaagagtattcctgcagaagtttggaatcaaactt

SEQ ID NO: 26206 - DNA, 60 bp, Artificial
  Synthetic oligonucleotide
aggtggtctcagcgacaccgcaagagtattcctgcagaagtttggaatcaaacttccgtg

SEQ ID NO: 26207 - DNA, 60 bp, Artificial
  Synthetic oligonucleotide
gttgccatagccaaaagcctgaaggatgttgaacaactcaaatggggaagaggtggtctc

SEQ ID NO: 26208 - DNA, 60 bp, Artificial
  Synthetic oligonucleotide
agcctgaaggatgttgaacaactcaaatggggaagaggtggtctcagcgacaccgcaaga

SEQ ID NO: 26209 - DNA, 60 bp, Artificial
  Synthetic oligonucleotide
cacaacaataacagcttaatgggtgggtggtaggggacagataagaaataggattaggat

SEQ ID NO: 26210 - DNA, 60 bp, Artificial
  Synthetic oligonucleotide
acagcttaatgggtgggtggtaggggacagataagaaataggattaggatgtcaacctaa

SEQ ID NO: 26211 - DNA, 60 bp, Artificial
  Synthetic oligonucleotide
aacttccgtgaatacaaaatgtcacaattaggctctaaattacaaattttacttctttaa

SEQ ID NO: 26212 - DNA, 60 bp, Artificial
  Synthetic oligonucleotide
acttctttaatttggtcgcaattggctatccaaaaagggttttaagaacccacaacaata

SEQ ID NO: 26213 - DNA, 60 bp, Artificial
  Synthetic oligonucleotide
gggacatcaacaagtcaggccgttcaggaatagcacttgttgcaacaggccttgctaagc

SEQ ID NO: 26214 - DNA, 60 bp, Artificial
  Synthetic oligonucleotide
cctccggaggacacagtctatgggtattcaactggaccagcgcatcattgtgcttttcat

SEQ ID NO: 26215 - DNA, 60 bp, Artificial
  Synthetic oligonucleotide
ctccggaggacacagtctatgggtattcaactggaccagcgcatcattgtgcttttcatg

SEQ ID NO: 26216 - DNA, 60 bp, Artificial
  Synthetic oligonucleotide
tctatgggtattcaactggaccagcgcatcattgtgctttttatgatagaatggggtaaa

SEQ ID NO: 26217 - DNA, 60 bp, Artificial
  Synthetic oligonucleotide
gggttctgatattgtcaaccatttccatctgggcgatgatatgagccctgagctcagaac

SEQ ID NO: 26218 - DNA, 60 bp, Artificial
  Synthetic oligonucleotide
tggggttctgatattgtcaaccatttccatctgggcgatgatatgagccctgagctcaga

SEQ ID NO: 26219 - DNA, 60 bp, Artificial
  Synthetic oligonucleotide
tggctaggatgaattgcgaggattcatacaggtacttcttgcataatagtgaatctttta

SEQ ID NO: 26220 - DNA, 60 bp, Artificial
  Synthetic oligonucleotide
gcgaggattcatacaggtacttcttgcataatagtgaatcttttagggaagatgcccttt

SEQ ID NO: 26221 - DNA, 60 bp, Artificial
  Synthetic oligonucleotide
gctgctagagtggcaagtcatgtggcaaagtctgctcatcggaggattagtgatctgcgg

SEQ ID NO: 26222 - DNA, 60 bp, Artificial
  Synthetic oligonucleotide
catcggaggattagtgatctgcggtttcacatttatttttctgtcagcccggtagagttg

SEQ ID NO: 26223 - DNA, 60 bp, Artificial
  Synthetic oligonucleotide
ccccctacattccccccaatttagaaccccacccaaatcaatgaccaattattcaccctt

SEQ ID NO: 26224 - DNA, 60 bp, Artificial
  Synthetic oligonucleotide
cccaatttagaaccccacccaaatcaatgaccaattattcacccttacccttccctcccc

SEQ ID NO: 26225 - DNA, 60 bp, Artificial
  Synthetic oligonucleotide
gaatcttttagggaagatgccctttccacagtgtggacaaaagactggcctaccccaaag

SEQ ID NO: 26226 - DNA, 60 bp, Artificial
  Synthetic oligonucleotide
gggaagatgccctttccacagtgtggacaaaagactggcctaccccaaaggagcaacttg

SEQ ID NO: 26227 - DNA, 60 bp, Artificial
  Synthetic oligonucleotide
ggcacacttaactatggctggtgttagcacaaggtcttcattgagtatcccaacagccat

SEQ ID NO: 26228 - DNA, 59 bp, Artificial
  Synthetic oligonucleotide
caacagccattaagagcttctttttgtcctccctagtgaagaacctaccactcatagca

SEQ ID NO: 26229 - DNA, 60 bp, Artificial
  Synthetic oligonucleotide
ccaaagtcttcaaaagacaagaatcggaaatttccaaggttctatgtcaatgtgaggatg

SEQ ID NO: 26230 - DNA, 60 bp, Artificial
  Synthetic oligonucleotide
gacaagaatcggaaatttccaaggttctatgtcaatgtgaggatgggagagtttgaccca

SEQ ID NO: 26231 - DNA, 60 bp, Artificial
  Synthetic oligonucleotide
cctgagtctgcagcttcatcaaggaaggctaaggcaatctcacgatagttctcctcagac

SEQ ID NO: 26232 - DNA, 60 bp, Artificial
  Synthetic oligonucleotide
tagtgcctgagtctgcagcttcatcaaggaaggctaaggcaatctcacgatagttctcct

SEQ ID NO: 26233 - DNA, 60 bp, Artificial
  Synthetic oligonucleotide
cctctttgggtcgaacccctggtaagcaaactcattcacccaggcagtaatagtgcctga

SEQ ID NO: 26234 - DNA, 58 bp, Artificial
  Synthetic oligonucleotide
cctctttgggtcgaacccctggtaagcaaactcattcacccaggcagtaatagtgcct

SEQ ID NO: 26235 - DNA, 60 bp, Artificial
  Synthetic oligonucleotide
caaggttgaggactatcatcattttaacgtctttcttccagtctctccccttggcggtcc

SEQ ID NO: 26236 - DNA, 60 bp, Artificial
  Synthetic oligonucleotide
gcttgttgcctctcacaaggttgaggactatcatcattttaacgtctttcttccagtctc

SEQ ID NO: 26237 - DNA, 60 bp, Artificial
  Synthetic oligonucleotide
ccagcacctttctctgacatcttcttcatcatggcctcaggcttgttgcctctcacaagg

SEQ ID NO: 26238 - DNA, 60 bp, Artificial
  Synthetic oligonucleotide
tgtgtgtagtccaggctgctagagtggcaagtcatgtggcaaagtctgctcatcggagga

SEQ ID NO: 26239 - DNA, 60 bp, Artificial
  Synthetic oligonucleotide
agaggacctacctgggaatgaccttataggagagttgtgtgtagtccaggctgctagagt

SEQ ID NO: 26240 - DNA, 60 bp, Artificial
  Synthetic oligonucleotide
tgtgaggatgggagagtttgacccatcaagaagattctgcttactggagagtgaaattcc

SEQ ID NO: 26241 - DNA, 60 bp, Artificial
  Synthetic oligonucleotide
gaggatcagatagtagaagttcacagaaggacacttttagaaggaatgaagcatggactc

SEQ ID NO: 26242 - DNA, 60 bp, Artificial
  Synthetic oligonucleotide
caggtcaaagaactaaactgtatgatcccactattcaagagctctttggagaatctatta

SEQ ID NO: 26243 - DNA, 60 bp, Artificial
  Synthetic oligonucleotide
gcatggactcacaaaagaggacctacctgggaatgaccttataggagagttgtgtgtagt

SEQ ID NO: 26244 - DNA, 60 bp, Artificial
  Synthetic oligonucleotide
gaagttcacagaaggacacttttagaaggaatgaagcatggactcacaaaagaggaccta

SEQ ID NO: 26245 - DNA, 60 bp, Artificial
  Synthetic oligonucleotide
gtgaaattccgatatatgtggataaatacaaagttgtgcttgactcaagaccaactctgt

SEQ ID NO: 26246 - DNA, 60 bp, Artificial
  Synthetic oligonucleotide
gtgaggatgggagagtttgacccatcaagaagattctgcttactggagagtgaaattccg

SEQ ID NO: 26247 - DNA, 60 bp, Artificial
  Synthetic oligonucleotide
atatgattcaataacaggtcaaagaactaaactgtatgatcccactattcaagagctctt

SEQ ID NO: 26248 - DNA, 60 bp, Artificial
  Synthetic oligonucleotide
ccaactctgtcgcattttctgtcaaagagggaatttcctgccttcattggatatgattca

SEQ ID NO: 26249 - DNA, 60 bp, Artificial
  Synthetic oligonucleotide
gccagggtttccttccttgagctggtatacagagattaactgggcaacaattccagcacc

SEQ ID NO: 26250 - DNA, 60 bp, Artificial
  Synthetic oligonucleotide
ggcaacaattccagcacctttctctgacatcttcttcatcatggcctcaggcttgttgcc

SEQ ID NO: 26251 - DNA, 60 bp, Artificial
  Synthetic oligonucleotide
gggtgcatcatggctctcggataagttacaccagcaatagcatccattgttgtccctgtg

SEQ ID NO: 26252 - DNA, 60 bp, Artificial
  Synthetic oligonucleotide
gctctcggataagttacaccagcaatagcatccattgttgtccctgtgaccgggagggag

SEQ ID NO: 26253 - DNA, 54 bp, Artificial
  Synthetic oligonucleotide
tgtccctgtgaccgggagggagtcagaaagtaccctaagtgcctgaatggtcca

SEQ ID NO: 26254 - DNA, 60 bp, Artificial
  Synthetic oligonucleotide
gtgtctctgccagggtttccttccttgagctggtatacagagattaactgggcaacaatt

SEQ ID NO: 26255 - DNA, 60 bp, Artificial
  Synthetic oligonucleotide
gatagtcttagaaaactctagcatgaacagaccatgtgcatcagcaattgcttcaccagc

SEQ ID NO: 26256 - DNA, 60 bp, Artificial
  Synthetic oligonucleotide
ctctagcatgaacagaccatgtgcatcagcaattgcttcaccagccctgttaggaaggtc

SEQ ID NO: 26257 - DNA, 60 bp, Artificial
  Synthetic oligonucleotide
cttcaccagccctgttaggaaggtccaggtcaatgataccagcgaagctagggtgcatca

SEQ ID NO: 26258 - DNA, 60 bp, Artificial
  Synthetic oligonucleotide
cctgttaggaaggtccaggtcaatgataccagcgaagctagggtgcatcatggctctcgg

SEQ ID NO: 26259 - DNA, 60 bp, Artificial
  Synthetic oligonucleotide
actatgaaagggattatcaatatgagacaagctggggttgcaatcctgcagattgtcctg

SEQ ID NO: 26260 - DNA, 60 bp, Artificial
  Synthetic oligonucleotide
ggcagactgccaagtgtttctttgaaaaggattatcaatatgagacaagctggggttgca

SEQ ID NO: 26261 - DNA, 60 bp, Artificial
  Synthetic oligonucleotide
cagactgccaagtgtttctttgaaaaggattatcaatatgagacaagctggggttgcaat

SEQ ID NO: 26262 - DNA, 60 bp, Artificial
  Synthetic oligonucleotide
ttctttgaaaaggattatcaatatgagacaagctggggttgcaatcctccagactgccca

SEQ ID NO: 26263 - DNA, 56 bp, Artificial
  Synthetic oligonucleotide
actatgaaagggattatcaatatgagacaagctggggttgcaatcctgcagattgt

SEQ ID NO: 26264 - DNA, 60 bp, Artificial
  Synthetic oligonucleotide
gacaaattctatgcaatgttcggagtaaggaaagaagccaagattgctggtgttgcatga

SEQ ID NO: 26265 - DNA, 60 bp, Artificial
  Synthetic oligonucleotide
gtcttctaagtctgccagaaaggatgaaggtcctttagtttcacttgctaaacataatgg

SEQ ID NO: 26266 - DNA, 60 bp, Artificial
  Synthetic oligonucleotide
tggtttgaagagttcaagaagagtaatggacttgtggacaccttcacaaactcttactcc

SEQ ID NO: 26267 - DNA, 60 bp, Artificial
  Synthetic oligonucleotide
ttaaacattgagggaacatcttcctttggaacctatgaatctgattccatcacagagtca

SEQ ID NO: 26268 - DNA, 60 bp, Artificial
  Synthetic oligonucleotide
ctctgtgatggaatcagattcataggttccaaaggaagatgttccctcaatgtttaacag

SEQ ID NO: 26269 - DNA, 60 bp, Artificial
  Synthetic oligonucleotide
cattgagggaacatcttcctttggaacctatgaatctgattccatcacagagtcagaagg

SEQ ID NO: 26270 - DNA, 60 bp, Artificial
  Synthetic oligonucleotide
cccagtccattccactgcctgactacggacttaccatacatcggttgtcaggttacttgg

SEQ ID NO: 26271 - DNA, 60 bp, Artificial
  Synthetic oligonucleotide
cccagtccattccactgcctgactacggactcaccatacatcggttgtcaggttacctgg

SEQ ID NO: 26272 - DNA, 60 bp, Artificial
  Synthetic oligonucleotide
ggtactgagaataagaagatagtcaaaatgcttcgtgggaagctaaagaaactcggtgct

SEQ ID NO: 26273 - DNA, 60 bp, Artificial
  Synthetic oligonucleotide
ggtactgagaataagaagatagtcaaaatgcttcgaggtaagctaaagaaactcggtgct

SEQ ID NO: 26274 - DNA, 60 bp, Artificial
  Synthetic oligonucleotide
ggtactgagaataagaagatagtcaaaatgcttcgagggaagttaaagaaactcggtgct

SEQ ID NO: 26275 - DNA, 60 bp, Artificial
  Synthetic oligonucleotide
ctcggctagtccagtgtttcagcggtgtttccaagatggggctatagtgaagcaaaaccc

SEQ ID NO: 26276 - DNA, 60 bp, Artificial
  Synthetic oligonucleotide
gttgcttccaagatggggctatagtgaagcaaaacccatcgaaagaggcagtgacagaag

SEQ ID NO: 26277 - DNA, 60 bp, Artificial
  Synthetic oligonucleotide
atcaaaattggctaacattctctagagagcatactagtgcatggggttgcgaatcatggg

SEQ ID NO: 26278 - DNA, 60 bp, Artificial
  Synthetic oligonucleotide
caattaagctatctctgcacaatgacttgactacccatcatttcaagcctacagacagcc

SEQ ID NO: 26279 - DNA, 60 bp, Artificial
  Synthetic oligonucleotide
tctataaattctgaaaagaagtcgattgtagaatctaaagatgggaaattttatgaatat

SEQ ID NO: 26280 - DNA, 60 bp, Artificial
  Synthetic oligonucleotide
aaaacaaggtttgatcttagagcaagggtttacaaatcgatgtttaacatgcatatgttc

SEQ ID NO: 26281 - DNA, 60 bp, Artificial
  Synthetic oligonucleotide
cttactaatatttggaatcattagtgttgtaatgtcgatcatattgactaaaacatatct

SEQ ID NO: 26282 - DNA, 60 bp, Artificial
  Synthetic oligonucleotide
agtatagccagttaatgagtcagcttaaaacacatattcatgaagatgaattgaatatac

SEQ ID NO: 26283 - DNA, 60 bp, Artificial
  Synthetic oligonucleotide
gtatgttagttgccaagaacgacattagactaaaaaagattggtcaatgttctataaatt

SEQ ID NO: 26284 - DNA, 60 bp, Artificial
  Synthetic oligonucleotide
caccatgtttgcagccagaagagctaaacagtctagaagagatgtcactttgtttagcct

SEQ ID NO: 26285 - DNA, 60 bp, Artificial
  Synthetic oligonucleotide
tgggatcggaagaaatagagacagaaatatgcatcagtgatccatatgaaacattgtgta

SEQ ID NO: 26286 - DNA, 51 bp, Artificial
  Synthetic oligonucleotide
actacaataaaaaatggctggttcaaagggacaattgaaataagcttagaa

SEQ ID NO: 26287 - DNA, 54 bp, Artificial
  Synthetic oligonucleotide
aggtacttcaaaaagtctatattacctgaactaataatagaatcattttgcacc

SEQ ID NO: 26288 - DNA, 60 bp, Artificial
  Synthetic oligonucleotide
agagatgtcactttgtttagccttatatcaaaatcagactcaaaatgtagagtatagcca

SEQ ID NO: 26289 - DNA, 60 bp, Artificial
  Synthetic oligonucleotide
ggttattctttgttaaagagtggtttaattgcaatcccattgaagatgtagcaggcacct

SEQ ID NO: 26290 - DNA, 60 bp, Artificial
  Synthetic oligonucleotide
agtctatgcatgcagggcagtgtgtgaaatcacaactgagcaggatacagggaatatatt

SEQ ID NO: 26291 - DNA, 60 bp, Artificial
  Synthetic oligonucleotide
aagaagtgtgcggagccaaaaacagtgaggtgtacagggaaaagattgcgaagtttgata

SEQ ID NO: 26292 - DNA, 60 bp, Artificial
  Synthetic oligonucleotide
gaatttcaagcatgcaatagcaatggtataagattgtataaacagccaaagtacccaaga

SEQ ID NO: 26293 - DNA, 60 bp, Artificial
  Synthetic oligonucleotide
ataaacagccaaagtacccaagaataatgactggaccagtactctgtcttgcagatagac

SEQ ID NO: 26294 - DNA, 60 bp, Artificial
  Synthetic oligonucleotide
gcatgaagagctatgtactggctcatgccctcatgacatacccaaggatcaaaattggct

SEQ ID NO: 26295 - DNA, 60 bp, Artificial
  Synthetic oligonucleotide
gtatgaggaaatgcaaaaattgtgggcttgcaatacacccattttccaaatgccctgtat

SEQ ID NO: 26296 - DNA, 60 bp, Artificial
  Synthetic oligonucleotide
gctaacattctctagagagcatactagtgcatggggttgcgaatcatggggctgcctagc

SEQ ID NO: 26297 - DNA, 60 bp, Artificial
  Synthetic oligonucleotide
gaatcatggggctgcctagctattggaacagggtgtgtttatggatcttgccaggacatc

SEQ ID NO: 26298 - DNA, 60 bp, Artificial
  Synthetic oligonucleotide
attagaacagaaagagtgcgataatacgaaagtagatgcagcaaaaactctagagaacta

SEQ ID NO: 26299 - DNA, 60 bp, Artificial
  Synthetic oligonucleotide
ggaatatattgattaaatctgaagacttaaatcattatagtatacaaggaactacaataa

SEQ ID NO: 26300 - DNA, 60 bp, Artificial
  Synthetic oligonucleotide
acgctatgtccagaaaagatataattcttagaagatgttatgataatgagtatgtttctt

SEQ ID NO: 26301 - DNA, 60 bp, Artificial
  Synthetic oligonucleotide
attgacgtactggaaccagttttaacagacaccatgcaagtagaaattacagcccaacag

SEQ ID NO: 26302 - DNA, 52 bp, Artificial
  Synthetic oligonucleotide
tatcgggtatcggcacttgtggtggatgtgttcaatgctttacagatatagc

SEQ ID NO: 26303 - DNA, 60 bp, Artificial
  Synthetic oligonucleotide
tggtaagatacttatattaaatgatggaaatctactagggggtgcagcaataagattgaa

SEQ ID NO: 26304 - DNA, 60 bp, Artificial
  Synthetic oligonucleotide
actagtaatattttagttcaagagggattgaacacactaaatgtcaaattaaagtgcttg

SEQ ID NO: 26305 - DNA, 60 bp, Artificial
  Synthetic oligonucleotide
catcaacagggataaaacagtgtgaagtcactagtaattgttatgtatacactagtaata

SEQ ID NO: 26306 - DNA, 60 bp, Artificial
  Synthetic oligonucleotide
tgtagaaaagctccaatgttatgcttcacagtcatcagatgagtcaaatggtatgttagt

SEQ ID NO: 26307 - DNA, 60 bp, Artificial
  Synthetic oligonucleotide
aaagtgcttgtctaaagaagttaaaatctcaatatgcaagacaaacatagatttaaaatc

SEQ ID NO: 26308 - DNA, 60 bp, Artificial
  Synthetic oligonucleotide
gattatgtctataaaatagagaataaaatgcattagattgtaaacaaactgggtgggtgg

SEQ ID NO: 26309 - DNA, 60 bp, Artificial
  Synthetic oligonucleotide
ggctgtgtagagtgtatgatgagggtttaggttttatatttaagcctttctggtctgaga

SEQ ID NO: 26310 - DNA, 60 bp, Artificial
  Synthetic oligonucleotide
caatactctacaggaccaacaataggaataaatgtaaagcatgaagagctatgtactggc

SEQ ID NO: 26311 - DNA, 60 bp, Artificial
  Synthetic oligonucleotide
tatctgtgtattagcaggcataataacgttaatatgtatgcggttgataattatgagata

SEQ ID NO: 26312 - DNA, 59 bp, Artificial
  Synthetic oligonucleotide
taaagtccatagacaatgcaagaattgcactggctttaaatcactaactcatacaagat

SEQ ID NO: 26313 - DNA, 60 bp, Artificial
  Synthetic oligonucleotide
aaaattgtgggcttgcaatacacccattttccaaatgccctgtatcttgtatttgtggaa

SEQ ID NO: 26314 - DNA, 60 bp, Artificial
  Synthetic oligonucleotide
aaggtgggaagtgcttttatggaggtgagaagtttaaagaagtcaatgcgtcaatgaaca

SEQ ID NO: 26315 - DNA, 60 bp, Artificial
  Synthetic oligonucleotide
cttcaaagtgggcattcacagggttatacactggctgacactaatggggcaaaaatattt

SEQ ID NO: 26316 - DNA, 60 bp, Artificial
  Synthetic oligonucleotide
cagacagcctgccacatgtagtgccgaactatagaggaatatcaataagaggaacggaaa

SEQ ID NO: 26317 - DNA, 60 bp, Artificial
  Synthetic oligonucleotide
ccagtttatagttcaccatgtttgcagccagaagagctaaacagtctagaagagatgtca

SEQ ID NO: 26318 - DNA, 60 bp, Artificial
  Synthetic oligonucleotide
gcatatgttcgaacaagaatgtgcataaagctacggaagactgcttatcgcacagccata

SEQ ID NO: 26319 - DNA, 60 bp, Artificial
  Synthetic oligonucleotide
tactccaattagtgctaaatgttatgaggaagaacaactcgtcgatgaattccgatcagc

SEQ ID NO: 26320 - DNA, 60 bp, Artificial
  Synthetic oligonucleotide
ctcccaaatgcaacacttgcaataatggtgacagtcctgtttctttcttttattactcca

SEQ ID NO: 26321 - DNA, 60 bp, Artificial
  Synthetic oligonucleotide
caatgttatgcttcacagtcatcagatgagtcaaatggtatgttagttgccaagaacgac

SEQ ID NO: 26322 - DNA, 60 bp, Artificial
  Synthetic oligonucleotide
gtgcttttatggaggtgagaagtttaaagaagtcaatgcgtcaatgaacatggccgaggt

SEQ ID NO: 26323 - DNA, 60 bp, Artificial
  Synthetic oligonucleotide
tgccctgtatcttgtatttgtggaatgcaatacaactccactgaagcacttaaagtccat

SEQ ID NO: 26324 - DNA, 60 bp, Artificial
  Synthetic oligonucleotide
tgcacaatgacttgactacccatcatttcaagcctacagacagcctgccacatgtagtgc

SEQ ID NO: 26325 - DNA, 60 bp, Artificial
  Synthetic oligonucleotide
gccatcataccctttccagtgatcgttccaaaattgagtcaagcgtgtcatactataggt

SEQ ID NO: 26326 - DNA, 60 bp, Artificial
  Synthetic oligonucleotide
ttatgaatatagagtattgcaacacaaaaagacagctctagttgatgaatattgcttatc

SEQ ID NO: 26327 - DNA, 56 bp, Artificial
  Synthetic oligonucleotide
gaattgcaaaaggagatcaatgcccatgagggtcaacttgtgatagcaaggcaaaa

SEQ ID NO: 26328 - DNA, 60 bp, Artificial
  Synthetic oligonucleotide
ggaggaattgcaaaaggagatcaatgcccatgagggtcaacttgtgatagcaaggcaaaa

SEQ ID NO: 26329 - DNA, 60 bp, Artificial
  Synthetic oligonucleotide
aaggagatcaatgcccatgagggtcaacttgtgatagcaaggcaaaaagtaagggatgca

SEQ ID NO: 26330 - DNA, 60 bp, Artificial
  Synthetic oligonucleotide
gaattgcaaaaggagatcaatgcccatgagggtcaacttgtgatagcaaggcaaaaagta

SEQ ID NO: 26331 - DNA, 60 bp, Artificial
  Synthetic oligonucleotide
gcagcagtcagcctccatggtggtcctgcaactaatagagattatctccgacagaggcag

SEQ ID NO: 26332 - DNA, 60 bp, Artificial
  Synthetic oligonucleotide
gcagcagttagcctccatggtggtcctgcaactaatagagattatctccgacagaggcag

SEQ ID NO: 26333 - DNA, 60 bp, Artificial
  Synthetic oligonucleotide
cctccatggtggtcctgcaactaatagagattatctccgacagaggcaggcagctttagg

SEQ ID NO: 26334 - DNA, 60 bp, Artificial
  Synthetic oligonucleotide
gtcagcctccatggtggtcctgcaactaatagagattatctccgacagaggcaggcagct

SEQ ID NO: 26335 - DNA, 60 bp, Artificial
  Synthetic oligonucleotide
agcgatcaagcctcagatatgggaatgtccttgatgtaaatgccattgatatagaagaac

SEQ ID NO: 26336 - DNA, 60 bp, Artificial
  Synthetic oligonucleotide
tgctggtggaagttgctgacatggagttacacacaaagaaaattgagatatcaggtttga

SEQ ID NO: 26337 - DNA, 60 bp, Artificial
  Synthetic oligonucleotide
ggcagcattcaaattcgttgggcaactggcttgggctaaatctggattctctcctgctgt

SEQ ID NO: 26338 - DNA, 60 bp, Artificial
  Synthetic oligonucleotide
cggcacgtcagtacgtaagtgtaaactttgagagagtgaattgggcatcttgaatgcaga

SEQ ID NO: 26339 - DNA, 60 bp, Artificial
  Synthetic oligonucleotide
ccaattggagtccgctattgttcgagtcttctacatcaatgccgcgaaggtcaaagctta

SEQ ID NO: 26340 - DNA, 60 bp, Artificial
  Synthetic oligonucleotide
ggagtccgctattgttcgagtcttctacatcaatgccgcgaaggtcaaagcttacctccg

SEQ ID NO: 26341 - DNA, 60 bp, Artificial
  Synthetic oligonucleotide
ttgaagttgaatgctaccagattctgatcttcctcaaactcaaggtctttgccttgtgtc

SEQ ID NO: 26342 - DNA, 60 bp, Artificial
  Synthetic oligonucleotide
agtcttgaagttgaatgctaccagattctgatcttcctcaaactcaaggtctttgccttg

SEQ ID NO: 26343 - DNA, 60 bp, Artificial
  Synthetic oligonucleotide
caaggcaaagaccttgagtttgaggaagatcagaatctggtagcattcaacttcaagact

SEQ ID NO: 26344 - DNA, 60 bp, Artificial
  Synthetic oligonucleotide
aagcaaagaccttgagtttgaggaagatcagaatctggtagcattcaacttcaagacttt

SEQ ID NO: 26345 - DNA, 60 bp, Artificial
  Synthetic oligonucleotide
aggcaaagaccttgagtttgaggaagatcagaatctggtagcattcaacttcaagacttt

SEQ ID NO: 26346 - DNA, 60 bp, Artificial
  Synthetic oligonucleotide
ggtggattgctgccttgggctagatctggattctcttcaatggctagaaagttcttgagg

SEQ ID NO: 26347 - DNA, 60 bp, Artificial
  Synthetic oligonucleotide
cgtcagacgtcacaaccaaatgtcaatcttacttttggccagtcagtctttccagtggtt

SEQ ID NO: 26348 - DNA, 60 bp, Artificial
  Synthetic oligonucleotide
gtcagtctttccagtggttaataaccattttccacaattccagtcaaatccggtgccaga

SEQ ID NO: 26349 - DNA, 60 bp, Artificial
  Synthetic oligonucleotide
ggttaataaccattttccacaattccagtcaaatccggtgccagataacggtcttaccct

SEQ ID NO: 26350 - DNA, 60 bp, Artificial
  Synthetic oligonucleotide
cggtgccagataacggtcttaccctgcaccgcctctccggttaccttgcgagatggttaa

SEQ ID NO: 26351 - DNA, 60 bp, Artificial
  Synthetic oligonucleotide
tgtatttggcatttgctgctgggacagaaatgtttctgcagacatttacattcttcccat

SEQ ID NO: 26352 - DNA, 60 bp, Artificial
  Synthetic oligonucleotide
ctgctgggacagaaatgtttctgcagacatttacattcttcccattagcaattgaaatgc

SEQ ID NO: 26353 - DNA, 60 bp, Artificial
  Synthetic oligonucleotide
ttcttcccattagcaattgaaatgcaacgcgtgctaaaagatggaatggatgtcaacttc

SEQ ID NO: 26354 - DNA, 60 bp, Artificial
  Synthetic oligonucleotide
ccattagcaattgaaatgcaacgcgtgctaaaagatggaatggatgtcaacttcatgaag

SEQ ID NO: 26355 - DNA, 60 bp, Artificial
  Synthetic oligonucleotide
acactaactgctgagcaatggatgagacacgaggtgactgcagtcacagcagcatttaat

SEQ ID NO: 26356 - DNA, 60 bp, Artificial
  Synthetic oligonucleotide
agcatttaatgctggtggattgctgccttgggctagatctggattctcttcaatggctag

SEQ ID NO: 26357 - DNA, 60 bp, Artificial
  Synthetic oligonucleotide
gatcgtctacgtcagacgtcacaaccaaatgtcaatcttacttttggccagtcagtcttt

SEQ ID NO: 26358 - DNA, 60 bp, Artificial
  Synthetic oligonucleotide
tgatgtacctcaacggtctacatccacgtttgacccggaggcagcatatgtggcatttga

SEQ ID NO: 26359 - DNA, 60 bp, Artificial
  Synthetic oligonucleotide
atgtctaaggtcaagctcaccagagagaacattatctctcttctaactcaggctggagaa

SEQ ID NO: 26360 - DNA, 54 bp, Artificial
  Synthetic oligonucleotide
cgccagagcatcatgaaagttgtgaaccaaagtgattttacctttgggaaaatc

SEQ ID NO: 26361 - DNA, 60 bp, Artificial
  Synthetic oligonucleotide
tcaagctgcattcaacttcaagactttttgtggagaaaatcttgattcaatcaagaaaat

SEQ ID NO: 26362 - DNA, 60 bp, Artificial
  Synthetic oligonucleotide
cgatcaccaattaagcaagctgagtttagagccactgtagtagtgcctttggctgaggta

SEQ ID NO: 26363 - DNA, 60 bp, Artificial
  Synthetic oligonucleotide
cggtcaccaattaagcaagctgagtttagagccactgtagtagtgcctttggctgaggta

SEQ ID NO: 26364 - DNA, 58 bp, Artificial
  Synthetic oligonucleotide
cgatcaccaattaagcaagctgagtttagagccactgtagtagtgcctttggctgagg

SEQ ID NO: 26365 - DNA, 58 bp, Artificial
  Synthetic oligonucleotide
cggtcaccaattaagcaagctgagtttagagccactgtagtagtgcctttggctgagg

SEQ ID NO: 26366 - DNA, 60 bp, Artificial
  Synthetic oligonucleotide
gacgggcagctgtgtcagcattggaggacaagctggcagacttcaagaggcagcttgcag

SEQ ID NO: 26367 - DNA, 60 bp, Artificial
  Synthetic oligonucleotide
cccaatttatgtggataagtacaaggttgtacttgactcaaggccaactctatctcattt

SEQ ID NO: 26368 - DNA, 60 bp, Artificial
  Synthetic oligonucleotide
gatgagtctttcagggaggatgctctctccactgtgtggactaaagactggccaaccccg

SEQ ID NO: 26369 - DNA, 60 bp, Artificial
  Synthetic oligonucleotide
atacaacaatgagtctttcagggaggatgctctctccacagtgtggacaaaagactggcc

SEQ ID NO: 26370 - DNA, 56 bp, Artificial
  Synthetic oligonucleotide
cccaatttatgtggataagtacaaggttgtactcgactcaaggccaaccctatctc

SEQ ID NO: 26371 - DNA, 60 bp, Artificial
  Synthetic oligonucleotide
tgctaaacatggggaatcgattaaccttgctgcagttaggatcttcttcctcaatgccgc

SEQ ID NO: 26372 - DNA, 60 bp, Artificial
  Synthetic oligonucleotide
tgctaaacatggagaatcaattaaccttgctgcagttaggatcttcttcctcaatgccgc

SEQ ID NO: 26373 - DNA, 60 bp, Artificial
  Synthetic oligonucleotide
tgctaaacatggggaatcaattaaccttgctgcagttaggatcttcttcctcaatgccgc

SEQ ID NO: 26374 - DNA, 60 bp, Artificial
  Synthetic oligonucleotide
gtagacaccttagtttctctgattaatgtgttaacaaggttcacttggtttcaggaggtg

SEQ ID NO: 26375 - DNA, 60 bp, Artificial
  Synthetic oligonucleotide
catttgcagataagtaaacaggtaatccatgcagagattcaacatttaggtcattggatg

SEQ ID NO: 26376 - DNA, 60 bp, Artificial
  Synthetic oligonucleotide
gtcccttggtttcattgaccaaacgcaatgggaatgttgaagtctctagatcatggtctc

SEQ ID NO: 26377 - DNA, 60 bp, Artificial
  Synthetic oligonucleotide
atataatacgaattttcctggcaaccggaacaacccagttcctgacgacggtcttaccct

SEQ ID NO: 26378 - DNA, 60 bp, Artificial
  Synthetic oligonucleotide
atacaatacgaattttcctggcaaccggaacaacccagttcctgacgatggtcttaccct

SEQ ID NO: 26379 - DNA, 60 bp, Artificial
  Synthetic oligonucleotide
atacaatacgaattttcctggcaaccggaacaacccagttcctgacgacggtcttaccct

SEQ ID NO: 26380 - DNA, 60 bp, Artificial
  Synthetic oligonucleotide
catcttggtgatgacatggacccagagcttcgtagcctggctcagatcctgattgaccag

SEQ ID NO: 26381 - DNA, 60 bp, Artificial
  Synthetic oligonucleotide
gacaactttcatctcggtgatgacatggacccagagcttcgtagcctggctcagatcctg

SEQ ID NO: 26382 - DNA, 60 bp, Artificial
  Synthetic oligonucleotide
ggacaactttcatctcggtgatgacatggacccagagcttcgtagcctggctcagatcct

SEQ ID NO: 26383 - DNA, 60 bp, Artificial
  Synthetic oligonucleotide
tgcagctcagaaattggctacaaaatctgttgatccaacagggattgaacctgatgacca

SEQ ID NO: 26384 - DNA, 60 bp, Artificial
  Synthetic oligonucleotide
ctgttcaaagaagtggcagctgaatgcatgaagaggtacattggcacaccttatgaggga

SEQ ID NO: 26385 - DNA, 60 bp, Artificial
  Synthetic oligonucleotide
gactgtatattgttcaaagaagtggcagctgaatgcatgaagaggtacattggcacacct

SEQ ID NO: 26386 - DNA, 60 bp, Artificial
  Synthetic oligonucleotide
gacgggcagctgtgtcagcattggaggacaaactggcagatttcaagagacaacttgcag

SEQ ID NO: 26387 - DNA, 60 bp, Artificial
  Synthetic oligonucleotide
gacgggcagctgtgtcagcattggaggacaaactggcagacttcaagaggcagcttgcag

SEQ ID NO: 26388 - DNA, 60 bp, Artificial
  Synthetic oligonucleotide
aatggcagatgctgtgtccaggaaaaaaatggatactaaacctactgacccgactgggat

SEQ ID NO: 26389 - DNA, 60 bp, Artificial
  Synthetic oligonucleotide
tgtgctttgaggatgatgctctgcattggaggtcctctgcctctcttgtctagcatgaca

SEQ ID NO: 26390 - DNA, 60 bp, Artificial
  Synthetic oligonucleotide
cttttgcaagcagcaaagatctgcttcctgcactttaggatattcaagcagtttgtgaag

SEQ ID NO: 26391 - DNA, 60 bp, Artificial
  Synthetic oligonucleotide
cttttgcaagcagcaaagatctgcttcctgcactttaggatattcaagcagttcgtgaag

SEQ ID NO: 26392 - DNA, 60 bp, Artificial
  Synthetic oligonucleotide
ttccctctggcttattatcaaaatgtgaagaaagagaaattaggaattaagaacttttct

SEQ ID NO: 26393 - DNA, 60 bp, Artificial
  Synthetic oligonucleotide
ggtggtatttgattgtcttgggagtctgctctactttgacactggcaatgccgaaaacca

SEQ ID NO: 26394 - DNA, 60 bp, Artificial
  Synthetic oligonucleotide
gtggcagccagctcaagtctcatggcaaggaagattgagtttggggttgacagtactttc

SEQ ID NO: 26395 - DNA, 60 bp, Artificial
  Synthetic oligonucleotide
gcctattttgctgcccctactgtaggcactgctctgctgacagagaaattcaccagttac

SEQ ID NO: 26396 - DNA, 60 bp, Artificial
  Synthetic oligonucleotide
cagccaagagtataaaaaaggagtctcatttgcaagtgtcatgtactcatggacaaaaga

SEQ ID NO: 26397 - DNA, 60 bp, Artificial
  Synthetic oligonucleotide
atgttgacacttttcggcagcaagaaaccctctgagtctgaaaagacagatgaaggtccc

SEQ ID NO: 26398 - DNA, 60 bp, Artificial
  Synthetic oligonucleotide
ctagatcatggtctcaatctaatgagaaaaaagctctggcaaaaaatatggatgtgtcta

SEQ ID NO: 26399 - DNA, 60 bp, Artificial
  Synthetic oligonucleotide
tagtagtagactccgcaaaagaaagcagtcaatcagcaacatgggtttatggaagtggct

SEQ ID NO: 26400 - DNA, 60 bp, Artificial
  Synthetic oligonucleotide
gatccagaactcaggcagcttgctcaatctcttattgacactaaggtcaaggagatttcc

SEQ ID NO: 26401 - DNA, 60 bp, Artificial
  Synthetic oligonucleotide
gacccagaactcaggcagcttgctcaatctcttattgacactaaggtcaaggagatttcc

SEQ ID NO: 26402 - DNA, 60 bp, Artificial
  Synthetic oligonucleotide
caggcagcttgctcaatctcttattgacactaaggtcaaggagatttccaaccaagagcc

SEQ ID NO: 26403 - DNA, 50 bp, Artificial
  Synthetic oligonucleotide
ttttatctcacattttaatgaagaagcattcaagcagttgttaggaagat

SEQ ID NO: 26404 - DNA, 56 bp, Artificial
  Synthetic oligonucleotide
ttttatctcacattttaatgaagaagcattcaagcagttattaggaagatctgaga

SEQ ID NO: 26405 - DNA, 56 bp, Artificial
  Synthetic oligonucleotide
ttttatctcacattttaatgaagaagcattcaagcagttgttaggaagatccaaga

SEQ ID NO: 26406 - DNA, 60 bp, Artificial
  Synthetic oligonucleotide
gcatgaagaggtacattggtacaccttatgaaggaatcatagacaccttagtttcactaa

SEQ ID NO: 26407 - DNA, 60 bp, Artificial
  Synthetic oligonucleotide
gcttaacgttagacatggtgtttacaaaggaaacgtctgatatgttgtttgaactgatat

SEQ ID NO: 26408 - DNA, 60 bp, Artificial
  Synthetic oligonucleotide
aacatctgctgtaccaccagccaaaagttccttgattttcttttctgtaagctgcttaac

SEQ ID NO: 26409 - DNA, 60 bp, Artificial
  Synthetic oligonucleotide
cccataagcagcaactaatggtagttccatgattttcccatacatttcctgtctagcagc

SEQ ID NO: 26410 - DNA, 60 bp, Artificial
  Synthetic oligonucleotide
aggcacattcaacccataagcagcaactaatggtagttccatgattttcccatacatttc

SEQ ID NO: 26411 - DNA, 60 bp, Artificial
  Synthetic oligonucleotide
gatgcgggcacattcaacccataagcagcaactaatggtagttccatgattttcccatac

SEQ ID NO: 26412 - DNA, 60 bp, Artificial
  Synthetic oligonucleotide
gatgcaggcacattcaacccataagcagcaactaatggtagttccatgattttcccatac

SEQ ID NO: 26413 - DNA, 60 bp, Artificial
  Synthetic oligonucleotide
ccatgattttcccatacatttcctgtctagcagcttcattcttgcttttctctaccatac

SEQ ID NO: 26414 - DNA, 60 bp, Artificial
  Synthetic oligonucleotide
ccatgattttcccatacatttcctgtctagcagcttcattcttacttttctccaccatac

SEQ ID NO: 26415 - DNA, 60 bp, Artificial
  Synthetic oligonucleotide
ttaacgttagacatggtgtttacaaaggaaacgtctgatatgttgtttgaactgatatta

SEQ ID NO: 26416 - DNA, 60 bp, Artificial
  Synthetic oligonucleotide
tcctcatatttcttgagcgaaatagagctagctgttccagggttactctcactgagtatt

SEQ ID NO: 26417 - DNA, 60 bp, Artificial
  Synthetic oligonucleotide
ggaaaataatcggtgctagtccccttatactagataaaagaggtagaggtcctccaatac

SEQ ID NO: 26418 - DNA, 60 bp, Artificial
  Synthetic oligonucleotide
ggaaaataatcggtgccagtccccttatactagataaaagaggtagaggtcctccaatac

SEQ ID NO: 26419 - DNA, 60 bp, Artificial
  Synthetic oligonucleotide
caaagggaaaataatcggtgccagtccccttatactagataaaagaggtagaggtcctcc

SEQ ID NO: 26420 - DNA, 60 bp, Artificial
  Synthetic oligonucleotide
aataagctaaagggaaaataatcggtgctagtccccttatactagataaaagaggtagag

SEQ ID NO: 26421 - DNA, 60 bp, Artificial
  Synthetic oligonucleotide
ctgctgtaccaccagccaaaagttccttgattttcttttctgtgagctgcttgacgttag

SEQ ID NO: 26422 - DNA, 60 bp, Artificial
  Synthetic oligonucleotide
ctgctgtaccaccagccaaaagttccttgattttcttttctgtgagctgcttaacgttag

SEQ ID NO: 26423 - DNA, 60 bp, Artificial
  Synthetic oligonucleotide
ccaccagccaaaagttccttgattttcttttctgtgagctgcttaacgttagacatggtg

SEQ ID NO: 26424 - DNA, 60 bp, Artificial
  Synthetic oligonucleotide
ccaccagccaaaagttccttgattttcttttctgtgagctgcttgacgttagacatggtg

SEQ ID NO: 26425 - DNA, 60 bp, Artificial
  Synthetic oligonucleotide
aataagctaaagggaaaataatcggtgccagtccccttatactagataaaagaggtagag

SEQ ID NO: 26426 - DNA, 60 bp, Artificial
  Synthetic oligonucleotide
aataagtcaaagggaaaataatcggtgccagtccccttatactagataaaagaggtagag

SEQ ID NO: 26427 - DNA, 53 bp, Artificial
  Synthetic oligonucleotide
tctttgaatgatcaccataatcatccacagaaaggttagcactgaagaccctg

SEQ ID NO: 26428 - DNA, 60 bp, Artificial
  Synthetic oligonucleotide
catacatttcctgtctagcagcttcattcttgcttttctccaccatactaactatttttg

SEQ ID NO: 26429 - DNA, 60 bp, Artificial
  Synthetic oligonucleotide
taccgcaaaaattatacttaccgctcttgcaggctgcaaaaatctgtttcctgcatttta

SEQ ID NO: 26430 - DNA, 60 bp, Artificial
  Synthetic oligonucleotide
ccatgattttcccatacatttcctgtctagcagcttcattcttgcttttctccaccatac

SEQ ID NO: 26431 - DNA, 58 bp, Artificial
  Synthetic oligonucleotide
catacatttcctgtctagcagcttcattcttgcttttctccaccatactaactatttt

SEQ ID NO: 26432 - DNA, 60 bp, Artificial
  Synthetic oligonucleotide
aattatacttaccgctcttgcaggctgcaaaaatctgtttcctgcatttcaagatattca

SEQ ID NO: 26433 - DNA, 60 bp, Artificial
  Synthetic oligonucleotide
ttctgtttcaatttcaacatctgctgtaccaccagccaaaagttccttgattttcttttc

SEQ ID NO: 26434 - DNA, 60 bp, Artificial
  Synthetic oligonucleotide
aattatacttaccactcttgcaggctgcaaaaatctgtttcctgcattttaggatattca

SEQ ID NO: 26435 - DNA, 60 bp, Artificial
  Synthetic oligonucleotide
aattatacttaccgctcttgcaggctgcaaaaatctgtttcctgcattttaggatattca

SEQ ID NO: 26436 - DNA, 60 bp, Artificial
  Synthetic oligonucleotide
tcctcatatttcttgagcgaaatagagctagctgttccagggttactttcactgagtatt

SEQ ID NO: 26437 - DNA, 60 bp, Artificial
  Synthetic oligonucleotide
tcctcatatttcttgagcgaaatagagctagctgtaccagggttactctcactgagtatt

SEQ ID NO: 26438 - DNA, 60 bp, Artificial
  Synthetic oligonucleotide
cctgatcctcatatttcttgagcgaaatagagctagctgttccagggttactctcactga

SEQ ID NO: 26439 - DNA, 60 bp, Artificial
  Synthetic oligonucleotide
atctgctgtaccaccagccaaaagttccttgattttcttttctgtgagctgcttaacgtt

SEQ ID NO: 26440 - DNA, 60 bp, Artificial
  Synthetic oligonucleotide
cttgagcgaaatagagctagctgttccagggttactctcactgagtattttgacagcctg

SEQ ID NO: 26441 - DNA, 60 bp, Artificial
  Synthetic oligonucleotide
cctgtgaagcagaaagaaccttagccactttacaaacttgctcataggtggagaagttct

SEQ ID NO: 26442 - DNA, 60 bp, Artificial
  Synthetic oligonucleotide
cctgtgaagcagaaagaaccttagccaccttacaaacttgctcataggtggagaagttct

SEQ ID NO: 26443 - DNA, 59 bp, Artificial
  Synthetic oligonucleotide
cctgtgaagcagaaagaaccttagccaccttacaaacttgctcataggtggagaagttc

SEQ ID NO: 26444 - DNA, 60 bp, Artificial
  Synthetic oligonucleotide
ctgtaagctgcttaacgttagacatggtgtttacaaaggaaacgtctgatatgttgtttg

SEQ ID NO: 26445 - DNA, 60 bp, Artificial
  Synthetic oligonucleotide
ttttcttttctgtaagctgcttaacgttagacatggtgtttacaaaggaaacgtctgata

SEQ ID NO: 26446 - DNA, 52 bp, Artificial
  Synthetic oligonucleotide
ctttgaatgatcaccataatcatccacagaaaggttagcactgaagaccctg

SEQ ID NO: 26447 - DNA, 60 bp, Artificial
  Synthetic oligonucleotide
ttgacgttagacatggtgtttacaaaggaaacgtctgatatgttgtttgaactgatatta

SEQ ID NO: 26448 - DNA, 60 bp, Artificial
  Synthetic oligonucleotide
gacagaagacataccacagaatgcacttgcttgaggcagtatttctaaataagcactgcg

SEQ ID NO: 26449 - DNA, 60 bp, Artificial
  Synthetic oligonucleotide
attaactgggtcagaggcatcatgatatttgttgcctttttatttgtaatacagaataca

SEQ ID NO: 26450 - DNA, 60 bp, Artificial
  Synthetic oligonucleotide
tggatgctgaaaatgtggagatattggggaaaactatggaatcagcaattagagtaattg

SEQ ID NO: 26451 - DNA, 60 bp, Artificial
  Synthetic oligonucleotide
gacgaacattgcactggccaatgtccaagcaatatagaacatgaggctaactggttgaca

SEQ ID NO: 26452 - DNA, 60 bp, Artificial
  Synthetic oligonucleotide
ttttcacaagaaagaactagcagatggggatgcgaagagtttgggtgcttggctgtcaac

SEQ ID NO: 26453 - DNA, 60 bp, Artificial
  Synthetic oligonucleotide
acacccatagaagggactctcacaaactaccctactgatcagaaatatactttagatgag

SEQ ID NO: 26454 - DNA, 60 bp, Artificial
  Synthetic oligonucleotide
actcttcggtgcaggtctgaccatcatttttgcaggagtagcattggggttaacaattat

SEQ ID NO: 26455 - DNA, 60 bp, Artificial
  Synthetic oligonucleotide
ccttggaaacctatagttttgccccgttagaaaatctcccgcatataaaaccagtttaca

SEQ ID NO: 26456 - DNA, 60 bp, Artificial
  Synthetic oligonucleotide
ccagtttacaaatatattactgcacaaggagtcgaaaactcagacggtatagaaggggca

SEQ ID NO: 26457 - DNA, 60 bp, Artificial
  Synthetic oligonucleotide
attactgcacaaggagtcgaaaactcagacggtatagaaggggcattcataacagccagt

SEQ ID NO: 26458 - DNA, 60 bp, Artificial
  Synthetic oligonucleotide
agaaggggcattcataacagccagtatcccagccgctgggggcactagcataggctacaa

SEQ ID NO: 26459 - DNA, 60 bp, Artificial
  Synthetic oligonucleotide
gtgaccacataccaggggaagatacaggcaatgatataggacattattgtgtatcagcag

SEQ ID NO: 26460 - DNA, 60 bp, Artificial
  Synthetic oligonucleotide
gggaatttacttctaggaaatcacaatatataggcaagatctccatgcagtctcttgaag

SEQ ID NO: 26461 - DNA, 60 bp, Artificial
  Synthetic oligonucleotide
gcagtctcttgaagattacgaaaaggctttaactgacagattgacccataccttggaaac

SEQ ID NO: 26462 - DNA, 60 bp, Artificial
  Synthetic oligonucleotide
ttacgaaaaggctttaactgacagattgacccataccttggaaacctatagttttgcccc

SEQ ID NO: 26463 - DNA, 60 bp, Artificial
  Synthetic oligonucleotide
ggccacagtaaagtgtttcgtcactggacgatcacagactggaaagcatgcaaccctgtt

SEQ ID NO: 26464 - DNA, 60 bp, Artificial
  Synthetic oligonucleotide
ctggaaagcatgcaaccctgttgttacggccggtggtagtataaatgttatagaggttga

SEQ ID NO: 26465 - DNA, 60 bp, Artificial
  Synthetic oligonucleotide
ttatagaggttgataaaaatctaaaccttgtaactagaaattatgtgtgcacaggggatt

SEQ ID NO: 26466 - DNA, 60 bp, Artificial
  Synthetic oligonucleotide
aatgcccaaattatatttcagacagacaaacttaatcattttgaagtgacaggaactact

SEQ ID NO: 26467 - DNA, 60 bp, Artificial
  Synthetic oligonucleotide
ctatcagcactggctggtttaagtctaaagcatctgttactctcgatagaacatgtgaac

SEQ ID NO: 26468 - DNA, 51 bp, Artificial
  Synthetic oligonucleotide
gtaggtgatttcactaataaatgtgggttttgtacgtgtgggctgctagag

SEQ ID NO: 26469 - DNA, 60 bp, Artificial
  Synthetic oligonucleotide
tatagacacaatctgcagccttgaagggccttgtgacacattccataataggatctcaat

SEQ ID NO: 26470 - DNA, 60 bp, Artificial
  Synthetic oligonucleotide
acagaaacattggacctccagattgatgcgaaatgtgttggctgccctgattgctttgag

SEQ ID NO: 26471 - DNA, 60 bp, Artificial
  Synthetic oligonucleotide
ccagacttcattcattaaagagaaagatgacaggtgcaaaacatggctgtgtagggtcag

SEQ ID NO: 26472 - DNA, 60 bp, Artificial
  Synthetic oligonucleotide
ttgcaagaaattaagcaaaagtgaaaattagacggttattaattcattgttaaatacatt

SEQ ID NO: 26473 - DNA, 59 bp, Artificial
  Synthetic oligonucleotide
attatgctgtaaaactctcctgccagaaggatccaagaccatcagggacttttaaaatt

SEQ ID NO: 26474 - DNA, 60 bp, Artificial
  Synthetic oligonucleotide
taaatgttggagaccagacttcattcattaaagagaaagatgacaggtgcaaaacatggc

SEQ ID NO: 26475 - DNA, 58 bp, Artificial
  Synthetic oligonucleotide
tgtcttgtgttcgattcttacacaggagcatactaccagggtcaatggcaatttcgat

SEQ ID NO: 26476 - DNA, 60 bp, Artificial
  Synthetic oligonucleotide
gttgcggattggcatatcatccctttacaaactgtggctcatattgtgtctgtggctcca

SEQ ID NO: 26477 - DNA, 59 bp, Artificial
  Synthetic oligonucleotide
acgtgttgatcccagtgtttatgcccatagcttttgcttatggatgggcgtacaacagg

SEQ ID NO: 26478 - DNA, 60 bp, Artificial
  Synthetic oligonucleotide
tgtggctccaaatttgaaacatcggacagaatgaggatgcaccgagaatcagggttatgt

SEQ ID NO: 26479 - DNA, 60 bp, Artificial
  Synthetic oligonucleotide
ggttttaaaagcctgagagtagcaagaaggctttgcaaatcaaaaggctcatcattgatc

SEQ ID NO: 26480 - DNA, 60 bp, Artificial
  Synthetic oligonucleotide
tggaatataatcaaatgtgattctggtccgctctactacagtgaccacataccaggggaa

SEQ ID NO: 26481 - DNA, 60 bp, Artificial
  Synthetic oligonucleotide
ggctcatcattgatcatatccatcttactctcagtgctgattctatcctttgtaacaccc

SEQ ID NO: 26482 - DNA, 60 bp, Artificial
  Synthetic oligonucleotide
actctattgcaataaaaacatgtagagtggttgataagggagtttgtactgttaattcac

SEQ ID NO: 26483 - DNA, 60 bp, Artificial
  Synthetic oligonucleotide
ggtgcattaatgatcagcattgcctagtagactttgtcccagctgaagccgatactgtag

SEQ ID NO: 26484 - DNA, 60 bp, Artificial
  Synthetic oligonucleotide
tagttgcttaagcccaagatttggaattccgctggaagatttaataagctgctgtgacca

SEQ ID NO: 26485 - DNA, 61 bp, Artificial
  Synthetic oligonucleotide
ccgaataataaactgcttattggatatttagattttggcaagtacttgctaggcttaagtc

SEQ ID NO: 26486 - DNA, 60 bp, Artificial
  Synthetic oligonucleotide
tttaaacatgacttctctctattcctcagaatctttgaagcagcatttccaggcactgct

SEQ ID NO: 26487 - DNA, 60 bp, Artificial
  Synthetic oligonucleotide
gtagtgtactaccgatacatcacaaacctttcagagacacatctttatttccaagatgag

SEQ ID NO: 26488 - DNA, 60 bp, Artificial
  Synthetic oligonucleotide
gagtagcccagttatcactagatgctttcatggtgggcaactgattgcagaaaggaaatc

SEQ ID NO: 26489 - DNA, 60 bp, Artificial
  Synthetic oligonucleotide
gcgcaaggttcttgggaatttgatacacatatgaactccacatattcaagtaaagtcgac

SEQ ID NO: 26490 - DNA, 60 bp, Artificial
  Synthetic oligonucleotide
gtgagttagctataaaattgatattaggggatatccagtataaattattcacagaaacat

SEQ ID NO: 26491 - DNA, 60 bp, Artificial
  Synthetic oligonucleotide
gactcctgcaaacttctaaaggaagaaacacagcttatatttaatgatgaccatgataca

SEQ ID NO: 26492 - DNA, 60 bp, Artificial
  Synthetic oligonucleotide
gggcaaatgtgcggaaatgtccaaaaaacaaacagcagcattttaggaactgggacacca

SEQ ID NO: 26493 - DNA, 60 bp, Artificial
  Synthetic oligonucleotide
ttttttgcaacgaatgcaacatgtaccatagcaaaaaatcaatcaaatatgtaggtgatt

SEQ ID NO: 26494 - DNA, 56 bp, Artificial
  Synthetic oligonucleotide
tgggacaccaaaatttgattatacttgccatggtgctagtaggaaggatatcattg

SEQ ID NO: 26495 - DNA, 60 bp, Artificial
  Synthetic oligonucleotide
agagtttgggtgcttggctgtcaacacaggttgtgtgtttgggtcttgtcaagatgtaat

SEQ ID NO: 26496 - DNA, 60 bp, Artificial
  Synthetic oligonucleotide
agtttaaaacagttgacacgaaaacactaccatatatagtagccgtaaacaatcataaac

SEQ ID NO: 26497 - DNA, 60 bp, Artificial
  Synthetic oligonucleotide
caggaaagctgtagatgaagttgttattttaacagtttgtattacatatccaggacacac

SEQ ID NO: 26498 - DNA, 60 bp, Artificial
  Synthetic oligonucleotide
gcagtaccaccagccaagagttccctaattttcttttcggtaagttgcctgacgttagac

SEQ ID NO: 26499 - DNA, 60 bp, Artificial
  Synthetic oligonucleotide
ctaacgtcaggcaacttaccgaaaagaaaattagggaactcttggctggtggtactgcag

SEQ ID NO: 26500 - DNA, 60 bp, Artificial
  Synthetic oligonucleotide
atttcaacatctgcagtaccaccagccaagagttccctaattttcttttcggtaagttgc

SEQ ID NO: 26501 - DNA, 60 bp, Artificial
  Synthetic oligonucleotide
gaactcttggctggtggtactgcagatgttgaaatagaaactgatgattcaactccagga

SEQ ID NO: 26502 - DNA, 60 bp, Artificial
  Synthetic oligonucleotide
gctggtggtactgcagatgttgaaatagaaactgatgattcaactccaggattcagcttc

SEQ ID NO: 26503 - DNA, 60 bp, Artificial
  Synthetic oligonucleotide
tgaagttgaatcctggagttgaatcatcagtttctatttcaacatctgcagtaccaccag

SEQ ID NO: 26504 - DNA, 60 bp, Artificial
  Synthetic oligonucleotide
tatcataaaatgtcttgaagttgaatcctggagttgaatcatcagtttctatttcaacat

SEQ ID NO: 26505 - DNA, 60 bp, Artificial
  Synthetic oligonucleotide
acatataaatgactatatctacttaaatcacacttctatagatgagctaggtttggagct

SEQ ID NO: 26506 - DNA, 60 bp, Artificial
  Synthetic oligonucleotide
ttttaagatattcaagcaatttgtgaaagtcatttcaacacccttgttattatcataaaa

SEQ ID NO: 26507 - DNA, 60 bp, Artificial
  Synthetic oligonucleotide
aactccaggattcagcttcaagacattttatgataataacaagggtgttgaaatgacttt

SEQ ID NO: 26508 - DNA, 60 bp, Artificial
  Synthetic oligonucleotide
ccactagtagctgcttatgggttgaatgtgcctacttcatatgattcttgtgctcttagg

SEQ ID NO: 26509 - DNA, 60 bp, Artificial
  Synthetic oligonucleotide
aaatgactttcacaaattgcttgaatatcttaaaatgcagaaaacagatttttgctgctt

SEQ ID NO: 26510 - DNA, 60 bp, Artificial
  Synthetic oligonucleotide
agaggtaggggtcccccaatgcatagcatcatcctaagagcacaagagtcatatgaagta

SEQ ID NO: 26511 - DNA, 60 bp, Artificial
  Synthetic oligonucleotide
cccaatgcatagcatcatcctaagagcacaagagtcatatgaagtaggcacattcaaccc

SEQ ID NO: 26512 - DNA, 60 bp, Artificial
  Synthetic oligonucleotide
agcagaaagaactttagccactttgcaaacctgctcataagtagagaaattcttaatgcc

SEQ ID NO: 26513 - DNA, 60 bp, Artificial
  Synthetic oligonucleotide
tgattcttgtgctcttaggatgatgctatgcattgggggacctctacctcttttgtccag

SEQ ID NO: 26514 - DNA, 60 bp, Artificial
  Synthetic oligonucleotide
attcaaagaaaagctccaaacctagctcatctatagaagtgtaatttaagtagatatagt

SEQ ID NO: 26515 - DNA, 60 bp, Artificial
  Synthetic oligonucleotide
gaagcagaaagaactttagccactttgcaaacctgctcataagtagagaaattcttaatg

SEQ ID NO: 26516 - DNA, 60 bp, Artificial
  Synthetic oligonucleotide
gcttatcaattgaggcaccatggggagcaataaatgtccaatcaaccttcaaacctactg

SEQ ID NO: 26517 - DNA, 60 bp, Artificial
  Synthetic oligonucleotide
cctcctagcattatggcaagcctcacagactttgcatcatcaagaggtaatccataggct

SEQ ID NO: 26518 - DNA, 60 bp, Artificial
  Synthetic oligonucleotide
gctacctcctagcattatggcaagcctcacagactttgcatcatcaagaggtaatccata

SEQ ID NO: 26519 - DNA, 60 bp, Artificial
  Synthetic oligonucleotide
caggtgattgctggtcaatatgtgaccaaccctaggttcaatatttccgattacttcgag

SEQ ID NO: 26520 - DNA, 60 bp, Artificial
  Synthetic oligonucleotide
cactaacatataattcagttttctcttaccgaggcttttgttcctgcggagcatactact

SEQ ID NO: 26521 - DNA, 60 bp, Artificial
  Synthetic oligonucleotide
actcacataaaattccattctcgcttaccgaggcttttgttcctgcggagcatactacta

SEQ ID NO: 26522 - DNA, 60 bp, Artificial
  Synthetic oligonucleotide
gaacaatccaattggtaacaacgatcttaccatccaccgcatctcaggataccttgccag

SEQ ID NO: 26523 - DNA, 60 bp, Artificial
  Synthetic oligonucleotide
caatccaattggtaacaacgatcttaccatccaccgcatctcaggataccttgccagatg

SEQ ID NO: 26524 - DNA, 60 bp, Artificial
  Synthetic oligonucleotide
ggaggttacacttaaccttgggggctggaagattgctgtatataatacgaattttcctgg

SEQ ID NO: 26525 - DNA, 60 bp, Artificial
  Synthetic oligonucleotide
ctcgcaaaaagaagtgaatgggaggttacacttaaccttgggggctggaagattgctgta

SEQ ID NO: 26526 - DNA, 57 bp, Artificial
  Synthetic oligonucleotide
ctcctgagcacaccaatgaagtgggggaagaagctttatgagctctttgctgatgat

SEQ ID NO: 26527 - DNA, 60 bp, Artificial
  Synthetic oligonucleotide
tagtagactccgcacgaagaagcaaacactgaataaaggagatacagaatggtagggtgg

SEQ ID NO: 26528 - DNA, 60 bp, Artificial
  Synthetic oligonucleotide
tagtagtagactccgcacgaagaagcaaacactgaataaaggatatacagaatggtaggg

SEQ ID NO: 26529 - DNA, 60 bp, Artificial
  Synthetic oligonucleotide
gtagactccgcacgaagaagcaaacactgaataaaggagatacagaatggtagggtgggt

SEQ ID NO: 26530 - DNA, 60 bp, Artificial
  Synthetic oligonucleotide
tagtagactccgcacgaagaagcaaacactgaataaaggatatacagaatggtagggtgg

SEQ ID NO: 26531 - DNA, 60 bp, Artificial
  Synthetic oligonucleotide
ccagatggctagtgccactgatgatgcacaaaaggattccatctacgcatctgctctggt

SEQ ID NO: 26532 - DNA, 60 bp, Artificial
  Synthetic oligonucleotide
ggacagatttgtattccagatggctagtgccactgatgatgcacaaaaggattccatcta

SEQ ID NO: 26533 - DNA, 60 bp, Artificial
  Synthetic oligonucleotide
ggacagattcgtatttcagatggctagtgccactgatgatgcacaaaaggattccatcta

SEQ ID NO: 26534 - DNA, 60 bp, Artificial
  Synthetic oligonucleotide
tcagatggctagtgccactgatgatgcacaaaaggattccatctacgcatctgctctggt

SEQ ID NO: 26535 - DNA, 57 bp, Artificial
  Synthetic oligonucleotide
tgtcattccaccatgcatttagagggacatctagcttctatactgcaaaacttttaa

SEQ ID NO: 26536 - DNA, 60 bp, Artificial
  Synthetic oligonucleotide
caaacaaagcgatggtgtaagaagttgtaggatgaaagattcaggggaatgcacagtaac

SEQ ID NO: 26537 - DNA, 60 bp, Artificial
  Synthetic oligonucleotide
tgcatgtttcaatcagcatatgtcttgtgttagatttctacatagaacaatattgccagg

SEQ ID NO: 26538 - DNA, 58 bp, Artificial
  Synthetic oligonucleotide
actggcatgattgtagaccaaaaaaagtctcaggggggcatataaatgttatagaggt

SEQ ID NO: 26539 - DNA, 60 bp, Artificial
  Synthetic oligonucleotide
tgaactgtgcacaggatcatgccctgtcaatgtacctcataatacaggctggctcacatt

SEQ ID NO: 26540 - DNA, 60 bp, Artificial
  Synthetic oligonucleotide
aaagattacgataaagatcaagatataggccatttttgcctcagtcctagatgcaacacc

SEQ ID NO: 26541 - DNA, 60 bp, Artificial
  Synthetic oligonucleotide
gtaagctatgtggcctagtataccatccctttacagagtgtggcactcattgtgtatgcg

SEQ ID NO: 26542 - DNA, 60 bp, Artificial
  Synthetic oligonucleotide
gaatatatccaattcaaacaaagcgatggtgtaagaagttgtaggatgaaagattcaggg

SEQ ID NO: 26543 - DNA, 60 bp, Artificial
  Synthetic oligonucleotide
agacatcataaaggacgagctgactgtctatagggaagaaactgaggaaaccacaaatgt

SEQ ID NO: 26544 - DNA, 60 bp, Artificial
  Synthetic oligonucleotide
gctttgacaatatacactgtgagttgacaatacatagtactgtagaagctagctgcccaa

SEQ ID NO: 26545 - DNA, 60 bp, Artificial
  Synthetic oligonucleotide
caccgaatgagcacaaatatgctataaaagtgatatgcaatggaaagcccgggatatcgc

SEQ ID NO: 26546 - DNA, 60 bp, Artificial
  Synthetic oligonucleotide
gctagctgcccaataacaagctcgtgtacagtattccacgatagaatattaataacaccg

SEQ ID NO: 26547 - DNA, 60 bp, Artificial
  Synthetic oligonucleotide
gaaagcccgggatatcgctaccattcaaaatttgcaacacaaaagtcgatgctgccatga

SEQ ID NO: 26548 - DNA, 60 bp, Artificial
  Synthetic oligonucleotide
gtggcactcattgtgtatgcggtgcaagatatgatacatctgataggatgaaactgcaca

SEQ ID NO: 26549 - DNA, 60 bp, Artificial
  Synthetic oligonucleotide
tggcaggaacatcgataggattcaaaataacatctaaatctgggaaacatttactagatg

SEQ ID NO: 26550 - DNA, 60 bp, Artificial
  Synthetic oligonucleotide
gactgctgaaggaatcgaaagtgcttatatagaatcagaaattcctgctctggcaggaac

SEQ ID NO: 26551 - DNA, 60 bp, Artificial
  Synthetic oligonucleotide
ggctcacatttgctagagaaagaacaagctcatggggatgtgaagagtttggctgcttag

SEQ ID NO: 26552 - DNA, 60 bp, Artificial
  Synthetic oligonucleotide
gcacaggatcatgccctgtcaatgtacctcataatacaggctggctcacatttgctagag

SEQ ID NO: 26553 - DNA, 60 bp, Artificial
  Synthetic oligonucleotide
aatcctgcaaaaagtgtaagctatgtggcctagtataccatccctttacagagtgtggca

SEQ ID NO: 26554 - DNA, 60 bp, Artificial
  Synthetic oligonucleotide
acagggcctactataggagtaaatacgaaacacgatgaactgtgcacaggatcatgccct

SEQ ID NO: 26555 - DNA, 60 bp, Artificial
  Synthetic oligonucleotide
caaatacatgtaaaaacattaaggctgttacatgtttatcaccgaaatcaggagtatcat

SEQ ID NO: 26556 - DNA, 60 bp, Artificial
  Synthetic oligonucleotide
gctgccatgactttaacagatgcaaagcagatattagaactagctcctgtagatcaaaca

SEQ ID NO: 26557 - DNA, 60 bp, Artificial
  Synthetic oligonucleotide
cgagctgactgtctatagggaagaaactgaggaaaccacaaatgtggagctgtgtctgac

SEQ ID NO: 26558 - DNA, 61 bp, Artificial
  Synthetic oligonucleotide
caccattagatatcctataaatcaaaatcacatctctaattgtacatggcaagttaggcac

SEQ ID NO: 26559 - DNA, 60 bp, Artificial
  Synthetic oligonucleotide
gttgcactaagtgctgcagggccagtttatcagagatgtttccaagatggtgctattgtc

SEQ ID NO: 26560 - DNA, 60 bp, Artificial
  Synthetic oligonucleotide
taccaaaaaccaaggaaacaagtataccagtctaattctgagcaaacgcatttttgtctt

SEQ ID NO: 26561 - DNA, 60 bp, Artificial
  Synthetic oligonucleotide
tttgacaacgattatcaagcttgtaagttcttacagacgcctgcaagctataggctagaa

SEQ ID NO: 26562 - DNA, 60 bp, Artificial
  Synthetic oligonucleotide
caggggaatgcacagtaactactaataagtggcccataatactttgtgaaaacaacagat

SEQ ID NO: 26563 - DNA, 60 bp, Artificial
  Synthetic oligonucleotide
ccacaaatgtggagctgtgtctgacctttgcagataaaacgtattgcactaatctcaatg

SEQ ID NO: 26564 - DNA, 60 bp, Artificial
  Synthetic oligonucleotide
ctaagctattacgctatgtactgtcaagaatgtgacatgtatcatgacaggtcaggtcta

SEQ ID NO: 26565 - DNA, 57 bp, Artificial
  Synthetic oligonucleotide
tacagtcaaatcagggtggtttaagagcactacttatataaccttaggtcaaacttg

SEQ ID NO: 26566 - DNA, 60 bp, Artificial
  Synthetic oligonucleotide
actacttatgccatttagctagtaggaaggaagtaatcattaggaaatgctttgacaacg

SEQ ID NO: 26567 - DNA, 60 bp, Artificial
  Synthetic oligonucleotide
gcagggccagtttatcagagatgtttccaagatggtgctattgtcaaacagagcccatcc

SEQ ID NO: 26568 - DNA, 60 bp, Artificial
  Synthetic oligonucleotide
gcaatataggaaagctattacgcaaaaactgcaaacaagcttaacactgtttaagtactc

SEQ ID NO: 26569 - DNA, 60 bp, Artificial
  Synthetic oligonucleotide
tgctattgtcaaacagagcccatccaaacaagctgtgacagaagtatgcttaaaggatga

SEQ ID NO: 26570 - DNA, 60 bp, Artificial
  Synthetic oligonucleotide
cccatatgtttcaaacttagggatacattaagacagcatgaggatgcttataagagggaa

SEQ ID NO: 26571 - DNA, 60 bp, Artificial
  Synthetic oligonucleotide
gctgttagggggttggggatttaatattaggagggtgggggctaacgacagcgtaatcta

SEQ ID NO: 26572 - DNA, 60 bp, Artificial
  Synthetic oligonucleotide
caagcttgtaagttcttacagacgcctgcaagctataggctagaagaggaaggaggctca

SEQ ID NO: 26573 - DNA, 60 bp, Artificial
  Synthetic oligonucleotide
atttgctgacaatgtagatataacagtagagggtgcttgcacaggatgtatcaattgctt

SEQ ID NO: 26574 - DNA, 60 bp, Artificial
  Synthetic oligonucleotide
tgactttatttttgaaaatccttcaacaagaagttcattgtcaaggaattcagagtcatc

SEQ ID NO: 26575 - DNA, 60 bp, Artificial
  Synthetic oligonucleotide
gtcttctagacacacattgcttggaaggctatgagacagtgggagaagaagtccttagtg

SEQ ID NO: 26576 - DNA, 60 bp, Artificial
  Synthetic oligonucleotide
gcatatagcttgcctagaattattgcagtacggaatcatgaaatcatggtaggacaaata

SEQ ID NO: 26577 - DNA, 65 bp, Artificial
  Synthetic oligonucleotide
ccctggtaatgcattattaaaggctgtaattgactacataaaatatatgatgggtttgactgaag

SEQ ID NO: 26578 - DNA, 60 bp, Artificial
  Synthetic oligonucleotide
gagctgtgtctgacctttgcagataaaacgtattgcactaatctcaatgccataactccc

SEQ ID NO: 26579 - DNA, 60 bp, Artificial
  Synthetic oligonucleotide
ctctggttatagtcagacaacatggagaacatacttgaggtcacatgattttgaggcatg

SEQ ID NO: 26580 - DNA, 60 bp, Artificial
  Synthetic oligonucleotide
gcagcgatataaatattgtgtggaattgtacagggccatttcttagcttaggcaattgcg

SEQ ID NO: 26581 - DNA, 60 bp, Artificial
  Synthetic oligonucleotide
ggcaatgcacatgtggacaatatgaggatgctacaggcttgatggctcataggaaaacat

SEQ ID NO: 26582 - DNA, 60 bp, Artificial
  Synthetic oligonucleotide
ccatttagctagtaggaaggaagtaatcattaggaaatgctttgacaacgattatcaagc

SEQ ID NO: 26583 - DNA, 60 bp, Artificial
  Synthetic oligonucleotide
ccagggtataagagtcttagagctgcaagagtcatgtgtaaatccaaaggcccagcttct

SEQ ID NO: 26584 - DNA, 60 bp, Artificial
  Synthetic oligonucleotide
atgatgggtttgactgaagtaagtaacttcaaacatgacgaaatgtgggatgactttatt

SEQ ID NO: 26585 - DNA, 60 bp, Artificial
  Synthetic oligonucleotide
ggattgcatcagggaggacaattggccaagaccgtgacccaacaggtgtggaaccagggg

SEQ ID NO: 26586 - DNA, 60 bp, Artificial
  Synthetic oligonucleotide
ggattgcatcagggaagacaattggccaagaccgtgacccaacaggtgtggaaccagggg

SEQ ID NO: 26587 - DNA, 60 bp, Artificial
  Synthetic oligonucleotide
cctgatgatttcaataagagggcacttcatgacagggagagtgtggctgcatcaattcag

SEQ ID NO: 26588 - DNA, 60 bp, Artificial
  Synthetic oligonucleotide
cctgatgatttaaataggagggcacttcatgacagggagagtgtggctgcatcaattcag

SEQ ID NO: 26589 - DNA, 60 bp, Artificial
  Synthetic oligonucleotide
gcaacttgctgataggattgcatcagggaagacaattggccaagaccgtgacccaacagg

SEQ ID NO: 26590 - DNA, 60 bp, Artificial
  Synthetic oligonucleotide
gcaacttgctgataggattgcatcagggaggacaattggccaagaccgtgacccaacagg

SEQ ID NO: 26591 - DNA, 60 bp, Artificial
  Synthetic oligonucleotide
ccctgatgatttcaataagagggcacttcatgacagggagagtgtggctgcatcaattca

SEQ ID NO: 26592 - DNA, 60 bp, Artificial
  Synthetic oligonucleotide
ccctgatgatttaaataggagggcacttcatgacagggagagtgtggctgcatcaattca

SEQ ID NO: 26593 - DNA, 60 bp, Artificial
  Synthetic oligonucleotide
acactacctcacttaaacccataaactacctcttatataaactacctcatgatgttgttg

SEQ ID NO: 26594 - DNA, 60 bp, Artificial
  Synthetic oligonucleotide
agggtaaagggccagggtggttttcgtatcaatgcaatatgggtgggtttagggccaagc

SEQ ID NO: 26595 - DNA, 60 bp, Artificial
  Synthetic oligonucleotide
ctggaccagcggatcattgtcatgttcatggttgcatggggaaaagaggcagtggataat

SEQ ID NO: 26596 - DNA, 60 bp, Artificial
  Synthetic oligonucleotide
gcaggaatggctgaactaggggcctttttttcaatcctacaagatatgaggaacaccatc

SEQ ID NO: 26597 - DNA, 60 bp, Artificial
  Synthetic oligonucleotide
cgagtccaccaacaaatgcagattatattgcacagaggcagggccttcttgcagggatgg

SEQ ID NO: 26598 - DNA, 60 bp, Artificial
  Synthetic oligonucleotide
aaagtttgcatgcgagtccaccaacaaatgcagattatattgcacagaggcagggccttc

SEQ ID NO: 26599 - DNA, 60 bp, Artificial
  Synthetic oligonucleotide
cccaaagtctgcatgcaagtccaccaacaaatgcagattatattgcacagaggcagggac

SEQ ID NO: 26600 - DNA, 60 bp, Artificial
  Synthetic oligonucleotide
tcaagactggcttggggcaccatgtaagtttctacctgatctgtcaacccaaagtttgca

SEQ ID NO: 26601 - DNA, 60 bp, Artificial
  Synthetic oligonucleotide
gcagggatggctgaactaggggcctttttttcaatcctgcaagatatgaggaacaccatt

SEQ ID NO: 26602 - DNA, 60 bp, Artificial
  Synthetic oligonucleotide
gggtctttgcaggtgcacctgatcgttgtccaccaacgtgcctcttcatcgcaggaatgg

SEQ ID NO: 26603 - DNA, 60 bp, Artificial
  Synthetic oligonucleotide
gggtctttgcaggtgcacctgatcgttgtccacctacatgcctcttcgtcgcagggatgg

SEQ ID NO: 26604 - DNA, 51 bp, Artificial
  Synthetic oligonucleotide
tataagagaccatgcaagggatgctggctgtacccttgttgatcatcttga

SEQ ID NO: 26605 - DNA, 60 bp, Artificial
  Synthetic oligonucleotide
gattcaggactgcagtttgtgggctgtatccagcccaggtgaaagccagaaatatggtaa

SEQ ID NO: 26606 - DNA, 60 bp, Artificial
  Synthetic oligonucleotide
ggattcaagactggcttggggcaccatgtaagtttctacctgatctttcaacccaaagtc

SEQ ID NO: 26607 - DNA, 60 bp, Artificial
  Synthetic oligonucleotide
gtgtggaaccaggggaccatctgagagagagatcaatgttgagttacgggaatgtgctgg

SEQ ID NO: 26608 - DNA, 60 bp, Artificial
  Synthetic oligonucleotide
gtgtggaaccaggggaccatctgagggagagatcaatgttgagttacgggaatgtgctgg

SEQ ID NO: 26609 - DNA, 60 bp, Artificial
  Synthetic oligonucleotide
acccaacaggtgtggaaccaggggaccatctgagggagagatcaatgttgagttacggga

SEQ ID NO: 26610 - DNA, 60 bp, Artificial
  Synthetic oligonucleotide
acccaacaggtgtggaaccaggggaccatctgagagagagatcaatgttgagttacggga

SEQ ID NO: 26611 - DNA, 60 bp, Artificial
  Synthetic oligonucleotide
cctgacatcctttgtaatacctattattctcaaggcactgtatatgcttacaacaagagg

SEQ ID NO: 26612 - DNA, 53 bp, Artificial
  Synthetic oligonucleotide
gattcaggactgcagtttgtgggctgtatccagctcaggtgaaagccagaaat

SEQ ID NO: 26613 - DNA, 60 bp, Artificial
  Synthetic oligonucleotide
aacaatcattgtttacctgacatcctttgtaatacctattattctcaaggcactgtatat

SEQ ID NO: 26614 - DNA, 60 bp, Artificial
  Synthetic oligonucleotide
tcattgtttacctgacatcctttgtaatacctattattctcaaggcactgtatatgctta

SEQ ID NO: 26615 - DNA, 60 bp, Artificial
  Synthetic oligonucleotide
tatcactgccatatcagggtaaagggccagggtggttttcgtatcaatgcaatatgggtg

SEQ ID NO: 26616 - DNA, 60 bp, Artificial
  Synthetic oligonucleotide
tcactgccatatcagggtaaagggccagggtggttttcgtatcaatgcaatatgggtggg

SEQ ID NO: 26617 - DNA, 60 bp, Artificial
  Synthetic oligonucleotide
agtggataatttccacctcggagatgacatggacccagaactcaggaatcttgcgcagct

SEQ ID NO: 26618 - DNA, 50 bp, Artificial
  Synthetic oligonucleotide
gacgacatggacccagaactcaggaatcttgcacagctattgattgacca

SEQ ID NO: 26619 - DNA, 60 bp, Artificial
  Synthetic oligonucleotide
tcaatagaaactaattattaagaataagtaaggtaataagtaataagtaagtaattaata

SEQ ID NO: 26620 - DNA, 60 bp, Artificial
  Synthetic oligonucleotide
taagtaattaatacaagattaacacataggataagtttaaccataggaattaagtaaatg

SEQ ID NO: 26621 - DNA, 50 bp, Artificial
  Synthetic oligonucleotide
gtaattaatacaagattaacacataggataagttaaccataggagttaag

SEQ ID NO: 26622 - DNA, 60 bp, Artificial
  Synthetic oligonucleotide
cctgattgaatatgtgattataaatgtgaaatatgtatactactgattattatcactgcc

SEQ ID NO: 26623 - DNA, 60 bp, Artificial
  Synthetic oligonucleotide
tactactgattattatcactgccatatcagggtaaagggccagggtggttttcgtatcaa

SEQ ID NO: 26624 - DNA, 60 bp, Artificial
  Synthetic oligonucleotide
tggggaatacaactgccctgattttaatggaaactttgagagaatttgtagatttgcaca

SEQ ID NO: 26625 - DNA, 60 bp, Artificial
  Synthetic oligonucleotide
ttgagagaatttgtagatttgcacagactcctgtttgtgagtatgggggtaacacagttt

SEQ ID NO: 26626 - DNA, 60 bp, Artificial
  Synthetic oligonucleotide
aacataaccacaataagcaataaacaaaacacactaacagccttcagaggtgcaacagat

SEQ ID NO: 26627 - DNA, 60 bp, Artificial
  Synthetic oligonucleotide
ctgacccaattctagagaggagcaagcttgaatggtatgaccctgatgcaacatcccgtg

SEQ ID NO: 26628 - DNA, 60 bp, Artificial
  Synthetic oligonucleotide
atgaggcaaataaaacttaacctaaaatttaggactaaccctcaaggcgatgatcatagt

SEQ ID NO: 26629 - DNA, 60 bp, Artificial
  Synthetic oligonucleotide
gatttcacaataccctatagcccaaaaatacacactaggatgaacttgcctgtcctatgt

SEQ ID NO: 26630 - DNA, 60 bp, Artificial
  Synthetic oligonucleotide
tcgaaaacttgggtgaaaatccctgtagagtaactcttaaagtcctgagcattgacgggg

SEQ ID NO: 26631 - DNA, 60 bp, Artificial
  Synthetic oligonucleotide
ggcatgtgataaagccatgtgttatggtgcaagctcacagacccttcagcgtggtgataa

SEQ ID NO: 26632 - DNA, 60 bp, Artificial
  Synthetic oligonucleotide
aacacagtttcaggctatcaacgatatcttgctactaaggattcttttttctcaatcaat

SEQ ID NO: 26633 - DNA, 60 bp, Artificial
  Synthetic oligonucleotide
ggacagacatcatgcacagatataaagctggcaagttggtactcatgcctggtaggcgat

SEQ ID NO: 26634 - DNA, 60 bp, Artificial
  Synthetic oligonucleotide
ggattttcactaaattgtaaagtctcattgcttgaatgtaatagctttattactgttata

SEQ ID NO: 26635 - DNA, 60 bp, Artificial
  Synthetic oligonucleotide
ccctgatgcaacatcccgtgatcacattaatgttcaaataacaaaggacctagatttcga

SEQ ID NO: 26636 - DNA, 60 bp, Artificial
  Synthetic oligonucleotide
tgatcatagtgatcgtagatcatctagaattcatattattgggcataagaacataaccac

SEQ ID NO: 26637 - DNA, 60 bp, Artificial
  Synthetic oligonucleotide
tgataatgtccacggagttggtgtgcataaaatgacaacagatgttgaactagatttttc

SEQ ID NO: 26638 - DNA, 60 bp, Artificial
  Synthetic oligonucleotide
agtgcagaagtgatgaacttggagccagaatggaatgataatgtccacggagttggtgtg

SEQ ID NO: 26639 - DNA, 60 bp, Artificial
  Synthetic oligonucleotide
aggcataaagtcataagaacaaagactcttgtgataggtcaatgtatacacacattcact

SEQ ID NO: 26640 - DNA, 60 bp, Artificial
  Synthetic oligonucleotide
tctcaacagaaaacaatagcatcaattcaaaagctaggtcattgggttgacgcacgctgg

SEQ ID NO: 26641 - DNA, 60 bp, Artificial
  Synthetic oligonucleotide
ccttcttcctcaaaatttacatataagcgattcttggaaagccctgtaggtgagactaag

SEQ ID NO: 26642 - DNA, 60 bp, Artificial
  Synthetic oligonucleotide
caaacagcctgggcgtgtaacccaggagattgccctgggattaacacaggatgcacagct

SEQ ID NO: 26643 - DNA, 60 bp, Artificial
  Synthetic oligonucleotide
taggacagtgttccattgctatggggcctgctctaaatttgaatatccgtggaagagtgc

SEQ ID NO: 26644 - DNA, 58 bp, Artificial
  Synthetic oligonucleotide
aacctacactgtttctaggctacacaccaactatgagctggacaacatgtggcacaag

SEQ ID NO: 26645 - DNA, 60 bp, Artificial
  Synthetic oligonucleotide
accatattttgtactcttgcaggtccgggtgcaagctgtgaggcattttctagttcaggg

SEQ ID NO: 26646 - DNA, 60 bp, Artificial
  Synthetic oligonucleotide
gagaggccatgtggacacctggggaagtgttatagaaacagatgactgtaccatattttg

SEQ ID NO: 26647 - DNA, 60 bp, Artificial
  Synthetic oligonucleotide
agacccttcagcgtggtgataatacagtaacaatccaagggagaggtggacatagtgggt

SEQ ID NO: 26648 - DNA, 58 bp, Artificial
  Synthetic oligonucleotide
actcatggtacttcaggggagtattttgataaagttgcaagtcacacagaaacagagg

SEQ ID NO: 26649 - DNA, 60 bp, Artificial
  Synthetic oligonucleotide
gggactacaagaattggacacttcccactagatgaggttaaaaacatggtatttgagaca

SEQ ID NO: 26650 - DNA, 60 bp, Artificial
  Synthetic oligonucleotide
gctgtgtgtgtgagtctactactatgtataagtgcaactgagcacaagcccattttgctc

SEQ ID NO: 26651 - DNA, 60 bp, Artificial
  Synthetic oligonucleotide
aggcttacttgctgaggctccacatctagcaagagtaaaatctgttgatgttgatacaag

SEQ ID NO: 26652 - DNA, 60 bp, Artificial
  Synthetic oligonucleotide
gtttaaatgttgccatgaagaagactgtgctgaggaaggcttacttgctgaggctccaca

SEQ ID NO: 26653 - DNA, 60 bp, Artificial
  Synthetic oligonucleotide
catagtgggtctaagtttaaatgttgccatgaagaagactgtgctgaggaaggcttactt

SEQ ID NO: 26654 - DNA, 60 bp, Artificial
  Synthetic oligonucleotide
ttttgggtaataacccacttctgtgattctttgtcttttgttcttgcggagtctactact

SEQ ID NO: 26655 - DNA, 60 bp, Artificial
  Synthetic oligonucleotide
gtaattggttggtcattgtagtattagtggtaataatgatactcagtattatgctgttaa

SEQ ID NO: 26656 - DNA, 60 bp, Artificial
  Synthetic oligonucleotide
tatgccaacagatggccagccagaggggacaaaggagattgttggacagacatcatgcac

SEQ ID NO: 26657 - DNA, 60 bp, Artificial
  Synthetic oligonucleotide
tgcaacagattatacatcattattgtataatgtgcaatctacagacaaaaaacctacact

SEQ ID NO: 26658 - DNA, 60 bp, Artificial
  Synthetic oligonucleotide
gttccaggcttccatggattcacagcagtttgtctcattacaacattttgttttggctgg

SEQ ID NO: 26659 - DNA, 60 bp, Artificial
  Synthetic oligonucleotide
tgtcctatgtatgcttatgccaacagatggccagccagaggggacaaaggagattgttgg

SEQ ID NO: 26660 - DNA, 60 bp, Artificial
  Synthetic oligonucleotide
gtgtcagcgggtagactttgatttagagttttactgtaatggtaggcataaagtcataag

SEQ ID NO: 26661 - DNA, 60 bp, Artificial
  Synthetic oligonucleotide
catactcataggtttaaaggtttaggagaccaggttacttttatgtgtcagcgggtagac

SEQ ID NO: 26662 - DNA, 60 bp, Artificial
  Synthetic oligonucleotide
atagcatcaattcaaaagctaggtcattgggttgacgcacgctggaatactaggacagtg

SEQ ID NO: 26663 - DNA, 60 bp, Artificial
  Synthetic oligonucleotide
ctgttataaagctcattcaaatagactatgagagggaagtttgtgttcagctaggtaact

SEQ ID NO: 26664 - DNA, 60 bp, Artificial
  Synthetic oligonucleotide
gatcaaatccttaagacaagcacgaagccacatagtagcttgtataaaaaattatgtgtg

SEQ ID NO: 26665 - DNA, 60 bp, Artificial
  Synthetic oligonucleotide
gagtgtaaacgagttactggaaatgactgcttaagcacaaatggagttaaagtctgtctt

SEQ ID NO: 26666 - DNA, 60 bp, Artificial
  Synthetic oligonucleotide
cacaaatggagttaaagtctgtcttctaagcaccactgtcaaacttgggtcaacagacac

SEQ ID NO: 26667 - DNA, 60 bp, Artificial
  Synthetic oligonucleotide
caacagacacattagttttctttgggccacttcaaggaggtgcagttgttttcaaaaatt

SEQ ID NO: 26668 - DNA, 60 bp, Artificial
  Synthetic oligonucleotide
ggtgcacgagtagctgtgtctacggggaccctggagatgtcatgctaacagaaaatgggg

SEQ ID NO: 26669 - DNA, 60 bp, Artificial
  Synthetic oligonucleotide
cacattcactagcttcttttcactgttcccaagtattgcacactcactagctgttgaaat

SEQ ID NO: 26670 - DNA, 60 bp, Artificial
  Synthetic oligonucleotide
cttttcactgttcccaagtattgcacactcactagctgttgaaatatgtgttccaggctt

SEQ ID NO: 26671 - DNA, 60 bp, Artificial
  Synthetic oligonucleotide
ggtctactattggtgatacaagttgtgattactgcaagcatgaatgtgcaacaaatttgg

SEQ ID NO: 26672 - DNA, 60 bp, Artificial
  Synthetic oligonucleotide
gtactgcaaacaaggcaaatgcccttactgtttaaatgaagtctaccactcacctgctgc

SEQ ID NO: 26673 - DNA, 60 bp, Artificial
  Synthetic oligonucleotide
tactatggatcagagatttaaacgtattttgacaaaaataaaggcagagtataggtctac

SEQ ID NO: 26674 - DNA, 60 bp, Artificial
  Synthetic oligonucleotide
cgcacagcacagcctggaaacatgcccttcggttaaaagggaccgcatatgagggtctgt

SEQ ID NO: 26675 - DNA, 58 bp, Artificial
  Synthetic oligonucleotide
gcattatggcaagcctcacagactttgcatcatcaagaggtaatccataggcttgaat

SEQ ID NO: 26676 - DNA, 60 bp, Artificial
  Synthetic oligonucleotide
attcaagcctatggattacctcttgatgatgcaaagtctgtgaggcttgccataatgcta

SEQ ID NO: 26677 - DNA, 60 bp, Artificial
  Synthetic oligonucleotide
attcaagcttatggattacctcttgatgatgcaaagtctgtgaggcttgccataatgctg

SEQ ID NO: 26678 - DNA, 58 bp, Artificial
  Synthetic oligonucleotide
gcattatggcaagcctcacagactttgcatcatcaagaggtaatccataggcttgact

SEQ ID NO: 26679 - DNA, 60 bp, Artificial
  Synthetic oligonucleotide
gcctatggattacctcttgatgatgcaaagtctgtgaggcttgccataatgctgggaggt

SEQ ID NO: 26680 - DNA, 60 bp, Artificial
  Synthetic oligonucleotide
attcaagcctatggattacctcttgatgatgcaaagtctgtgaggcttgccataatgctg

SEQ ID NO: 26681 - DNA, 60 bp, Artificial
  Synthetic oligonucleotide
cctcccagcattatggcaagcctcacagactttgcatcatcaagaggtaatccataggct

SEQ ID NO: 26682 - DNA, 60 bp, Artificial
  Synthetic oligonucleotide
cctcccagcattatggcaagcctcacagactttgcatcatcaagaggtaatccataagcc

SEQ ID NO: 26683 - DNA, 60 bp, Artificial
  Synthetic oligonucleotide
cagcattatggcaagcctcacagactttgcatcatcaagaggtaatccataggcttgaat

SEQ ID NO: 26684 - DNA, 60 bp, Artificial
  Synthetic oligonucleotide
cccagcattatggcaagcctcacagactttgcatcatcaagaggtaatccataggcttga

SEQ ID NO: 26685 - DNA, 60 bp, Artificial
  Synthetic oligonucleotide
ttatcaattgaggcaccgtggggagcaatcaatgttcagtcaacctacaaaccaactgtc

SEQ ID NO: 26686 - DNA, 60 bp, Artificial
  Synthetic oligonucleotide
gatttccaggattgtgatatgggtctgccccactataccaaaccctacagggaaacttgt

SEQ ID NO: 26687 - DNA, 60 bp, Artificial
  Synthetic oligonucleotide
gcaccaaggatacagtttaagcagacacaaaatgtaaaggaaccgggtacatttaaacta

SEQ ID NO: 26688 - DNA, 60 bp, Artificial
  Synthetic oligonucleotide
ccaggaaaaagatggatactaagcctgctgacccgactgggattgaacctgatgaccacc

SEQ ID NO: 26689 - DNA, 60 bp, Artificial
  Synthetic oligonucleotide
cttaaagaaagatcaagcctcagatatggaaatgtccttgatgtgaatgcaatcgatatt

SEQ ID NO: 26690 - DNA, 60 bp, Artificial
  Synthetic oligonucleotide
gtgtgctccactctaatcacttgaaggttactctggaagaggtttgatagttagacttac

SEQ ID NO: 26691 - DNA, 60 bp, Artificial
  Synthetic oligonucleotide
atagttagacttacttttgacgtgatgtccgaactagagtttaaagatgtgccctcattt

SEQ ID NO: 26692 - DNA, 60 bp, Artificial
  Synthetic oligonucleotide
cacagagtctccggttacctagcacgatgggcattgtaccttatcgcccctagtccatat

SEQ ID NO: 26693 - DNA, 60 bp, Artificial
  Synthetic oligonucleotide
acttgttctccttactcttggaggggttaaccttgctgtgcttaatacccatttccctgg

SEQ ID NO: 26694 - DNA, 60 bp, Artificial
  Synthetic oligonucleotide
ggcgaaggtcaaagcttacttgcacaggtcgtcggagcaacttgttctccttactcttgg

SEQ ID NO: 26695 - DNA, 60 bp, Artificial
  Synthetic oligonucleotide
tacatcaatgcggcgaaggtcaaagcttacttgcacaggtcgtcggagcaacttgttctc

SEQ ID NO: 26696 - DNA, 60 bp, Artificial
  Synthetic oligonucleotide
gaagggtattggaggctactattgttagaatcttctacatcaatgcggcgaaggtcaaag

SEQ ID NO: 26697 - DNA, 60 bp, Artificial
  Synthetic oligonucleotide
ttatacctagaaatggaagggtattggaggctactattgttagaatcttctacatcaatg

SEQ ID NO: 26698 - DNA, 60 bp, Artificial
  Synthetic oligonucleotide
gccctcatttgcagacaatacatttaacccggaagctcagtatgtcacatttatacctag

SEQ ID NO: 26699 - DNA, 60 bp, Artificial
  Synthetic oligonucleotide
gacttacttttgacgtgatgtccgaactagagtttaaagatgtgccctcatttgcagaca

SEQ ID NO: 26700 - DNA, 60 bp, Artificial
  Synthetic oligonucleotide
tagtccatattctgacagagacatcgtccggaccactttcatcgtgccaattgccgagaa

SEQ ID NO: 26701 - DNA, 60 bp, Artificial
  Synthetic oligonucleotide
ccggttacctagcacgatgggcattgtaccttatcgcccctagtccatattctgacagag

SEQ ID NO: 26702 - DNA, 60 bp, Artificial
  Synthetic oligonucleotide
gggacacgaacattattacatacgtgaattcatttatcaggtatagaattggtggagcac

SEQ ID NO: 26703 - DNA, 60 bp, Artificial
  Synthetic oligonucleotide
gtcgctggattgggctagaactgcttttacaagcacagccagagagttcgtggcccagtt

SEQ ID NO: 26704 - DNA, 60 bp, Artificial
  Synthetic oligonucleotide
gtatgcagatatcaacgcgcggttctcagtcgttgagtcgctggattgggctagaactgc

SEQ ID NO: 26705 - DNA, 60 bp, Artificial
  Synthetic oligonucleotide
tggcccagttcggaatcaagttagcgtaatatcattgagcacagttgcaattttcagagt

SEQ ID NO: 26706 - DNA, 60 bp, Artificial
  Synthetic oligonucleotide
gctggattgggctagaactgcttttacaagcacagccagagagttcgtggcccagttcgg

SEQ ID NO: 26707 - DNA, 60 bp, Artificial
  Synthetic oligonucleotide
ttttcagagtccagtaaattagggccaacaaaagataacagcaaaatgggtgggtggttg

SEQ ID NO: 26708 - DNA, 60 bp, Artificial
  Synthetic oligonucleotide
gcccagttcggaatcaagttagcgtaatatcattgagcacagttgcaattttcagagtcc

SEQ ID NO: 26709 - DNA, 60 bp, Artificial
  Synthetic oligonucleotide
tgggtggttggggacacgaacattattacatacgtgaattcatttatcaggtatagaatt

SEQ ID NO: 26710 - DNA, 60 bp, Artificial
  Synthetic oligonucleotide
gtccagtaaattagggccaacaaaagataacagcaaaatgggtgggtggttggggacacg

SEQ ID NO: 26711 - DNA, 60 bp, Artificial
  Synthetic oligonucleotide
cagagacatcgtccggaccactttcatcgtgccaattgccgagaagaatggcattacatg

SEQ ID NO: 26712 - DNA, 57 bp, Artificial
  Synthetic oligonucleotide
ttgccgagaagaatggcattacatggtgcgatggtgtaacaatgtatctggcctttt

SEQ ID NO: 26713 - DNA, 60 bp, Artificial
  Synthetic oligonucleotide
ttgccgagaagaatggcattacatggtgcgatggtgtaacaatgtatctggcctttttgc

SEQ ID NO: 26714 - DNA, 60 bp, Artificial
  Synthetic oligonucleotide
gcctttttgcctggctccgaaatgttcatgtccacatttaggttcttcccgctgaccatc

SEQ ID NO: 26715 - DNA, 60 bp, Artificial
  Synthetic oligonucleotide
cctggctccgaaatgttcatgtccacatttaggttcttcccgctgaccatcggaatgtac

SEQ ID NO: 26716 - DNA, 60 bp, Artificial
  Synthetic oligonucleotide
gctgaccatcggaatgtacaaggtgcagagatggggcatggaccctaaatgtctagaaaa

SEQ ID NO: 26717 - DNA, 60 bp, Artificial
  Synthetic oligonucleotide
gtacaaggtgcagagatggggcatggaccctaaatgtctagaaaaggcgatatggcaacg

SEQ ID NO: 26718 - DNA, 60 bp, Artificial
  Synthetic oligonucleotide
gtctagaaaaggcgatatggcaacggtatgcgggcatcggtgcagacacgtggatacaga

SEQ ID NO: 26719 - DNA, 60 bp, Artificial
  Synthetic oligonucleotide
ggcgatatggcaacggtatgcgggcatcggtgcagacacgtggatacagaaagagtatgc

SEQ ID NO: 26720 - DNA, 60 bp, Artificial
  Synthetic oligonucleotide
tggatacagaaagagtatgcagatatcaacgcgcggttctcagtcgttgagtcgctggat

SEQ ID NO: 26721 - DNA, 60 bp, Artificial
  Synthetic oligonucleotide
agtagtgtgctccactctaatcacttgaaggttactctggaagaggtttgatagttagac

SEQ ID NO: 26722 - DNA, 60 bp, Artificial
  Synthetic oligonucleotide
gagaagttaggtattaagaatttctctacttatgaacaggtttgcaaagtggctaaagtt

SEQ ID NO: 26723 - DNA, 61 bp, Artificial
  Synthetic oligonucleotide
gagaagttaggtattaagaatttctctacttatgaacaggtttgcaaagtggctaaagttc

SEQ ID NO: 26724 - DNA, 60 bp, Artificial
  Synthetic oligonucleotide
gcagaaagaaccttagctaccttgcaaacctgttcataagtagagaaattcttaattccc

SEQ ID NO: 26725 - DNA, 60 bp, Artificial
  Synthetic oligonucleotide
gcagaaagaaccttagctaccttgcaaacctgttcataagtagagaaattcttaatgccc

SEQ ID NO: 26726 - DNA, 60 bp, Artificial
  Synthetic oligonucleotide
aatggcaactaaggaagagatccagagggaaatcagtgcacacgaggggcagcttgtgat

SEQ ID NO: 26727 - DNA, 60 bp, Artificial
  Synthetic oligonucleotide
catcattcgttgtcccaatcatcttgaaggcactttatatgttaacaacaagaggccggc

SEQ ID NO: 26728 - DNA, 60 bp, Artificial
  Synthetic oligonucleotide
ggcagggatggagcctaaagagtttcaagccctcaggcagcattcaaaagatgccggttg

SEQ ID NO: 26729 - DNA, 60 bp, Artificial
  Synthetic oligonucleotide
ggtgcactggcagggatggagcctaaagagtttcaagccctcaggcagcattcaaaagat

SEQ ID NO: 26730 - DNA, 60 bp, Artificial
  Synthetic oligonucleotide
gccttgacattgatgagccaacaggacagacagctgattggttgactataattgtttacc

SEQ ID NO: 26731 - DNA, 60 bp, Artificial
  Synthetic oligonucleotide
ggagcttatccgggaatcctgtaaaccgtgattacatccgacaaaggcaaggtgcactgg

SEQ ID NO: 26732 - DNA, 60 bp, Artificial
  Synthetic oligonucleotide
ccgggaatcctgtaaaccgtgattacatccgacaaaggcaaggtgcactggcagggatgg

SEQ ID NO: 26733 - DNA, 60 bp, Artificial
  Synthetic oligonucleotide
ggcaggatcgggatcctacgggagtagagccaggtgaccacctcaaagagagatcagcac

SEQ ID NO: 26734 - DNA, 60 bp, Artificial
  Synthetic oligonucleotide
cagacagctgattggttgactataattgtttacctaacatcattcgtcgtcccaatcatc

SEQ ID NO: 26735 - DNA, 60 bp, Artificial
  Synthetic oligonucleotide
atgggaatacactggatctgaacagccttgacattgatgagccaacaggacagacagctg

SEQ ID NO: 26736 - DNA, 60 bp, Artificial
  Synthetic oligonucleotide
ttgtacaatggtggaacaaatcgaatcaccatcatcgatatgggtgtttgccggggcccc

SEQ ID NO: 26737 - DNA, 60 bp, Artificial
  Synthetic oligonucleotide
cgatatgggtgtttgccggggcccctgatcggtgcccaccaacatgtttgtttgttgggg

SEQ ID NO: 26738 - DNA, 60 bp, Artificial
  Synthetic oligonucleotide
ggatccagagcttcgtagcctggctcagatcctgattgatcaaaaggtgaaggagatatc

SEQ ID NO: 26739 - DNA, 60 bp, Artificial
  Synthetic oligonucleotide
caatccaatcaaagattgatgagttgaagcgccagcttgccgataggattgcagcaggga

SEQ ID NO: 26740 - DNA, 60 bp, Artificial
  Synthetic oligonucleotide
gggccccatgcaagtttatggctgagtctcccattgccgggagcttatccgggaatcctg

SEQ ID NO: 26741 - DNA, 60 bp, Artificial
  Synthetic oligonucleotide
ctggatctgaacagccttgacattgatgagccaacaggacagacagctgattggttgact

SEQ ID NO: 26742 - DNA, 60 bp, Artificial
  Synthetic oligonucleotide
tttgttgggggaatggctgagctaggtgccttcttctccatacttcaagacatgaggaac

SEQ ID NO: 26743 - DNA, 60 bp, Artificial
  Synthetic oligonucleotide
tcaaagattgatgagttgaagcgccagcttgccgataggattgcagcagggaagaacatc

SEQ ID NO: 26744 - DNA, 51 bp, Artificial
  Synthetic oligonucleotide
atatatgactatcacaattgaatgtaatcataagcacaatcactggcatgt

SEQ ID NO: 26745 - DNA, 60 bp, Artificial
  Synthetic oligonucleotide
gcatttgtatgtgtcaatgcctaatgcccaatctagcatgaaggctgaagagatcacacc

SEQ ID NO: 26746 - DNA, 60 bp, Artificial
  Synthetic oligonucleotide
gattcggaaaccaaagcatttgtatgtgtcaatgcctaatgcccaatctagcatgaaggc

SEQ ID NO: 26747 - DNA, 60 bp, Artificial
  Synthetic oligonucleotide
taaacaagagggcactgcatgaccgggaaagtgtggcagcttcaatccaatcaaagattg

SEQ ID NO: 26748 - DNA, 60 bp, Artificial
  Synthetic oligonucleotide
agagatccagagggaaatcagtgcacacgaggggcagcttgtgatagcacgacgaaaggt

SEQ ID NO: 26749 - DNA, 60 bp, Artificial
  Synthetic oligonucleotide
ggctgaagagatcacacctgggagcttccgcactgcagtttgtgggctatatcctgcaac

SEQ ID NO: 26750 - DNA, 60 bp, Artificial
  Synthetic oligonucleotide
gggcactgcatgaccgggaaagtgtggcagcttcaatccaatcaaagattgatgagttga

SEQ ID NO: 26751 - DNA, 60 bp, Artificial
  Synthetic oligonucleotide
caatcaatgggaattcaactggatcagagaataattgttatgttcatggttgcctggggc

SEQ ID NO: 26752 - DNA, 60 bp, Artificial
  Synthetic oligonucleotide
ggctgagctaggtgccttcttctccatacttcaagacatgaggaacacaattatggcttc

SEQ ID NO: 26753 - DNA, 60 bp, Artificial
  Synthetic oligonucleotide
tgcctggggcaaagaggcagtagataactttcatcttggtgatgatatggatccagagct

SEQ ID NO: 26754 - DNA, 60 bp, Artificial
  Synthetic oligonucleotide
agattggctcggggccccatgcaagtttatggctgagtctcccattgccgggagcttatc

SEQ ID NO: 26755 - DNA, 60 bp, Artificial
  Synthetic oligonucleotide
gaagaacatcgggcaggatcgggatcctacgggagtagagccaggtgaccacctcaaaga

SEQ ID NO: 26756 - DNA, 60 bp, Artificial
  Synthetic oligonucleotide
ataggattgcagcagggaagagcatcgggcaggatcgggatcctacgggagtagagccag

SEQ ID NO: 26757 - DNA, 60 bp, Artificial
  Synthetic oligonucleotide
gaaggagatatcaaaccaggagcccatgaagttataagcatataattaagtaatcaacac

SEQ ID NO: 26758 - DNA, 60 bp, Artificial
  Synthetic oligonucleotide
cagcactaagctatgggaatacactggatctgaacagccttgacattgatgagccaacag

SEQ ID NO: 26759 - DNA, 60 bp, Artificial
  Synthetic oligonucleotide
gcatgaaggctgaagagatcacacctgggagcttccgcactgcagtttgtgggctatatc

SEQ ID NO: 26760 - DNA, 60 bp, Artificial
  Synthetic oligonucleotide
cttgccgataggattgcagcagggaagagcatcgggcaggatcgggatcctacgggagta

SEQ ID NO: 26761 - DNA, 60 bp, Artificial
  Synthetic oligonucleotide
gttgaagcgccagcttgccgataggattgcagcagggaagaacatcgggcaggatcggga

SEQ ID NO: 26762 - DNA, 60 bp, Artificial
  Synthetic oligonucleotide
gggttcctggcactggcaaaggattggacatcaaggattgaagattggctcggggcccca

SEQ ID NO: 26763 - DNA, 60 bp, Artificial
  Synthetic oligonucleotide
agtgtagttgggttcctggcactggcaaaggattggacatcaaggattgaagattggctc

SEQ ID NO: 26764 - DNA, 60 bp, Artificial
  Synthetic oligonucleotide
gtgactgcccagaaaggtgtggctgcacatcatcaacctgcttgcataaagaatggcctc

SEQ ID NO: 26765 - DNA, 60 bp, Artificial
  Synthetic oligonucleotide
acccactggtcattgagatgcatagagtcctcaaagataatatggatgtgaacttcatga

SEQ ID NO: 26766 - DNA, 60 bp, Artificial
  Synthetic oligonucleotide
tacccactggtcattgagatgcatagagtcctcaaagataatatggatgtgaacttcatg

SEQ ID NO: 26767 - DNA, 60 bp, Artificial
  Synthetic oligonucleotide
gctgtaagaactttcttgcaggaattcggtatcaacatctaaacctctccgttataaccc

SEQ ID NO: 26768 - DNA, 60 bp, Artificial
  Synthetic oligonucleotide
ctcctgctgtaagaactttcttgcaggaattcggtatcaacatctaaacctctccgttat

SEQ ID NO: 26769 - DNA, 60 bp, Artificial
  Synthetic oligonucleotide
gcaaagctagtgttctcaaactagctgaagcaagtgcacagattgttatgcctcttgctg

SEQ ID NO: 26770 - DNA, 60 bp, Artificial
  Synthetic oligonucleotide
cactccacaggatgtcaggatacttagcgcggtgggtagctgacacatgcaaagctagtg

SEQ ID NO: 26771 - DNA, 60 bp, Artificial
  Synthetic oligonucleotide
cctcttgctgaggttaagggctgcacctgggctgatggctatacaatgtatcttggattt

SEQ ID NO: 26772 - DNA, 60 bp, Artificial
  Synthetic oligonucleotide
ctcaaactagctgaagcaagtgcacagattgttatgcctcttgctgaggttaagggctgc

SEQ ID NO: 26773 - DNA, 60 bp, Artificial
  Synthetic oligonucleotide
cacactccacaggatgtcaggatacttagcgcggtgggtagctgacacatgcaaagctag

SEQ ID NO: 26774 - DNA, 60 bp, Artificial
  Synthetic oligonucleotide
ggctgtgagaaaacatgccatagatgctggttgtaacatcattgaccatattgactcacc

SEQ ID NO: 26775 - DNA, 60 bp, Artificial
  Synthetic oligonucleotide
gctgtgagaaaacatgccatagatgctggttgtaacatcattgaccatattgactcaccg

SEQ ID NO: 26776 - DNA, 60 bp, Artificial
  Synthetic oligonucleotide
gcagtacttttgacccagaggtcgcatacgctaactttaagcgtgtctacaccactgggc

SEQ ID NO: 26777 - DNA, 60 bp, Artificial
  Synthetic oligonucleotide
ccgcaaaagaaagcagtcaatcagcaacatgggaatatggaagtggctagtgatggccag

SEQ ID NO: 26778 - DNA, 60 bp, Artificial
  Synthetic oligonucleotide
tccgcaaaagaaagcagtcaatcagcaacatgggtttatggaagtggctaacaatggccg

SEQ ID NO: 26779 - DNA, 60 bp, Artificial
  Synthetic oligonucleotide
ccgcaaaagaaagcagtcaatcagcaacatggggatatggaagtggctagtgatggccag

SEQ ID NO: 26780 - DNA, 60 bp, Artificial
  Synthetic oligonucleotide
cattagtagtcactgtgactgcaatgcctccccgtaatacgaatgggggtcgatgctttt

SEQ ID NO: 26781 - DNA, 60 bp, Artificial
  Synthetic oligonucleotide
tggtaaagagatacctgtgaaatctgagataattaaagatacaaagaagctagattgggc

SEQ ID NO: 26782 - DNA, 60 bp, Artificial
  Synthetic oligonucleotide
cacatctcattgccttacatgcatctgtcgtgacaaaagcatacacagagccaacaataa

SEQ ID NO: 26783 - DNA, 60 bp, Artificial
  Synthetic oligonucleotide
agaagagcggtttagttgatgagtattgtctaagcccaaattgtgacctagattgctacc

SEQ ID NO: 26784 - DNA, 60 bp, Artificial
  Synthetic oligonucleotide
gcaatccagttcaagacatcctcggaacttttatggtgttcgatgtgaatcatgagggca

SEQ ID NO: 26785 - DNA, 60 bp, Artificial
  Synthetic oligonucleotide
tcgtgaacatactagcacttggggttgcgaagaatggggctgcttagcaataggcacggg

SEQ ID NO: 26786 - DNA, 60 bp, Artificial
  Synthetic oligonucleotide
ggatcaaaattcacagacaagaacccaggaattcccgacatcaaagaatgccaaactccg

SEQ ID NO: 26787 - DNA, 60 bp, Artificial
  Synthetic oligonucleotide
gcttattaccaattcatcctttcagtccctgcccaacaacatgcatctgtggaatggttt

SEQ ID NO: 26788 - DNA, 60 bp, Artificial
  Synthetic oligonucleotide
catgttgtcaaaatgatatgccgttgtgtgattaagcaagaggaatgcagttctacaaaa

SEQ ID NO: 26789 - DNA, 60 bp, Artificial
  Synthetic oligonucleotide
acctacatattacttgcggccacaaaacccttaatgttcatgcatgcttcagacaacata

SEQ ID NO: 26790 - DNA, 60 bp, Artificial
  Synthetic oligonucleotide
caggaacaacccaattggtaacaacgatcttaccatccataggctttcaggatatctagc

SEQ ID NO: 26791 - DNA, 60 bp, Artificial
  Synthetic oligonucleotide
gatatggaaatgtccttgatgtgaatgccattgatattgaggaaccgagtggtcaaacag

SEQ ID NO: 26792 - DNA, 60 bp, Artificial
  Synthetic oligonucleotide
gaatgcccacattcaatcaactttggggagagcagtgtaacaggtaaggtggaattacca

SEQ ID NO: 26793 - DNA, 60 bp, Artificial
  Synthetic oligonucleotide
atcattctatcaatcatacctcagacgccaacaatcaatggggatacaactggaccagag

SEQ ID NO: 26794 - DNA, 60 bp, Artificial
  Synthetic oligonucleotide
cattctatcaatcatacctcagacgccaacaatcaatggggatacaactggaccagagga

SEQ ID NO: 26795 - DNA, 60 bp, Artificial
  Synthetic oligonucleotide
gctcatgcttttcatacaataagggatattagataccaagcagtagatgcagtaagcaat

SEQ ID NO: 26796 - DNA, 60 bp, Artificial
  Synthetic oligonucleotide
caagtggccaaacagcagattggtatacaattggagtgtatgtgatagggttcacacttc

SEQ ID NO: 26797 - DNA, 60 bp, Artificial
  Synthetic oligonucleotide
ggtcctcaaggacggtatggatgtcaactttatgaagaaagttctccggcagaggtacgg

SEQ ID NO: 26798 - DNA, 60 bp, Artificial
  Synthetic oligonucleotide
gcatagggttctcaaggatggcatggatgtcaactttatgaagaaagttctccggcaacg

SEQ ID NO: 26799 - DNA, 60 bp, Artificial
  Synthetic oligonucleotide
agtagtgtactccacttgaatactttgagaatatattgaaataaacccctatagaaggaa

SEQ ID NO: 26800 - DNA, 61 bp, Artificial
  Synthetic oligonucleotide
ctccacttgaatactttgagaatatattgaaataaacccctatagaaggaatacctggttg

SEQ ID NO: 26801 - DNA, 60 bp, Artificial
  Synthetic oligonucleotide
agtagtgtactccacttgaatactttgagaatatattgaaataaacttctatagaaggaa

SEQ ID NO: 26802 - DNA, 60 bp, Artificial
  Synthetic oligonucleotide
agtagtgtgctccacttgaatactttgagaatatattgaaataaacttctataaaaggca

SEQ ID NO: 26803 - DNA, 60 bp, Artificial
  Synthetic oligonucleotide
agtagtgtactccacttgaatactttgagaatatattgaaataaacttctatagaaggca

SEQ ID NO: 26804 - DNA, 60 bp, Artificial
  Synthetic oligonucleotide
agtagtgtactccacttgaatactttgagaatatattgaaataaacttctataaaaggca

SEQ ID NO: 26805 - DNA, 60 bp, Artificial
  Synthetic oligonucleotide
ttttgcaatccctattatactaaaggccttatatatgctgtcaacccgtggaaggcagac

SEQ ID NO: 26806 - DNA, 60 bp, Artificial
  Synthetic oligonucleotide
gcttcgaaagaaatcatcattctatcaatcatacctcagacgcacacaatcaatggggat

SEQ ID NO: 26807 - DNA, 60 bp, Artificial
  Synthetic oligonucleotide
agaaatcatcattctatcaatcatacctcagacacacacaatcaatgggaattcaactgg

SEQ ID NO: 26808 - DNA, 60 bp, Artificial
  Synthetic oligonucleotide
ctggcaccaattatattccctctggcttattatcaaaatgtgaagaaagagaagttgggt

SEQ ID NO: 26809 - DNA, 60 bp, Artificial
  Synthetic oligonucleotide
taatttctctttcttcacattttgataataagccagagggaatataattggtgccagacc

SEQ ID NO: 26810 - DNA, 60 bp, Artificial
  Synthetic oligonucleotide
gacaggtctggcaccaattatattccctctggcttattatcaaaatgtgaagaaagagaa

SEQ ID NO: 26811 - DNA, 60 bp, Artificial
  Synthetic oligonucleotide
aaagttcttaattcctaatttctctttcttcacattttgataataagccagagggaatat

SEQ ID NO: 26812 - DNA, 60 bp, Artificial
  Synthetic oligonucleotide
gacaggcctggcaccaattatattccctctggcttattatcaaaatgtgaagaaagagaa

SEQ ID NO: 26813 - DNA, 60 bp, Artificial
  Synthetic oligonucleotide
tgacaggtctagcaccaattatattccctctggcttattatcaaaatgtgaagaaagaga

SEQ ID NO: 26814 - DNA, 60 bp, Artificial
  Synthetic oligonucleotide
tgacaggcctggcaccaattatattccctctggcttattatcaaaatgtgaagaaagaga

SEQ ID NO: 26815 - DNA, 60 bp, Artificial
  Synthetic oligonucleotide
gacaggtctagcaccaattatattccctctggcttattatcaaaatgtgaagaaagagaa

SEQ ID NO: 26816 - DNA, 60 bp, Artificial
  Synthetic oligonucleotide
tgacaggtctggcaccaattatattccctctggcttattatcaaaatgtgaagaaagaga

SEQ ID NO: 26817 - DNA, 60 bp, Artificial
  Synthetic oligonucleotide
cacattttgataataagccagagggaatataattggtgccagacctgtcatgctagacaa

SEQ ID NO: 26818 - DNA, 60 bp, Artificial
  Synthetic oligonucleotide
gcatgacaggtttggcaccaattatattccctctggcttattatcaaaatgtgaagaaag

SEQ ID NO: 26819 - DNA, 60 bp, Artificial
  Synthetic oligonucleotide
gcatgacaggtctggcaccaattatattccctctggcttattatcaaaatgtgaagaaag

SEQ ID NO: 26820 - DNA, 60 bp, Artificial
  Synthetic oligonucleotide
gacaggtctggcaccaattatattccctctggcttattatcaaaatgtgaagaaagagga

SEQ ID NO: 26821 - DNA, 60 bp, Artificial
  Synthetic oligonucleotide
atgacaggtctggcaccaattatattccctctggcttattatcaaaatgtgaagaaagag

SEQ ID NO: 26822 - DNA, 60 bp, Artificial
  Synthetic oligonucleotide
taacaggtctggcaccaattatattccctctggcttattatcaaaatgtgaagaaagaga

SEQ ID NO: 26823 - DNA, 60 bp, Artificial
  Synthetic oligonucleotide
tgacaggtctggcaccaattatattccctctggcttattatcaaaatgtgaagaaagagg

SEQ ID NO: 26824 - DNA, 60 bp, Artificial
  Synthetic oligonucleotide
ctccttgaaaagctactacgagaaagactggaatgagtgacttgacagatatccaagagg

SEQ ID NO: 26825 - DNA, 60 bp, Artificial
  Synthetic oligonucleotide
catacctcagacgcacacaatcaatgggaatacaactggaccagaggataattgttatgt

SEQ ID NO: 26826 - DNA, 60 bp, Artificial
  Synthetic oligonucleotide
ttgtgggtgggtttagttccaggctgccttaagtagcctttttctgtatatatggatgta

SEQ ID NO: 26827 - DNA, 51 bp, Artificial
  Synthetic oligonucleotide
gtgacagaaacaacaagtatagttgcatcacctagaactcatatgatgctc

SEQ ID NO: 26828 - DNA, 60 bp, Artificial
  Synthetic oligonucleotide
aacccaccatggggggatatcaacaagtcaggccgttcaggaatagcacttgtcgcaaca

SEQ ID NO: 26829 - DNA, 60 bp, Artificial
  Synthetic oligonucleotide
aacttaacagaacctcacatcacaacaaataaacttgaatggattgacccagatgggaac

SEQ ID NO: 26830 - DNA, 60 bp, Artificial
  Synthetic oligonucleotide
ttggtgatgatatggatcctgagctcagacaacttgctcaatccttgattgataccaagg

SEQ ID NO: 26831 - DNA, 60 bp, Artificial
  Synthetic oligonucleotide
ggtgatgatatggatcctgagctcagacaacttgctcaatccttgattgataccaaggtt

SEQ ID NO: 26832 - DNA, 60 bp, Artificial
  Synthetic oligonucleotide
agatgaagtcaacaagagcacattacaaagtagacgggcggctgtgtctacattggagac

SEQ ID NO: 26833 - DNA, 60 bp, Artificial
  Synthetic oligonucleotide
tgcctacacaaagaatggccccattcaagaaactggagatgcaatcctacttggtgttgg

SEQ ID NO: 26834 - DNA, 60 bp, Artificial
  Synthetic oligonucleotide
aacacactgcaagcaaggcaacaaacagtgtcagcattggaggataaactcgcagactac

SEQ ID NO: 26835 - DNA, 60 bp, Artificial
  Synthetic oligonucleotide
gcagtggaggtggacccggatgacgttaacaagagcacactacagagtagacgggcagct

SEQ ID NO: 26836 - DNA, 60 bp, Artificial
  Synthetic oligonucleotide
ttatcgattgaggcaccatggggagcaataaatgttcagtcaacctataaaccaactgtg

SEQ ID NO: 26837 - DNA, 60 bp, Artificial
  Synthetic oligonucleotide
ggcaggcgtgactccagaaaccttcccaactgtttcacagttccttttcgagctagggaa

SEQ ID NO: 26838 - DNA, 60 bp, Artificial
  Synthetic oligonucleotide
cataattgcactattattatcaggggaatcaacatatcagggtaggggtacatttatggg

SEQ ID NO: 26839 - DNA, 60 bp, Artificial
  Synthetic oligonucleotide
ccaatcataattgcactattattatcaggggaatcaacatatcagggtaggggtacattt

SEQ ID NO: 26840 - DNA, 60 bp, Artificial
  Synthetic oligonucleotide
gtgagatgggtgtctgctttggaacaatccctgtggccgatcctgatgatgccgcccagg

SEQ ID NO: 26841 - DNA, 60 bp, Artificial
  Synthetic oligonucleotide
ctctcttctatctcctatcttttattgattgaccggggtgttgtcttgacatcttgcgga

SEQ ID NO: 26842 - DNA, 60 bp, Artificial
  Synthetic oligonucleotide
ctcctatcttttattgattgaccggggtgttgtcttgacatcttgcggagtctactacta

SEQ ID NO: 26843 - DNA, 60 bp, Artificial
  Synthetic oligonucleotide
gttgcagagttgcacacatggtgtgccaggagacctacaggtctaccacatcggaaattt

SEQ ID NO: 26844 - DNA, 60 bp, Artificial
  Synthetic oligonucleotide
gtcaaccatttccatctgggtgatgatatggaccctgaactcagaacacttgcacaaagt

SEQ ID NO: 26845 - DNA, 60 bp, Artificial
  Synthetic oligonucleotide
gcgcaaaggattggtcgaaggtgtggtcatctccaaggaaggttctgaatcatgcatcga

SEQ ID NO: 26846 - DNA, 60 bp, Artificial
  Synthetic oligonucleotide
gggttagcatctctgaggtgacagaaacaacaagtatagttgcatcacctaaaacacata

SEQ ID NO: 26847 - DNA, 60 bp, Artificial
  Synthetic oligonucleotide
ccctgtaaagtggacttacacacacaggcaatagaaggggcatggggttctggtgtaggg

SEQ ID NO: 26848 - DNA, 60 bp, Artificial
  Synthetic oligonucleotide
cccgtgtaaggttgatttacatacacaggcaatagaaggggcatggggttctggtgttgg

SEQ ID NO: 26849 - DNA, 60 bp, Artificial
  Synthetic oligonucleotide
agtgacaacccgtgtaaggttgatttacatacacaggcaatagaaggggcatggggttct

SEQ ID NO: 26850 - DNA, 60 bp, Artificial
  Synthetic oligonucleotide
aaagcttccactttcactctaaaagggttactgcacatggagacacaccacaattggatc

SEQ ID NO: 26851 - DNA, 60 bp, Artificial
  Synthetic oligonucleotide
ttggttatccaaaagggttttcttaagggaacccacaaaaatagcagctaaatgggtggg

SEQ ID NO: 26852 - DNA, 60 bp, Artificial
  Synthetic oligonucleotide
acatttgaccctgaagctgctttccttagattcgaaagtgcatacggcagccaattggtg

SEQ ID NO: 26853 - DNA, 60 bp, Artificial
  Synthetic oligonucleotide
gctgctttccttagattcgaaagtgcatacggcagccaattggtgtctgccgtcgtacga

SEQ ID NO: 26854 - DNA, 60 bp, Artificial
  Synthetic oligonucleotide
gttagtcattgtgaaaataaaggctttgaggacagcaatgaatgcttgacagatctagac

SEQ ID NO: 26855 - DNA, 60 bp, Artificial
  Synthetic oligonucleotide
gtgccgcttacgcccacagtgttcacttgagtgttggcaaaatggagaataaaatcgagg

SEQ ID NO: 26856 - DNA, 60 bp, Artificial
  Synthetic oligonucleotide
gccggcagaatcagtgagatgggggtctgcttcggaaccatccccgtggctaaccctgat

SEQ ID NO: 26857 - DNA, 60 bp, Artificial
  Synthetic oligonucleotide
cccaccctggggagatattaacaagtcaggccgctcggggatagctcttgtcgcaacagg

SEQ ID NO: 26858 - DNA, 56 bp, Artificial
  Synthetic oligonucleotide
atgactggaccttcaaaaggacagaagctttcatcaggaccaaaatggctagtatg

SEQ ID NO: 26859 - DNA, 54 bp, Artificial
  Synthetic oligonucleotide
catactagccattttggtcctgatgaaagcttctgtccttttgaaggtccagtc

SEQ ID NO: 26860 - DNA, 60 bp, Artificial
  Synthetic oligonucleotide
caggcatgtctactgcaaagagtgctgcttcagaattcgtgaagagctatggaacaagag

SEQ ID NO: 26861 - DNA, 51 bp, Artificial
  Synthetic oligonucleotide
ctgcttcagaattcgtgaagagctatggaacaagggataatagagccatca

SEQ ID NO: 26862 - DNA, 60 bp, Artificial
  Synthetic oligonucleotide
caggcatgtctagtgtaaagagtgctgcttcagaattcgtgaagagctatggaacaaggg

SEQ ID NO: 26863 - DNA, 51 bp, Artificial
  Synthetic oligonucleotide
ctgcttcagaattcgtgaagagctatggaacaagagacaatagagctatca

SEQ ID NO: 26864 - DNA, 60 bp, Artificial
  Synthetic oligonucleotide
catgccatgattataattactttgagaagtttggtttagacataacattttgtgagcatg

SEQ ID NO: 26865 - DNA, 60 bp, Artificial
  Synthetic oligonucleotide
tagtagtagacttcgtgaaaagctactactaaagactctggaatgagcaacctcaaagaa

SEQ ID NO: 26866 - DNA, 60 bp, Artificial
  Synthetic oligonucleotide
ccactcaaaatttaagtattaagcagtagttctgggcagctaacatagaacgggtggtgc

SEQ ID NO: 26867 - DNA, 60 bp, Artificial
  Synthetic oligonucleotide
taacatagaacgggtggtgcattattctagtatacactgggttggttaatcagggtttat

SEQ ID NO: 26868 - DNA, 60 bp, Artificial
  Synthetic oligonucleotide
gccatggctcagtcattggttgattcaaaggtgaaagagatttctaatcaggagccactc

SEQ ID NO: 26869 - DNA, 60 bp, Artificial
  Synthetic oligonucleotide
taatcaggagccactcaaaatttaagtattaagcagtagttctgggcagctaacatagaa

SEQ ID NO: 26870 - DNA, 60 bp, Artificial
  Synthetic oligonucleotide
atcatttccatcttggagatgacatggatcctgaacttcgtgccatggctcagtcattgg

SEQ ID NO: 26871 - DNA, 60 bp, Artificial
  Synthetic oligonucleotide
cttcgtgccatggctcagtcattggttgattcaaaggtgaaagagatttctaatcaggag

SEQ ID NO: 26872 - DNA, 60 bp, Artificial
  Synthetic oligonucleotide
gggcatccagcttgaccaaaggattatcatcatgtatatgtcacattggggtaaagacat

SEQ ID NO: 26873 - DNA, 60 bp, Artificial
  Synthetic oligonucleotide
gtaaagacattgtaaatcatttccatcttggagatgacatggatcctgaacttcgtgcca

SEQ ID NO: 26874 - DNA, 60 bp, Artificial
  Synthetic oligonucleotide
gtgtgggtatttgcatgtgcacctgatcgttgtcctcctacagcattatatgttgcaggg

SEQ ID NO: 26875 - DNA, 60 bp, Artificial
  Synthetic oligonucleotide
tcctacagcattatatgttgcagggttaccagaattgggagcatttttttccatactaca

SEQ ID NO: 26876 - DNA, 60 bp, Artificial
  Synthetic oligonucleotide
caagagacagctggcagattttgttacatctcagaagctggctactaaacctgtagaccc

SEQ ID NO: 26877 - DNA, 60 bp, Artificial
  Synthetic oligonucleotide
cagctggcagattttgttacatctcagaagctggctactaaacctgtagacccaacaggg

SEQ ID NO: 26878 - DNA, 60 bp, Artificial
  Synthetic oligonucleotide
ctgtagacccaacagggattgaaccagatgatcatctcaaggaaaagtcatcacttaggt

SEQ ID NO: 26879 - DNA, 60 bp, Artificial
  Synthetic oligonucleotide
gacccaacagggattgaaccagatgatcatctcaaggaaaagtcatcacttaggtatggc

SEQ ID NO: 26880 - DNA, 60 bp, Artificial
  Synthetic oligonucleotide
tcacttaggtatggcaatgtccttgatgtcaattctgtggaccttgaagagccaagtggc

SEQ ID NO: 26881 - DNA, 60 bp, Artificial
  Synthetic oligonucleotide
ggcaatgtccttgatgtcaattctgtggaccttgaagagccaagtggccaaacagctgac

SEQ ID NO: 26882 - DNA, 60 bp, Artificial
  Synthetic oligonucleotide
gccaagtggccaaacagctgactggaggtcaatcggaatgtatatcttaagcttcacact

SEQ ID NO: 26883 - DNA, 60 bp, Artificial
  Synthetic oligonucleotide
gccaaacagctgactggaggtcaatcggaatgtatatcttaagcttcacactgcccatcg

SEQ ID NO: 26884 - DNA, 60 bp, Artificial
  Synthetic oligonucleotide
gcttcacactgcccatcgtccttaaagcattatacatgctttctacaaggggtcgacaaa

SEQ ID NO: 26885 - DNA, 60 bp, Artificial
  Synthetic oligonucleotide
gatccgtagacctcgtcatctctatgtgtcaatgcctactgctcagtcaacaatgagagc

SEQ ID NO: 26886 - DNA, 60 bp, Artificial
  Synthetic oligonucleotide
cagggtttattattgaatgtagtctcatatatgttatgttaagtattattgtaatcaatg

SEQ ID NO: 26887 - DNA, 60 bp, Artificial
  Synthetic oligonucleotide
cgggtggtgcattattctagtatacactgggttggttaatcagggtttattattgaatgt

SEQ ID NO: 26888 - DNA, 60 bp, Artificial
  Synthetic oligonucleotide
gtcattgtattgtagtgatgaaatagatttacgggtaatgggaaatatactcagggttgt

SEQ ID NO: 26889 - DNA, 60 bp, Artificial
  Synthetic oligonucleotide
gtaatcaatgtagtcattgtattgtagtgatgaaatagatttacgggtaatgggaaatat

SEQ ID NO: 26890 - DNA, 60 bp, Artificial
  Synthetic oligonucleotide
ggtcaagctctctttcttactttccctttctttcctaactaacctactaatctgaactac

SEQ ID NO: 26891 - DNA, 60 bp, Artificial
  Synthetic oligonucleotide
tgggaaatatactcagggttgtatcgttattattaatgtcatgtatgtttattgtaagta

SEQ ID NO: 26892 - DNA, 60 bp, Artificial
  Synthetic oligonucleotide
cttactttccctttctttcctaactaacctactaatctgaactacctcatccccttcccc

SEQ ID NO: 26893 - DNA, 60 bp, Artificial
  Synthetic oligonucleotide
aaagctcaaggcagtgcagacaagttactgtctaccatcagggcatatttcataacccga

SEQ ID NO: 26894 - DNA, 60 bp, Artificial
  Synthetic oligonucleotide
gatgaattccttgctgctgagtgcccatttctccctaaagctcaaggcagtgcagacaag

SEQ ID NO: 26895 - DNA, 60 bp, Artificial
  Synthetic oligonucleotide
gggcagagaaaattgatgaattccttgctgctgagtgcccatttctccctaaagctcaag

SEQ ID NO: 26896 - DNA, 60 bp, Artificial
  Synthetic oligonucleotide
ggacaacatcacagcccatgaacagcagctcgtgtctgctcgtcaaaagctaaaggatgc

SEQ ID NO: 26897 - DNA, 60 bp, Artificial
  Synthetic oligonucleotide
acttaattgctgaagctcaggcccaaggggcaacattattcaatgacattacatctcctc

SEQ ID NO: 26898 - DNA, 60 bp, Artificial
  Synthetic oligonucleotide
ccaagtcatgcagtccatgcttccagagctgtctgacttaattgctgaagctcaggccca

SEQ ID NO: 26899 - DNA, 60 bp, Artificial
  Synthetic oligonucleotide
cataacccgacaggaccaagtcatgcagtccatgcttccagagctgtctgacttaattgc

SEQ ID NO: 26900 - DNA, 60 bp, Artificial
  Synthetic oligonucleotide
gcagtgcagacaagttactgtctaccatcagggcatatttcataacccgacaggaccaag

SEQ ID NO: 26901 - DNA, 60 bp, Artificial
  Synthetic oligonucleotide
acatctcctcattctgtgtgggtatttgcatgtgcacctgatcgttgtcctcctacagca

SEQ ID NO: 26902 - DNA, 60 bp, Artificial
  Synthetic oligonucleotide
gctcaggcccaaggggcaacattattcaatgacattacatctcctcattctgtgtgggta

SEQ ID NO: 26903 - DNA, 60 bp, Artificial
  Synthetic oligonucleotide
gacgggctgcagtgtcagcattggagaccaaactgggagaactcaagagacagctggcag

SEQ ID NO: 26904 - DNA, 60 bp, Artificial
  Synthetic oligonucleotide
caaagcagacgggctgcagtgtcagcattggagaccaaactgggagaactcaagagacag

SEQ ID NO: 26905 - DNA, 60 bp, Artificial
  Synthetic oligonucleotide
cctcaaagaacttcaggacaacatcacagcccatgaacagcagctcgtgtctgctcgtca

SEQ ID NO: 26906 - DNA, 60 bp, Artificial
  Synthetic oligonucleotide
cgtgaaaagctactactaaagactctggaatgagcaacctcaaagaacttcaggacaaca

SEQ ID NO: 26907 - DNA, 57 bp, Artificial
  Synthetic oligonucleotide
ctgctcgtcaaaagctaaaggatgccgagaaagcagttgaggtggaccccgatgatg

SEQ ID NO: 26908 - DNA, 60 bp, Artificial
  Synthetic oligonucleotide
ccgtagacctcgtcatctctatgtgtcaatgcctactgctcagtcaacaatgagagctga

SEQ ID NO: 26909 - DNA, 60 bp, Artificial
  Synthetic oligonucleotide
tgtctggtccaggggcatcttgtgaagcattttcagaaggggggatctttaatataactt

SEQ ID NO: 26910 - DNA, 60 bp, Artificial
  Synthetic oligonucleotide
cctactgtgctggacagacagagcagagcaagttctgtgagagaactactcaacaccaag

SEQ ID NO: 26911 - DNA, 60 bp, Artificial
  Synthetic oligonucleotide
cctcctaccgagagtgatgaagactagaagaaagctgttagctgtcactgatggtagcac

SEQ ID NO: 26912 - DNA, 60 bp, Artificial
  Synthetic oligonucleotide
agggtggaacttggtcaagctacatcgccggggtatacacagcaaccattgacctgttag

SEQ ID NO: 26913 - DNA, 60 bp, Artificial
  Synthetic oligonucleotide
aggaaagtccatagaggtccacaaacaagacataggagggccggggaaaaaactgaccat

SEQ ID NO: 26914 - DNA, 60 bp, Artificial
  Synthetic oligonucleotide
ctgaccatttgtaacggcactagtgttctcgatgtacccctggatgaaggacatggatgc

SEQ ID NO: 26915 - DNA, 60 bp, Artificial
  Synthetic oligonucleotide
ggtagcactgaatgtaactcagggacacagctaattgaaggaaagtccatagaggtccac

SEQ ID NO: 26916 - DNA, 60 bp, Artificial
  Synthetic oligonucleotide
cggaggaggagaggcactgtgaaattgtcgaggcaggaaccagattcaacattggcccta

SEQ ID NO: 26917 - DNA, 60 bp, Artificial
  Synthetic oligonucleotide
atcttagaactgaggtgttggtctgcgtggaggtcacggaggaggagaggcactgtgaaa

SEQ ID NO: 26918 - DNA, 60 bp, Artificial
  Synthetic oligonucleotide
atgtggctgccaaacatcaacttgtatggccaaagagtgccacacacaagaatgcgtgtc

SEQ ID NO: 26919 - DNA, 60 bp, Artificial
  Synthetic oligonucleotide
ctactaagtgaatggccaaaagccgtctgcacaggagattgtcctcatagatgtggctgc

SEQ ID NO: 26920 - DNA, 60 bp, Artificial
  Synthetic oligonucleotide
ggtttccgataatggattttgcccaagtctacaattcagtattccagtacataacaggtg

SEQ ID NO: 26921 - DNA, 60 bp, Artificial
  Synthetic oligonucleotide
gccatgagctggagctccactgacatcaaaggtgagaaggtcatactatcaggaaggagc

SEQ ID NO: 26922 - DNA, 60 bp, Artificial
  Synthetic oligonucleotide
ggcaagcagcacgccaacagtcagcagaactccacaaacaaccaccacctccactgcagt

SEQ ID NO: 26923 - DNA, 60 bp, Artificial
  Synthetic oligonucleotide
gttagccatttcaccagttcaaggagctccaacagaggtcagtaatgttaagcaggacgg

SEQ ID NO: 26924 - DNA, 60 bp, Artificial
  Synthetic oligonucleotide
ctaactacaagcgagtgcctctgcctaagtgtatgctatcaacttctaataagcgtaggc

SEQ ID NO: 26925 - DNA, 60 bp, Artificial
  Synthetic oligonucleotide
ttggttgtttggtgacagctgcacttttgttgaaggtcaagagaacaaactctaatggca

SEQ ID NO: 26926 - DNA, 60 bp, Artificial
  Synthetic oligonucleotide
agaaaggagagaggcttggagaaatctgtgtcaagtgcgagcagcaaacagttaacctta

SEQ ID NO: 26927 - DNA, 60 bp, Artificial
  Synthetic oligonucleotide
gctgcaatcgaatgtcagacgaaggtatgagcaggcatgtaggtaagtgtcctaaaagat

SEQ ID NO: 26928 - DNA, 60 bp, Artificial
  Synthetic oligonucleotide
ggagttacattcaaagacaataaggctaagtggtataagactaactggactgaaatgcag

SEQ ID NO: 26929 - DNA, 60 bp, Artificial
  Synthetic oligonucleotide
ccaggatggaggtgaaagtgacagcactgattgaagttgatggtatggagttacattcaa

SEQ ID NO: 26930 - DNA, 60 bp, Artificial
  Synthetic oligonucleotide
gtcaatgccaagttgacttctccagacgaatttacactgcatctgaggagcaccagtccc

SEQ ID NO: 26931 - DNA, 60 bp, Artificial
  Synthetic oligonucleotide
attgcaagaaagggtccaagtgccacaactagcaggtttaaagtgttctctgttcgtgat

SEQ ID NO: 26932 - DNA, 60 bp, Artificial
  Synthetic oligonucleotide
gaggagcaccagtcccaatgtggtagtggcagaaactagcataattgcaagaaagggtcc

SEQ ID NO: 26933 - DNA, 60 bp, Artificial
  Synthetic oligonucleotide
cttcctttcgcccttttaattctttttttcatatacggtgacaaaatgctttggcctttc

SEQ ID NO: 26934 - DNA, 60 bp, Artificial
  Synthetic oligonucleotide
tgggaagggtgtgacatggactactactgtaatgttggcgattggccaacctgtacctac

SEQ ID NO: 26935 - DNA, 60 bp, Artificial
  Synthetic oligonucleotide
gtgaagtcaatcacctagaaaatgcctgcaacagggaagggaaaaactgcacagaattaa

SEQ ID NO: 26936 - DNA, 60 bp, Artificial
  Synthetic oligonucleotide
ttgttgacaagtgtctcaattgatgcaccttggggtcgaattaatgttgaatcaacttgg

SEQ ID NO: 26937 - DNA, 60 bp, Artificial
  Synthetic oligonucleotide
aaaagagtcatgttataacacttacctagaaaaacaccttcgcagtgttagccctgaagt

SEQ ID NO: 26938 - DNA, 60 bp, Artificial
  Synthetic oligonucleotide
ggatgctacaccattaatgtaatcacgtccaaaagggcatgcagaccaaagaacagcaag

SEQ ID NO: 26939 - DNA, 60 bp, Artificial
  Synthetic oligonucleotide
attgaccgtagaatcatcagatttgaaacagactcccaaagagtgacctgtctctcagca

SEQ ID NO: 26940 - DNA, 60 bp, Artificial
  Synthetic oligonucleotide
gccctgaagttagtctcaccccttacagggtcctcgggctaagagaagacattttgctga

SEQ ID NO: 26941 - DNA, 60 bp, Artificial
  Synthetic oligonucleotide
attgatgctaagccctccaacggtcctaaaatagtgcctgtggacagcgtcgcctgcatg

SEQ ID NO: 26942 - DNA, 60 bp, Artificial
  Synthetic oligonucleotide
gcctgtggacagcgtcgcctgcatgaacttagaagctaacgtagatgtgagatcaaacaa

SEQ ID NO: 26943 - DNA, 60 bp, Artificial
  Synthetic oligonucleotide
cactatgcagtctctgtgtctgtcctttctgtgagaaacaggctcttgatctggtgaccc

SEQ ID NO: 26944 - DNA, 60 bp, Artificial
  Synthetic oligonucleotide
caggctcttgatctggtgacccttgaagaacatgtcaaagaatgctacaaagttgcaact

SEQ ID NO: 26945 - DNA, 60 bp, Artificial
  Synthetic oligonucleotide
gaagatgtctgctactgccctgctgaggatggcgtaggaaggaaattgctgttcttcaat

SEQ ID NO: 26946 - DNA, 60 bp, Artificial
  Synthetic oligonucleotide
gtagaatgtcaagcagacctacagtagcattgcttcttggcatctggattggctgcggct

SEQ ID NO: 26947 - DNA, 60 bp, Artificial
  Synthetic oligonucleotide
ggcatctggattggctgcggctatatactcacatgcatcttctcatttttgctataccac

SEQ ID NO: 26948 - DNA, 60 bp, Artificial
  Synthetic oligonucleotide
ggactgctcaggaggccgtcagcactatttggaggtgaacatcgttgatatccactgccc

SEQ ID NO: 26949 - DNA, 60 bp, Artificial
  Synthetic oligonucleotide
gtgactcaggcaagtgtttgagtatcagccaaaaaggagcaggccacattaaggtgagca

SEQ ID NO: 26950 - DNA, 60 bp, Artificial
  Synthetic oligonucleotide
catacctgcggcacatacaagtgttaaaggtgttcacaatgtctaagagggtactgatca

SEQ ID NO: 26951 - DNA, 60 bp, Artificial
  Synthetic oligonucleotide
accaaagaacagcaagttacagtgttcaattgacaaagagcttaagccttgtgactcagg

SEQ ID NO: 26952 - DNA, 60 bp, Artificial
  Synthetic oligonucleotide
taccagatttacagcactgacagctttaatcaaagatgatcacagttctggactcaacct

SEQ ID NO: 26953 - DNA, 60 bp, Artificial
  Synthetic oligonucleotide
caggtactaaaagctaggtgtactcaccacaaccacctaaatcaagaagacctagtgaat

SEQ ID NO: 26954 - DNA, 60 bp, Artificial
  Synthetic oligonucleotide
gctgacaacagttgtaggcttcaaagctgcactcatggcagtgcggtgactaccagattt

SEQ ID NO: 26955 - DNA, 60 bp, Artificial
  Synthetic oligonucleotide
gcattacattggaagcattgctgtcggagtacttggcacggttcttcctttcgccctttt

SEQ ID NO: 26956 - DNA, 60 bp, Artificial
  Synthetic oligonucleotide
agaatctcagcaaaaggtcacacacttcagttagacttgaaggcaagaccgtaaccagga

SEQ ID NO: 26957 - DNA, 60 bp, Artificial
  Synthetic oligonucleotide
gctgtgttagatcccaaagtcaatagtagctggctatcatgggaagggtgtgacatggac

SEQ ID NO: 26958 - DNA, 60 bp, Artificial
  Synthetic oligonucleotide
gagctgagagacataattagaaagttcagtaaaagtggtgaacttatcaacaaagatgca

SEQ ID NO: 26959 - DNA, 60 bp, Artificial
  Synthetic oligonucleotide
gaggaacaatagtacagcaccaaaacgacacttgcaaatctaagattgactgttggtcaa

SEQ ID NO: 26960 - DNA, 60 bp, Artificial
  Synthetic oligonucleotide
caatgcccacgagggtcaactggtgatagccaggcagaaggtgagggatgcagaaaagca

SEQ ID NO: 26961 - DNA, 60 bp, Artificial
  Synthetic oligonucleotide
cccacgagggtcaactggtgatagccaggcagaaggtgagggatgcagaaaagcagtatg

SEQ ID NO: 26962 - DNA, 60 bp, Artificial
  Synthetic oligonucleotide
agttcctggagagattgtgatgtctgtcaaagagatgctgtcagacatgattaggagaag

SEQ ID NO: 26963 - DNA, 60 bp, Artificial
  Synthetic oligonucleotide
gcagttttgtacatatcagagaaacattcccctacttcaggaagcctcaagactagagac

SEQ ID NO: 26964 - DNA, 55 bp, Artificial
  Synthetic oligonucleotide
ggctccctgaagtaggggaatgtttctctgatatgtacaaaactgcagattctga

SEQ ID NO: 26965 - DNA, 60 bp, Artificial
  Synthetic oligonucleotide
gcagtcacttttcccaacaattacaagagaagatatagttttgatattgcaaaatgtgtg

SEQ ID NO: 26966 - DNA, 60 bp, Artificial
  Synthetic oligonucleotide
ggccaaaagtctctagtcttgaggcttcctgaagtaggggaatgtttctctgatatgtac

SEQ ID NO: 26967 - DNA, 60 bp, Artificial
  Synthetic oligonucleotide
tagaaaatttaggtctaaaaaacatccccctaacagacgatagcattaatgttttaacaa

SEQ ID NO: 26968 - DNA, 60 bp, Artificial
  Synthetic oligonucleotide
gattagacctgttccaaatgtgcttgttaaaacattaatgctatcgtctgttagagggat

SEQ ID NO: 26969 - DNA, 60 bp, Artificial
  Synthetic oligonucleotide
cttattaatttgtttgagaaagcatcagtgtctgaagattcagacgttctaactatcggg

SEQ ID NO: 26970 - DNA, 60 bp, Artificial
  Synthetic oligonucleotide
tcagactgagaaatggatacctgttgttgaaggctctccaggactagtagtgatgcatgc

SEQ ID NO: 26971 - DNA, 60 bp, Artificial
  Synthetic oligonucleotide
tgaagatgagtatagtcctctgttttcagagattgttgataaagcaaaacagtacactag

SEQ ID NO: 26972 - DNA, 60 bp, Artificial
  Synthetic oligonucleotide
gtggctctatagcttttaaatcctgatgcatcattgatcagggaatatttaagcatgagc

SEQ ID NO: 26973 - DNA, 60 bp, Artificial
  Synthetic oligonucleotide
agagagattattttgagtaaaataagtgagttggatgaggttgctgaaacagatgaagac

SEQ ID NO: 26974 - DNA, 65 bp, Artificial
  Synthetic oligonucleotide
gcaaacaagagagattattttgagtaaaataagtgagttggatgaggttgttgaaacagatgaag

SEQ ID NO: 26975 - DNA, 54 bp, Artificial
  Synthetic oligonucleotide
cctacccaatctgtcagttgaaaatatgtctggtctaaaactgttccgcaacaa

SEQ ID NO: 26976 - DNA, 60 bp, Artificial
  Synthetic oligonucleotide
ccagttgattaaagcttgcgaaacatgccacaacaatgactctatattaaacttagcaag

SEQ ID NO: 26977 - DNA, 60 bp, Artificial
  Synthetic oligonucleotide
tgaggttgctgaaacagatgaagacaatttcttgcttagttatctaagaggagaagaaga

SEQ ID NO: 26978 - DNA, 54 bp, Artificial
  Synthetic oligonucleotide
gcaagagatataacaaacttggttagactgtgcttaacagagctaagctgtgat

SEQ ID NO: 26979 - DNA, 60 bp, Artificial
  Synthetic oligonucleotide
ggagagtcttcaaattttcccaaaaccctgctgctagtaacagtgattggcatcccagca

SEQ ID NO: 26980 - DNA, 60 bp, Artificial
  Synthetic oligonucleotide
caggatttttagcataattattgtaaacagatgtgatcttgccttcctctcttatatcac

SEQ ID NO: 26981 - DNA, 60 bp, Artificial
  Synthetic oligonucleotide
agaagacatgtctatacttgaataatcatcatttgggtcagcctgcctttctgaggtatc

SEQ ID NO: 26982 - DNA, 60 bp, Artificial
  Synthetic oligonucleotide
tggaaatctttcaaagatataaaagtgaatggaaagccattcctggaagatcatcctgtt

SEQ ID NO: 26983 - DNA, 60 bp, Artificial
  Synthetic oligonucleotide
ccacaaaactttagaatgttacaaagactgtgatttccaaactagatggattgtgcactc

SEQ ID NO: 26984 - DNA, 60 bp, Artificial
  Synthetic oligonucleotide
ggcaaaatgaaactgccataggacttttgactaaagggttgacgacaaacacataccctg

SEQ ID NO: 26985 - DNA, 60 bp, Artificial
  Synthetic oligonucleotide
cagtgcggacagatgggtccaacatttcaacacagtggccaagtagaaggaatgatggtg

SEQ ID NO: 26986 - DNA, 60 bp, Artificial
  Synthetic oligonucleotide
tacatctagagacagtagggtgggcacttaaatttcgagaaaaagatgagagatatgggg

SEQ ID NO: 26987 - DNA, 60 bp, Artificial
  Synthetic oligonucleotide
ctatctgatctggaattgaatataactgagccatcaacccaggagtacacaacgactaag

SEQ ID NO: 26988 - DNA, 60 bp, Artificial
  Synthetic oligonucleotide
gatgctgtagaactggcagcaatagagctaaataaagttttatcaaccaagtccagtgtg

SEQ ID NO: 26989 - DNA, 60 bp, Artificial
  Synthetic oligonucleotide
gggaggaaccctattttagccagacaagaaacataagtttaaagggcatgtcagggcaag

SEQ ID NO: 26990 - DNA, 60 bp, Artificial
  Synthetic oligonucleotide
cccagctgtaattggttataaatttgctgtcactgtagatgaaatgtctgacgtattgga

SEQ ID NO: 26991 - DNA, 60 bp, Artificial
  Synthetic oligonucleotide
caagggatcagaaggcgatggctaggattgtaaggaagtatcagaggacagaggcagaca

SEQ ID NO: 26992 - DNA, 56 bp, Artificial
  Synthetic oligonucleotide
actgaagaatatatctcgtatggaggtgaaaaaaagattcttgctattcaaggggc

SEQ ID NO: 26993 - DNA, 60 bp, Artificial
  Synthetic oligonucleotide
ggtcaccgggagacaactcagcaaaattccgaagattcacatctatgctccataatggtc

SEQ ID NO: 26994 - DNA, 60 bp, Artificial
  Synthetic oligonucleotide
gcaggcaaagcaacacatgaaagtttgcagattagatggggactgggtaacatttaggga

SEQ ID NO: 26995 - DNA, 57 bp, Artificial
  Synthetic oligonucleotide
aggaggaaatggtgcaatgtctataatggagctagcaacagctgggatagggatgtc

SEQ ID NO: 26996 - DNA, 60 bp, Artificial
  Synthetic oligonucleotide
caagttcttgatgaacttatctgaggagacattccagcatgagagactagggcggttctc

SEQ ID NO: 26997 - DNA, 60 bp, Artificial
  Synthetic oligonucleotide
cattattttcattcagacacacaatggtattgttgagacggctattcccgcaggattcta

SEQ ID NO: 26998 - DNA, 60 bp, Artificial
  Synthetic oligonucleotide
gcaagttcaaggcgtgcgacatatggtgttgttcaagacggagtctgggtttgagtgggg

SEQ ID NO: 26999 - DNA, 60 bp, Artificial
  Synthetic oligonucleotide
gtgagggagcatttgattaaaacagaagagagagctgcattggaagctatgttcaatcta

SEQ ID NO: 27000 - DNA, 60 bp, Artificial
  Synthetic oligonucleotide
gcaactacaggctaataggagggcatactcaggtaaacaatatgatgcttattgtgtgca

SEQ ID NO: 27001 - DNA, 60 bp, Artificial
  Synthetic oligonucleotide
aatgctgaattcctatcaacattttttgagggttgtgcagtgtcgataccatttgtaaag

SEQ ID NO: 27002 - DNA, 60 bp, Artificial
  Synthetic oligonucleotide
gtggggaaaaccaaatatcccgtgtattgtctacaagaactgtgcccttagaacaagcct

SEQ ID NO: 27003 - DNA, 60 bp, Artificial
  Synthetic oligonucleotide
cctcccatcaaaatcactagaggtagctgggtcctttattagattcattactgttttcag

SEQ ID NO: 27004 - DNA, 58 bp, Artificial
  Synthetic oligonucleotide
caagagcttgctggtagcacttgcacagaataataaagctagattttactctaaagtg

SEQ ID NO: 27005 - DNA, 60 bp, Artificial
  Synthetic oligonucleotide
ggtcatctagtaagggacataacagaaagtttaattgcccattcaggtcttaagaggtca

SEQ ID NO: 27006 - DNA, 60 bp, Artificial
  Synthetic oligonucleotide
taaccataagagtggtgagaaacatggtgagctgatagaaagcttaaacattgctagcca

SEQ ID NO: 27007 - DNA, 60 bp, Artificial
  Synthetic oligonucleotide
gaggtcaaggggacagcagtatttgattgttttaactcaaatgaagccaaccactgtcag

SEQ ID NO: 27008 - DNA, 60 bp, Artificial
  Synthetic oligonucleotide
gatattggacagcagaaagatttggctgctcttaaactgtgtatagaggtatggaggtgg

SEQ ID NO: 27009 - DNA, 60 bp, Artificial
  Synthetic oligonucleotide
ccccaggtggcacagttagctgtcgcattatgcacgagcaaggtagaaagattgtatggt

SEQ ID NO: 27010 - DNA, 60 bp, Artificial
  Synthetic oligonucleotide
attgggttcattatcagatctgccaggcttaggctattttgatgatctggcagcagcaca

SEQ ID NO: 27011 - DNA, 60 bp, Artificial
  Synthetic oligonucleotide
tgaaccaataggggcaaatattgacgacctagttgactattcaaaagagtggttatctag

SEQ ID NO: 27012 - DNA, 60 bp, Artificial
  Synthetic oligonucleotide
ggctggggggaatgtgtgattgaccaatttgagagccttgatagggaagcccagaatatg

SEQ ID NO: 27013 - DNA, 60 bp, Artificial
  Synthetic oligonucleotide
gttggatagattctgcagagtaggggttccgcctattgatccagaaattcagtgtgcagc

SEQ ID NO: 27014 - DNA, 66 bp, Artificial
  Synthetic oligonucleotide
catctttatttggtgtagcaatgtcattactgtttaagcaggtatggaataatctatttcctgaac

SEQ ID NO: 27015 - DNA, 60 bp, Artificial
  Synthetic oligonucleotide
gttctttaattacatcatataaacctgccactactctatctgaccaaattgatagtaggc

SEQ ID NO: 27016 - DNA, 60 bp, Artificial
  Synthetic oligonucleotide
ctgttagctcaatgtcaagtcgattatggtctgaggagatgagcttagttgatgatgatg

SEQ ID NO: 27017 - DNA, 64 bp, Artificial
  Synthetic oligonucleotide
ggcttatagatatataaatctcacaagagaggatatgatcagttactatgcaccaagaatacag

SEQ ID NO: 27018 - DNA, 60 bp, Artificial
  Synthetic oligonucleotide
ttgttagcccatgcttttcatactataagagatattaggtaccaagctgttgatgcagtg

SEQ ID NO: 27019 - DNA, 60 bp, Artificial
  Synthetic oligonucleotide
tggagtttatcgggaattaggactggatatatcattaccagatgttatgaagaggattgc

SEQ ID NO: 27020 - DNA, 60 bp, Artificial
  Synthetic oligonucleotide
tcccgggtggttattgttcaagggaatgttgaaggaacagccgaagccatatgtgcttat

SEQ ID NO: 27021 - DNA, 60 bp, Artificial
  Synthetic oligonucleotide
tagatatggaggctgacatcgaacattttttgcaagatgaaagttcttatacaggggact

SEQ ID NO: 27022 - DNA, 60 bp, Artificial
  Synthetic oligonucleotide
tttccttattagatccttatgatttaactgagctggaaagtattgttcgaggctgggggg

SEQ ID NO: 27023 - DNA, 60 bp, Artificial
  Synthetic oligonucleotide
ttcaaaggagttattgaagtgtgggatgagatttaatacagagcaagttcaaggcgtgcg

SEQ ID NO: 27024 - DNA, 60 bp, Artificial
  Synthetic oligonucleotide
tgcaacagctacatggttccaatactacactgaggatcagggtcaattccctctacagta

SEQ ID NO: 27025 - DNA, 60 bp, Artificial
  Synthetic oligonucleotide
gcatttgcatctgaatataaaccaactacacaggacatggaactctttcagacacttgtg

SEQ ID NO: 27026 - DNA, 60 bp, Artificial
  Synthetic oligonucleotide
cacttatggacccatatgatttaactgaatttgagagtattgttaaaggttggggtgaac

SEQ ID NO: 27027 - DNA, 60 bp, Artificial
  Synthetic oligonucleotide
gggccaaaagggtctattgcagatacaagctaatagaagagcttattcaggcaaacagta

SEQ ID NO: 27028 - DNA, 60 bp, Artificial
  Synthetic oligonucleotide
ataatccgagagtttattttaaggcaacacagagtgtcaaggagccaggaactttcaagt

SEQ ID NO: 27029 - DNA, 60 bp, Artificial
  Synthetic oligonucleotide
tgccaaatcagcctacaagcaccatatttgccttcaaccattgcttcagaccaatatgat

SEQ ID NO: 27030 - DNA, 60 bp, Artificial
  Synthetic oligonucleotide
ggattgtcattgttcaaggtaatgtagaaggtactgctgagtctatctgtagctattggc

SEQ ID NO: 27031 - DNA, 60 bp, Artificial
  Synthetic oligonucleotide
cagaattggcttgagactgaacatgcatttgcttttaaagaggttacagggcaacgtgtc

SEQ ID NO: 27032 - DNA, 60 bp, Artificial
  Synthetic oligonucleotide
tttgtaagagaacacctggtaaaaaatgaagagcggggagctcttgaggcaatgtttaat

SEQ ID NO: 27033 - DNA, 60 bp, Artificial
  Synthetic oligonucleotide
ccgaaggtttcacgactgttagtacaatttctagcacccagtggtcagaagaggtaagtt

SEQ ID NO: 27034 - DNA, 60 bp, Artificial
  Synthetic oligonucleotide
gatgatatgtttcagcatgatcgcttaggggaattcagttttgtgggaaaggtccagtgg

SEQ ID NO: 27035 - DNA, 60 bp, Artificial
  Synthetic oligonucleotide
cacggaaggataatgacagatacatcttaggtctgtttaaatttggaatgtcattgactg

SEQ ID NO: 27036 - DNA, 60 bp, Artificial
  Synthetic oligonucleotide
gttccggcgagggacacaatcattatatgatgggctgcgtgatgataaactaaaaaactg

SEQ ID NO: 27037 - DNA, 60 bp, Artificial
  Synthetic oligonucleotide
ctgggataaaccgtattttagtcaaactccaaatattagcttaaaagggatgtcaggtgc

SEQ ID NO: 27038 - DNA, 60 bp, Artificial
  Synthetic oligonucleotide
gtagagttagctgcccaagaattgaacacttacttgcatgccaaatcccaggttatggct

SEQ ID NO: 27039 - DNA, 60 bp, Artificial
  Synthetic oligonucleotide
atcccgcaagctctcgaaaaggcattgagatgggcctcaggtgaaagtgaaatccaatct

SEQ ID NO: 27040 - DNA, 60 bp, Artificial
  Synthetic oligonucleotide
gatgtcaggtgcattacaagaagatggtcatcttgctgcaagtgttcccttaatagaagc

SEQ ID NO: 27041 - DNA, 60 bp, Artificial
  Synthetic oligonucleotide
gaggtccattgtgatgttcttacaacgagacaaattcataggcctaagatagctcgaaca

SEQ ID NO: 27042 - DNA, 60 bp, Artificial
  Synthetic oligonucleotide
aaaattcttatggaggaagtgaccaaagagttattgcggtgtgggatgagattcaaaaca

SEQ ID NO: 27043 - DNA, 60 bp, Artificial
  Synthetic oligonucleotide
aagtgttgttttgtttaagactgaaagtgggtttgaatggggcaaacctaatataccctg

SEQ ID NO: 27044 - DNA, 60 bp, Artificial
  Synthetic oligonucleotide
tacttgctcatgcatatcacaacttaaaggatgtaaggtatcaagctttacaggccgtcg

SEQ ID NO: 27045 - DNA, 60 bp, Artificial
  Synthetic oligonucleotide
tggatttagagcgatggcacagcttgatgaagaaaatccaaggtttctacttgctcatgc

SEQ ID NO: 27046 - DNA, 60 bp, Artificial
  Synthetic oligonucleotide
caagaggtagagataacttgttggtttacttagtcaggaaattaaatgaccctagtatag

SEQ ID NO: 27047 - DNA, 55 bp, Artificial
  Synthetic oligonucleotide
gagtttatcgagcaacttctccaggtagaggcacagaaaggtaattgccaacctg

SEQ ID NO: 27048 - DNA, 60 bp, Artificial
  Synthetic oligonucleotide
cgtataattccagggagtcctagtgggcaaatacttagatcatttttcaaaatgacccca

SEQ ID NO: 27049 - DNA, 57 bp, Artificial
  Synthetic oligonucleotide
gcttacctgcagccatcccgcctgcagcatattcattgattatgaataaagctaaga

SEQ ID NO: 27050 - DNA, 59 bp, Artificial
  Synthetic oligonucleotide
gggaacatcagcagtagaatgcttagatctactagatcgattatatgcagtcagacatg

SEQ ID NO: 27051 - DNA, 60 bp, Artificial
  Synthetic oligonucleotide
caaccacctgttacattctatttgaaaagggcttacatggcaacctcacagaagaggcta

SEQ ID NO: 27052 - DNA, 58 bp, Artificial
  Synthetic oligonucleotide
ggctccatgtcaatcatggagttggccactgcaagcattggtttggctgataaaacct

SEQ ID NO: 27053 - DNA, 60 bp, Artificial
  Synthetic oligonucleotide
tattatccgacttagaggtgaatttgggtgaatcgactgtgggtttagaccaaccaaaaa

SEQ ID NO: 27054 - DNA, 60 bp, Artificial
  Synthetic oligonucleotide
gcatctgggccatttattacgtgatataacagaatctttaatagcacatgctgggttaaa

SEQ ID NO: 27055 - DNA, 60 bp, Artificial
  Synthetic oligonucleotide
ccgtctaaatcattagaagtctctgggtcatttattaggttttttacagtatttaaggag

SEQ ID NO: 27056 - DNA, 60 bp, Artificial
  Synthetic oligonucleotide
gggttgggcctgattgattctgaaaaccttgactcaaaagttgatattgacggggtgacc

SEQ ID NO: 27057 - DNA, 60 bp, Artificial
  Synthetic oligonucleotide
cagcaacttggttccaatactatgctgaagatcaaggacactttccccttcaacatgctt

SEQ ID NO: 27058 - DNA, 60 bp, Artificial
  Synthetic oligonucleotide
gactgttaggtttaacagtagaccagtcaacaattggagcaagtggagtttatccttctc

SEQ ID NO: 27059 - DNA, 60 bp, Artificial
  Synthetic oligonucleotide
gcaatgacaatgcagtcacctttacagttgagatttaggatgcaagctaaacaacatatg

SEQ ID NO: 27060 - DNA, 60 bp, Artificial
  Synthetic oligonucleotide
cctattaatgggttcaattaagatttcaccaaaaaaaacaactgtatctcccacaaatgc

SEQ ID NO: 27061 - DNA, 60 bp, Artificial
  Synthetic oligonucleotide
gtaacacaacagatacaagcaggcaacctgcactggcatgctgtaaatcaggaaatgtgg

SEQ ID NO: 27062 - DNA, 60 bp, Artificial
  Synthetic oligonucleotide
ggtgacttttaactttggcatagattgtgcacgtttagaaatcttctgggagaaaagaga

SEQ ID NO: 27063 - DNA, 60 bp, Artificial
  Synthetic oligonucleotide
ggggctgcaatatcattattatttaagcgtgtatggggcaaactatatccagaattggag

SEQ ID NO: 27064 - DNA, 60 bp, Artificial
  Synthetic oligonucleotide
tgctttatttatttatggttatttagagccagtggatgatggtacagagtggtttcaata

SEQ ID NO: 27065 - DNA, 60 bp, Artificial
  Synthetic oligonucleotide
attctatggcatggttaaaatgtttaatgtttgaaaataaaaccttggaacaatggatag

SEQ ID NO: 27066 - DNA, 60 bp, Artificial
  Synthetic oligonucleotide
gatccagaaattcagtgtttagggctattagtgtatgatcttaagggccaaaagggtcta

SEQ ID NO: 27067 - DNA, 60 bp, Artificial
  Synthetic oligonucleotide
gctgggtatccaagggcctttcaatagacaagatctacaatcctgtgaacattatcctta

SEQ ID NO: 27068 - DNA, 60 bp, Artificial
  Synthetic oligonucleotide
gacttacagcttatgagagagggcgtctatagagaactaggattggatattagtcagcca

SEQ ID NO: 27069 - DNA, 60 bp, Artificial
  Synthetic oligonucleotide
ctatatggcacagttcctggaatggtaaataatcctactgcgtatctcaaagtagatagg

SEQ ID NO: 27070 - DNA, 60 bp, Artificial
  Synthetic oligonucleotide
gggactcagcctcttcattttattgacagattgtaccttcttttgctcttttctcggagg

SEQ ID NO: 27071 - DNA, 60 bp, Artificial
  Synthetic oligonucleotide
gtcagccaaatgtattaaagaaagtagcaccacttttatacaagtctggtaagtcacgga

SEQ ID NO: 27072 - DNA, 60 bp, Artificial
  Synthetic oligonucleotide
gactagatatatgtcgaaacacttcaattttcatgcaaaacagttatcacttatggaccc

SEQ ID NO: 27073 - DNA, 60 bp, Artificial
  Synthetic oligonucleotide
gcccaagattcctattagctcatgcatttcacacaataagagatattaggtatcaagcgg

SEQ ID NO: 27074 - DNA, 60 bp, Artificial
  Synthetic oligonucleotide
ccctaggaatacattggatctatcaggccttgaaacaacaggggatggattcagtactgt

SEQ ID NO: 27075 - DNA, 60 bp, Artificial
  Synthetic oligonucleotide
ggggatggattcagtactgtaagttcaatgtcaagccgattatggtctgaagaaatgagc

SEQ ID NO: 27076 - DNA, 60 bp, Artificial
  Synthetic oligonucleotide
gaagggacagctgaggctatatgtcgctactggctaaaatcaatgtcattggtaaagact

SEQ ID NO: 27077 - DNA, 60 bp, Artificial
  Synthetic oligonucleotide
acctgatgttatgaaaagaattgcacctatgctctacaaatcttctaaatcaagggtagt

SEQ ID NO: 27078 - DNA, 60 bp, Artificial
  Synthetic oligonucleotide
gaaacccagaagtacctgatagatgtgttgaaaaaaacaacagcatggcacataggtcat

SEQ ID NO: 27079 - DNA, 60 bp, Artificial
  Synthetic oligonucleotide
ttagccaaacaagaaatatcagcctgaaaggcatgtcagggcaggttcaggaagatggcc

SEQ ID NO: 27080 - DNA, 60 bp, Artificial
  Synthetic oligonucleotide
ttgggaggaaatggtgcaatgtcaataatggagttagcaacagctgggattgggatgtca

SEQ ID NO: 27081 - DNA, 60 bp, Artificial
  Synthetic oligonucleotide
gccgcacaaagtaggtgtgttaaggctctggaccttggagcatcacctcaggttgcacaa

SEQ ID NO: 27082 - DNA, 60 bp, Artificial
  Synthetic oligonucleotide
gggcacttgagaaggccttgagatgggcatcaggtgaaagctttatcgaacttagtaacc

SEQ ID NO: 27083 - DNA, 60 bp, Artificial
  Synthetic oligonucleotide
acagaggcagataggggcttttttatcacaacacttcctactagatgcaggcttgaaatt

SEQ ID NO: 27084 - DNA, 60 bp, Artificial
  Synthetic oligonucleotide
cattgtcaaagatatcctatgtcccgaaagcctagaaatttcctactcatacaatgttct

SEQ ID NO: 27085 - DNA, 60 bp, Artificial
  Synthetic oligonucleotide
gcagatgctacaaagtggtcaccaggagataattcagcaaagttccgtaggttcacctcc

SEQ ID NO: 27086 - DNA, 60 bp, Artificial
  Synthetic oligonucleotide
acatttcaacatgagaggttagggcaattttcttttatcgggaaagtacagtggaagatc

SEQ ID NO: 27087 - DNA, 60 bp, Artificial
  Synthetic oligonucleotide
gaagggcctgttcatacattctaaacttaattccagatacaccagcatcctatctgatcc

SEQ ID NO: 27088 - DNA, 60 bp, Artificial
  Synthetic oligonucleotide
atgtaagagagccaggaacgtttaagttgacatcaagtatgttgagagcagaatcaaaag

SEQ ID NO: 27089 - DNA, 60 bp, Artificial
  Synthetic oligonucleotide
cacacaaaagccagccctattacataccagattataaggggatggaaccaataggagcaa

SEQ ID NO: 27090 - DNA, 60 bp, Artificial
  Synthetic oligonucleotide
tgtcacggcagatgttgacaagggaataagagagaagaagcttaaatatgaggcaggctt

SEQ ID NO: 27091 - DNA, 60 bp, Artificial
  Synthetic oligonucleotide
gagatcccacaaccctataaaataacatttaatgtagttgcagttcgcacagatggctcc

SEQ ID NO: 27092 - DNA, 60 bp, Artificial
  Synthetic oligonucleotide
tgagataagttatgttagagagcacttgatcaaaactgaggagagagctgcactagaagc

SEQ ID NO: 27093 - DNA, 60 bp, Artificial
  Synthetic oligonucleotide
gctgtagcattgtgcaccagtaaagttgaaagattatatggtacagcgccaggcatggta

SEQ ID NO: 27094 - DNA, 59 bp, Artificial
  Synthetic oligonucleotide
tgagccatcaactcaagaatattccacaactaagcatacttatgtcgatacagtgttag

SEQ ID NO: 27095 - DNA, 60 bp, Artificial
  Synthetic oligonucleotide
cagcacagaggaaactgaatcaaagaaaatgaggggcatagtgaaaatacttgagcctgt

SEQ ID NO: 27096 - DNA, 60 bp, Artificial
  Synthetic oligonucleotide
atacagaacaggtccaaggagtacggcacatggtgttatttaagacagagtctggatttg

SEQ ID NO: 27097 - DNA, 60 bp, Artificial
  Synthetic oligonucleotide
cgaaagtctcgatagagaggctcagaatatggttgttaataaaggaatatgccctgagga

SEQ ID NO: 27098 - DNA, 60 bp, Artificial
  Synthetic oligonucleotide
ggtctcattattagatccatatgatttaacagaattagagagcattgtccgaggatgggg

SEQ ID NO: 27099 - DNA, 60 bp, Artificial
  Synthetic oligonucleotide
cgcaaagaagatataggacaaccggaagacttagctgctcttaaactgtgcatagaagtt

SEQ ID NO: 27100 - DNA, 60 bp, Artificial
  Synthetic oligonucleotide
gctccatatagagattggttccaggctctatggttcgaggataaaaccttttcagagtgg

SEQ ID NO: 27101 - DNA, 60 bp, Artificial
  Synthetic oligonucleotide
tgatagctgatataaagggtgattactcagtcttgcagttacaagcgaataggcgagcat

SEQ ID NO: 27102 - DNA, 60 bp, Artificial
  Synthetic oligonucleotide
acttaccaggattaggttattttgacgatttagcagccgcacaaagtaggtgtgttaagg

SEQ ID NO: 27103 - DNA, 60 bp, Artificial
  Synthetic oligonucleotide
ggacacagccaagttcccagactctctatctgttgacctaaagacaatgaaagacggagt

SEQ ID NO: 27104 - DNA, 60 bp, Artificial
  Synthetic oligonucleotide
gaatggaattcactgtgatgttatcccgacaaaacaggttcaaagggccaaagttgcacg

SEQ ID NO: 27105 - DNA, 60 bp, Artificial
  Synthetic oligonucleotide
gcaagctaagcagcacatgaaggtgtgtagattggatggagaatgggttactttcaggga

SEQ ID NO: 27106 - DNA, 60 bp, Artificial
  Synthetic oligonucleotide
caggccatttgcactggtttagtgtaaatacagagatgtggaagagtatgtttaatctac

SEQ ID NO: 27107 - DNA, 60 bp, Artificial
  Synthetic oligonucleotide
gcctgttagttgcacttgctcaaaatactaaagccagattctattctaaggtaaagttac

SEQ ID NO: 27108 - DNA, 60 bp, Artificial
  Synthetic oligonucleotide
ttgtttctttgagtttgcacatcactctgatgatgcattattcatttatggatacttgga

SEQ ID NO: 27109 - DNA, 60 bp, Artificial
  Synthetic oligonucleotide
ctcccatcaaagtcgcttgaagtagcaggttcctttattaggttcattacagttttcaga

SEQ ID NO: 27110 - DNA, 60 bp, Artificial
  Synthetic oligonucleotide
cgtaggttcacctccatgctacataacggacttcccaataataagctaaaaaactgtgta

SEQ ID NO: 27111 - DNA, 60 bp, Artificial
  Synthetic oligonucleotide
ccctgatgggcaccatggggaagtgaagggaaactggctgcagggtaacttgaacaagtg

SEQ ID NO: 27112 - DNA, 60 bp, Artificial
  Synthetic oligonucleotide
gagacagttgaatgggcacttaaattcagagagaaggaagaaaagtatggggaatctcta

SEQ ID NO: 27113 - DNA, 60 bp, Artificial
  Synthetic oligonucleotide
taccaaatcatcctacaggaaagagtctaaaggccttcttcaagatgacacctgataatt

SEQ ID NO: 27114 - DNA, 60 bp, Artificial
  Synthetic oligonucleotide
gagacctaagggtaacatttaattttggtcttgactgtgcaaggcttgagatcttttggg

SEQ ID NO: 27115 - DNA, 60 bp, Artificial
  Synthetic oligonucleotide
gatagactttacgccgtgagacatgacattgtagaccaaatgattaagcatgactggtct

SEQ ID NO: 27116 - DNA, 60 bp, Artificial
  Synthetic oligonucleotide
ccctgctgtgttgacagccggcagaatcagtgaaatgggtgtctgctttggaacaatccc

SEQ ID NO: 27117 - DNA, 60 bp, Artificial
  Synthetic oligonucleotide
cactctaagagagttactgcacatggagacacaccacaattagatttgaaagctagacca

SEQ ID NO: 27118 - DNA, 56 bp, Artificial
  Synthetic oligonucleotide
gggtcagttaatccgttgtgggtgggtttagttccaagctgccttaagtagctttt

SEQ ID NO: 27119 - DNA, 60 bp, Artificial
  Synthetic oligonucleotide
gaaagtcatcattttaccaatcgtacctcaggaggacacaatcaatgggaatacaactgg

SEQ ID NO: 27120 - DNA, 60 bp, Artificial
  Synthetic oligonucleotide
gaaccaggggaccatttaaaggagagatcaatgctcagctatgggaatgtgctggacttg

SEQ ID NO: 27121 - DNA, 60 bp, Artificial
  Synthetic oligonucleotide
caggggaccatttaaaggagagatcaatgctcagctatgggaatgtgctggacttgaacc

SEQ ID NO: 27122 - DNA, 60 bp, Artificial
  Synthetic oligonucleotide
tctaatgctctggtggaggcaacacgtttttgtgctccaatctatgagtgtgcttggacc

SEQ ID NO: 27123 - DNA, 60 bp, Artificial
  Synthetic oligonucleotide
gcttttcgccgatgattccttccagcagaacaggatctacatgcaccctgctgtgctgac

SEQ ID NO: 27124 - DNA, 60 bp, Artificial
  Synthetic oligonucleotide
ctttgctgatgattccttccagcagaacaggatctacatgcaccctgctgtgctgacagc

SEQ ID NO: 27125 - DNA, 57 bp, Artificial
  Synthetic oligonucleotide
attacataagctgtgatgagcaacctccaagaagtacaggaaggtatcactcttcat

SEQ ID NO: 27126 - DNA, 60 bp, Artificial
  Synthetic oligonucleotide
cataattaaattcacacatacactgattgggttgggtgggtcaaatcaaatacatataag

SEQ ID NO: 27127 - DNA, 60 bp, Artificial
  Synthetic oligonucleotide
ccccgatgatgttaacaagagcacattacagagcagacgggcagctgtgtctgcattgga

SEQ ID NO: 27128 - DNA, 60 bp, Artificial
  Synthetic oligonucleotide
cccgatgatgttaacaagagcacattacagagcagacgggcagctgtgtctgcattggag

SEQ ID NO: 27129 - DNA, 60 bp, Artificial
  Synthetic oligonucleotide
gaaaatccacgcggcccagtgagccgtgaacatgtggagtggtgcagggagtttgtcaaa

SEQ ID NO: 27130 - DNA, 60 bp, Artificial
  Synthetic oligonucleotide
aaatccacgcggcccagtgagccgtgaacatgtggagtggtgcagggagtttgtcaaagg

SEQ ID NO: 27131 - DNA, 60 bp, Artificial
  Synthetic oligonucleotide
cacttctgagcaccccaatgaaatggggaaagaagctttatgagctctttgctgatgact

SEQ ID NO: 27132 - DNA, 60 bp, Artificial
  Synthetic oligonucleotide
ggaatgagcaccctccaagaactacaggaaaatatcacagcacacgaacaacagctcgtg

SEQ ID NO: 27133 - DNA, 60 bp, Artificial
  Synthetic oligonucleotide
agcacacgaacaacagctcgtgactgctcggcaaaagctcaaagatgccgaaaagacggt

SEQ ID NO: 27134 - DNA, 60 bp, Artificial
  Synthetic oligonucleotide
gacttgagcagccacagagcatactaattgagcacaaaggaacgataattggaaagcaga

SEQ ID NO: 27135 - DNA, 60 bp, Artificial
  Synthetic oligonucleotide
gcagccacagagcatactaattgagcacaaaggaacgataattggaaagcagaatgatac

SEQ ID NO: 27136 - DNA, 60 bp, Artificial
  Synthetic oligonucleotide
caatgggaacgttgaagtctctagatcgtggtctcaatctaatgagaaagaagctctagc

SEQ ID NO: 27137 - DNA, 60 bp, Artificial
  Synthetic oligonucleotide
caaacatttcatagaatttgtcaagattatcactgtaatagtccatagcaatgcttccct

SEQ ID NO: 27138 - DNA, 60 bp, Artificial
  Synthetic oligonucleotide
atcccaatgctaagggaagcattgctatggactattacagtgacaatcttgacaagttct

SEQ ID NO: 27139 - DNA, 60 bp, Artificial
  Synthetic oligonucleotide
atttgtcaagattatcactgtaatagtccatagcaatgcttcccttagcattgggattgc

SEQ ID NO: 27140 - DNA, 60 bp, Artificial
  Synthetic oligonucleotide
caggatccatgtagatgaaccagatgagcttacagtacatgtgaagagtgaagacccaga

SEQ ID NO: 27141 - DNA, 60 bp, Artificial
  Synthetic oligonucleotide
caagatccatgtagatgaaccagatgagcttacagtacatgtgaagagtgaagacccaga

SEQ ID NO: 27142 - DNA, 60 bp, Artificial
  Synthetic oligonucleotide
gatccatgtagatgaaccagatgagcttacagtacatgtgaagagtgaagacccagacat

SEQ ID NO: 27143 - DNA, 60 bp, Artificial
  Synthetic oligonucleotide
ggatccatgtagatgaaccagatgagcttacagtacatgtgaagagtgaagacccagaca

SEQ ID NO: 27144 - DNA, 60 bp, Artificial
  Synthetic oligonucleotide
agatgaaccagatgagcttacagtacatgtgaagagtgaagacccagacatagttgctgc

SEQ ID NO: 27145 - DNA, 60 bp, Artificial
  Synthetic oligonucleotide
cctgtaaggttagaatccatgtagatgagccagatgagcttacagtacatgtgaagagtg

SEQ ID NO: 27146 - DNA, 60 bp, Artificial
  Synthetic oligonucleotide
gaagtgttgctatggaacattacagtgaaactctcaacaagttctacaacatgttcggag

SEQ ID NO: 27147 - DNA, 59 bp, Artificial
  Synthetic oligonucleotide
gaagtgttgctatggaacattacagtgaaactctcaacaagttctacaacatgttcgga

SEQ ID NO: 27148 - DNA, 60 bp, Artificial
  Synthetic oligonucleotide
tcatttcagggctttacactaatcgggaatgtgactactatcagttacaatgtgatgggt

SEQ ID NO: 27149 - DNA, 60 bp, Artificial
  Synthetic oligonucleotide
gggctgatgagggctttctgggcttgtgccaaatattaatcatttcagggctttacacta

SEQ ID NO: 27150 - DNA, 60 bp, Artificial
  Synthetic oligonucleotide
ttcttcctgacattgaagacttaattgatacagctgagtctgaaggtgccaccctattta

SEQ ID NO: 27151 - DNA, 60 bp, Artificial
  Synthetic oligonucleotide
caaatcgggcatattttctggcaaggcaaagtcaggtgagagagtctattcttcctgaca

SEQ ID NO: 27152 - DNA, 60 bp, Artificial
  Synthetic oligonucleotide
accctatttaaagacattgctgtccctcactctgtgtgggtttttgcctgtgcaccagac

SEQ ID NO: 27153 - DNA, 60 bp, Artificial
  Synthetic oligonucleotide
aagacttaattgatacagctgagtctgaaggtgccaccctatttaaagacattgctgtcc

SEQ ID NO: 27154 - DNA, 60 bp, Artificial
  Synthetic oligonucleotide
tcaccttggtgatgacatggatcctgagctaaggcagttagcacagtccttagttgacac

SEQ ID NO: 27155 - DNA, 60 bp, Artificial
  Synthetic oligonucleotide
agcagtaaaccactttcaccttggtgatgacatggatcctgagctaaggcagttagcaca

SEQ ID NO: 27156 - DNA, 60 bp, Artificial
  Synthetic oligonucleotide
ggatggttaaagggctgatgagggctttctgggcttgtgccaaatattaatcatttcagg

SEQ ID NO: 27157 - DNA, 55 bp, Artificial
  Synthetic oligonucleotide
agttagcacagtccttagttgacactaaagtgaaggagatttcaaaccaggaacc

SEQ ID NO: 27158 - DNA, 60 bp, Artificial
  Synthetic oligonucleotide
cctcggatttgcactaccaatcatcttgaaagccctctacatgttatccacaagagggag

SEQ ID NO: 27159 - DNA, 60 bp, Artificial
  Synthetic oligonucleotide
tgattcatccttcgaagaggtaaatgggataagaaagcctaaacatctttatgtgtcgat

SEQ ID NO: 27160 - DNA, 60 bp, Artificial
  Synthetic oligonucleotide
agaggtaaatgggataagaaagcctaaacatctttatgtgtcgatgcccactgcacagtc

SEQ ID NO: 27161 - DNA, 60 bp, Artificial
  Synthetic oligonucleotide
atgtgtcgatgcccactgcacagtcaacaatgaaggctgatgaaataacacctggaaggt

SEQ ID NO: 27162 - DNA, 60 bp, Artificial
  Synthetic oligonucleotide
gatgcccactgcacagtcaacaatgaaggctgatgaaataacacctggaaggttccggac

SEQ ID NO: 27163 - DNA, 60 bp, Artificial
  Synthetic oligonucleotide
cctggaaggttccggacaattgcatgtggccttttcccagctcaagtcaaagccaggaat

SEQ ID NO: 27164 - DNA, 60 bp, Artificial
  Synthetic oligonucleotide
agccaggaatataattagcccagtaatgggtgtcatcggttttggtttttttgtaaagga

SEQ ID NO: 27165 - DNA, 60 bp, Artificial
  Synthetic oligonucleotide
gagtgtccatttttgcagaagccaaaggttccatctgaggcatttacaaccacaaatcgg

SEQ ID NO: 27166 - DNA, 60 bp, Artificial
  Synthetic oligonucleotide
gcagaagccaaaggttccatctgaggcatttacaaccacaaatcgggcatattttctggc

SEQ ID NO: 27167 - DNA, 60 bp, Artificial
  Synthetic oligonucleotide
cacaaatcgggcatattttctggcaaggcaaagtcaggtgagagagtctattcttcctga

SEQ ID NO: 27168 - DNA, 60 bp, Artificial
  Synthetic oligonucleotide
ctggctatgctttgcttaatactaaccacaacattctacctcatcccaacccctttccct

SEQ ID NO: 27169 - DNA, 60 bp, Artificial
  Synthetic oligonucleotide
ggttaagtgatttaggtaagttaagataattaagaatatttagccgtatttactcattag

SEQ ID NO: 27170 - DNA, 60 bp, Artificial
  Synthetic oligonucleotide
tactcattaggtataagtcatatacatcagatgtggtaatcttaggtagtttctatgggc

SEQ ID NO: 27171 - DNA, 60 bp, Artificial
  Synthetic oligonucleotide
cagggctttacactaatcgggaatgtgactactatcagttacaatgtgatgggtgggcaa

SEQ ID NO: 27172 - DNA, 60 bp, Artificial
  Synthetic oligonucleotide
agggttaagggccataattgatttgtagtaattagataagttagatttaagtgattagtt

SEQ ID NO: 27173 - DNA, 60 bp, Artificial
  Synthetic oligonucleotide
ctatgggcatcatagatcgttgggaaatgataatcaatgagactgactgctgacgggttg

SEQ ID NO: 27174 - DNA, 60 bp, Artificial
  Synthetic oligonucleotide
tttcgttctggctatgctttgcttaatactaaccacaacattctacctcatcccaacccc

SEQ ID NO: 27175 - DNA, 60 bp, Artificial
  Synthetic oligonucleotide
agtcatatacatcagatgtggtaatcttaggtagtttctatgggcatcatagatcgttgg

SEQ ID NO: 27176 - DNA, 60 bp, Artificial
  Synthetic oligonucleotide
ttctatgggcatcatagatcgttgggaaatgataatcaatgagactgactgctgacgggt

SEQ ID NO: 27177 - DNA, 60 bp, Artificial
  Synthetic oligonucleotide
aactccattgatcttgaagagcctagtggtcaaacagctgattggaggtcaattggtgct

SEQ ID NO: 27178 - DNA, 60 bp, Artificial
  Synthetic oligonucleotide
accagttgatccaacagggattgagcctgatgaccatttgaaggaaaaatctacacttcg

SEQ ID NO: 27179 - DNA, 54 bp, Artificial
  Synthetic oligonucleotide
ctggaaaccaagctcggagaactcaaaaggcagctggcagatttggtggcagct

SEQ ID NO: 27180 - DNA, 60 bp, Artificial
  Synthetic oligonucleotide
gtacactacaggggagaagggcagctgtgtctacactggaaaccaagctcggagaactca

SEQ ID NO: 27181 - DNA, 60 bp, Artificial
  Synthetic oligonucleotide
atgaagttaacaaaagtacactacaggggagaagggcagctgtgtctacactggaaacca

SEQ ID NO: 27182 - DNA, 60 bp, Artificial
  Synthetic oligonucleotide
gcacggcaaaagcttaaagatgccgagagagcagttgaagtggacccggatgaagttaac

SEQ ID NO: 27183 - DNA, 60 bp, Artificial
  Synthetic oligonucleotide
tgcacggcaaaagcttaaagatgccgagagagcagttgaagtggacccggatgaagttaa

SEQ ID NO: 27184 - DNA, 60 bp, Artificial
  Synthetic oligonucleotide
aattggtgcttatatcctcggatttgcactaccaatcatcttgaaagccctctacatgtt

SEQ ID NO: 27185 - DNA, 60 bp, Artificial
  Synthetic oligonucleotide
cttgaagagcctagtggtcaaacagctgattggaggtcaattggtgcttatatcctcgga

SEQ ID NO: 27186 - DNA, 59 bp, Artificial
  Synthetic oligonucleotide
tcaacacttcttggatgtcctgggatggctgtgacctagattactactgtaacatgggg

SEQ ID NO: 27187 - DNA, 60 bp, Artificial
  Synthetic oligonucleotide
caatcatatttgcactattattatcaggggaatcaacatattagggtgaggatacattta

SEQ ID NO: 27188 - DNA, 60 bp, Artificial
  Synthetic oligonucleotide
cccagatgacgttaacaagagcacactacaaagcagacgggcagctgtgtctgcattgga

SEQ ID NO: 27189 - DNA, 55 bp, Artificial
  Synthetic oligonucleotide
catgagcacacccttagggatgaaatgcccagaacatgcaggttcctttagaaaa

SEQ ID NO: 27190 - DNA, 60 bp, Artificial
  Synthetic oligonucleotide
ttccagtcattcaatattacagaaccccatattacaacaaattcactagaatgggttgac

SEQ ID NO: 27191 - DNA, 60 bp, Artificial
  Synthetic oligonucleotide
cagggcattattctatcagggttatgggcactaatcagggaattattgcactagggtggg

SEQ ID NO: 27192 - DNA, 60 bp, Artificial
  Synthetic oligonucleotide
gagctggcacaagctctcgttgacgttaaggtcagggaaatctccaaccaagagccactc

SEQ ID NO: 27193 - DNA, 60 bp, Artificial
  Synthetic oligonucleotide
tcatcctacgaagaagttaacggaatcagaaaaccgagacatctttatgtttcaatgcct

SEQ ID NO: 27194 - DNA, 53 bp, Artificial
  Synthetic oligonucleotide
cttctaccaatcctatctaagacgcactcaatcgatgggaattcaactggacc

SEQ ID NO: 27195 - DNA, 60 bp, Artificial
  Synthetic oligonucleotide
acctgaccgatgtcctcctacagctttatatgtagctgggatgccagagcttggtgcttt

SEQ ID NO: 27196 - DNA, 60 bp, Artificial
  Synthetic oligonucleotide
tgcaatcccaattgtgttaaaagccttatatatgttatcaaccaggggccgccaaacagt

SEQ ID NO: 27197 - DNA, 60 bp, Artificial
  Synthetic oligonucleotide
gccaaacagttaaagagaataaaggcactagaataaggttcaaagatgattcatcctacg

SEQ ID NO: 27198 - DNA, 60 bp, Artificial
  Synthetic oligonucleotide
gcagctcgtgactgccaggcaaaagcttaaagatgccgaaagagcagtggaggtggaccc

SEQ ID NO: 27199 - DNA, 60 bp, Artificial
  Synthetic oligonucleotide
agtgggcagacagctgactggaaatctattggtttgtacatattgagttttgcaatccca

SEQ ID NO: 27200 - DNA, 60 bp, Artificial
  Synthetic oligonucleotide
gtccttgatgtgaactcaattgatctggaagagccaagtgggcagacagctgactggaaa

SEQ ID NO: 27201 - DNA, 60 bp, Artificial
  Synthetic oligonucleotide
atctcaatctcactttgtcttttattcagtcctatctttgggtcatcagggtctgtatct

SEQ ID NO: 27202 - DNA, 56 bp, Artificial
  Synthetic oligonucleotide
taaggttaaggttaaggtcaagttagttaatgttatatgtataagtcaaggtataa

SEQ ID NO: 27203 - DNA, 60 bp, Artificial
  Synthetic oligonucleotide
gtctgtatctcaggactatccctatattggaatactaataaaatcatttaactggaacta

SEQ ID NO: 27204 - DNA, 60 bp, Artificial
  Synthetic oligonucleotide
tttgtatatatggatgtaaatttcattccataaatcatgtataacactaatgcctgcttt

SEQ ID NO: 27205 - DNA, 53 bp, Artificial
  Synthetic oligonucleotide
tgcctgctttgctactaattgatttcctctgttacaacaatctacctcattgt

SEQ ID NO: 27206 - DNA, 60 bp, Artificial
  Synthetic oligonucleotide
cttttcacagatattgcaactcctcactcagtgtgggtctttgcatgtgcacctgaccga

SEQ ID NO: 27207 - DNA, 60 bp, Artificial
  Synthetic oligonucleotide
gcaactcctcactcagtgtgggtctttgcatgtgcacctgaccgatgtcctcctacagct

SEQ ID NO: 27208 - DNA, 60 bp, Artificial
  Synthetic oligonucleotide
ttgtagacattgaggagctgatcatagatgctagagcagagtctgctactcttttcacag

SEQ ID NO: 27209 - DNA, 60 bp, Artificial
  Synthetic oligonucleotide
cgtacaattgcatgtggacttttccctgcccaagtcaaagctaggaatatcatcagtcct

SEQ ID NO: 27210 - DNA, 60 bp, Artificial
  Synthetic oligonucleotide
ggctgatcgctgccctttcctacctgagcctagagatcccaaagatgctgcatcaggaac

SEQ ID NO: 27211 - DNA, 60 bp, Artificial
  Synthetic oligonucleotide
ttcaatgcctacagctcaatctacgatgaaagcagatgaaatcactccaggacggtttcg

SEQ ID NO: 27212 - DNA, 60 bp, Artificial
  Synthetic oligonucleotide
cacattacatgaacagcagctcgtgactgccaggcaaaagcttaaagatgccgaaagagc

SEQ ID NO: 27213 - DNA, 60 bp, Artificial
  Synthetic oligonucleotide
gatgacgttaacaaaaacacactgcaagcaaggcaacaaacagtgtcagcattggaggat

SEQ ID NO: 27214 - DNA, 60 bp, Artificial
  Synthetic oligonucleotide
aatggcagatgctgtgtcccggaaaaaaatggatactaaacctactgatccgactgggat

SEQ ID NO: 27215 - DNA, 59 bp, Artificial
  Synthetic oligonucleotide
tatcgactgcaaacatagcactcagttggagctcagtggagcacagaggcaacaagatc

SEQ ID NO: 27216 - DNA, 60 bp, Artificial
  Synthetic oligonucleotide
caggagctctataagaattcgtctgcgcttcgtgcacaaggtgcacagattgacactgcc

SEQ ID NO: 27217 - DNA, 60 bp, Artificial
  Synthetic oligonucleotide
gaggaagcatgccatagatgctggttgtaacatcattgatcacatcgactcaccatcatc

SEQ ID NO: 27218 - DNA, 60 bp, Artificial
  Synthetic oligonucleotide
gtgaggaagcatgccatagatgctggttgtaacatcattgatcacatcgactcaccatca

SEQ ID NO: 27219 - DNA, 60 bp, Artificial
  Synthetic oligonucleotide
agaaaacatgccatagatgctggttgtaacatcattgaccatattgactcaccgtcatca

SEQ ID NO: 27220 - DNA, 60 bp, Artificial
  Synthetic oligonucleotide
ggtttaggatgtcaccttaagtgactttttctgtatatatggatgtagatttcaattgat

SEQ ID NO: 27221 - DNA, 60 bp, Artificial
  Synthetic oligonucleotide
tgtcttcgatgtgaatgcaattgatattgaggaaccaagtggtcaaacagcagattggta

SEQ ID NO: 27222 - DNA, 60 bp, Artificial
  Synthetic oligonucleotide
tgtccttgatgtgaatgcaattgatattgaggaaccaagtggtcaaacagcagattggta

SEQ ID NO: 27223 - DNA, 60 bp, Artificial
  Synthetic oligonucleotide
ttagagaatctcctgcaatcattccagaaattttgtctgtacgattataagaatctatta

SEQ ID NO: 27224 - DNA, 60 bp, Artificial
  Synthetic oligonucleotide
agcttatggattacctcttgatgatgcaaagtctgtgaggcttgccataatgctaggagg

SEQ ID NO: 27225 - DNA, 60 bp, Artificial
  Synthetic oligonucleotide
agcctatggattacctcttgatgatgcaaagtctgtgaggcttgccataatgctaggagg

SEQ ID NO: 27226 - DNA, 60 bp, Artificial
  Synthetic oligonucleotide
gttgtgggtgggtttagttcctggctgccttaagtagcctttttttgtatatatggatgt

SEQ ID NO: 27227 - DNA, 60 bp, Artificial
  Synthetic oligonucleotide
agcaaatcctgtgccagacactgccctcactctccaccgcctctcgggatatttagctaa

SEQ ID NO: 27228 - DNA, 60 bp, Artificial
  Synthetic oligonucleotide
agcaaatcctgtgccagacactgccctcactctccaccgcctctcgggatatctagctaa

SEQ ID NO: 27229 - DNA, 60 bp, Artificial
  Synthetic oligonucleotide
agcaaatcctgtgccagacactgccctcactctccaccgcctctcaggctatctagctaa

SEQ ID NO: 27230 - DNA, 60 bp, Artificial
  Synthetic oligonucleotide
aatggcctcattcaagaaactggagatgtaatcccacttggtgctggggagtgggaaccg

SEQ ID NO: 27231 - DNA, 60 bp, Artificial
  Synthetic oligonucleotide
ctgcttgcataaagaatggcctcattcaagaaactggagatgtaatcccacttggtgctg

SEQ ID NO: 27232 - DNA, 60 bp, Artificial
  Synthetic oligonucleotide
aacgacagctggcagaccttattgcagctcagaaattggcttcaaaacctattgatccaa

SEQ ID NO: 27233 - DNA, 60 bp, Artificial
  Synthetic oligonucleotide
ggggacatcaacaagtcaggccgatcaggaatagcacttgttgcaacaggccttgccaag

SEQ ID NO: 27234 - DNA, 60 bp, Artificial
  Synthetic oligonucleotide
gggacatcaacaagtcaggccgatcaggaatagcacttgttgcaacaggccttgccaagc

SEQ ID NO: 27235 - DNA, 60 bp, Artificial
  Synthetic oligonucleotide
aagaaaggaaatggacttgtggacaccttcacaaactcctattccttttgtgagagtgtc

SEQ ID NO: 27236 - DNA, 60 bp, Artificial
  Synthetic oligonucleotide
accaactaagtacaacactaaggaagctctggggaaggtttgcactgtgctgaaaagcaa

SEQ ID NO: 27237 - DNA, 60 bp, Artificial
  Synthetic oligonucleotide
tttgcttttaagcactgtgcaaaccttccccagagcttccttagtgttgtacttagttgg

SEQ ID NO: 27238 - DNA, 60 bp, Artificial
  Synthetic oligonucleotide
gccttggcgattcttcaagaaagtcaaacatgaagtgatactcattttcttaatcaggtc

SEQ ID NO: 27239 - DNA, 60 bp, Artificial
  Synthetic oligonucleotide
aaatgagtatcacttcatgtttgactttcttgaagaatcgccaaagcatcatgaaagttg

SEQ ID NO: 27240 - DNA, 60 bp, Artificial
  Synthetic oligonucleotide
cataatgccttggcgattcttcaagaaagtcaaacatgaagtgatactcattttcttaat

SEQ ID NO: 27241 - DNA, 60 bp, Artificial
  Synthetic oligonucleotide
ccaactaagtacaacactaaggaagctctggggaaggtttgcactgtgctgaaaagcaaa

SEQ ID NO: 27242 - DNA, 60 bp, Artificial
  Synthetic oligonucleotide
ctgcaacattgtttcaagatattgcaacaccgaattcagtttgggtttttgcatgtgctc

SEQ ID NO: 27243 - DNA, 60 bp, Artificial
  Synthetic oligonucleotide
ggaggtattgatacaaccattcgcacatacttcataaggagacaagaacaagtgagagaa

SEQ ID NO: 27244 - DNA, 60 bp, Artificial
  Synthetic oligonucleotide
ggtcttttcccagcacaagtcaaagcaagaaacattataagtcctgtcatgggagtgata

SEQ ID NO: 27245 - DNA, 60 bp, Artificial
  Synthetic oligonucleotide
gatgaaatcacaccagggcgattcaggacaattgcatgtggtcttttcccagcacaagtc

SEQ ID NO: 27246 - DNA, 60 bp, Artificial
  Synthetic oligonucleotide
gggagtgataggatttagcttttttgtcaaggactggatggaaaggattgaggatttcct

SEQ ID NO: 27247 - DNA, 60 bp, Artificial
  Synthetic oligonucleotide
ccagcacaagtcaaagcaagaaacattataagtcctgtcatgggagtgataggatttagc

SEQ ID NO: 27248 - DNA, 60 bp, Artificial
  Synthetic oligonucleotide
aggatttccttgcatctgactgcccgtttcttcccaaagtgagtgtgcagcaaggaggta

SEQ ID NO: 27249 - DNA, 54 bp, Artificial
  Synthetic oligonucleotide
ttttgtcaaggactggatggaaaggattgaggatttccttgcatctgactgccc

SEQ ID NO: 27250 - DNA, 60 bp, Artificial
  Synthetic oligonucleotide
caaggaggtattgatacaaccattcgcacatacttcataaggagacaagaacaagtgaga

SEQ ID NO: 27251 - DNA, 60 bp, Artificial
  Synthetic oligonucleotide
gcatctgactgcccgtttcttcccaaagtgagtgtgcagcaaggaggtattgatacaacc

SEQ ID NO: 27252 - DNA, 60 bp, Artificial
  Synthetic oligonucleotide
ttattcagggtttattattcagggcatgttaatcagtagatatagtgagtttttatccaa

SEQ ID NO: 27253 - DNA, 60 bp, Artificial
  Synthetic oligonucleotide
ggatcatttattcagggatcagttaatcaggtttattattcagggtttattattcagggc

SEQ ID NO: 27254 - DNA, 60 bp, Artificial
  Synthetic oligonucleotide
agtgcactccaggcgagacggtcggctgtgtcagcactggaaaccaagctcggagaactc

SEQ ID NO: 27255 - DNA, 60 bp, Artificial
  Synthetic oligonucleotide
cccacgaacagcagcttgtaactgctaggcaaagactcaaagatgccgaacgtgagatgg

SEQ ID NO: 27256 - DNA, 60 bp, Artificial
  Synthetic oligonucleotide
ttaaatagtttacgtatatattagctcacataatcaagggtcattatgagggttcattta

SEQ ID NO: 27257 - DNA, 50 bp, Artificial
  Synthetic oligonucleotide
ttttttaatcatattcaatagattacagtatgtattaattctattcagaa

SEQ ID NO: 27258 - DNA, 60 bp, Artificial
  Synthetic oligonucleotide
ttcaactaattactaataacattgtatttaatagtttaataattaactaattttttaatc

SEQ ID NO: 27259 - DNA, 60 bp, Artificial
  Synthetic oligonucleotide
ccactcaagatctgaatgactggattaacatcagtttataagctcccatattcaactaat

SEQ ID NO: 27260 - DNA, 60 bp, Artificial
  Synthetic oligonucleotide
gtatcacagcccacgaacagcagcttgtaactgctaggcaaagactcaaagatgccgaac

SEQ ID NO: 27261 - DNA, 60 bp, Artificial
  Synthetic oligonucleotide
ttattcaatgtgaatataatcattatctttttctttcttgattcccaattccttttcctg

SEQ ID NO: 27262 - DNA, 60 bp, Artificial
  Synthetic oligonucleotide
ttttatccaattagcattaattaggtataagtttacatatatacagaatcatctcattag

SEQ ID NO: 27263 - DNA, 60 bp, Artificial
  Synthetic oligonucleotide
ccttttcctgtgaattatatatgccattagatgtaaatttcgttccaactaattatgctt

SEQ ID NO: 27264 - DNA, 65 bp, Artificial
  Synthetic oligonucleotide
cctgtgaattatatatgccattagatgtaaatttcgttccaactaattatgcttgcttacgctac

SEQ ID NO: 27265 - DNA, 60 bp, Artificial
  Synthetic oligonucleotide
ggatcaggttcagagatgactcttcctttgaagaagtcaatggcattagaaaacccaaac

SEQ ID NO: 27266 - DNA, 60 bp, Artificial
  Synthetic oligonucleotide
caatgaaagctgatgaaatcacaccagggcgattcaggacaattgcatgtggtcttttcc

SEQ ID NO: 27267 - DNA, 60 bp, Artificial
  Synthetic oligonucleotide
gggctttgccataccgatcatccttaaggctctttatatgttgtcaactagaggccgtca

SEQ ID NO: 27268 - DNA, 60 bp, Artificial
  Synthetic oligonucleotide
ggacaaggatcaggttcagagatgactcttcctttgaagaagtcaatggcattagaaaac

SEQ ID NO: 27269 - DNA, 60 bp, Artificial
  Synthetic oligonucleotide
gagcctagtggacaaactgcagactggaaaacaatcggggtgtatgttttgggctttgcc

SEQ ID NO: 27270 - DNA, 60 bp, Artificial
  Synthetic oligonucleotide
tgggctttgccataccgatcatccttaaggctctttatatgttgtcaactagaggccgtc

SEQ ID NO: 27271 - DNA, 60 bp, Artificial
  Synthetic oligonucleotide
ggtaatgtcctggatgtaaactccattgaccttgaagagcctagtggacaaactgcagac

SEQ ID NO: 27272 - DNA, 60 bp, Artificial
  Synthetic oligonucleotide
agagcctagtggacaaactgcagactggaaaacaatcggggtgtatgttttgggctttgc

SEQ ID NO: 27273 - DNA, 60 bp, Artificial
  Synthetic oligonucleotide
gagacggtcggctgtgtcagcactggaaaccaagctcggagaactcaagcgtcagatggc

SEQ ID NO: 27274 - DNA, 60 bp, Artificial
  Synthetic oligonucleotide
tctgccttgaggtatggtaatgtcctggatgtaaactccattgaccttgaagagcctagt

SEQ ID NO: 27275 - DNA, 60 bp, Artificial
  Synthetic oligonucleotide
ctggaccaaaagattattatcatgtatatgattcattggggaaaggaagcagtaaatcat

SEQ ID NO: 27276 - DNA, 60 bp, Artificial
  Synthetic oligonucleotide
attatcatgtatatgattcattggggaaaggaagcagtaaatcatttccatctcggcgat

SEQ ID NO: 27277 - DNA, 60 bp, Artificial
  Synthetic oligonucleotide
agtaaatcatttccatctcggcgatgacatggaccctgaactcaggcagcttgcacaatc

SEQ ID NO: 27278 - DNA, 60 bp, Artificial
  Synthetic oligonucleotide
ccatctcggcgatgacatggaccctgaactcaggcagcttgcacaatccctggttgacac

SEQ ID NO: 27279 - DNA, 60 bp, Artificial
  Synthetic oligonucleotide
gcatgtgctcctgatcgttgtccgcccacctctctgtatgtcgccgggattcctgagctt

SEQ ID NO: 27280 - DNA, 60 bp, Artificial
  Synthetic oligonucleotide
cgttgtccgcccacctctctgtatgtcgccgggattcctgagcttggtgccttcttctct

SEQ ID NO: 27281 - DNA, 60 bp, Artificial
  Synthetic oligonucleotide
ctgcattctaccaatcatatttacggcgaacacaatctatgggaatacaactggaccaaa

SEQ ID NO: 27282 - DNA, 60 bp, Artificial
  Synthetic oligonucleotide
gcattctaccaatcatatttacggcgaacacaatctatgggaatacaactggaccaaaag

SEQ ID NO: 27283 - DNA, 60 bp, Artificial
  Synthetic oligonucleotide
ttgcacaatccctggttgacactaaggtgaaagagatctcaaaccaagatccactcaaga

SEQ ID NO: 27284 - DNA, 60 bp, Artificial
  Synthetic oligonucleotide
gcacaatccctggttgacactaaggtgaaagagatctcaaaccaagatccactcaagatc

SEQ ID NO: 27285 - DNA, 60 bp, Artificial
  Synthetic oligonucleotide
ggttcatttaatcagggatcatttattcagggatcagttaatcaggtttattattcaggg

SEQ ID NO: 27286 - DNA, 60 bp, Artificial
  Synthetic oligonucleotide
cgtatatattagctcacataatcaagggtcattatgagggttcatttaatcagggatcat

SEQ ID NO: 27287 - DNA, 60 bp, Artificial
  Synthetic oligonucleotide
gcttacttatgaccacatacgaatcttctacattaaagggagcgagattaaaactagtct

SEQ ID NO: 27288 - DNA, 60 bp, Artificial
  Synthetic oligonucleotide
cttatgaccacatacgaatcttctacattaaagggagcgagattaaaactagtctcgcaa

SEQ ID NO: 27289 - DNA, 60 bp, Artificial
  Synthetic oligonucleotide
tgcaccgtgtgataaaagatgggatggatgtcaacttcatgaggaaggtcctacgccaga

SEQ ID NO: 27290 - DNA, 60 bp, Artificial
  Synthetic oligonucleotide
aagatgggatggatgtcaacttcatgaggaaggtcctacgccagaggtatggacagctga

SEQ ID NO: 27291 - DNA, 60 bp, Artificial
  Synthetic oligonucleotide
ctttacgctccatcgcatctcaggctatttagctcgctggattgctgagcagtgcaaggg

SEQ ID NO: 27292 - DNA, 60 bp, Artificial
  Synthetic oligonucleotide
gctggattgctgagcagtgcaagggtaaccagatcaagtttgcagaggcagctgccacag

SEQ ID NO: 27293 - DNA, 60 bp, Artificial
  Synthetic oligonucleotide
ggctgcatttggctcagttgcccagatatcttgggccaagtctggcttctcacctgcagc

SEQ ID NO: 27294 - DNA, 60 bp, Artificial
  Synthetic oligonucleotide
ccaagtctggcttctcacctgcagctagagctttcctggcccaatttggtatccagatct

SEQ ID NO: 27295 - DNA, 60 bp, Artificial
  Synthetic oligonucleotide
agctccagcaatcctaatgctaaaggaagtattgctatggaacattacagtgaaactctt

SEQ ID NO: 27296 - DNA, 60 bp, Artificial
  Synthetic oligonucleotide
tctcagggtggtttaggacgtcaccttaagtgactttttctgtatatatggatgtagatt

SEQ ID NO: 27297 - DNA, 60 bp, Artificial
  Synthetic oligonucleotide
tttcctggcaaccggaacaacccagttcctgacgacggtcttaccctccaccgcctcagt

SEQ ID NO: 27298 - DNA, 60 bp, Artificial
  Synthetic oligonucleotide
acacaatttactacctcaaaaagttattttcttgattgcttttcaaggagtttactacta

SEQ ID NO: 27299 - DNA, 60 bp, Artificial
  Synthetic oligonucleotide
actggaatccataatactactgatcagtaaatgtatttgcactaggggacgggttgggtg

SEQ ID NO: 27300 - DNA, 60 bp, Artificial
  Synthetic oligonucleotide
tgaagtcctcttcgatgacataagaaactctccaacgcacagtacagcttggaagcatgc

SEQ ID NO: 27301 - DNA, 60 bp, Artificial
  Synthetic oligonucleotide
aacccaccttggggggacatcaacaagtcaggccgttcaggaatagcactcgttgcaaca

SEQ ID NO: 27302 - DNA, 60 bp, Artificial
  Synthetic oligonucleotide
gctctacaaggccggcgtgactccagaaaccttcccaactgtctcacagttccttttcga

SEQ ID NO: 27303 - DNA, 60 bp, Artificial
  Synthetic oligonucleotide
aacaccagcagttcttttgacccagaggcagcatacgctaactttaagcgtgtccacacc

SEQ ID NO: 27304 - DNA, 60 bp, Artificial
  Synthetic oligonucleotide
tttgacccagaggcagcatacgctaactttaagcgtgtccacaccactgggcttacttat

SEQ ID NO: 27305 - DNA, 60 bp, Artificial
  Synthetic oligonucleotide
ccagaggcagcatacgctaactttaagcgtgtccacaccactgggcttacttatgaccac

SEQ ID NO: 27306 - DNA, 60 bp, Artificial
  Synthetic oligonucleotide
ttcattgaagcctgcaagttgataattcctaaaggtaacagtgaaaaacaaataaggaaa

SEQ ID NO: 27307 - DNA, 60 bp, Artificial
  Synthetic oligonucleotide
gatgtgcagccaagaatacaggaaaggtgtttcctttgcaagtgtaatgtattcttggac

SEQ ID NO: 27308 - DNA, 60 bp, Artificial
  Synthetic oligonucleotide
gaataacactccagaaaactgctgccaactccacttgatgtgcagccaagaatacaggaa

SEQ ID NO: 27309 - DNA, 60 bp, Artificial
  Synthetic oligonucleotide
cctctgaatagagctatcagagccagatctcaagcattcattgaagcctgcaagttgata

SEQ ID NO: 27310 - DNA, 60 bp, Artificial
  Synthetic oligonucleotide
gttgcatgattattcctctgaatagagctatcagagccagatctcaagcattcattgaag

SEQ ID NO: 27311 - DNA, 60 bp, Artificial
  Synthetic oligonucleotide
gctatattaggcaaaatgatgacactctttggtaacaagggctctcaaaggcaagccaag

SEQ ID NO: 27312 - DNA, 60 bp, Artificial
  Synthetic oligonucleotide
caagggctctcaaaggcaagccaagagagaagaaggtcccttagtttctttaacaaaaca

SEQ ID NO: 27313 - DNA, 60 bp, Artificial
  Synthetic oligonucleotide
agttcaaaaggtaaaatacttttgaacactgaaggaacttcttcttttggtacatatgaa

SEQ ID NO: 27314 - DNA, 60 bp, Artificial
  Synthetic oligonucleotide
gatctctagaattgttatttgggtctgccctactattccgaacccaactggcaaattgat

SEQ ID NO: 27315 - DNA, 60 bp, Artificial
  Synthetic oligonucleotide
gctcacctaacgttggctatattaggcaaaatgatgacactctttggtaacaagggctct

SEQ ID NO: 27316 - DNA, 60 bp, Artificial
  Synthetic oligonucleotide
tatttgggtctgccctactattccgaacccaactggcaaattgatggctgcactggtaga

SEQ ID NO: 27317 - DNA, 60 bp, Artificial
  Synthetic oligonucleotide
gtcaaggcactataacagatcctatctgttttgtgttttatttgaattggtctataccaa

SEQ ID NO: 27318 - DNA, 60 bp, Artificial
  Synthetic oligonucleotide
cttgcacatgcatttcatacaataagggatattagataccaggcagtagatgctgtaagt

SEQ ID NO: 27319 - DNA, 60 bp, Artificial
  Synthetic oligonucleotide
ttaaaagtgatgatccagatgtagttgcagctagctcaagtctcatggcaagaaagcttg

SEQ ID NO: 27320 - DNA, 60 bp, Artificial
  Synthetic oligonucleotide
ttcagctcatactactggctctacaaggccggcgtgactccagaaaccttcccgactgtc

SEQ ID NO: 27321 - DNA, 60 bp, Artificial
  Synthetic oligonucleotide
ggcagatgctgtgtcccggaagaaaatggatactaaacctactgacccgactgggattga

SEQ ID NO: 27322 - DNA, 60 bp, Artificial
  Synthetic oligonucleotide
aatggcagatgctgtgtcccggaagaaaatggatactaaacctactgacccgactgggat

SEQ ID NO: 27323 - DNA, 60 bp, Artificial
  Synthetic oligonucleotide
cggaacaacccagttcctgacgatggtcttaccctccaccgcctcagtggattccttgcc

SEQ ID NO: 27324 - DNA, 60 bp, Artificial
  Synthetic oligonucleotide
gcgtcttagaagaaacagcagaaagacatatgctttgggagcttgatctgatgaattcac

SEQ ID NO: 27325 - DNA, 60 bp, Artificial
  Synthetic oligonucleotide
gttacggctgcaagcccagtgtatcagagatgtttccaagatggggctatagtgaagcaa

SEQ ID NO: 27326 - DNA, 60 bp, Artificial
  Synthetic oligonucleotide
gcctggggtaaagaggtagtggataacttccaccttggagatgacatggatcctgagttg

SEQ ID NO: 27327 - DNA, 60 bp, Artificial
  Synthetic oligonucleotide
gcctggggaaaggaagcagtggataatttccaccttggagatgacatggatcctgagttg

SEQ ID NO: 27328 - DNA, 60 bp, Artificial
  Synthetic oligonucleotide
gcctggggagaggaagcagtggataatttccaccttggagatgacatggatcctgagttg

SEQ ID NO: 27329 - DNA, 60 bp, Artificial
  Synthetic oligonucleotide
attaaggctgcgttcaactctgttggacagcttgcttgggctaaatctggattctctcct

SEQ ID NO: 27330 - DNA, 60 bp, Artificial
  Synthetic oligonucleotide
attaaggctgcgttcaactccgttggacaacttgcttgggctaaatctggattctctcct

SEQ ID NO: 27331 - DNA, 60 bp, Artificial
  Synthetic oligonucleotide
atgcacagggttctcaaagacaatatggatgtaaatttcatgaaaaaagtccttcgccag

SEQ ID NO: 27332 - DNA, 60 bp, Artificial
  Synthetic oligonucleotide
ggctagtgtccttaagttggctgaagcaagtgctcagattgtcatgcctcttgctgaggt

SEQ ID NO: 27333 - DNA, 60 bp, Artificial
  Synthetic oligonucleotide
gcaaggctagtgtccttaagttggctgaagcaagtgctcagattgtcatgcctcttgctg

SEQ ID NO: 27334 - DNA, 60 bp, Artificial
  Synthetic oligonucleotide
aagatcgtggaggtgaggactggaagcaggatgtcaagaagatgattgttctctctctta

SEQ ID NO: 27335 - DNA, 60 bp, Artificial
  Synthetic oligonucleotide
tccttgataagcaaaatcagtcacccaaccggcaacagtttgctcatctatagactcaga

SEQ ID NO: 27336 - DNA, 60 bp, Artificial
  Synthetic oligonucleotide
gtaagagagagaacaatcatcttcttgacatcttgcttccagtcatcacctccacgatcc

SEQ ID NO: 27337 - DNA, 60 bp, Artificial
  Synthetic oligonucleotide
gtaagagagagaacaatcatcttcttgacatcctgcttccagtcatcacctccacgatcc

SEQ ID NO: 27338 - DNA, 60 bp, Artificial
  Synthetic oligonucleotide
ctctggtaagagagagaacaatcatcttcttgacatcctgcttccagtcatcacctccac

SEQ ID NO: 27339 - DNA, 60 bp, Artificial
  Synthetic oligonucleotide
ctctggtaagagagagaacaatcatcttcttgacatcttgcttccagtcatcacctccac

SEQ ID NO: 27340 - DNA, 60 bp, Artificial
  Synthetic oligonucleotide
gcctctagtaagagagagaacaatcatcttcttgacatcctgcttccagtcctcacctcc

SEQ ID NO: 27341 - DNA, 60 bp, Artificial
  Synthetic oligonucleotide
gcctctggtaagagagagaacaatcatcttcttgacatcctgcttccagtcctcacctcc

SEQ ID NO: 27342 - DNA, 60 bp, Artificial
  Synthetic oligonucleotide
tgcctctagtaagagagagaacaatcatcttcttgacatcctgcttccagtcctcacctc

SEQ ID NO: 27343 - DNA, 60 bp, Artificial
  Synthetic oligonucleotide
tgcctctggtaagagagagaacaatcatcttcttgacatcctgcttccagtcctcacctc

SEQ ID NO: 27344 - DNA, 60 bp, Artificial
  Synthetic oligonucleotide
accagcaaagctggggtgcatcatcgccctgggataactgctggatatggcatccatggc

SEQ ID NO: 27345 - DNA, 52 bp, Artificial
  Synthetic oligonucleotide
ctgctggatatggcatccatggctctgccagtcactggcaagtactcctgga

SEQ ID NO: 27346 - DNA, 53 bp, Artificial
  Synthetic oligonucleotide
actgctggatatggcatccatggctctgccagtcactggcaagtactcctgga

SEQ ID NO: 27347 - DNA, 60 bp, Artificial
  Synthetic oligonucleotide
ccagcaaagctgggatgcatcatcgccctaggataactgctggatatggcatccatggct

SEQ ID NO: 27348 - DNA, 60 bp, Artificial
  Synthetic oligonucleotide
ccagcaaagcttgggtgcatcatcgccctgggataactgctggatatggcatccatggct

SEQ ID NO: 27349 - DNA, 60 bp, Artificial
  Synthetic oligonucleotide
ggggtgcatcatcgccctgggataactgctggatatggcatccatggctctgccagtcac

SEQ ID NO: 27350 - DNA, 60 bp, Artificial
  Synthetic oligonucleotide
cagcaaagctgggatgcatcatcgccctaggataactgctggatatggcatccatggctc

SEQ ID NO: 27351 - DNA, 60 bp, Artificial
  Synthetic oligonucleotide
tgcatcatcgccctgggataactgctggatatggcatccatggctctgccagtcactggc

SEQ ID NO: 27352 - DNA, 60 bp, Artificial
  Synthetic oligonucleotide
gtgcatcatcgccctgggataactgctggatatggcatccatggctctgccagtcactgg

SEQ ID NO: 27353 - DNA, 60 bp, Artificial
  Synthetic oligonucleotide
tccaggagtacttgccagtgactggcagagccatggatgccatatccagcagttatccta

SEQ ID NO: 27354 - DNA, 60 bp, Artificial
  Synthetic oligonucleotide
gccagtgactggcagagccatggatgccatatccagcagttatcctagggcgatgatgca

SEQ ID NO: 27355 - DNA, 60 bp, Artificial
  Synthetic oligonucleotide
ttgataagcaaaatcagtcacccaaccggcaaccgcttgctcatctatagactcagaggc

SEQ ID NO: 27356 - DNA, 60 bp, Artificial
  Synthetic oligonucleotide
ctctgagtctatagatgagcaaactgttgccggttgggtgactgattttgcttatcaagg

SEQ ID NO: 27357 - DNA, 60 bp, Artificial
  Synthetic oligonucleotide
ttgaataggtcacagactaatcccaatgttattgacatgtatgagcagacaaagcagcac

SEQ ID NO: 27358 - DNA, 60 bp, Artificial
  Synthetic oligonucleotide
cacagctatgacaatgcaatccccgttgcaacttaggtttaggatgcaagctaaacaaca

SEQ ID NO: 27359 - DNA, 60 bp, Artificial
  Synthetic oligonucleotide
gcgctctgtattttcattccatttcttattatgtgtttcccagaagatgaagatctgtgc

SEQ ID NO: 27360 - DNA, 60 bp, Artificial
  Synthetic oligonucleotide
caaaatatctgtagaccttttcatgtttaacgagttattggctttggtcaacccaagaaa

SEQ ID NO: 27361 - DNA, 60 bp, Artificial
  Synthetic oligonucleotide
tacctacaaaacatgttcatcggtcaaaaattgcaagaactttcacagtgcgtgaaaaag

SEQ ID NO: 27362 - DNA, 60 bp, Artificial
  Synthetic oligonucleotide
gctgttatagggtataaatatgcctcaactgtggatgagattagtgatgtcttggatagt

SEQ ID NO: 27363 - DNA, 60 bp, Artificial
  Synthetic oligonucleotide
acagtacagtgacctctatatccagcagacaatggtctgaggaagtgagtcttatggctg

SEQ ID NO: 27364 - DNA, 60 bp, Artificial
  Synthetic oligonucleotide
aaacgaagaggctaaaatacatcttgaaactgtagaatgggcaaggaagtttgaggctaa

SEQ ID NO: 27365 - DNA, 60 bp, Artificial
  Synthetic oligonucleotide
ctattctgtcaagaggtcgtagagttaagtgcagaggaactaaacaaatacttgcaggca

SEQ ID NO: 27366 - DNA, 60 bp, Artificial
  Synthetic oligonucleotide
acctcaatcactgtgtcagcctgagattacaaatttgatccagtattgtaagcactggct

SEQ ID NO: 27367 - DNA, 60 bp, Artificial
  Synthetic oligonucleotide
caaggtatggaaaagaaagtcattcctacaagtccttcagggcagatcctcaagagcttt

SEQ ID NO: 27368 - DNA, 60 bp, Artificial
  Synthetic oligonucleotide
ggtgttgttcaacatatgaggcttgttcaagctgatattaattatgttagggagcacctc

SEQ ID NO: 27369 - DNA, 60 bp, Artificial
  Synthetic oligonucleotide
gagagattcatcaaagagtaaaggagattcctcctgggggggcatctgcattagagtgtt

SEQ ID NO: 27370 - DNA, 60 bp, Artificial
  Synthetic oligonucleotide
gtgcaggctgtaggtaatgtatggttccaaactaatcaacataaattattcataaatccg

SEQ ID NO: 27371 - DNA, 60 bp, Artificial
  Synthetic oligonucleotide
gtggagggtacagctgagtcaatttgcagctattggcttagaagcatgtcattagttaaa

SEQ ID NO: 27372 - DNA, 60 bp, Artificial
  Synthetic oligonucleotide
ggactgggtagagagatttcgtagaaaaggtgttgttcctgtagaccctgagatccagtg

SEQ ID NO: 27373 - DNA, 60 bp, Artificial
  Synthetic oligonucleotide
gcacaattggctgttgtcatctgcactagtaaagttgagaggttatatggtactgcagat

SEQ ID NO: 27374 - DNA, 60 bp, Artificial
  Synthetic oligonucleotide
cggttatgcatagaagtttggagatggtgtaaggctaatgaccagaatgtgaatgactgg

SEQ ID NO: 27375 - DNA, 60 bp, Artificial
  Synthetic oligonucleotide
tgatggtctgtcagatgaaaagttgaagtgttgtgttgtagatgccctcaggcatgttta

SEQ ID NO: 27376 - DNA, 60 bp, Artificial
  Synthetic oligonucleotide
ggggttatactgttcatcctcccttcaaaatccctagaggttgttggatcttatatccgt

SEQ ID NO: 27377 - DNA, 60 bp, Artificial
  Synthetic oligonucleotide
gggctgtgcagtgtcaatcccgttcatcaagatactattagggtcattatcggatttacc

SEQ ID NO: 27378 - DNA, 60 bp, Artificial
  Synthetic oligonucleotide
ctcgacttctttaagggtggtgtgtctgccactgtcaaaggaaattggcttcaaggtaac

SEQ ID NO: 27379 - DNA, 60 bp, Artificial
  Synthetic oligonucleotide
acaagttagtcatacaaagagtttagttttattcaagacggagtcagggtttgagtgggg

SEQ ID NO: 27380 - DNA, 60 bp, Artificial
  Synthetic oligonucleotide
gttctgggtctttttaagtttttgatgtctctcagtgaggatgtcttccagcatgatagg

SEQ ID NO: 27381 - DNA, 60 bp, Artificial
  Synthetic oligonucleotide
gtgtattgccttgcttctctatgatgtgttaggttataagagcgtattacaaatgcaggc

SEQ ID NO: 27382 - DNA, 60 bp, Artificial
  Synthetic oligonucleotide
gactggttcctatatgtatcccaacaaatccaggccggcaactatcactggcatgcagtc

SEQ ID NO: 27383 - DNA, 60 bp, Artificial
  Synthetic oligonucleotide
ttggctgtctagaggtattaaaagtacatccagaaacaccagtgcaagcaatagcagtag

SEQ ID NO: 27384 - DNA, 55 bp, Artificial
  Synthetic oligonucleotide
aatgtcggtgaggtaacaatgaatctagctaatcctcgtaagaccacaggtgtag

SEQ ID NO: 27385 - DNA, 60 bp, Artificial
  Synthetic oligonucleotide
gagctgtctaagtatttgattagtatattacggaaaactgcagcttggcatattggtcat

SEQ ID NO: 27386 - DNA, 60 bp, Artificial
  Synthetic oligonucleotide
ggcccatgtacctatcccattgggaggtgatggatcaatgtctattatggaacttgctac

SEQ ID NO: 27387 - DNA, 60 bp, Artificial
  Synthetic oligonucleotide
tatgttcaacctccatgagcacttgttgttgatgggttctataaaggtatcaccaaaaaa

SEQ ID NO: 27388 - DNA, 60 bp, Artificial
  Synthetic oligonucleotide
ccggggcattgcaagaggatggacatcttgcagcaagtgtcacattaattgaggctatta

SEQ ID NO: 27389 - DNA, 60 bp, Artificial
  Synthetic oligonucleotide
cgtactgaggctgatagagggttcttcatcacaactcttccaacaagggtcaggttagag

SEQ ID NO: 27390 - DNA, 60 bp, Artificial
  Synthetic oligonucleotide
gctgttacttcgctatattcaggttatgagctcttaatagagaaattctttgagaggccc

SEQ ID NO: 27391 - DNA, 59 bp, Artificial
  Synthetic oligonucleotide
ttggtcttactgttgaccattcaactgtaggtgcaagtggagtctatccttcattgatg

SEQ ID NO: 27392 - DNA, 60 bp, Artificial
  Synthetic oligonucleotide
caaagtgtataatcccatagggatagtgttgatggccaggtatatgtcaaagaattatga

SEQ ID NO: 27393 - DNA, 60 bp, Artificial
  Synthetic oligonucleotide
gaacaatacaggcacctcatcactaggcacatatgagtctgaccagatatctgaatcaga

SEQ ID NO: 27394 - DNA, 60 bp, Artificial
  Synthetic oligonucleotide
agatcataagactctgattcagatatctggtcagactcatatgtgcctagtgatgaggtg

SEQ ID NO: 27395 - DNA, 60 bp, Artificial
  Synthetic oligonucleotide
gatctcaaggatagttatctggatatgccctactatagctgatcctgatgggaaattggc

SEQ ID NO: 27396 - DNA, 60 bp, Artificial
  Synthetic oligonucleotide
ggatagttatctggatatgtcctactatagctgatcctgatgggaaattggctgtagctt

SEQ ID NO: 27397 - DNA, 60 bp, Artificial
  Synthetic oligonucleotide
ggatagttatctggatatgccctactatagctgatcctgatgggaaattggctgtagctt

SEQ ID NO: 27398 - DNA, 60 bp, Artificial
  Synthetic oligonucleotide
ctcttgttaggatcaattaaagctacagccaatttcccatcaggatcagctatagtaggg

SEQ ID NO: 27399 - DNA, 52 bp, Artificial
  Synthetic oligonucleotide
ggaaattggctgtagctttaattgatcctaacaagagtgttaatgccagaac

SEQ ID NO: 27400 - DNA, 60 bp, Artificial
  Synthetic oligonucleotide
gttctggcattaacactcttgttaggatcaattaaagctacagccaatttcccatcagga

SEQ ID NO: 27401 - DNA, 59 bp, Artificial
  Synthetic oligonucleotide
gaacaatacaggcacctcatcactaggcacatatgagtctgaccagatatctgaatcag

SEQ ID NO: 27402 - DNA, 59 bp, Artificial
  Synthetic oligonucleotide
ctgattcagatatctggtcagactcatatgtgcctagtgatgaggtgcctgtattgttc

SEQ ID NO: 27403 - DNA, 60 bp, Artificial
  Synthetic oligonucleotide
tacacaatccttctgctaatcacaacaacaaggaagttctccaaagagccatggatagct

SEQ ID NO: 27404 - DNA, 60 bp, Artificial
  Synthetic oligonucleotide
gctatccatggctctttggagaacttccttgttgttgtgattagcagaaggattgtgtac

SEQ ID NO: 27405 - DNA, 60 bp, Artificial
  Synthetic oligonucleotide
acacaatccttctgctaatcacaacaacaaggaagttctccaaagagccatggatagctc

SEQ ID NO: 27406 - DNA, 60 bp, Artificial
  Synthetic oligonucleotide
gagctatccatggctctttggagaacttccttgttgttgtgattagcagaaggattgtgt

SEQ ID NO: 27407 - DNA, 60 bp, Artificial
  Synthetic oligonucleotide
gcttttatccagatctgctcttggtgaatcacagaattcttttgtccaagaatacatgac

SEQ ID NO: 27408 - DNA, 60 bp, Artificial
  Synthetic oligonucleotide
gctagtgtcatgtattcttggacaaaagaattctgtgattcaccaagagcagatctggat

SEQ ID NO: 27409 - DNA, 60 bp, Artificial
  Synthetic oligonucleotide
agatgtttcttttgctagtgtcatgtattcttggacaaaagaattctgtgattcaccaag

SEQ ID NO: 27410 - DNA, 60 bp, Artificial
  Synthetic oligonucleotide
gaagcattaaagatcccatatgttttgttttttatctaaattggtccattccaaaagtta

SEQ ID NO: 27411 - DNA, 52 bp, Artificial
  Synthetic oligonucleotide
acccatcaatagagctattagagccaaatcgcaagccttcattgaagcctgc

SEQ ID NO: 27412 - DNA, 60 bp, Artificial
  Synthetic oligonucleotide
gcaggcttcaatgaaggcttgcgatttggctctaatagccctattgatgggtattatcat

SEQ ID NO: 27413 - DNA, 57 bp, Artificial
  Synthetic oligonucleotide
ataatacccatcaatagggctattagagccaaatcgcaagccttcattgaagcctgc

SEQ ID NO: 27414 - DNA, 59 bp, Artificial
  Synthetic oligonucleotide
gaagcattaaagatcctatatgttttgttttttatctaaattggtccattccaaaagtt

SEQ ID NO: 27415 - DNA, 59 bp, Artificial
  Synthetic oligonucleotide
aacttttggaatggaccaatttagataaaaaacaaaacatataggatctttaatgcttc

SEQ ID NO: 27416 - DNA, 60 bp, Artificial
  Synthetic oligonucleotide
gacagtggaggtggacccggatgacgttaacaaaagtacattgcaaagcagacggtcagc

SEQ ID NO: 27417 - DNA, 60 bp, Artificial
  Synthetic oligonucleotide
tctcaaagaaacacgtgccgcttacgcccacagtgttcccttgagtgctagcaaaatgga

SEQ ID NO: 27418 - DNA, 60 bp, Artificial
  Synthetic oligonucleotide
tctcaaagaaacacgtgccgcttacgcccacagtgttctcttgagtgctagctaaatgga

SEQ ID NO: 27419 - DNA, 60 bp, Artificial
  Synthetic oligonucleotide
aattcaggcacattacaaagtttgtcaagccacccaccgattcagagaagatttaaaaaa

SEQ ID NO: 27420 - DNA, 55 bp, Artificial
  Synthetic oligonucleotide
gcacattacaaagtttgtcaagccacccaccgattcagagaagatttaaaaaaga

SEQ ID NO: 27421 - DNA, 60 bp, Artificial
  Synthetic oligonucleotide
cagatgacgttaacaagaacacactgcaggcacggcaacaaacagtgtcagcattggagg

SEQ ID NO: 27422 - DNA, 60 bp, Artificial
  Synthetic oligonucleotide
gatgacgttaacaagaacacactgcaagcacggcaacaaacagtgtcagcattggaagat

SEQ ID NO: 27423 - DNA, 60 bp, Artificial
  Synthetic oligonucleotide
gatatgggaatgtccttgatgtgaatgcaatagatatagaagaaccaagtggtcaaacag

SEQ ID NO: 27424 - DNA, 60 bp, Artificial
  Synthetic oligonucleotide
gatatgggaatgtccttgatgtgaatgcaatagatatagaagaaccaagtggtcagacag

SEQ ID NO: 27425 - DNA, 60 bp, Artificial
  Synthetic oligonucleotide
tgcttctatttctaagtgcaccatgtctatgtggtgcacacctttgttcagctgcatgga

SEQ ID NO: 27426 - DNA, 60 bp, Artificial
  Synthetic oligonucleotide
cactattaactacgcattgcaatggcaaatcaatttattttcaacgatgttccacaacgg

SEQ ID NO: 27427 - DNA, 59 bp, Artificial
  Synthetic oligonucleotide
tcttctctttctaagtgcaccatgtctatgtggtgcatacctttattcagctgcttgga

SEQ ID NO: 27428 - DNA, 60 bp, Artificial
  Synthetic oligonucleotide
agtagtgaactccactattaactacgcattgcaatggcaaatcaatttattttcaacgat

SEQ ID NO: 27429 - DNA, 60 bp, Artificial
  Synthetic oligonucleotide
gaaatggacttgtggacactttcacaaactcctactccttttgtgagagtgttccaaatc

SEQ ID NO: 27430 - DNA, 60 bp, Artificial
  Synthetic oligonucleotide
gctgcgaaagctggaatgagcaccctccaagaattgcaggaaaacatcacagcacacgaa

SEQ ID NO: 27431 - DNA, 60 bp, Artificial
  Synthetic oligonucleotide
ctctcaaatggaggaaggacataggtttccgtgtcaatgcaaacacggcagccttaagca

SEQ ID NO: 27432 - DNA, 60 bp, Artificial
  Synthetic oligonucleotide
gacagatgcaaagtctgtgaggcttgccataatgctaggaggtagtatccctctgattgc

SEQ ID NO: 27433 - DNA, 60 bp, Artificial
  Synthetic oligonucleotide
tgcacaaagaatggccccattcaagaaattggagatgcaatcccacttggtgctggggtg

SEQ ID NO: 27434 - DNA, 60 bp, Artificial
  Synthetic oligonucleotide
gtatccacaccactgggcttagttatgaccacattcgaatcttctacattaaaggacgcg

SEQ ID NO: 27435 - DNA, 60 bp, Artificial
  Synthetic oligonucleotide
gcaccaagaatacagtttaagcagacacaaaatgtaaaggagccaggcacatttaagcta

SEQ ID NO: 27436 - DNA, 60 bp, Artificial
  Synthetic oligonucleotide
gaatggggaagagaaatggtggatcatttccatcttggtgatgacatggatcctgagcta

SEQ ID NO: 27437 - DNA, 60 bp, Artificial
  Synthetic oligonucleotide
gaatggggaaaagaaatggtggatcatttccatcttggtgatgacatggatcctgagcta

SEQ ID NO: 27438 - DNA, 60 bp, Artificial
  Synthetic oligonucleotide
gctgatgactctttccagcaaaacaggatctacatgcaccctgctgtgctgacagctggc

SEQ ID NO: 27439 - DNA, 60 bp, Artificial
  Synthetic oligonucleotide
gaaatcaatgcccatgagggtcaactggtgatagccaggcagaaggtgagggatgcagaa

SEQ ID NO: 27440 - DNA, 60 bp, Artificial
  Synthetic oligonucleotide
catggacattgtagcctctgagcacctgctgcaccaatcccttgtcggcaagcagtctcc

SEQ ID NO: 27441 - DNA, 50 bp, Artificial
  Synthetic oligonucleotide
gtcaaggagatttcaaatcaggaaccattaaagatatgagccaacaagtt

SEQ ID NO: 27442 - DNA, 60 bp, Artificial
  Synthetic oligonucleotide
cattgatatgaatctgatgggttgggcacaaatttcacaaatgcatgaatacaattcaca

SEQ ID NO: 27443 - DNA, 60 bp, Artificial
  Synthetic oligonucleotide
ccgacgccctaaacacttatatgtatcaatgccaactgcccagtccacaatgaaagcaga

SEQ ID NO: 27444 - DNA, 60 bp, Artificial
  Synthetic oligonucleotide
catgggtgtttgcttgtgcacctgatagatgccctccgacatgtatatatgtggccggga

SEQ ID NO: 27445 - DNA, 52 bp, Artificial
  Synthetic oligonucleotide
tctttatgtttaatgttagtttgttaagttttaaagttaagtcattgtttag

SEQ ID NO: 27446 - DNA, 59 bp, Artificial
  Synthetic oligonucleotide
cagctgctctttatgtttaatgttagtttgttaagtttaagagttaagtccttgtttag

SEQ ID NO: 27447 - DNA, 60 bp, Artificial
  Synthetic oligonucleotide
cattgatatgaatctgatgggttgggcacaaaattcacacaaatgcatgaaaacaattca

SEQ ID NO: 27448 - DNA, 60 bp, Artificial
  Synthetic oligonucleotide
gactggaccttcaaaaggacagaagctttcatcaggaccaaaatggctagtatggttgaa

SEQ ID NO: 27449 - DNA, 60 bp, Artificial
  Synthetic oligonucleotide
cagtggaggtggacccagatgacgttaacaagaacacactacaagcaaggcaacaaacag

SEQ ID NO: 27450 - DNA, 60 bp, Artificial
  Synthetic oligonucleotide
cagtggaggtggacccagatgacgttaacaagaacacactgcaagcaaggcaacagacag

SEQ ID NO: 27451 - DNA, 60 bp, Artificial
  Synthetic oligonucleotide
gggaggaagcaacagttatttccagagtaaataatgaacagctagaagttgaattttgcg

SEQ ID NO: 27452 - DNA, 60 bp, Artificial
  Synthetic oligonucleotide
gggcctagttttactagataatttcacatctcattgccttacatgcatttgtcgcgataa

SEQ ID NO: 27453 - DNA, 60 bp, Artificial
  Synthetic oligonucleotide
aaaggcctaatcttactagataatttcacatctcattgccttacatgcatctgtcgtgac

SEQ ID NO: 27454 - DNA, 60 bp, Artificial
  Synthetic oligonucleotide
aagcaacagttatttccagagtaaataatgaacagctagaagttgaattttgcgtttcag

SEQ ID NO: 27455 - DNA, 60 bp, Artificial
  Synthetic oligonucleotide
ctagataatttcacatctcattgccttacatgcatctgtcgtgacaaaagcttacacaga

SEQ ID NO: 27456 - DNA, 60 bp, Artificial
  Synthetic oligonucleotide
ccttaggtatggaaatgtccttgatgtgaatgcaattgatattgaggaaccaagtggcca

SEQ ID NO: 27457 - DNA, 60 bp, Artificial
  Synthetic oligonucleotide
ccttaggtatggaaatgtccttgatgtgaatgcaattgatattgaggaaccaagtggtca

SEQ ID NO: 27458 - DNA, 60 bp, Artificial
  Synthetic oligonucleotide
gccttaggtatggaaatgtccttgatgtgaatgcaattgatattgaggaaccaagtggtc

SEQ ID NO: 27459 - DNA, 55 bp, Artificial
  Synthetic oligonucleotide
gcctttttttgtatatatggatgtagatttcatttgatcctggaactaatcttgc

SEQ ID NO: 27460 - DNA, 60 bp, Artificial
  Synthetic oligonucleotide
tgccgacaggattgcagcagggaagaacatcgggcaagaccgggatcctacaggggtaga

SEQ ID NO: 27461 - DNA, 60 bp, Artificial
  Synthetic oligonucleotide
gctgacaggattgcagcagggaagaacatcgggcaagaccgggatcctacaggggtagag

SEQ ID NO: 27462 - DNA, 60 bp, Artificial
  Synthetic oligonucleotide
ctaaaaagttgggaacacagcttaagctggctgttgagttagagaaactgattactggtg

SEQ ID NO: 27463 - DNA, 60 bp, Artificial
  Synthetic oligonucleotide
cagctaaggtgccatctacagaaacaactgaaacaatgcaaggaattgcatttgctggag

SEQ ID NO: 27464 - DNA, 59 bp, Artificial
  Synthetic oligonucleotide
cagtgtacttatatatatgcaagtagcatatatataagtacacaacatactacctcaac

SEQ ID NO: 27465 - DNA, 60 bp, Artificial
  Synthetic oligonucleotide
tcagtgtacttatatatatgcaagtagcatatatataagtacacaatatactacctcaac

SEQ ID NO: 27466 - DNA, 60 bp, Artificial
  Synthetic oligonucleotide
tgtacttatatatatgcaagtagcatatatataagtacacaacatactacctcaacagac

SEQ ID NO: 27467 - DNA, 52 bp, Artificial
  Synthetic oligonucleotide
cttatatatatgcaagtagcatatatataagtacacaacatactacctcaac

SEQ ID NO: 27468 - DNA, 60 bp, Artificial
  Synthetic oligonucleotide
ggacatggacattgtagcctctgagcacctgctgcaccaatcccttgttggcaagcagtc

SEQ ID NO: 27469 - DNA, 60 bp, Artificial
  Synthetic oligonucleotide
ctgaaaagtggatgtcccagaagacaggcatgattgctaaaagcctaaaggaggttgagc

SEQ ID NO: 27470 - DNA, 60 bp, Artificial
  Synthetic oligonucleotide
ggttcttaggggcccacaaccatagcagctaaatgggtgggtggtaggggacagcaaaac

SEQ ID NO: 27471 - DNA, 54 bp, Artificial
  Synthetic oligonucleotide
ccagaaatttatctggcattcttcccaggaaccgagatgttcttggagacattc

SEQ ID NO: 27472 - DNA, 60 bp, Artificial
  Synthetic oligonucleotide
ctccttaactgctgaaaagtggatgtcccagaagacaggcatgattgctaaaagcctaaa

SEQ ID NO: 27473 - DNA, 60 bp, Artificial
  Synthetic oligonucleotide
cagtcatcaaccccattgctgagtctaatggcatcagatgggagaatggcccagaaattt

SEQ ID NO: 27474 - DNA, 60 bp, Artificial
  Synthetic oligonucleotide
caaccccattgctgagtctaatggcatcagatgggagaatggcccagaaatttatctggc

SEQ ID NO: 27475 - DNA, 60 bp, Artificial
  Synthetic oligonucleotide
cgcatctcaggataccttgccagatgggtcctagagcaatacagagaaaatgaagatgag

SEQ ID NO: 27476 - DNA, 60 bp, Artificial
  Synthetic oligonucleotide
ctcaggataccttgccagatgggtcctagagcaatacagagaaaatgaagatgagtccca

SEQ ID NO: 27477 - DNA, 60 bp, Artificial
  Synthetic oligonucleotide
cttgttgcttctggaaagaattgactagagtgttatgtcggatttggttttttatgatgt

SEQ ID NO: 27478 - DNA, 60 bp, Artificial
  Synthetic oligonucleotide
gacttctagacagccatgcaatccagagctgtcatcctgaagcacaagtctggttcaagc

SEQ ID NO: 27479 - DNA, 60 bp, Artificial
  Synthetic oligonucleotide
agacttctagacagccatgcaatccagagctgtcatcttgaagtatagatctggttcagg

SEQ ID NO: 27480 - DNA, 60 bp, Artificial
  Synthetic oligonucleotide
ccctgacaaggttcagcacaatcatcatcttcacatctttcttccagtccctgccctttg

SEQ ID NO: 27481 - DNA, 56 bp, Artificial
  Synthetic oligonucleotide
tggtaagcaaactcattcacccatgcattgatggtcccagaatctgcagactcatc

SEQ ID NO: 27482 - DNA, 60 bp, Artificial
  Synthetic oligonucleotide
catggattaactgcttttgatctcccaggaaatgacatcctcggagacatatgtgtggtt

SEQ ID NO: 27483 - DNA, 60 bp, Artificial
  Synthetic oligonucleotide
aaagaagacatgagagtgacaaagtggctgcctagtcccccccactacccacccttatga

SEQ ID NO: 27484 - DNA, 59 bp, Artificial
  Synthetic oligonucleotide
tggtaagcaaactcattcacccatgcattgatggtcccagaatctgcagactcatcaag

SEQ ID NO: 27485 - DNA, 60 bp, Artificial
  Synthetic oligonucleotide
aggataatttaaggaagtcattggcagcttatgaaccaaagcaaggatgttatcgaacat

SEQ ID NO: 27486 - DNA, 60 bp, Artificial
  Synthetic oligonucleotide
ggaatgagcaccctccaagaattacaagaaaatatcacagcacacgaacaacagctcgtg

SEQ ID NO: 27487 - DNA, 60 bp, Artificial
  Synthetic oligonucleotide
aagaaagagaagttgggtattaagaacttctctacttatgaacaggtttgcaaggtagcc

SEQ ID NO: 27488 - DNA, 60 bp, Artificial
  Synthetic oligonucleotide
ggtgaagggttgcacctggagtgatgggtatgcaatgtacctaggatttgcccctggtgc

SEQ ID NO: 27489 - DNA, 60 bp, Artificial
  Synthetic oligonucleotide
ttgcttctatttctaagtgcaccatgtctatgtggtgcacacctttgttcagctgcatgg

SEQ ID NO: 27490 - DNA, 51 bp, Artificial
  Synthetic oligonucleotide
aaaatctgccttttaccagtcctatctccgcagaacacaatcaatgggaat

SEQ ID NO: 27491 - DNA, 60 bp, Artificial
  Synthetic oligonucleotide
ctggtcgagctggattcccattgattgtgttctgcggagatatgattggtaaaaggctga

SEQ ID NO: 27492 - DNA, 60 bp, Artificial
  Synthetic oligonucleotide
agcctcagatatggaaatgtccttgatgtgaatgcaatcgatattgatgagcccagtgga

SEQ ID NO: 27493 - DNA, 60 bp, Artificial
  Synthetic oligonucleotide
cctggaaacaggaacaacccaattggtaacaacgatcttaccatccaccggctttctgga

SEQ ID NO: 27494 - DNA, 60 bp, Artificial
  Synthetic oligonucleotide
ttcctggaaacaggaacaacccaattggtaacaacgatcttaccatccaccggctttctg

SEQ ID NO: 27495 - DNA, 60 bp, Artificial
  Synthetic oligonucleotide
cctggaaacaggaacaacccaattggtaacaacgatcttaccttgcaccggatttcagga

SEQ ID NO: 27496 - DNA, 60 bp, Artificial
  Synthetic oligonucleotide
tacctccctttaactacctcatttgctttttccttgattgtctttttagggagcatacta

SEQ ID NO: 27497 - DNA, 60 bp, Artificial
  Synthetic oligonucleotide
gttttaccacaaaaaacatacttaccacttttacaagcagcaaagatctgcttcctgcac

SEQ ID NO: 27498 - DNA, 60 bp, Artificial
  Synthetic oligonucleotide
gtaagacatatgtatgttacttattaatgcctatatttattccaatagcatatatttacg

SEQ ID NO: 27499 - DNA, 60 bp, Artificial
  Synthetic oligonucleotide
aagcttatcaattgaggcaccatggggagcaataaatgtccaatcaactttcaaacctac

SEQ ID NO: 27500 - DNA, 60 bp, Artificial
  Synthetic oligonucleotide
gcttatcaattgaggcaccatggggagcaataaatgtccagtcaacctttaaaccaacag

SEQ ID NO: 27501 - DNA, 60 bp, Artificial
  Synthetic oligonucleotide
caaagatgctgtcaaatgaaagatagtgccaaaaccttggtgagcgactgctttctcgag

SEQ ID NO: 27502 - DNA, 60 bp, Artificial
  Synthetic oligonucleotide
tcagtcaacctacaaaccaactgtgtcaactgcaaacatagcactcagttggagctctgt

SEQ ID NO: 27503 - DNA, 60 bp, Artificial
  Synthetic oligonucleotide
gcctggggtaaagaggcagtggataacttccaccttggagatgacatggatcctgagttg

SEQ ID NO: 27504 - DNA, 58 bp, Artificial
  Synthetic oligonucleotide
gaaatggacttgtggacaccttcacaaactcctattccttttgcgagagtgttcccaa

SEQ ID NO: 27505 - DNA, 60 bp, Artificial
  Synthetic oligonucleotide
gcaagagctctataggaattcttctgcacttcgtgcacagggtgcacagattgacactgc

SEQ ID NO: 27506 - DNA, 60 bp, Artificial
  Synthetic oligonucleotide
ctccttgaaaagctactacgagaaagtctggaatgagtgacttgacagatatccaagagg

SEQ ID NO: 27507 - DNA, 60 bp, Artificial
  Synthetic oligonucleotide
gtatataatacgaattttcctggcaaccggaacaacccaagtcctgacgatggtcttacc

SEQ ID NO: 27508 - DNA, 60 bp, Artificial
  Synthetic oligonucleotide
ccctgcaccgtctgtcaggatacctagctcgctgggcctttacccagatgcggtcaccaa

SEQ ID NO: 27509 - DNA, 60 bp, Artificial
  Synthetic oligonucleotide
cctgcaccgtctgtcaggatacctagctcgctgggcctttacccagatgcggtcaccaat

SEQ ID NO: 27510 - DNA, 60 bp, Artificial
  Synthetic oligonucleotide
ttgtaatcagggtcatgtatgggtgggtgctaagtttacaatttatccagttattataag

SEQ ID NO: 27511 - DNA, 60 bp, Artificial
  Synthetic oligonucleotide
tattgaaagtagtatttatgttactcagggtgggtttgtaatcagggtcatgtatgggtg

SEQ ID NO: 27512 - DNA, 60 bp, Artificial
  Synthetic oligonucleotide
tcagactgcccattcctgcctaaagtccaaggtgcaggtgaaaagttgttgcagactata

SEQ ID NO: 27513 - DNA, 60 bp, Artificial
  Synthetic oligonucleotide
caatgtgatcataccatctagatcctagatgtgaagttgtcaacctgtgtggtctggtgt

SEQ ID NO: 27514 - DNA, 60 bp, Artificial
  Synthetic oligonucleotide
aatataatagtagtcgtaaagttagtgtaacatatactgttttgtgtttattgaatgtag

SEQ ID NO: 27515 - DNA, 60 bp, Artificial
  Synthetic oligonucleotide
ggtctggtgtttttatgttagctagtatatcgtaattatgtaaatagccaaatataatag

SEQ ID NO: 27516 - DNA, 60 bp, Artificial
  Synthetic oligonucleotide
gtagtgagtatactagtgttattgtgtattaaatcagttattgttgggtgggcacacggg

SEQ ID NO: 27517 - DNA, 60 bp, Artificial
  Synthetic oligonucleotide
ttgaatgtagtgagtatactagtgttattgtgtattaaatcagttattgttgggtgggca

SEQ ID NO: 27518 - DNA, 60 bp, Artificial
  Synthetic oligonucleotide
tcgtgtgttatcctgtattgaaagtagtatttatgttactcagggtgggtttgtaatcag

SEQ ID NO: 27519 - DNA, 52 bp, Artificial
  Synthetic oligonucleotide
tgggtgggcacacgggttaagttgcactacgggtgggattattaatcagggt

SEQ ID NO: 27520 - DNA, 60 bp, Artificial
  Synthetic oligonucleotide
gacaaggataaggtttaaagatgatacatcttatgaagaggtaaatggaatcaggaaacc

SEQ ID NO: 27521 - DNA, 60 bp, Artificial
  Synthetic oligonucleotide
gctctgtatatgctatcaactagagggagacaaactgtacaggaaaataaagggacaagg

SEQ ID NO: 27522 - DNA, 60 bp, Artificial
  Synthetic oligonucleotide
tgaaagctctgtatatgctatcaactagagggagacaaactgtacaggaaaataaaggga

SEQ ID NO: 27523 - DNA, 60 bp, Artificial
  Synthetic oligonucleotide
ctgatgagataacacctggaaggttcagaacaatcacgtgtggtttatttcctgcacaag

SEQ ID NO: 27524 - DNA, 60 bp, Artificial
  Synthetic oligonucleotide
aatccacaatgaaagctgatgagataacacctggaaggttcagaacaatcacgtgtggtt

SEQ ID NO: 27525 - DNA, 60 bp, Artificial
  Synthetic oligonucleotide
ggaaaccaaaacatctctatgtgtcactgcctacagcacaatccacaatgaaagctgatg

SEQ ID NO: 27526 - DNA, 60 bp, Artificial
  Synthetic oligonucleotide
aaatggaatcaggaaaccaaaacatctctatgtgtcactgcctacagcacaatccacaat

SEQ ID NO: 27527 - DNA, 53 bp, Artificial
  Synthetic oligonucleotide
agtcatgggggtgattgggtttagcttttttgtgaaagattggacggaaaaaa

SEQ ID NO: 27528 - DNA, 60 bp, Artificial
  Synthetic oligonucleotide
acgtgtggtttatttcctgcacaagtcaaagcaaggaatatcatcagcccagtcatgggg

SEQ ID NO: 27529 - DNA, 60 bp, Artificial
  Synthetic oligonucleotide
ctgcccattcctgcctaaagtccaaggtgcaggtgaaaagttgttgcagactataagagc

SEQ ID NO: 27530 - DNA, 60 bp, Artificial
  Synthetic oligonucleotide
gcattttatcaatcatatctaagaaggacacaatcaatgggaattcaactggatcaaagg

SEQ ID NO: 27531 - DNA, 60 bp, Artificial
  Synthetic oligonucleotide
tcaactggatcaaaggatcataattatgtacatgtctcactggggaaaggaaatcgtcaa

SEQ ID NO: 27532 - DNA, 60 bp, Artificial
  Synthetic oligonucleotide
cgtgaaaagctactacgactaaagctgggatgagcaacctcaaagaattacaagacaaca

SEQ ID NO: 27533 - DNA, 60 bp, Artificial
  Synthetic oligonucleotide
ctgcattggagaccaagctcggagagctcaagagacaactggcagattttgttacctctc

SEQ ID NO: 27534 - DNA, 60 bp, Artificial
  Synthetic oligonucleotide
cttgtttagtgacataacatctcctcattcagtttgggtcttctcatgtgcccctgatcg

SEQ ID NO: 27535 - DNA, 60 bp, Artificial
  Synthetic oligonucleotide
aacatctcctcattcagtttgggtcttctcatgtgcccctgatcggtgccctccaactgc

SEQ ID NO: 27536 - DNA, 60 bp, Artificial
  Synthetic oligonucleotide
gttacctctcagaaactggcttctaaacctgtggatccaacagggcttgagcctgatgac

SEQ ID NO: 27537 - DNA, 52 bp, Artificial
  Synthetic oligonucleotide
tctcaggtatgggaatgttctagacgtgaactccattgaccttgaagagccc

SEQ ID NO: 27538 - DNA, 60 bp, Artificial
  Synthetic oligonucleotide
ttggaagtccatcggactttatatcctgagctttaccctaccaattgtcttgaaagctct

SEQ ID NO: 27539 - DNA, 60 bp, Artificial
  Synthetic oligonucleotide
agcttgcacaagctcttgtggatactaaagtcaaggaaatctctaaccaagagctactaa

SEQ ID NO: 27540 - DNA, 60 bp, Artificial
  Synthetic oligonucleotide
cttccttgttctttcactaaccactaacaactaagctacctcatccccaatcccttccct

SEQ ID NO: 27541 - DNA, 60 bp, Artificial
  Synthetic oligonucleotide
ccccaatcccttccctaaaaactacctcagtaaatctacctcagtgattcatgtttcttg

SEQ ID NO: 27542 - DNA, 60 bp, Artificial
  Synthetic oligonucleotide
cagggtcatgtatgggtgggtgctaagtttacaatttatccagttattataagctgctca

SEQ ID NO: 27543 - DNA, 60 bp, Artificial
  Synthetic oligonucleotide
ttattataagctgctcatagtgaaataattatactaacactaatttcccatgctttcttc

SEQ ID NO: 27544 - DNA, 64 bp, Artificial
  Synthetic oligonucleotide
gctgctcatagtgaaataattatactaacactaatttcccatgctttcttccttgttctttcac

SEQ ID NO: 27545 - DNA, 60 bp, Artificial
  Synthetic oligonucleotide
tgctttcttccttgttctttcactaaccactaacaactaagctacctcatccccaatccc

SEQ ID NO: 27546 - DNA, 50 bp, Artificial
  Synthetic oligonucleotide
cccctgatcggtgccctccaactgcattgtatgtagctggtcttcctgaa

SEQ ID NO: 27547 - DNA, 60 bp, Artificial
  Synthetic oligonucleotide
aaatctgcattttatcaatcatatctaagaaggacacaatcaatgggaattcaactggat

SEQ ID NO: 27548 - DNA, 60 bp, Artificial
  Synthetic oligonucleotide
tagtagtagacttcgtgaaaagctactacgactaaagctgggatgagcaacctcaaagaa

SEQ ID NO: 27549 - DNA, 60 bp, Artificial
  Synthetic oligonucleotide
atcagttctgttaagcctatggtgtacaccttccaaggcatggcaagtgacctctctaga

SEQ ID NO: 27550 - DNA, 60 bp, Artificial
  Synthetic oligonucleotide
tcagaacagtgattagatcttatagagcaagtgacccttctgctaccccaccccagatcc

SEQ ID NO: 27551 - DNA, 60 bp, Artificial
  Synthetic oligonucleotide
ggagagttaccagcttcttggggcccagcatgctacatcagttctgttaagcctatggtg

SEQ ID NO: 27552 - DNA, 60 bp, Artificial
  Synthetic oligonucleotide
cctatggtgtacaccttccaaggcatggcaagtgacctctctagatttgatcttacaagc

SEQ ID NO: 27553 - DNA, 60 bp, Artificial
  Synthetic oligonucleotide
gtgtggtgcctactactcacaatggagctaatagtctgggctgctagtgctgaagttgtt

SEQ ID NO: 27554 - DNA, 60 bp, Artificial
  Synthetic oligonucleotide
ggggtcattcaggttccaaatttgtgtgctgccataacgctaaatgctcagcaacagggc

SEQ ID NO: 27555 - DNA, 60 bp, Artificial
  Synthetic oligonucleotide
gtcgtaggtaaagggggtcattcaggttccaaatttgtgtgctgccataacgctaaatgc

SEQ ID NO: 27556 - DNA, 60 bp, Artificial
  Synthetic oligonucleotide
ctacacctacaggcgggagctacaaaatcctgctaatgagcatgagagaatccccttcca

SEQ ID NO: 27557 - DNA, 60 bp, Artificial
  Synthetic oligonucleotide
tccccttccacttacaaattgaacgacaagtcattcatgctgaaatacaacatttaggac

SEQ ID NO: 27558 - DNA, 60 bp, Artificial
  Synthetic oligonucleotide
ttaggacattggatggatgctacattcaaccttaaaacagcatttcactgttacggatca

SEQ ID NO: 27559 - DNA, 64 bp, Artificial
  Synthetic oligonucleotide
gaccatattaatgttattgtcaatagggacttatcattccaagacttaagtgagaatccatgtc

SEQ ID NO: 27560 - DNA, 60 bp, Artificial
  Synthetic oligonucleotide
agtgaaccgcatattactgctaactctttagaatgggtagacccagatagttctttaaaa

SEQ ID NO: 27561 - DNA, 60 bp, Artificial
  Synthetic oligonucleotide
aacgtttatgactgcaattaaggcatgtgactctgcaatgtgttatggttcgactacagc

SEQ ID NO: 27562 - DNA, 60 bp, Artificial
  Synthetic oligonucleotide
ctgacttggaattagacttttcactaccttcatcatcaagctacacctacaggcgggagc

SEQ ID NO: 27563 - DNA, 60 bp, Artificial
  Synthetic oligonucleotide
cggagcctggggttcaggtgttggattcaatttagcttgccaagttagtctgacagagtg

SEQ ID NO: 27564 - DNA, 60 bp, Artificial
  Synthetic oligonucleotide
atccatgtcaaatagatcttagcacatcttcaattgacggagcctggggttcaggtgttg

SEQ ID NO: 27565 - DNA, 60 bp, Artificial
  Synthetic oligonucleotide
ccaatgcggactgacttggaattagacttttcactaccttcatcatcaagctacacctac

SEQ ID NO: 27566 - DNA, 60 bp, Artificial
  Synthetic oligonucleotide
cagcgctcttcgtgtggttgggaaaattaccggtaaggcaccatctacagaatcttctga

SEQ ID NO: 27567 - DNA, 60 bp, Artificial
  Synthetic oligonucleotide
caagaaaagttgtcctaaaggctcatgcccatactgcttaaatcccacagaagcaactga

SEQ ID NO: 27568 - DNA, 60 bp, Artificial
  Synthetic oligonucleotide
taagcaggaatatcaacggacaatgggctctatggtatgtgaagtctgccaacatgagtg

SEQ ID NO: 27569 - DNA, 60 bp, Artificial
  Synthetic oligonucleotide
ttgctcacatatgcttgctctaaatacaatactgattccaaatttaaactaatcattgag

SEQ ID NO: 27570 - DNA, 60 bp, Artificial
  Synthetic oligonucleotide
tatatgttcccacacttgatgattacaggtctgcagaggtgctctcgagaatggcctttg

SEQ ID NO: 27571 - DNA, 60 bp, Artificial
  Synthetic oligonucleotide
aagcaactgaatcagcccttcaagcacacttcaaaatatgcaaactgacaacccgattcc

SEQ ID NO: 27572 - DNA, 60 bp, Artificial
  Synthetic oligonucleotide
tatgctttaaccctatccatactatggcattatcacagcctagccacacttatgacattg

SEQ ID NO: 27573 - DNA, 60 bp, Artificial
  Synthetic oligonucleotide
gaaaacctagtccaaaaaacagggtgtaccaacaattttcaaggttattatgtctgtttg

SEQ ID NO: 27574 - DNA, 60 bp, Artificial
  Synthetic oligonucleotide
aagagggtgctatagggcattatcaatgtttagatacagaagtcgctgttttgtaggatt

SEQ ID NO: 27575 - DNA, 60 bp, Artificial
  Synthetic oligonucleotide
tgcctgaccacaaaaagttgccttctcgggcttggggatcataggattcaagttaattat

SEQ ID NO: 27576 - DNA, 60 bp, Artificial
  Synthetic oligonucleotide
accaaacatcatgtcaaccaacagtctatctcattgcccccattcaaacctgcctgacca

SEQ ID NO: 27577 - DNA, 60 bp, Artificial
  Synthetic oligonucleotide
agttaattatgaaaaaacatactgtgtatctggacagttagtcgaaggagtatgctttaa

SEQ ID NO: 27578 - DNA, 60 bp, Artificial
  Synthetic oligonucleotide
acccgattcccggaaaatcttagggaatcattaactacatacgagccaaaaagagggtgc

SEQ ID NO: 27579 - DNA, 60 bp, Artificial
  Synthetic oligonucleotide
catttgcaacaactcctgtctgtgagtatgatggaaacacactatctggatataaaaaaa

SEQ ID NO: 27580 - DNA, 60 bp, Artificial
  Synthetic oligonucleotide
tgtcagcttggggaccctggtgatattatgagtaccccacaagggatgaagtgtcccgac

SEQ ID NO: 27581 - DNA, 60 bp, Artificial
  Synthetic oligonucleotide
ggagaatggctgttaggtatactcagtggaaactggatggttgttgctgttttagttgtc

SEQ ID NO: 27582 - DNA, 60 bp, Artificial
  Synthetic oligonucleotide
aattgggactatttctaaatttcaaccctctgatacattgctgtttttaggcccattaga

SEQ ID NO: 27583 - DNA, 60 bp, Artificial
  Synthetic oligonucleotide
tgcattaaaatatacaagaaaaatttgcatacagttaggccgtgaacagtcctgtaaaac

SEQ ID NO: 27584 - DNA, 60 bp, Artificial
  Synthetic oligonucleotide
ttagttatagaaaaaaaacactaactttactgctaactaacccccataccgattatgcct

SEQ ID NO: 27585 - DNA, 60 bp, Artificial
  Synthetic oligonucleotide
gttggggctgtaatccaccagactgcccaggtgtcggtacgggttgtactgcatgtggtg

SEQ ID NO: 27586 - DNA, 60 bp, Artificial
  Synthetic oligonucleotide
ccatggcaaactgctggttgctttgtagagagagattttgaatatgaaacaagttggggc

SEQ ID NO: 27587 - DNA, 60 bp, Artificial
  Synthetic oligonucleotide
gaggggcagagcaacagatcaaatttgtgtgtcagcgagttgatttagatatcactgtgt

SEQ ID NO: 27588 - DNA, 60 bp, Artificial
  Synthetic oligonucleotide
catgctctgcaaagtatatatagttaagcacctaactcaataactataaatataagacat

SEQ ID NO: 27589 - DNA, 60 bp, Artificial
  Synthetic oligonucleotide
tctgacagagtgttcaacgtttatgactgcaattaaggcatgtgactctgcaatgtgtta

SEQ ID NO: 27590 - DNA, 60 bp, Artificial
  Synthetic oligonucleotide
atggcctttgcacctcatggagaggatcatgatattgaaaggaattccatcagcgctctt

SEQ ID NO: 27591 - DNA, 60 bp, Artificial
  Synthetic oligonucleotide
aggggcttatgtgtcattcctactcttgtcttagaaacagcatcacgaacacggaaaaca

SEQ ID NO: 27592 - DNA, 60 bp, Artificial
  Synthetic oligonucleotide
cacggaaaacaatcacttgctttgacctatcatgtaaccaaacatcatgtcaaccaacag

SEQ ID NO: 27593 - DNA, 60 bp, Artificial
  Synthetic oligonucleotide
gtccaaggggttgcctttgcaggtactcccttctacacatcaacagggatcttgactgca

SEQ ID NO: 27594 - DNA, 60 bp, Artificial
  Synthetic oligonucleotide
cagggatcttgactgcaaaagatgatccaatatacgtctttgccccagggatcatcatgg

SEQ ID NO: 27595 - DNA, 60 bp, Artificial
  Synthetic oligonucleotide
tttaatattagttcaccaacttgtttagtgaatagagtacaacgatttagaggggcagag

SEQ ID NO: 27596 - DNA, 60 bp, Artificial
  Synthetic oligonucleotide
agtacaacgatttagaggggcagagcaacagatcaaatttgtgtgtcagcgagttgattt

SEQ ID NO: 27597 - DNA, 58 bp, Artificial
  Synthetic oligonucleotide
aaaatgagtagagtttatctgtatctgctcttcttgggcctactactactgactactg

SEQ ID NO: 27598 - DNA, 60 bp, Artificial
  Synthetic oligonucleotide
ggaaacgcttaagctagaaagctcctgcaatttcgatctgcacacaagcacatctgccca

SEQ ID NO: 27599 - DNA, 60 bp, Artificial
  Synthetic oligonucleotide
gctgaaataaacttaaggggcttatgtgtcattcctactcttgtcttagaaacagcatca

SEQ ID NO: 27600 - DNA, 52 bp, Artificial
  Synthetic oligonucleotide
acatacaattggattgggtcagggactggtaatcggttctgtcgagctaccg

SEQ ID NO: 27601 - DNA, 60 bp, Artificial
  Synthetic oligonucleotide
gaggtcctctgcctctcttgtctagcataacaggtctggcaccaattatattccctctgg

SEQ ID NO: 27602 - DNA, 60 bp, Artificial
  Synthetic oligonucleotide
aggtcctctacctctcttgtctagcataacaggtctggcaccaattatattccctctggc

SEQ ID NO: 27603 - DNA, 60 bp, Artificial
  Synthetic oligonucleotide
ggtcctctgcctctcttgtctagcataacaggtctggcaccaattatattccctctggct

SEQ ID NO: 27604 - DNA, 60 bp, Artificial
  Synthetic oligonucleotide
ctgctaacaccagcagtacttttgacccagaggtcgcatatgctaactttaagcgtatcc

SEQ ID NO: 27605 - DNA, 60 bp, Artificial
  Synthetic oligonucleotide
cgctgctaacaccagcagtacttttgacccagaggtcgcatacgctaactttaagcgtgt

SEQ ID NO: 27606 - DNA, 60 bp, Artificial
  Synthetic oligonucleotide
ctgctaacaccagcagtacttttgacccagaggtcgcatacgctaactttaagcgtgtcc

SEQ ID NO: 27607 - DNA, 60 bp, Artificial
  Synthetic oligonucleotide
gtgtcaactgcaaacatagcacttagttggagctcagtggaacacagaggtaataagatc

SEQ ID NO: 27608 - DNA, 60 bp, Artificial
  Synthetic oligonucleotide
tagacagcaccccagttaaatgcaggcagggttattgcctaaaaatcactcaggaaggaa

SEQ ID NO: 27609 - DNA, 60 bp, Artificial
  Synthetic oligonucleotide
ccagcaggctgctctcaagtggaggaaggacataggcttccgtgtcaatgcaaatacggc

SEQ ID NO: 27610 - DNA, 60 bp, Artificial
  Synthetic oligonucleotide
gcgtcttagaagaaacagcagaaagacatatgctttgggaactcgatctgatgaactcac

SEQ ID NO: 27611 - DNA, 60 bp, Artificial
  Synthetic oligonucleotide
agaagaaacagcagaaagacatatgctttgggaactcgatctgatgaactcactttgctc

SEQ ID NO: 27612 - DNA, 60 bp, Artificial
  Synthetic oligonucleotide
gcgatcgagcctcagatatggaaatgtccttgatgtaaatgccattgatatagaagaacc

SEQ ID NO: 27613 - DNA, 60 bp, Artificial
  Synthetic oligonucleotide
gctgctaacaccagcagtacttttgacccagaggttgcatacattaactttaagcgtgtc

SEQ ID NO: 27614 - DNA, 60 bp, Artificial
  Synthetic oligonucleotide
ctgctaacaccagcagtacttttgacccagaggttgcatacattaactttaagcgtctct

SEQ ID NO: 27615 - DNA, 56 bp, Artificial
  Synthetic oligonucleotide
atagaaggaatacttggttgatatgggagatttggttttttatgatgtcgcatcca

SEQ ID NO: 27616 - DNA, 60 bp, Artificial
  Synthetic oligonucleotide
gacatcaaaccaagcctgaccatgttgatacagacattgttccctgacaaatttgaagac

SEQ ID NO: 27617 - DNA, 60 bp, Artificial
  Synthetic oligonucleotide
ctgatgggatgttaagggaccatattaacattctggttacaaaggatattgactttgata

SEQ ID NO: 27618 - DNA, 60 bp, Artificial
  Synthetic oligonucleotide
actgtagttacaatatatgcccttattgtgcatcaagattgacctccgatgggctagcca

SEQ ID NO: 27619 - DNA, 60 bp, Artificial
  Synthetic oligonucleotide
ttatcgattgaggcaccatggggagcaataaatgttcagtcaacctacaaaccaactgtg

SEQ ID NO: 27620 - DNA, 60 bp, Artificial
  Synthetic oligonucleotide
actggctgaggtgaagggttgcacttggagtgacgggtatgcaatgtacctgggatttgc

SEQ ID NO: 27621 - DNA, 60 bp, Artificial
  Synthetic oligonucleotide
gattatcagcaagcaataacagacatttgtcaattttctgagtatacaccaaacaaggag

SEQ ID NO: 27622 - DNA, 60 bp, Artificial
  Synthetic oligonucleotide
tgggctaaatctggattctctcctgctgctagaactttcttgcagcaatttggtatcaac

SEQ ID NO: 27623 - DNA, 60 bp, Artificial
  Synthetic oligonucleotide
cctggacccaagatcactaatctgaagaccatcaattgcataaacttaaaggcatcagtc

SEQ ID NO: 27624 - DNA, 60 bp, Artificial
  Synthetic oligonucleotide
gctacttgtgctacttacagtttcattgtcaccagtacaatcagcacctatcggccatgg

SEQ ID NO: 27625 - DNA, 60 bp, Artificial
  Synthetic oligonucleotide
ctggctgaggtaaagggttgcacttggagtgacgggtatgcaatgtacctagggtttgcc

SEQ ID NO: 27626 - DNA, 60 bp, Artificial
  Synthetic oligonucleotide
ggtgaagggttgcacttggagtgacgggtatgcaatgtacctagggtttgcccctggtgc

SEQ ID NO: 27627 - DNA, 60 bp, Artificial
  Synthetic oligonucleotide
ggttgcacttggagtgacgggtatgcaatgtacctagggtttgcccctggtgctgagatg

SEQ ID NO: 27628 - DNA, 60 bp, Artificial
  Synthetic oligonucleotide
gagacagctggcagatcttgttgcagctcaaaaactggctgcaaaacctgttgatccaac

SEQ ID NO: 27629 - DNA, 60 bp, Artificial
  Synthetic oligonucleotide
gagacaactggcagatcttgttgcagctcagaaactggctgcaaaacctgttgatccaac

SEQ ID NO: 27630 - DNA, 60 bp, Artificial
  Synthetic oligonucleotide
agcgaacggtggaagtggacccagatgacgttaacaaaagcacattacagagcagacggg

SEQ ID NO: 27631 - DNA, 60 bp, Artificial
  Synthetic oligonucleotide
aacgaacaatggaagtggaccccgatgatgttaacaaaagcacattacagagcagacggg

SEQ ID NO: 27632 - DNA, 60 bp, Artificial
  Synthetic oligonucleotide
gtcttagatatggaaatgtccttgatgtgaatgctatagatattgatgaaccaagtggac

SEQ ID NO: 27633 - DNA, 60 bp, Artificial
  Synthetic oligonucleotide
ccttagatatggaaatgtccttgatgtgaatgctattgacattgaagaaccaagtggcca

SEQ ID NO: 27634 - DNA, 60 bp, Artificial
  Synthetic oligonucleotide
tatataagtgtacgattctactacctcagacagttgctttcttgattgcttttcaaggag

SEQ ID NO: 27635 - DNA, 58 bp, Artificial
  Synthetic oligonucleotide
tatataagtgtacgattctactacctcagacagttgctttcttgattgcttttcaagg

SEQ ID NO: 27636 - DNA, 60 bp, Artificial
  Synthetic oligonucleotide
agtcttatctcaggagaacacaatcaatgggaatacaactggaccagaggataattgtgc

SEQ ID NO: 27637 - DNA, 60 bp, Artificial
  Synthetic oligonucleotide
tcatctctgattaaacatctctacctccgtacacttatatatatgcacgtagcatatata

SEQ ID NO: 27638 - DNA, 60 bp, Artificial
  Synthetic oligonucleotide
tttcaacggtgtttccaagatggagctatagtgaagcaaaacccatctaaggaagcagtg

SEQ ID NO: 27639 - DNA, 59 bp, Artificial
  Synthetic oligonucleotide
acctaactacctcattagcttgctccttgattgtctttttagggagcatactactacta

SEQ ID NO: 27640 - DNA, 60 bp, Artificial
  Synthetic oligonucleotide
tgaaactgtaggcactttcgcctgggccagaactggattctccccagcagcaagagactt

SEQ ID NO: 27641 - DNA, 54 bp, Artificial
  Synthetic oligonucleotide
ataactcgccatgaacaacaacttgttgttgccagacaaaaacttaaggatgca

SEQ ID NO: 27642 - DNA, 58 bp, Artificial
  Synthetic oligonucleotide
ttctcaatcctgcaggacatgcgaaatacaatcatggcatcaaagtctgtcggaacag

SEQ ID NO: 27643 - DNA, 60 bp, Artificial
  Synthetic oligonucleotide
catttttctcaatcctgcaggacatgcgaaatacaatcatggcatcaaagtctgtcggaa

SEQ ID NO: 27644 - DNA, 60 bp, Artificial
  Synthetic oligonucleotide
actgcatatgctggtatgagcaacctccaagaagtacaagaaggtatcacactccatgaa

SEQ ID NO: 27645 - DNA, 60 bp, Artificial
  Synthetic oligonucleotide
gagtcaaagtcagccacattattcaatgatattgcagtccctcattctgtgtgggttttt

SEQ ID NO: 27646 - DNA, 57 bp, Artificial
  Synthetic oligonucleotide
gtgggttttttcatgtgctcctgatagatgccccccaactgcactttatgttgcagg

SEQ ID NO: 27647 - DNA, 56 bp, Artificial
  Synthetic oligonucleotide
catcagtccagtgatgggggtgattgggtttgggttctttgtaaaggactggatgg

SEQ ID NO: 27648 - DNA, 60 bp, Artificial
  Synthetic oligonucleotide
ttagcagctgaatgcccattcctcccaaaaccaaaggcccaatcagaatctttcatgggg

SEQ ID NO: 27649 - DNA, 60 bp, Artificial
  Synthetic oligonucleotide
aacatctgtatgtctccatgccaacagctcagtctaccatgaaggcagatgagatcacac

SEQ ID NO: 27650 - DNA, 60 bp, Artificial
  Synthetic oligonucleotide
ctccatgccaacagctcagtctaccatgaaggcagatgagatcacaccagggaggtttcg

SEQ ID NO: 27651 - DNA, 60 bp, Artificial
  Synthetic oligonucleotide
tcctgcttaagctttgcaatactaacactaactcaacacattcctacctcatcccaatac

SEQ ID NO: 27652 - DNA, 60 bp, Artificial
  Synthetic oligonucleotide
acacattcctacctcatcccaatacccttcccttttattctacctcatttattctacctt

SEQ ID NO: 27653 - DNA, 60 bp, Artificial
  Synthetic oligonucleotide
gcccattcctcccaaaaccaaaggcccaatcagaatctttcatggggactaacagggctt

SEQ ID NO: 27654 - DNA, 60 bp, Artificial
  Synthetic oligonucleotide
tttcatggggactaacagggcttattttatcaaccgtcagaggcaagtggatgaatcaaa

SEQ ID NO: 27655 - DNA, 60 bp, Artificial
  Synthetic oligonucleotide
ctcatcttttgaggaaataaatgggattaggaaaccgaaacatctgtatgtctccatgcc

SEQ ID NO: 27656 - DNA, 60 bp, Artificial
  Synthetic oligonucleotide
gattgatcaaggactaatgaatgtaatcaggatgcatagttgtttaaatcatagatccat

SEQ ID NO: 27657 - DNA, 60 bp, Artificial
  Synthetic oligonucleotide
gcactaatcaatgtgatagagttaaggtagttagaatgtgaagggtggtggggggtgaca

SEQ ID NO: 27658 - DNA, 60 bp, Artificial
  Synthetic oligonucleotide
agatgggtttccgggcttgtgccaacagttattcatctctggactattctgcactaatca

SEQ ID NO: 27659 - DNA, 51 bp, Artificial
  Synthetic oligonucleotide
agatcatcatattatacatgctcttttggggtaaagaagctgtaaaccact

SEQ ID NO: 27660 - DNA, 60 bp, Artificial
  Synthetic oligonucleotide
catattacgtaattgcactataaattgtgatagccataataagtaaattacactacataa

SEQ ID NO: 27661 - DNA, 60 bp, Artificial
  Synthetic oligonucleotide
gggggtgacattacaagggtgggattgtttactcacatgggttctagggccatattacgt

SEQ ID NO: 27662 - DNA, 60 bp, Artificial
  Synthetic oligonucleotide
gagaaatcagctctgcgatatgggaatgttctggatgtgaactctatagatcttgaagag

SEQ ID NO: 27663 - DNA, 60 bp, Artificial
  Synthetic oligonucleotide
ggatgtaaatttcattcctgcttaagctttgcaatactaacactaactcaacacattcct

SEQ ID NO: 27664 - DNA, 60 bp, Artificial
  Synthetic oligonucleotide
gcgatatgggaatgttctggatgtgaactctatagatcttgaagagcctagtggtcagac

SEQ ID NO: 27665 - DNA, 60 bp, Artificial
  Synthetic oligonucleotide
atattttaggatttgtcataccgattgtcctgaaagccttatacatgctttcaacaaggg

SEQ ID NO: 27666 - DNA, 60 bp, Artificial
  Synthetic oligonucleotide
gagcctagtggtcagactgcagattggaaagcaatcggggcatatattttaggatttgtc

SEQ ID NO: 27667 - DNA, 60 bp, Artificial
  Synthetic oligonucleotide
tcaacaagggggaggcaaactgtcaaagagaacaaagggacaagaataaggttcaaggat

SEQ ID NO: 27668 - DNA, 60 bp, Artificial
  Synthetic oligonucleotide
ctgatagctcactacgagaccatatcaatgtagttgtaggtcgtgatctatctttccagg

SEQ ID NO: 27669 - DNA, 60 bp, Artificial
  Synthetic oligonucleotide
aggatgtactgcatgtggtgtttatttagataagttaaaatcagttgggaaagtatttaa

SEQ ID NO: 27670 - DNA, 60 bp, Artificial
  Synthetic oligonucleotide
atgttcacattgtgctgtccacgtaggcctagctacaggaaagagcataagccatgatca

SEQ ID NO: 27671 - DNA, 60 bp, Artificial
  Synthetic oligonucleotide
ggggatcctggagatattatgagcacacctacaggaatgaaatgtccagaattaaatggt

SEQ ID NO: 27672 - DNA, 60 bp, Artificial
  Synthetic oligonucleotide
caagcacaggcttagttgcagctgcaccacctctagatcgtgttacaggctataatcaag

SEQ ID NO: 27673 - DNA, 60 bp, Artificial
  Synthetic oligonucleotide
acctgaatgtggtatgtcatgctggtttaaaaaatcaggagaatggatactcggagtgct

SEQ ID NO: 27674 - DNA, 60 bp, Artificial
  Synthetic oligonucleotide
tctttccaggatctcagtgaaacaccctgtcaggtggatttaatgacttcaactatagat

SEQ ID NO: 27675 - DNA, 59 bp, Artificial
  Synthetic oligonucleotide
aaggtcagaatacagttcatatggttggtaagggaggtcactctggttcaaaattcatg

SEQ ID NO: 27676 - DNA, 60 bp, Artificial
  Synthetic oligonucleotide
ttctgggtggactgacacagcacatggatctgggatcataccaatgaaaactgacctgga

SEQ ID NO: 27677 - DNA, 60 bp, Artificial
  Synthetic oligonucleotide
gtgggcttggtctggtgtttattattggttatggagctgattgtgtgggcagccagtgca

SEQ ID NO: 27678 - DNA, 60 bp, Artificial
  Synthetic oligonucleotide
gcatttgcaacgacacctgtatgccaatttgatgggaatacaatttcaggatataaacgg

SEQ ID NO: 27679 - DNA, 60 bp, Artificial
  Synthetic oligonucleotide
acatcaaggtttcaggaaaacttaaggaaatcattaacagtctatgaaccaatgcagggc

SEQ ID NO: 27680 - DNA, 53 bp, Artificial
  Synthetic oligonucleotide
aacagtctatgaaccaatgcagggctgttatcggactttgtcactcttccgat

SEQ ID NO: 27681 - DNA, 60 bp, Artificial
  Synthetic oligonucleotide
accctctgatactttattatttctaggtcctctgcaacaaggtggcttaatctttaaaca

SEQ ID NO: 27682 - DNA, 60 bp, Artificial
  Synthetic oligonucleotide
ccatttcatttgcagataagtaaacaagtgattcatgcagaaattcaacatttaggccat

SEQ ID NO: 27683 - DNA, 60 bp, Artificial
  Synthetic oligonucleotide
ctgtccacgtaggcctagctacaggaaagagcataagccatgatcattaattgctagcac

SEQ ID NO: 27684 - DNA, 60 bp, Artificial
  Synthetic oligonucleotide
ggtggcttaatctttaaacaatggtgcacaacaacatgtcagtttggggatcctggagat

SEQ ID NO: 27685 - DNA, 60 bp, Artificial
  Synthetic oligonucleotide
ccatacaatggccctttctcaaccaagtcatacatatgatgtaatgacattgatggtgcg

SEQ ID NO: 27686 - DNA, 60 bp, Artificial
  Synthetic oligonucleotide
tgaagattgaaaaaaactttgaaactcttgtccaaaaaacaggctgtacaggtaataact

SEQ ID NO: 27687 - DNA, 60 bp, Artificial
  Synthetic oligonucleotide
gaattatgagaagacatattgtgtgtcagggcaacttgttgaaggtgtctgttttaatcc

SEQ ID NO: 27688 - DNA, 60 bp, Artificial
  Synthetic oligonucleotide
gctgtctcttgggtttaggtgatcaaaggattcaagtgaattatgagaagacatattgtg

SEQ ID NO: 27689 - DNA, 60 bp, Artificial
  Synthetic oligonucleotide
atattgtgtgtcagggcaacttgttgaaggtgtctgttttaatcctatccatacaatggc

SEQ ID NO: 27690 - DNA, 60 bp, Artificial
  Synthetic oligonucleotide
gggcaacttgttgaaggtgtctgttttaatcctatccatacaatggccctttctcaacca

SEQ ID NO: 27691 - DNA, 59 bp, Artificial
  Synthetic oligonucleotide
gccatgatcattaattgctaacacaagtcttatactgatgcactaataaaattcttgta

SEQ ID NO: 27692 - DNA, 60 bp, Artificial
  Synthetic oligonucleotide
aatggagtgcccacatactatcggattaggtcaaggcctggttgttggttcagtggaatt

SEQ ID NO: 27693 - DNA, 60 bp, Artificial
  Synthetic oligonucleotide
atatgggaaaacttagtccagtttgtttgtatctacttctccagtgtctactactagggg

SEQ ID NO: 27694 - DNA, 60 bp, Artificial
  Synthetic oligonucleotide
ggattgctggtaaagtggcaggtagggcaccttcaactgaggcctctgatacagtgcaag

SEQ ID NO: 27695 - DNA, 60 bp, Artificial
  Synthetic oligonucleotide
cggaagacaatagcctgctacgatctaacatgcaatcagacagtatgccagcccactgtc

SEQ ID NO: 27696 - DNA, 60 bp, Artificial
  Synthetic oligonucleotide
agctgcaaggactcggaagacaatagcctgctacgatctaacatgcaatcagacagtatg

SEQ ID NO: 27697 - DNA, 60 bp, Artificial
  Synthetic oligonucleotide
agcttgtgattcagctatgtgttatggatcaactactgctaatttggtgagaggtcagaa

SEQ ID NO: 27698 - DNA, 60 bp, Artificial
  Synthetic oligonucleotide
gccaaggaactagagtcacatcggaaaagctgttcaattggatcatgcccatattgcctg

SEQ ID NO: 27699 - DNA, 60 bp, Artificial
  Synthetic oligonucleotide
cccttggcagacagcaggttgtttcattgaaaaggactatgagtatgagactggttgggg

SEQ ID NO: 27700 - DNA, 60 bp, Artificial
  Synthetic oligonucleotide
atcactacatctgttaaggtgtgcatgattgggactatttcaaaatttcaaccctctgat

SEQ ID NO: 27701 - DNA, 60 bp, Artificial
  Synthetic oligonucleotide
aagtatttaagattgtatcccttaaatatactagaaaggtatgcatccaattaggcactg

SEQ ID NO: 27702 - DNA, 60 bp, Artificial
  Synthetic oligonucleotide
gtctgtactgttagcttaacagagtgttcaccatttttaacttccatcaaagcttgtgat

SEQ ID NO: 27703 - DNA, 60 bp, Artificial
  Synthetic oligonucleotide
ggttttgacagccaaagatgaccctgtatatatttgggcaccaggaattatcatggaggg

SEQ ID NO: 27704 - DNA, 60 bp, Artificial
  Synthetic oligonucleotide
gggcaccaggaattatcatggagggtaaccattctagttgtgataaaaagacattgccat

SEQ ID NO: 27705 - DNA, 60 bp, Artificial
  Synthetic oligonucleotide
tatttcaaaatttcaaccctctgatactttattatttctaggtcctctgcaacaaggtgg

SEQ ID NO: 27706 - DNA, 60 bp, Artificial
  Synthetic oligonucleotide
caaagagttgacatggatattattgtatattgtaacggcataaagaaagtaatactaaca

SEQ ID NO: 27707 - DNA, 60 bp, Artificial
  Synthetic oligonucleotide
atcgtgtgcaaaggttccgtggtgcggagcaacagataaagtttgtctgtcaaagagttg

SEQ ID NO: 27708 - DNA, 60 bp, Artificial
  Synthetic oligonucleotide
tggttgggtattaataccatttatcaccatgatactactgaaaatactaattgcatttgc

SEQ ID NO: 27709 - DNA, 60 bp, Artificial
  Synthetic oligonucleotide
actgaggcctctgatacagtgcaaggtattgctttttcaggtagtcctctttatacatct

SEQ ID NO: 27710 - DNA, 60 bp, Artificial
  Synthetic oligonucleotide
gttggggttgcaatccacctgattgccctggggttggtacaggatgtactgcatgtggtg

SEQ ID NO: 27711 - DNA, 60 bp, Artificial
  Synthetic oligonucleotide
gggttattatatctgtcttataggaagtagctctgagccattgtatgtcccaacattgga

SEQ ID NO: 27712 - DNA, 60 bp, Artificial
  Synthetic oligonucleotide
gccattgtatgtcccaacattggatgattaccggtcagctgaggtattatcaaggatggc

SEQ ID NO: 27713 - DNA, 60 bp, Artificial
  Synthetic oligonucleotide
ctgtaagtacaatgaggattgctggtaaagtggcaggtagggcaccttcaactgaggcct

SEQ ID NO: 27714 - DNA, 60 bp, Artificial
  Synthetic oligonucleotide
aacattggatgattaccggtcagctgaggtattatcaaggatggcctttgcccctcacgg

SEQ ID NO: 27715 - DNA, 54 bp, Artificial
  Synthetic oligonucleotide
tttaggccattggatggatgctacatttaatctaaagacagcattccattgcta

SEQ ID NO: 27716 - DNA, 60 bp, Artificial
  Synthetic oligonucleotide
cagtgaaacaccctgtcaggtggatttaatgacttcaactatagatggggcatggggttc

SEQ ID NO: 27717 - DNA, 60 bp, Artificial
  Synthetic oligonucleotide
tggagccaagctggaatgacaatgcacatggtgttggcgttgtcccaatgcatactgacc

SEQ ID NO: 27718 - DNA, 60 bp, Artificial
  Synthetic oligonucleotide
ggcgttgtcccaatgcatactgacctggaacttgatttctctcttccatcaagttctaag

SEQ ID NO: 27719 - DNA, 53 bp, Artificial
  Synthetic oligonucleotide
tctgcctggctattatgaaacagttcacccatgtaatgttttttgtgtgctgt

SEQ ID NO: 27720 - DNA, 60 bp, Artificial
  Synthetic oligonucleotide
tggtattttcaatattacatcccctacttgccttgtgtcaaagcaaaataggttcagagc

SEQ ID NO: 27721 - DNA, 60 bp, Artificial
  Synthetic oligonucleotide
ggtactggctgtactgcatgcgggctatacattgaccagcttaaacctgtaggcagtgca

SEQ ID NO: 27722 - DNA, 60 bp, Artificial
  Synthetic oligonucleotide
atcttttcattgttatggtgcatgtactaagtatgaatacccttggcacacggcaaaatg

SEQ ID NO: 27723 - DNA, 60 bp, Artificial
  Synthetic oligonucleotide
attgttatggtgcatgtactaagtatgaatacccctggcatacagcgaaatgtcactttg

SEQ ID NO: 27724 - DNA, 60 bp, Artificial
  Synthetic oligonucleotide
tgattcctttcaatcatttaacactagttcaattcattatacagatgaaaggattgaatg

SEQ ID NO: 27725 - DNA, 60 bp, Artificial
  Synthetic oligonucleotide
atttaacactagttcaattcattatacagatgaaaggattgagtggaaagacccggatgg

SEQ ID NO: 27726 - DNA, 60 bp, Artificial
  Synthetic oligonucleotide
aaaagcagacaaagcccaagctgccaaggactcatttgaaacaacatcaagtgaggtcaa

SEQ ID NO: 27727 - DNA, 60 bp, Artificial
  Synthetic oligonucleotide
ctggagaaaaaaggcagacaaagcccaagctgccaaggactcatttgagacaacatcaag

SEQ ID NO: 27728 - DNA, 60 bp, Artificial
  Synthetic oligonucleotide
cttgtaattcaacacattgcaagccaacaatgcatatgattgtacctgtgcactcatgca

SEQ ID NO: 27729 - DNA, 60 bp, Artificial
  Synthetic oligonucleotide
gtcttgcaattcaacacattgcaagccaacgatgcatatgattgtacctgtgcactcatg

SEQ ID NO: 27730 - DNA, 60 bp, Artificial
  Synthetic oligonucleotide
cctcatggtgaagaccatgatttatctggagaagaggtggcaacttactcaattgccggg

SEQ ID NO: 27731 - DNA, 55 bp, Artificial
  Synthetic oligonucleotide
ccttatcgaattcaagttgtctacgagagaacctactgtacaactggtatactaa

SEQ ID NO: 27732 - DNA, 60 bp, Artificial
  Synthetic oligonucleotide
ctcatggtgaagaccatgatttatctggagaagaggtggcaacttactcaattgccgggc

SEQ ID NO: 27733 - DNA, 60 bp, Artificial
  Synthetic oligonucleotide
ggatatatagatctgcctggctattatgaaacagttcacccatgtaatgtcttttgtgtg

SEQ ID NO: 27734 - DNA, 60 bp, Artificial
  Synthetic oligonucleotide
ccggacagattgaaggcaaaattccacacactgcaaatgcagcaaacatgctgtttactg

SEQ ID NO: 27735 - DNA, 60 bp, Artificial
  Synthetic oligonucleotide
ccttcattactataaatctcagtcctttagtacgtgggtatttctatatcttgcggagca

SEQ ID NO: 27736 - DNA, 52 bp, Artificial
  Synthetic oligonucleotide
tggggagtggataacaggaattttcaatgggaattggattgtcatagttgtg

SEQ ID NO: 27737 - DNA, 60 bp, Artificial
  Synthetic oligonucleotide
gtttccgggaaaggtgggcatagtggctcttcattcaagtgttgccatggaacagattgc

SEQ ID NO: 27738 - DNA, 60 bp, Artificial
  Synthetic oligonucleotide
gaaggtgcatggggttctggggttggtttcaccctcacttgccaaatctcactgactgaa

SEQ ID NO: 27739 - DNA, 60 bp, Artificial
  Synthetic oligonucleotide
accaccttaatatacttgtcacaaaggatattgacttcgaaaaccttggggagaacccgt

SEQ ID NO: 27740 - DNA, 60 bp, Artificial
  Synthetic oligonucleotide
gctatgatctttcatgcaatcagacacattgccagccaacagtccatttacttgcaccag

SEQ ID NO: 27741 - DNA, 60 bp, Artificial
  Synthetic oligonucleotide
ataccagaagaccatgggttcaatggtgtgtgatatctgtcaccatgaatgtgaaacagt

SEQ ID NO: 27742 - DNA, 60 bp, Artificial
  Synthetic oligonucleotide
aatgcaggtgctacaacgtttgaggcaacatcgaaaagtacaaatctacgtggaacttgt

SEQ ID NO: 27743 - DNA, 60 bp, Artificial
  Synthetic oligonucleotide
gtcactggtcagctagttgaggggcaatgcttcaatcccacccacaccatgactctaact

SEQ ID NO: 27744 - DNA, 60 bp, Artificial
  Synthetic oligonucleotide
gctagttgaggggcaatgcttcaatcccacccacaccatgactctaactcaacctgcaca

SEQ ID NO: 27745 - DNA, 60 bp, Artificial
  Synthetic oligonucleotide
atcgaattcaaatatcatatgagaagactcactgtgtcactggtcagctagttgaggggc

SEQ ID NO: 27746 - DNA, 60 bp, Artificial
  Synthetic oligonucleotide
ggatcctacctgagtcaaatcagagccagtgtgacaagaaaacccttcccttaacatgga

SEQ ID NO: 27747 - DNA, 60 bp, Artificial
  Synthetic oligonucleotide
gtcaaatcagagccagtgtgacaagaaaacccttcccttaacatggactggatacctccc

SEQ ID NO: 27748 - DNA, 60 bp, Artificial
  Synthetic oligonucleotide
ggatgcactgtcttttgcacactggcaggtccaggtgcaagctgtgaggcttattctgag

SEQ ID NO: 27749 - DNA, 60 bp, Artificial
  Synthetic oligonucleotide
ctcaacctgcacatacttatgacactgttacccttcctgtattatgtttcctttcagcaa

SEQ ID NO: 27750 - DNA, 60 bp, Artificial
  Synthetic oligonucleotide
tctatacattcactagtttattctccctcgcacccagtgtggcacattcattggctgtcg

SEQ ID NO: 27751 - DNA, 60 bp, Artificial
  Synthetic oligonucleotide
gttgggcaactgttgcgctagttgtgacattttgttttgggtggcttctgattccagcag

SEQ ID NO: 27752 - DNA, 60 bp, Artificial
  Synthetic oligonucleotide
ccatttacttgcaccagtgattacatgtatgagtatacgaaattgcatggtaagcatcct

SEQ ID NO: 27753 - DNA, 58 bp, Artificial
  Synthetic oligonucleotide
aaaaggttgaacccgagtatgttttcagtcctgggatcctacctgagtcaaatcagag

SEQ ID NO: 27754 - DNA, 60 bp, Artificial
  Synthetic oligonucleotide
cagtctcaaaattgcagcctgctgacacactgctctttcttgggccccttgagcagggcg

SEQ ID NO: 27755 - DNA, 60 bp, Artificial
  Synthetic oligonucleotide
cttgggccccttgagcagggcggtattattctgaagcagtggtgtacaacctcttgtgcc

SEQ ID NO: 27756 - DNA, 60 bp, Artificial
  Synthetic oligonucleotide
aacctcttgtgcctttggtgatcctggcgatattatggctactactgcaggaatgcggtg

SEQ ID NO: 27757 - DNA, 60 bp, Artificial
  Synthetic oligonucleotide
tggtgatcctggcgatattatggctactactgcaggaatgcggtgtccagaacacacagg

SEQ ID NO: 27758 - DNA, 60 bp, Artificial
  Synthetic oligonucleotide
agtgataacccatgtaaggtagaccttcatacacagtctatagagggtgcatggggttct

SEQ ID NO: 27759 - DNA, 60 bp, Artificial
  Synthetic oligonucleotide
gggcagcaagcgcagagactcctcaaactgaagcaggttggtctgatactgctcacggtg

SEQ ID NO: 27760 - DNA, 60 bp, Artificial
  Synthetic oligonucleotide
atagcagggcctataaaggctaaagtcccacagactgaaacaagtgaaactatgcaaggg

SEQ ID NO: 27761 - DNA, 60 bp, Artificial
  Synthetic oligonucleotide
ggggttctggtgtagggtttacattaacttgcaatgttggattaacagaatgcccaagct

SEQ ID NO: 27762 - DNA, 60 bp, Artificial
  Synthetic oligonucleotide
gtgatctggctatgtgttatggatcagctgtagttacactcactaggggttctaacacga

SEQ ID NO: 27763 - DNA, 60 bp, Artificial
  Synthetic oligonucleotide
gaagaaaggctgctacaggactttaggggtcttcaggtataaaagtaggtgttatgtggg

SEQ ID NO: 27764 - DNA, 60 bp, Artificial
  Synthetic oligonucleotide
gcccatattgtatgactttaacagaagccacggaaagtgcattgcaggctcactttgctg

SEQ ID NO: 27765 - DNA, 54 bp, Artificial
  Synthetic oligonucleotide
ggctcactttgctgtctgtaagctaacgggcagatttcaagaggcattaaagaa

SEQ ID NO: 27766 - DNA, 60 bp, Artificial
  Synthetic oligonucleotide
gtgaaacagtcaaggagcttgaaacccacaaaaaaagttgttgtgacgggcagtgcccat

SEQ ID NO: 27767 - DNA, 60 bp, Artificial
  Synthetic oligonucleotide
tattgtaatgggcaaaaaaaggtgattttaaccaagacacttgtaataggacaatgtatc

SEQ ID NO: 27768 - DNA, 60 bp, Artificial
  Synthetic oligonucleotide
tggaagggtggttgttgatcttctgtggagtacttactactatggtgtcagcactcccga

SEQ ID NO: 27769 - DNA, 60 bp, Artificial
  Synthetic oligonucleotide
tttatcgacgctagtaaaaaaggttgaacccgagtatgttttcagtcctgggatcctacc

SEQ ID NO: 27770 - DNA, 60 bp, Artificial
  Synthetic oligonucleotide
gcactcccgaaagcagtctatgagcttaagatggaatgtccacataccgttggtctagga

SEQ ID NO: 27771 - DNA, 60 bp, Artificial
  Synthetic oligonucleotide
gagaggggaagatcatgatccagacaaagctggacaaggcatactaaggatagcagggcc

SEQ ID NO: 27772 - DNA, 51 bp, Artificial
  Synthetic oligonucleotide
atactgctcacggtgtaggtgtgatcccaatgaagacagacctagagcttg

SEQ ID NO: 27773 - DNA, 60 bp, Artificial
  Synthetic oligonucleotide
tctggaagatatcagatcagctgaaattgtaagtagaatcatcatgcacccgagagggga

SEQ ID NO: 27774 - DNA, 60 bp, Artificial
  Synthetic oligonucleotide
tcttatgtttgctttatagggaagaattctgaaccactaattgtcccagctctggaagat

SEQ ID NO: 27775 - DNA, 60 bp, Artificial
  Synthetic oligonucleotide
aggtgttatgtgggtttagtatggggtattcttctaacatttgaaattgttgtctgggca

SEQ ID NO: 27776 - DNA, 60 bp, Artificial
  Synthetic oligonucleotide
tcgggatattaaatggcaattggattgtggtagcagtacttgttgtcatcttgatcattt

SEQ ID NO: 27777 - DNA, 60 bp, Artificial
  Synthetic oligonucleotide
taagaaaagtgtgtaagtaaatatgggatttggctacacttgtaataccttaagtgctta

SEQ ID NO: 27778 - DNA, 60 bp, Artificial
  Synthetic oligonucleotide
cgatcatactctttagttttctttgtcctcgtagggttcataagaaaagtgtgtaagtaa

SEQ ID NO: 27779 - DNA, 60 bp, Artificial
  Synthetic oligonucleotide
tctgcatgatcgggacagtctcaaaattgcagcctgctgacacactgctctttcttgggc

SEQ ID NO: 27780 - DNA, 60 bp, Artificial
  Synthetic oligonucleotide
gacgcaaatgactgccttgttaccccgtctgtaaaagtctgcatgatcgggacagtctca

SEQ ID NO: 27781 - DNA, 60 bp, Artificial
  Synthetic oligonucleotide
tcctccttgtacagttaaatgttggtttgcaaaatctggagaatggcttttcgggatatt

SEQ ID NO: 27782 - DNA, 52 bp, Artificial
  Synthetic oligonucleotide
ggcactcaggttctgcatttaagtgctgtcatgacactgattgttcgaatga

SEQ ID NO: 27783 - DNA, 60 bp, Artificial
  Synthetic oligonucleotide
tcactaagatatactcgtaaagtgtgcatacagctgggtacagaacagacatgcaaacat

SEQ ID NO: 27784 - DNA, 60 bp, Artificial
  Synthetic oligonucleotide
atgcaaacatattgacgcaaatgactgccttgttaccccgtctgtaaaagtctgcatgat

SEQ ID NO: 27785 - DNA, 60 bp, Artificial
  Synthetic oligonucleotide
cgtaaagtgtgcatacagctgggtacagaacagacatgcaaacatattgacgcaaatgac

SEQ ID NO: 27786 - DNA, 60 bp, Artificial
  Synthetic oligonucleotide
aactgcctttcattgttatggggcctgtaacaaatattcatacccctggcaaactgccaa

SEQ ID NO: 27787 - DNA, 60 bp, Artificial
  Synthetic oligonucleotide
aaactgccaaatgcttctttgagaaggattatcagtatgagacaggatgggcttgcaacc

SEQ ID NO: 27788 - DNA, 60 bp, Artificial
  Synthetic oligonucleotide
cagcattggaggataaactcgcagactacaagagaagaatggcagatgctgtgtccagga

SEQ ID NO: 27789 - DNA, 60 bp, Artificial
  Synthetic oligonucleotide
cagcattggaggataaactcgcagactacaagagaagaatggcagatgctgtgtcccgga

SEQ ID NO: 27790 - DNA, 60 bp, Artificial
  Synthetic oligonucleotide
ctgctagaatggtgtaagagaaatcttggtcttgattgtgatgatactttctttcaaaag

SEQ ID NO: 27791 - DNA, 60 bp, Artificial
  Synthetic oligonucleotide
caaaacttgagcaaccacagagcattttgatcgaacacaagggaactataatcggaaagc

SEQ ID NO: 27792 - DNA, 60 bp, Artificial
  Synthetic oligonucleotide
cttgctaggcatgtgacacaatgccctaagcggaaggagaaagtggaagaaactgaattg

SEQ ID NO: 27793 - DNA, 55 bp, Artificial
  Synthetic oligonucleotide
gggagagattaacaaggcaggtaaatctgggtaccctctcttggccacgggatta

SEQ ID NO: 27794 - DNA, 60 bp, Artificial
  Synthetic oligonucleotide
caagtcgaccaagacaaggcagaagacctcctaaaaggggtgagagaaagctacaagact

SEQ ID NO: 27795 - DNA, 60 bp, Artificial
  Synthetic oligonucleotide
caaggcagaagacctcctaaaaggggtgagagaaagctacaagactgccctggctctggc

SEQ ID NO: 27796 - DNA, 60 bp, Artificial
  Synthetic oligonucleotide
ctacaagactgccctggctctggcaaagctgtcgaacgccttccgtgcccagggagctca

SEQ ID NO: 27797 - DNA, 60 bp, Artificial
  Synthetic oligonucleotide
ccgatgatgcgccaaagagagggcctgttgggcgtgagcatcttgactggtgcagagagt

SEQ ID NO: 27798 - DNA, 60 bp, Artificial
  Synthetic oligonucleotide
ccaaagagagggcctgttgggcgtgagcatcttgactggtgcagagagtttgcctcaggc

SEQ ID NO: 27799 - DNA, 60 bp, Artificial
  Synthetic oligonucleotide
tgcagagagtttgcctcaggcaaatttttgaatgctttcaaccctccttggggagagatt

SEQ ID NO: 27800 - DNA, 50 bp, Artificial
  Synthetic oligonucleotide
ttttgaatgctttcaaccctccttggggagagattaacaaggcaggtaaa

SEQ ID NO: 27801 - DNA, 60 bp, Artificial
  Synthetic oligonucleotide
ctggctctggcaaagctgtcgaacgccttccgtgcccagggagctcaaatagacactgtg

SEQ ID NO: 27802 - DNA, 60 bp, Artificial
  Synthetic oligonucleotide
agggagctcaaatagacactgtgttcagcagctactactggccttggaaggcaggagtga

SEQ ID NO: 27803 - DNA, 60 bp, Artificial
  Synthetic oligonucleotide
tgccgcagacgccccacgttttcatccttttgagagcaaaaccggtcgcctcacaacatc

SEQ ID NO: 27804 - DNA, 60 bp, Artificial
  Synthetic oligonucleotide
tctcaaagacaaacatgccgcagacgccccacgttttcatccttttgagagcaaaaccgg

SEQ ID NO: 27805 - DNA, 60 bp, Artificial
  Synthetic oligonucleotide
cacctggtacaagcagtttgctgagaaacacaaactgaacaacaagtacacggaatctgc

SEQ ID NO: 27806 - DNA, 60 bp, Artificial
  Synthetic oligonucleotide
gagttcaacacctggtacaagcagtttgctgagaaacacaaactgaacaacaagtacacg

SEQ ID NO: 27807 - DNA, 60 bp, Artificial
  Synthetic oligonucleotide
tattcttactttcattcctattctattctgttttgtaaaatttggggctgtgcggcaacg

SEQ ID NO: 27808 - DNA, 60 bp, Artificial
  Synthetic oligonucleotide
cattgagagcatggacatagtcgcctctgaacatcttctccatcaatctcttgtggggaa

SEQ ID NO: 27809 - DNA, 60 bp, Artificial
  Synthetic oligonucleotide
gggcacacaaaggcagtcctcaactataagaccaagaccgaggtcggcaacccgtgtgcc

SEQ ID NO: 27810 - DNA, 58 bp, Artificial
  Synthetic oligonucleotide
gctgggtaagaaccccaagggacagaaaaaaatgcaaaaggcactcatcaacacccct

SEQ ID NO: 27811 - DNA, 60 bp, Artificial
  Synthetic oligonucleotide
gtcaccttcccatctgtgtcccaattccttttcgagctgggtaagaaccccaagggacag

SEQ ID NO: 27812 - DNA, 60 bp, Artificial
  Synthetic oligonucleotide
gcaggagtgacaccagtcaccttcccatctgtgtcccaattccttttcgagctgggtaag

SEQ ID NO: 27813 - DNA, 60 bp, Artificial
  Synthetic oligonucleotide
acactgtgttcagcagctactactggccttggaaggcaggagtgacaccagtcaccttcc

SEQ ID NO: 27814 - DNA, 60 bp, Artificial
  Synthetic oligonucleotide
gccgcccaagggtccgggcacacaaaggcagtcctcaactataagaccaagaccgaggtc

SEQ ID NO: 27815 - DNA, 55 bp, Artificial
  Synthetic oligonucleotide
tgcacccctgtgtgctaacatctggaagaatgtccgagcttggaatatcgtttgg

SEQ ID NO: 27816 - DNA, 60 bp, Artificial
  Synthetic oligonucleotide
tgctgataacgacttcacagagaacagaatctacatgcacccctgtgtgctaacatctgg

SEQ ID NO: 27817 - DNA, 60 bp, Artificial
  Synthetic oligonucleotide
gctcattgaactgtttgctgataacgacttcacagagaacagaatctacatgcacccctg

SEQ ID NO: 27818 - DNA, 60 bp, Artificial
  Synthetic oligonucleotide
cattcctattctattctgttttgtaaaatttggggctgtgcggcaacgatatctttgaga

SEQ ID NO: 27819 - DNA, 60 bp, Artificial
  Synthetic oligonucleotide
ggaatggttcgacaaaaacaaagactctgacaccgtgaaggtctgggatgccaactacca

SEQ ID NO: 27820 - DNA, 60 bp, Artificial
  Synthetic oligonucleotide
ccgcctgctgaggcattactggcataccagaaagccgccctcaactggagaaaggatgtc

SEQ ID NO: 27821 - DNA, 60 bp, Artificial
  Synthetic oligonucleotide
atcatggagtgtgcatgggcttcctgcactgggacagttaaaagaggtctggaatggttc

SEQ ID NO: 27822 - DNA, 60 bp, Artificial
  Synthetic oligonucleotide
ggagtgtgcatgggcttcctgcactgggacagttaaaagaggtctggaatggttcgacaa

SEQ ID NO: 27823 - DNA, 60 bp, Artificial
  Synthetic oligonucleotide
cctacaagtacaagatggagctagccagcacggacaatgagagggacgccatctacagct

SEQ ID NO: 27824 - DNA, 60 bp, Artificial
  Synthetic oligonucleotide
tggagctagccagcacggacaatgagagggacgccatctacagctcagcactcattgagg

SEQ ID NO: 27825 - DNA, 60 bp, Artificial
  Synthetic oligonucleotide
caagtacacggaatctgcatccttttgtgccgaaattcctcagctcgacacctacaagta

SEQ ID NO: 27826 - DNA, 60 bp, Artificial
  Synthetic oligonucleotide
tgcatccttttgtgccgaaattcctcagctcgacacctacaagtacaagatggagctagc

SEQ ID NO: 27827 - DNA, 60 bp, Artificial
  Synthetic oligonucleotide
cctgctgaggcattactggcataccagaaagccgccctcaactggagaaaggatgtcggc

SEQ ID NO: 27828 - DNA, 60 bp, Artificial
  Synthetic oligonucleotide
aaaggatgtcggcttctccattggggagtacaccagtatactaaaaaaggcagtggcggc

SEQ ID NO: 27829 - DNA, 60 bp, Artificial
  Synthetic oligonucleotide
catagtcgcctctgaacatcttctccatcaatctcttgtggggaagcgctcgcccttcca

SEQ ID NO: 27830 - DNA, 61 bp, Artificial
  Synthetic oligonucleotide
cactatagaacaaagcttttaaatggcaaaccaatttattttccaagatgttcctcaacgg

SEQ ID NO: 27831 - DNA, 60 bp, Artificial
  Synthetic oligonucleotide
ctcgcagaatacaaagtccctggtgagattgtgatgtctgtcaaagagatgctgtcagac

SEQ ID NO: 27832 - DNA, 50 bp, Artificial
  Synthetic oligonucleotide
cttgacagacattcaggaggatataacccgccatgaacaacaacttgttg

SEQ ID NO: 27833 - DNA, 60 bp, Artificial
  Synthetic oligonucleotide
tatagactcaccatcatcaatctgggtctttgcaggagcacctgacagatgccctcctac

SEQ ID NO: 27834 - DNA, 60 bp, Artificial
  Synthetic oligonucleotide
attgctactctgtattcactggagaaggtgtcaactttctcaatttgttcatgcataata

SEQ ID NO: 27835 - DNA, 51 bp, Artificial
  Synthetic oligonucleotide
attctgtcttctctggagaaggtgtcaactttctcaatttgttcatgcata

SEQ ID NO: 27836 - DNA, 60 bp, Artificial
  Synthetic oligonucleotide
agtaaatcactttcatcttggtgatgatatggatcctgagcttagacagcttgctcagtc

SEQ ID NO: 27837 - DNA, 60 bp, Artificial
  Synthetic oligonucleotide
gactcggttcgaagacgtcgagaagctggattgggcaaagacagccttcactagttcagc

SEQ ID NO: 27838 - DNA, 60 bp, Artificial
  Synthetic oligonucleotide
ggttcgaagacgtcgagaagctggattgggcaaagacagccttcactagttcagctagag

SEQ ID NO: 27839 - DNA, 60 bp, Artificial
  Synthetic oligonucleotide
ctaacgttttagaatctttccgtccttcaaacagctcaaacaaagagctagtgcctgcag

SEQ ID NO: 27840 - DNA, 60 bp, Artificial
  Synthetic oligonucleotide
gccagacagaaactcaaggatgcagagaaggcagtggaaatggacccagatgacgttaac

SEQ ID NO: 27841 - DNA, 60 bp, Artificial
  Synthetic oligonucleotide
gacatgcggaatacaatcatggcatccaagacagttggaacctctgaggagaagctgcgg

SEQ ID NO: 27842 - DNA, 60 bp, Artificial
  Synthetic oligonucleotide
gatatgcggaatacaatcatggcatccaagacagttggaacctctgaggagaagctgcgg

SEQ ID NO: 27843 - DNA, 60 bp, Artificial
  Synthetic oligonucleotide
ggatatgcggaatacaatcatggcatccaagacagtgggtacatcggaggaaaagctgag

SEQ ID NO: 27844 - DNA, 60 bp, Artificial
  Synthetic oligonucleotide
ggacatgcggaatacaatcatggcatccaagacagttggaacctctgaggagaagctgcg

SEQ ID NO: 27845 - DNA, 52 bp, Artificial
  Synthetic oligonucleotide
attctctcctgctgccagaactttcttgcagcaatttggtatcaacatctaa

SEQ ID NO: 27846 - DNA, 60 bp, Artificial
  Synthetic oligonucleotide
gattgctgtatataatacgaattttcctggcaacaggaacaacccaattcctgacgatgg

SEQ ID NO: 27847 - DNA, 60 bp, Artificial
  Synthetic oligonucleotide
taaaaggccccatggaaaaccagcagaaaacaatatcaattaaaaccatctctagtgaga

SEQ ID NO: 27848 - DNA, 60 bp, Artificial
  Synthetic oligonucleotide
ctctagtgagacagtatgcagagaaggttcgagtttctggaccagtttgtacatcccatc

SEQ ID NO: 27849 - DNA, 60 bp, Artificial
  Synthetic oligonucleotide
ttgttggtgattgtgtgggtaacaaatgccagtcatggcgagatgatcagctatccaggg

SEQ ID NO: 27850 - DNA, 60 bp, Artificial
  Synthetic oligonucleotide
catcagttggtcccattacggctgcacctccagattcaactatgatcaatccatggcctc

SEQ ID NO: 27851 - DNA, 60 bp, Artificial
  Synthetic oligonucleotide
gtttcaacatcaatccttcctgcttgtatgtccatgcttatctcaagagtgctagaaatg

SEQ ID NO: 27852 - DNA, 60 bp, Artificial
  Synthetic oligonucleotide
gatacaatacgaggcgactacattgtggactgtgtgactggattataccagtcagacatt

SEQ ID NO: 27853 - DNA, 60 bp, Artificial
  Synthetic oligonucleotide
gctactcttgtgattatggagcacatgtctgtgtgaaagtaaagtcttcggagtcagccg

SEQ ID NO: 27854 - DNA, 60 bp, Artificial
  Synthetic oligonucleotide
gagatgctgaaaagctgatgtcagacctgatggctagaaattctgacttacggaatcaca

SEQ ID NO: 27855 - DNA, 60 bp, Artificial
  Synthetic oligonucleotide
ccagtacaaaagacaaaaaaacagtacaggccttcaccaatggagcaataaaagcattat

SEQ ID NO: 27856 - DNA, 60 bp, Artificial
  Synthetic oligonucleotide
gaaggaacctggagcatctccaattggttttctgggcttctggactggctaggtgggcct

SEQ ID NO: 27857 - DNA, 60 bp, Artificial
  Synthetic oligonucleotide
catattcttgtggatctgagcctaagctgatagtgattaagggaacattagtttacatgg

SEQ ID NO: 27858 - DNA, 60 bp, Artificial
  Synthetic oligonucleotide
aggagtacacataaaatccactggttttgaaataacatcagcagtggcctgctcacatgg

SEQ ID NO: 27859 - DNA, 60 bp, Artificial
  Synthetic oligonucleotide
ggataaaaccccaatgtgttggctacgagagagtcttagtagatagggaggttaagcagc

SEQ ID NO: 27860 - DNA, 60 bp, Artificial
  Synthetic oligonucleotide
gtatgactgttctacatcttatccagatgtgacttgtatccacacaccaggatcagggcc

SEQ ID NO: 27861 - DNA, 60 bp, Artificial
  Synthetic oligonucleotide
gctcgttatgagcatgtactctttaacaacgtgggacagctccagtaggaatgacatatg

SEQ ID NO: 27862 - DNA, 60 bp, Artificial
  Synthetic oligonucleotide
caagagaaggatttcttggagagataaggtgcagttctgaatccgcagccatatcagctc

SEQ ID NO: 27863 - DNA, 60 bp, Artificial
  Synthetic oligonucleotide
ttggatgcagaaggtatcagcggaaccaacagtatcagttttttggaaagtagtaaagga

SEQ ID NO: 27864 - DNA, 60 bp, Artificial
  Synthetic oligonucleotide
gaggtcaaaggccctgatggcgagatggagttggtcacactagggagcctgggcactaag

SEQ ID NO: 27865 - DNA, 60 bp, Artificial
  Synthetic oligonucleotide
agccaactcaaagcttacaggagcaaacataaacagaaaacccacaccaagaagcacagg

SEQ ID NO: 27866 - DNA, 60 bp, Artificial
  Synthetic oligonucleotide
gcacagagtaactggcctctttacatactcatctctgtagtccagtcatcacatctctag

SEQ ID NO: 27867 - DNA, 60 bp, Artificial
  Synthetic oligonucleotide
catctctagtcattttcagatttcctgcaaggtgagagtatggaaaacttagttgttggt

SEQ ID NO: 27868 - DNA, 60 bp, Artificial
  Synthetic oligonucleotide
cagctcataagtcatgcattagagctcctggtttgatcaagtacaagcccatgacagatc

SEQ ID NO: 27869 - DNA, 60 bp, Artificial
  Synthetic oligonucleotide
ggggacatgtccgaccaacatcaatgcagttcattacattgacaataaaggcaagttgcg

SEQ ID NO: 27870 - DNA, 60 bp, Artificial
  Synthetic oligonucleotide
accgaaacagctgaaaagtccagtgggatggctcaaactctttgtcaactggctactaac

SEQ ID NO: 27871 - DNA, 60 bp, Artificial
  Synthetic oligonucleotide
gggaggataaatcagagaatagggtgggttgatcatcatgatgtagagagaccaaggcac

SEQ ID NO: 27872 - DNA, 60 bp, Artificial
  Synthetic oligonucleotide
attattccatatccaggcttgttggctagtgtgggcgggagaattgggatacacctctca

SEQ ID NO: 27873 - DNA, 60 bp, Artificial
  Synthetic oligonucleotide
gagaactcagacatttactccggaccaaagatacctttcaagggagtttgtaagatcggt

SEQ ID NO: 27874 - DNA, 60 bp, Artificial
  Synthetic oligonucleotide
gtggtttgccctcccagagatagttgtgcagctcataattgcttactatgctatcatggc

SEQ ID NO: 27875 - DNA, 60 bp, Artificial
  Synthetic oligonucleotide
ctgttcaggtgcagaaaacttcagtaccgttacaagatgcaatttgtcaagagaactcag

SEQ ID NO: 27876 - DNA, 60 bp, Artificial
  Synthetic oligonucleotide
tgatgaacaagaggtagaacacagggccctgaagagagtatcagtcaatgattgtaagat

SEQ ID NO: 27877 - DNA, 60 bp, Artificial
  Synthetic oligonucleotide
tggtgacaggaggaaatgcctgctccaatacagtagtggccaattcgaagcaaaccagat

SEQ ID NO: 27878 - DNA, 60 bp, Artificial
  Synthetic oligonucleotide
aatatgatgaaaatgatgagtcagggtgtagaccaatcagatatggtgtttcctgcatag

SEQ ID NO: 27879 - DNA, 52 bp, Artificial
  Synthetic oligonucleotide
gaggtagtatccctctcattgcttctgttgacagtctcgaaatgatcagtgt

SEQ ID NO: 27880 - DNA, 60 bp, Artificial
  Synthetic oligonucleotide
gctgcctttggacgatgcaaaatctgtgagacttgccataatgcttggaggtagtatccc

SEQ ID NO: 27881 - DNA, 60 bp, Artificial
  Synthetic oligonucleotide
tgacaatcttgagaagttctatgaaatgtttggagtcaagaaagaggccaagattgctgg

SEQ ID NO: 27882 - DNA, 60 bp, Artificial
  Synthetic oligonucleotide
tatggactattacagtgacaatcttgagaagttctatgaaatgtttggagtcaagaaaga

SEQ ID NO: 27883 - DNA, 60 bp, Artificial
  Synthetic oligonucleotide
cgggctgcctttggacgatgcaaaatctgtgagacttgccataatgcttggaggtagtat

SEQ ID NO: 27884 - DNA, 60 bp, Artificial
  Synthetic oligonucleotide
cttttgactcaatctgaggatgttgagtttgaagaagaccagaaccaggttgcattcaac

SEQ ID NO: 27885 - DNA, 60 bp, Artificial
  Synthetic oligonucleotide
atttccaaaatgagtgcagtaagagagatggacctagatgttccttcgcagcactgttaa

SEQ ID NO: 27886 - DNA, 60 bp, Artificial
  Synthetic oligonucleotide
gaattgtgtactggcccatgcccagcaaatatcaatcatcaggttgggtggctgacattt

SEQ ID NO: 27887 - DNA, 60 bp, Artificial
  Synthetic oligonucleotide
actggcccatgcccagcaaatatcaatcatcaggttgggtggctaacatttgcaagagag

SEQ ID NO: 27888 - DNA, 60 bp, Artificial
  Synthetic oligonucleotide
cttttaacttaaagacagcatttcattgttatggctcatgtgaaaagtatgcctatcctt

SEQ ID NO: 27889 - DNA, 60 bp, Artificial
  Synthetic oligonucleotide
aaggaagtcattggcagcttacgagcccaagcaaggatgttatcgaacattatccctttt

SEQ ID NO: 27890 - DNA, 60 bp, Artificial
  Synthetic oligonucleotide
aggataatttaaggaagtcattggcagcttacgagcccaagcaaggatgttatcgaacat

SEQ ID NO: 27891 - DNA, 60 bp, Artificial
  Synthetic oligonucleotide
ggataacccggtttatgtttggtcaccagggattatcatggaagggaatcattctgtatg

SEQ ID NO: 27892 - DNA, 60 bp, Artificial
  Synthetic oligonucleotide
aaggataatccagtatatgtttggtcaccagggattatcatggaagggaatcattctgtg

SEQ ID NO: 27893 - DNA, 60 bp, Artificial
  Synthetic oligonucleotide
ggggtattaacagcaaaggataatccagtatatgtttggtcaccagggattatcatggaa

SEQ ID NO: 27894 - DNA, 56 bp, Artificial
  Synthetic oligonucleotide
cccctttatacatctacaggggtattaacagcaaaggataacccggtttatgtttg

SEQ ID NO: 27895 - DNA, 60 bp, Artificial
  Synthetic oligonucleotide
tatagccttttcaggcagccccctttatacatctacaggggtattaacagcaaaggataa

SEQ ID NO: 27896 - DNA, 60 bp, Artificial
  Synthetic oligonucleotide
ggtatagcattctcaggtagccctctttacacatctacaggggtattaacagcaaaggat

SEQ ID NO: 27897 - DNA, 60 bp, Artificial
  Synthetic oligonucleotide
gacagcatttcattgttatggctcatgtgaaaagtatgcctatccttggcaaacagctgg

SEQ ID NO: 27898 - DNA, 60 bp, Artificial
  Synthetic oligonucleotide
cattcaatttaaaaacagcatttcattgttatggctcatgtgaaaagtatgcctatccat

SEQ ID NO: 27899 - DNA, 60 bp, Artificial
  Synthetic oligonucleotide
ggcatggggttcaggtgtcggctttaatttagtctgtactgttagtttaacagaatgccc

SEQ ID NO: 27900 - DNA, 60 bp, Artificial
  Synthetic oligonucleotide
tcatgatacaaagtgttctagtacaggtttggttgcagctgcaccacatttagaccgggt

SEQ ID NO: 27901 - DNA, 60 bp, Artificial
  Synthetic oligonucleotide
gatggggcatggggttcaggtgtcggctttaatttagtctgtactgttagtttaacagaa

SEQ ID NO: 27902 - DNA, 60 bp, Artificial
  Synthetic oligonucleotide
ggagcatggggttcaggtgtcggctttaatttagtctgtacagtcagtttgacagaatgc

SEQ ID NO: 27903 - DNA, 60 bp, Artificial
  Synthetic oligonucleotide
ggtgcacaaccgcatgtcaatttggtgatcctggggatataatgagtactccagcaggga

SEQ ID NO: 27904 - DNA, 60 bp, Artificial
  Synthetic oligonucleotide
gtcaatttggtgatcctggggatataatgagtactccaacagggatgaaatgtccagagc

SEQ ID NO: 27905 - DNA, 60 bp, Artificial
  Synthetic oligonucleotide
cagcatttcattgttatggctcatgtgaaaagtatgcctatccatggcaaacagccggtt

SEQ ID NO: 27906 - DNA, 60 bp, Artificial
  Synthetic oligonucleotide
caacaacatgtcaatttggtgatcctggggatataatgagtactccaacagggatgaaat

SEQ ID NO: 27907 - DNA, 60 bp, Artificial
  Synthetic oligonucleotide
tttcgagagagttggagctaaagacatgactttcagaaggcttgacagcatgataagagt

SEQ ID NO: 27908 - DNA, 60 bp, Artificial
  Synthetic oligonucleotide
gggaagcattgctatggactattacagtgacaatcttgacaagttctacgagatgtttgg

SEQ ID NO: 27909 - DNA, 56 bp, Artificial
  Synthetic oligonucleotide
ctgcaagcccagtgtatcaaaggtgtttccaagatggggctatagtgaagcaaaac

SEQ ID NO: 27910 - DNA, 56 bp, Artificial
  Synthetic oligonucleotide
ctgcaagcccagtgtatcaaaggtgcttccaagatggggctatagtgaagcaaaac

SEQ ID NO: 27911 - DNA, 60 bp, Artificial
  Synthetic oligonucleotide
ctgcaagcccagtgttacaaaggtgtttccaagatggggctatagtgaagcaaaacccat

SEQ ID NO: 27912 - DNA, 60 bp, Artificial
  Synthetic oligonucleotide
ccatgtcataaacatttctgcagaaaccacatgttgcaccttcattaatggcaaagcacc

SEQ ID NO: 27913 - DNA, 60 bp, Artificial
  Synthetic oligonucleotide
ataaaggtttgttccgagatagctctaaatattcacaacctaacctgcactttatgaaag

SEQ ID NO: 27914 - DNA, 60 bp, Artificial
  Synthetic oligonucleotide
gccttaacaggtaattaaagcatttcattctgcatgcagcaagttcgcgagtatctataa

SEQ ID NO: 27915 - DNA, 60 bp, Artificial
  Synthetic oligonucleotide
gcattgggctgtttgagccattgacataggcatttgggacaatataatcaaccctataag

SEQ ID NO: 27916 - DNA, 60 bp, Artificial
  Synthetic oligonucleotide
agctctcagtgataaagaactttgttccaacagaaaaatgccttttgttgtccagtttag

SEQ ID NO: 27917 - DNA, 60 bp, Artificial
  Synthetic oligonucleotide
gcaaagcaccatgcttcctcacagccccagtaagatgttggtgtaatgcaaaagtcttgg

SEQ ID NO: 27918 - DNA, 55 bp, Artificial
  Synthetic oligonucleotide
cgtggtctgattcctttgaaagtatagggcattctgaagaatgttcccttgaagc

SEQ ID NO: 27919 - DNA, 65 bp, Artificial
  Synthetic oligonucleotide
gaacttctgtgataaatttgagtaagctcaggctaagttttgtgtttattatcagatgaaaccac

SEQ ID NO: 27920 - DNA, 60 bp, Artificial
  Synthetic oligonucleotide
gacaccattattttcgacttggtagtacacattgtaagtcgatatccctttgacctcgca

SEQ ID NO: 27921 - DNA, 60 bp, Artificial
  Synthetic oligonucleotide
aaatcagacgtatccaggaaaaattgatgcaagctgtttgtttgtagatgcttttagaat

SEQ ID NO: 27922 - DNA, 60 bp, Artificial
  Synthetic oligonucleotide
cctccctaatactgcagaagcattgatttgcttctggacacttttcaaacttgctggtca

SEQ ID NO: 27923 - DNA, 60 bp, Artificial
  Synthetic oligonucleotide
gggatcactgggatttctggaaacttctttgggagattctgagaattgtcacatcgcccc

SEQ ID NO: 27924 - DNA, 60 bp, Artificial
  Synthetic oligonucleotide
gaattgtcacatcgccccagattatctgcagaatctgaaacacaggaataaatgacacca

SEQ ID NO: 27925 - DNA, 60 bp, Artificial
  Synthetic oligonucleotide
accttctgtttgatgtgaattataggaaatcggataattgccagaggctaagctctcagt

SEQ ID NO: 27926 - DNA, 60 bp, Artificial
  Synthetic oligonucleotide
cttgcaatcaccagaaagcttaacagtctgcaatgaaacaataccttctgtttgatgtga

SEQ ID NO: 27927 - DNA, 60 bp, Artificial
  Synthetic oligonucleotide
ttgctggtcaccatttgattacaccctggaatataaaaacaaccgtttaggcattgggct

SEQ ID NO: 27928 - DNA, 60 bp, Artificial
  Synthetic oligonucleotide
gatatctgttccaatccagatttgaacctatatgtatcataaccacaagattttatggta

SEQ ID NO: 27929 - DNA, 60 bp, Artificial
  Synthetic oligonucleotide
ggaagaagctggaaagatctttgaaggtaactggaatgtctgatatctgttccaatccag

SEQ ID NO: 27930 - DNA, 60 bp, Artificial
  Synthetic oligonucleotide
cacagggtcatttaagttagcaatgtttcctgcatatatatgactatcaggtccgtgagc

SEQ ID NO: 27931 - DNA, 60 bp, Artificial
  Synthetic oligonucleotide
tcaggtccgtgagctattagttcgccgacggttattccatcattgtgcaaatctgcctgt

SEQ ID NO: 27932 - DNA, 60 bp, Artificial
  Synthetic oligonucleotide
cttcttcagtgattttggtacattgatctcctaaaattccagaaatgcacacgtcagcta

SEQ ID NO: 27933 - DNA, 60 bp, Artificial
  Synthetic oligonucleotide
ccagaaatgcacacgtcagctattatagtggatttcaagacagaatagatcctgtaggat

SEQ ID NO: 27934 - DNA, 60 bp, Artificial
  Synthetic oligonucleotide
caagaagagattgttctaccatgtatctgtatttaccgtctacgatggaatcaaagatca

SEQ ID NO: 27935 - DNA, 60 bp, Artificial
  Synthetic oligonucleotide
gggtaagttatcaagcctataagatcataccacaagaacagaggcttagtagtcttattc

SEQ ID NO: 27936 - DNA, 60 bp, Artificial
  Synthetic oligonucleotide
gcctttcccacacaagagacaaccattgcattctaatctagttgaagttatagaaggctt

SEQ ID NO: 27937 - DNA, 60 bp, Artificial
  Synthetic oligonucleotide
gaggttgaaaataccaggtccgaaaagaactcgaaattgcaagacaagcctttcccacac

SEQ ID NO: 27938 - DNA, 60 bp, Artificial
  Synthetic oligonucleotide
atttttttcttatctggattgactgagcaatacattgttatgttgtatttatttgatcct

SEQ ID NO: 27939 - DNA, 60 bp, Artificial
  Synthetic oligonucleotide
taattggaacttctacagtaagttctggatttccttctggatacattttgatttttttct

SEQ ID NO: 27940 - DNA, 60 bp, Artificial
  Synthetic oligonucleotide
ctatagaaatagaggttgaaaataccaggtccgaaaagaactcgaaattgcaagacaagc

SEQ ID NO: 27941 - DNA, 60 bp, Artificial
  Synthetic oligonucleotide
atttgatcctttttttacagctaattggtagctagatagagaacaggattctatagaaat

SEQ ID NO: 27942 - DNA, 60 bp, Artificial
  Synthetic oligonucleotide
ccccatgcagaagagtctgaattgtactgttgctcttcgtgagcatactcatcattctga

SEQ ID NO: 27943 - DNA, 60 bp, Artificial
  Synthetic oligonucleotide
tttaaccaacacttaacttgaacatgcaattctaaactagatgagagaagtccatagggg

SEQ ID NO: 27944 - DNA, 60 bp, Artificial
  Synthetic oligonucleotide
ctgatcgatgatgttttcaggatctttaactactactgtgttaattggaacttctacagt

SEQ ID NO: 27945 - DNA, 59 bp, Artificial
  Synthetic oligonucleotide
cgtttgcctggattgtgatggttgtctgtttaattgtactatgtccgggttaagatttt

SEQ ID NO: 27946 - DNA, 60 bp, Artificial
  Synthetic oligonucleotide
cagctcgttctgttctggatctatcagagtgtgctttgaggtttccgggaagaacctctg

SEQ ID NO: 27947 - DNA, 60 bp, Artificial
  Synthetic oligonucleotide
cattagttctagtagttttattagtctcatcctaaacgtttgcctggattgtgatggttg

SEQ ID NO: 27948 - DNA, 53 bp, Artificial
  Synthetic oligonucleotide
ttttctgagctagattcaacttggagagtgggagcctgcttttcagctcgttc

SEQ ID NO: 27949 - DNA, 60 bp, Artificial
  Synthetic oligonucleotide
tgggagcctgcttttcagctcgttctgttctggatctatcagagtgtgctttgaggtttc

SEQ ID NO: 27950 - DNA, 60 bp, Artificial
  Synthetic oligonucleotide
gacctcgcattttagggatatatttagacaattgttagggatgtcttggatagacacagc

SEQ ID NO: 27951 - DNA, 60 bp, Artificial
  Synthetic oligonucleotide
gatgtcttggatagacacagctttttctgagctagattcaacttggagagtgggagcctg

SEQ ID NO: 27952 - DNA, 60 bp, Artificial
  Synthetic oligonucleotide
cactaaccaacgtatagggaaatatatcaacaatgcgatcaaaatcagacgtatccagga

SEQ ID NO: 27953 - DNA, 60 bp, Artificial
  Synthetic oligonucleotide
gcatgtatcacaattgccagtgcaagtcgagtaataatctgtgtgagtgctcataatagg

SEQ ID NO: 27954 - DNA, 60 bp, Artificial
  Synthetic oligonucleotide
gccgatttgtcaccacacaagagattgtgatttccatccaacatctcctcactaaacgtt

SEQ ID NO: 27955 - DNA, 60 bp, Artificial
  Synthetic oligonucleotide
caccttcattaatggcaaagcaccatgcttcctcacagccccagtaagatgttggtgtaa

SEQ ID NO: 27956 - DNA, 60 bp, Artificial
  Synthetic oligonucleotide
gtgcattcatgtgtaacaatgcataaattgccacaattggcacatttgaatgggaaatat

SEQ ID NO: 27957 - DNA, 60 bp, Artificial
  Synthetic oligonucleotide
ctaccatgtatctgtatttaccgtctacgatggaatcaaagatcaaagattggcgaggca

SEQ ID NO: 27958 - DNA, 60 bp, Artificial
  Synthetic oligonucleotide
tgctgttccggatgttttatcatttaacatgaacacagttccacctcctccaagaagaga

SEQ ID NO: 27959 - DNA, 60 bp, Artificial
  Synthetic oligonucleotide
cctaacctgcactttatgaaagtgtccatagggctgctttccaagcaatcttgattagca

SEQ ID NO: 27960 - DNA, 60 bp, Artificial
  Synthetic oligonucleotide
gtcatatataaactcgaagaagttagccctaaagagcttcctgtataatccaagaaacta

SEQ ID NO: 27961 - DNA, 60 bp, Artificial
  Synthetic oligonucleotide
ctctgggctggtaatgctcacggtgtatggattggcaaagttagatttagttatcttgca

SEQ ID NO: 27962 - DNA, 58 bp, Artificial
  Synthetic oligonucleotide
agattttcctgacagaaagtcttaaagttgaatgcgacctggttctggtcttcttcaa

SEQ ID NO: 27963 - DNA, 60 bp, Artificial
  Synthetic oligonucleotide
gctaaacttagacatgtcaattccaagctcaacatgtttagcatcttgataaatagccgg

SEQ ID NO: 27964 - DNA, 60 bp, Artificial
  Synthetic oligonucleotide
gcctctttagtgctaaacttagacatgtcaattccaagctcaacatgtttagcatcttga

SEQ ID NO: 27965 - DNA, 60 bp, Artificial
  Synthetic oligonucleotide
gctgcactagttccggctatttatcaagatgctaaacatgttgagcttggaattgacatg

SEQ ID NO: 27966 - DNA, 60 bp, Artificial
  Synthetic oligonucleotide
gctgcactagttctggctatttatcaagatgctaaacatgttgagctaggaattgacatg

SEQ ID NO: 27967 - DNA, 60 bp, Artificial
  Synthetic oligonucleotide
ggctaaacaatatgcagatatactaaaggcttgtagtccgaaagctaaaggacttgctgc

SEQ ID NO: 27968 - DNA, 60 bp, Artificial
  Synthetic oligonucleotide
ctaaacaatatgcagatatactaaaggcttgtagtccgaaagctaaaggacttgctgcaa

SEQ ID NO: 27969 - DNA, 60 bp, Artificial
  Synthetic oligonucleotide
tgcctctttagtgctaaacttagacatgtcaattccaagctcaacatgtttagcatcttg

SEQ ID NO: 27970 - DNA, 51 bp, Artificial
  Synthetic oligonucleotide
aaacatgttgagcttggaattgacatgtctaagtttagcactaaagaggca

SEQ ID NO: 27971 - DNA, 60 bp, Artificial
  Synthetic oligonucleotide
ctgaattttgaaatagctgcactagttctggctatttatcaagatgctaaacatgttgag

SEQ ID NO: 27972 - DNA, 60 bp, Artificial
  Synthetic oligonucleotide
tactgaattttgaaatagctgcactagttctggctatttatcaagatgctaaacatgttg

SEQ ID NO: 27973 - DNA, 60 bp, Artificial
  Synthetic oligonucleotide
tagcatcttgataaatagccggaactagtgcagctatttcaaaattcagtacagatgcta

SEQ ID NO: 27974 - DNA, 60 bp, Artificial
  Synthetic oligonucleotide
tagccggaactagtgcagctatttcaaaattcagtacagatgctatcagaggaagacttc

SEQ ID NO: 27975 - DNA, 60 bp, Artificial
  Synthetic oligonucleotide
caatggatctgctctgattgaagctataaatagccttccaagtcaccctctgattgcctc

SEQ ID NO: 27976 - DNA, 60 bp, Artificial
  Synthetic oligonucleotide
caatggatctgctctgactgaagctataaatagccttccaagtcaccctctgattgcctc

SEQ ID NO: 27977 - DNA, 60 bp, Artificial
  Synthetic oligonucleotide
gtgtcttgggagttctcttaggaggaagtcttcctctgatagcatctgtactgaattttg

SEQ ID NO: 27978 - DNA, 60 bp, Artificial
  Synthetic oligonucleotide
ctgtgtcttgggtgttctcttaggaggaagtcttcctctgatagcatctgtactgaattt

SEQ ID NO: 27979 - DNA, 60 bp, Artificial
  Synthetic oligonucleotide
ctatccttcctcaagaataggcaatctataatgagagtcattaagagtgctgacttcact

SEQ ID NO: 27980 - DNA, 60 bp, Artificial
  Synthetic oligonucleotide
accgtgaaaagattcagaacatgactactgcatcttgcctatccttcctcaagaataggc

SEQ ID NO: 27981 - DNA, 60 bp, Artificial
  Synthetic oligonucleotide
ataaaggacaatggatctgctctgactgaagctataaatagccttccaagtcaccctctg

SEQ ID NO: 27982 - DNA, 60 bp, Artificial
  Synthetic oligonucleotide
ctgatccaaaagtgaagtcagcactcttaatgactctcattatagattgcctattcttga

SEQ ID NO: 27983 - DNA, 60 bp, Artificial
  Synthetic oligonucleotide
tctttaccaacaaccgtgaaaagattcagaacatgactactgcatcttgcctatccttcc

SEQ ID NO: 27984 - DNA, 60 bp, Artificial
  Synthetic oligonucleotide
gagtttcctcaaattctaaggaatcagattgagtcaaaagcttgactatgttctccttgg

SEQ ID NO: 27985 - DNA, 60 bp, Artificial
  Synthetic oligonucleotide
tagctgcactagttctggctatttatcaagatgctaaacatgttgagcttggaattgaca

SEQ ID NO: 27986 - DNA, 60 bp, Artificial
  Synthetic oligonucleotide
gtgtcttgggtgttctcttaggaggaagtcttcctctgatagcatctgtactgaattttg

SEQ ID NO: 27987 - DNA, 54 bp, Artificial
  Synthetic oligonucleotide
agtcaccctctgattgcctcatatggtcttgcaaccacagatttgaaatcctgt

SEQ ID NO: 27988 - DNA, 60 bp, Artificial
  Synthetic oligonucleotide
gattaccaaggagaacatagtcaagcttttgactcaatctgattccttagaatttgagga

SEQ ID NO: 27989 - DNA, 60 bp, Artificial
  Synthetic oligonucleotide
tttcctcaaattctaaggaatcagattgagtcaaaagcttgactatgttctccttggtaa

SEQ ID NO: 27990 - DNA, 60 bp, Artificial
  Synthetic oligonucleotide
aggaatcagattgagtcaaaagcttgactatgttctccttggtaatctttgctttgttca

SEQ ID NO: 27991 - DNA, 60 bp, Artificial
  Synthetic oligonucleotide
ggacaaagcaaagattaccaaggagaacatagtcaagcttttgactcaatctgattcctt

SEQ ID NO: 27992 - DNA, 60 bp, Artificial
  Synthetic oligonucleotide
ccatggacaaagcaaagattaccaaggagaacatagtcaagcttttgactcaatctgatt

SEQ ID NO: 27993 - DNA, 60 bp, Artificial
  Synthetic oligonucleotide
ctgaattttgaaatagctgcactagttccggctatttatcaagatgctaaacatgttgag

SEQ ID NO: 27994 - DNA, 60 bp, Artificial
  Synthetic oligonucleotide
ggttgcaagaccatatgaggcaatcagagggtgacttggaaggctgtttatagcttcagt

SEQ ID NO: 27995 - DNA, 60 bp, Artificial
  Synthetic oligonucleotide
ggatttcaaatctgtggttgcaagaccatatgaggcaatcagagggtgacttggaaggct

SEQ ID NO: 27996 - DNA, 60 bp, Artificial
  Synthetic oligonucleotide
agatttcaaatctgtggttgcaagaccatatgaggcaatcagagggtgacttggaaggct

SEQ ID NO: 27997 - DNA, 53 bp, Artificial
  Synthetic oligonucleotide
aggaagtcttcctctgatagcatctgtactgaattttgaaatagctgcactag

SEQ ID NO: 27998 - DNA, 60 bp, Artificial
  Synthetic oligonucleotide
agtcaccctctgattgcctcatatggtcttgcaaccacagatttgaaatcctgtgtcttg

SEQ ID NO: 27999 - DNA, 60 bp, Artificial
  Synthetic oligonucleotide
ctattcttgaggaaggataggcaagatgcagtagtcatgttctgaatcttttcacggttg

SEQ ID NO: 28000 - DNA, 60 bp, Artificial
  Synthetic oligonucleotide
tcaccctctgattgcctcatatggtcttgcaaccacagatttgaaatcctgtgtcttggg

SEQ ID NO: 28001 - DNA, 60 bp, Artificial
  Synthetic oligonucleotide
acagatgctatcagaggaagacttcctcctaagagaacacccaagacacaggatttcaaa

SEQ ID NO: 28002 - DNA, 60 bp, Artificial
  Synthetic oligonucleotide
acagatgatatcagaggaagacttcctcctaagagaacacccaagacacaggatttcaaa

SEQ ID NO: 28003 - DNA, 60 bp, Artificial
  Synthetic oligonucleotide
acagatgctatcagaggaagacttcctcctaagagaacacccaagacacaagatttcaaa

SEQ ID NO: 28004 - DNA, 60 bp, Artificial
  Synthetic oligonucleotide
atgaacaaagcaaagattaccaaggagaacatagtcaagcttttgactcaatctgattcc

SEQ ID NO: 28005 - DNA, 60 bp, Artificial
  Synthetic oligonucleotide
cttgaggaaggataggcaagatgcagtagtcatgttctgaatcttttcacggttgttggt

SEQ ID NO: 28006 - DNA, 52 bp, Artificial
  Synthetic oligonucleotide
tcaccctctgattgcctcatatggtcttgcaaccacagatttgaaatcctgt

SEQ ID NO: 28007 - DNA, 60 bp, Artificial
  Synthetic oligonucleotide
tagtagtagactccttgaaaagctactacgaaaaaaactggaatgagtgacttgacagat

SEQ ID NO: 28008 - DNA, 60 bp, Artificial
  Synthetic oligonucleotide
tagtagtagactccttgaaaagctactacgagaaaaactgggatgagtgacttgacagac

SEQ ID NO: 28009 - DNA, 60 bp, Artificial
  Synthetic oligonucleotide
cagatgttgagtttgaagaagaccaaaaccaggtcgcattcaactttaaaactttctgtc

SEQ ID NO: 28010 - DNA, 60 bp, Artificial
  Synthetic oligonucleotide
aagaagaccaaaaccaggtcgcattcaactttaaaactttctgtcaggaaaatcttgacc

SEQ ID NO: 28011 - DNA, 60 bp, Artificial
  Synthetic oligonucleotide
aagatgcaaagtacaaggagctagggattgaaccgactaagtacaacactaaggaagctc

SEQ ID NO: 28012 - DNA, 60 bp, Artificial
  Synthetic oligonucleotide
aagatgcaaaatacaaggagttagggattgaaccgactaagtacaacactaaggaagctc

SEQ ID NO: 28013 - DNA, 60 bp, Artificial
  Synthetic oligonucleotide
aggagttagggattgaaccgactaagtacaacactaaggaagctctaggaaaggtctgca

SEQ ID NO: 28014 - DNA, 60 bp, Artificial
  Synthetic oligonucleotide
caccgcctcagtggataccttgccaggtacctacttgagaagatgctaaaagtcagtgaa

SEQ ID NO: 28015 - DNA, 60 bp, Artificial
  Synthetic oligonucleotide
ctgtctcaactgcaaacatagcacttagttggagctcagtggaacacagaggcaataagg

SEQ ID NO: 28016 - DNA, 60 bp, Artificial
  Synthetic oligonucleotide
ctgtatcaactgcaaacatagcacttagttggagctcagtggaacacagaggcaataagg

SEQ ID NO: 28017 - DNA, 60 bp, Artificial
  Synthetic oligonucleotide
atttctgattatttcgagattgtgcggcagcctggtgatgggaactgcttctatcacagc

SEQ ID NO: 28018 - DNA, 60 bp, Artificial
  Synthetic oligonucleotide
gtgcagaaagcagatctttgctgcttgtaaaagtggtaagtatgtcttttgtggtaaaac

SEQ ID NO: 28019 - DNA, 60 bp, Artificial
  Synthetic oligonucleotide
attataagggtggtaagtgggtttcaattactaactacgggtaagggacactactatcct

SEQ ID NO: 28020 - DNA, 60 bp, Artificial
  Synthetic oligonucleotide
gggaatgtccttgatgtgaatgcaatagatatagaagaaccaagtggtcaaacagcagat

SEQ ID NO: 28021 - DNA, 60 bp, Artificial
  Synthetic oligonucleotide
catcattttaccagtcttacctcaggagaacacaatcaatgggaatacaactggaccaga

SEQ ID NO: 28022 - DNA, 60 bp, Artificial
  Synthetic oligonucleotide
ggacaagaatcagattcaaggatgattcttcttatgaagatgttaatggtattcggaagc

SEQ ID NO: 28023 - DNA, 60 bp, Artificial
  Synthetic oligonucleotide
tcaaggatgattcttcttatgaagatgttaatggtattcggaagcccaaacacttgtatg

SEQ ID NO: 28024 - DNA, 60 bp, Artificial
  Synthetic oligonucleotide
gggcagctgtgtctgcattggaggccaaaattggggagctcaagagacaacttgcagatc

SEQ ID NO: 28025 - DNA, 60 bp, Artificial
  Synthetic oligonucleotide
acttgcagatcttgttgcagctcagaaattggctacaaaatctgttgatccaacagggat

SEQ ID NO: 28026 - DNA, 60 bp, Artificial
  Synthetic oligonucleotide
caacagggattgaacctgatgaccatctgaaagaaaagtcctcacttaggtatggcaatg

SEQ ID NO: 28027 - DNA, 60 bp, Artificial
  Synthetic oligonucleotide
gaacctgatgaccatctgaaagaaaagtcctcacttaggtatggcaatgtgcttgacgtc

SEQ ID NO: 28028 - DNA, 60 bp, Artificial
  Synthetic oligonucleotide
tatggcaatgtgcttgacgtcaattcaattgaccttgaggaaccaagtgggcagactgct

SEQ ID NO: 28029 - DNA, 56 bp, Artificial
  Synthetic oligonucleotide
tcaattcaattgaccttgaggaaccaagtgggcagactgctgactggaaagcaatc

SEQ ID NO: 28030 - DNA, 60 bp, Artificial
  Synthetic oligonucleotide
gcagactgctgactggaaagcaatcgggacttatattcttagttttgtccttccaattgt

SEQ ID NO: 28031 - DNA, 60 bp, Artificial
  Synthetic oligonucleotide
ggaaagcaatcgggacttatattcttagttttgtccttccaattgtgttgaaggccctct

SEQ ID NO: 28032 - DNA, 60 bp, Artificial
  Synthetic oligonucleotide
cgggtgggttagatagagaatgtataatcctttactgtgacgggtggttcaatagggcat

SEQ ID NO: 28033 - DNA, 60 bp, Artificial
  Synthetic oligonucleotide
ttcaatagggcatttatgggtcatattatttagttataattagattaagattaggattaa

SEQ ID NO: 28034 - DNA, 60 bp, Artificial
  Synthetic oligonucleotide
ctgccttctaccagtcttacttacgcagaacacagtcaatggggattcaactggaccaga

SEQ ID NO: 28035 - DNA, 60 bp, Artificial
  Synthetic oligonucleotide
aactggaccagaaaatcattatattgtatatgattaactggggaaaagaggctgtcaacc

SEQ ID NO: 28036 - DNA, 60 bp, Artificial
  Synthetic oligonucleotide
cgacagcattgtatgttgctggtgtgcctgaattaggagcattcttttcaatactccaag

SEQ ID NO: 28037 - DNA, 58 bp, Artificial
  Synthetic oligonucleotide
aatactccaagatatgaggaatacaattatggcatctaagtctgtaggaactgctgaa

SEQ ID NO: 28038 - DNA, 60 bp, Artificial
  Synthetic oligonucleotide
cgggttggtgccaattattaatcatctcaggttctttcctttaaattacgggtgggttag

SEQ ID NO: 28039 - DNA, 60 bp, Artificial
  Synthetic oligonucleotide
ttacgggtgggttagatagagaatgtataatcctttactgtgacgggtggttcaataggg

SEQ ID NO: 28040 - DNA, 60 bp, Artificial
  Synthetic oligonucleotide
cggcagctagcacaagccttagtagacactaaggttaaagagatttcaaatcaagagcct

SEQ ID NO: 28041 - DNA, 60 bp, Artificial
  Synthetic oligonucleotide
tatttcgggttggtgccaattattaatcatctcaggttctttcctttaaattacgggtgg

SEQ ID NO: 28042 - DNA, 60 bp, Artificial
  Synthetic oligonucleotide
cgggcagctgtgtctgcattggaggccaaaattggggagctcaagagacaacttgcagat

SEQ ID NO: 28043 - DNA, 60 bp, Artificial
  Synthetic oligonucleotide
ggcagctagacaaaagctgaaagatgcagaaaggacggttgaggtggacccggatgacgt

SEQ ID NO: 28044 - DNA, 60 bp, Artificial
  Synthetic oligonucleotide
ccgacagcattgtatgttgctggtgtgcctgaattaggagcattcttttcaatactccaa

SEQ ID NO: 28045 - DNA, 60 bp, Artificial
  Synthetic oligonucleotide
ctagccctcaatctgcatggatatttgcctgtgcaccggaccgatgtccaccgacagcat

SEQ ID NO: 28046 - DNA, 60 bp, Artificial
  Synthetic oligonucleotide
atgagcaacctcaaagaagttcaggacaatattacaacccacgaacagcagctagtggca

SEQ ID NO: 28047 - DNA, 60 bp, Artificial
  Synthetic oligonucleotide
gctagtggcagctagacaaaagctgaaagatgcagaaaggacggttgaggtggacccgga

SEQ ID NO: 28048 - DNA, 60 bp, Artificial
  Synthetic oligonucleotide
gagcaacctcaaagaagttcaggacaatattacaacccacgaacagcagctagtggcagc

SEQ ID NO: 28049 - DNA, 60 bp, Artificial
  Synthetic oligonucleotide
gtgaaggattgggttgataaaattgaggactttttaagggctgaatgtccattcctacca

SEQ ID NO: 28050 - DNA, 54 bp, Artificial
  Synthetic oligonucleotide
tattccctgcacagattaaagcacggaatattataagccctgtcatgggagtga

SEQ ID NO: 28051 - DNA, 60 bp, Artificial
  Synthetic oligonucleotide
ggaagcccaaacacttgtatgtgtccttgcctacagcacagtcaacaatgaaggcagatg

SEQ ID NO: 28052 - DNA, 60 bp, Artificial
  Synthetic oligonucleotide
attcggaagcccaaacacttgtatgtgtccttgcctacagcacagtcaacaatgaaggca

SEQ ID NO: 28053 - DNA, 60 bp, Artificial
  Synthetic oligonucleotide
atagacagacacaggttgaagagtcaaaggtgcaggacattttagacctaattgacactg

SEQ ID NO: 28054 - DNA, 60 bp, Artificial
  Synthetic oligonucleotide
gtgcttactttatgaatagacagacacaggttgaagagtcaaaggtgcaggacattttag

SEQ ID NO: 28055 - DNA, 60 bp, Artificial
  Synthetic oligonucleotide
ccaagggcacaagcagagtcattcctgtcgacaaatggtgcttactttatgaatagacag

SEQ ID NO: 28056 - DNA, 60 bp, Artificial
  Synthetic oligonucleotide
attcctaccaaaaccaagggcacaagcagagtcattcctgtcgacaaatggtgcttactt

SEQ ID NO: 28057 - DNA, 60 bp, Artificial
  Synthetic oligonucleotide
atggtaatttagtctatagacctagttaatgattgaaatctatatagttagtttgtgtta

SEQ ID NO: 28058 - DNA, 50 bp, Artificial
  Synthetic oligonucleotide
ttaggattaaggttaagattaaactttaggttaaggttataattgctagt

SEQ ID NO: 28059 - DNA, 60 bp, Artificial
  Synthetic oligonucleotide
ctcatcctaaaccctcaaccctaacctacctcttacattctacctcagagtttatgtttc

SEQ ID NO: 28060 - DNA, 60 bp, Artificial
  Synthetic oligonucleotide
acctcatcctaaaccctcaaccctaacctacctcttacattctacctcagagtttatgtt

SEQ ID NO: 28061 - DNA, 60 bp, Artificial
  Synthetic oligonucleotide
cagatttgtgttccaaatggccggtgccactgatgatgcacaaaaggattccatctatgc

SEQ ID NO: 28062 - DNA, 60 bp, Artificial
  Synthetic oligonucleotide
tggggttctgatattgtcaaccatttccatctgggtgatgatatggaccctgaactcaga

SEQ ID NO: 28063 - DNA, 60 bp, Artificial
  Synthetic oligonucleotide
gtggggttctgatattgtcaaccatttccatctgggtgatgatatggaccctgaactcag

SEQ ID NO: 28064 - DNA, 60 bp, Artificial
  Synthetic oligonucleotide
tggcaaaagattggagtgaccgtattgagcagtggctaagtgaaccctgtaagctactcc

SEQ ID NO: 28065 - DNA, 60 bp, Artificial
  Synthetic oligonucleotide
aaatcggttccggctaacagaacagcaggtaaactttgtgtgtcaaagagtagacatgga

SEQ ID NO: 28066 - DNA, 58 bp, Artificial
  Synthetic oligonucleotide
tgttacacaagtacctcaaatcaggaggtgtcaggcagcgaaacactgaagtactttt

SEQ ID NO: 28067 - DNA, 60 bp, Artificial
  Synthetic oligonucleotide
ggtccttactacttccacggctggattaacacggaatctttatgagttgaagatagaatg

SEQ ID NO: 28068 - DNA, 60 bp, Artificial
  Synthetic oligonucleotide
cacggctggattaacacggaatctttatgagttgaagatagaatgcccgcatacagtagg

SEQ ID NO: 28069 - DNA, 60 bp, Artificial
  Synthetic oligonucleotide
ggtccttactactgcaactgctgggctaacacggaatctttatgagttgaagatagaatg

SEQ ID NO: 28070 - DNA, 60 bp, Artificial
  Synthetic oligonucleotide
gcagtggtgtacaacatcatgtgtgtttggagatcctggagacataatgtcaacaacgag

SEQ ID NO: 28071 - DNA, 60 bp, Artificial
  Synthetic oligonucleotide
aactgctgggctaacacggaatctttatgagttgaagatagaatgtccacatactgtggg

SEQ ID NO: 28072 - DNA, 60 bp, Artificial
  Synthetic oligonucleotide
caatggtgtacaacatcatgtgtgtttggagatcccggtgatattatgtcaacaacaagt

SEQ ID NO: 28073 - DNA, 60 bp, Artificial
  Synthetic oligonucleotide
gttatgtttatggttgcctggggaaaggaggcagtggacaactttcatctcggtgatgac

SEQ ID NO: 28074 - DNA, 54 bp, Artificial
  Synthetic oligonucleotide
aaaacacaggctgaatcattcatggggactaacagagcatatttcataaaccga

SEQ ID NO: 28075 - DNA, 60 bp, Artificial
  Synthetic oligonucleotide
atgctgctgagtctgaatcagctactctcttcaacgatattgctgtaccacactctgtct

SEQ ID NO: 28076 - DNA, 60 bp, Artificial
  Synthetic oligonucleotide
agaggattgaggactttttggcatctgactgtccatttctgcctaaacctaaaacacagg

SEQ ID NO: 28077 - DNA, 60 bp, Artificial
  Synthetic oligonucleotide
ttttggcatctgactgtccatttctgcctaaacctaaaacacaggctgaatcattcatgg

SEQ ID NO: 28078 - DNA, 60 bp, Artificial
  Synthetic oligonucleotide
ctgcataagctggaatgagcaacctccaagaagtacaggaaggcatcacacttcatgagc

SEQ ID NO: 28079 - DNA, 60 bp, Artificial
  Synthetic oligonucleotide
ccctgttatgggggtcatcgggttcggattttttgtgaaggattgggctgagaggattga

SEQ ID NO: 28080 - DNA, 60 bp, Artificial
  Synthetic oligonucleotide
ataaacgggatcaggaagccaaaacatctgtatgtatccatgcccactgctcaatctacc

SEQ ID NO: 28081 - DNA, 60 bp, Artificial
  Synthetic oligonucleotide
ggaagccaaaacatctgtatgtatccatgcccactgctcaatctaccatgaaagccgatg

SEQ ID NO: 28082 - DNA, 60 bp, Artificial
  Synthetic oligonucleotide
cactctgtctgggtattttcctgtgcacctgacaggtgtccaccaacagcattgtatgtt

SEQ ID NO: 28083 - DNA, 60 bp, Artificial
  Synthetic oligonucleotide
acgggttaatcaatgtgagggtggtgggcggttattatatacaagggtggaatgtttact

SEQ ID NO: 28084 - DNA, 60 bp, Artificial
  Synthetic oligonucleotide
tgagggtggtgggcggttattatatacaagggtggaatgtttacttacatgggtttaagg

SEQ ID NO: 28085 - DNA, 60 bp, Artificial
  Synthetic oligonucleotide
gttaattgagttaaatttatgtatctgttgagtcatagtcagttagatatataggcaagt

SEQ ID NO: 28086 - DNA, 60 bp, Artificial
  Synthetic oligonucleotide
ataggcaagttgattaattgtgaattgattgtatgatgcactgctgatcaatcaatgatt

SEQ ID NO: 28087 - DNA, 60 bp, Artificial
  Synthetic oligonucleotide
atcaatgattcctgtttcttataattaggtgcttaattcaaatcaactgttctgctcttg

SEQ ID NO: 28088 - DNA, 64 bp, Artificial
  Synthetic oligonucleotide
cctgtttcttataattaggtgcttaattcaaatcaactgttctgctcttgataggatactacac

SEQ ID NO: 28089 - DNA, 60 bp, Artificial
  Synthetic oligonucleotide
tctgctcttgataggatactacactgagcctttaatctcatatcaatattaatagtcaat

SEQ ID NO: 28090 - DNA, 60 bp, Artificial
  Synthetic oligonucleotide
aatagtcaatagatgtaaatttcgttcaaggcttgtgcttagctctactaacgctaatat

SEQ ID NO: 28091 - DNA, 60 bp, Artificial
  Synthetic oligonucleotide
atagatgtaaatttcgttcaaggcttgtgcttagctctactaacgctaatatacaacgac

SEQ ID NO: 28092 - DNA, 60 bp, Artificial
  Synthetic oligonucleotide
cccctccccttattactacctcatttattctacctcatcagttattttcttgattgcttt

SEQ ID NO: 28093 - DNA, 50 bp, Artificial
  Synthetic oligonucleotide
aaaactggcttcaaaaccagttgacccgacggggcttgagcctgatgatc

SEQ ID NO: 28094 - DNA, 60 bp, Artificial
  Synthetic oligonucleotide
cgggcagctgtgtctacactggaaaacaaaattgcagaactcaagaggcagctggcggat

SEQ ID NO: 28095 - DNA, 60 bp, Artificial
  Synthetic oligonucleotide
ccgacggggcttgagcctgatgatcatctgaaggagaaatcagcacttaggtatggcaat

SEQ ID NO: 28096 - DNA, 60 bp, Artificial
  Synthetic oligonucleotide
gctggatgtaaactcaattgaccttgaggaaccaagtggacagactgctgattggaaggc

SEQ ID NO: 28097 - DNA, 60 bp, Artificial
  Synthetic oligonucleotide
gtatggcaatgtgctggatgtaaactcaattgaccttgaggaaccaagtggacagactgc

SEQ ID NO: 28098 - DNA, 60 bp, Artificial
  Synthetic oligonucleotide
tatgttgtccaccagagggaggcagacagttaaagaaaacaagggaacacggatccgctt

SEQ ID NO: 28099 - DNA, 60 bp, Artificial
  Synthetic oligonucleotide
tctgaaagcattatatatgttgtccaccagagggaggcagacagttaaagaaaacaaggg

SEQ ID NO: 28100 - DNA, 60 bp, Artificial
  Synthetic oligonucleotide
cacggatccgcttcaaggatgattcatcatatgaggaaataaacgggatcaggaagccaa

SEQ ID NO: 28101 - DNA, 60 bp, Artificial
  Synthetic oligonucleotide
aaaacaagggaacacggatccgcttcaaggatgattcatcatatgaggaaataaacggga

SEQ ID NO: 28102 - DNA, 60 bp, Artificial
  Synthetic oligonucleotide
ccaatccatgggaatacaactggatcaaaagataatcatcttgtatatgcttttctgggg

SEQ ID NO: 28103 - DNA, 60 bp, Artificial
  Synthetic oligonucleotide
gtacagctgaggagaagcttaagaaaaaatctgctttctatcaatcctatttaagaagga

SEQ ID NO: 28104 - DNA, 60 bp, Artificial
  Synthetic oligonucleotide
ggacccagagctaaggcagctggcacaatctctgattgatgcaaaagtgaaggagatttc

SEQ ID NO: 28105 - DNA, 60 bp, Artificial
  Synthetic oligonucleotide
gtgatgatatggacccagagctaaggcagctggcacaatctctgattgatgcaaaagtga

SEQ ID NO: 28106 - DNA, 60 bp, Artificial
  Synthetic oligonucleotide
ctggggaaaggaagcagtgaatcacttccacttgggtgatgatatggacccagagctaag

SEQ ID NO: 28107 - DNA, 60 bp, Artificial
  Synthetic oligonucleotide
cttgtatatgcttttctggggaaaggaagcagtgaatcacttccacttgggtgatgatat

SEQ ID NO: 28108 - DNA, 60 bp, Artificial
  Synthetic oligonucleotide
gttaaagattgctttccgggcttgtgccaacatttatccatctcaggactatcctgcact

SEQ ID NO: 28109 - DNA, 60 bp, Artificial
  Synthetic oligonucleotide
tgaagcttgattgttaaagattgctttccgggcttgtgccaacatttatccatctcagga

SEQ ID NO: 28110 - DNA, 60 bp, Artificial
  Synthetic oligonucleotide
attgcttgtggtctttttccagcacagatcaaagcaagaaatatcataagccctgttatg

SEQ ID NO: 28111 - DNA, 60 bp, Artificial
  Synthetic oligonucleotide
ggcttgcgatttggctctaatagccctattgatgggtattatcatgcagcttttatccag

SEQ ID NO: 28112 - DNA, 60 bp, Artificial
  Synthetic oligonucleotide
ctgtgattcaccaagagcagatctggataaaagctgcatgataatacccatcaatagggc

SEQ ID NO: 28113 - DNA, 60 bp, Artificial
  Synthetic oligonucleotide
tcaccctagggttacaactaccctctctaaacaaggagcagacattgttgtacacaatcc

SEQ ID NO: 28114 - DNA, 60 bp, Artificial
  Synthetic oligonucleotide
gggagctagatcaccctagggttacaactaccctctctaaacaaggagcagacattgttg

SEQ ID NO: 28115 - DNA, 60 bp, Artificial
  Synthetic oligonucleotide
tcaagtttacaagaaagatgtttcttttgctagtgtcatgtattcttggacaaaagaatt

SEQ ID NO: 28116 - DNA, 57 bp, Artificial
  Synthetic oligonucleotide
tcttttgtccaagaatacatgacactagcaaaagaaacatctttcttgtaaacttga

SEQ ID NO: 28117 - DNA, 60 bp, Artificial
  Synthetic oligonucleotide
caaaagaattctgtgattcaccaagagcagatctggataaaagctgcatgataataccca

SEQ ID NO: 28118 - DNA, 60 bp, Artificial
  Synthetic oligonucleotide
gtattatcatgcagcttttatccagatctgctcttggtgaatcacagaattcttttgtcc

SEQ ID NO: 28119 - DNA, 60 bp, Artificial
  Synthetic oligonucleotide
ccctagggttacaactaccctctctaaacaaggagcagacattgttgtacacaatccttc

SEQ ID NO: 28120 - DNA, 60 bp, Artificial
  Synthetic oligonucleotide
aggattgtgtacaacaatgtctgctccttgtttagagagggtagttgtaaccctagggtg

SEQ ID NO: 28121 - DNA, 52 bp, Artificial
  Synthetic oligonucleotide
cccatcaggatcagctatagtagggcatatccagataactatccttgagatc

SEQ ID NO: 28122 - DNA, 60 bp, Artificial
  Synthetic oligonucleotide
cagacattgttgtacacaatccttctgctaatcacaacaacaaggaagttctccaaagag

SEQ ID NO: 28123 - DNA, 51 bp, Artificial
  Synthetic oligonucleotide
ccctagggtgatctagctccctgctgctagatgatctgagtgatttgaaaa

SEQ ID NO: 28124 - DNA, 60 bp, Artificial
  Synthetic oligonucleotide
ccctagggtgatctagctccctgctgctagatgatctgagtgatttgaaaaaactattca

SEQ ID NO: 28125 - DNA, 60 bp, Artificial
  Synthetic oligonucleotide
atgaatagttttttcaaatcactcagatcatctagcagcagggagctagatcaccctagg

SEQ ID NO: 28126 - DNA, 60 bp, Artificial
  Synthetic oligonucleotide
caatgtctgctccttgtttagagagggtagttgtaaccctagggtgatctagctccctgc

SEQ ID NO: 28127 - DNA, 60 bp, Artificial
  Synthetic oligonucleotide
cagggagctagatcaccctagggttacaactaccctctctaaacaaggagcagacattgt

SEQ ID NO: 28128 - DNA, 53 bp, Artificial
  Synthetic oligonucleotide
ttttcaaatcactcagatcatctagcagcagggagctagatcaccctagggtt

SEQ ID NO: 28129 - DNA, 60 bp, Artificial
  Synthetic oligonucleotide
aaatcactcagatcatctagcagcagggagctagatcaccctagggttacaactaccctc

SEQ ID NO: 28130 - DNA, 60 bp, Artificial
  Synthetic oligonucleotide
ctcagggtggtttaggatgtcaccttaagtgactttttctgtatatatggatgtagattt

SEQ ID NO: 28131 - DNA, 60 bp, Artificial
  Synthetic oligonucleotide
cagcaggatcatgtggggtttactattgctagccgctctggttggccaaggtttagcatt

SEQ ID NO: 28132 - DNA, 60 bp, Artificial
  Synthetic oligonucleotide
gcatgtaatacaacattttgtaagccaactgtctacatgattgtcccaattcatgcttgc

SEQ ID NO: 28133 - DNA, 60 bp, Artificial
  Synthetic oligonucleotide
gccctacagaatccaggtaatttatgagagaacttattgtactacagggatactgacaga

SEQ ID NO: 28134 - DNA, 60 bp, Artificial
  Synthetic oligonucleotide
tatcacttctccgatgtgcctagtgtcaaaacaaaacagatttagggcagcagaacagca

SEQ ID NO: 28135 - DNA, 60 bp, Artificial
  Synthetic oligonucleotide
acacagaatggtcgaggaatcatatagaaataggaggtcagtaatttgttatgatctggc

SEQ ID NO: 28136 - DNA, 60 bp, Artificial
  Synthetic oligonucleotide
gcaggcattccatcttactcatcaacaagtatcttggctgcatcagaggatggcaggttt

SEQ ID NO: 28137 - DNA, 60 bp, Artificial
  Synthetic oligonucleotide
gcgagccaactgaaacagcaattcaggcccattataaagtctgtcaagctacccatcggt

SEQ ID NO: 28138 - DNA, 60 bp, Artificial
  Synthetic oligonucleotide
cccatcggttcagggaagatttaaaaaagactgtaacccctcaaaatattgggccaggtt

SEQ ID NO: 28139 - DNA, 60 bp, Artificial
  Synthetic oligonucleotide
caaaaaggaaacacatacaaaatagtatcagcaatcacatcagcaatgggctccaaatgc

SEQ ID NO: 28140 - DNA, 60 bp, Artificial
  Synthetic oligonucleotide
agggcaatggaagttttttcaggaattattacatcaccacatggggaagatcatgacctc

SEQ ID NO: 28141 - DNA, 60 bp, Artificial
  Synthetic oligonucleotide
aaaaggcaaatcaggaatcagcaagtcagaattcatttgaggttgtggaaaatgaggtga

SEQ ID NO: 28142 - DNA, 60 bp, Artificial
  Synthetic oligonucleotide
cgaaagccagggcattggtgctgatgttcaccatctcggacactggtatgatgcaagatt

SEQ ID NO: 28143 - DNA, 60 bp, Artificial
  Synthetic oligonucleotide
gctcgacttttccttaccatctagctctaaatacacatataaaaggcatcttacaaatcc

SEQ ID NO: 28144 - DNA, 60 bp, Artificial
  Synthetic oligonucleotide
tggacagataatgcccatggagttggcagtgttccaatgcatacagatctggagcttgac

SEQ ID NO: 28145 - DNA, 60 bp, Artificial
  Synthetic oligonucleotide
ctcccaggtgaagagatagcaacataccagatctcaggtcaaatagaggctaagatcccc

SEQ ID NO: 28146 - DNA, 60 bp, Artificial
  Synthetic oligonucleotide
attaaacttaaagacatcatttcactgttatggtgcctgcacaaagtatcagtacccatg

SEQ ID NO: 28147 - DNA, 60 bp, Artificial
  Synthetic oligonucleotide
gaggcttgtgacatggcaatttgttatggagcagaaagtgtaacactatcacggggccaa

SEQ ID NO: 28148 - DNA, 60 bp, Artificial
  Synthetic oligonucleotide
cactttacagatgagaggattgaatggaaagatcctgacggtatgcttcgagaccatatt

SEQ ID NO: 28149 - DNA, 60 bp, Artificial
  Synthetic oligonucleotide
ggctgaaaacccttgtaaagtaggccttcaagcagctaatatagaaggtgcctggggctc

SEQ ID NO: 28150 - DNA, 60 bp, Artificial
  Synthetic oligonucleotide
gagtgctcagcaaatggccttcaggcaagtgccccacatttggataaagtgaacggtatt

SEQ ID NO: 28151 - DNA, 60 bp, Artificial
  Synthetic oligonucleotide
ttgcccccactcccactacaggaggcagaacagcttgtgccggaaagctcttgtaacatg

SEQ ID NO: 28152 - DNA, 60 bp, Artificial
  Synthetic oligonucleotide
ctttgacatgaagatacagtgccctcattcagtaaactttggggaaacaagtgtgtcagg

SEQ ID NO: 28153 - DNA, 60 bp, Artificial
  Synthetic oligonucleotide
ggtgggaattcagctcctgtttatgctcctgctggtgaagatttcagggcaatggaagtt

SEQ ID NO: 28154 - DNA, 60 bp, Artificial
  Synthetic oligonucleotide
tacagattctaaggtccaaggatactacatatgcattattggtgggaattcagctcctgt

SEQ ID NO: 28155 - DNA, 60 bp, Artificial
  Synthetic oligonucleotide
tactgtaatgggcaaaaaaagacaattctgaccaaaacactagttattggccagtgcata

SEQ ID NO: 28156 - DNA, 60 bp, Artificial
  Synthetic oligonucleotide
cctggggttgcacattctattgctattgaactatgtgtaccaggtttccatggctgggct

SEQ ID NO: 28157 - DNA, 60 bp, Artificial
  Synthetic oligonucleotide
aggtttccatggctgggctacagcagcacttctagttaccttctgttttggttgggtttt

SEQ ID NO: 28158 - DNA, 53 bp, Artificial
  Synthetic oligonucleotide
acgaaaaataaaggaggaatttgaaaaaacaaagggctcaatggtgtgtgaaa

SEQ ID NO: 28159 - DNA, 60 bp, Artificial
  Synthetic oligonucleotide
gggaagtgttttgtccctgataaggctgttgttagtgctttaaagagaggtatgtgtgca

SEQ ID NO: 28160 - DNA, 60 bp, Artificial
  Synthetic oligonucleotide
gtcctgtgttcaaggggagtgcccatattgcttcacccattgcgagccaactgaaacagc

SEQ ID NO: 28161 - DNA, 60 bp, Artificial
  Synthetic oligonucleotide
ggtgttatatcctgacaatgtggattctccttcttgtcattgaatctatattgtgggcag

SEQ ID NO: 28162 - DNA, 60 bp, Artificial
  Synthetic oligonucleotide
atatgagaatagttgggcatgtaatccacctgattgccctggtgttggggcaggctgtac

SEQ ID NO: 28163 - DNA, 58 bp, Artificial
  Synthetic oligonucleotide
ttataagcgtcagatatagtaggaaagtttgtgtccaatttggtgaagagtacctttg

SEQ ID NO: 28164 - DNA, 60 bp, Artificial
  Synthetic oligonucleotide
gactaggcatgccaagatctgtataatcgggactgtgtccaagttttctcaaggtgacac

SEQ ID NO: 28165 - DNA, 60 bp, Artificial
  Synthetic oligonucleotide
ccaagttttctcaaggtgacactttattatttcttggacctatggaaggaggcggaatta

SEQ ID NO: 28166 - DNA, 60 bp, Artificial
  Synthetic oligonucleotide
ggcggaattatcttcaaacattggtgcacatcaacctgccattttggagaccctggcgat

SEQ ID NO: 28167 - DNA, 60 bp, Artificial
  Synthetic oligonucleotide
agccatttatatgtcccgaatttccaggccagttcagaaaaaaatgtaattttgctacga

SEQ ID NO: 28168 - DNA, 60 bp, Artificial
  Synthetic oligonucleotide
gctaagcatattgtgtcctgttagaaagcataagaagtcatgagctcgacctgagaatac

SEQ ID NO: 28169 - DNA, 60 bp, Artificial
  Synthetic oligonucleotide
gtattaactactaaaaaaaatactctcttctatctcccaatcttctattgattcaccggg

SEQ ID NO: 28170 - DNA, 60 bp, Artificial
  Synthetic oligonucleotide
atctcaaccaccttgacattgatgaaccgactgggcaaactgctgattggctgagcattg

SEQ ID NO: 28171 - DNA, 60 bp, Artificial
  Synthetic oligonucleotide
ggacacttgattcaacagattctatagcgtcttctaacttttgccttctcttgtccacgt

SEQ ID NO: 28172 - DNA, 60 bp, Artificial
  Synthetic oligonucleotide
aaagctctcagctggccattgggcatccctgactgtgagatttttagtatatgtagtgaa

SEQ ID NO: 28173 - DNA, 60 bp, Artificial
  Synthetic oligonucleotide
gacctgtttagagagataggatctctagtctgcctcagactcatcaatgcagagccatat

SEQ ID NO: 28174 - DNA, 60 bp, Artificial
  Synthetic oligonucleotide
cacaagaggccaggagattgggccttagtaatgagcattataacgggtatgacctgttta

SEQ ID NO: 28175 - DNA, 60 bp, Artificial
  Synthetic oligonucleotide
ggtcgaggcttgggtcaatgagaccagcaaagcttggatgcatcatctgcctaggatacg

SEQ ID NO: 28176 - DNA, 60 bp, Artificial
  Synthetic oligonucleotide
ctgcttcttctggggaggcacttgagatcaggacagtgattaggtcctatagagcaagtg

SEQ ID NO: 28177 - DNA, 60 bp, Artificial
  Synthetic oligonucleotide
agagccatatgatactgcttcttctggggaggcacttgagatcaggacagtgattaggtc

SEQ ID NO: 28178 - DNA, 60 bp, Artificial
  Synthetic oligonucleotide
gatgcatcatctgcctaggatacgtttgtccacacatgcgatccattgtgctcccaggaa

SEQ ID NO: 28179 - DNA, 60 bp, Artificial
  Synthetic oligonucleotide
ctgatactcgtccatctcgaattcagctcactttgattttctagggaactttgtgtcccc

SEQ ID NO: 28180 - DNA, 60 bp, Artificial
  Synthetic oligonucleotide
catatacaagaataacttgtgagcatccagaactgcattgaaatcctcttggtcgaggct

SEQ ID NO: 28181 - DNA, 60 bp, Artificial
  Synthetic oligonucleotide
atgtagtgaagggtttgtgagagggctccaaacaagagaccaattaatgtcttatatcct

SEQ ID NO: 28182 - DNA, 60 bp, Artificial
  Synthetic oligonucleotide
attgaaatcctcttggtcgaggcttgggtcaatgagaccagcaaagcttggatgcatcat

SEQ ID NO: 28183 - DNA, 60 bp, Artificial
  Synthetic oligonucleotide
ctgagtgttgtctataaaagagctgttgatagcagcaagcattggctgagagaatgactc

SEQ ID NO: 28184 - DNA, 60 bp, Artificial
  Synthetic oligonucleotide
agaatgactcctcaatatctcttttctgtgcaccacgtaggctgacattgattgttttgg

SEQ ID NO: 28185 - DNA, 60 bp, Artificial
  Synthetic oligonucleotide
gctcttgctccagaggttaagatcccaaactttgtcaggaaagctctcctctgagtgttg

SEQ ID NO: 28186 - DNA, 60 bp, Artificial
  Synthetic oligonucleotide
gccagtacatgttcgattatccggcaatcaacattgatgtgaggtgtcacagactcctct

SEQ ID NO: 28187 - DNA, 60 bp, Artificial
  Synthetic oligonucleotide
cacacatgatgaacagccagtacatgttcgattatccggcaatcaacattgatgtgaggt

SEQ ID NO: 28188 - DNA, 60 bp, Artificial
  Synthetic oligonucleotide
ggtgtcacagactcctctctagtgtttcttacattgcctacaataaatttcacacccacg

SEQ ID NO: 28189 - DNA, 60 bp, Artificial
  Synthetic oligonucleotide
gataatcattttcttagcatcctcttcccagccttttcctccaagctggatgaggttctg

SEQ ID NO: 28190 - DNA, 50 bp, Artificial
  Synthetic oligonucleotide
ccccacatctgtcccacccaactaccccaagcccaaaagtccctcaccca

SEQ ID NO: 28191 - DNA, 60 bp, Artificial
  Synthetic oligonucleotide
ctcccaggaactggaagaaagttctcaaccacttctacagcctgaacggtccatccagcc

SEQ ID NO: 28192 - DNA, 60 bp, Artificial
  Synthetic oligonucleotide
agaaagttctcaaccacttctacagcctgaacggtccatccagccagagctgcagctacc

SEQ ID NO: 28193 - DNA, 60 bp, Artificial
  Synthetic oligonucleotide
ccatccagccagagctgcagctacccttgatagagttattccgtttctgccaggtcttcc

SEQ ID NO: 28194 - DNA, 60 bp, Artificial
  Synthetic oligonucleotide
caggtcttccttcaactatcttatacttcgaaaccaggcttttaacctctctggctccct

SEQ ID NO: 28195 - DNA, 60 bp, Artificial
  Synthetic oligonucleotide
ccttcaactatcttatacttcgaaaccaggcttttaacctctctggctccctctggagac

SEQ ID NO: 28196 - DNA, 60 bp, Artificial
  Synthetic oligonucleotide
acgagtcagagataagataatcattttcttagcatcctcttcccagccttttcctccaag

SEQ ID NO: 28197 - DNA, 60 bp, Artificial
  Synthetic oligonucleotide
cttactccagcttcctgtagacttctgcaatctttttcacgactgcagtagctcttgctc

SEQ ID NO: 28198 - DNA, 60 bp, Artificial
  Synthetic oligonucleotide
ttcctccaagctggatgaggttctggatgatcgttctggcatcaaacccctgataagcaa

SEQ ID NO: 28199 - DNA, 60 bp, Artificial
  Synthetic oligonucleotide
ctgacccaacccaccccccacatctgtcccacccaactaccccaagcccaaaagtccctc

SEQ ID NO: 28200 - DNA, 56 bp, Artificial
  Synthetic oligonucleotide
tgataagcaaaagcttgtagccattcctgaaccacagtctcatcaattgcctgctc

SEQ ID NO: 28201 - DNA, 60 bp, Artificial
  Synthetic oligonucleotide
ccctccccaagccccacccagaccaccccaccctgtcccgcacccctagtctgacccaac

SEQ ID NO: 28202 - DNA, 60 bp, Artificial
  Synthetic oligonucleotide
tccccaagccccacccagaccaccccaccctgtcccgcacccctagtctgacccaaccca

SEQ ID NO: 28203 - DNA, 60 bp, Artificial
  Synthetic oligonucleotide
catctgactccgacttctgatttccgctgcccaaccccaaatgcccacccccctccccaa

SEQ ID NO: 28204 - DNA, 60 bp, Artificial
  Synthetic oligonucleotide
ccctttgggtcccgatacatagccatgtggatgaaaatgacgagagctcatctgactccg

SEQ ID NO: 28205 - DNA, 60 bp, Artificial
  Synthetic oligonucleotide
cccttggagagttaccagcttcatggggcccagcatgctacataagctctgtaaagccca

SEQ ID NO: 28206 - DNA, 60 bp, Artificial
  Synthetic oligonucleotide
ctctgtaaagcccatggtttacaccttccagggcatggcgagtgatctctctagatttga

SEQ ID NO: 28207 - DNA, 60 bp, Artificial
  Synthetic oligonucleotide
gcccatggtttacaccttccagggcatggcgagtgatctctctagatttgacctcactag

SEQ ID NO: 28208 - DNA, 60 bp, Artificial
  Synthetic oligonucleotide
taaatttcacacccacgatgtctcaacttatgagcactgtgagataccattggaaaagtt

SEQ ID NO: 28209 - DNA, 60 bp, Artificial
  Synthetic oligonucleotide
ggatgaggttctggatgatcgttctggcatcaaacccctgataagcaaaagcttgtagcc

SEQ ID NO: 28210 - DNA, 60 bp, Artificial
  Synthetic oligonucleotide
tggaaaagttgagacttggggttggacgcagaagctcgctgtctgacttttattcccttg

SEQ ID NO: 28211 - DNA, 60 bp, Artificial
  Synthetic oligonucleotide
cttggggttggacgcagaagctcgctgtctgacttttattcccttggagagttaccagct

SEQ ID NO: 28212 - DNA, 60 bp, Artificial
  Synthetic oligonucleotide
ctagatttgacctcactagtttctccaggagaggaatgccaaatgtcttgaaagctctca

SEQ ID NO: 28213 - DNA, 60 bp, Artificial
  Synthetic oligonucleotide
ctagtttctccaggagaggaatgccaaatgtcttgaaagctctcagctggccattgggca

SEQ ID NO: 28214 - DNA, 60 bp, Artificial
  Synthetic oligonucleotide
gacccagatgacgttaacaaaaatacactgcaagcaaggcaacagacagtgtcagcattg

SEQ ID NO: 28215 - DNA, 60 bp, Artificial
  Synthetic oligonucleotide
ctctctgtgatagagtgcctgacttagctctagcagaaatgaaaatggcccttgctacag

SEQ ID NO: 28216 - DNA, 60 bp, Artificial
  Synthetic oligonucleotide
cgataagctccaattaagatcaaccctcacaaactccgcatctctctgtgatagagtgcc

SEQ ID NO: 28217 - DNA, 60 bp, Artificial
  Synthetic oligonucleotide
cagaatccagaaatctggctttgatctggaaagcttagaggtcgtgtccactgaacacct

SEQ ID NO: 28218 - DNA, 60 bp, Artificial
  Synthetic oligonucleotide
tgttgcaagcccagaggatgcaatcttgggctcaggacactcaaaaaacatattgaactt

SEQ ID NO: 28219 - DNA, 60 bp, Artificial
  Synthetic oligonucleotide
ccaactcagaatgcctacaaggtgagaggcaacgcaaccaatgttaacatcatctaaaag

SEQ ID NO: 28220 - DNA, 60 bp, Artificial
  Synthetic oligonucleotide
gaaatctggctttgatctggaaagcttagaggtcgtgtccactgaacaccttttgcacca

SEQ ID NO: 28221 - DNA, 60 bp, Artificial
  Synthetic oligonucleotide
catctaaaagctggcattgtgtggcctgccctaacactctaggcatgctgcacatcagca

SEQ ID NO: 28222 - DNA, 60 bp, Artificial
  Synthetic oligonucleotide
tacaaggtgagaggcaacgcaaccaatgttaacatcatctaaaagctggcattgtgtggc

SEQ ID NO: 28223 - DNA, 60 bp, Artificial
  Synthetic oligonucleotide
ctggtcgaatgagtgagatgggtgcatgcttcggggttattcctgttgcaagcccagagg

SEQ ID NO: 28224 - DNA, 60 bp, Artificial
  Synthetic oligonucleotide
ctaactcctggtcgaatgagtgagatgggtgcatgcttcggggttattcctgttgcaagc

SEQ ID NO: 28225 - DNA, 60 bp, Artificial
  Synthetic oligonucleotide
tcaaaccttttagcgataagctccaattaagatcaaccctcacaaactccgcatctctct

SEQ ID NO: 28226 - DNA, 60 bp, Artificial
  Synthetic oligonucleotide
gatggagaaccagatcaaggcaaacaccaaaaaagagtttgatgagtggttcaaaccttt

SEQ ID NO: 28227 - DNA, 60 bp, Artificial
  Synthetic oligonucleotide
atgcaaaatatatggatctcagaaagggaatccctgaaccagagcagctagtatcatacc

SEQ ID NO: 28228 - DNA, 51 bp, Artificial
  Synthetic oligonucleotide
tggtggaggcaacacgattctgtgctccaatctatgaatgtgcttggacct

SEQ ID NO: 28229 - DNA, 60 bp, Artificial
  Synthetic oligonucleotide
gctggcattgtgtggcctgccctaacactctaggcatgctgcacatcagcaaaaggtcac

SEQ ID NO: 28230 - DNA, 60 bp, Artificial
  Synthetic oligonucleotide
atcaaagcactgacatccacaccactaaggtggggtaaaggattgattaacttgtttgca

SEQ ID NO: 28231 - DNA, 60 bp, Artificial
  Synthetic oligonucleotide
ctgacatccacaccactaaggtggggtaaaggattgattaacttgtttgcagatgatgac

SEQ ID NO: 28232 - DNA, 60 bp, Artificial
  Synthetic oligonucleotide
acaaggtgcctggagagattgctgttgatgtcaaggaaatgctatctgacatgatcagac

SEQ ID NO: 28233 - DNA, 60 bp, Artificial
  Synthetic oligonucleotide
caacaaggatgcactggaggatggaaaaggcaatgaactcattcagaccatgacaaagca

SEQ ID NO: 28234 - DNA, 60 bp, Artificial
  Synthetic oligonucleotide
atatggatctcagaaagggaatccctgaaccagagcagctagtatcataccagcaagcag

SEQ ID NO: 28235 - DNA, 60 bp, Artificial
  Synthetic oligonucleotide
tgcagaatacaaggtgcctggagagattgctgttgatgtcaaggaaatgctatctgacat

SEQ ID NO: 28236 - DNA, 60 bp, Artificial
  Synthetic oligonucleotide
gcacctggctcaagcagtggaactgtccaagaagtccaatgcccttcgcgcacaaggagc

SEQ ID NO: 28237 - DNA, 60 bp, Artificial
  Synthetic oligonucleotide
actgggcttggagcgccggagttaagccagagacttttttcactttgtctcaattcctct

SEQ ID NO: 28238 - DNA, 60 bp, Artificial
  Synthetic oligonucleotide
ggatgcactggaggatggaaaaggcaatgaactcattcagaccatgacaaagcacctggc

SEQ ID NO: 28239 - DNA, 60 bp, Artificial
  Synthetic oligonucleotide
tgacaaagcacctggctcaagcagtggaactgtccaagaagtccaatgcccttcgcgcac

SEQ ID NO: 28240 - DNA, 60 bp, Artificial
  Synthetic oligonucleotide
ccaactgtgtcagctgcaaacatagcacttagttggagttcagttgaacacagaggtaat

SEQ ID NO: 28241 - DNA, 60 bp, Artificial
  Synthetic oligonucleotide
accaactgtgtcagctgcaaacatagcacttagttggagttcagttgaacacagaggtaa

SEQ ID NO: 28242 - DNA, 60 bp, Artificial
  Synthetic oligonucleotide
cggtggaagtggacccagatgacgttaacaaaagcacattacagagcagacgggcagctg

SEQ ID NO: 28243 - DNA, 60 bp, Artificial
  Synthetic oligonucleotide
ggaatgcagctacatttaacccggaggtcgggtatgtggcatttattggtaagtatgggc

SEQ ID NO: 28244 - DNA, 60 bp, Artificial
  Synthetic oligonucleotide
cggtggaattggaccccgatgatgttaacaaaagcacattacagagcagacgggcagctg

SEQ ID NO: 28245 - DNA, 60 bp, Artificial
  Synthetic oligonucleotide
ctgcttgcataaagaatggccccattcaagaaactggagatgtaatcccacttggtgctg

SEQ ID NO: 28246 - DNA, 60 bp, Artificial
  Synthetic oligonucleotide
cagccagggcagcagcaactcgtgatagagtcaactcatcccgggaaggattcccctcct

SEQ ID NO: 28247 - DNA, 60 bp, Artificial
  Synthetic oligonucleotide
ggtgtcagacactgcctttacgctccatcgcatctcgggctacttagctcgctgggttgc

SEQ ID NO: 28248 - DNA, 60 bp, Artificial
  Synthetic oligonucleotide
agtgtcagacactgcctttacgctccatcgcatctcgggctacttagctcgctgggttgc

SEQ ID NO: 28249 - DNA, 60 bp, Artificial
  Synthetic oligonucleotide
cgccacaaccaagtgtcgatcttacttttgcaggggtcaaatttacagtggttaataacc

SEQ ID NO: 28250 - DNA, 60 bp, Artificial
  Synthetic oligonucleotide
tggtcttacataagacgccacaaccaagtgtcgatcttacttttgcaggggtcaaattta

SEQ ID NO: 28251 - DNA, 60 bp, Artificial
  Synthetic oligonucleotide
gcgtgtctacaccactgggcttagttatgaccacattcgaatcttctacattaaaggacg

SEQ ID NO: 28252 - DNA, 60 bp, Artificial
  Synthetic oligonucleotide
aagcgtctctacaccactgggcttagttatgaccacattcgaatcttctacattaaagga

SEQ ID NO: 28253 - DNA, 51 bp, Artificial
  Synthetic oligonucleotide
agtcatcggatttagcttctttgtaaaggactggatggaaaggattgaaga

SEQ ID NO: 28254 - DNA, 50 bp, Artificial
  Synthetic oligonucleotide
ttttccatcttgcaggatatgcggaatacaatcatggcatccaagacagt

SEQ ID NO: 28255 - DNA, 60 bp, Artificial
  Synthetic oligonucleotide
ccatcttgcaggatatgcggaatacaatcatggcatccaagacagtgggtacatctgagg

SEQ ID NO: 28256 - DNA, 60 bp, Artificial
  Synthetic oligonucleotide
tgtgaagcagaaagtactttggctactttgcaaacctgttcataagtagaaaagttctta

SEQ ID NO: 28257 - DNA, 57 bp, Artificial
  Synthetic oligonucleotide
gaacttttctacttatgaacaggtttgcaaagtagccaaagtactttctgcttcaca

SEQ ID NO: 28258 - DNA, 60 bp, Artificial
  Synthetic oligonucleotide
aatagaatttcatgatgtcgctgctaacaccagcagtacttttgacccagaggtcgcata

SEQ ID NO: 28259 - DNA, 60 bp, Artificial
  Synthetic oligonucleotide
tcaggcgaacacaatcaatggggatacaactggaccagaggattattgtgctctttatgg

SEQ ID NO: 28260 - DNA, 60 bp, Artificial
  Synthetic oligonucleotide
ggaggaattgcaaaaggagatcaatgcccatgagggtcaacttgtaatagcaaggcaaaa

SEQ ID NO: 28261 - DNA, 60 bp, Artificial
  Synthetic oligonucleotide
gaggcaccatggggagcaataaatgttcagtcaacctacaaaccaactgtgtcaactgca

SEQ ID NO: 28262 - DNA, 60 bp, Artificial
  Synthetic oligonucleotide
gcaccatggggagcaataaatgttcagtcaacctacaaaccaactgtgtcaactgcaaac

SEQ ID NO: 28263 - DNA, 60 bp, Artificial
  Synthetic oligonucleotide
ccagcagtacttttgacccagaggtcgcatacgctaactttaagcgtgtccacaccactg

SEQ ID NO: 28264 - DNA, 60 bp, Artificial
  Synthetic oligonucleotide
gtacactacagagcagacgggcagctgtgtcagcattggaggacaagttggcagacttca

SEQ ID NO: 28265 - DNA, 60 bp, Artificial
  Synthetic oligonucleotide
gcttagaaacaagcctatcaattgaggcaccatggggagcaataaatgtccagtcaacct

SEQ ID NO: 28266 - DNA, 60 bp, Artificial
  Synthetic oligonucleotide
tgctggtcaatatgtgaccaaccctaggttcaatatctccgattacttcgagattgtgcg

SEQ ID NO: 28267 - DNA, 60 bp, Artificial
  Synthetic oligonucleotide
ttagagggtgggtcagttaatccgttgtgggtgggtttagttccaggctgccttaagtag

SEQ ID NO: 28268 - DNA, 60 bp, Artificial
  Synthetic oligonucleotide
catgccacttgctgaagtgaaaggctgcacttggactgaagggctgactatgtatctggg

SEQ ID NO: 28269 - DNA, 60 bp, Artificial
  Synthetic oligonucleotide
catgccactggctgaagtgaaaggttgcacctggactgaagggctgactatgtatctggg

SEQ ID NO: 28270 - DNA, 60 bp, Artificial
  Synthetic oligonucleotide
cattgaggacataggcttcaacaatgtgcttgttaacatcgacaggaatacagtgaagag

SEQ ID NO: 28271 - DNA, 60 bp, Artificial
  Synthetic oligonucleotide
ggaaacttgtggttgccctggttgatcccaacatgccatctgaaaagcaagtcattctga

SEQ ID NO: 28272 - DNA, 60 bp, Artificial
  Synthetic oligonucleotide
gccctagtcgatcccaacatgccatctgaaaagcaagtcattctgaagggtcaggggaca

SEQ ID NO: 28273 - DNA, 60 bp, Artificial
  Synthetic oligonucleotide
gaaaacttgtggttgccctggttgatcccaacatgccatctgaaaagcaagtcattctga

SEQ ID NO: 28274 - DNA, 60 bp, Artificial
  Synthetic oligonucleotide
gctctggtcgatcccaacatgccatctgaaaagcaagtcattctgaagggtcaggggact

SEQ ID NO: 28275 - DNA, 60 bp, Artificial
  Synthetic oligonucleotide
gccatccatggtagtcccagtgacaggaagccactcactcaagacgaccagagcctggca

SEQ ID NO: 28276 - DNA, 60 bp, Artificial
  Synthetic oligonucleotide
gtatgcaggggataggccatccatggtagtcccagtgacaggaagccactcactcaagac

SEQ ID NO: 28277 - DNA, 60 bp, Artificial
  Synthetic oligonucleotide
ggccgtccatggtagtcccagtgacaggaagccactcactcaagacgactaaagcctggc

SEQ ID NO: 28278 - DNA, 60 bp, Artificial
  Synthetic oligonucleotide
tagtagtagactccttgaaaagctactacgagaaagactggaatgagtgacttgacagat

SEQ ID NO: 28279 - DNA, 60 bp, Artificial
  Synthetic oligonucleotide
tagtagtagactccttgaaaagctactacgagaacaactggaatgagtgacttgacagac

SEQ ID NO: 28280 - DNA, 60 bp, Artificial
  Synthetic oligonucleotide
gagcagcctttcctggaacaggaatagagaggcatatgcagctgctacactctgaaatga

SEQ ID NO: 28281 - DNA, 60 bp, Artificial
  Synthetic oligonucleotide
gcaggaagcagatctttgctgcttgtaagagtggtaagtatgttttttgtggtaaaacta

SEQ ID NO: 28282 - DNA, 60 bp, Artificial
  Synthetic oligonucleotide
ctcaaaaccatggtcttcttctgatgaaaagcttgctttaaccaaagccatggatgcatc

SEQ ID NO: 28283 - DNA, 60 bp, Artificial
  Synthetic oligonucleotide
ctaagccatggtcttcttctgatgaaaagcttgctttgacgaaagctatggatacatcca

SEQ ID NO: 28284 - DNA, 60 bp, Artificial
  Synthetic oligonucleotide
caaaaccatggtcttcttctgatgaaaagcttgctttgactaaagctatggatacatcca

SEQ ID NO: 28285 - DNA, 60 bp, Artificial
  Synthetic oligonucleotide
ctaagccatggtcttcttctgatgaaaagcttgctttgactaaagctatggatacatcca

SEQ ID NO: 28286 - DNA, 60 bp, Artificial
  Synthetic oligonucleotide
ttcctttggatgcatccatggctttggttaaagcaagcttttcatcagaagaagaccatg

SEQ ID NO: 28287 - DNA, 60 bp, Artificial
  Synthetic oligonucleotide
ccatggtcttcttctgatgaaaagcttgctttaaccaaagccatggatgcatctaaagga

SEQ ID NO: 28288 - DNA, 59 bp, Artificial
  Synthetic oligonucleotide
ctgcagaaatttggcatcaggcttccataaatatggcatgaggcattcaaattaggttc

SEQ ID NO: 28289 - DNA, 60 bp, Artificial
  Synthetic oligonucleotide
atgatggaccctcaatacctgaagaaggccttaaggcaacgctatggcactctcacagca

SEQ ID NO: 28290 - DNA, 60 bp, Artificial
  Synthetic oligonucleotide
gatggaccctcaatacctgaagaaggccttaaggcaacgctatggcactctcacagcaga

SEQ ID NO: 28291 - DNA, 60 bp, Artificial
  Synthetic oligonucleotide
tatctcctaatagaaatgtccatgaatggctgtacagtttcaagccaaatttcaatcaag

SEQ ID NO: 28292 - DNA, 60 bp, Artificial
  Synthetic oligonucleotide
caacttgattgaaatttggcttgaaactgtacagccattcatggacatttctgttaggag

SEQ ID NO: 28293 - DNA, 60 bp, Artificial
  Synthetic oligonucleotide
tatctcctaacagaaatgtccatgaatggctgtacagtttcaagccaaatttcaatcaag

SEQ ID NO: 28294 - DNA, 60 bp, Artificial
  Synthetic oligonucleotide
tatcccctaacagaaatgtccatgaatggctgtacagtttcaagccaaatttcaatcaag

SEQ ID NO: 28295 - DNA, 60 bp, Artificial
  Synthetic oligonucleotide
atgtccatgaatggctgtacagtttcaagccaaatttcaatcaagttgaaagcaacaaca

SEQ ID NO: 28296 - DNA, 60 bp, Artificial
  Synthetic oligonucleotide
tttcaacttgattgaaatttggcttgaaactgtacagccattcatggacatttctgttag

SEQ ID NO: 28297 - DNA, 60 bp, Artificial
  Synthetic oligonucleotide
cccctaacagaaatgtccatgaatggctgtacagtttcaagccaaatttcaatcaagttg

SEQ ID NO: 28298 - DNA, 60 bp, Artificial
  Synthetic oligonucleotide
ctcctaacagaaatgtccatgaatggctgtacagtttcaagccaaatttcaatcaagttg

SEQ ID NO: 28299 - DNA, 60 bp, Artificial
  Synthetic oligonucleotide
ctcctaacagaaatgtccatgaatggctgtacagtttcaagccaaatttcaatcaagtcg

SEQ ID NO: 28300 - DNA, 60 bp, Artificial
  Synthetic oligonucleotide
gtttcacttacacttggaggcgttaaccttgctgttcttaatacccattttcctggaacc

SEQ ID NO: 28301 - DNA, 60 bp, Artificial
  Synthetic oligonucleotide
cctacgaaggtcatccgaacttttggtttcacttacacttggaggcgttaaccttgctgt

SEQ ID NO: 28302 - DNA, 60 bp, Artificial
  Synthetic oligonucleotide
cctacgaaggtcatcggagcttttggtttcacttacacttggaggcgttaaccttgctgt

SEQ ID NO: 28303 - DNA, 60 bp, Artificial
  Synthetic oligonucleotide
cctacgaaggtcatccgagcttttggtttcacttacacttggaggcgttaaccttgctgt

SEQ ID NO: 28304 - DNA, 60 bp, Artificial
  Synthetic oligonucleotide
gcaccccgctgtgttaacagccggcagaatcagtgagatgggtgtctgcttcggaaccat

SEQ ID NO: 28305 - DNA, 60 bp, Artificial
  Synthetic oligonucleotide
cttctcttgctccctctggagacattctctcaaccatcttcttgggcttgttgccacgag

SEQ ID NO: 28306 - DNA, 60 bp, Artificial
  Synthetic oligonucleotide
actcgtggcaacaagcccaagaagatggttgagagaatgtctccagagggagcaagagaa

SEQ ID NO: 28307 - DNA, 60 bp, Artificial
  Synthetic oligonucleotide
ggctccctctggagacattctctcaaccatcttcttgggcttgttaccacgagtcagaga

SEQ ID NO: 28308 - DNA, 60 bp, Artificial
  Synthetic oligonucleotide
ctggctccctctggagacattctctcaaccatcttcttgggcttgttaccacgagtcaga

SEQ ID NO: 28309 - DNA, 60 bp, Artificial
  Synthetic oligonucleotide
ccaggctcttaacttctcttgctccctctggagacattctctcaaccatcttcttgggct

SEQ ID NO: 28310 - DNA, 60 bp, Artificial
  Synthetic oligonucleotide
ctcgtggcaacaagcccaagaagatggttgagagaatgtctccagagggagcaagagaag

SEQ ID NO: 28311 - DNA, 60 bp, Artificial
  Synthetic oligonucleotide
ttgcaaccaggctcttaacttctcttgctccctctggagacattctctcaaccatcttct

SEQ ID NO: 28312 - DNA, 60 bp, Artificial
  Synthetic oligonucleotide
gacctgacaaatttctgtcatcaggaatgccaggtaaccgagacggagtgcctctgtcca

SEQ ID NO: 28313 - DNA, 53 bp, Artificial
  Synthetic oligonucleotide
gctgggttgctgagcagtgcaaggctaatcagatcaaattcgcagaggcagct

SEQ ID NO: 28314 - DNA, 53 bp, Artificial
  Synthetic oligonucleotide
gctgggttgctgagcagtgcaaggctaatcagatcaaatttgcagaggcagct

SEQ ID NO: 28315 - DNA, 60 bp, Artificial
  Synthetic oligonucleotide
ggtcgcatatgctaactttaagcgtatccacaccaatgggcttagttatgacaacatacg

SEQ ID NO: 28316 - DNA, 60 bp, Artificial
  Synthetic oligonucleotide
aggtcgcatatgctaactttaagcgtatccacaccaatgggcttagttatgacaacatac

SEQ ID NO: 28317 - DNA, 57 bp, Artificial
  Synthetic oligonucleotide
cagcagcagttagcctccttggtggtcctgcaaccaacagggactacctacggcagc

SEQ ID NO: 28318 - DNA, 60 bp, Artificial
  Synthetic oligonucleotide
tgtttatagcaggtattgctgagcttggggcatttttttccatcctgcaggacatgcgaa

SEQ ID NO: 28319 - DNA, 60 bp, Artificial
  Synthetic oligonucleotide
ggtgaagggttgcacttggagtgacgggtatgcaatgtacctgggatttgcccctggtgc

SEQ ID NO: 28320 - DNA, 53 bp, Artificial
  Synthetic oligonucleotide
taatttaatctgttcaaaatttatgcattaatttggctaaaagagtcttcgga

SEQ ID NO: 28321 - DNA, 60 bp, Artificial
  Synthetic oligonucleotide
cttgggaacattcaaattctacccattggctatcggaatttacaaggttcagaagaagga

SEQ ID NO: 28322 - DNA, 60 bp, Artificial
  Synthetic oligonucleotide
ggctgcacttacagttgtctctggattaggttggaagaaaactaatgtcagtgctgcggc

SEQ ID NO: 28323 - DNA, 60 bp, Artificial
  Synthetic oligonucleotide
atgcgacagaggtacatgggtcttgaagcagctacatggacagttagcaaagtcaatgaa

SEQ ID NO: 28324 - DNA, 60 bp, Artificial
  Synthetic oligonucleotide
catgggtcttgaagcagctacatggacagttagcaaagtcaatgaagtccaggctgcact

SEQ ID NO: 28325 - DNA, 60 bp, Artificial
  Synthetic oligonucleotide
tttacaaggttcagaagaaggaaatggaacctaaatatctggagaaaacaatgcgacaga

SEQ ID NO: 28326 - DNA, 60 bp, Artificial
  Synthetic oligonucleotide
agaaggaaatggaacctaaatatctggagaaaacaatgcgacagaggtacatgggtcttg

SEQ ID NO: 28327 - DNA, 60 bp, Artificial
  Synthetic oligonucleotide
ggaataacatgggctgatggtgaggaggtatacctctcattctttccaggctcagaaatg

SEQ ID NO: 28328 - DNA, 60 bp, Artificial
  Synthetic oligonucleotide
agtcaatgaagtccaggctgcacttacagttgtctctggattaggttggaagaaaactaa

SEQ ID NO: 28329 - DNA, 60 bp, Artificial
  Synthetic oligonucleotide
gccaaccctgatgatgctgcccagggatctggacacaccaagtccattctcaaccttcgg

SEQ ID NO: 28330 - DNA, 60 bp, Artificial
  Synthetic oligonucleotide
tagccagaactagtgaagctatttcaaaattcagtacagatgctatcagaggaagacttc

SEQ ID NO: 28331 - DNA, 60 bp, Artificial
  Synthetic oligonucleotide
tagcatcttgataaatagccagaactagtgaagctatttcaaaattcagtacagatgcta

SEQ ID NO: 28332 - DNA, 60 bp, Artificial
  Synthetic oligonucleotide
cacacttcacaggatgtcgggatatctagcgcgatgggttgctgacacatgcaaggctag

SEQ ID NO: 28333 - DNA, 60 bp, Artificial
  Synthetic oligonucleotide
ccactggttatcgagatgcacagggttctcaaagataatatggatgtaaatttcatgaaa

SEQ ID NO: 28334 - DNA, 60 bp, Artificial
  Synthetic oligonucleotide
gtcgggatatctagcgcgatgggttgctgacacatgcaaggctagtgtccttaagttggc

SEQ ID NO: 28335 - DNA, 50 bp, Artificial
  Synthetic oligonucleotide
aaaagtccttcgccagcgctacggaacaatgactgcagaagaatggatga

SEQ ID NO: 28336 - DNA, 59 bp, Artificial
  Synthetic oligonucleotide
tttcatgaaaaaagtccttcgccagcgctacggaacaatgactgcagaagaatggatga

SEQ ID NO: 28337 - DNA, 60 bp, Artificial
  Synthetic oligonucleotide
gtctccagcttgggttggaagaaaactaatgttagtgcagctgccagggacttccttgct

SEQ ID NO: 28338 - DNA, 60 bp, Artificial
  Synthetic oligonucleotide
aatcgggctaaagtcatctgttttaatttggctaaaagggttgtttcaacccacaaaata

SEQ ID NO: 28339 - DNA, 60 bp, Artificial
  Synthetic oligonucleotide
gcacacttcaaagcagacgggcagctgtgtcagcattggaggacaaactggcagatttca

SEQ ID NO: 28340 - DNA, 60 bp, Artificial
  Synthetic oligonucleotide
gtacacttcaaagcagacgggcagctgtgtcagcattggaggacaaactggcagatttca

SEQ ID NO: 28341 - DNA, 60 bp, Artificial
  Synthetic oligonucleotide
ggacagtgtatatatactataacaagtttattttcactactgcctggggtagcacactct

SEQ ID NO: 28342 - DNA, 60 bp, Artificial
  Synthetic oligonucleotide
cttgatgattttaggtccatggaggcattttcagggatctttaggtcaccacatggagag

SEQ ID NO: 28343 - DNA, 60 bp, Artificial
  Synthetic oligonucleotide
aagtgttaaaattgtttgtttctttgtggcagttaagggaaacacttataaactgtttga

SEQ ID NO: 28344 - DNA, 60 bp, Artificial
  Synthetic oligonucleotide
gtcataggacagtgtatatatactataacaagtttattttcactactgcctggggtagca

SEQ ID NO: 28345 - DNA, 60 bp, Artificial
  Synthetic oligonucleotide
ggaggcattctcagggatctttaggtcaccacatggagaagaccatgatctggctggaga

SEQ ID NO: 28346 - DNA, 60 bp, Artificial
  Synthetic oligonucleotide
ttgaacactaagggaacatcttcctttggaacctatgaatctgattctatcacagaatca

SEQ ID NO: 28347 - DNA, 59 bp, Artificial
  Synthetic oligonucleotide
ttgaacactaagggaacatcttcctttggaacctatgaatctgattctatcacagaatc

SEQ ID NO: 28348 - DNA, 60 bp, Artificial
  Synthetic oligonucleotide
cagagggaacatcttcctttggaacctatgaatctgattctatcacagaatcagagggtt

SEQ ID NO: 28349 - DNA, 60 bp, Artificial
  Synthetic oligonucleotide
gttgaacacagagggaacatcttcctttggaacctatgaatctgattctatcacagaatc

SEQ ID NO: 28350 - DNA, 60 bp, Artificial
  Synthetic oligonucleotide
tactgttgaacacagagggaacatcttcctttggaacctatgaatctgattctatcacag

SEQ ID NO: 28351 - DNA, 60 bp, Artificial
  Synthetic oligonucleotide
gctctacagataggaagaagcttttgccccagtcagtgttttctgactccaaagtcgtcc

SEQ ID NO: 28352 - DNA, 52 bp, Artificial
  Synthetic oligonucleotide
ggggaagaagctttatgagctctttgctgatgattccttccagcagaacagg

SEQ ID NO: 28353 - DNA, 60 bp, Artificial
  Synthetic oligonucleotide
gatctacatgcaccctgctgtgctgacagctggtaggatcagcgaaatgggtgtctgctt

SEQ ID NO: 28354 - DNA, 60 bp, Artificial
  Synthetic oligonucleotide
gtgcagctgccagggacttccttgctaaattcggaatcaacattaaagcagggatgcatt

SEQ ID NO: 28355 - DNA, 60 bp, Artificial
  Synthetic oligonucleotide
tagtgcagctgccagggacttccttgctaaattcggaatcaacattaaagcagggatgca

SEQ ID NO: 28356 - DNA, 60 bp, Artificial
  Synthetic oligonucleotide
gtctctagcttaggttggaagaaaaccaatgttagtgcagctgccagggacttccttgct

SEQ ID NO: 28357 - DNA, 60 bp, Artificial
  Synthetic oligonucleotide
cgggaatatctgatatttgctctaaaccagatctaaatctgtatgtatcatatccgcatg

SEQ ID NO: 28358 - DNA, 60 bp, Artificial
  Synthetic oligonucleotide
caggaatatctgatatttgctctaaaccagatctaaatctgtatgtatcatatccgcatg

SEQ ID NO: 28359 - DNA, 60 bp, Artificial
  Synthetic oligonucleotide
aatctaatgagaaagaagctctggcaaaaaatatggatgtatctaaaggtaagatattat

SEQ ID NO: 28360 - DNA, 51 bp, Artificial
  Synthetic oligonucleotide
caaattaagaagcagcttaaagatcttagcaccaacctggagaaatctgtt

SEQ ID NO: 28361 - DNA, 60 bp, Artificial
  Synthetic oligonucleotide
cagccaagagtataagaaaggagtctcatttgccagtgtcatgtactcatggacaaaaga

SEQ ID NO: 28362 - DNA, 60 bp, Artificial
  Synthetic oligonucleotide
ttcatctctaattaaacattcctacctccgtacacttatatatatgcacgtagcatatat

SEQ ID NO: 28363 - DNA, 60 bp, Artificial
  Synthetic oligonucleotide
tcatctctaattaaacacctctacctccgtacacttatatatatgcacgtagcatatata

SEQ ID NO: 28364 - DNA, 60 bp, Artificial
  Synthetic oligonucleotide
gccatccatggtggtcccagtgacaggaagccactcactcaagacgaccaaagcctggca

SEQ ID NO: 28365 - DNA, 60 bp, Artificial
  Synthetic oligonucleotide
gccgtccatggttgtcccagtgacaggaagccactcactcaagacgaccaaagcctggca

SEQ ID NO: 28366 - DNA, 60 bp, Artificial
  Synthetic oligonucleotide
cttggcagatatccaagaggatataacccgccatgagcaacaacttgttgttgccagaca

SEQ ID NO: 28367 - DNA, 60 bp, Artificial
  Synthetic oligonucleotide
agagacctgctttggtgactccaccaacccagagatgattgaaggagcttgggattcact

SEQ ID NO: 28368 - DNA, 60 bp, Artificial
  Synthetic oligonucleotide
gacctgttttggtgactccaccaacccagagatgattgaaggagcttgggattcactcag

SEQ ID NO: 28369 - DNA, 60 bp, Artificial
  Synthetic oligonucleotide
gagaagaaacctgttttggtgactccaccaacccagagatgattgaaggagcttgggatt

SEQ ID NO: 28370 - DNA, 60 bp, Artificial
  Synthetic oligonucleotide
agagacctgttttggtgactccaccaacccagagatgattgaaggagcttgggattcact

SEQ ID NO: 28371 - DNA, 60 bp, Artificial
  Synthetic oligonucleotide
ggtgactccaccaacccagagatgattgaaggagcttgggattcactcagagaggaggag

SEQ ID NO: 28372 - DNA, 60 bp, Artificial
  Synthetic oligonucleotide
ggtgactacaccaacccagagatgattgaaggagcttgggattcactcagagaggaggag

SEQ ID NO: 28373 - DNA, 60 bp, Artificial
  Synthetic oligonucleotide
atcttggaatttctttgactggttttctggacttatgagttggtttggagggcctcttaa

SEQ ID NO: 28374 - DNA, 60 bp, Artificial
  Synthetic oligonucleotide
gacgggaaaatggcttcagtcaagtgccctcctaagtatgagctcactgaggactgcaac

SEQ ID NO: 28375 - DNA, 53 bp, Artificial
  Synthetic oligonucleotide
ttcttggaatttctttgactggttttctggacttatgagttggtttggagggc

SEQ ID NO: 28376 - DNA, 60 bp, Artificial
  Synthetic oligonucleotide
ttggtgactccaccaacccagagatgattgaaggagcttgggattcactcagagaggagg

SEQ ID NO: 28377 - DNA, 60 bp, Artificial
  Synthetic oligonucleotide
gacctgctttggtgactccaccaacccagagatgattgaaggagcttgggattcactcag

SEQ ID NO: 28378 - DNA, 60 bp, Artificial
  Synthetic oligonucleotide
tacgggagtagagccaggtgaccacctcaaagagagatcagcactaagctatgggaatac

SEQ ID NO: 28379 - DNA, 60 bp, Artificial
  Synthetic oligonucleotide
cgggagtagagccaggtgaccacctcaaagagagatcagcactaagctatgggaatacac

SEQ ID NO: 28380 - DNA, 60 bp, Artificial
  Synthetic oligonucleotide
attgcactattattatcaggggaatcaacatatcagggtaggggtacatttatgggtggg

SEQ ID NO: 28381 - DNA, 60 bp, Artificial
  Synthetic oligonucleotide
gggtcagttaatccgttgtgggtgggtttagtttcaagctgccttaagtagcttttttct

SEQ ID NO: 28382 - DNA, 60 bp, Artificial
  Synthetic oligonucleotide
ggacttatggacactttcacaaactcctactccttttgtgagaatgtaccaaatctggat

SEQ ID NO: 28383 - DNA, 60 bp, Artificial
  Synthetic oligonucleotide
ggccagaagaaagtgatattaacaaagacacttgttataggccaatgcatctacacattc

SEQ ID NO: 28384 - DNA, 60 bp, Artificial
  Synthetic oligonucleotide
ttctgtactcgacacccatacacaaatatcatgtaaaagtattctcttgtattaactcat

SEQ ID NO: 28385 - DNA, 60 bp, Artificial
  Synthetic oligonucleotide
cactaacaaaggtgtctcatgtccggaacattcaggctcatttcgaaaaatctgtcattt

SEQ ID NO: 28386 - DNA, 60 bp, Artificial
  Synthetic oligonucleotide
tccaaagaaggcagaacagctcaagattgtgactgaactagagaagctggctggtaagac

SEQ ID NO: 28387 - DNA, 60 bp, Artificial
  Synthetic oligonucleotide
cctcattcttaagaccttaaaagttgtaacctattcttgttctcattactccacagagtc

SEQ ID NO: 28388 - DNA, 60 bp, Artificial
  Synthetic oligonucleotide
gtgtgacaggacagctagtggaaggggtttgttttatccctatgaatggagtaggttaca

SEQ ID NO: 28389 - DNA, 60 bp, Artificial
  Synthetic oligonucleotide
ccaattcatgcatatgacattgtgacattgcctgtaacttgctttctagttccaaagaag

SEQ ID NO: 28390 - DNA, 60 bp, Artificial
  Synthetic oligonucleotide
gctatgatctttcatgcaaccagacacactgtcagccaacccttcacttaatagcaccta

SEQ ID NO: 28391 - DNA, 60 bp, Artificial
  Synthetic oligonucleotide
tgtaacccaggtgactgcccaggagttggaacaggctgtacagcttgtggaatatacttg

SEQ ID NO: 28392 - DNA, 60 bp, Artificial
  Synthetic oligonucleotide
cctatctttacatgcatgtcaataagaacttgtatggtaagtatactttctagtcgggtc

SEQ ID NO: 28393 - DNA, 60 bp, Artificial
  Synthetic oligonucleotide
ggactgatacagcacacggggttggtatggtgcctatgaagacagatcttgaactagact

SEQ ID NO: 28394 - DNA, 60 bp, Artificial
  Synthetic oligonucleotide
ctctcttaataacattctgttttgggtggctgattattcctgcagtgacactcctcattc

SEQ ID NO: 28395 - DNA, 60 bp, Artificial
  Synthetic oligonucleotide
tacatgctgagatacaagtcttgggtcactggatggatgcaacgttcaatataaagacag

SEQ ID NO: 28396 - DNA, 66 bp, Artificial
  Synthetic oligonucleotide
gtctgatcactgctgatatatttgacacagtatatagatctaggaaaacagttttatgctatgatc

SEQ ID NO: 28397 - DNA, 60 bp, Artificial
  Synthetic oligonucleotide
cttggacaagctaaagccagttgggagagcctttaagatagtatccttgcgttatacacg

SEQ ID NO: 28398 - DNA, 60 bp, Artificial
  Synthetic oligonucleotide
ctctgttaaagtgtgtatgattggaacaatctcaaaattacaaccaggagacacattgct

SEQ ID NO: 28399 - DNA, 60 bp, Artificial
  Synthetic oligonucleotide
taggaccacttgagcaaggtggaataatcgtgaaacagtggtgtactacaacatgtacct

SEQ ID NO: 28400 - DNA, 60 bp, Artificial
  Synthetic oligonucleotide
ccgtaaagattgttgggaaaggagggcactctggatcactgttcaaatgttgtcataaca

SEQ ID NO: 28401 - DNA, 60 bp, Artificial
  Synthetic oligonucleotide
gtgattctgctatgtgttatggggcaacagtagttaatttagtgagaggttcaaataccg

SEQ ID NO: 28402 - DNA, 60 bp, Artificial
  Synthetic oligonucleotide
tcaagctgtagagggtgcttggggttctggtgtaggttttacactgacatgttctgtggg

SEQ ID NO: 28403 - DNA, 60 bp, Artificial
  Synthetic oligonucleotide
tctgtcattttgcaactacaccagtatgtgagtatcaaggaaacacagtatcaggctata

SEQ ID NO: 28404 - DNA, 60 bp, Artificial
  Synthetic oligonucleotide
gccctgtgagaaacagaaagaagcaagtttaagccttttctactggattctgtactcgac

SEQ ID NO: 28405 - DNA, 60 bp, Artificial
  Synthetic oligonucleotide
tgttccgaacatgctgattgagagttcatgcaattttgacttacatgttgcagctggtgc

SEQ ID NO: 28406 - DNA, 60 bp, Artificial
  Synthetic oligonucleotide
ccacagagtcaaaattcaaagtgctgttagaaaaggtgaaggttgagtaccagaggacca

SEQ ID NO: 28407 - DNA, 60 bp, Artificial
  Synthetic oligonucleotide
caaggatatgtcacagggcaagtggaattgagctatgtgccgttgactgatgttccgaac

SEQ ID NO: 28408 - DNA, 60 bp, Artificial
  Synthetic oligonucleotide
ggccaatgcatctacacattcacaagcctcttctcattattaccaggggtagcccattct

SEQ ID NO: 28409 - DNA, 59 bp, Artificial
  Synthetic oligonucleotide
aaaatttacagaggtgtcatgggcgaagaaaagtagcactacagccacaacaaatgctg

SEQ ID NO: 28410 - DNA, 57 bp, Artificial
  Synthetic oligonucleotide
agcactacagccacaacaaatgctggtgaaagtacatttgaagctacatcaaaggaa

SEQ ID NO: 28411 - DNA, 60 bp, Artificial
  Synthetic oligonucleotide
ccaattacatggactggctttcttcctgtagcaggaaaatctgagaaaatcacaggctgc

SEQ ID NO: 28412 - DNA, 60 bp, Artificial
  Synthetic oligonucleotide
tcacaggctgcaatgtattttgtaccttagctggacctggggcaatgtgtgaagcatatt

SEQ ID NO: 28413 - DNA, 60 bp, Artificial
  Synthetic oligonucleotide
caaagattgttcagatataggactagcagcttctgcacctcacctagagagggtgactgg

SEQ ID NO: 28414 - DNA, 60 bp, Artificial
  Synthetic oligonucleotide
gggttgtatgtctgtttcataggaaagcattcggaacctatccatgtcccaatttcaagc

SEQ ID NO: 28415 - DNA, 60 bp, Artificial
  Synthetic oligonucleotide
ttcataggaaagcattcggaacctatccatgtcccaatttcaagcgacctacggtcaagc

SEQ ID NO: 28416 - DNA, 60 bp, Artificial
  Synthetic oligonucleotide
gagaagctggctggtaagacaggatgtgctgaaaattctttccaagggttgtatgtctgt

SEQ ID NO: 28417 - DNA, 60 bp, Artificial
  Synthetic oligonucleotide
cctggtgttatccctgattcaaatcattcaagttgtgagaaaaagacattaccaattaca

SEQ ID NO: 28418 - DNA, 60 bp, Artificial
  Synthetic oligonucleotide
aggaccatgatacagacaagacaggtcaaggtgtattgaggattgctggaccagttaaag

SEQ ID NO: 28419 - DNA, 60 bp, Artificial
  Synthetic oligonucleotide
tgaaagtggaatgtcctcatacagtgggtttagggcaaggatatgtcacagggcaagtgg

SEQ ID NO: 28420 - DNA, 54 bp, Artificial
  Synthetic oligonucleotide
tgcccttcaagcacactacaccatttgtaaattaacagacaggtttcaggatgc

SEQ ID NO: 28421 - DNA, 60 bp, Artificial
  Synthetic oligonucleotide
ccagaggtcaaaaggggctgttatagaacattaggggtattcagatacaagagcaggtgt

SEQ ID NO: 28422 - DNA, 60 bp, Artificial
  Synthetic oligonucleotide
gtgttatgtaggactggtttggggtttacttcttactgttgaacttgtgatctgggctgc

SEQ ID NO: 28423 - DNA, 60 bp, Artificial
  Synthetic oligonucleotide
gaaggttgagtaccagaggaccatgggttcaatggtgtgtgacatttgtcaccatgattg

SEQ ID NO: 28424 - DNA, 60 bp, Artificial
  Synthetic oligonucleotide
accatgattgtgagactgccaaggaacttgagacacacaaaaagagctgcccagagggtc

SEQ ID NO: 28425 - DNA, 60 bp, Artificial
  Synthetic oligonucleotide
agtgcaattaaggatcacttaaatgtcgttgttaaccgggacctatcctttcaagatcta

SEQ ID NO: 28426 - DNA, 60 bp, Artificial
  Synthetic oligonucleotide
ggtcagtgcccatattgcatgactttaactgaggcaacacagagtgcccttcaagcacac

SEQ ID NO: 28427 - DNA, 60 bp, Artificial
  Synthetic oligonucleotide
tgtatctgaagttcatgtcacatctagccaacttgaatggattgatccagatagtgcaat

SEQ ID NO: 28428 - DNA, 60 bp, Artificial
  Synthetic oligonucleotide
gggcaagtggaattgagctatgtgccgttgactgatgttccgaacatgctgattgagagt

SEQ ID NO: 28429 - DNA, 60 bp, Artificial
  Synthetic oligonucleotide
gggctgcaagtgcagagactcctgttatggagcctggatggactgatacagcacacgggg

SEQ ID NO: 28430 - DNA, 60 bp, Artificial
  Synthetic oligonucleotide
caacgacttcactaataaacaatttcatgattttaacccaaggcttttgttcttgcggag

SEQ ID NO: 28431 - DNA, 60 bp, Artificial
  Synthetic oligonucleotide
cagtggtgtactacaacatgtacctttggtgatccaggtgacatcatgtccactaacaaa

SEQ ID NO: 28432 - DNA, 60 bp, Artificial
  Synthetic oligonucleotide
tcaggctataaaagattgatggcaactaaagattcatttcaatcgttcaatgtatctgaa

SEQ ID NO: 28433 - DNA, 60 bp, Artificial
  Synthetic oligonucleotide
atcgatatgggtctttgctggagcacctgatcgctgtccaccaacatgcctgtttattgc

SEQ ID NO: 28434 - DNA, 60 bp, Artificial
  Synthetic oligonucleotide
gaaaaacacaactggtacatttgccaacaacattgcaatgaggaaatggttagttgcaga

SEQ ID NO: 28435 - DNA, 60 bp, Artificial
  Synthetic oligonucleotide
ccaagatggagctatagtgaagcaaaatccatcaaaggaagcagtgacagaagtttgcct

SEQ ID NO: 28436 - DNA, 60 bp, Artificial
  Synthetic oligonucleotide
tagttgcagattggcatgattgcagacctcagaaatcatctggtggccatatcaatgtta

SEQ ID NO: 28437 - DNA, 60 bp, Artificial
  Synthetic oligonucleotide
gcagattgtgtgatcacagtggacaaagaaacagctcagatccgtttgcagacagacaac

SEQ ID NO: 28438 - DNA, 60 bp, Artificial
  Synthetic oligonucleotide
gggtggggtcaaacaaaactgctgagtttattttggaaacatttagatatacttggtagc

SEQ ID NO: 28439 - DNA, 60 bp, Artificial
  Synthetic oligonucleotide
tggcaatggggtaccaaaattcgactacctatgccatttagcaagtagaaaggaagttat

SEQ ID NO: 28440 - DNA, 60 bp, Artificial
  Synthetic oligonucleotide
gaagttcaatttaaaacagtcgaatcatacacattgccaagaataatagctgtgaaaaat

SEQ ID NO: 28441 - DNA, 60 bp, Artificial
  Synthetic oligonucleotide
gatactgatcactccagatgagcacaagtacgcattgaaaattgtatgccaagataaacc

SEQ ID NO: 28442 - DNA, 60 bp, Artificial
  Synthetic oligonucleotide
gcagaaggaacttgtgctggatgtgtaaattgctttgagaatattcattgtgaatttact

SEQ ID NO: 28443 - DNA, 54 bp, Artificial
  Synthetic oligonucleotide
ttcctacaaagtcctgcaagctatcgtttagaagaacaccaagggacagttaca

SEQ ID NO: 28444 - DNA, 60 bp, Artificial
  Synthetic oligonucleotide
ggttcttacatcggaatattttatactggcatactatcagttatatgccttctcatcgtc

SEQ ID NO: 28445 - DNA, 60 bp, Artificial
  Synthetic oligonucleotide
ttctatgacaatagtggactcaaaaccaattttagaacttgcaccagttgatcaaactgc

SEQ ID NO: 28446 - DNA, 60 bp, Artificial
  Synthetic oligonucleotide
ccgtttgcagacagacaacacaaaccactttgaggttgctgggacaactgtgaaatctgg

SEQ ID NO: 28447 - DNA, 56 bp, Artificial
  Synthetic oligonucleotide
gtgagcatttaaaagtatcatgtggccctaagtcaatacagttccatgcatgcttt

SEQ ID NO: 28448 - DNA, 55 bp, Artificial
  Synthetic oligonucleotide
tgtacgattcttgcataggacaatactcccagggtcaattgcaaattctatatgc

SEQ ID NO: 28449 - DNA, 60 bp, Artificial
  Synthetic oligonucleotide
ttatctacggatggatctataataagtcatgtaaaaaatgtaaactttgtggtttagtct

SEQ ID NO: 28450 - DNA, 60 bp, Artificial
  Synthetic oligonucleotide
ctgcatagagcatctggtttatgtccaggatacaaaagtctcagagctgctagagtaatg

SEQ ID NO: 28451 - DNA, 60 bp, Artificial
  Synthetic oligonucleotide
aagtctcagagctgctagagtaatgtgcaaatctaaaggcccagcatcaattttatccat

SEQ ID NO: 28452 - DNA, 60 bp, Artificial
  Synthetic oligonucleotide
cacctagatctagagctaaatttgagaatataatagcttgtggagagcatgccaatccat

SEQ ID NO: 28453 - DNA, 60 bp, Artificial
  Synthetic oligonucleotide
gctctactggcagctttaatagactatattgtatatttacagtcacttgcagagatatca

SEQ ID NO: 28454 - DNA, 60 bp, Artificial
  Synthetic oligonucleotide
ctttaaatacaaacctgaaccaacagaatctactctacaacctagatctcacagaagtga

SEQ ID NO: 28455 - DNA, 52 bp, Artificial
  Synthetic oligonucleotide
tatggcccgaaaagacaatggttcaatggcacattttgctttagaaattagg

SEQ ID NO: 28456 - DNA, 60 bp, Artificial
  Synthetic oligonucleotide
atttacgatcacatgattttggtgcatgtgttgtgtatccaaaccaacatttttgcagat

SEQ ID NO: 28457 - DNA, 60 bp, Artificial
  Synthetic oligonucleotide
gtaacagtgctaaatgggattttgctaacgagatgaagacattttacactggccggaaag

SEQ ID NO: 28458 - DNA, 60 bp, Artificial
  Synthetic oligonucleotide
atgtgaaaatgggaattactattattcggaaattcataaagattacgacaaagatcaaga

SEQ ID NO: 28459 - DNA, 60 bp, Artificial
  Synthetic oligonucleotide
caatagcaatgtcaaagtctgtaaaaatgtcaaaaaagtattgtgtgtctcacctagatc

SEQ ID NO: 28460 - DNA, 60 bp, Artificial
  Synthetic oligonucleotide
tttgtcacacctatcagtgcaatggtcgttggtgaatcaaatgagatctacaccttagac

SEQ ID NO: 28461 - DNA, 60 bp, Artificial
  Synthetic oligonucleotide
tagaccacaaagatggctggttaacattttcaaaggagaggaccagcacatggggttgtg

SEQ ID NO: 28462 - DNA, 60 bp, Artificial
  Synthetic oligonucleotide
ccacatattaaacctgcttataagtatattaccgtagaggggactgagaccatcgaaggg

SEQ ID NO: 28463 - DNA, 58 bp, Artificial
  Synthetic oligonucleotide
gagggtaattacttaatggatgttattggttatgttaaaagtgcatcttattcagcaa

SEQ ID NO: 28464 - DNA, 60 bp, Artificial
  Synthetic oligonucleotide
cgggccaactataggaataaatactagacatgatgaaaaatgcacaggtccttgtcctgt

SEQ ID NO: 28465 - DNA, 60 bp, Artificial
  Synthetic oligonucleotide
aagatcaagatgtcgggcatttctgtctaagtcctagatgcagtacaatacgctatccaa

SEQ ID NO: 28466 - DNA, 54 bp, Artificial
  Synthetic oligonucleotide
tggcagatctcacattcaacaatcgacaaaatttcggtgcaagagctagctgat

SEQ ID NO: 28467 - DNA, 60 bp, Artificial
  Synthetic oligonucleotide
agctatatcacaaaaattgcagacaagtttgtcgatatttaagtatgtcaaaactaaaaa

SEQ ID NO: 28468 - DNA, 60 bp, Artificial
  Synthetic oligonucleotide
gctaatcaattgaagggtctgggtgtgatttctatactggatattccgatgattgagaag

SEQ ID NO: 28469 - DNA, 60 bp, Artificial
  Synthetic oligonucleotide
tatttgatgataatgttggttaaagattcgctattatttgttggtgcaacaagagctgac

SEQ ID NO: 28470 - DNA, 60 bp, Artificial
  Synthetic oligonucleotide
caaataagtgtaggcaatgcacatgtgggcaatttgaagatgccactggcttgatggtgc

SEQ ID NO: 28471 - DNA, 60 bp, Artificial
  Synthetic oligonucleotide
cattactgtattgcagactcacactgtcttgaggagtatgaaattgtgaacacagagctc

SEQ ID NO: 28472 - DNA, 60 bp, Artificial
  Synthetic oligonucleotide
caccttagacgacttacctgatgacatggttcagatggcagaaaggataaacatttacta

SEQ ID NO: 28473 - DNA, 60 bp, Artificial
  Synthetic oligonucleotide
cagagctcttgacagcactaaagaaatctagatgctgggctaaggagatggatgatgtcg

SEQ ID NO: 28474 - DNA, 60 bp, Artificial
  Synthetic oligonucleotide
gatactgggagttgtaatgtattgggcaatgactggaccatagttttatgtgaaaatggg

SEQ ID NO: 28475 - DNA, 60 bp, Artificial
  Synthetic oligonucleotide
gccaatccatctgtatatatgatgcctaatatcagtatctatcaatccaattctgaaagg

SEQ ID NO: 28476 - DNA, 60 bp, Artificial
  Synthetic oligonucleotide
gagcagctgaccgcagaatatgcattcctcaccaggtattgtgattactacacacaatat

SEQ ID NO: 28477 - DNA, 60 bp, Artificial
  Synthetic oligonucleotide
cagggctgatgattctgattttcagtcccctgacatgatcatagagacagagactggcca

SEQ ID NO: 28478 - DNA, 60 bp, Artificial
  Synthetic oligonucleotide
aggcagcttcttgcttctgggctgagacatatggttttgaaccttggaaattcgtggacc

SEQ ID NO: 28479 - DNA, 60 bp, Artificial
  Synthetic oligonucleotide
gctgtgcattttaatggagtgatctcaaacctcgacctgtcagacgaagaagtcaacgaa

SEQ ID NO: 28480 - DNA, 60 bp, Artificial
  Synthetic oligonucleotide
gcaaactcagcagatctggctgccagaaacaagatcgcgaaatatgagatagcttgcctc

SEQ ID NO: 28481 - DNA, 60 bp, Artificial
  Synthetic oligonucleotide
caacccgctctctgaggacaaatccctgagactactggcaatgggcctgcatcagcctac

SEQ ID NO: 28482 - DNA, 60 bp, Artificial
  Synthetic oligonucleotide
gctctaaaacatggatcctgacccagagtttgaaggcatggtgtgaggacatgcaggtat

SEQ ID NO: 28483 - DNA, 60 bp, Artificial
  Synthetic oligonucleotide
cagtaaagcagcacgtcaagcctaatcagttcattgtgaagaggttgctggactctgcta

SEQ ID NO: 28484 - DNA, 60 bp, Artificial
  Synthetic oligonucleotide
ccaccgcaccgtgctcactttgtccccagaggagagagagtatgctgcagtcctaggagt

SEQ ID NO: 28485 - DNA, 60 bp, Artificial
  Synthetic oligonucleotide
ctaggagtttgtgggaagagaaatgcaaatctgggagctgtcaaagaagccagggtgagg

SEQ ID NO: 28486 - DNA, 58 bp, Artificial
  Synthetic oligonucleotide
agctgtcaaagaagccagggtgaggagcaagaagggcttctccattggccacaacact

SEQ ID NO: 28487 - DNA, 60 bp, Artificial
  Synthetic oligonucleotide
ttgataacccgtactctgctggtctgtcgggattcaagtataatctgtacagagccataa

SEQ ID NO: 28488 - DNA, 60 bp, Artificial
  Synthetic oligonucleotide
gctgcttcttgctctctccctgaggttgagacattggtcgcaagcaaagaagaggctgct

SEQ ID NO: 28489 - DNA, 60 bp, Artificial
  Synthetic oligonucleotide
cctggcagccatgatacagcactgccagtcgtcaattcattacatgctcatggggttggg

SEQ ID NO: 28490 - DNA, 60 bp, Artificial
  Synthetic oligonucleotide
gctaggctctgatgcgtcttcaaaagtagtgtgcgatatgatgcagggctcagatgacag

SEQ ID NO: 28491 - DNA, 60 bp, Artificial
  Synthetic oligonucleotide
tctgagttcttcttccattctcagcatgtgaggcctaccatcaggtggatagctgcttct

SEQ ID NO: 28492 - DNA, 60 bp, Artificial
  Synthetic oligonucleotide
ccaatatatcttgtccgccatgacatcacaaatctaggcttgctccatgatgatgacata

SEQ ID NO: 28493 - DNA, 60 bp, Artificial
  Synthetic oligonucleotide
cttctttgccaggatggagggtaggccaagggtcatcaaagtcactggcgcacctgtaaa

SEQ ID NO: 28494 - DNA, 60 bp, Artificial
  Synthetic oligonucleotide
tgtgagaagcaaagataaaagaccaagagatctgcatatcttatcgtacactccttcaga

SEQ ID NO: 28495 - DNA, 60 bp, Artificial
  Synthetic oligonucleotide
ctgtagaaccaaccagatcatggatgttatgccagcccttgccgtggagctttgtcagac

SEQ ID NO: 28496 - DNA, 60 bp, Artificial
  Synthetic oligonucleotide
ctagaaagagcaaaataggatctcctgggttcaggcaagagtgggatagactcaaggcca

SEQ ID NO: 28497 - DNA, 60 bp, Artificial
  Synthetic oligonucleotide
gtggtcgatctgtctggacttgtgccacctcagatgatgctagaaagtggaatcaaggac

SEQ ID NO: 28498 - DNA, 60 bp, Artificial
  Synthetic oligonucleotide
ggtgcagatgaaagaatagttcaatcagtgatagaggccatagcgcgggcaattggaagg

SEQ ID NO: 28499 - DNA, 60 bp, Artificial
  Synthetic oligonucleotide
ctgcaggttgcgacagggagtaggaggagccccaggcaactggatcttgaaaggctgaga

SEQ ID NO: 28500 - DNA, 60 bp, Artificial
  Synthetic oligonucleotide
gaggtgtttgaagaatgcatgtcaaggattgaagagaaaggttgcatggagatctgctta

SEQ ID NO: 28501 - DNA, 60 bp, Artificial
  Synthetic oligonucleotide
gactggattcttacaagggctggaagacgaagttggccacagcagggccatgcaagtaga

SEQ ID NO: 28502 - DNA, 60 bp, Artificial
  Synthetic oligonucleotide
ggacacagaggatcacaagtcgactgtacagtttcctccctgggtgacaaggacaggccc

SEQ ID NO: 28503 - DNA, 60 bp, Artificial
  Synthetic oligonucleotide
agtctgtgagtgtggagggttctcatcccatgtgtaagatttggaataaggtgtgcacaa

SEQ ID NO: 28504 - DNA, 60 bp, Artificial
  Synthetic oligonucleotide
ggacaccaccgagaagaaattcccgagctttaggagggagctctttgagaacttcaggag

SEQ ID NO: 28505 - DNA, 60 bp, Artificial
  Synthetic oligonucleotide
cactgaggacatcaccaataaagagagatttgagctaaactcaaagagagctgcttctga

SEQ ID NO: 28506 - DNA, 60 bp, Artificial
  Synthetic oligonucleotide
atggcagaggagtaatgaatcagattgagaacagcatagtgagagaggtccagtcaataa

SEQ ID NO: 28507 - DNA, 56 bp, Artificial
  Synthetic oligonucleotide
atcagcattatcagccatgtacaagaagattatagagctagaacatctccgacccc

SEQ ID NO: 28508 - DNA, 60 bp, Artificial
  Synthetic oligonucleotide
atatgcaatgtcagggtcaacagagcggtcagttgagaggaacaagtaccaccgcaccgt

SEQ ID NO: 28509 - DNA, 60 bp, Artificial
  Synthetic oligonucleotide
cccacaggctattcagcacaatgcagcgaatatcagccacccctttccagctccacaagg

SEQ ID NO: 28510 - DNA, 60 bp, Artificial
  Synthetic oligonucleotide
aacaacagaagagcttcagactatgcaaaggtatgtgataatggaggggtttgtgtcact

SEQ ID NO: 28511 - DNA, 60 bp, Artificial
  Synthetic oligonucleotide
ttgattcaatcatctatgataaggggaggtttaatgttatcccaagagcaagccagaggg

SEQ ID NO: 28512 - DNA, 60 bp, Artificial
  Synthetic oligonucleotide
acctcaagacaagcactgggatgatgcaggggattctgcacttcacttcctccttgcttc

SEQ ID NO: 28513 - DNA, 60 bp, Artificial
  Synthetic oligonucleotide
ctcagatggtgtcaccatagatattgcaacctccgagcttgctgatggacaatctgggtc

SEQ ID NO: 28514 - DNA, 60 bp, Artificial
  Synthetic oligonucleotide
ggagtggtttcgtcattaagcaccgggaatgctgtctgtaaagtcatggcatcttcagtg

SEQ ID NO: 28515 - DNA, 60 bp, Artificial
  Synthetic oligonucleotide
aacctggaaagagatgatcaatgagagtcctgaggtcttgtacagagccccgcagactgg

SEQ ID NO: 28516 - DNA, 60 bp, Artificial
  Synthetic oligonucleotide
tatctggaagggtgtgatggatggctaccaagttcagatagatattgatgggaaggaggg

SEQ ID NO: 28517 - DNA, 60 bp, Artificial
  Synthetic oligonucleotide
cactcctcaagagtggtggcctttaatcatcagaggttgctcgatgttcacaaacaagtt

SEQ ID NO: 28518 - DNA, 60 bp, Artificial
  Synthetic oligonucleotide
cagattgaggatgagtttgtgagtaagctgttcaaggcataccacggtgagagtgtggag

SEQ ID NO: 28519 - DNA, 60 bp, Artificial
  Synthetic oligonucleotide
gcaacactcatagaagatatgaaggcaggggtctttggcgcatttgtgaaggcacagcag

SEQ ID NO: 28520 - DNA, 60 bp, Artificial
  Synthetic oligonucleotide
gaccttcttggctaactgctttaagaattgggagaactgagggagagaataggtgtgggg

SEQ ID NO: 28521 - DNA, 60 bp, Artificial
  Synthetic oligonucleotide
attcatggccctagacagagacccatctcaaataagagaggaattgattcttggagacag

SEQ ID NO: 28522 - DNA, 60 bp, Artificial
  Synthetic oligonucleotide
gagggtaaaagggggatctcaaagaacagatggcattataagtgaatcctgcagtgtcag

SEQ ID NO: 28523 - DNA, 58 bp, Artificial
  Synthetic oligonucleotide
tctttggaccagcacactacaaggagttacagagtctcacagtgttggcacacccttt

SEQ ID NO: 28524 - DNA, 60 bp, Artificial
  Synthetic oligonucleotide
aggttgggactgtgtatggtcagaatagacctgagaagttcattgaagcagagcctattg

SEQ ID NO: 28525 - DNA, 60 bp, Artificial
  Synthetic oligonucleotide
ggaatggacgatgcctttgaggagctggctgactacttaactgtggaagaggatcctgat

SEQ ID NO: 28526 - DNA, 60 bp, Artificial
  Synthetic oligonucleotide
tccatccaacaaaataaggattccagaaacacacgggcagagagccaaaagaaggtgtgg

SEQ ID NO: 28527 - DNA, 60 bp, Artificial
  Synthetic oligonucleotide
ggccatctagtcagagatatcacagaaagtttaattgcacatgctgggctgcgccgttct

SEQ ID NO: 28528 - DNA, 60 bp, Artificial
  Synthetic oligonucleotide
ggcttacctgctgccatacctcctgctgcatattccctcataatgaacaaggctaagatt

SEQ ID NO: 28529 - DNA, 60 bp, Artificial
  Synthetic oligonucleotide
gggaaactggcttcaagggaacttaaataaatgctcatcattatttggtgctgctgtctc

SEQ ID NO: 28530 - DNA, 60 bp, Artificial
  Synthetic oligonucleotide
gaggatgtattccagcacgaccgattgggtgagtttagttttgtaggtaaagttcaatgg

SEQ ID NO: 28531 - DNA, 60 bp, Artificial
  Synthetic oligonucleotide
tcagtcaaacacgcaatatcagtctcaagggaatgtctggggcattgcaagaggatggac

SEQ ID NO: 28532 - DNA, 60 bp, Artificial
  Synthetic oligonucleotide
gcaggaaggtcacgtgttgttattgtggaaggaaatgtagaagggacagctgagtcaatc

SEQ ID NO: 28533 - DNA, 60 bp, Artificial
  Synthetic oligonucleotide
gaatgcatagatctactggataggctctacgctgtcagacatgacctggttgaccagatg

SEQ ID NO: 28534 - DNA, 60 bp, Artificial
  Synthetic oligonucleotide
cagttgatcactccacggtcggagcaagtggtgtttacccctctttaatgtcccgtgttg

SEQ ID NO: 28535 - DNA, 60 bp, Artificial
  Synthetic oligonucleotide
ccctagagtgcactttcaatcgagccctaatgtgaaggaaccagggacactgaagttagg

SEQ ID NO: 28536 - DNA, 60 bp, Artificial
  Synthetic oligonucleotide
cttggaagatgcgaaaagactcaaaaaaaagccagctatgctacaattgctacacagtta

SEQ ID NO: 28537 - DNA, 60 bp, Artificial
  Synthetic oligonucleotide
gatattgtgattattacactcaatttagtgataattctggttatagccagacaagctgga

SEQ ID NO: 28538 - DNA, 60 bp, Artificial
  Synthetic oligonucleotide
cgcgttgtaatataattagatacccaatcaaccctaggcatataagaacctgcaagtggc

SEQ ID NO: 28539 - DNA, 60 bp, Artificial
  Synthetic oligonucleotide
acaagctggaggaaattcttaagatcacacgattttgaatcttgcataatttacccaaat

SEQ ID NO: 28540 - DNA, 59 bp, Artificial
  Synthetic oligonucleotide
ttatctacctttcacaaagctttcagagggactccaatctcttatgtaacagaattgat

SEQ ID NO: 28541 - DNA, 60 bp, Artificial
  Synthetic oligonucleotide
tataccaatcgaatatagagaggagtcattattgcattgctgattcgcattgtctagaag

SEQ ID NO: 28542 - DNA, 60 bp, Artificial
  Synthetic oligonucleotide
ccaaagacgcagttacagaagtctgccttaaagatgatgttagcatgataaagaccgaag

SEQ ID NO: 28543 - DNA, 60 bp, Artificial
  Synthetic oligonucleotide
cgggaacattttcaaataatgtagctatgagaaagtggttggttgcagactggcatgatt

SEQ ID NO: 28544 - DNA, 60 bp, Artificial
  Synthetic oligonucleotide
cccaatgattgcaaagataccagaagatatatctggggcactgaaatacatagagagttt

SEQ ID NO: 28545 - DNA, 60 bp, Artificial
  Synthetic oligonucleotide
ctcatgtggcccaaagtccatacaattccatgcatgtttcaatcagcatatgtcttgtgt

SEQ ID NO: 28546 - DNA, 60 bp, Artificial
  Synthetic oligonucleotide
attgctgattcgcattgtctagaagaattcgaattggtaaagccagagcttctaactgca

SEQ ID NO: 28547 - DNA, 60 bp, Artificial
  Synthetic oligonucleotide
tatttttgagcctttcaaaaatttatttggctcatatataggtatcttttacgctatagt

SEQ ID NO: 28548 - DNA, 60 bp, Artificial
  Synthetic oligonucleotide
cacaattcatagcacagtggaaaccagttgtcaaattgaaagcgactgtacaagtttcca

SEQ ID NO: 28549 - DNA, 60 bp, Artificial
  Synthetic oligonucleotide
caagtagaaaagaagttaccattaggaaatgctttgacaacgattaccaggcttgtaaat

SEQ ID NO: 28550 - DNA, 66 bp, Artificial
  Synthetic oligonucleotide
ggttggacaaattaatgatattggagtctattcaaaaggatgtggtaatgtacaaaaggtaaatgg

SEQ ID NO: 28551 - DNA, 60 bp, Artificial
  Synthetic oligonucleotide
atatcaatgctgaaggttcttgtgctggatgcattaactgttttgagaacatacattgtg

SEQ ID NO: 28552 - DNA, 53 bp, Artificial
  Synthetic oligonucleotide
atactgggttctattaaaatgaaggcaatcttaggagatgtcaagtacaaaaa

SEQ ID NO: 28553 - DNA, 60 bp, Artificial
  Synthetic oligonucleotide
attgaatccgaaataccagcattggcaggtactgctataggttttaaaatcaattcaaag

SEQ ID NO: 28554 - DNA, 60 bp, Artificial
  Synthetic oligonucleotide
agaagttggtgatgatctctcattgcacacagaagcatacatttgtagtgctgattgtat

SEQ ID NO: 28555 - DNA, 60 bp, Artificial
  Synthetic oligonucleotide
cctgcaagtggcaaatttcacattctacaatagataaaattaccgtacatgagttggcag

SEQ ID NO: 28556 - DNA, 60 bp, Artificial
  Synthetic oligonucleotide
gtgttgataaggaaacagcacaaataaggctacaaacagacagcaccacccactttgaaa

SEQ ID NO: 28557 - DNA, 60 bp, Artificial
  Synthetic oligonucleotide
ggcctgaggagctgtagaataaaagacacaggaacctgcgatgtattaggcaatgaatgg

SEQ ID NO: 28558 - DNA, 60 bp, Artificial
  Synthetic oligonucleotide
ggtaagcaagatagctttatattttctaaggggtacttatataagtgggttggggtcaaa

SEQ ID NO: 28559 - DNA, 60 bp, Artificial
  Synthetic oligonucleotide
caaataatgtagctatgagaaagtggttggttgcagactggcatgattgtaggccccaaa

SEQ ID NO: 28560 - DNA, 60 bp, Artificial
  Synthetic oligonucleotide
tggcatgattgtaggccccaaaaatcatctggagggcacatcaatgtaatagaagttggt

SEQ ID NO: 28561 - DNA, 60 bp, Artificial
  Synthetic oligonucleotide
taccaaatatcactatataccaatcgaatatagagaggagtcattattgcattgctgatt

SEQ ID NO: 28562 - DNA, 60 bp, Artificial
  Synthetic oligonucleotide
gtatagaacaaaaggcaatatcttggaattgcactggccctttcctaaaccttggaagat

SEQ ID NO: 28563 - DNA, 60 bp, Artificial
  Synthetic oligonucleotide
ggcaatatcttggaattgcactggccctttcctaaaccttggaagatgcgaaaagactca

SEQ ID NO: 28564 - DNA, 60 bp, Artificial
  Synthetic oligonucleotide
ggtgactttacaaacaagtgtagacaatgcacttgtgggcagtatgaagatgcagctgga

SEQ ID NO: 28565 - DNA, 60 bp, Artificial
  Synthetic oligonucleotide
taaagactctgttctactgacatctgcagaaggccctgatttttctgtatgtatagaaca

SEQ ID NO: 28566 - DNA, 60 bp, Artificial
  Synthetic oligonucleotide
gcagtgaatgtgacatgtaccatgataagaatggtttagtaaggaatggtgactttacaa

SEQ ID NO: 28567 - DNA, 60 bp, Artificial
  Synthetic oligonucleotide
tagtataacctggggcttagtaatactcctaggtttaactttcatcctattcagaagatt

SEQ ID NO: 28568 - DNA, 60 bp, Artificial
  Synthetic oligonucleotide
ccagatgatatgttggacatggctgaaaggatagatatttactatttaagcattatctta

SEQ ID NO: 28569 - DNA, 60 bp, Artificial
  Synthetic oligonucleotide
cttgtgtaagattcctgcatagaacaatattgccaggttctatagcaaactctatatgcc

SEQ ID NO: 28570 - DNA, 60 bp, Artificial
  Synthetic oligonucleotide
cagcaccacccactttgaaatagctgggacaactgtaaaatcaggttggtttaaaagcac

SEQ ID NO: 28571 - DNA, 60 bp, Artificial
  Synthetic oligonucleotide
gcacaacttacataacactagatcaaacatgtgaacatctgaaagtctcatgtggcccaa

SEQ ID NO: 28572 - DNA, 60 bp, Artificial
  Synthetic oligonucleotide
cctataataacagataaatttgaggtgcaattcaaaaccgtggaatcttactcattgcca

SEQ ID NO: 28573 - DNA, 60 bp, Artificial
  Synthetic oligonucleotide
ggatatgtaaagagtgcatcttattcatctacatacacaaaattatacacaactgggcca

SEQ ID NO: 28574 - DNA, 60 bp, Artificial
  Synthetic oligonucleotide
ttctcatattaacatttgtaacacctatgaatgcattaaccctaggttcttcagaggaga

SEQ ID NO: 28575 - DNA, 51 bp, Artificial
  Synthetic oligonucleotide
attgtgtgtgtggtgctagatatgaaacatctgatagaatgaagttgcata

SEQ ID NO: 28576 - DNA, 60 bp, Artificial
  Synthetic oligonucleotide
gggtgcgaagagtttggatgtttggctattagtgatggctgcgtatttgggtcatgtcag

SEQ ID NO: 28577 - DNA, 60 bp, Artificial
  Synthetic oligonucleotide
cataataaaggatgaattgaccgtttataggaaaaccactgacgaagtgacagagctgga

SEQ ID NO: 28578 - DNA, 51 bp, Artificial
  Synthetic oligonucleotide
ctgacgaagtgacagagctggaattgtgcctgacttttgcagacaagactt

SEQ ID NO: 28579 - DNA, 60 bp, Artificial
  Synthetic oligonucleotide
tgccttaatatttctgattgcaattgctgctgcaagcccagtataccagagatgcttcca

SEQ ID NO: 28580 - DNA, 60 bp, Artificial
  Synthetic oligonucleotide
ctaccaagtatagataacgttcaaagagtgaaagtataagacagattaaggatgattgcc

SEQ ID NO: 28581 - DNA, 60 bp, Artificial
  Synthetic oligonucleotide
aaatgcactgggagctgtcctacacaagtcaagcataaaaccggttggttaacatttgca

SEQ ID NO: 28582 - DNA, 60 bp, Artificial
  Synthetic oligonucleotide
tgaaagtctcatgtggcccaaagtccatacaattccatgcatgtttcaatcagcatatgt

SEQ ID NO: 28583 - DNA, 60 bp, Artificial
  Synthetic oligonucleotide
gtggtttagtatatcatccatttactgaatgtggaacccattgtgtgtgtggtgctagat

SEQ ID NO: 28584 - DNA, 60 bp, Artificial
  Synthetic oligonucleotide
aattatacacaactgggccaacaatagggatcaacacgaagcatgatgaaaaatgcactg

SEQ ID NO: 28585 - DNA, 60 bp, Artificial
  Synthetic oligonucleotide
ttagtatacttagtaagacgtatatctgttacattttaatgcctatgttcatacctgtgg

SEQ ID NO: 28586 - DNA, 60 bp, Artificial
  Synthetic oligonucleotide
ggtatggcaatgtcctggatgtcaactccattgatctggaagaaccaagtggacagactg

SEQ ID NO: 28587 - DNA, 60 bp, Artificial
  Synthetic oligonucleotide
tcaaagcttacctccgaaggtcatcggaacttctggtttcacttacacttggaggtgtta

SEQ ID NO: 28588 - DNA, 60 bp, Artificial
  Synthetic oligonucleotide
cctccgaaggtcatcggaacttctggtttcacttacacttggaggtgttaaccttgctgt

SEQ ID NO: 28589 - DNA, 60 bp, Artificial
  Synthetic oligonucleotide
tcttatctcaggaggacacaatcaatgggaatacaactggaccagaggatcatcgttctc

SEQ ID NO: 28590 - DNA, 60 bp, Artificial
  Synthetic oligonucleotide
gtgcctgtgcatgcctgtaacatgatgaagagctgcctaatagcattagggccctataga

SEQ ID NO: 28591 - DNA, 60 bp, Artificial
  Synthetic oligonucleotide
gtgcctgtgcatgcctgtaacatgatgaagagctgcctaatagcattaggcccctataga

SEQ ID NO: 28592 - DNA, 60 bp, Artificial
  Synthetic oligonucleotide
ggtggacccagatgacgttaacaagaacacactgcaagcaaggcaacagacagtgtcagc

SEQ ID NO: 28593 - DNA, 60 bp, Artificial
  Synthetic oligonucleotide
ggcagatgctgtgtcccggaagaagatggatactaaacctactgacccgactgggattga

SEQ ID NO: 28594 - DNA, 60 bp, Artificial
  Synthetic oligonucleotide
ctctttcactcttctacctcagtgtacttatatatatgcaagtagcatatatataagtac

SEQ ID NO: 28595 - DNA, 60 bp, Artificial
  Synthetic oligonucleotide
ccacagggacatttgctaataacatagctatgagaaaatggttggttgcagattggcatg

SEQ ID NO: 28596 - DNA, 60 bp, Artificial
  Synthetic oligonucleotide
ccacttggtgctggggtgtagggactggctgcacctgttgtggattagacgtgaaagacc

SEQ ID NO: 28597 - DNA, 50 bp, Artificial
  Synthetic oligonucleotide
atccataggtggccttcgtcttgtcattgtatctttcattaacataaggg

SEQ ID NO: 28598 - DNA, 60 bp, Artificial
  Synthetic oligonucleotide
ggtgagagaaatccataggtggccttcgtcttgtcattgtatctttcattaacatagggg

SEQ ID NO: 28599 - DNA, 60 bp, Artificial
  Synthetic oligonucleotide
gagaaatccataggtggccttcgtcttgtcattgtatctttcattaacataggggcgttg

SEQ ID NO: 28600 - DNA, 60 bp, Artificial
  Synthetic oligonucleotide
tcagacaaggtgagaaaaatccataggtggccttcgtcttgtcattgtatctttcattaa

SEQ ID NO: 28601 - DNA, 60 bp, Artificial
  Synthetic oligonucleotide
ggtgagagaaatccataggtggccttcgtcttgtcattgtatctttcattaacataggag

SEQ ID NO: 28602 - DNA, 60 bp, Artificial
  Synthetic oligonucleotide
gttaaccttgccgtacttaacacgcatttccctggaacccagtccattccactgcctgac

SEQ ID NO: 28603 - DNA, 51 bp, Artificial
  Synthetic oligonucleotide
tgttgcaacaggccttgccaagcttgcagagactgaggggaagggagtttt

SEQ ID NO: 28604 - DNA, 51 bp, Artificial
  Synthetic oligonucleotide
tgttgcaacaggccttgccaagcttgcagagactgaagggaagggagtttt

SEQ ID NO: 28605 - DNA, 52 bp, Artificial
  Synthetic oligonucleotide
ggcgcactcaatcaatgggaatacaactggaccaaaggattatcctgctttt

SEQ ID NO: 28606 - DNA, 57 bp, Artificial
  Synthetic oligonucleotide
ttgaattggaattcaatgatgtcgctgctaacaccagcagtacttttgacccagagg

SEQ ID NO: 28607 - DNA, 60 bp, Artificial
  Synthetic oligonucleotide
ttcctggaaacaggaacaacccaattggtaacaacgatcttaccatccacagaatttcag

SEQ ID NO: 28608 - DNA, 60 bp, Artificial
  Synthetic oligonucleotide
cctggaaacaggaacaacccaattggtaacaacgatcttaccatccacagaatttcagga

SEQ ID NO: 28609 - DNA, 60 bp, Artificial
  Synthetic oligonucleotide
actggaggataaactcgcagacttcaagcgaagaatggcagatgctgtgtccaggaaaaa

SEQ ID NO: 28610 - DNA, 60 bp, Artificial
  Synthetic oligonucleotide
cttcgtgcacagggtgcacagattgatactgctttcagctcatactactggctctacaag

SEQ ID NO: 28611 - DNA, 60 bp, Artificial
  Synthetic oligonucleotide
aaaattttagtttcaggtagatcagagtcaatcatgaaattagaagaaagaacaggagtc

SEQ ID NO: 28612 - DNA, 50 bp, Artificial
  Synthetic oligonucleotide
ctcaccatcatcaatttgggtttttgctggggcacctgataggtgccccc

SEQ ID NO: 28613 - DNA, 59 bp, Artificial
  Synthetic oligonucleotide
aatggaggaaagacataggtttccgtgtcaatgcaaacacagcggctctgagtaacaaa

SEQ ID NO: 28614 - DNA, 60 bp, Artificial
  Synthetic oligonucleotide
ggaacatttatgggtgggaatcattactcaagggtgggtcagttaatccgttgtgggtgg

SEQ ID NO: 28615 - DNA, 60 bp, Artificial
  Synthetic oligonucleotide
ggaacatttatgggtgggaatcattactcaggggtgggtcagttaatccgttgtgggtgg

SEQ ID NO: 28616 - DNA, 60 bp, Artificial
  Synthetic oligonucleotide
tttagttccaggctgccttaagtagcctttttttgtatatatggatgtaaatttcatttg

SEQ ID NO: 28617 - DNA, 60 bp, Artificial
  Synthetic oligonucleotide
ggtggaggttatcaataatcattttcctggaaacaggaacaacccaattggtaacaacga

SEQ ID NO: 28618 - DNA, 60 bp, Artificial
  Synthetic oligonucleotide
gagaaggggttgcagcatccattcaggcaaaaattgatgaattaaagaggcagttggcag

SEQ ID NO: 28619 - DNA, 60 bp, Artificial
  Synthetic oligonucleotide
ccaaatggggcccaatacactgctgttccttcttttccggcatgatgcagcaggtcctga

SEQ ID NO: 28620 - DNA, 60 bp, Artificial
  Synthetic oligonucleotide
ccaaatggggcccaatacactgctgttccttcttttcaggtatgatgcagcaggttctta

SEQ ID NO: 28621 - DNA, 60 bp, Artificial
  Synthetic oligonucleotide
gcatgtacagaaggtgctatcagcaagcacagtgtgtaagttgcagagttgcacacatgg

SEQ ID NO: 28622 - DNA, 60 bp, Artificial
  Synthetic oligonucleotide
gcatgtgcaaaaggtgttatcggcaagcacagtgtgtaagttgcagagttgcacacatgg

SEQ ID NO: 28623 - DNA, 60 bp, Artificial
  Synthetic oligonucleotide
aactggtccaactataggggtaaatactaagcatgatgaaaagtgcacaggaccctgccc

SEQ ID NO: 28624 - DNA, 60 bp, Artificial
  Synthetic oligonucleotide
gtgacagactgggtttcattccatgacagaatactgatcacaccagacgaacataaatat

SEQ ID NO: 28625 - DNA, 60 bp, Artificial
  Synthetic oligonucleotide
ccatcagtatatacgatgcccaatgtcagtatttaccaatctaattcagagaggagccac

SEQ ID NO: 28626 - DNA, 60 bp, Artificial
  Synthetic oligonucleotide
ggtattacacaaagcatttagaggaactggcacttcatatattgcagaaagtatggcccg

SEQ ID NO: 28627 - DNA, 60 bp, Artificial
  Synthetic oligonucleotide
aagatcaagatgtaggtcacttttgtctcagccctcgatgtagtacaatacgctacccaa

SEQ ID NO: 28628 - DNA, 60 bp, Artificial
  Synthetic oligonucleotide
ggcatctgggttgtgtccggggtataagaatctcagagcagccagagttatgtgcaaatc

SEQ ID NO: 28629 - DNA, 60 bp, Artificial
  Synthetic oligonucleotide
gtgagcatgataaaaacagaagcaaaatacatcaaaaatacaacaggaacatttgccaac

SEQ ID NO: 28630 - DNA, 60 bp, Artificial
  Synthetic oligonucleotide
aatgcaggcaatgcacatgtgggcaatttgaggatgttactgggttgatggtgcataaga

SEQ ID NO: 28631 - DNA, 60 bp, Artificial
  Synthetic oligonucleotide
gatcaaacatgtgagcatctgaaagtgtcatgcggacctaaatcaatacagttccatgct

SEQ ID NO: 28632 - DNA, 60 bp, Artificial
  Synthetic oligonucleotide
caagcatagaaaggatatctaagttgcggatggaagactgcctcagatggtgtgagccta

SEQ ID NO: 28633 - DNA, 60 bp, Artificial
  Synthetic oligonucleotide
ccagcttgaagtttttctatcactcattcatagagtcctacaatcacagatgggttgaca

SEQ ID NO: 28634 - DNA, 60 bp, Artificial
  Synthetic oligonucleotide
cctcgtcagtggggtcatgtgggttctatggtaactatgaagtcccctagtttctttgat

SEQ ID NO: 28635 - DNA, 60 bp, Artificial
  Synthetic oligonucleotide
ctagtttctttgatacaagcatagaaaggatatctaagttgcggatggaagactgcctca

SEQ ID NO: 28636 - DNA, 60 bp, Artificial
  Synthetic oligonucleotide
gactttgcaacccaaatagtcagaataggtggagggctagggttagatgactccattttg

SEQ ID NO: 28637 - DNA, 60 bp, Artificial
  Synthetic oligonucleotide
gctagggttagatgactccattttgttcacacatagcaaaatgattggggaattggcttt

SEQ ID NO: 28638 - DNA, 60 bp, Artificial
  Synthetic oligonucleotide
tctatcactcattcatagagtcctacaatcacagatgggttgacaaatgtgactttgcaa

SEQ ID NO: 28639 - DNA, 60 bp, Artificial
  Synthetic oligonucleotide
tgggttgacaaatgtgactttgcaacccaaatagtcagaataggtggagggctagggtta

SEQ ID NO: 28640 - DNA, 60 bp, Artificial
  Synthetic oligonucleotide
ggttagatgactccattttgttcacacatagcaaaatgattggggaattggctttgagag

SEQ ID NO: 28641 - DNA, 60 bp, Artificial
  Synthetic oligonucleotide
cttatgtgcagatgataaggatgctgatagctatgacatatgacgaagcggacgactgtt

SEQ ID NO: 28642 - DNA, 60 bp, Artificial
  Synthetic oligonucleotide
cagcttgtacttacttatcaattcattaaccaccttcttaccttcatctgacatcttgtt

SEQ ID NO: 28643 - DNA, 60 bp, Artificial
  Synthetic oligonucleotide
acatactctgcagcttgacaggtccaaccagcaaatgcagctgcaattctagataatgtc

SEQ ID NO: 28644 - DNA, 60 bp, Artificial
  Synthetic oligonucleotide
ctctgcagcttgacaggtccaaccagcaaatgcagctgcaattctagataatgtcaaatc

SEQ ID NO: 28645 - DNA, 60 bp, Artificial
  Synthetic oligonucleotide
gattcctcgtcagtggggtcatgtgggttctatggtaactatgaagtcccctagtttctt

SEQ ID NO: 28646 - DNA, 60 bp, Artificial
  Synthetic oligonucleotide
ctgttctcagcagtcagaaaggggctatttatggcagcctgcattggcctatcaaagcta

SEQ ID NO: 28647 - DNA, 60 bp, Artificial
  Synthetic oligonucleotide
ccatagctctaccggttacaggcagataatcctggacatactctgcagcttgacaggtcc

SEQ ID NO: 28648 - DNA, 60 bp, Artificial
  Synthetic oligonucleotide
ctcagcagtcagaaaggggctatttatggcagcctgcattggcctatcaaagctattgac

SEQ ID NO: 28649 - DNA, 60 bp, Artificial
  Synthetic oligonucleotide
agggtcaatcaagccagcaaagctaggatgcatcagagctcttggatacttatcagatag

SEQ ID NO: 28650 - DNA, 60 bp, Artificial
  Synthetic oligonucleotide
tatcagatagagcatccatagctctaccggttacaggcagataatcctggacatactctg

SEQ ID NO: 28651 - DNA, 58 bp, Artificial
  Synthetic oligonucleotide
ttggggatggattgggaggggatgggcagccttttacaatttacggtaggctttggct

SEQ ID NO: 28652 - DNA, 50 bp, Artificial
  Synthetic oligonucleotide
ccagttctctcctcctctctttttgatcaggattataacttgttttgcat

SEQ ID NO: 28653 - DNA, 51 bp, Artificial
  Synthetic oligonucleotide
acatcttgttcaccatcttggaaggcttgttgcctctagttaaagagagca

SEQ ID NO: 28654 - DNA, 60 bp, Artificial
  Synthetic oligonucleotide
gtcagagacccaagcagcgatggtgctctcatcgattgactcactagcaaactgaatcgc

SEQ ID NO: 28655 - DNA, 60 bp, Artificial
  Synthetic oligonucleotide
aagtcagagacccaagcagcgatggtgctctcatcgattgactcactagcaaactgaatc

SEQ ID NO: 28656 - DNA, 60 bp, Artificial
  Synthetic oligonucleotide
aatctcctcgtaagacatggcttttatttagtaagaattcttcagggaactttgtgtccc

SEQ ID NO: 28657 - DNA, 60 bp, Artificial
  Synthetic oligonucleotide
aaactgaatcgcaatctcctcgtaagacatggcttttatttagtaagaattcttcaggga

SEQ ID NO: 28658 - DNA, 51 bp, Artificial
  Synthetic oligonucleotide
gataggttgatgggtgatggggttgttgggggtgaatgacggggttaaatc

SEQ ID NO: 28659 - DNA, 60 bp, Artificial
  Synthetic oligonucleotide
atcagctgcctgagggtggaggaatgggattttaggataggttgatgggtgatggggttg

SEQ ID NO: 28660 - DNA, 60 bp, Artificial
  Synthetic oligonucleotide
gagatgatcaaattcatcagctgcctgagggtggaggaatgggattttaggataggttga

SEQ ID NO: 28661 - DNA, 60 bp, Artificial
  Synthetic oligonucleotide
cttacttggaaacagaaaatggagatatgtaagtagagatgatcaaattcatcagctgcc

SEQ ID NO: 28662 - DNA, 60 bp, Artificial
  Synthetic oligonucleotide
ggttacttcctctcacttacttggaaacagaaaatggagatatgtaagtagagatgatca

SEQ ID NO: 28663 - DNA, 60 bp, Artificial
  Synthetic oligonucleotide
cgactgttgtcaatctccactctttaacatattatcacttcagagggaggttacttcctc

SEQ ID NO: 28664 - DNA, 60 bp, Artificial
  Synthetic oligonucleotide
gacgactgttgtcaatctccactctttaacatattatcacttcagagggaggttacttcc

SEQ ID NO: 28665 - DNA, 60 bp, Artificial
  Synthetic oligonucleotide
taaggatgctgatagctatgacatatgacgaagcggacgactgttgtcaatctccactct

SEQ ID NO: 28666 - DNA, 60 bp, Artificial
  Synthetic oligonucleotide
catcagtctcatcttatagaggcttggagataccttgtcataacctgaggcaatctctag

SEQ ID NO: 28667 - DNA, 60 bp, Artificial
  Synthetic oligonucleotide
gctctggagttgccatgcatctctatgtccataggacccttacatagaccttctgtaaat

SEQ ID NO: 28668 - DNA, 60 bp, Artificial
  Synthetic oligonucleotide
caatctctagttgaaaagagaaaattgtcttattttcttaaggattctgagattcctcgt

SEQ ID NO: 28669 - DNA, 60 bp, Artificial
  Synthetic oligonucleotide
cagtctcatcttatagaggcttggagataccttgtcataacctgaggcaatctctagttg

SEQ ID NO: 28670 - DNA, 60 bp, Artificial
  Synthetic oligonucleotide
ggacacccaagaccccctgattgttttcataatgctgagttataataaatatgctctgga

SEQ ID NO: 28671 - DNA, 60 bp, Artificial
  Synthetic oligonucleotide
atgctctggagttgccatgcatctctatgtccataggacccttacatagaccttctgtaa

SEQ ID NO: 28672 - DNA, 60 bp, Artificial
  Synthetic oligonucleotide
tatcaattcattaaccaccttcttaccttcatctgacatcttgttcaccatcttggaagg

SEQ ID NO: 28673 - DNA, 60 bp, Artificial
  Synthetic oligonucleotide
atggcttaagattggaattgatcacccctagagtggtcaacatagcacgtctgttctcag

SEQ ID NO: 28674 - DNA, 60 bp, Artificial
  Synthetic oligonucleotide
cccctgattgttttcataatgctgagttataataaatatgctctggagttgccatgcatc

SEQ ID NO: 28675 - DNA, 60 bp, Artificial
  Synthetic oligonucleotide
aagagaaaattgtcttattttcttaaggattctgagattcctcgtcagtggggtcatgtg

SEQ ID NO: 28676 - DNA, 60 bp, Artificial
  Synthetic oligonucleotide
aattgatcacccctagagtggtcaacatagcacgtctgttctcagcagtcagaaaggggc

SEQ ID NO: 28677 - DNA, 60 bp, Artificial
  Synthetic oligonucleotide
atttccccggaacccagtccattccactgcctgactacggtctcacgatccaccggattt

SEQ ID NO: 28678 - DNA, 60 bp, Artificial
  Synthetic oligonucleotide
gtccctgctgagtgggagctaaagttcagaaaagagttaggtttcaacatacttgaagac

SEQ ID NO: 28679 - DNA, 60 bp, Artificial
  Synthetic oligonucleotide
tttcggagagctgatctccaggcacctgagaataaaacccaaacaaagaagcgaggtgga

SEQ ID NO: 28680 - DNA, 60 bp, Artificial
  Synthetic oligonucleotide
ggtaaagacagcttcgaaacagaggcttttagtaattctaatgaatgtcaaagattggtg

SEQ ID NO: 28681 - DNA, 60 bp, Artificial
  Synthetic oligonucleotide
gatgaccacctcaaggagagatctagcctcagatatgggaatgtccttgatgtgaatgca

SEQ ID NO: 28682 - DNA, 60 bp, Artificial
  Synthetic oligonucleotide
taatggaatacgtcgcccaaaacacttgtatgtctcaatgccaactgcacagtccacaat

SEQ ID NO: 28683 - DNA, 60 bp, Artificial
  Synthetic oligonucleotide
taatggaatacgtcgcccaaaacacctgtatgtctcaatgccaactgcacagtccacaat

SEQ ID NO: 28684 - DNA, 60 bp, Artificial
  Synthetic oligonucleotide
tatacatgttaacaacaagaggaaggcaaacagctaaggacaacaagggaacacggatca

SEQ ID NO: 28685 - DNA, 60 bp, Artificial
  Synthetic oligonucleotide
tgaaggcagaagagattacaccaggaggctaccgaacagctgtatgtgggctttttcctg

SEQ ID NO: 28686 - DNA, 60 bp, Artificial
  Synthetic oligonucleotide
tctttatgtgtcaatgcctaatgcccaatcaagcatgaaggcagaagagattacaccagg

SEQ ID NO: 28687 - DNA, 60 bp, Artificial
  Synthetic oligonucleotide
tgcttactaacaacaacaacctacctcaaaaacaacaactacctccaacatactacctca

SEQ ID NO: 28688 - DNA, 60 bp, Artificial
  Synthetic oligonucleotide
tgcttactaacaacaacaacctacctcaaaaacaacaacaacctccaacatactacctca

SEQ ID NO: 28689 - DNA, 60 bp, Artificial
  Synthetic oligonucleotide
cgtatatttgacctcatttgtagtcccaatcttgttgaaagcactatacatgttaacaac

SEQ ID NO: 28690 - DNA, 66 bp, Artificial
  Synthetic oligonucleotide
cattgtatatttgacctcatttgtagtcccaatcttgttgaaagcactatacatgttaacaacaag

SEQ ID NO: 28691 - DNA, 60 bp, Artificial
  Synthetic oligonucleotide
tcggaaacctaaacatctttatgtgtcaatgcctaatgcccaatcaagcatgaaggcaga

SEQ ID NO: 28692 - DNA, 60 bp, Artificial
  Synthetic oligonucleotide
cacggatcagatttaaggatgacagttcttttgaggatgtcaatggaattcggaaaccta

SEQ ID NO: 28693 - DNA, 60 bp, Artificial
  Synthetic oligonucleotide
acacggatcagatttaaggatgacagttcttttgaggatgtcaatggaattcggaaacct

SEQ ID NO: 28694 - DNA, 60 bp, Artificial
  Synthetic oligonucleotide
caagaggaaggcaaacagctaaggacaacaagggaacacggatcagatttaaggatgaca

SEQ ID NO: 28695 - DNA, 60 bp, Artificial
  Synthetic oligonucleotide
gaatataattgtgcactatgattataactggaatcacccattatgtgaatgataatgtta

SEQ ID NO: 28696 - DNA, 60 bp, Artificial
  Synthetic oligonucleotide
agttgcagcatccatccaggctaaaattgatgaactgaaaagacagctagcagacaggat

SEQ ID NO: 28697 - DNA, 60 bp, Artificial
  Synthetic oligonucleotide
agtttcagcatccatccaggctaaaattgatgaactgaaaagacagctagcagacaggat

SEQ ID NO: 28698 - DNA, 60 bp, Artificial
  Synthetic oligonucleotide
agtcttctttttatcagtcctacttgagaagaacgcagtcaatggggatacaactagatc

SEQ ID NO: 28699 - DNA, 60 bp, Artificial
  Synthetic oligonucleotide
tctctatcttacaggatatgaggaataccatcatggcatccaagactgtgggaacatctg

SEQ ID NO: 28700 - DNA, 60 bp, Artificial
  Synthetic oligonucleotide
acatggacccagagctgagaactcttgcacagagtctgattgaccagaaggttaaggaaa

SEQ ID NO: 28701 - DNA, 53 bp, Artificial
  Synthetic oligonucleotide
ttttatcagtcctacttgagaagaacgcagtcaatggggatacaactagatca

SEQ ID NO: 28702 - DNA, 60 bp, Artificial
  Synthetic oligonucleotide
gataggtgtccgcctacatgcctttttattgctggtattgctgagttaggagcattcttc

SEQ ID NO: 28703 - DNA, 60 bp, Artificial
  Synthetic oligonucleotide
ccatccaggctaaaattgatgaactgaaaagacagctagcagacaggattgctacgggaa

SEQ ID NO: 28704 - DNA, 60 bp, Artificial
  Synthetic oligonucleotide
agcattcttctctatcttacaggatatgaggaataccatcatggcatccaagactgtggg

SEQ ID NO: 28705 - DNA, 60 bp, Artificial
  Synthetic oligonucleotide
ggtgtccgcctacatgcccttttattgctggtattgctgagttaggagcattcttctcta

SEQ ID NO: 28706 - DNA, 60 bp, Artificial
  Synthetic oligonucleotide
gataatgttatactactgattattatcaatcactgccatatatttgcactatttagggtt

SEQ ID NO: 28707 - DNA, 60 bp, Artificial
  Synthetic oligonucleotide
gttaaggaaatttcaaatcaggagcctttaaaattgtagatatgcactatgaatataatt

SEQ ID NO: 28708 - DNA, 60 bp, Artificial
  Synthetic oligonucleotide
ggacccagagctgagaactcttgcacagagtctgattgaccagaaggttaaggaaatttc

SEQ ID NO: 28709 - DNA, 60 bp, Artificial
  Synthetic oligonucleotide
gataggtgtccgcctacatgcccttttattgctggtattgctgagttaggagcattcttc

SEQ ID NO: 28710 - DNA, 60 bp, Artificial
  Synthetic oligonucleotide
gagaaggacccagatgagttaaacaagagggcactgactgacagggaaggagtttcagca

SEQ ID NO: 28711 - DNA, 54 bp, Artificial
  Synthetic oligonucleotide
aaaacctgggacaggatcgggatccaacaggggtagaaccaggggaccacctaa

SEQ ID NO: 28712 - DNA, 60 bp, Artificial
  Synthetic oligonucleotide
catcatcgtatatttgacctcatttgtagtcccaatcttgttgaaagcactatacatgtt

SEQ ID NO: 28713 - DNA, 60 bp, Artificial
  Synthetic oligonucleotide
cgggtgggtcagttattccgttgtgggtgggtttaggagccatgctgccttaagtagcat

SEQ ID NO: 28714 - DNA, 60 bp, Artificial
  Synthetic oligonucleotide
acgggtgggtcagttattccgttgtgggtgggtttaggagccatgctgccttaagtagca

SEQ ID NO: 28715 - DNA, 60 bp, Artificial
  Synthetic oligonucleotide
gagaaggacccagatgagttaaacaagagggcactgactgacagggaaggagttgcagca

SEQ ID NO: 28716 - DNA, 60 bp, Artificial
  Synthetic oligonucleotide
tataatgttatactactgattattaccaatcactgccatatatttgcactatttagggtt

SEQ ID NO: 28717 - DNA, 60 bp, Artificial
  Synthetic oligonucleotide
gatgagttaaacaagagggcactgactgacagggaaggagtttcagcatccatccaggct

SEQ ID NO: 28718 - DNA, 60 bp, Artificial
  Synthetic oligonucleotide
gatgagttaaacaagagggcactgactgacagggaaggagttgcagcatccatccaggct

SEQ ID NO: 28719 - DNA, 60 bp, Artificial
  Synthetic oligonucleotide
gggccatttaatccttgggtgggaataattatataacgggtgggtcagttattccgttgt

SEQ ID NO: 28720 - DNA, 60 bp, Artificial
  Synthetic oligonucleotide
atttagggttattatgggccatttaatccttgggtgggaataattatataacgggtgggt

SEQ ID NO: 28721 - DNA, 60 bp, Artificial
  Synthetic oligonucleotide
ctactgattattaccaatcactgccatatatttgcactatttagggttattatgggccat

SEQ ID NO: 28722 - DNA, 60 bp, Artificial
  Synthetic oligonucleotide
cagacaggattgctacgggaaaaaacctgggacaggatcgggatccaacaggggtagaac

SEQ ID NO: 28723 - DNA, 53 bp, Artificial
  Synthetic oligonucleotide
catgctgaatcagcaggttgtagcatgattgacaacattgactctccatcgtc

SEQ ID NO: 28724 - DNA, 60 bp, Artificial
  Synthetic oligonucleotide
ttgacaacattgactctccatcgtcaatctgggtttttgccggagctccagataggtgtc

SEQ ID NO: 28725 - DNA, 60 bp, Artificial
  Synthetic oligonucleotide
ggactggactgatcggattgagagctggcttggtgaaccctgcaaacttttaccagacac

SEQ ID NO: 28726 - DNA, 60 bp, Artificial
  Synthetic oligonucleotide
ttttaccagacacatcagctgtgagtctcctgggaggaccggcaacaaaccgggactaca

SEQ ID NO: 28727 - DNA, 60 bp, Artificial
  Synthetic oligonucleotide
tgaaggcagaagagattacaccaggaagataccgaacagctgtatgtgggctttttcctg

SEQ ID NO: 28728 - DNA, 60 bp, Artificial
  Synthetic oligonucleotide
aaaggactggactgatcggattgagagctggcttggtgaaccctgcaaacttttaccaga

SEQ ID NO: 28729 - DNA, 60 bp, Artificial
  Synthetic oligonucleotide
ggcaaaggcaggtggcacttgggaacatggaaactaaagaagcaaaggctgttagacaac

SEQ ID NO: 28730 - DNA, 60 bp, Artificial
  Synthetic oligonucleotide
agaagcaaaggctgttagacaacatgctgaatcagcaggttgtagcatgattgacaacat

SEQ ID NO: 28731 - DNA, 60 bp, Artificial
  Synthetic oligonucleotide
cagctgtgagtctcctgggaggaccggcaacaaaccgggactacataaggcaaaggcagg

SEQ ID NO: 28732 - DNA, 60 bp, Artificial
  Synthetic oligonucleotide
cgggactacataaggcaaaggcaggtggcacttgggaacatggaaactaaagaagcaaag

SEQ ID NO: 28733 - DNA, 60 bp, Artificial
  Synthetic oligonucleotide
gaagctagaagaaaggacaggaatcagctgggatctgggcgtagaagatgcctctgaatc

SEQ ID NO: 28734 - DNA, 60 bp, Artificial
  Synthetic oligonucleotide
gaagctagaagaaaggacaggaatcagctgggatctgggcgtagaagatgcctctgagtc

SEQ ID NO: 28735 - DNA, 60 bp, Artificial
  Synthetic oligonucleotide
gtcgctgctaactccagcagtacttttgacccagaggtcgcatacgctagttttaagcgt

SEQ ID NO: 28736 - DNA, 60 bp, Artificial
  Synthetic oligonucleotide
gaaacacgtgccgcttacgcccacagtgttaccttgagtgttagcaaaatggagaacaaa

SEQ ID NO: 28737 - DNA, 60 bp, Artificial
  Synthetic oligonucleotide
cctgttaatacttttctttatgtttgggtggaggatcctgttctgctttaagtgctgcag

SEQ ID NO: 28738 - DNA, 60 bp, Artificial
  Synthetic oligonucleotide
cctgttaatacttttctttatgtttgggtggaggattctgttctgctttaagtgctgcag

SEQ ID NO: 28739 - DNA, 53 bp, Artificial
  Synthetic oligonucleotide
gtctaagttagacaacactgatgttgagtttaaccacagggagatagccgacc

SEQ ID NO: 28740 - DNA, 58 bp, Artificial
  Synthetic oligonucleotide
aaaaccatttgaactaaggtcaggccttgaagtctttaacgaccctttcaatgactat

SEQ ID NO: 28741 - DNA, 60 bp, Artificial
  Synthetic oligonucleotide
aaattgggttagcatctcagaagttacagaaacaacaagtatagttgcatcacctaaaac

SEQ ID NO: 28742 - DNA, 60 bp, Artificial
  Synthetic oligonucleotide
gctgcttgtcaattgtttatgatgagactgacactcagaccacataccacgagaaccttc

SEQ ID NO: 28743 - DNA, 60 bp, Artificial
  Synthetic oligonucleotide
caacagtacatgttgagcatgccggtagctctgatgattatgcaaaatgtatagtggtaa

SEQ ID NO: 28744 - DNA, 56 bp, Artificial
  Synthetic oligonucleotide
aaaactcattagcctcaatgtttcgacagaagaatactcagctgaggtatctagac

SEQ ID NO: 28745 - DNA, 58 bp, Artificial
  Synthetic oligonucleotide
aaaactcatcagcctcaatgtttcgacagaagaatactcggctgaggtgtctagactc

SEQ ID NO: 28746 - DNA, 58 bp, Artificial
  Synthetic oligonucleotide
aaaactcatcagcctcaatgtttcgacagaagaatactcagctgaagtgtctagactc

SEQ ID NO: 28747 - DNA, 60 bp, Artificial
  Synthetic oligonucleotide
tacctcagtgtacttatatatatgcaattagcatatatataagtacacaatttactacct

SEQ ID NO: 28748 - DNA, 60 bp, Artificial
  Synthetic oligonucleotide
tgaagctggaggaaaggacaggaatcagctgggatctgggagtagaagacgcctctgagt

SEQ ID NO: 28749 - DNA, 60 bp, Artificial
  Synthetic oligonucleotide
tcagctagagacaaggcagctgttgttggtggaagttggttttcaaactgacatcgatgg

SEQ ID NO: 28750 - DNA, 60 bp, Artificial
  Synthetic oligonucleotide
atcagctagagacaaggcagctgttgttggtggaagttggttttcaaactgacatcgatg

SEQ ID NO: 28751 - DNA, 60 bp, Artificial
  Synthetic oligonucleotide
gaggaggaccagctagaaacaaggcagctgttgttggtggaagttggttttcaaactgac

SEQ ID NO: 28752 - DNA, 60 bp, Artificial
  Synthetic oligonucleotide
atggaaatgtccttgatgtgaactccatcgacatagaagaacccagtggccagacagctg

SEQ ID NO: 28753 - DNA, 60 bp, Artificial
  Synthetic oligonucleotide
tacattgcaaagcagacggtcagcagtgtcaacattggaggacaagttggcagaattcaa

SEQ ID NO: 28754 - DNA, 60 bp, Artificial
  Synthetic oligonucleotide
cagacagctgattggctcaaaattggcagctacatcataggatttgcactacctatcatc

SEQ ID NO: 28755 - DNA, 60 bp, Artificial
  Synthetic oligonucleotide
gtccttgatgtgaactccatcgacatagaagaacccagtggccagacagctgattggctc

SEQ ID NO: 28756 - DNA, 60 bp, Artificial
  Synthetic oligonucleotide
gcactcaactaacatttaggcacaaattgatggaacagtactgtgaaactgagctatcca

SEQ ID NO: 28757 - DNA, 60 bp, Artificial
  Synthetic oligonucleotide
gacaagttgcactcaactaacatttaggcacaaattgatggaacagtactgtgaaactga

SEQ ID NO: 28758 - DNA, 60 bp, Artificial
  Synthetic oligonucleotide
aaggatgctgaaaggacagtggaggtggacccggatgacgttaacaaaagtacattgcaa

SEQ ID NO: 28759 - DNA, 60 bp, Artificial
  Synthetic oligonucleotide
ctcatgtatatgattgagtggggaaatgaggttgttaaccacttccacctgggtgatgat

SEQ ID NO: 28760 - DNA, 60 bp, Artificial
  Synthetic oligonucleotide
ggccttgtacatgttgtcaactcgagggaggcagactgtgaaggaaaataaggggacaag

SEQ ID NO: 28761 - DNA, 60 bp, Artificial
  Synthetic oligonucleotide
acctatcatcttaaaggccttgtacatgttgtcaactcgagggaggcagactgtgaagga

SEQ ID NO: 28762 - DNA, 56 bp, Artificial
  Synthetic oligonucleotide
ggacatgcgaaataccatcatggcatcaaaaaccgtagggacagctgaggaaaagc

SEQ ID NO: 28763 - DNA, 60 bp, Artificial
  Synthetic oligonucleotide
gacaattatgcgagttactatcatattaatctcacttactaattcacaatgacaagttgc

SEQ ID NO: 28764 - DNA, 55 bp, Artificial
  Synthetic oligonucleotide
ccacttccacctgggtgatgatatggatcctgagctaaggcaattagctcaagct

SEQ ID NO: 28765 - DNA, 60 bp, Artificial
  Synthetic oligonucleotide
caaaggattattctcatgtatatgattgagtggggaaatgaggttgttaaccacttccac

SEQ ID NO: 28766 - DNA, 60 bp, Artificial
  Synthetic oligonucleotide
aatccacatgcagcttgggtctttgcatgtgctcctgatcgatgtccaccaacatgcatc

SEQ ID NO: 28767 - DNA, 53 bp, Artificial
  Synthetic oligonucleotide
tgatcgatgtccaccaacatgcatctacattgcagggatggcagaacttggtg

SEQ ID NO: 28768 - DNA, 60 bp, Artificial
  Synthetic oligonucleotide
acaccagggaggttcaggacaattgtctgtgggttattccctgcacagatcatggcaaga

SEQ ID NO: 28769 - DNA, 60 bp, Artificial
  Synthetic oligonucleotide
attccctgcacagatcatggcaagaaatattatcagtcctgtaatgggggtaatcgggtt

SEQ ID NO: 28770 - DNA, 52 bp, Artificial
  Synthetic oligonucleotide
tatgaggatgtgaatggcatcaggcgcccaaagcatctctacgtgtctatgc

SEQ ID NO: 28771 - DNA, 60 bp, Artificial
  Synthetic oligonucleotide
aaagttgaggaattaacaccagggaggttcaggacaattgtctgtgggttattccctgca

SEQ ID NO: 28772 - DNA, 60 bp, Artificial
  Synthetic oligonucleotide
tgaagcagaatttcttagtagtattagggcctacctcatgaaccggcaggctgtcttgga

SEQ ID NO: 28773 - DNA, 57 bp, Artificial
  Synthetic oligonucleotide
ctgtcttggatgaaacacatctgcctgatatagatgcattggttgaacttgctgcct

SEQ ID NO: 28774 - DNA, 60 bp, Artificial
  Synthetic oligonucleotide
taatcgggtttgcattttttgtgaaagactgggctgataaagtgaaggcctttcttgacc

SEQ ID NO: 28775 - DNA, 55 bp, Artificial
  Synthetic oligonucleotide
ttttgtgaaagactgggctgataaagtgaaggcctttcttgaccagaaatgtcct

SEQ ID NO: 28776 - DNA, 56 bp, Artificial
  Synthetic oligonucleotide
ccacttccacctgggtgatgatatggatcctgagctaaggcaattagctcaagctc

SEQ ID NO: 28777 - DNA, 60 bp, Artificial
  Synthetic oligonucleotide
ggccatatgactcttagtgatttcacaaggttccccaatctgaaagaagccatatcctgg

SEQ ID NO: 28778 - DNA, 60 bp, Artificial
  Synthetic oligonucleotide
atttgccaacaacatagccatgagaaaatggttagttgcagattggcatgattgcaggcc

SEQ ID NO: 28779 - DNA, 60 bp, Artificial
  Synthetic oligonucleotide
ggtacatttgccaacaacattgcaatgaggaaatggttagttgcagattggcatgattgc

SEQ ID NO: 28780 - DNA, 60 bp, Artificial
  Synthetic oligonucleotide
gacccaactgggattgaacctgatgaccacctcaaagaaagatcaagtctcagatacgga

SEQ ID NO: 28781 - DNA, 55 bp, Artificial
  Synthetic oligonucleotide
aaaactatgggctccatggtatgtgaggtttgtcaatatgagtgtgaaactgcaa

SEQ ID NO: 28782 - DNA, 60 bp, Artificial
  Synthetic oligonucleotide
aaagaataccagaaaacaatgggttcaatggtatgtgaggtttgtcaatatgagtgtgaa

SEQ ID NO: 28783 - DNA, 58 bp, Artificial
  Synthetic oligonucleotide
aaaagatggatactaagcctactgacccgactgggattgaacctgatgaccacctcaa

SEQ ID NO: 28784 - DNA, 60 bp, Artificial
  Synthetic oligonucleotide
atcctggggcaaggaagcagtgaaccatttccatcttggtgatgacatggatcctgagct

SEQ ID NO: 28785 - DNA, 60 bp, Artificial
  Synthetic oligonucleotide
gctctcatggggcaaggaagcagtgaaccatttccatcttggtgatgacatggaccctga

SEQ ID NO: 28786 - DNA, 60 bp, Artificial
  Synthetic oligonucleotide
aatcctttacatgctatcctggggcaaggaagcagtgaaccatttccatcttggtgatga

SEQ ID NO: 28787 - DNA, 60 bp, Artificial
  Synthetic oligonucleotide
taatcctctacatgctctcatggggcaaggaagcagtgaaccatttccatcttggtgatg

SEQ ID NO: 28788 - DNA, 60 bp, Artificial
  Synthetic oligonucleotide
cggtggaggtggacccggatgaggttaacaagagcacattacaaagtagacgggcagctg

SEQ ID NO: 28789 - DNA, 60 bp, Artificial
  Synthetic oligonucleotide
cggtggaggtggacccggatgaggttaacaagagcacactacaaagtcgacgggcagctg

SEQ ID NO: 28790 - DNA, 60 bp, Artificial
  Synthetic oligonucleotide
aaaagacggtggaggtggacccggatgaggttaacaagagcacactacaaagtcgacggg

SEQ ID NO: 28791 - DNA, 60 bp, Artificial
  Synthetic oligonucleotide
aaaagacggtggaggtggacccggatgaggttaacaagagcacattacaaagtagacggg

SEQ ID NO: 28792 - DNA, 60 bp, Artificial
  Synthetic oligonucleotide
ggactcatggcgttaaacagttacaaccatatgggtcagggcattcaccatgcaacatcc

SEQ ID NO: 28793 - DNA, 60 bp, Artificial
  Synthetic oligonucleotide
ttgaagaccatcaattgcataaacttaagggcatcagtcttcaaagaacatagagaggtt

SEQ ID NO: 28794 - DNA, 60 bp, Artificial
  Synthetic oligonucleotide
cctaaagaccataagctgcataaacttaaaggcatcagtcttcaaagaacatagagaggt

SEQ ID NO: 28795 - DNA, 60 bp, Artificial
  Synthetic oligonucleotide
aaaccatcagctgcataaatttgaaggcatcagtcttcaaagaacatagagaggttgaaa

SEQ ID NO: 28796 - DNA, 60 bp, Artificial
  Synthetic oligonucleotide
cctaaagaccatcagctgcataaacttaaaggcatcagtcttcaaagaacatagagaggt

SEQ ID NO: 28797 - DNA, 60 bp, Artificial
  Synthetic oligonucleotide
ccatcaattgcataaacttaagggcatcagtcttcaaagaacatagagaggttgagatca

SEQ ID NO: 28798 - DNA, 60 bp, Artificial
  Synthetic oligonucleotide
caaatgtagttacaatatatgcccttattgtgcatcaagattgacctctgatgggctagc

SEQ ID NO: 28799 - DNA, 60 bp, Artificial
  Synthetic oligonucleotide
cacagtttcattgtcaccggttcaatcagcacctgttggtcatggtaagacaatcgaaac

SEQ ID NO: 28800 - DNA, 60 bp, Artificial
  Synthetic oligonucleotide
ccactatgaaagggattaccaatatgagacaagctggggttgtaatccatcagattgtcc

SEQ ID NO: 28801 - DNA, 60 bp, Artificial
  Synthetic oligonucleotide
accacatggagaagaccatgatctagctggagaagaaactgcaacttactctatagttgg

SEQ ID NO: 28802 - DNA, 60 bp, Artificial
  Synthetic oligonucleotide
gcatactgcaaagtgccactatgaaagggattaccaatatgagacaagctggggttgtaa

SEQ ID NO: 28803 - DNA, 54 bp, Artificial
  Synthetic oligonucleotide
ttttagatcaccacatggagaagaccatgatctagctggagaagaggttgcatc

SEQ ID NO: 28804 - DNA, 60 bp, Artificial
  Synthetic oligonucleotide
tttagatcaccacatggagaagaccatgatctagctggagaagaaactgcaacttactct

SEQ ID NO: 28805 - DNA, 60 bp, Artificial
  Synthetic oligonucleotide
aatggaagcattctcaggaatttttagatcaccacatggagaagaccatgatctagctgg

SEQ ID NO: 28806 - DNA, 60 bp, Artificial
  Synthetic oligonucleotide
tgggttgggtgggccatttatccgttatataatctcagggtggtttaggatgtcacctta

SEQ ID NO: 28807 - DNA, 60 bp, Artificial
  Synthetic oligonucleotide
tgggtgggccatttatccattatataatctcagggtggtttaggatgtcaccttaagtga

SEQ ID NO: 28808 - DNA, 60 bp, Artificial
  Synthetic oligonucleotide
gggtgggccatttatccgttatataatctcagggtggtttaggatgtcaccttaagtgac

SEQ ID NO: 28809 - DNA, 60 bp, Artificial
  Synthetic oligonucleotide
gggtgggccatttatccattatataatctcagggtggtttaggatgtcaccttaagtgac

SEQ ID NO: 28810 - DNA, 60 bp, Artificial
  Synthetic oligonucleotide
ggaagggttgggtgggccatttatccattatataatctcagggtggtttaggatgtcacc

SEQ ID NO: 28811 - DNA, 60 bp, Artificial
  Synthetic oligonucleotide
cagagggagacaaactactaaagacaataagggaatgaggattcgatttaaggatgacag

SEQ ID NO: 28812 - DNA, 60 bp, Artificial
  Synthetic oligonucleotide
ctactaaagacaataagggaatgaggattcgatttaaggatgacagctcttttgaagatg

SEQ ID NO: 28813 - DNA, 60 bp, Artificial
  Synthetic oligonucleotide
gatggttatgggagaaaatatttcctttctcagaccttgaaaagtcttccgagaaactca

SEQ ID NO: 28814 - DNA, 60 bp, Artificial
  Synthetic oligonucleotide
ccaaaaaagtttgagctagggaaaaagactttaaattattcagaagatggttatgggaga

SEQ ID NO: 28815 - DNA, 60 bp, Artificial
  Synthetic oligonucleotide
attattcagaagatggttatgggagaaaatatttcctttctcagaccttgaaaagtcttc

SEQ ID NO: 28816 - DNA, 60 bp, Artificial
  Synthetic oligonucleotide
tgagccagatctaaagccaaaaaagtttgagctagggaaaaagactttaaattattcaga

SEQ ID NO: 28817 - DNA, 60 bp, Artificial
  Synthetic oligonucleotide
cataaccatcttctgaataatttaaagtctttttccctagctcaaacttttttggcttta

SEQ ID NO: 28818 - DNA, 60 bp, Artificial
  Synthetic oligonucleotide
gtgttcagcaagacataattgtcttcactataaatgagccagatctaaagccaaaaaagt

SEQ ID NO: 28819 - DNA, 60 bp, Artificial
  Synthetic oligonucleotide
ctgtgacagtgttcagcaagacatgattgtcttcactataaatgagccagatctaaagcc

SEQ ID NO: 28820 - DNA, 60 bp, Artificial
  Synthetic oligonucleotide
caagattcggtctgaaagaatctgacatcttccctccaaataatttcattgaagctgcaa

SEQ ID NO: 28821 - DNA, 60 bp, Artificial
  Synthetic oligonucleotide
ccattcacttcttgaaatccacacagaacttgctcaaactatctgtgacagtgttcagca

SEQ ID NO: 28822 - DNA, 60 bp, Artificial
  Synthetic oligonucleotide
gccaactttaccagtgtaacagaaactggtcttgctcctggagtcagaatagagttgagc

SEQ ID NO: 28823 - DNA, 60 bp, Artificial
  Synthetic oligonucleotide
gctatttgctcttcaagcattctgagcaactgagaggataacactttgagatgaccttga

SEQ ID NO: 28824 - DNA, 60 bp, Artificial
  Synthetic oligonucleotide
caagcattctgagcaactgagaggataacactttgagatgaccttgatgtttaacaccgt

SEQ ID NO: 28825 - DNA, 60 bp, Artificial
  Synthetic oligonucleotide
acacaaacggtgttaagcatcaaggtcatctcaaagtgttatcctctcagttgctcagaa

SEQ ID NO: 28826 - DNA, 60 bp, Artificial
  Synthetic oligonucleotide
gatctaacacaacaaacacaaacggtgttaagcatcaaggtcatctcaaagtgttatcct

SEQ ID NO: 28827 - DNA, 60 bp, Artificial
  Synthetic oligonucleotide
atgtcaagtattcaaacaaccaatccatgggcaaagtcagtgttctttctcctaccagaa

SEQ ID NO: 28828 - DNA, 60 bp, Artificial
  Synthetic oligonucleotide
gtttaacaccgtttgtgtttgttgtgttagatctgaccagaatttcgacaacattccctg

SEQ ID NO: 28829 - DNA, 60 bp, Artificial
  Synthetic oligonucleotide
ctccttttcagggaatgttgtcgaaattctggtcagatctaacacaacaaacacaaacgg

SEQ ID NO: 28830 - DNA, 60 bp, Artificial
  Synthetic oligonucleotide
caggcttaagtgtgtacagccattcatgaacacttctggtaggagaaagaacactgactt

SEQ ID NO: 28831 - DNA, 60 bp, Artificial
  Synthetic oligonucleotide
gggattggttaaaaacaggcttaagtgtgtacagccattcatgaacacttctggtaggag

SEQ ID NO: 28832 - DNA, 60 bp, Artificial
  Synthetic oligonucleotide
cattgccagtgattttacagccaaagtgtttactgtcctgttgttggtctgggattggtt

SEQ ID NO: 28833 - DNA, 60 bp, Artificial
  Synthetic oligonucleotide
ctaccagaagtgttcatgaatggctgtacacacttaagcctgtttttaaccaatcccaga

SEQ ID NO: 28834 - DNA, 60 bp, Artificial
  Synthetic oligonucleotide
cactgtcacagacagtttgagcaagttctgtgtggatttcaagaagtgaatgaacaattc

SEQ ID NO: 28835 - DNA, 60 bp, Artificial
  Synthetic oligonucleotide
atcctcaaagaattgttcattcacttcttgaaatccacacagaacttgctcaaactatct

SEQ ID NO: 28836 - DNA, 53 bp, Artificial
  Synthetic oligonucleotide
aggttaatttaaatctaatttagaaatagctttcaaaacatcctctgatctag

SEQ ID NO: 28837 - DNA, 60 bp, Artificial
  Synthetic oligonucleotide
atgaccttgatgtttaacaccgtttgtgtttgttgtgttagatctgaccagaatttcgac

SEQ ID NO: 28838 - DNA, 60 bp, Artificial
  Synthetic oligonucleotide
gcaacttctgatttaatgtcagatactcattcatttgtcaggctcaataataacaagccc

SEQ ID NO: 28839 - DNA, 66 bp, Artificial
  Synthetic oligonucleotide
ctgatctaaaagaaccttacaatgttatccatgatatgtcgtatcctcaaagaattgttcattcac

SEQ ID NO: 28840 - DNA, 60 bp, Artificial
  Synthetic oligonucleotide
acaaccaatccatgggcaaagtcagtgttctttctcctaccagaagtgttcatgaatggc

SEQ ID NO: 28841 - DNA, 58 bp, Artificial
  Synthetic oligonucleotide
aggctcaataataacaagccctttaaaatcagcctttggatgcgcatccctaaaataa

SEQ ID NO: 28842 - DNA, 60 bp, Artificial
  Synthetic oligonucleotide
ccaataactatctactactgctttacccgaagatgttgttccccagattgaggacttcga

SEQ ID NO: 28843 - DNA, 60 bp, Artificial
  Synthetic oligonucleotide
gtatgaaacaattatcaaatcgaagtcctcaatctggggaacaacatcttcgggtaaagc

SEQ ID NO: 28844 - DNA, 60 bp, Artificial
  Synthetic oligonucleotide
gggaacaacatcttcgggtaaagcagtagtagatagttattggattcatgatcaatcttc

SEQ ID NO: 28845 - DNA, 60 bp, Artificial
  Synthetic oligonucleotide
catgaatccaataactatctactactgctttacccgaagatgttgttccccagattgagg

SEQ ID NO: 28846 - DNA, 60 bp, Artificial
  Synthetic oligonucleotide
atgtctagtgcaatgtatgaaacaattatcaaatcgaagtcctcaatctggggaacaaca

SEQ ID NO: 28847 - DNA, 60 bp, Artificial
  Synthetic oligonucleotide
ccagaccaacaacaggacagtaaacactttggctgtaaaatcactggcaatgtctgcaac

SEQ ID NO: 28848 - DNA, 60 bp, Artificial
  Synthetic oligonucleotide
gacacaagacaatgatcctttatttgcagcttcaatgaaattatttggagggaagatgtc

SEQ ID NO: 28849 - DNA, 60 bp, Artificial
  Synthetic oligonucleotide
atcaatcttccggaaagaagttggtcgaagctcaactctattctgactccaggagcaaga

SEQ ID NO: 28850 - DNA, 60 bp, Artificial
  Synthetic oligonucleotide
cggaaagaagttggtcgaagctcaactctattctgactccaggagcaagaccagtttctg

SEQ ID NO: 28851 - DNA, 60 bp, Artificial
  Synthetic oligonucleotide
ccaatcccagaccaacaacaggacagtaaacactttggctgtaaaatcactggcaatgtc

SEQ ID NO: 28852 - DNA, 60 bp, Artificial
  Synthetic oligonucleotide
gttgggagaaagccaactttaccagtgtaacagaaactggtcttgctcctggagtcagaa

SEQ ID NO: 28853 - DNA, 60 bp, Artificial
  Synthetic oligonucleotide
gtgttatcctctcagttgctcagaatgcttgaagagcaaatagcagtgcctgaaattact

SEQ ID NO: 28854 - DNA, 60 bp, Artificial
  Synthetic oligonucleotide
tgaaattacttcaagattcggtctgaaagaatctgacatcttccctccaaataatttcat

SEQ ID NO: 28855 - DNA, 60 bp, Artificial
  Synthetic oligonucleotide
cattgatctgaatttctccttttcagggaatgttgtcgaaattctggtcagatctaacac

SEQ ID NO: 28856 - DNA, 60 bp, Artificial
  Synthetic oligonucleotide
ggaagatgtcagattctttcagaccgaatcttgaagtaatttcaggcactgctatttgct

SEQ ID NO: 28857 - DNA, 60 bp, Artificial
  Synthetic oligonucleotide
ttgctcagaatgtttgaagagcaaatagcagtgcctgaaattacttcaagattcggtctg

SEQ ID NO: 28858 - DNA, 60 bp, Artificial
  Synthetic oligonucleotide
gaatttttctgatctaaaagaaccttacaatgttatccatgatatgtcgtatcctcaaag

SEQ ID NO: 28859 - DNA, 60 bp, Artificial
  Synthetic oligonucleotide
tcctttatttgcagcttcaatgaaattatttggagggaagatgtcagattctttcagacc

SEQ ID NO: 28860 - DNA, 60 bp, Artificial
  Synthetic oligonucleotide
tggcaatgtctgcaacttctgatttaatgtcagatactcattcatttgtcaggctcaata

SEQ ID NO: 28861 - DNA, 60 bp, Artificial
  Synthetic oligonucleotide
cgggtaaagcagtagtagatagttattggattcatgatcaatcttccggaaagaagttgg

SEQ ID NO: 28862 - DNA, 60 bp, Artificial
  Synthetic oligonucleotide
ggagtcagaatagagttgagcttcgaccaacttctttccggaagattgatcatgaatcca

SEQ ID NO: 28863 - DNA, 60 bp, Artificial
  Synthetic oligonucleotide
tcccttgtcggcaagcagtctccattccaaaatgcctacaatgtcaagggcaatgccacc

SEQ ID NO: 28864 - DNA, 60 bp, Artificial
  Synthetic oligonucleotide
gtcggcaagcagtctccattccaaaatgcctacaatgtcaagggcaatgccaccagtgcc

SEQ ID NO: 28865 - DNA, 60 bp, Artificial
  Synthetic oligonucleotide
tggtggtgatggctcaatgtctattatggaacttgcaacagctggtttcgggatggcaga

SEQ ID NO: 28866 - DNA, 60 bp, Artificial
  Synthetic oligonucleotide
cagttgatcattctacggtcggagcaagcggtgtttatccctctttaatgtcccgtgttg

SEQ ID NO: 28867 - DNA, 60 bp, Artificial
  Synthetic oligonucleotide
gggaaattggcttcaaggaaatttgaataaatgctcatcgttatttggtgctgctgtctc

SEQ ID NO: 28868 - DNA, 60 bp, Artificial
  Synthetic oligonucleotide
gcagaccaaacaatcaaaggcacaggctaggattgtcaggaaataccagggaacagaagc

SEQ ID NO: 28869 - DNA, 60 bp, Artificial
  Synthetic oligonucleotide
ggtcatctagttagagatatcacagaaagtttaattgcacatgccggtctgcgtcgttct

SEQ ID NO: 28870 - DNA, 60 bp, Artificial
  Synthetic oligonucleotide
gcaggaagatcgcgtgttgttattgtggaagggaatgtagaggggacagctgagtcaatc

SEQ ID NO: 28871 - DNA, 60 bp, Artificial
  Synthetic oligonucleotide
tagcatcattacagctatgactatgcagtcaccattacaactccgttttcgtatgcaggc

SEQ ID NO: 28872 - DNA, 59 bp, Artificial
  Synthetic oligonucleotide
acccaatggcctagtcgtaggaatgatggggtagttcagcacatgcgtctagtccaagc

SEQ ID NO: 28873 - DNA, 60 bp, Artificial
  Synthetic oligonucleotide
gggttccgtgcaatagcgcagatggatattgaaagtccacgattcttgttggcacatgca

SEQ ID NO: 28874 - DNA, 60 bp, Artificial
  Synthetic oligonucleotide
ttaggcgttgaggcacaagcagttgttaaagagaaaggtgtacagccagaagatgtactc

SEQ ID NO: 28875 - DNA, 60 bp, Artificial
  Synthetic oligonucleotide
ggaactgccattggtagcagcctatggcttgaatgttcctgcagcttatgattcatgtgc

SEQ ID NO: 28876 - DNA, 60 bp, Artificial
  Synthetic oligonucleotide
agtatggtggagaaaagtactaatgaaaacgccaaacaagagatgtatacaaaaataatg

SEQ ID NO: 28877 - DNA, 60 bp, Artificial
  Synthetic oligonucleotide
atgaccaggttaaatacatggacaggatctttaattctagtctttccatggatgactatg

SEQ ID NO: 28878 - DNA, 60 bp, Artificial
  Synthetic oligonucleotide
acatggacaggatctttaattctagtctttccatggatgactatggtgagcactctaaga

SEQ ID NO: 28879 - DNA, 60 bp, Artificial
  Synthetic oligonucleotide
gatgactatggtgagcactctaagaagagctcaaaagctggcacttcgttggaattgtaa

SEQ ID NO: 28880 - DNA, 60 bp, Artificial
  Synthetic oligonucleotide
gattggacttttaaaaggacagaagctttcatcagaacaaagatggttagtatggtggag

SEQ ID NO: 28881 - DNA, 60 bp, Artificial
  Synthetic oligonucleotide
cctctcctgtctagtttaaaagggctagcaccagtcatatttcctttagcttattatcaa

SEQ ID NO: 28882 - DNA, 60 bp, Artificial
  Synthetic oligonucleotide
agcttattatcaaaatgtgaaaaaagagaaactgggcataaaaaacttttctacttatga

SEQ ID NO: 28883 - DNA, 60 bp, Artificial
  Synthetic oligonucleotide
cagcaagagtaacccgggaacagccagttcaatctctctgaagaaatatgatgaccaggt

SEQ ID NO: 28884 - DNA, 60 bp, Artificial
  Synthetic oligonucleotide
gattcatgtgctctaagaatgatgttatgtattggaggtcctttacctctcctgtctagt

SEQ ID NO: 28885 - DNA, 60 bp, Artificial
  Synthetic oligonucleotide
cagcttatgattcatgtgctctaagaatgatgttatgtattggaggtcctttacctctcc

SEQ ID NO: 28886 - DNA, 60 bp, Artificial
  Synthetic oligonucleotide
ttacctctcctgtctagtttaaaagggctagcaccagtcatatttcctttagcttattat

SEQ ID NO: 28887 - DNA, 60 bp, Artificial
  Synthetic oligonucleotide
gggctgctagtgcatcagaacttgtactggagccaaattggaatgacaatgcacatggtg

SEQ ID NO: 28888 - DNA, 60 bp, Artificial
  Synthetic oligonucleotide
tacaagagcaggtgttatatcttcacagtgtgggttgtcctcctcatcattgagtcaatc

SEQ ID NO: 28889 - DNA, 60 bp, Artificial
  Synthetic oligonucleotide
gaatcagcatttcaggcacactatagagtctgtcaggctacacatagattcagggatgac

SEQ ID NO: 28890 - DNA, 60 bp, Artificial
  Synthetic oligonucleotide
aatttatcttgtccacagtcacagtgtccttactgctttacacattgtgaacttactgaa

SEQ ID NO: 28891 - DNA, 60 bp, Artificial
  Synthetic oligonucleotide
gcacatggtgtcggtatagtcccaatgcacactgatttggagttggatttctctctccct

SEQ ID NO: 28892 - DNA, 60 bp, Artificial
  Synthetic oligonucleotide
taaaattctttgctgcaattctgcacaatagttcccaagaaaatcggttcaaaataattc

SEQ ID NO: 28893 - DNA, 57 bp, Artificial
  Synthetic oligonucleotide
tgaaacaattcatccttgcaacgtcttttgtgtcttgtctggcccaggagcatcatg

SEQ ID NO: 28894 - DNA, 60 bp, Artificial
  Synthetic oligonucleotide
gccctggcctatttcctaaactaaatcaatcttcatgtgacaaagttgctttacccttaa

SEQ ID NO: 28895 - DNA, 60 bp, Artificial
  Synthetic oligonucleotide
tattgcaatgggcagaagaaaaccatcttaacaaagacactggttatcggccagtgcatt

SEQ ID NO: 28896 - DNA, 60 bp, Artificial
  Synthetic oligonucleotide
gctagcctactgagatctccccatggtgaagatcatgatctgtctggagaagaggttgca

SEQ ID NO: 28897 - DNA, 60 bp, Artificial
  Synthetic oligonucleotide
aaaagacattgactttgaaaacctcggagaaaacccatgtagagttgggctgcaaacagc

SEQ ID NO: 28898 - DNA, 60 bp, Artificial
  Synthetic oligonucleotide
ggagttggatttactcttacttgccagatttcactgactgaatgctcacgctttttgaca

SEQ ID NO: 28899 - DNA, 60 bp, Artificial
  Synthetic oligonucleotide
catgtagagttgggctgcaaacagcatctatagagggtgcatggggctctggagttggat

SEQ ID NO: 28900 - DNA, 60 bp, Artificial
  Synthetic oligonucleotide
tccacactccatcaattttggagaaagcagtgttacaggtaaagtggaattaccccccat

SEQ ID NO: 28901 - DNA, 60 bp, Artificial
  Synthetic oligonucleotide
gatgagcagattgagtggaaagatcctgatgggatgcttaaagatcatttaaacatactt

SEQ ID NO: 28902 - DNA, 60 bp, Artificial
  Synthetic oligonucleotide
gtacactgacacatagaatggttgaagaatcttaccgaaacagaaaatcagtcatatgct

SEQ ID NO: 28903 - DNA, 60 bp, Artificial
  Synthetic oligonucleotide
gtaattttgcaactacacctgtgtgtgaatatgatggcaatatggtttctggttacaaaa

SEQ ID NO: 28904 - DNA, 60 bp, Artificial
  Synthetic oligonucleotide
cctccagactgtccaggcattggtactggctgcaccgcatgtggtttatatctggaccag

SEQ ID NO: 28905 - DNA, 60 bp, Artificial
  Synthetic oligonucleotide
tgtaaccaggcatgtgaaggtatgcatcataggtactgtttcaaagttctcacaaggtga

SEQ ID NO: 28906 - DNA, 60 bp, Artificial
  Synthetic oligonucleotide
gtcaagggatttctacaagtgtgcatgctttaggccactggtttgatgggaggttgaact

SEQ ID NO: 28907 - DNA, 60 bp, Artificial
  Synthetic oligonucleotide
ggcatttcatgttggttcataaagtctggggagtggataaaaggtatcttcagtggaaac

SEQ ID NO: 28908 - DNA, 60 bp, Artificial
  Synthetic oligonucleotide
caataaagttcaaggctactatctctgtattgtaggtgctaactcttctcccgtctatgc

SEQ ID NO: 28909 - DNA, 55 bp, Artificial
  Synthetic oligonucleotide
tgccctatccgcaagcataagcgctcataagtatgtattaaattgaacttcatgc

SEQ ID NO: 28910 - DNA, 60 bp, Artificial
  Synthetic oligonucleotide
tggagaagaggttgcaacttattcaattgctgggcagattgagggcaaaatcccacatac

SEQ ID NO: 28911 - DNA, 56 bp, Artificial
  Synthetic oligonucleotide
gaacatactgtacaactggtatactgacagaaggaaaatgctttgtgccagatcag

SEQ ID NO: 28912 - DNA, 60 bp, Artificial
  Synthetic oligonucleotide
ctgctctcaacaagggcttcaagcaagtgctccacatttggacaaggtcaatggcattgt

SEQ ID NO: 28913 - DNA, 60 bp, Artificial
  Synthetic oligonucleotide
atgcagcaaatatggcattcactgcattctcaggaatccctagctattcttcattgagtg

SEQ ID NO: 28914 - DNA, 51 bp, Artificial
  Synthetic oligonucleotide
tgttggcaagcaatctccattccagaacgcctacaacgtcaagggcaatgc

SEQ ID NO: 28915 - DNA, 60 bp, Artificial
  Synthetic oligonucleotide
tgtcaagctgtttgaaattcagaaaacagggttcaacattcaggacatggacatagtggc

SEQ ID NO: 28916 - DNA, 60 bp, Artificial
  Synthetic oligonucleotide
attcaggacatggacatagtggcctctgagcacttgctacatcagtctcttgttggcaag

SEQ ID NO: 28917 - DNA, 60 bp, Artificial
  Synthetic oligonucleotide
ctacttatgaacaggtttgcaaagtagccaaagtactttctgcttcacagattgaattca

SEQ ID NO: 28918 - DNA, 60 bp, Artificial
  Synthetic oligonucleotide
cttagatatggaaatgtccttgatgtgaatgcaattgatattgaggaaccaagcggccag

SEQ ID NO: 28919 - DNA, 60 bp, Artificial
  Synthetic oligonucleotide
tgaaccttcagttctctgatccaaacagacagaaactcaggatagttgaatctagacctg

SEQ ID NO: 28920 - DNA, 60 bp, Artificial
  Synthetic oligonucleotide
cctggagatattatgagtccaagagatagaggcttcctgtgccccgaatttcctgggagt

SEQ ID NO: 28921 - DNA, 60 bp, Artificial
  Synthetic oligonucleotide
tgagagaatagagtggaaagatcctgatgggatgttacgagaccacataaatatcctagt

SEQ ID NO: 28922 - DNA, 60 bp, Artificial
  Synthetic oligonucleotide
agcactggtgtacatctacatgtcagtttggggatcctggagatattatgagtccaagag

SEQ ID NO: 28923 - DNA, 60 bp, Artificial
  Synthetic oligonucleotide
tttggggatcctggagatattatgagtccaagagataaaggcttcctgtgccccgaattt

SEQ ID NO: 28924 - DNA, 60 bp, Artificial
  Synthetic oligonucleotide
gtagttcctgcatacacacacgcacatccaatgatatgaatttgaagggttgggcacaaa

SEQ ID NO: 28925 - DNA, 60 bp, Artificial
  Synthetic oligonucleotide
ggcagctgttcctgcatacacgcacacacatccaatgatatgaatttgaagggttgggca

SEQ ID NO: 28926 - DNA, 60 bp, Artificial
  Synthetic oligonucleotide
gttgttcctgcatacacacacgcacatccaatgatatgaatttgaagggttgggcacaaa

SEQ ID NO: 28927 - DNA, 56 bp, Artificial
  Synthetic oligonucleotide
gggtcagttaatccgttgtgggtgggtttagtttcaagctgccttaagtagctttt

SEQ ID NO: 28928 - DNA, 54 bp, Artificial
  Synthetic oligonucleotide
tctaggttaacctcagatggtcttgccagacatgtaatgcagtgccctaagcgg

SEQ ID NO: 28929 - DNA, 60 bp, Artificial
  Synthetic oligonucleotide
gctctatggtgtgtgatatttgccaccacgaatgcgaaacagcaaaagaacttgaaacac

SEQ ID NO: 28930 - DNA, 60 bp, Artificial
  Synthetic oligonucleotide
gaaaaggattatcaatatgaaacaagttggggctgtaatccaccagactgtccaggggta

SEQ ID NO: 28931 - DNA, 60 bp, Artificial
  Synthetic oligonucleotide
gaggggctatgtttcatcccaacacatacaattgcactcacacaacctggtcatacctat

SEQ ID NO: 28932 - DNA, 60 bp, Artificial
  Synthetic oligonucleotide
cagatttggagcttgattttgcattggcctcatcatcttcttacagttataggcgaaagc

SEQ ID NO: 28933 - DNA, 60 bp, Artificial
  Synthetic oligonucleotide
ggtcagctgagttatttacccgtatggttttaaatccgagaggtgaagatcatgaccctg

SEQ ID NO: 28934 - DNA, 60 bp, Artificial
  Synthetic oligonucleotide
ggctgttgggaatccttaatggcaattgggtggtagttgctgttctgattgtaattttga

SEQ ID NO: 28935 - DNA, 60 bp, Artificial
  Synthetic oligonucleotide
ccactgagagtgctctccaagcccattttgcaatctgtaagctaacaaacaggtttcagg

SEQ ID NO: 28936 - DNA, 60 bp, Artificial
  Synthetic oligonucleotide
caatcaattgacggggcctggggttcaggagtaggttttacgttggtatgtactgtgggg

SEQ ID NO: 28937 - DNA, 60 bp, Artificial
  Synthetic oligonucleotide
tcatgtgtgtttggagatcccggtgatattatgtcaacaacaagtgggatgcggtgccca

SEQ ID NO: 28938 - DNA, 60 bp, Artificial
  Synthetic oligonucleotide
ccccttacatggacagggtttttggcagtttctggagagatagagaaaataacaggctgt

SEQ ID NO: 28939 - DNA, 60 bp, Artificial
  Synthetic oligonucleotide
cgatctgcatgtcccggctaccactacccaaaaatacaatcaggttgactggaccaaaaa

SEQ ID NO: 28940 - DNA, 60 bp, Artificial
  Synthetic oligonucleotide
ctgactgtaccgaagaagggttagcagcatctccaccacatttagacagggttacaggct

SEQ ID NO: 28941 - DNA, 60 bp, Artificial
  Synthetic oligonucleotide
gattccaacgcatgatggcaactcgagattctttccagtcattcaatgtgacagaaccac

SEQ ID NO: 28942 - DNA, 60 bp, Artificial
  Synthetic oligonucleotide
agtttattctcactaatcccaggagttgcccattctcttgctgtagagctatgtgttcca

SEQ ID NO: 28943 - DNA, 60 bp, Artificial
  Synthetic oligonucleotide
tttgctttggctggctccttataccggcagtcaccttaattatactgaagatcctgaggt

SEQ ID NO: 28944 - DNA, 60 bp, Artificial
  Synthetic oligonucleotide
atacaagtattaactaacccattaacagctaaaaaaaacaaatccttaacacctatataa

SEQ ID NO: 28945 - DNA, 60 bp, Artificial
  Synthetic oligonucleotide
cattgtcttcctacggtccatttgattgctcctgttcaaacgtgcatgtctgtgcggagc

SEQ ID NO: 28946 - DNA, 60 bp, Artificial
  Synthetic oligonucleotide
cactggtgagaaccacagatccagagtatgtcttttcacccgggataataccagagtcca

SEQ ID NO: 28947 - DNA, 60 bp, Artificial
  Synthetic oligonucleotide
gactgagtgccctagtttcattacatcaattaaagcatgtgatatggcaatgtgttacgg

SEQ ID NO: 28948 - DNA, 60 bp, Artificial
  Synthetic oligonucleotide
ttcttacggatagttggcccaataacagcaaaagtgccaagtaccagttctactgatacc

SEQ ID NO: 28949 - DNA, 60 bp, Artificial
  Synthetic oligonucleotide
ggggtgaagatcatgatccaattcaaaactcacagggattcttacggatagttggcccaa

SEQ ID NO: 28950 - DNA, 60 bp, Artificial
  Synthetic oligonucleotide
ggggattctactgaagcaatggtgtactacttcatgtgcatttggggatcctggtgatat

SEQ ID NO: 28951 - DNA, 60 bp, Artificial
  Synthetic oligonucleotide
ctgtttgtgagtaccaagggaacacaatctcaggatataaaagaatgatggccacaaagg

SEQ ID NO: 28952 - DNA, 59 bp, Artificial
  Synthetic oligonucleotide
ctggtgatataatgtcaacaactagtggaatgagatgccccgaacatactgggtccttc

SEQ ID NO: 28953 - DNA, 60 bp, Artificial
  Synthetic oligonucleotide
ataacccatgtaaggttgatctacacacacaagctatagaaggagcatggggttcaggtg

SEQ ID NO: 28954 - DNA, 60 bp, Artificial
  Synthetic oligonucleotide
tccaatcacagtacctgtgacaagaagactatccctcttacatggacaggttatcttccc

SEQ ID NO: 28955 - DNA, 60 bp, Artificial
  Synthetic oligonucleotide
gatggccacaaaggattcattccaatctttcaatttgactgatccacatattacaacaaa

SEQ ID NO: 28956 - DNA, 60 bp, Artificial
  Synthetic oligonucleotide
tactgatacccttaaagggactgcatttgctggtgtcccaatgtacagctctttatcaac

SEQ ID NO: 28957 - DNA, 60 bp, Artificial
  Synthetic oligonucleotide
agggcacaagaagactgtttaatgtattgaatttactcatccatgcatttattcataata

SEQ ID NO: 28958 - DNA, 60 bp, Artificial
  Synthetic oligonucleotide
ctacatgcatgtcaataaggagctgcatggcaagtgtcttcactaataggattcaggtga

SEQ ID NO: 28959 - DNA, 60 bp, Artificial
  Synthetic oligonucleotide
gcttagaagacatccgttcagttgaagtgttcagtagaatgattatacatccaaggggtg

SEQ ID NO: 28960 - DNA, 60 bp, Artificial
  Synthetic oligonucleotide
aaagctgcatcaacgggcaatgcccttactgtatgaccatgacagaggcaacagaaagtg

SEQ ID NO: 28961 - DNA, 60 bp, Artificial
  Synthetic oligonucleotide
gagaaagttaaggttgagtaccaaaagacaatgggatccatggtttgtgatatctgccac

SEQ ID NO: 28962 - DNA, 60 bp, Artificial
  Synthetic oligonucleotide
taaagacatttgagggaataatcagtaaaacaggctgcacagagaatgcactgcaagggt

SEQ ID NO: 28963 - DNA, 60 bp, Artificial
  Synthetic oligonucleotide
ccagcaattaccttagttgtcctaaaattcttaaagatggcaacattctcttgttcacat

SEQ ID NO: 28964 - DNA, 60 bp, Artificial
  Synthetic oligonucleotide
cctgttctcattgatgcctgatgtggcccattcattagccgttgagttatgtgtgccagg

SEQ ID NO: 28965 - DNA, 60 bp, Artificial
  Synthetic oligonucleotide
tcttacatggacaggttatcttcccattgcaggcgagatggaaaaagtcactggatgtac

SEQ ID NO: 28966 - DNA, 60 bp, Artificial
  Synthetic oligonucleotide
gtcttctgtactttggcaggccctggagcaagttgtgaggcttactctgagcatggtatc

SEQ ID NO: 28967 - DNA, 60 bp, Artificial
  Synthetic oligonucleotide
taactctctcacagccagcccacacctatgagatggtaacattaccagtcacctgctttt

SEQ ID NO: 28968 - DNA, 60 bp, Artificial
  Synthetic oligonucleotide
aaccaaattgattctgacaaggtatatgacgatggtgctcctccatgtacattcaagtgc

SEQ ID NO: 28969 - DNA, 60 bp, Artificial
  Synthetic oligonucleotide
gtgttacggatcaactgtctctaatttagctaggggttccaatacagtgaaggtagtagg

SEQ ID NO: 28970 - DNA, 60 bp, Artificial
  Synthetic oligonucleotide
tcttcattcaaggtgctgtcatgatacagactgttcatctgagggtcttgtggcatcagc

SEQ ID NO: 28971 - DNA, 60 bp, Artificial
  Synthetic oligonucleotide
gaactctatgacacattgaagaaaattaaaaagacagtcctctgttatgatttaacctgt

SEQ ID NO: 28972 - DNA, 61 bp, Artificial
  Synthetic oligonucleotide
ctgcactaaccaactaatgctcatatgtctcaaaacactaaactttattacagtataaccc

SEQ ID NO: 28973 - DNA, 60 bp, Artificial
  Synthetic oligonucleotide
gtggttctgatcttttctataatactctttaatatcttatgcccacggagagggcacaag

SEQ ID NO: 28974 - DNA, 60 bp, Artificial
  Synthetic oligonucleotide
agttgagggtcaatgctttaatcctgcacatactctaactctctcacagccagcccacac

SEQ ID NO: 28975 - DNA, 60 bp, Artificial
  Synthetic oligonucleotide
gcatttcattgttatggtgcctgccaaaagtattcttacccgtggcaaactgcaaaatgt

SEQ ID NO: 28976 - DNA, 60 bp, Artificial
  Synthetic oligonucleotide
catgcagaaattcaaacattggggcattggatggatgcaacattcaatattaaaactgca

SEQ ID NO: 28977 - DNA, 60 bp, Artificial
  Synthetic oligonucleotide
gtttgcttccttggcagtcattcagaacctttgcatgttccgagcttagaagacatccgt

SEQ ID NO: 28978 - DNA, 60 bp, Artificial
  Synthetic oligonucleotide
actggctggggttgcaatcctggggactgtcctggatttggaacgggctgcactgcttgt

SEQ ID NO: 28979 - DNA, 60 bp, Artificial
  Synthetic oligonucleotide
caccaggaaggtttgcatccaactaggtacagagcaaacatgcaaacatattgatgcaaa

SEQ ID NO: 28980 - DNA, 60 bp, Artificial
  Synthetic oligonucleotide
agctagaaagctcatgtaattttgacctccatacaacctcaatgactcaaaaaagctata

SEQ ID NO: 28981 - DNA, 60 bp, Artificial
  Synthetic oligonucleotide
tattgaaaagatggaagggtggtatttgattgtcttgggagtctgctctacattgacact

SEQ ID NO: 28982 - DNA, 60 bp, Artificial
  Synthetic oligonucleotide
gcccgcatactgtgggcttgggtcaaggttatattatagggtcaactgagctcgggctga

SEQ ID NO: 28983 - DNA, 60 bp, Artificial
  Synthetic oligonucleotide
agggtcaactgagctcgggctgattccgattgagactgtatcggatttgaagctagaaag

SEQ ID NO: 28984 - DNA, 60 bp, Artificial
  Synthetic oligonucleotide
gctctacattgacactggcaatgcctagaaccatctatgaactcaggatggaatgcccgc

SEQ ID NO: 28985 - DNA, 60 bp, Artificial
  Synthetic oligonucleotide
tgcaaacaaggaggaatcaatcccttttcattttcagatggaaaagcaagtgatacatgc

SEQ ID NO: 28986 - DNA, 60 bp, Artificial
  Synthetic oligonucleotide
tcttcttacagctacagaagaaaactgaccaatcctgcaaacaaggaggaatcaatccct

SEQ ID NO: 28987 - DNA, 60 bp, Artificial
  Synthetic oligonucleotide
ctgcaagggtattatgtttgcttccttggcagtcattcagaacctttgcatgttccgagc

SEQ ID NO: 28988 - DNA, 60 bp, Artificial
  Synthetic oligonucleotide
gacagaggcaacagaaagtgccttacaggctcattactctatttgtaaattaacaggcag

SEQ ID NO: 28989 - DNA, 60 bp, Artificial
  Synthetic oligonucleotide
aattaacaggcagattccaggaagctttaaagaaatcactgaagagaccagaagtcaaaa

SEQ ID NO: 28990 - DNA, 60 bp, Artificial
  Synthetic oligonucleotide
gggctggtgtggtgtgtgctcttaacatgtgaacttatcgtatgggctgctagtgcagag

SEQ ID NO: 28991 - DNA, 60 bp, Artificial
  Synthetic oligonucleotide
tgttatcgtacattaggggtatttaggtacaagagtagatgctatgttgggctggtgtgg

SEQ ID NO: 28992 - DNA, 60 bp, Artificial
  Synthetic oligonucleotide
gggctgctagtgcagagactccacttcttgagtcaggatggtcagatacagcacatggtg

SEQ ID NO: 28993 - DNA, 60 bp, Artificial
  Synthetic oligonucleotide
ttgtccatgtatttgacttgttcatcatatttcttgagtgagatagagctggctgttcca

SEQ ID NO: 28994 - DNA, 60 bp, Artificial
  Synthetic oligonucleotide
cattgacctcaaccatcttgacattgatgaaccaacagggcaaactgctgactggttaag

SEQ ID NO: 28995 - DNA, 60 bp, Artificial
  Synthetic oligonucleotide
gtacacaatttactacctcaacatactgatttcttgattgcttttcaaggagtctactac

SEQ ID NO: 28996 - DNA, 60 bp, Artificial
  Synthetic oligonucleotide
gagccctatgacactgctacatcaggagaacctcttgagataagaactattatcagatcc

SEQ ID NO: 28997 - DNA, 60 bp, Artificial
  Synthetic oligonucleotide
gctgagccctatgacattgctacatcaggagaacctcttgagataagaactattatcaga

SEQ ID NO: 28998 - DNA, 60 bp, Artificial
  Synthetic oligonucleotide
gaagttctccacaacctcgacagcttggacagtccatcccgcaagggcagcagccaccct

SEQ ID NO: 28999 - DNA, 60 bp, Artificial
  Synthetic oligonucleotide
gaagttctccacgacctcgacagcttggacagtccatcccgcaagggcagcagccaccct

SEQ ID NO: 29000 - DNA, 60 bp, Artificial
  Synthetic oligonucleotide
ggaaagccctcctctgtgtgttgtcaatgaaggagctgttgattgcggcaagcattggct

SEQ ID NO: 29001 - DNA, 60 bp, Artificial
  Synthetic oligonucleotide
cacatcctgtccattgcactcccagggactggcaggaagttctccacgacctcgacagct

SEQ ID NO: 29002 - DNA, 60 bp, Artificial
  Synthetic oligonucleotide
ttccaaacttggtcaggaaagccctcctctgtgtgttgtcaatgaaggagctgttgattg

SEQ ID NO: 29003 - DNA, 60 bp, Artificial
  Synthetic oligonucleotide
ggtcaggaaagccctcctctgtgtgttgtcaatgaaggagctgttgattgcggcaagcat

SEQ ID NO: 29004 - DNA, 60 bp, Artificial
  Synthetic oligonucleotide
gaccactgcagtggcccttgctccagaagtaattattccaaacttggtcaggaaagccct

SEQ ID NO: 29005 - DNA, 60 bp, Artificial
  Synthetic oligonucleotide
ttaccccaaacttggtcaggaaagccctcctctgtgtgttgtcaatgaaggagctgttga

SEQ ID NO: 29006 - DNA, 60 bp, Artificial
  Synthetic oligonucleotide
aacctcgacagcttggacagtccatcccgcaagggcagcagccaccctggatagagtgat

SEQ ID NO: 29007 - DNA, 60 bp, Artificial
  Synthetic oligonucleotide
acctcgacagcttggacagtccatcccgcaagggcagcagccaccctggatagagtgatg

SEQ ID NO: 29008 - DNA, 60 bp, Artificial
  Synthetic oligonucleotide
ttgggcacggtagaaggagttccctgtctgaattctactccctgggtgaattgccgtcag

SEQ ID NO: 29009 - DNA, 57 bp, Artificial
  Synthetic oligonucleotide
ttttaaagagattgggtctttagtatgtcttagactcatcaatgctgagccctatga

SEQ ID NO: 29010 - DNA, 60 bp, Artificial
  Synthetic oligonucleotide
ggtgtcacagactcctgtccagtgtgacatacatggcctataacaaatttcactccacag

SEQ ID NO: 29011 - DNA, 60 bp, Artificial
  Synthetic oligonucleotide
cccaaacgatgaatagccagtacatgttcgattatccgtcgatcaagatcgatgtgaggt

SEQ ID NO: 29012 - DNA, 60 bp, Artificial
  Synthetic oligonucleotide
ctccctgggtgaattgccgtcagcatggggtccagcttgctacatcagctctgtcaagcc

SEQ ID NO: 29013 - DNA, 60 bp, Artificial
  Synthetic oligonucleotide
ccctgggtgaactgccgtcagcatggggtccagcttgctacatcagctctgtcaagccta

SEQ ID NO: 29014 - DNA, 60 bp, Artificial
  Synthetic oligonucleotide
ctctgtcaagcctatggtctacactttccaagggatggctagtgacttgtctcggtttga

SEQ ID NO: 29015 - DNA, 60 bp, Artificial
  Synthetic oligonucleotide
gcctatggtctacactttccaagggatggctagtgacttgtctcggtttgatatggctag

SEQ ID NO: 29016 - DNA, 60 bp, Artificial
  Synthetic oligonucleotide
gagatctgcaactcagagtacaggcgtggtttgcaaacaagagatcagctcatgtcttac

SEQ ID NO: 29017 - DNA, 60 bp, Artificial
  Synthetic oligonucleotide
gagatctgcaattcagagtacaggcgtggcttgcaaacaagagatcagctcatgtcttac

SEQ ID NO: 29018 - DNA, 60 bp, Artificial
  Synthetic oligonucleotide
cctactggaggctagaagactgggcctcagtgatgaacactataatggctatgatctttt

SEQ ID NO: 29019 - DNA, 60 bp, Artificial
  Synthetic oligonucleotide
caccctggatagagtgatgccatttctcccgggtctgccttccacgatcttgtacttcgc

SEQ ID NO: 29020 - DNA, 60 bp, Artificial
  Synthetic oligonucleotide
cagccaccctggatagagtgatgccatttctcccgggtctgccttccacgatcttgtact

SEQ ID NO: 29021 - DNA, 60 bp, Artificial
  Synthetic oligonucleotide
atcttgtacttcgctacgagactcttgacatcgcgggctccctcgggagacatcctctca

SEQ ID NO: 29022 - DNA, 60 bp, Artificial
  Synthetic oligonucleotide
atcttgtacttcgctacgagactcttgacatcgcgggccccctcgggagacatcctctca

SEQ ID NO: 29023 - DNA, 60 bp, Artificial
  Synthetic oligonucleotide
gcatcttcctcccagcctttgcctcccagttgaaccaggttctggattattgtcctggca

SEQ ID NO: 29024 - DNA, 60 bp, Artificial
  Synthetic oligonucleotide
acgagactcttgacatcgcgggctccctcgggagacatcctctcaaccatcttctttggc

SEQ ID NO: 29025 - DNA, 53 bp, Artificial
  Synthetic oligonucleotide
cggcaattttctggtactcgtccatttcagattttactaactcagattaacta

SEQ ID NO: 29026 - DNA, 60 bp, Artificial
  Synthetic oligonucleotide
ccagcctttgcctcccagttgaaccaggttctggattattgtcctggcatcaaacccctg

SEQ ID NO: 29027 - DNA, 60 bp, Artificial
  Synthetic oligonucleotide
gagccctatgacattgctacatcaggagaacctcttgagataagaactattatcagatcc

SEQ ID NO: 29028 - DNA, 60 bp, Artificial
  Synthetic oligonucleotide
gccagtacatgttcgattatccgtcgatcaagatcgatgtgaggtgtcacagactcctgt

SEQ ID NO: 29029 - DNA, 60 bp, Artificial
  Synthetic oligonucleotide
gatgtgaggtgtcacagactcctgtccagtgtaacatacatggcctataacaaatttcac

SEQ ID NO: 29030 - DNA, 60 bp, Artificial
  Synthetic oligonucleotide
cacttctgcaatcttcttgaccactgcagtggcccttgctccagaagtaattaccccaaa

SEQ ID NO: 29031 - DNA, 60 bp, Artificial
  Synthetic oligonucleotide
gatgtgaggtgtcacagactcctgtccagtgtgacatacatggcctataacaaatttcac

SEQ ID NO: 29032 - DNA, 60 bp, Artificial
  Synthetic oligonucleotide
catcaccaagcccaccccaatgtggcagctgctcactccagcttcctgtacacttctgca

SEQ ID NO: 29033 - DNA, 60 bp, Artificial
  Synthetic oligonucleotide
cttgaccactgcagtggcccttgctccagaagtaattaccccaaacttggtcaggaaagc

SEQ ID NO: 29034 - DNA, 60 bp, Artificial
  Synthetic oligonucleotide
ttctgcaatcttcttgaccactgcagtggcccttgctccagaagtaattattccaaactt

SEQ ID NO: 29035 - DNA, 60 bp, Artificial
  Synthetic oligonucleotide
tactccctgggtgaattgccgtcagcatggggtccagcttgctacatcagctctgtcaag

SEQ ID NO: 29036 - DNA, 60 bp, Artificial
  Synthetic oligonucleotide
tactccctgggtgaactgccgtcagcatggggtccagcttgctacatcagctctgtcaag

SEQ ID NO: 29037 - DNA, 60 bp, Artificial
  Synthetic oligonucleotide
agatgtgatcacttatgagcactgtgagatcccactagagaggtacaggattgggcacgg

SEQ ID NO: 29038 - DNA, 60 bp, Artificial
  Synthetic oligonucleotide
agatgtgatcacttatgagcactgtgagatcccactagagaggtacaggatcgggcacgg

SEQ ID NO: 29039 - DNA, 60 bp, Artificial
  Synthetic oligonucleotide
tcgggcacggtagaaggagttccctgtctgaattttactccctgggtgaactgccgtcag

SEQ ID NO: 29040 - DNA, 60 bp, Artificial
  Synthetic oligonucleotide
gctgagccctatgacactgctacatcaggagaacctcttgagataagaactattatcaga

SEQ ID NO: 29041 - DNA, 60 bp, Artificial
  Synthetic oligonucleotide
ggtgtcacagactcctgtccagtgtaacatacatggcctataacaaatttcactccacag

SEQ ID NO: 29042 - DNA, 60 bp, Artificial
  Synthetic oligonucleotide
caccaagcctaccccaatgtggcagctactcactccagcttcctgtacacttctgcaatc

SEQ ID NO: 29043 - DNA, 60 bp, Artificial
  Synthetic oligonucleotide
caaatttcactccacagatgtgatcacttatgagcactgtgagatcccactagagaggta

SEQ ID NO: 29044 - DNA, 60 bp, Artificial
  Synthetic oligonucleotide
caccaagcccaccccaatgtggcagctgctcactccagcttcctgtacacttctgcaatc

SEQ ID NO: 29045 - DNA, 60 bp, Artificial
  Synthetic oligonucleotide
ttggtgatgatatggatccagagcttcgtagcctggctcagatcctgattgatcaaaagg

SEQ ID NO: 29046 - DNA, 60 bp, Artificial
  Synthetic oligonucleotide
ggacaacattgatcttaaaaattgtcacccaaagcaggccaggagagtacatctcaacac

SEQ ID NO: 29047 - DNA, 60 bp, Artificial
  Synthetic oligonucleotide
gaactgcttgttcaaataatttaagtattgtagttcttttatcatacatcaataagctgt

SEQ ID NO: 29048 - DNA, 60 bp, Artificial
  Synthetic oligonucleotide
gagtaatagcagaaaatgcttttaaaaccagtaaaagcactcattaaaatgcatcattct

SEQ ID NO: 29049 - DNA, 52 bp, Artificial
  Synthetic oligonucleotide
ttgctcactcgtgcggtagccatggtgtttacttaggaagcagcttactttg

SEQ ID NO: 29050 - DNA, 60 bp, Artificial
  Synthetic oligonucleotide
attggcctgctttcaccattttgtaaatacctgctctgttccttaaaattgtgtaaccgt

SEQ ID NO: 29051 - DNA, 60 bp, Artificial
  Synthetic oligonucleotide
ttggctcttatgaagccttccaacctcctgaatgtccaatcatcttgaccagcgcttaca

SEQ ID NO: 29052 - DNA, 60 bp, Artificial
  Synthetic oligonucleotide
actcttgcaattttgcccttatctgtttctgttttgtcctacctggattctgcgtctcca

SEQ ID NO: 29053 - DNA, 60 bp, Artificial
  Synthetic oligonucleotide
gaaacaaagtaagcagcaatactatctcagccatgtctaccgtcaaaacaacagcagtgg

SEQ ID NO: 29054 - DNA, 60 bp, Artificial
  Synthetic oligonucleotide
agcagcaccagcagtccctggagtacagtcatttagaatctttatggtctcttcaaaaat

SEQ ID NO: 29055 - DNA, 60 bp, Artificial
  Synthetic oligonucleotide
atatggacaaaacatcactgatttcagtcaagcaaaaatccatgaacaaccctctggtgc

SEQ ID NO: 29056 - DNA, 60 bp, Artificial
  Synthetic oligonucleotide
gcattcagtgttggtaatctcgggaggaatgaagacattaaagctaatgaagcagagatt

SEQ ID NO: 29057 - DNA, 56 bp, Artificial
  Synthetic oligonucleotide
ttttcatagctgatgtttctgggttcagcctagattatgggttttcagtgatgggc

SEQ ID NO: 29058 - DNA, 60 bp, Artificial
  Synthetic oligonucleotide
ctgacttccgacctcaaaactcaatttaggatctctttgccaggagaatataatgaaact

SEQ ID NO: 29059 - DNA, 60 bp, Artificial
  Synthetic oligonucleotide
tgagacaaaattccagatgcacaatcagatatttgaaccttcaacacaactgttgcgtca

SEQ ID NO: 29060 - DNA, 60 bp, Artificial
  Synthetic oligonucleotide
ctgcgtctccatcttgctggaaggaatccagagggttaggccatttcactgtagaggagt

SEQ ID NO: 29061 - DNA, 60 bp, Artificial
  Synthetic oligonucleotide
gcctacgggcaaattctgacttccttacccatataattattggtaagaaaaccagaattt

SEQ ID NO: 29062 - DNA, 60 bp, Artificial
  Synthetic oligonucleotide
gcgtcatggtataggcaaaatgactgaatctgatttctatgcttgctcaaatctgtccaa

SEQ ID NO: 29063 - DNA, 60 bp, Artificial
  Synthetic oligonucleotide
cgaactacaacaagataattgcgcatgaactactttctgtgcacacaaattttgctctaa

SEQ ID NO: 29064 - DNA, 60 bp, Artificial
  Synthetic oligonucleotide
cactgcttccaaaagaccattcagattgcaggagagtggttggagctagctttgggattg

SEQ ID NO: 29065 - DNA, 60 bp, Artificial
  Synthetic oligonucleotide
aggagccgttgctttgtaggattggtatggtgcattctattgaccttagagttaattatc

SEQ ID NO: 29066 - DNA, 60 bp, Artificial
  Synthetic oligonucleotide
ttaggggatcagaggatccaagttaattatgaaaaaacatactgtgtatcaggccagctc

SEQ ID NO: 29067 - DNA, 60 bp, Artificial
  Synthetic oligonucleotide
gcacctatacagacctgtgttacaaccaagagttgcttattgggtttaggggatcagagg

SEQ ID NO: 29068 - DNA, 60 bp, Artificial
  Synthetic oligonucleotide
ggattaggccagggcttggtcatcggttcagtcgagctaccacctgtgcctctaaataag

SEQ ID NO: 29069 - DNA, 60 bp, Artificial
  Synthetic oligonucleotide
catgtatccaactggcttgtcagcccacagtatacttgatagcacctatacagacctgtg

SEQ ID NO: 29070 - DNA, 60 bp, Artificial
  Synthetic oligonucleotide
ttgttttgacttgtcatgtatccaactggcttgtcagcccacagtatacttgatagcacc

SEQ ID NO: 29071 - DNA, 60 bp, Artificial
  Synthetic oligonucleotide
atccctccattagtcttagagactgcgtcacggacaagaaagacagtcacttgttttgac

SEQ ID NO: 29072 - DNA, 60 bp, Artificial
  Synthetic oligonucleotide
ctagttttgtctcgagaatggcagaagtcaatttaaggggactctgcataatccctccat

SEQ ID NO: 29073 - DNA, 60 bp, Artificial
  Synthetic oligonucleotide
gacagacctggcagatggtacaaaatcttcatctactagttttgtctcgagaatggcaga

SEQ ID NO: 29074 - DNA, 60 bp, Artificial
  Synthetic oligonucleotide
gacatgggaaaagaagacagacctggcagatggtacaaaatcttcatctactagttttgt

SEQ ID NO: 29075 - DNA, 60 bp, Artificial
  Synthetic oligonucleotide
gcacattggcaggacccggaacagactgtgaggcatactcagatacagggatcttcaata

SEQ ID NO: 29076 - DNA, 60 bp, Artificial
  Synthetic oligonucleotide
gtatactgtaatggtataaagaaagttatcctgaccaaaaccttggtgattgggcaatgt

SEQ ID NO: 29077 - DNA, 60 bp, Artificial
  Synthetic oligonucleotide
caatataagctcaccaacatgtctagttaaccgtgtacaacggtttagaggtgctgagca

SEQ ID NO: 29078 - DNA, 60 bp, Artificial
  Synthetic oligonucleotide
caggtgtcttaactgccaaagaggacccaatatatgtttgggcaccaggcataataatgg

SEQ ID NO: 29079 - DNA, 60 bp, Artificial
  Synthetic oligonucleotide
tggtgcaccggaatgcggagtaacatgttggtttaaaaaatcaggtgaatgggtagttgg

SEQ ID NO: 29080 - DNA, 60 bp, Artificial
  Synthetic oligonucleotide
ctgtattttgcacattggcaggacccggaacagactgtgaggcatactcagatacaggga

SEQ ID NO: 29081 - DNA, 60 bp, Artificial
  Synthetic oligonucleotide
tgttgtcataatacaaagtgctctagcctgggtcttgtagcggctgcaccgcatttggac

SEQ ID NO: 29082 - DNA, 54 bp, Artificial
  Synthetic oligonucleotide
ttgagctgtgtgttcctggtctccatggctgggcaactattgctttgcttttaa

SEQ ID NO: 29083 - DNA, 56 bp, Artificial
  Synthetic oligonucleotide
tatagatcagctgaagtactatctaggatgacatttgcacctcatggtgaagatca

SEQ ID NO: 29084 - DNA, 60 bp, Artificial
  Synthetic oligonucleotide
ggttccaaatttgtatgttgtcataatacaaagtgctctagcctgggtcttgtagcggct

SEQ ID NO: 29085 - DNA, 60 bp, Artificial
  Synthetic oligonucleotide
tgtcctcatacaattggattaggccagggcttggtcatcggttcagtcgagctaccacct

SEQ ID NO: 29086 - DNA, 60 bp, Artificial
  Synthetic oligonucleotide
gtaggattggtatggtgcattctattgaccttagagttaattatctgggctgctagtgca

SEQ ID NO: 29087 - DNA, 60 bp, Artificial
  Synthetic oligonucleotide
ggctgctagtgcagaggtggccaatttggaacctggatggaatgatatggctcacgggac

SEQ ID NO: 29088 - DNA, 60 bp, Artificial
  Synthetic oligonucleotide
ctattgataccaataataacccttgtctccattaaaattttgctgctttttacatatgcc

SEQ ID NO: 29089 - DNA, 60 bp, Artificial
  Synthetic oligonucleotide
cagcatgagtgtgaaacagccaaagaacttgaatcccacaaaaaagcttgtcccaatggc

SEQ ID NO: 29090 - DNA, 60 bp, Artificial
  Synthetic oligonucleotide
catatgagccgaagagaggttgtcatcgagcactgtcaatctttagatataggagccgtt

SEQ ID NO: 29091 - DNA, 60 bp, Artificial
  Synthetic oligonucleotide
gccgaagagaggttgtcatcgagcactgtcaatctttagatataggagccgttgctttgt

SEQ ID NO: 29092 - DNA, 60 bp, Artificial
  Synthetic oligonucleotide
ggaatgatatggctcacgggacaggaattgtgcccatcgtgacagacttagaactggact

SEQ ID NO: 29093 - DNA, 60 bp, Artificial
  Synthetic oligonucleotide
gctcacgggacaggaattgtgcccatcgtgacagacttagaactggacttttcactcccg

SEQ ID NO: 29094 - DNA, 60 bp, Artificial
  Synthetic oligonucleotide
tatctgtgtctgctcttctcgggcctactactatggagggctgcagaacttcggaacctt

SEQ ID NO: 29095 - DNA, 57 bp, Artificial
  Synthetic oligonucleotide
tagttcattaaaagaccatatcaatgttgtggtaaatagagatatttcatttcaaga

SEQ ID NO: 29096 - DNA, 60 bp, Artificial
  Synthetic oligonucleotide
cagtgcacttcgggttgttgggaaagtgaccggtaaggcaccttcaactgaatcatccga

SEQ ID NO: 29097 - DNA, 60 bp, Artificial
  Synthetic oligonucleotide
cggaagcagctctgaagcattatatgtccctgtattagaagattatagatcagctgaagt

SEQ ID NO: 29098 - DNA, 51 bp, Artificial
  Synthetic oligonucleotide
gtcaggtggatgttagcacttcatcgattgatgggcatgggggctccgggg

SEQ ID NO: 29099 - DNA, 60 bp, Artificial
  Synthetic oligonucleotide
aggttgcaccaacaattttcagggctattatgtgtgtatcatcggaagcagctctgaagc

SEQ ID NO: 29100 - DNA, 60 bp, Artificial
  Synthetic oligonucleotide
atgttcatttgctactactccagtgtgtgaatatgatggtaacaccatttctggttataa

SEQ ID NO: 29101 - DNA, 60 bp, Artificial
  Synthetic oligonucleotide
tggttgccacaaaggattcatttcagtcattcaatgtgagtgaaccacatatcacagcta

SEQ ID NO: 29102 - DNA, 60 bp, Artificial
  Synthetic oligonucleotide
gctagctcaaaagacaggttgcaccaacaattttcagggctattatgtgtgtatcatcgg

SEQ ID NO: 29103 - DNA, 60 bp, Artificial
  Synthetic oligonucleotide
ttgtgagaggacaaaatacagtacatgtagttggcaagggtggacattcaggttccaaat

SEQ ID NO: 29104 - DNA, 60 bp, Artificial
  Synthetic oligonucleotide
ccgatacagttcaaggagtagcatttgctggtgtgcctttctatacttctacaggtgtct

SEQ ID NO: 29105 - DNA, 60 bp, Artificial
  Synthetic oligonucleotide
gtgagtgaaccacatatcacagctaattcactagaatgggttgagcctgatagttcatta

SEQ ID NO: 29106 - DNA, 50 bp, Artificial
  Synthetic oligonucleotide
ggaacattcttgacagcaataaaggcatgcgactcagctatgtgttatgg

SEQ ID NO: 29107 - DNA, 60 bp, Artificial
  Synthetic oligonucleotide
acatcacaaggtatgaagtgccctgaccttaatggttcattccggaaaaaatgttcattt

SEQ ID NO: 29108 - DNA, 60 bp, Artificial
  Synthetic oligonucleotide
cttgtcagtttggcgatccaggagatataatgagtacatcacaaggtatgaagtgccctg

SEQ ID NO: 29109 - DNA, 60 bp, Artificial
  Synthetic oligonucleotide
ccttggcagacagctggctgtttcttagacaaagattatgaattcgaaacaggatggggc

SEQ ID NO: 29110 - DNA, 60 bp, Artificial
  Synthetic oligonucleotide
aaaatccagcaaatgagcaagagagagttcctttccacctgcagattgaaaggcaagtaa

SEQ ID NO: 29111 - DNA, 60 bp, Artificial
  Synthetic oligonucleotide
aatggtgtactactacttgtcagtttggcgatccaggagatataatgagtacatcacaag

SEQ ID NO: 29112 - DNA, 60 bp, Artificial
  Synthetic oligonucleotide
ccacatctaccaaaatatgtttaatcggaacaatttcaaaattccagccttctgacacac

SEQ ID NO: 29113 - DNA, 60 bp, Artificial
  Synthetic oligonucleotide
ggtagtgagcaagcctgtaagaccgtggattccaatgattgtctagtcaccacatctacc

SEQ ID NO: 29114 - DNA, 60 bp, Artificial
  Synthetic oligonucleotide
taacggatggaagggaatggttgggacctccttgttcaggatgaacccacaactcgagca

SEQ ID NO: 29115 - DNA, 60 bp, Artificial
  Synthetic oligonucleotide
ccaactctaagagacttctacagcagaggtgagtttccttttagatggggccctgggact

SEQ ID NO: 29116 - DNA, 60 bp, Artificial
  Synthetic oligonucleotide
atccaattgtcagggatcccgggacatttcacacataacggatggaagggaatggttggg

SEQ ID NO: 29117 - DNA, 60 bp, Artificial
  Synthetic oligonucleotide
atcatagaccaactctaagagacttctacagcagaggtgagtttccttttagatggggcc

SEQ ID NO: 29118 - DNA, 60 bp, Artificial
  Synthetic oligonucleotide
gagcttccttccaaatgtaaagttggctctcagctggcctttagggtacccaacgacaga

SEQ ID NO: 29119 - DNA, 60 bp, Artificial
  Synthetic oligonucleotide
ggacacttttgaaaatgagaaccctgagatgcttgggaataggttctggatcccaagccc

SEQ ID NO: 29120 - DNA, 60 bp, Artificial
  Synthetic oligonucleotide
agagcttccttccaaatgtaaagttggctctcagctggcctttagggtacccaacgacag

SEQ ID NO: 29121 - DNA, 60 bp, Artificial
  Synthetic oligonucleotide
tgtatgatcagcctgtcatcttcaggatgggaggagtgggcgatcctgaagttgaagttg

SEQ ID NO: 29122 - DNA, 59 bp, Artificial
  Synthetic oligonucleotide
catcttcaggatgggaggagtgggcgatcctgaagttgaagttggctatctgccttttg

SEQ ID NO: 29123 - DNA, 60 bp, Artificial
  Synthetic oligonucleotide
gttgaagttggctatctgccttttgagtcatggtctcacaggaggatttgtgtgcacaac

SEQ ID NO: 29124 - DNA, 60 bp, Artificial
  Synthetic oligonucleotide
ggctatctgccttttgagtcatggtctcacaggaggatttgtgtgcacaactctctggag

SEQ ID NO: 29125 - DNA, 60 bp, Artificial
  Synthetic oligonucleotide
tgtgcacaactctctggagattccccttgagacttacagatttgccatggatcatagacc

SEQ ID NO: 29126 - DNA, 60 bp, Artificial
  Synthetic oligonucleotide
gcacaactctctggagattccccttgagacttacagatttgccatggatcatagaccaac

SEQ ID NO: 29127 - DNA, 60 bp, Artificial
  Synthetic oligonucleotide
ttgatgtggatatagtatatagcaatgtcccaacaggcctcactgacaagctccagagtc

SEQ ID NO: 29128 - DNA, 60 bp, Artificial
  Synthetic oligonucleotide
tatatagcaatgtcccaacaggcctcactgacaagctccagagtctgcgggacacttttg

SEQ ID NO: 29129 - DNA, 60 bp, Artificial
  Synthetic oligonucleotide
tcttctgaaggaagttgcatctcttcagattgtgagactcttgaatgctgttgatgtgga

SEQ ID NO: 29130 - DNA, 60 bp, Artificial
  Synthetic oligonucleotide
cttctgaaggaagttgcatctcttcagattgtgagactcttgaatgctgttgatgtggat

SEQ ID NO: 29131 - DNA, 60 bp, Artificial
  Synthetic oligonucleotide
aaggaggctgaaagaagaggtctagagtcagaactctttacaggctatgatcttctgaag

SEQ ID NO: 29132 - DNA, 60 bp, Artificial
  Synthetic oligonucleotide
agaggtctagagtcagaactctttacaggctatgatcttctgaaggaagttgcatctctt

SEQ ID NO: 29133 - DNA, 60 bp, Artificial
  Synthetic oligonucleotide
cctggggagatactatccatggaggcaccagtcacgggcaagtaaggatgaagcacagcc

SEQ ID NO: 29134 - DNA, 60 bp, Artificial
  Synthetic oligonucleotide
aggctactctagagagagtcaggtcatctcttccgggattgccagacttcagattgtaca

SEQ ID NO: 29135 - DNA, 60 bp, Artificial
  Synthetic oligonucleotide
ggctactctagagagagtcaggtcatctcttccgggattgccagacttcagattgtacat

SEQ ID NO: 29136 - DNA, 60 bp, Artificial
  Synthetic oligonucleotide
atcatcttagctggcttgttccctcttgtgagagcaagaacaatcatcatcttaacatct

SEQ ID NO: 29137 - DNA, 60 bp, Artificial
  Synthetic oligonucleotide
gatataaagcatgggcatctacaactgtctgcaaaaatgcctcagggatagagttgtcaa

SEQ ID NO: 29138 - DNA, 60 bp, Artificial
  Synthetic oligonucleotide
gagttgtcaatcaaaccagcgaagctagggtgcatcatggccctgggataccctggggag

SEQ ID NO: 29139 - DNA, 60 bp, Artificial
  Synthetic oligonucleotide
ccagcgaagctagggtgcatcatggccctgggataccctggggagatactatccatggag

SEQ ID NO: 29140 - DNA, 60 bp, Artificial
  Synthetic oligonucleotide
ccctggggagatactatccatggaggcaccagtcacgggcaagtaaggatgaagcacagc

SEQ ID NO: 29141 - DNA, 60 bp, Artificial
  Synthetic oligonucleotide
ggcttgttccctcttgtgagagcaagaacaatcatcatcttaacatctgtctgccaggtc

SEQ ID NO: 29142 - DNA, 60 bp, Artificial
  Synthetic oligonucleotide
cttaacatctgtctgccaggtctgagggcccctctcctggacaagttgtatgatcctctg

SEQ ID NO: 29143 - DNA, 60 bp, Artificial
  Synthetic oligonucleotide
ctctgaagaggattaaacagtgatgctgcccagacccccccaccccgcccctccacccct

SEQ ID NO: 29144 - DNA, 60 bp, Artificial
  Synthetic oligonucleotide
aactcgagcattatgaccaggtctttgtggaggcccacaagtcaattctaaaggaggctg

SEQ ID NO: 29145 - DNA, 55 bp, Artificial
  Synthetic oligonucleotide
ttttgttgatgaccctagaaaattggagcagatataaagcatgggcatctacaac

SEQ ID NO: 29146 - DNA, 60 bp, Artificial
  Synthetic oligonucleotide
cttaggctggcctctcatatttttgttgatgaccctagaaaattggagcagatataaagc

SEQ ID NO: 29147 - DNA, 60 bp, Artificial
  Synthetic oligonucleotide
accaggtctttgtggaggcccacaagtcaattctaaaggaggctgaaagaagaggtctag

SEQ ID NO: 29148 - DNA, 55 bp, Artificial
  Synthetic oligonucleotide
gaataggttctggatcccaagccctgatacttggtttgatggagtatatctgcag

SEQ ID NO: 29149 - DNA, 60 bp, Artificial
  Synthetic oligonucleotide
gcagtttcgactgcttgagttggcttcccattctggtcaacgatcccgaaggccatcagc

SEQ ID NO: 29150 - DNA, 60 bp, Artificial
  Synthetic oligonucleotide
cttggcagcagtttcgactgcttgagttggcttcccattctggtcaacgatcccgaaggc

SEQ ID NO: 29151 - DNA, 60 bp, Artificial
  Synthetic oligonucleotide
ggaatggttgggacctccttgttcaggatgaacccacaactcgagcattatgaccaggtc

SEQ ID NO: 29152 - DNA, 60 bp, Artificial
  Synthetic oligonucleotide
ctccacccctcaccaaccccaaaccccaatccccccatccaagagaccccttccctcatc

SEQ ID NO: 29153 - DNA, 60 bp, Artificial
  Synthetic oligonucleotide
gcagcattcattggctgcaggaatgagctcaccaccacactcttaggctggcctctcata

SEQ ID NO: 29154 - DNA, 60 bp, Artificial
  Synthetic oligonucleotide
ctgacaatagcagcattcattggctgcaggaatgagctcaccaccacactcttaggctgg

SEQ ID NO: 29155 - DNA, 60 bp, Artificial
  Synthetic oligonucleotide
cccgaaggccatcagcattttcctcctcttatcatgagaaatgaagccactgacaatagc

SEQ ID NO: 29156 - DNA, 60 bp, Artificial
  Synthetic oligonucleotide
tcccgaaggccatcagcattttcctcctcttatcatgagaaatgaagccactgacaatag

SEQ ID NO: 29157 - DNA, 60 bp, Artificial
  Synthetic oligonucleotide
aaactcattgacccatcccatgacttctgcattattgacaggctcacctgcaaaggctac

SEQ ID NO: 29158 - DNA, 60 bp, Artificial
  Synthetic oligonucleotide
aacatctgtctgccaggtctgagggcccctctcctggacaagttgtatgatcctctgggc

SEQ ID NO: 29159 - DNA, 60 bp, Artificial
  Synthetic oligonucleotide
ctcattgacccatcccatgacttctgcattattgacaggctcacctgcaaaggctacagc

SEQ ID NO: 29160 - DNA, 60 bp, Artificial
  Synthetic oligonucleotide
ccaacgacagattttatccaattgtcagggatcccgggacatttcacacataacggatgg

SEQ ID NO: 29161 - DNA, 60 bp, Artificial
  Synthetic oligonucleotide
ctccagagtctgcgggacacttttgaaaatgagaaccctgagatgcttgggaataggttc

SEQ ID NO: 29162 - DNA, 50 bp, Artificial
  Synthetic oligonucleotide
ttccctcatcccaccctccctggattcccaaaccccaggcagcagatcag

SEQ ID NO: 29163 - DNA, 60 bp, Artificial
  Synthetic oligonucleotide
tcatcattttatcagtcttatctcaggaggacacaatcaatgggaatacaactggaccag

SEQ ID NO: 29164 - DNA, 60 bp, Artificial
  Synthetic oligonucleotide
gggtttgatctcaattgaggctgcatctgatataaagcttgagagctcttgtaattttga

SEQ ID NO: 29165 - DNA, 60 bp, Artificial
  Synthetic oligonucleotide
gctcttgtaattttgatcttcatacaacatctatggcccagaagagtttcacccaagttg

SEQ ID NO: 29166 - DNA, 60 bp, Artificial
  Synthetic oligonucleotide
aagcttgagagctcttgtaattttgatcttcatacaacatctatggcccagaagagtttc

SEQ ID NO: 29167 - DNA, 60 bp, Artificial
  Synthetic oligonucleotide
tcttcatacaacatctatggcccagaagagtttcacccaagttgaatggagaaagaaaag

SEQ ID NO: 29168 - DNA, 60 bp, Artificial
  Synthetic oligonucleotide
ctcttgtaattttgatcttcatacaacatctatggcccagaagagtttcacccaagttga

SEQ ID NO: 29169 - DNA, 60 bp, Artificial
  Synthetic oligonucleotide
ctgaggcaactgaaagtgccttgcaagcccattattccatttgtaaattgacaggaagat

SEQ ID NO: 29170 - DNA, 60 bp, Artificial
  Synthetic oligonucleotide
cccaagttgaatggagaaagaaaagtgacacaactgataccacaaatgctgcgtccacta

SEQ ID NO: 29171 - DNA, 60 bp, Artificial
  Synthetic oligonucleotide
caagttgaatggagaaagaaaagtgacacaactgataccacaaatgctgcgtccactacc

SEQ ID NO: 29172 - DNA, 60 bp, Artificial
  Synthetic oligonucleotide
aaagttgcatcaatggacaatgcccttattgcatgacaataactgaagcaactgaaagtg

SEQ ID NO: 29173 - DNA, 60 bp, Artificial
  Synthetic oligonucleotide
cattgtgtaacaggtcagctgattgagggtcaatgtttcaacccagcacacacactgaca

SEQ ID NO: 29174 - DNA, 60 bp, Artificial
  Synthetic oligonucleotide
gggttttgacgttttcttgttcccattacactaatgagtcaaaatttaaattcatcctgg

SEQ ID NO: 29175 - DNA, 60 bp, Artificial
  Synthetic oligonucleotide
tgtgtcccaggattacatgggtgggccactgtcatgcttctatcaacattctgcttcgga

SEQ ID NO: 29176 - DNA, 60 bp, Artificial
  Synthetic oligonucleotide
gcctattttcattgatgcctgatgtagcccactcactcgctgtagaattatgtgtcccag

SEQ ID NO: 29177 - DNA, 60 bp, Artificial
  Synthetic oligonucleotide
tacattcacaagcctattttcattgatgcctgatgtagcccattcactcgctgtagaatt

SEQ ID NO: 29178 - DNA, 60 bp, Artificial
  Synthetic oligonucleotide
tgggcagtgtatttatacattcacaagcctattttcattgatgcctgatgtagcccattc

SEQ ID NO: 29179 - DNA, 60 bp, Artificial
  Synthetic oligonucleotide
tagaacaagggggggtcatccttaaacaatggtgcacaacatcatgtgcatttggggacc

SEQ ID NO: 29180 - DNA, 60 bp, Artificial
  Synthetic oligonucleotide
cagagtgccctagttttatgacatcaattaaggcatgtgatcttgctatgtgttatggat

SEQ ID NO: 29181 - DNA, 60 bp, Artificial
  Synthetic oligonucleotide
ggggctgtaatcctggtgactgcccaggggttgggactggatgcactgcttgtggtgttt

SEQ ID NO: 29182 - DNA, 60 bp, Artificial
  Synthetic oligonucleotide
acaataactgaagcaactgaaagtgccttgcaagcccattattccatttgtaaattgaca

SEQ ID NO: 29183 - DNA, 60 bp, Artificial
  Synthetic oligonucleotide
cccaagttgaatggagaaagaaaagtgacacaactgataccacaaatgctgcatccacca

SEQ ID NO: 29184 - DNA, 60 bp, Artificial
  Synthetic oligonucleotide
gaactaggtttgatctcaattgaggctgcatctgatataaagctcgagagctcttgcaat

SEQ ID NO: 29185 - DNA, 60 bp, Artificial
  Synthetic oligonucleotide
gcccgagttttatgacatcaattaaggcatgtgatcttgctatgtgttatggatcaacag

SEQ ID NO: 29186 - DNA, 60 bp, Artificial
  Synthetic oligonucleotide
gaaggggcatggggttctggtgtagggtttacactcacatgtactgtcggattaacagag

SEQ ID NO: 29187 - DNA, 60 bp, Artificial
  Synthetic oligonucleotide
ggagaaagaaaagtgacacaactgataccacaaatgctgcatccaccacctttgaagcac

SEQ ID NO: 29188 - DNA, 60 bp, Artificial
  Synthetic oligonucleotide
gcatggggttctggtgtagggtttacacttacatgtactgtcggattaacagagtgcccg

SEQ ID NO: 29189 - DNA, 60 bp, Artificial
  Synthetic oligonucleotide
aaagacgcattgtgtaacaggtcagctgattgagggtcagtgcttcaacccagcacacac

SEQ ID NO: 29190 - DNA, 60 bp, Artificial
  Synthetic oligonucleotide
ggctcaacagaattgggtttgatctcaattgaggctgcatctgatataaagcttgagagc

SEQ ID NO: 29191 - DNA, 55 bp, Artificial
  Synthetic oligonucleotide
atgtgataagaagacagtacctatcacatggacaggctacctaccaatatcaggt

SEQ ID NO: 29192 - DNA, 60 bp, Artificial
  Synthetic oligonucleotide
agaagtgagtttaaaatggaagggtggtatctggttgctcttggaatctgctatacgctg

SEQ ID NO: 29193 - DNA, 60 bp, Artificial
  Synthetic oligonucleotide
ggcatggggttctggtgtagggtttacactcacatgtactgtcggattaacagagtgccc

SEQ ID NO: 29194 - DNA, 60 bp, Artificial
  Synthetic oligonucleotide
aaaatggaagggtggtatctggttgctcttggagtctgctatacgctgacactggcaatg

SEQ ID NO: 29195 - DNA, 60 bp, Artificial
  Synthetic oligonucleotide
ttggctcaacagaattgggtttgatctcaattgaggctgcatctgatataaagcttgaga

SEQ ID NO: 29196 - DNA, 60 bp, Artificial
  Synthetic oligonucleotide
agaagtgagtttaaaatggaagggtggtatctggttgctcttggagtctgctatacgctg

SEQ ID NO: 29197 - DNA, 60 bp, Artificial
  Synthetic oligonucleotide
agaagtgagtttaaaatggaagggtggtatctggttgttcttggagtctgctatacgctg

SEQ ID NO: 29198 - DNA, 60 bp, Artificial
  Synthetic oligonucleotide
actgaaagtgccttgcaagcccattattccatttgtaaattgacaggaagatttcaggag

SEQ ID NO: 29199 - DNA, 57 bp, Artificial
  Synthetic oligonucleotide
aagtcacttaagaagccagaggtaaaaaaaggttgttacagaacacttggggtattt

SEQ ID NO: 29200 - DNA, 60 bp, Artificial
  Synthetic oligonucleotide
caagtgcagagactccactaatggagtcaggttggtcagatacagctcatggtgttggcg

SEQ ID NO: 29201 - DNA, 60 bp, Artificial
  Synthetic oligonucleotide
gtatgaaacaggctggggctgtaatcctggtgactgcccaggggttgggactggatgcac

SEQ ID NO: 29202 - DNA, 60 bp, Artificial
  Synthetic oligonucleotide
cagcacacacattgacattatctcaacctgctcacacttatgatactgtcaccctgccta

SEQ ID NO: 29203 - DNA, 60 bp, Artificial
  Synthetic oligonucleotide
gttggggctgtaatcctggtgactgcccaggggttgggactggatgtactgcttgtggtg

SEQ ID NO: 29204 - DNA, 60 bp, Artificial
  Synthetic oligonucleotide
tgtatgtgataagaagacagtacctatcacatggacaggctacctaccaatatcagggga

SEQ ID NO: 29205 - DNA, 60 bp, Artificial
  Synthetic oligonucleotide
ggggctgtaatcctggtgactgcccaggggttgggactgggtgcactgcttgtggtgttt

SEQ ID NO: 29206 - DNA, 54 bp, Artificial
  Synthetic oligonucleotide
gatattaataaactctagttattgactttataagattattatggaactaacctc

SEQ ID NO: 29207 - DNA, 60 bp, Artificial
  Synthetic oligonucleotide
gtgatactcattctctctatcataatgttcagtgttctgtgccccaggagaggacacaag

SEQ ID NO: 29208 - DNA, 60 bp, Artificial
  Synthetic oligonucleotide
aagggaggtcattcagggtcttcatttaaatgctgtcatgatacagattgctcctctgag

SEQ ID NO: 29209 - DNA, 52 bp, Artificial
  Synthetic oligonucleotide
tgattcagataaggtttatgatgatggtgcaccaccttgcacattcaaatgc

SEQ ID NO: 29210 - DNA, 60 bp, Artificial
  Synthetic oligonucleotide
ggaggaatcatccttaaacaatggtgcacaacatcatgtgcatttggggaccccggtgat

SEQ ID NO: 29211 - DNA, 60 bp, Artificial
  Synthetic oligonucleotide
gtgataagaagacagtacctatcacatggacaggctacctaccaatatcaggggagatgg

SEQ ID NO: 29212 - DNA, 60 bp, Artificial
  Synthetic oligonucleotide
acaggttggggctgtaatcctggtgactgcccaggggttgggactggatgtactgcttgt

SEQ ID NO: 29213 - DNA, 60 bp, Artificial
  Synthetic oligonucleotide
gcattgtgtaacaggtcagctgattgagggtcagtgcttcaacccagcacacacattgac

SEQ ID NO: 29214 - DNA, 60 bp, Artificial
  Synthetic oligonucleotide
atgccagcctactgtttttctaataggcccaatacaaacatgcataacaacaaaaagttg

SEQ ID NO: 29215 - DNA, 60 bp, Artificial
  Synthetic oligonucleotide
ccattaacacaggtggagtctttaaaactggaaagttcatgtaattttgatctacatacc

SEQ ID NO: 29216 - DNA, 60 bp, Artificial
  Synthetic oligonucleotide
tccattaacacaggtggagtctttaaaactggaaagttcatgtaattttgatctacatac

SEQ ID NO: 29217 - DNA, 60 bp, Artificial
  Synthetic oligonucleotide
cacctgttccattaactcaagtggagtctttaaaactggaaagttcatgtaatttcgatc

SEQ ID NO: 29218 - DNA, 60 bp, Artificial
  Synthetic oligonucleotide
gaattaccacctgttccattaactcaagtggagtctttaaaactggaaagttcatgtaat

SEQ ID NO: 29219 - DNA, 60 bp, Artificial
  Synthetic oligonucleotide
attggtttgggtcagggcctagttattggatcagttgaattaccacctgttccattaaca

SEQ ID NO: 29220 - DNA, 57 bp, Artificial
  Synthetic oligonucleotide
attggtttgggtcagggcctagttattggatcagttgaattaccacctgttccatta

SEQ ID NO: 29221 - DNA, 60 bp, Artificial
  Synthetic oligonucleotide
gtccacacacaattggtttgggtcagggccttgttattggatcagttgaattaccacctg

SEQ ID NO: 29222 - DNA, 60 bp, Artificial
  Synthetic oligonucleotide
gggaaagtgacaggcaaggcaccatcaactgagtcatctgatacaatacagggcgttgcc

SEQ ID NO: 29223 - DNA, 60 bp, Artificial
  Synthetic oligonucleotide
ttaggtgatcagaggattcaggttaattatgaaaaaacatattgtgtttcaggtcaactc

SEQ ID NO: 29224 - DNA, 60 bp, Artificial
  Synthetic oligonucleotide
taataggcccaatacaaacatgcataacaacaaaaagttgccttttgggtttaggtgatc

SEQ ID NO: 29225 - DNA, 60 bp, Artificial
  Synthetic oligonucleotide
cacagtgtactgtattctgtacattagctggacctggtgcagattgtgaagcttattctg

SEQ ID NO: 29226 - DNA, 60 bp, Artificial
  Synthetic oligonucleotide
aagacaacacagtgtactgtattctgtacattagctggacctggtgcagattgtgaagct

SEQ ID NO: 29227 - DNA, 60 bp, Artificial
  Synthetic oligonucleotide
ttctccaacctgtttaattaatcgtgtgcagagattccgtggtgctgaacagcaaatcaa

SEQ ID NO: 29228 - DNA, 60 bp, Artificial
  Synthetic oligonucleotide
gtacagtattctgtacattagctggacctggtgcagattgtgaagcatattctgaaacag

SEQ ID NO: 29229 - DNA, 60 bp, Artificial
  Synthetic oligonucleotide
tgcttaattaaccgtgtgcagagattccgtggtgctgaacagcaaatcaaattcatttgt

SEQ ID NO: 29230 - DNA, 60 bp, Artificial
  Synthetic oligonucleotide
ccaacctgtttaattaatcgtgtgcagagattccgtggtgctgaacagcaaatcaaattc

SEQ ID NO: 29231 - DNA, 60 bp, Artificial
  Synthetic oligonucleotide
tgtaacgggctgaagaaagtgattcttaccaaaactttaatcattggacagtgtatctat

SEQ ID NO: 29232 - DNA, 60 bp, Artificial
  Synthetic oligonucleotide
ccgtgtgcagagattccgtggtgctgaacagcaaatcaaattcatttgtcagagggttga

SEQ ID NO: 29233 - DNA, 60 bp, Artificial
  Synthetic oligonucleotide
gcccaatgggttcatgtccatattgtctgaatcctgctgaagcaacaacatctgctttgc

SEQ ID NO: 29234 - DNA, 60 bp, Artificial
  Synthetic oligonucleotide
cgggctgaagaaagtgattcttaccaaaactttaatcattggacagtgtatctatacttt

SEQ ID NO: 29235 - DNA, 60 bp, Artificial
  Synthetic oligonucleotide
tattccagtttgtctgtacttgctcttcttgtgtctgctactatggaatagaggagatgc

SEQ ID NO: 29236 - DNA, 60 bp, Artificial
  Synthetic oligonucleotide
ccagtttgtctgtacttgctcttcttgtgtctgctactatggaatagaggagatgccaga

SEQ ID NO: 29237 - DNA, 60 bp, Artificial
  Synthetic oligonucleotide
gctactatggaatagaggagatgccagaaacctgaatgaacttaaaattgaatgtccaca

SEQ ID NO: 29238 - DNA, 60 bp, Artificial
  Synthetic oligonucleotide
ccagaaacctaaatgaacttaaaatggagtgtccacacacaattggtttgggtcagggcc

SEQ ID NO: 29239 - DNA, 60 bp, Artificial
  Synthetic oligonucleotide
aatgtccacacacaattggtttgggtcagggccttgttattggatcagttgaattaccac

SEQ ID NO: 29240 - DNA, 60 bp, Artificial
  Synthetic oligonucleotide
tgattacaggtcagctgagatcctctcaagaatggcatttgcaccacatggggaagatca

SEQ ID NO: 29241 - DNA, 60 bp, Artificial
  Synthetic oligonucleotide
caggtcagctgagatcctctcaagaatggcatttgcaccacatggggaagatcatgatgt

SEQ ID NO: 29242 - DNA, 60 bp, Artificial
  Synthetic oligonucleotide
gaaggtttcaacaggtgatagtatgaagcttgaaaaaagctttgagactcttgttcagaa

SEQ ID NO: 29243 - DNA, 60 bp, Artificial
  Synthetic oligonucleotide
tgattacaggtcagctgaggtcctttcaaggatggcatttgcaccacatggggaagatca

SEQ ID NO: 29244 - DNA, 60 bp, Artificial
  Synthetic oligonucleotide
gggaaagtgacaggcaaagcaccatcaactgagtcatctgatacaatacagggcattgcc

SEQ ID NO: 29245 - DNA, 60 bp, Artificial
  Synthetic oligonucleotide
cagcaaaggatgaccctgtatatatttgggcacctggaattataatggaaggaaaccact

SEQ ID NO: 29246 - DNA, 60 bp, Artificial
  Synthetic oligonucleotide
ggtcagctgaggtcctttcaaggatggcatttgcaccacatggggaagatcatgatgttg

SEQ ID NO: 29247 - DNA, 60 bp, Artificial
  Synthetic oligonucleotide
ttggtgtttgttattagtcttagaattaattgtgtgggctgctagtgctgaaactcagaa

SEQ ID NO: 29248 - DNA, 60 bp, Artificial
  Synthetic oligonucleotide
gaccctgtatatatttgggcacctggaattataatggaaggaaaccactcagtttgtgac

SEQ ID NO: 29249 - DNA, 60 bp, Artificial
  Synthetic oligonucleotide
gaagacaacacagtgtacagtattctgtacattagctggacctggtgcagattgtgaagc

SEQ ID NO: 29250 - DNA, 60 bp, Artificial
  Synthetic oligonucleotide
ggtgtttgttgttagttttggaattaattgtgtgggctgctagtgctgaaactcaaagtt

SEQ ID NO: 29251 - DNA, 57 bp, Artificial
  Synthetic oligonucleotide
cctctttacattgtgttgtccacgaaggcctagttatgcaaaagaacataaacctta

SEQ ID NO: 29252 - DNA, 60 bp, Artificial
  Synthetic oligonucleotide
ataggttcatgtccatattgtctgaatcctgctgaagcaacaacatctgctttacaggcc

SEQ ID NO: 29253 - DNA, 60 bp, Artificial
  Synthetic oligonucleotide
atttggtgtttgttattagtcttagaattaattgtgtgggctgctagtgctgaaactcag

SEQ ID NO: 29254 - DNA, 60 bp, Artificial
  Synthetic oligonucleotide
gggttcatgtccatattgtctgaatcctgctgaagcaacaacatctgctttgcaggccca

SEQ ID NO: 29255 - DNA, 60 bp, Artificial
  Synthetic oligonucleotide
ggaggtggacccggatgacgttaacaagagcacactacagagtagacgggcagctgtgtc

SEQ ID NO: 29256 - DNA, 60 bp, Artificial
  Synthetic oligonucleotide
tacctggagtgacggggtgggcatgtacctcgccttcttgccgggcgctgagatgtttat

SEQ ID NO: 29257 - DNA, 60 bp, Artificial
  Synthetic oligonucleotide
gctgcttacctcagatttgagagtgattacgggtcccaattggagtccgctatcgttcga

SEQ ID NO: 29258 - DNA, 60 bp, Artificial
  Synthetic oligonucleotide
tcgctatcctgactcggtttgaagacgtcgagaaactggattgggcaaagacagccttca

SEQ ID NO: 29259 - DNA, 60 bp, Artificial
  Synthetic oligonucleotide
tggttgatcattttcatcttggtgatgatatggatcctgaactcagaggacttgcacagg

SEQ ID NO: 29260 - DNA, 60 bp, Artificial
  Synthetic oligonucleotide
aaacaatgggctcaatggtctgtgacatatgccaccatgaatgtgagacagcaaaagtgt

SEQ ID NO: 29261 - DNA, 60 bp, Artificial
  Synthetic oligonucleotide
aaaacaatgggctcaatggtctgtgacatatgccaccatgaatgtgagacagcaaaagtg

SEQ ID NO: 29262 - DNA, 56 bp, Artificial
  Synthetic oligonucleotide
aaaacaatgggctcaatggtctgtgacatatgccaccatgagtgtgagacagccaa

SEQ ID NO: 29263 - DNA, 52 bp, Artificial
  Synthetic oligonucleotide
cactcaggtattctgctgctctgtatgtttattgttagtttgttaagtttag

SEQ ID NO: 29264 - DNA, 57 bp, Artificial
  Synthetic oligonucleotide
aaaactcgtctgcacttcgtgcacagggtgcacagattgatactgctttcagctcat

SEQ ID NO: 29265 - DNA, 60 bp, Artificial
  Synthetic oligonucleotide
gtcaatccagagcaagattgatgaattaaggagacagctggctgaccgtgtggctgcagg

SEQ ID NO: 29266 - DNA, 60 bp, Artificial
  Synthetic oligonucleotide
caatccagagtaaaatcgatgaactaaggagacagctggctgaccgtgtggctgcaggga

SEQ ID NO: 29267 - DNA, 55 bp, Artificial
  Synthetic oligonucleotide
cttgctgcaatggaccactacaaagaagggcttacatccatttacagcatgttta

SEQ ID NO: 29268 - DNA, 57 bp, Artificial
  Synthetic oligonucleotide
gacttgctgcaatggaccactacaaagaagggcttacatccatttacagcatgttta

SEQ ID NO: 29269 - DNA, 60 bp, Artificial
  Synthetic oligonucleotide
taaacatgctgtaaatggaggtaagcccttctttgtagtggtccattgcagcaagtcctt

SEQ ID NO: 29270 - DNA, 51 bp, Artificial
  Synthetic oligonucleotide
aggaagacttcctcctaagagaacacccaagacacaggatttcaaatctgt

SEQ ID NO: 29271 - DNA, 60 bp, Artificial
  Synthetic oligonucleotide
tggatgtaagcccttctttgtagtggtccattgcagcaagtcctttagctttcggactac

SEQ ID NO: 29272 - DNA, 60 bp, Artificial
  Synthetic oligonucleotide
tggaggtaagcccttctttgtagtggtccattgcagcaagtccttcagcttttggactac

SEQ ID NO: 29273 - DNA, 60 bp, Artificial
  Synthetic oligonucleotide
tacctgatctttcaacccaaagtctgcatgcaagtccaccaacaaatgcagattatattg

SEQ ID NO: 29274 - DNA, 60 bp, Artificial
  Synthetic oligonucleotide
gcacctgatcgttgtccaccaacgtgcctcttcatcgcaggaatggctgaactaggggcc

SEQ ID NO: 29275 - DNA, 60 bp, Artificial
  Synthetic oligonucleotide
ggattggactgataggattcaagactggcttggggcaccatgtaagtttctacctgatct

SEQ ID NO: 29276 - DNA, 60 bp, Artificial
  Synthetic oligonucleotide
aatatggtaagtcctgttatgagtgtcataggctttatggcacttgctaaggattggact

SEQ ID NO: 29277 - DNA, 60 bp, Artificial
  Synthetic oligonucleotide
tagtagtaggctccctaaagagctactattacaacaaccaaaaaaaatggcaactatgga

SEQ ID NO: 29278 - DNA, 60 bp, Artificial
  Synthetic oligonucleotide
cctttttccctgcttactaacagcaacacactacctcacttaaacccacaaactacctct

SEQ ID NO: 29279 - DNA, 60 bp, Artificial
  Synthetic oligonucleotide
ggggaaaagaggcagtggataacttccacctcggagacgacatggacccagaactcagga

SEQ ID NO: 29280 - DNA, 60 bp, Artificial
  Synthetic oligonucleotide
ctatgggaattcaattggaccaacggatcatcgtcatgttcatggttgcatggggaaaag

SEQ ID NO: 29281 - DNA, 60 bp, Artificial
  Synthetic oligonucleotide
gagaaggacacaatctatgggaattcaattggaccaacggatcatcgtcatgttcatggt

SEQ ID NO: 29282 - DNA, 60 bp, Artificial
  Synthetic oligonucleotide
aactacctcttatataaactacctcatgatgttgttgccttttgtctctttagggagcat

SEQ ID NO: 29283 - DNA, 60 bp, Artificial
  Synthetic oligonucleotide
catacaggacatggacattgtagcctctgagcacctgctgcaccagtctcttgtcggcaa

SEQ ID NO: 29284 - DNA, 60 bp, Artificial
  Synthetic oligonucleotide
ctgacgatggtcttaccctccaccgcctcagtggattccttgccaggtttctacttgaaa

SEQ ID NO: 29285 - DNA, 60 bp, Artificial
  Synthetic oligonucleotide
actggctgaggtgaagggttgcacctggagtgatgggtatgcaatgtacctgggatttgc

SEQ ID NO: 29286 - DNA, 60 bp, Artificial
  Synthetic oligonucleotide
cctcagatatggaaatgtccttgatgtgaatgctattgacattgatgaaccaagtggaca

SEQ ID NO: 29287 - DNA, 60 bp, Artificial
  Synthetic oligonucleotide
gatcaagccttaggtatggaaatgtccttgatgtgaatgcaattgatattgaggaaccaa

SEQ ID NO: 29288 - DNA, 57 bp, Artificial
  Synthetic oligonucleotide
ggggcatggctgcttgtccattgtttatgatgaaaccgacactcagaccacatacca

SEQ ID NO: 29289 - DNA, 60 bp, Artificial
  Synthetic oligonucleotide
ctaggaaatgaactgttgtataaggcacccagaaaggccttagcaactgtctgcagtgcc

SEQ ID NO: 29290 - DNA, 60 bp, Artificial
  Synthetic oligonucleotide
atccgaaagccaagacatctgtacgtgtcaatgcctacagcccagtccacgatgaaggca

SEQ ID NO: 29291 - DNA, 60 bp, Artificial
  Synthetic oligonucleotide
ctgctttgctactaactgattattcctgttacaacaacctacctcattatccaactcccc

SEQ ID NO: 29292 - DNA, 60 bp, Artificial
  Synthetic oligonucleotide
ttcatctctgattaaacatctctacctccgtacacttatatatatgcacgtagcatatat

SEQ ID NO: 29293 - DNA, 60 bp, Artificial
  Synthetic oligonucleotide
ggggttaaactagtcaaggtaaggcactgtgacattaacctatcagtcaaattgccatcg

SEQ ID NO: 29294 - DNA, 60 bp, Artificial
  Synthetic oligonucleotide
ggctctttacatgcttaccaccagagggagacaaactactaaagacaataagggaatgag

SEQ ID NO: 29295 - DNA, 60 bp, Artificial
  Synthetic oligonucleotide
agggaatgaggattcgatttaaggatgacagctcttttgaagatgtgaatgggattcgaa

SEQ ID NO: 29296 - DNA, 60 bp, Artificial
  Synthetic oligonucleotide
aaggacgcgagattaaaactagtctcgcaaaaagaagtgaatgggaggttacacttaacc

SEQ ID NO: 29297 - DNA, 60 bp, Artificial
  Synthetic oligonucleotide
gggaatcattactcaggggtgggtcagttaatccgttgtgggtgggtttagctccaggct

SEQ ID NO: 29298 - DNA, 52 bp, Artificial
  Synthetic oligonucleotide
attctaccttatcagttattttcttgattgcttttcaaggagtatactacta

SEQ ID NO: 29299 - DNA, 60 bp, Artificial
  Synthetic oligonucleotide
agctggcggatttggtggcagctcaaaaactggcttcaaaaccagttgacccgacggggc

SEQ ID NO: 29300 - DNA, 60 bp, Artificial
  Synthetic oligonucleotide
cgcagaactcaagagacagctggcagatttggtggcagctcaaaaactggcttcaaaacc

SEQ ID NO: 29301 - DNA, 60 bp, Artificial
  Synthetic oligonucleotide
gcccagtgtttcaacgttgcttccaagatggggctatagtgaagcaaaacccatcgaaag

SEQ ID NO: 29302 - DNA, 55 bp, Artificial
  Synthetic oligonucleotide
tttggcatgcttgcagggcttagtaggctcgtctgtcctaatgagctggggaaaa

SEQ ID NO: 29303 - DNA, 60 bp, Artificial
  Synthetic oligonucleotide
ctgtcaatcattttcatcttggtgatgatatggatcctgagctcagacaactggctcaag

SEQ ID NO: 29304 - DNA, 60 bp, Artificial
  Synthetic oligonucleotide
aagcagtgaaccactttcatcttggtgatgatatggatcctgagctcagacagctcgctc

SEQ ID NO: 29305 - DNA, 53 bp, Artificial
  Synthetic oligonucleotide
aaattggcttcaaaacctgttgatccaacagggattgaacctgatgaccattt

SEQ ID NO: 29306 - DNA, 60 bp, Artificial
  Synthetic oligonucleotide
tgccggagcaccaaatcgctgtccaccgacatgcctgtttattgcagggattgctgaact

SEQ ID NO: 29307 - DNA, 55 bp, Artificial
  Synthetic oligonucleotide
cattatactactgattattgaatgtatttgcactaggggacgggttgggtgggcc

SEQ ID NO: 29308 - DNA, 60 bp, Artificial
  Synthetic oligonucleotide
cccagagcttcggggtctggcacaggcattgattgaccagaaagtgaaggagatatccaa

SEQ ID NO: 29309 - DNA, 60 bp, Artificial
  Synthetic oligonucleotide
gattcaacatacaggacatggacattgtggcctctgaacatctgctgcatcagtctcttg

SEQ ID NO: 29310 - DNA, 60 bp, Artificial
  Synthetic oligonucleotide
ccactggtcatcgacatgcaccgtgtgataaaagatggaatggatgtcaacttcatgaga

SEQ ID NO: 29311 - DNA, 60 bp, Artificial
  Synthetic oligonucleotide
acgttgtaatcaaatcacatgtctgtgactattctttagacattgacggtacggtgaggc

SEQ ID NO: 29312 - DNA, 60 bp, Artificial
  Synthetic oligonucleotide
gaagtggcagctgaatgcatgaagaggtacattggcacaccttatgagggaattgtagac

SEQ ID NO: 29313 - DNA, 60 bp, Artificial
  Synthetic oligonucleotide
actgcgaaagctggaatgagcaccctccaagaactacaggaaaatatcacagcacacgaa

SEQ ID NO: 29314 - DNA, 60 bp, Artificial
  Synthetic oligonucleotide
gtatgaaaaggaccctgatgacctcaacaaaagagcattgagtgaccgagaaagcgttgc

SEQ ID NO: 29315 - DNA, 60 bp, Artificial
  Synthetic oligonucleotide
cgatcaccaattaagcaagctgagttcagagccgctgtagtagtgcctttggttgaggta

SEQ ID NO: 29316 - DNA, 60 bp, Artificial
  Synthetic oligonucleotide
cgatcaccaattaagcaagctgagttcagagccactgtagtagtgcctttggttgaggta

SEQ ID NO: 29317 - DNA, 60 bp, Artificial
  Synthetic oligonucleotide
cacaatgcgataagaagaccctcccacttacatggacaggctttataactctaccaggag

SEQ ID NO: 29318 - DNA, 60 bp, Artificial
  Synthetic oligonucleotide
ttgtctaggatgaccacagcaccccatggagaagaccatgacatagaccctaatgccatt

SEQ ID NO: 29319 - DNA, 60 bp, Artificial
  Synthetic oligonucleotide
gcgtttcattgctatggctcttgtataaaatatgcttatccttggcagacagcaaagtgt

SEQ ID NO: 29320 - DNA, 60 bp, Artificial
  Synthetic oligonucleotide
tgaaactggatggggctgtaatcctcctgactgcccaggggtaggtacagggtgtacagc

SEQ ID NO: 29321 - DNA, 60 bp, Artificial
  Synthetic oligonucleotide
ggtgtacaacaacatgccaatttggagacccaggtgatatcatgagcacacccttaggga

SEQ ID NO: 29322 - DNA, 60 bp, Artificial
  Synthetic oligonucleotide
cccgctgcacactattgctatatctcaaccaactcatacctatgatattatgacactagc

SEQ ID NO: 29323 - DNA, 60 bp, Artificial
  Synthetic oligonucleotide
agaggtttaggggggcagagcagcaggtaaagtttgtttgtcaaagggttgatttagaca

SEQ ID NO: 29324 - DNA, 60 bp, Artificial
  Synthetic oligonucleotide
agacctgtgttaccacaaaaagctgcttgttaggtttaggggatcagaggattcaagtag

SEQ ID NO: 29325 - DNA, 60 bp, Artificial
  Synthetic oligonucleotide
accatcttctgcaacatacacatataggagagaactacaaaatcctgcaaatgaacaaga

SEQ ID NO: 29326 - DNA, 60 bp, Artificial
  Synthetic oligonucleotide
aggaggtgcagttaagaggtctttgtgtcataccaacccttgtccttgagactgcttctc

SEQ ID NO: 29327 - DNA, 60 bp, Artificial
  Synthetic oligonucleotide
tccatactgtctcaacccaactgaagctactgagtctgccctacaggctcattttaaagt

SEQ ID NO: 29328 - DNA, 60 bp, Artificial
  Synthetic oligonucleotide
tagtgtgggcagctagtgctgagacaataaatcttgaacctggatggacagacacagccc

SEQ ID NO: 29329 - DNA, 60 bp, Artificial
  Synthetic oligonucleotide
aaatggtcatgggagaagaaggctgatactgctgagaatgcaaaagcagcatcaacaaca

SEQ ID NO: 29330 - DNA, 60 bp, Artificial
  Synthetic oligonucleotide
gtgattggtagtgcagaattgccacctgtgcctttagcgaaggtagagtcactgaagctg

SEQ ID NO: 29331 - DNA, 60 bp, Artificial
  Synthetic oligonucleotide
tgttttggctggcttgctattcccctattatctatgattattataaggtttctattaatt

SEQ ID NO: 29332 - DNA, 60 bp, Artificial
  Synthetic oligonucleotide
tacacatttactagtatattttcattgatgccaggtgttgcacattctcttgcagttgaa

SEQ ID NO: 29333 - DNA, 60 bp, Artificial
  Synthetic oligonucleotide
gagaaaactggaataaagaagtatgttttgtctgtgtttgagtcttctcggtctactact

SEQ ID NO: 29334 - DNA, 60 bp, Artificial
  Synthetic oligonucleotide
attggaaactacctagagcacttttcagctaaaattagtgcctgcagtgtagaaatgtgg

SEQ ID NO: 29335 - DNA, 56 bp, Artificial
  Synthetic oligonucleotide
tatgaagtcacacttctgttcaaaagcacacagtgtagcactagagtgtatgaaaa

SEQ ID NO: 29336 - DNA, 60 bp, Artificial
  Synthetic oligonucleotide
cctcgacatgggattttgctcgaatgaaaatcttagtattctggaggaaatacattggat

SEQ ID NO: 29337 - DNA, 60 bp, Artificial
  Synthetic oligonucleotide
ccaaatttcagcaggttggagagaaatggtaaacagagtaagctctgaacgtgacatgtc

SEQ ID NO: 29338 - DNA, 60 bp, Artificial
  Synthetic oligonucleotide
ctggataaagaaagatgccaacgcatagtatcctctccaggcttgttcctcatgacaagc

SEQ ID NO: 29339 - DNA, 60 bp, Artificial
  Synthetic oligonucleotide
ctactcaacttttaagacagcaacaggatatatttcaatatcaaaggcttttaggctgga

SEQ ID NO: 29340 - DNA, 60 bp, Artificial
  Synthetic oligonucleotide
gcaataatggctctccataatgaggaggcagaaatagcagaacttggctcactctactca

SEQ ID NO: 29341 - DNA, 60 bp, Artificial
  Synthetic oligonucleotide
atactggcaatgcatcaatgactattccaccctaatgaaaaacatgttagctgtctctca

SEQ ID NO: 29342 - DNA, 60 bp, Artificial
  Synthetic oligonucleotide
ctcattcgctttccagaatacaagttaatgtagatgaatatgccatcacgagaagagcac

SEQ ID NO: 29343 - DNA, 60 bp, Artificial
  Synthetic oligonucleotide
ggacggcctatactttccaaagttagaaatctgaatatgcagactcattcgctttccaga

SEQ ID NO: 29344 - DNA, 60 bp, Artificial
  Synthetic oligonucleotide
attctccccttatacaaaaacatcattttctgtggtaatgacagacttaatcaagaaggg

SEQ ID NO: 29345 - DNA, 60 bp, Artificial
  Synthetic oligonucleotide
attgaggaccataattctagagttgaatcatctaggctaagcagagattcaaaatgggtt

SEQ ID NO: 29346 - DNA, 60 bp, Artificial
  Synthetic oligonucleotide
aggttactagattgtcagaagatttaatttatagacacggtcaggcaatgttgaataagc

SEQ ID NO: 29347 - DNA, 60 bp, Artificial
  Synthetic oligonucleotide
tgcaacacaaactgctataaagcatggttgcccaccatcacttgcatgggtatctatcgc

SEQ ID NO: 29348 - DNA, 60 bp, Artificial
  Synthetic oligonucleotide
gacccgttaccattcttccctactaacaatagaagtgaaataccagtagagatgtgcgga

SEQ ID NO: 29349 - DNA, 60 bp, Artificial
  Synthetic oligonucleotide
ggtctacggaactagacaattgtattcacatgtgcatgtacaggaatggatatgatgcag

SEQ ID NO: 29350 - DNA, 53 bp, Artificial
  Synthetic oligonucleotide
atttcttcttcacctgaattggaattgcaaattgctgatgaggcactaagact

SEQ ID NO: 29351 - DNA, 60 bp, Artificial
  Synthetic oligonucleotide
tttctatatatgggagatttctactcacagcagtaggagactgtgcctatctagggcctt

SEQ ID NO: 29352 - DNA, 60 bp, Artificial
  Synthetic oligonucleotide
ggtattcatattgccatacaaagttttcacatcaatagaattctgcggggcactgacagg

SEQ ID NO: 29353 - DNA, 60 bp, Artificial
  Synthetic oligonucleotide
catgagttcaatgccagaggcagaacaggccctattcaaggaagcattggaattcaaatc

SEQ ID NO: 29354 - DNA, 60 bp, Artificial
  Synthetic oligonucleotide
atgacaatataattgaattttgcattaagatattcgagaagatatgcttaacttttggca

SEQ ID NO: 29355 - DNA, 60 bp, Artificial
  Synthetic oligonucleotide
aagctctgaacgtgacatgtcaaatgacataaatcaggaaaaaccaagcatgcattttat

SEQ ID NO: 29356 - DNA, 60 bp, Artificial
  Synthetic oligonucleotide
ggacatgctcattctatatttctgacaacaggggactaccccaagccagacaaagaccaa

SEQ ID NO: 29357 - DNA, 60 bp, Artificial
  Synthetic oligonucleotide
gagaagcagcaatattattagaaggagaagcccttgtgaactcaatggtacattctgatg

SEQ ID NO: 29358 - DNA, 60 bp, Artificial
  Synthetic oligonucleotide
ctgttgctcaaccaatatcggaataggatattgcactgccgtgaacctgagatagcaaag

SEQ ID NO: 29359 - DNA, 60 bp, Artificial
  Synthetic oligonucleotide
ctgccgtgaacctgagatagcaaaggatatatggcgagatctattaaatgatcgacacaa

SEQ ID NO: 29360 - DNA, 60 bp, Artificial
  Synthetic oligonucleotide
ccatggattgaagaagacaccccagaattgcttactcatcctatatacaatgaattcatg

SEQ ID NO: 29361 - DNA, 60 bp, Artificial
  Synthetic oligonucleotide
ctgtgcctatctagggccttatgaagatttagcaagtaggctatctgcaacacaaactgc

SEQ ID NO: 29362 - DNA, 60 bp, Artificial
  Synthetic oligonucleotide
tttctcgggaattttgcagagctgcaaatcttgagtacagaaatgatgttcctgctgagg

SEQ ID NO: 29363 - DNA, 57 bp, Artificial
  Synthetic oligonucleotide
aaaagagcaaagggagtcattacctgagccatggtcagagatacctgctaagcgact

SEQ ID NO: 29364 - DNA, 60 bp, Artificial
  Synthetic oligonucleotide
ggtcagagatacctgctaagcgactgtcacttaatgttttaatttactcattgcaggaac

SEQ ID NO: 29365 - DNA, 60 bp, Artificial
  Synthetic oligonucleotide
gcaggaactgaatttagatacttcaagacataattttgtaagaagccgggtggaaaacgc

SEQ ID NO: 29366 - DNA, 60 bp, Artificial
  Synthetic oligonucleotide
ggtggaaaacgcaaataatttcaacagatctataacgacaatatctacttttaccagctc

SEQ ID NO: 29367 - DNA, 60 bp, Artificial
  Synthetic oligonucleotide
aggcattcaacttatgaggacttaaaacaatctatcccagattacacagattatatgtct

SEQ ID NO: 29368 - DNA, 60 bp, Artificial
  Synthetic oligonucleotide
cgaaatcaggtatattagcaatacaataaagacattagggaatgccatagagaacttgca

SEQ ID NO: 29369 - DNA, 60 bp, Artificial
  Synthetic oligonucleotide
atgcgaaaacaaagcaagaggacttaagatagaaataaatgctgatatgtccaaatggag

SEQ ID NO: 29370 - DNA, 60 bp, Artificial
  Synthetic oligonucleotide
gcggggcactgacaggtaacttgataaatgacaaattatggtacataacgcattatctga

SEQ ID NO: 29371 - DNA, 60 bp, Artificial
  Synthetic oligonucleotide
gccagaggtccgaagtctaaaactcatacattattcaccagcagttgttttgagagccta

SEQ ID NO: 29372 - DNA, 60 bp, Artificial
  Synthetic oligonucleotide
gccaggaattgaagaactagatacaattataggtcgcaaaacatttgttgagagttatgt

SEQ ID NO: 29373 - DNA, 60 bp, Artificial
  Synthetic oligonucleotide
gggacatagtcaagaaagaataggtcaatcagcatgcaaaatgccagaggtccgaagtct

SEQ ID NO: 29374 - DNA, 60 bp, Artificial
  Synthetic oligonucleotide
gaagaattcacatacaaagggatacctgtaaaacatttatactcaaaaataaagaactcc

SEQ ID NO: 29375 - DNA, 60 bp, Artificial
  Synthetic oligonucleotide
gttactggttacaaaaggcgaaacatttgaagaatttgttaatacgatattatttaggta

SEQ ID NO: 29376 - DNA, 60 bp, Artificial
  Synthetic oligonucleotide
gaataactggcaagtgtcaagagatatgaatactggaccaatagacttaatgataagcgg

SEQ ID NO: 29377 - DNA, 60 bp, Artificial
  Synthetic oligonucleotide
ccaatagacttaatgataagcggttactctagacagctgcggatcactggggaagatgac

SEQ ID NO: 29378 - DNA, 60 bp, Artificial
  Synthetic oligonucleotide
gatgtgcggaatactagaaagtgatttatcaacaattgcactaactggtttagaagcagg

SEQ ID NO: 29379 - DNA, 51 bp, Artificial
  Synthetic oligonucleotide
ggggagactagtgaaatgagatctcgatcacttttaacacctcgtaaattc

SEQ ID NO: 29380 - DNA, 60 bp, Artificial
  Synthetic oligonucleotide
ggacatgtctagggtatttaagtgcaatggcagtggagatgaccaaatggctttcgaatt

SEQ ID NO: 29381 - DNA, 60 bp, Artificial
  Synthetic oligonucleotide
ggtttagaagcagggaatgtcacgtttctaacaaatatagcaaggaagttatcatcccca

SEQ ID NO: 29382 - DNA, 60 bp, Artificial
  Synthetic oligonucleotide
gaccaaatggctttcgaatttctatcggacgaaattttggagcaagatgtagttgaagaa

SEQ ID NO: 29383 - DNA, 56 bp, Artificial
  Synthetic oligonucleotide
tagtgcttgatcccatcttatatcctgctgagaggaaaaggataatttatttcctc

SEQ ID NO: 29384 - DNA, 60 bp, Artificial
  Synthetic oligonucleotide
aagaaaggaaatggacttgtggacactttcacaaactcctactccttttgtgagagtgtt

SEQ ID NO: 29385 - DNA, 58 bp, Artificial
  Synthetic oligonucleotide
aaggaaatggacttgtggacactttcacaaactcctactccttttgtgagagtgttcc

SEQ ID NO: 29386 - DNA, 60 bp, Artificial
  Synthetic oligonucleotide
tctataccaaaaatgaataacactccagaaaactgctgccaactccacttgatgtgcagc

SEQ ID NO: 29387 - DNA, 60 bp, Artificial
  Synthetic oligonucleotide
ttttgtcttttatctgaactggtctattccgaaaatgaataacactccagaaaactgctg

SEQ ID NO: 29388 - DNA, 60 bp, Artificial
  Synthetic oligonucleotide
cactatctcttttactttctacctcagtgtacttatatatatgcaagtagcatatatata

SEQ ID NO: 29389 - DNA, 60 bp, Artificial
  Synthetic oligonucleotide
ccactatctctcttactttctacctcagtgtacttatatatatgcaagtagcatatatat

SEQ ID NO: 29390 - DNA, 60 bp, Artificial
  Synthetic oligonucleotide
gctgcgttcaactctgttggacagcttgcttgggctaaatctggattctctcctgctgcc

SEQ ID NO: 29391 - DNA, 60 bp, Artificial
  Synthetic oligonucleotide
ggctgctttcaattctgttggacagcttgcctgggctaaatctggattctctcctgctgc

SEQ ID NO: 29392 - DNA, 60 bp, Artificial
  Synthetic oligonucleotide
ctctcttctatctcctaatcttttattgattcaccggggtgttgtcttgacatcttgcgg

SEQ ID NO: 29393 - DNA, 60 bp, Artificial
  Synthetic oligonucleotide
aaatactctcttctatctcctaatcttttattgattcaccggggtgttgtcttgacatct

SEQ ID NO: 29394 - DNA, 60 bp, Artificial
  Synthetic oligonucleotide
gcttagctatgggaatgtactggatttgaaccatctggatattgatgagcccacaggaca

SEQ ID NO: 29395 - DNA, 60 bp, Artificial
  Synthetic oligonucleotide
gctatgggaatgtactggatttgaaccatctagacattgatgagccaacaggtcagactg

SEQ ID NO: 29396 - DNA, 60 bp, Artificial
  Synthetic oligonucleotide
gcttagctatgggaatgtactggatttgaaccatctggatatcgatgagcccacaggaca

SEQ ID NO: 29397 - DNA, 60 bp, Artificial
  Synthetic oligonucleotide
ccggaacccagtccattccactgcctgactacggtctcacgatccaccggatttcgggtt

SEQ ID NO: 29398 - DNA, 60 bp, Artificial
  Synthetic oligonucleotide
ggaatttaatgatgtcgctgctaacaccagcagtacttttgacccagaggcagcatacgc

SEQ ID NO: 29399 - DNA, 60 bp, Artificial
  Synthetic oligonucleotide
caggaatggcaatattgcaacaattagcttttgcacaggcactaaattatgaacaccgct

SEQ ID NO: 29400 - DNA, 60 bp, Artificial
  Synthetic oligonucleotide
gaggcaccatggggagctataaatgtccaatcaaccttcaaacctactgtgtccgctgcg

SEQ ID NO: 29401 - DNA, 60 bp, Artificial
  Synthetic oligonucleotide
ggcacaaaattcacaccaatgcatgattacaattcacacatacactgattgggttgggtg

SEQ ID NO: 29402 - DNA, 56 bp, Artificial
  Synthetic oligonucleotide
cactattattatcaggggaatcattgtatcagggtatgggtacatttatgggtggg

SEQ ID NO: 29403 - DNA, 56 bp, Artificial
  Synthetic oligonucleotide
cactattattatcaggggaatcattgtatcagggtatgggtacatttatgggtggt

SEQ ID NO: 29404 - DNA, 60 bp, Artificial
  Synthetic oligonucleotide
ggaattacagagggaaatcaatgcccatgagggccagttagtgatagccaggcaaaaggt

SEQ ID NO: 29405 - DNA, 60 bp, Artificial
  Synthetic oligonucleotide
gggatgacttaaagaagacagtaactccccagaattttaccccaggctgttaccgtacct

SEQ ID NO: 29406 - DNA, 60 bp, Artificial
  Synthetic oligonucleotide
caatgcccatattgctttacccattgtgaacctacagaagctgcatttcaagcccattac

SEQ ID NO: 29407 - DNA, 60 bp, Artificial
  Synthetic oligonucleotide
gaagctgcatttcaagcccattacaaagtatgccaagttacccatagatttagggatgac

SEQ ID NO: 29408 - DNA, 63 bp, Artificial
  Synthetic oligonucleotide
cctgcagttacccttgtcatattaacaattctaaagtttattgcaaacattttccacacaagc

SEQ ID NO: 29409 - DNA, 60 bp, Artificial
  Synthetic oligonucleotide
ggagaagatcatgaccttgcaggggaagagattgcctcttattccattgtaggacctgcc

SEQ ID NO: 29410 - DNA, 60 bp, Artificial
  Synthetic oligonucleotide
catgtcctcagtctcaatgcccatattgctttacccattgtgaacctacagaagctgcat

SEQ ID NO: 29411 - DNA, 60 bp, Artificial
  Synthetic oligonucleotide
gtgatattaacaaaaaccttagtaattggccagtgtatatatacaataactagcctgttt

SEQ ID NO: 29412 - DNA, 60 bp, Artificial
  Synthetic oligonucleotide
gcttcagatcatcagagcaacaagtcaactttgtttgtcaaagagttgatatggatatcg

SEQ ID NO: 29413 - DNA, 60 bp, Artificial
  Synthetic oligonucleotide
gccgttgaattgtgtgtccctggcttccatggctgggccacagcagcactgcttacaaca

SEQ ID NO: 29414 - DNA, 60 bp, Artificial
  Synthetic oligonucleotide
ccctggcttccatggctgggccacagcagcactgcttacaacattctgctttggttgggt

SEQ ID NO: 29415 - DNA, 60 bp, Artificial
  Synthetic oligonucleotide
gcagcactgcttacaacattctgctttggttgggtgctaatacctgcagttacccttgtc

SEQ ID NO: 29416 - DNA, 60 bp, Artificial
  Synthetic oligonucleotide
gagccttcaattacactaggaactttttctgttataaaccacctgaagttgtagttggct

SEQ ID NO: 29417 - DNA, 60 bp, Artificial
  Synthetic oligonucleotide
tttatgtacccaaaattatataaccatgccgcatgtttgctcatagcaatcatttgtggt

SEQ ID NO: 29418 - DNA, 60 bp, Artificial
  Synthetic oligonucleotide
gtcatgtctgggaatagactttgtaatctatcagaaacataagcacaacaatcaatcagc

SEQ ID NO: 29419 - DNA, 60 bp, Artificial
  Synthetic oligonucleotide
agtcagaaagtggtaagaaccctgcatatctcatgaaatcaaatattcccattctactga

SEQ ID NO: 29420 - DNA, 60 bp, Artificial
  Synthetic oligonucleotide
ctactatatatagtgctccagatagccaatgtattggtgatgaatgttttgcctagattg

SEQ ID NO: 29421 - DNA, 60 bp, Artificial
  Synthetic oligonucleotide
cagcacatcagcacattggaattcttctgtcttgtattgcttaccaccgttttgaataca

SEQ ID NO: 29422 - DNA, 60 bp, Artificial
  Synthetic oligonucleotide
caatcaggtaatccataccataaacagctgacatcacgatcaatcctggtgagccttcaa

SEQ ID NO: 29423 - DNA, 60 bp, Artificial
  Synthetic oligonucleotide
cctttcaatcctcgacccagcttttctaaagcttccagatcaatctctgtaatcttgttg

SEQ ID NO: 29424 - DNA, 60 bp, Artificial
  Synthetic oligonucleotide
cagtagttgtcttgaagtagccatatcttactttcataaatgtctccactgtcaatggat

SEQ ID NO: 29425 - DNA, 60 bp, Artificial
  Synthetic oligonucleotide
gcctcagaaggatctgcttgggctacatgtttgtatgtgtgctcaataaaatacagcatc

SEQ ID NO: 29426 - DNA, 60 bp, Artificial
  Synthetic oligonucleotide
ctctgcatcttttcaaacactgaaacaaggaaatctgtatttcctgcattggtcctagac

SEQ ID NO: 29427 - DNA, 60 bp, Artificial
  Synthetic oligonucleotide
ctgacatagtatccacagagactttccagtcatatatcatcagacatgctctttcacccg

SEQ ID NO: 29428 - DNA, 60 bp, Artificial
  Synthetic oligonucleotide
ctttcacccgatgtttctttgtagattgtatagttatcaggtgtcaagtgttggaagacc

SEQ ID NO: 29429 - DNA, 60 bp, Artificial
  Synthetic oligonucleotide
ccaaattgtctgttaagacagataaagcagttccgtatgagccatattctgtttgacctc

SEQ ID NO: 29430 - DNA, 60 bp, Artificial
  Synthetic oligonucleotide
atacactcacacatcaggtttatttctccggttgttaagatagggttcattataacagct

SEQ ID NO: 29431 - DNA, 60 bp, Artificial
  Synthetic oligonucleotide
acttctgatgatctgttcatgtactcgcccacttttgataaaagagagtttttgaatgct

SEQ ID NO: 29432 - DNA, 60 bp, Artificial
  Synthetic oligonucleotide
gcttgagtctctgcataaaaccgcctaaagcaatcagttcccaatccaataagctgtcct

SEQ ID NO: 29433 - DNA, 60 bp, Artificial
  Synthetic oligonucleotide
gttctgtagggtgaatttctgagttcctgaatcactctactcgtcgtagcagtaattgac

SEQ ID NO: 29434 - DNA, 60 bp, Artificial
  Synthetic oligonucleotide
gctgccaccatacgatttatggtgaatcagcttgggctgttcgatgaacgaagtcctgaa

SEQ ID NO: 29435 - DNA, 60 bp, Artificial
  Synthetic oligonucleotide
gcaacctggatactctttctggtactctcctgcatttatgttgaaagccgtttctatgct

SEQ ID NO: 29436 - DNA, 60 bp, Artificial
  Synthetic oligonucleotide
gggtcaaccttcatcatttcacagtgtgctttatacccctcaaacctgtcttttaagtgt

SEQ ID NO: 29437 - DNA, 60 bp, Artificial
  Synthetic oligonucleotide
tataacagctaatatgtacttgtatgtcaaatctgatgccgaccattttgattgatctgc

SEQ ID NO: 29438 - DNA, 60 bp, Artificial
  Synthetic oligonucleotide
ctatatttgatctgcaggcaccaacattgcttatgttcttcctataatagtcgaacagag

SEQ ID NO: 29439 - DNA, 60 bp, Artificial
  Synthetic oligonucleotide
agtatgtcccgaaacataatatcctctgacatcttgctcatctgtctttatataatggac

SEQ ID NO: 29440 - DNA, 61 bp, Artificial
  Synthetic oligonucleotide
ggtattcataaggcgaatgtaaatgaattgaaacatcttgatttgtcatagctaactgtcc

SEQ ID NO: 29441 - DNA, 60 bp, Artificial
  Synthetic oligonucleotide
cgagctctcatggatgcagaactgattgggcattaaatcagacctcatgttgaggaaagt

SEQ ID NO: 29442 - DNA, 60 bp, Artificial
  Synthetic oligonucleotide
gttccacgcaaaatctgaagatggtatgtactttatgctgcctttaaattttatcctctc

SEQ ID NO: 29443 - DNA, 60 bp, Artificial
  Synthetic oligonucleotide
ccccgtttcagctgttcttaatttgtattttgattgattgctcatcatgttccacgcaaa

SEQ ID NO: 29444 - DNA, 60 bp, Artificial
  Synthetic oligonucleotide
gaagttgtacatgtttctaaaccttctatggctaatttgtggatttgatcgacagaatct

SEQ ID NO: 29445 - DNA, 60 bp, Artificial
  Synthetic oligonucleotide
ccacctgacatgtcattttcttggtctatagtcaaaggttttatgttgttgctcaggttg

SEQ ID NO: 29446 - DNA, 60 bp, Artificial
  Synthetic oligonucleotide
acaatagtagttatgtcgttctcctcaccaggtaacattgagtatatgcttaatgactgg

SEQ ID NO: 29447 - DNA, 60 bp, Artificial
  Synthetic oligonucleotide
gcaggtacacttaagagggttgtaaggttatgcacatgggtatggagtgatttaggcatc

SEQ ID NO: 29448 - DNA, 60 bp, Artificial
  Synthetic oligonucleotide
aattacctttagtgaataatgacgcagggttagagcagtactcatcataaactgagttta

SEQ ID NO: 29449 - DNA, 60 bp, Artificial
  Synthetic oligonucleotide
gtgagaataaaataggaactttgctgggtgctttaaacaagctaagaagcctcacttgat

SEQ ID NO: 29450 - DNA, 60 bp, Artificial
  Synthetic oligonucleotide
ggagttaggatcaagaaatgttttagctttagatcttaatattctgtccagagccagttt

SEQ ID NO: 29451 - DNA, 58 bp, Artificial
  Synthetic oligonucleotide
ccagagtcaatgacacctttaccttcagggtaacttctctccacaatattcgacattg

SEQ ID NO: 29452 - DNA, 60 bp, Artificial
  Synthetic oligonucleotide
gctaccatctttgacgtccacaacatcttctagagctgcttttgaatgccctgtggtgtc

SEQ ID NO: 29453 - DNA, 60 bp, Artificial
  Synthetic oligonucleotide
gcttttcaaactcatttgataaggtatgtcagcttttgatatatcatactccccactagg

SEQ ID NO: 29454 - DNA, 60 bp, Artificial
  Synthetic oligonucleotide
caagttcccttgaagccaattcattgacacagggaatgtgtttgtttccaaattgtctgt

SEQ ID NO: 29455 - DNA, 60 bp, Artificial
  Synthetic oligonucleotide
gtcttcaatgttgatcctgttattgggcagacgatgtctaagtctgatatcccacctgac

SEQ ID NO: 29456 - DNA, 60 bp, Artificial
  Synthetic oligonucleotide
ccatccaccttatggtgaagtcatagtctttcattcttttcatagacttttcatagccca

SEQ ID NO: 29457 - DNA, 60 bp, Artificial
  Synthetic oligonucleotide
gcaatcaaatttagcacagaattactagtgtggcaggcttcacatgcctttataagttta

SEQ ID NO: 29458 - DNA, 60 bp, Artificial
  Synthetic oligonucleotide
tcatttcagctagttttaggttttgaccggtcacactgaatccatggttttctaaaacca

SEQ ID NO: 29459 - DNA, 60 bp, Artificial
  Synthetic oligonucleotide
ggaatgagataggagctttttttctttgtcagtctcatctgtctcgcgatttgatcataa

SEQ ID NO: 29460 - DNA, 60 bp, Artificial
  Synthetic oligonucleotide
cggcatcttgaacacttagtaatctattttctcttactggcttcattgcaaagtggcttc

SEQ ID NO: 29461 - DNA, 60 bp, Artificial
  Synthetic oligonucleotide
cttttccaagaattatacaattggcagctttgcgctcttttcttgttttagaatctgtac

SEQ ID NO: 29462 - DNA, 60 bp, Artificial
  Synthetic oligonucleotide
tactatttctgacactaatgtctggtttagaacttgcaactagactgcatcctattatga

SEQ ID NO: 29463 - DNA, 60 bp, Artificial
  Synthetic oligonucleotide
acagtgtaattcggagttgccagagatataaagttttccaaactgtcagatacacctaac

SEQ ID NO: 29464 - DNA, 56 bp, Artificial
  Synthetic oligonucleotide
ttcaggttagatatttctaagtcaattttgcttacagcattgaatatcatgctgct

SEQ ID NO: 29465 - DNA, 60 bp, Artificial
  Synthetic oligonucleotide
ggggacacatcaatgtaatagaagttggtgatgacctatcgctgcatactgaatcatatg

SEQ ID NO: 29466 - DNA, 60 bp, Artificial
  Synthetic oligonucleotide
ctgctggaactgacttcaccacctgcctagagactgagagtataaattggaactgcactg

SEQ ID NO: 29467 - DNA, 60 bp, Artificial
  Synthetic oligonucleotide
ctatagttgtacaagctgctggaactgacttcaccacctgcctagagactgagagtataa

SEQ ID NO: 29468 - DNA, 57 bp, Artificial
  Synthetic oligonucleotide
ccttaagtagccttttttgtatatatggatgtagatttcatttgatccttaactaat

SEQ ID NO: 29469 - DNA, 60 bp, Artificial
  Synthetic oligonucleotide
cactctaagagagttactgcacatggagacacaccacaattagatctgaaagctaggcca

SEQ ID NO: 29470 - DNA, 60 bp, Artificial
  Synthetic oligonucleotide
ttctaccagtcatatttacggagaactcaatcaatggggatacagttagaccaaaaaatc

SEQ ID NO: 29471 - DNA, 56 bp, Artificial
  Synthetic oligonucleotide
ttctaccagtcatatttacggagaactcaatcaatggggatacagttagaccaaaa

SEQ ID NO: 29472 - DNA, 59 bp, Artificial
  Synthetic oligonucleotide
aaaatcatcatactttacatgttgtcttggggaaaggaggcagttaatcacttccacct

SEQ ID NO: 29473 - DNA, 60 bp, Artificial
  Synthetic oligonucleotide
ccaaaaaatcatcatactttacatgttgtcttggggaaaggaggcagttaatcacttcca

SEQ ID NO: 29474 - DNA, 60 bp, Artificial
  Synthetic oligonucleotide
ccaccttggtgatgacatggatcctgagcttagacagctggcacagactctcattgatgc

SEQ ID NO: 29475 - DNA, 60 bp, Artificial
  Synthetic oligonucleotide
atcacttccaccttggtgatgacatggatcctgagcttagacagctggcacagactctca

SEQ ID NO: 29476 - DNA, 60 bp, Artificial
  Synthetic oligonucleotide
gcaaaggtcaaagagatctctaatcaggaacccctaaaactctaagaaggcagtaggatc

SEQ ID NO: 29477 - DNA, 60 bp, Artificial
  Synthetic oligonucleotide
cagactctcattgatgcaaaggtcaaagagatctctaatcaggaacccctaaaactctaa

SEQ ID NO: 29478 - DNA, 60 bp, Artificial
  Synthetic oligonucleotide
ctaagaaggcagtaggatcaatgattgtggtatgtgagggctttccgggcttgtgccaac

SEQ ID NO: 29479 - DNA, 60 bp, Artificial
  Synthetic oligonucleotide
aaaactctaagaaggcagtaggatcaatgattgtggtatgtgagggctttccgggcttgt

SEQ ID NO: 29480 - DNA, 60 bp, Artificial
  Synthetic oligonucleotide
gggcattctttgccatactccaggatatgagaaatacaatcatggcatctaaatctgttg

SEQ ID NO: 29481 - DNA, 60 bp, Artificial
  Synthetic oligonucleotide
tgcctactgcacaatctacaatgaaggcagatgagataacaccggggaggtttaggacaa

SEQ ID NO: 29482 - DNA, 60 bp, Artificial
  Synthetic oligonucleotide
caatctacaatgaaggcagatgagataacaccggggaggtttaggacaattgcatgtggc

SEQ ID NO: 29483 - DNA, 60 bp, Artificial
  Synthetic oligonucleotide
atttgaagaagtcaatggcatccgaaaacctaaacacttgtatgtgtcaatgcctactgc

SEQ ID NO: 29484 - DNA, 60 bp, Artificial
  Synthetic oligonucleotide
gtcaatggcatccgaaaacctaaacacttgtatgtgtcaatgcctactgcacaatctaca

SEQ ID NO: 29485 - DNA, 60 bp, Artificial
  Synthetic oligonucleotide
gttcagctacactattcaatgacattgcaacaccacattctgcatgggtttttgcatgtg

SEQ ID NO: 29486 - DNA, 52 bp, Artificial
  Synthetic oligonucleotide
gttcagctacactattcaatgacattgcaacaccacattctgcatgggtttt

SEQ ID NO: 29487 - DNA, 60 bp, Artificial
  Synthetic oligonucleotide
cccatttcttccaaaggctagggttcaatcagaggcattcatgtcaacgaatagggcata

SEQ ID NO: 29488 - DNA, 54 bp, Artificial
  Synthetic oligonucleotide
atagggcatattttctaaacaggcagaggcaagtggatgagtcgagaatacagg

SEQ ID NO: 29489 - DNA, 60 bp, Artificial
  Synthetic oligonucleotide
ccgggcttgtgccaacatttattcatctcagggctattctgcactaatcaatgggtggga

SEQ ID NO: 29490 - DNA, 60 bp, Artificial
  Synthetic oligonucleotide
atgggtgggattagtatctatgaatgtatgggtggtgggtaatgtcatactactgatggg

SEQ ID NO: 29491 - DNA, 60 bp, Artificial
  Synthetic oligonucleotide
ggtgggattagtatctatgaatgtatgggtggtgggtaatgtcatactactgatgggagg

SEQ ID NO: 29492 - DNA, 60 bp, Artificial
  Synthetic oligonucleotide
ggcattctttgccatactccaggatatgagaaatacaatcatggcatctaaatctgttgg

SEQ ID NO: 29493 - DNA, 60 bp, Artificial
  Synthetic oligonucleotide
ttgttcaactctattttaatcatttataactaataatcaggcatattagatgtaaatttc

SEQ ID NO: 29494 - DNA, 60 bp, Artificial
  Synthetic oligonucleotide
tgtaaatttcattctcagcttatgctttgcagcactaacactaacttacacatttctacc

SEQ ID NO: 29495 - DNA, 60 bp, Artificial
  Synthetic oligonucleotide
cagcttatgctttgcagcactaacactaacttacacatttctacctcaaccacttaccct

SEQ ID NO: 29496 - DNA, 60 bp, Artificial
  Synthetic oligonucleotide
catttctacctcaaccacttaccctcccctttatactacctcatttattctacctcataa

SEQ ID NO: 29497 - DNA, 54 bp, Artificial
  Synthetic oligonucleotide
tactgatgggaggatttactgatacgggtaaagaatatcagggatttgtataac

SEQ ID NO: 29498 - DNA, 56 bp, Artificial
  Synthetic oligonucleotide
actgttaaagagaacaaagggaccaggattcgattcaaggatgattcatcatttga

SEQ ID NO: 29499 - DNA, 60 bp, Artificial
  Synthetic oligonucleotide
actgttaaagagaacaaagggaccaggattcgattcaaggatgattcatcatttgaagaa

SEQ ID NO: 29500 - DNA, 60 bp, Artificial
  Synthetic oligonucleotide
cctggatgtcaatgctattgaccttgaagaaccgagtggccaaactgccgattggaaggc

SEQ ID NO: 29501 - DNA, 60 bp, Artificial
  Synthetic oligonucleotide
tatggaaatgtcctggatgtcaatgctattgaccttgaagaaccgagtggccaaactgcc

SEQ ID NO: 29502 - DNA, 60 bp, Artificial
  Synthetic oligonucleotide
aggcattatatatgctttcaacaagagggaggcagactgttaaagagaacaaagggacca

SEQ ID NO: 29503 - DNA, 60 bp, Artificial
  Synthetic oligonucleotide
taccaattatcctaaaggcattatatatgctttcaacaagagggaggcagactgttaaag

SEQ ID NO: 29504 - DNA, 60 bp, Artificial
  Synthetic oligonucleotide
cgattggaaggctattggagcctatattctaggatttgtaataccaattatcctaaaggc

SEQ ID NO: 29505 - DNA, 60 bp, Artificial
  Synthetic oligonucleotide
ccaaactgccgattggaaggctattggagcctatattctaggatttgtaataccaattat

SEQ ID NO: 29506 - DNA, 60 bp, Artificial
  Synthetic oligonucleotide
aatgatgtcgctgttaacaccagcagttcttttgacccagaggcagcatacgctaacttt

SEQ ID NO: 29507 - DNA, 60 bp, Artificial
  Synthetic oligonucleotide
gcagagttgcacacatggtgtgccaggagatctacaggtctaccacatcggaaatttact

SEQ ID NO: 29508 - DNA, 60 bp, Artificial
  Synthetic oligonucleotide
cctggcaacaggaacaatccaattggtaacaacgatcttaccatccacagaatttcaggc

SEQ ID NO: 29509 - DNA, 60 bp, Artificial
  Synthetic oligonucleotide
gtatgcaggggataggccgtccatggttgtcccagtgacaggaagccactcactcaagac

SEQ ID NO: 29510 - DNA, 60 bp, Artificial
  Synthetic oligonucleotide
gtatgcaggggataggccatccatggtggtcccagtgacaggaagccactcactcaagac

SEQ ID NO: 29511 - DNA, 60 bp, Artificial
  Synthetic oligonucleotide
aggttgtcttggatgcatgcgactcaagctgtgaagtaatgatacctaaaggcacaggtg

SEQ ID NO: 29512 - DNA, 56 bp, Artificial
  Synthetic oligonucleotide
atagaaggaatacctggttgatatgggagatttggttttctatgatgtcgcatcca

SEQ ID NO: 29513 - DNA, 60 bp, Artificial
  Synthetic oligonucleotide
gacctcacaagtttctctagaaaggggctgccaaatgtcctgaaggctcttagctggcca

SEQ ID NO: 29514 - DNA, 60 bp, Artificial
  Synthetic oligonucleotide
ggggttctggggtggagggtggctaggtgggggggtggcaagggtggattcggtttgggt

SEQ ID NO: 29515 - DNA, 60 bp, Artificial
  Synthetic oligonucleotide
atctctctaaatagatcgtatccattgtaatgctcatcactaagacccaacctcctagct

SEQ ID NO: 29516 - DNA, 60 bp, Artificial
  Synthetic oligonucleotide
ccctccaccccagaacccccaacccagaatccccatcccaccccacactagcagcagctt

SEQ ID NO: 29517 - DNA, 60 bp, Artificial
  Synthetic oligonucleotide
tagtagagggcagaccaggcaggaatggaattaccctgtcaagggtggctgcagccctgg

SEQ ID NO: 29518 - DNA, 60 bp, Artificial
  Synthetic oligonucleotide
taccagtcccagggagcacaatggaccgcatgtgtggacaaacataccccaggcagatga

SEQ ID NO: 29519 - DNA, 60 bp, Artificial
  Synthetic oligonucleotide
gggtccaaagagaattgccatactcggtgaggccagtagaagggtcacttgctctatagg

SEQ ID NO: 29520 - DNA, 60 bp, Artificial
  Synthetic oligonucleotide
atgaccccaacccaaaccgaatccacccttgccacccccccacctagccaccctccaccc

SEQ ID NO: 29521 - DNA, 60 bp, Artificial
  Synthetic oligonucleotide
gggctgggcagcggagatcaaaagtcagagtcagacgagctctcatcattttcatccaca

SEQ ID NO: 29522 - DNA, 60 bp, Artificial
  Synthetic oligonucleotide
tgccagaacaattatacacaaccttgtgcagcttggagggaagagttgggaagaggatgc

SEQ ID NO: 29523 - DNA, 60 bp, Artificial
  Synthetic oligonucleotide
cccttggagagttgccagcttcttggggcccagcatgctattttagttctgtcaagccta

SEQ ID NO: 29524 - DNA, 60 bp, Artificial
  Synthetic oligonucleotide
aggcaacataagacacactggagaggagtctatgacacctcacatcaatgttaattgccg

SEQ ID NO: 29525 - DNA, 60 bp, Artificial
  Synthetic oligonucleotide
tccttgatacgcaaatgcttgtagccaatcctggatcacagtctcatcaatagcctgctc

SEQ ID NO: 29526 - DNA, 60 bp, Artificial
  Synthetic oligonucleotide
ccttcgatatggaaatgtccttgatgtgaatgccattgacatcgatgagccaagtggaca

SEQ ID NO: 29527 - DNA, 60 bp, Artificial
  Synthetic oligonucleotide
cctgcgatatggaaatgtccttgatgtgaatgccattgatatagaagagccgagtggcca

SEQ ID NO: 29528 - DNA, 60 bp, Artificial
  Synthetic oligonucleotide
aatggcagatgctgtgtcccggaaaaaaatggatactaagcctactgacccgactgggat

SEQ ID NO: 29529 - DNA, 56 bp, Artificial
  Synthetic oligonucleotide
ttctatcaatcttacctaagaaggacacaatctatggggattcaactggaccaaaa

SEQ ID NO: 29530 - DNA, 60 bp, Artificial
  Synthetic oligonucleotide
ttttatcaatcttacctaagaaggacacaatctatggggattcaactggaccagaaaatc

SEQ ID NO: 29531 - DNA, 60 bp, Artificial
  Synthetic oligonucleotide
ttctatcaatcttacctaagaaggacacaatctatggggattcaactggaccaaaaaatc

SEQ ID NO: 29532 - DNA, 60 bp, Artificial
  Synthetic oligonucleotide
aacatctcaacttttctgttgctagagtcttcttcctcaaccagaagaaagccaagatgg

SEQ ID NO: 29533 - DNA, 60 bp, Artificial
  Synthetic oligonucleotide
ggtcttacgccagagatatggtcagctcacagcggaagaatggatgacaactaaggttga

SEQ ID NO: 29534 - DNA, 60 bp, Artificial
  Synthetic oligonucleotide
gcaacatctcaacttttctgttgctagagtcttcttcctcaaccagaagaaagccaagat

SEQ ID NO: 29535 - DNA, 60 bp, Artificial
  Synthetic oligonucleotide
ttcatgagaaaggtcttacgccagagatatggtcagctcacagcggaagaatggatgaca

SEQ ID NO: 29536 - DNA, 60 bp, Artificial
  Synthetic oligonucleotide
gggtttcgctcctggggcagaaatgttcctagagacctttgagttctacccacttgtcat

SEQ ID NO: 29537 - DNA, 60 bp, Artificial
  Synthetic oligonucleotide
caagggctgcacatggaatgatggttataccatgtatctgggtttcgctcctggggcaga

SEQ ID NO: 29538 - DNA, 60 bp, Artificial
  Synthetic oligonucleotide
tgcatcgcgtcttaaaagacggaatggatgtgaacttcatgagaaaggtcttacgccaga

SEQ ID NO: 29539 - DNA, 60 bp, Artificial
  Synthetic oligonucleotide
cacttgtcatagacatgcatcgcgtcttaaaagacggaatggatgtgaacttcatgagaa

SEQ ID NO: 29540 - DNA, 60 bp, Artificial
  Synthetic oligonucleotide
agggcaaccagattaagctagctgaggcagctgcgactattgttatgccactggctgaga

SEQ ID NO: 29541 - DNA, 60 bp, Artificial
  Synthetic oligonucleotide
taaccattttccccagtacactgcaaatacagtgtcagacactgcctttaccctccaccg

SEQ ID NO: 29542 - DNA, 60 bp, Artificial
  Synthetic oligonucleotide
ctggctgagatcaagggctgcacatggaatgatggttataccatgtatctgggtttcgct

SEQ ID NO: 29543 - DNA, 60 bp, Artificial
  Synthetic oligonucleotide
agctagctgaggcagctgcgactattgttatgccactggctgagatcaagggctgcacat

SEQ ID NO: 29544 - DNA, 60 bp, Artificial
  Synthetic oligonucleotide
gattctcccctgcagcacgtgctttccttactcagtttggcatccagatctaggcacctc

SEQ ID NO: 29545 - DNA, 60 bp, Artificial
  Synthetic oligonucleotide
cccctgcagcacgtgctttccttactcagtttggcatccagatctaggcacctcttccag

SEQ ID NO: 29546 - DNA, 60 bp, Artificial
  Synthetic oligonucleotide
taggcacctcttccagtcttttcctaattttccctcttagtgtaccatgtctatgtgata

SEQ ID NO: 29547 - DNA, 60 bp, Artificial
  Synthetic oligonucleotide
cctcttccagtcttttcctaattttccctcttagtgtaccatgtctatgtgatacacgcc

SEQ ID NO: 29548 - DNA, 60 bp, Artificial
  Synthetic oligonucleotide
ctatgtgatacacgccatttcagcagtattgattattcattcatagttaaatagtggagt

SEQ ID NO: 29549 - DNA, 60 bp, Artificial
  Synthetic oligonucleotide
gtgatacacgccatttcagcagtattgattattcattcatagttaaatagtggagtacac

SEQ ID NO: 29550 - DNA, 60 bp, Artificial
  Synthetic oligonucleotide
aagggatgtacctgggctgatggttatacaatgtatcttggatttgcacctggggccgaa

SEQ ID NO: 29551 - DNA, 60 bp, Artificial
  Synthetic oligonucleotide
cctcttgccgaggttaagggatgtacctgggctgatggttatacaatgtatcttggattt

SEQ ID NO: 29552 - DNA, 60 bp, Artificial
  Synthetic oligonucleotide
ccccttgctgaggttaagggatgtacctgggctgatggttatacaatgtatcttggattt

SEQ ID NO: 29553 - DNA, 50 bp, Artificial
  Synthetic oligonucleotide
ccactagttatcgaaatgcatagggtccttaaggacaatatggatgtcaa

SEQ ID NO: 29554 - DNA, 50 bp, Artificial
  Synthetic oligonucleotide
ccactggttatcgaaatgcatagggtccttaaggacaatatggatgtgaa

SEQ ID NO: 29555 - DNA, 50 bp, Artificial
  Synthetic oligonucleotide
ccactagttatcgaaatgcatagggtccttaaggacaatatggatgtgaa

SEQ ID NO: 29556 - DNA, 60 bp, Artificial
  Synthetic oligonucleotide
aactggtattgagcctgacgaccatcttaaggagaggtcaagcctccgatatggaaatgt

SEQ ID NO: 29557 - DNA, 60 bp, Artificial
  Synthetic oligonucleotide
ccgggaaaggtgggcatagtggctcttcattcaagtgttgccatggaacagattgctctc

SEQ ID NO: 29558 - DNA, 60 bp, Artificial
  Synthetic oligonucleotide
aaaaagtctatgatgatggtgcaccacaatgtggcatttcatgctggtttgttaagtctg

SEQ ID NO: 29559 - DNA, 60 bp, Artificial
  Synthetic oligonucleotide
ggtcattggtttgatgggagacttaatttaaagacatcttttcattgttatggtgcatgt

SEQ ID NO: 29560 - DNA, 60 bp, Artificial
  Synthetic oligonucleotide
gcaccacagtgtggcatttcatgctggtttgttaagtctggagagtggataacaggaatt

SEQ ID NO: 29561 - DNA, 60 bp, Artificial
  Synthetic oligonucleotide
actaatcattgaatcaatcatgtgggcagctagtgcatcagaaactgtcttggagccaag

SEQ ID NO: 29562 - DNA, 60 bp, Artificial
  Synthetic oligonucleotide
ggtcattggtttgatggaaggcttaacctaaagacatcttttcattgttatggtgcatgt

SEQ ID NO: 29563 - DNA, 60 bp, Artificial
  Synthetic oligonucleotide
gctcaatggtttgtgaagtgtgcaagtatgagtgtgaaacagggaaggagcttaaagccc

SEQ ID NO: 29564 - DNA, 60 bp, Artificial
  Synthetic oligonucleotide
cagtatgggtaaccctgctaatcattgaatcaatcatgtgggcagctagtgcatcagaaa

SEQ ID NO: 29565 - DNA, 60 bp, Artificial
  Synthetic oligonucleotide
tggtctgtgaagtgtgcaagtatgagtgtgaaacagggaaggagcttaaagcccataatt

SEQ ID NO: 29566 - DNA, 60 bp, Artificial
  Synthetic oligonucleotide
tggtttgtgaagtgtgcaagtatgagtgtgaaacagggaaagagcttaaagcccacaatt

SEQ ID NO: 29567 - DNA, 60 bp, Artificial
  Synthetic oligonucleotide
taatgcctggggtagcacattcaattgcaattgaattgtgtgtaccagggttccatggtt

SEQ ID NO: 29568 - DNA, 60 bp, Artificial
  Synthetic oligonucleotide
ggacattggtttgatgggaggcttaacttaaagacatcttttcattgttatggtgcatgt

SEQ ID NO: 29569 - DNA, 60 bp, Artificial
  Synthetic oligonucleotide
ctgattttagatctatggaagcacttgctagccttttaagagctcctcatggtgaggacc

SEQ ID NO: 29570 - DNA, 60 bp, Artificial
  Synthetic oligonucleotide
ctgattttagatctatggaggcacttgctagccttttaagagctcctcatggtgaagacc

SEQ ID NO: 29571 - DNA, 60 bp, Artificial
  Synthetic oligonucleotide
caaccactgattttagatctatggaagcacttgctagccttttaagagctcctcatggtg

SEQ ID NO: 29572 - DNA, 60 bp, Artificial
  Synthetic oligonucleotide
cggcaactgcaaataactgtaatgacactgacaataaggttcaagggtattatctttgta

SEQ ID NO: 29573 - DNA, 60 bp, Artificial
  Synthetic oligonucleotide
ggcagacaaagcccaagctgccaaggactcatttgagacaacatcaagtgaggttaactt

SEQ ID NO: 29574 - DNA, 60 bp, Artificial
  Synthetic oligonucleotide
tcagtgactagtttattttcaataatgcctggggtagcacattcaattgcaattgaatta

SEQ ID NO: 29575 - DNA, 60 bp, Artificial
  Synthetic oligonucleotide
tctcattgcggtccactgcttgggcagcaaactggatcgcaagctcttgatagttgtcca

SEQ ID NO: 29576 - DNA, 60 bp, Artificial
  Synthetic oligonucleotide
agttgcagagttgcacacatggtgtgccaggagatctacaggtctaccacatcggaaatt

SEQ ID NO: 29577 - DNA, 60 bp, Artificial
  Synthetic oligonucleotide
tgctgtcagcaagcacagtgtgtaaattgcagagttgcacacatggtgtgccaggagatc

SEQ ID NO: 29578 - DNA, 60 bp, Artificial
  Synthetic oligonucleotide
ggacaggagtcagctgggatctaggggtagaagatgcctctgaatccaaattacttaccg

SEQ ID NO: 29579 - DNA, 60 bp, Artificial
  Synthetic oligonucleotide
ggtgatgcaatgtacctggggtttgctgctggtgctgagatgttcctgcagacattcact

SEQ ID NO: 29580 - DNA, 60 bp, Artificial
  Synthetic oligonucleotide
ggtgacgcaatgtacctggggtttgctgctggtgctgagatgttcctgcagacattcact

SEQ ID NO: 29581 - DNA, 60 bp, Artificial
  Synthetic oligonucleotide
tgagatgaacaagtggtttgaggagttcaagaaaggaaatggacttgtggacaccttcac

SEQ ID NO: 29582 - DNA, 60 bp, Artificial
  Synthetic oligonucleotide
ggtgaacagcaaagatgagatgaacaagtggtttgaggagttcaagaaaggaaatggact

SEQ ID NO: 29583 - DNA, 60 bp, Artificial
  Synthetic oligonucleotide
agtgaacagcaaagatgagatgaacaagtggtttgaggagttcaagaaaggaaatggact

SEQ ID NO: 29584 - DNA, 58 bp, Artificial
  Synthetic oligonucleotide
ccagcacaatcatgcttcatttgtaaacctgctcaacattgaaactgactatacaaaa

SEQ ID NO: 29585 - DNA, 60 bp, Artificial
  Synthetic oligonucleotide
tcaacagaggtggcgatgaaaatccacgaggcccagtgagccgtgaacatgtggagtggt

SEQ ID NO: 29586 - DNA, 60 bp, Artificial
  Synthetic oligonucleotide
ctttcattggcatgctgttaatcaggaaatgtggaaaagcatgtttaatctccatgagca

SEQ ID NO: 29587 - DNA, 60 bp, Artificial
  Synthetic oligonucleotide
tcctggaacccagtccattccactgcctgactacggacttaccatacaccggttgtcagg

SEQ ID NO: 29588 - DNA, 60 bp, Artificial
  Synthetic oligonucleotide
agcctacggattacctcttgatgatgcaaagtctgtgaggcttgccataatgctaggagg

SEQ ID NO: 29589 - DNA, 60 bp, Artificial
  Synthetic oligonucleotide
ccactgcctgactacggacttaccatacaccggttgtcaggttacctgtcaagatgggca

SEQ ID NO: 29590 - DNA, 53 bp, Artificial
  Synthetic oligonucleotide
aaaaggagatcaatagccatgaaggccaactggtgatagccaggcagaaggtg

SEQ ID NO: 29591 - DNA, 60 bp, Artificial
  Synthetic oligonucleotide
aaaaggagatcaatagccatgaaggccaactggtgatagccaggcagaaggtgaaggatg

SEQ ID NO: 29592 - DNA, 52 bp, Artificial
  Synthetic oligonucleotide
aaaagagatcaatagccatgagggccaactggtgatagccaggcagaaggtg

SEQ ID NO: 29593 - DNA, 60 bp, Artificial
  Synthetic oligonucleotide
acgcgagattaaaactagtctcgcaaagagaagtgaatgggaggttacacttaaccttgg

SEQ ID NO: 29594 - DNA, 60 bp, Artificial
  Synthetic oligonucleotide
ccctttcaatgattatcagcaagcaataacagacatttgtcaattttctgagtatacacc

SEQ ID NO: 29595 - DNA, 60 bp, Artificial
  Synthetic oligonucleotide
ccccttcaatgattatcagcaagcaataacagacatttgtcaattttctgagtatacacc

SEQ ID NO: 29596 - DNA, 60 bp, Artificial
  Synthetic oligonucleotide
ccgccttaacctaaagacctcctttcattgttatggtgcatgtacaaaatacgaataccc

SEQ ID NO: 29597 - DNA, 60 bp, Artificial
  Synthetic oligonucleotide
ccaaatgtattctcccgtctttgagtatctgtcaggtgatagacaggtagaagagtggcc

SEQ ID NO: 29598 - DNA, 59 bp, Artificial
  Synthetic oligonucleotide
aatggagaaaggacataggtttccgtgtcaatgcaaacacagcggctctgagcaacaaa

SEQ ID NO: 29599 - DNA, 60 bp, Artificial
  Synthetic oligonucleotide
gtggcaagattcaagacagctacataacattctcaataccattaatgactggactatcgc

SEQ ID NO: 29600 - DNA, 60 bp, Artificial
  Synthetic oligonucleotide
aatcagctgtaaagctattgagtgaaagcaaccctggaacagccagctctatttcactca

SEQ ID NO: 29601 - DNA, 60 bp, Artificial
  Synthetic oligonucleotide
gtaaagctattgagtgaaagcaaccctggaacagccagctctatttcactcaagaaatat

SEQ ID NO: 29602 - DNA, 60 bp, Artificial
  Synthetic oligonucleotide
attgagtgaaagcaaccctggaacagccagctctatttcactcaagaaatatgatgaaca

SEQ ID NO: 29603 - DNA, 60 bp, Artificial
  Synthetic oligonucleotide
gagtgaaagcaaccctggaacagccagctctatttcactcaagaaatatgatgaacaggt

SEQ ID NO: 29604 - DNA, 60 bp, Artificial
  Synthetic oligonucleotide
aatcggctgtaaagctattgagtgaaagcaaccctggaacagccagctctatttcactca

SEQ ID NO: 29605 - DNA, 60 bp, Artificial
  Synthetic oligonucleotide
cctcaggtatggaaatgtccttgatgtgaatgcaattgatattgaggaaccgagtggcca

SEQ ID NO: 29606 - DNA, 60 bp, Artificial
  Synthetic oligonucleotide
ctggcaacaggaacagcccagttcctgacgatggtcttaccctccaccgcctcagtggat

SEQ ID NO: 29607 - DNA, 60 bp, Artificial
  Synthetic oligonucleotide
gacaagtgttgcactgtcatacctttgaacagagctatccgggctagatctcaagccttt

SEQ ID NO: 29608 - DNA, 60 bp, Artificial
  Synthetic oligonucleotide
gggaatgttgaagtctctagatcgtggtctcaatctgatgagaaagaagctttagcaaaa

SEQ ID NO: 29609 - DNA, 60 bp, Artificial
  Synthetic oligonucleotide
tgggaatgttgaagtctctagatcgtggtctcaatctgatgagaaagaagctttagcaaa

SEQ ID NO: 29610 - DNA, 60 bp, Artificial
  Synthetic oligonucleotide
gacaattgttgcactgtcatacctttgaatagagctatccgggctagatctcaagccttt

SEQ ID NO: 29611 - DNA, 60 bp, Artificial
  Synthetic oligonucleotide
atgatggtttcaaggattgtgatatgggtttgtcctaccataccagatcctacaggcaac

SEQ ID NO: 29612 - DNA, 60 bp, Artificial
  Synthetic oligonucleotide
aaaacaagtctaggatgatttgcttttatgcaaaaactgttgctgacaatagcaacgaaa

SEQ ID NO: 29613 - DNA, 60 bp, Artificial
  Synthetic oligonucleotide
tttgggaaggaatgaagatatcaaaatccatgaagctgaaattattgatacatgccatga

SEQ ID NO: 29614 - DNA, 60 bp, Artificial
  Synthetic oligonucleotide
cagttgcagcaaagaggacacacaaaagtgtgtaaatgcaaaacttgagcagcctcagag

SEQ ID NO: 29615 - DNA, 60 bp, Artificial
  Synthetic oligonucleotide
gcaagcactgtgtgtaaattgcagagctgcacgcatggtgtaccaggtgacttgcaagtg

SEQ ID NO: 29616 - DNA, 60 bp, Artificial
  Synthetic oligonucleotide
aaccaagaaacattcagcagaagctccctcctgaactggttacgctgcatccaagagtag

SEQ ID NO: 29617 - DNA, 60 bp, Artificial
  Synthetic oligonucleotide
ttgggtggtatcttcggcaacgttatcttgggcatcatcatgttccttgctccttttgcc

SEQ ID NO: 29618 - DNA, 60 bp, Artificial
  Synthetic oligonucleotide
agcacacgccacactgcaagagagctcctctcagtaacaggcacggaggcagaacagctc

SEQ ID NO: 29619 - DNA, 60 bp, Artificial
  Synthetic oligonucleotide
gagctcacggtacacgtgaagagtgatgatccggatgtagttgcagccagctcaagcctg

SEQ ID NO: 29620 - DNA, 60 bp, Artificial
  Synthetic oligonucleotide
gccatagtgtgtgttgaactcacaagccaggaaaggcaatgcagtcttatagaagcaggc

SEQ ID NO: 29621 - DNA, 60 bp, Artificial
  Synthetic oligonucleotide
cacatggagagacgccccagctagaccttaaagccagaccaaagtatggagcaggtgagg

SEQ ID NO: 29622 - DNA, 60 bp, Artificial
  Synthetic oligonucleotide
caggcacggaggcagaacagctcatcacacagacaattcacacgacaaaagaggccacaa

SEQ ID NO: 29623 - DNA, 52 bp, Artificial
  Synthetic oligonucleotide
ccccagccgaccgccagcaaccccgaccccacactggcaacaaccagccgct

SEQ ID NO: 29624 - DNA, 60 bp, Artificial
  Synthetic oligonucleotide
caccccaatccacatccccaacacccgagagttcaacaattcagactcaaattctgccaa

SEQ ID NO: 29625 - DNA, 60 bp, Artificial
  Synthetic oligonucleotide
tcgcccgccaccaccgcgccgcccgaaagatcagtcacaccctcacacactccaaccacc

SEQ ID NO: 29626 - DNA, 60 bp, Artificial
  Synthetic oligonucleotide
gaccccaagagccaagcacccatccaagccccaggagcagcccaagcaagcctgtagaga

SEQ ID NO: 29627 - DNA, 60 bp, Artificial
  Synthetic oligonucleotide
cacctcagccgtagagatggagaacttgccagcaggtacttgggagaaggaagaggacct

SEQ ID NO: 29628 - DNA, 60 bp, Artificial
  Synthetic oligonucleotide
ccctggtttgtcagaaagctcttgcaggtatcagaatcaacaggggtagcgctcaagaga

SEQ ID NO: 29629 - DNA, 60 bp, Artificial
  Synthetic oligonucleotide
gtgatgactatggcgggcccggagagaaaataaccatctgcaacggctctactattgtag

SEQ ID NO: 29630 - DNA, 60 bp, Artificial
  Synthetic oligonucleotide
ctttgtcgcctgtgcaatcagcacccattggtcaggaaagaacggtagtaacgtaccaag

SEQ ID NO: 29631 - DNA, 60 bp, Artificial
  Synthetic oligonucleotide
aggtgctcaccagtctcatttgagtgtttgtaaaaagaggaaaactggaagcaatgtcat

SEQ ID NO: 29632 - DNA, 60 bp, Artificial
  Synthetic oligonucleotide
agttgagataaatgtgcttcttccccaagttgcagtaaatctctcaagctgtcatgtcct

SEQ ID NO: 29633 - DNA, 60 bp, Artificial
  Synthetic oligonucleotide
caatgcattcatctaagatgcccattactccaggcccaaagtactccaatctcaagaaca

SEQ ID NO: 29634 - DNA, 60 bp, Artificial
  Synthetic oligonucleotide
gcagatggaatgataaagcttccccagataactcacgagggaacttttatacctggaact

SEQ ID NO: 29635 - DNA, 60 bp, Artificial
  Synthetic oligonucleotide
gcgtcataaagggaagagaggtcaggaaggggcagtcggctctcagacagtataagacag

SEQ ID NO: 29636 - DNA, 60 bp, Artificial
  Synthetic oligonucleotide
ggcgagagattggcagacaagaaaattgctgaactattctcaacgaagacacacattggc

SEQ ID NO: 29637 - DNA, 60 bp, Artificial
  Synthetic oligonucleotide
ttccactgtcttcgagtacttatcaggcgaccggcaagtagaggagtggcctaaagcaac

SEQ ID NO: 29638 - DNA, 60 bp, Artificial
  Synthetic oligonucleotide
tggctaatacagactagacttaacagggcgcaacagcagcaaaccccttccccgtcgcac

SEQ ID NO: 29639 - DNA, 60 bp, Artificial
  Synthetic oligonucleotide
gcgtttcacagtatgtgttctcttcctccacactgcagcgtatgtgacactgtttccatt

SEQ ID NO: 29640 - DNA, 60 bp, Artificial
  Synthetic oligonucleotide
gaaaagcctgttaaattcaacaagtttggaaacaagcctgtcaattgaagcaccctgggg

SEQ ID NO: 29641 - DNA, 60 bp, Artificial
  Synthetic oligonucleotide
cagagtcgattatgaaactggaagaaagaacaggaatcagttggaatctcggtgtggaag

SEQ ID NO: 29642 - DNA, 60 bp, Artificial
  Synthetic oligonucleotide
gtcttgggacggctgtgatcttgattactactgcaacatgggagactggccctcctgtac

SEQ ID NO: 29643 - DNA, 60 bp, Artificial
  Synthetic oligonucleotide
gcctccagccccgggtcgcccgccaccaccgcgccgcccgaaagatcagtcacaccctca

SEQ ID NO: 29644 - DNA, 60 bp, Artificial
  Synthetic oligonucleotide
aatcccacacagacatatcccatcagccaacatccatcaccgcagcctccagccccgggt

SEQ ID NO: 29645 - DNA, 60 bp, Artificial
  Synthetic oligonucleotide
ggaacacaggagcttccaatacaactatcagccctacaactaacaaatcccacacagaca

SEQ ID NO: 29646 - DNA, 60 bp, Artificial
  Synthetic oligonucleotide
cggcacgtcagtacgtaagtatcaactttgagggtgctagtggagtgttcagcagtcaac

SEQ ID NO: 29647 - DNA, 60 bp, Artificial
  Synthetic oligonucleotide
aaggcgtggccccattcaaggaactggaggtgcaaccccacgtggtgttggggagttgga

SEQ ID NO: 29648 - DNA, 60 bp, Artificial
  Synthetic oligonucleotide
ggatcaaacagtacagagagcttaagcctcagacctgcactatatgtgaagcaactcctg

SEQ ID NO: 29649 - DNA, 60 bp, Artificial
  Synthetic oligonucleotide
gggtctggtgatatcctggtagattgctctggaggacagcagcacttcctacaggacaac

SEQ ID NO: 29650 - DNA, 60 bp, Artificial
  Synthetic oligonucleotide
cacctcaccagggaagaagactccgagggtctgcttgagtggtgtacacggatcttggga

SEQ ID NO: 29651 - DNA, 60 bp, Artificial
  Synthetic oligonucleotide
caggaaagggttgtgaaattgacagtactccagtaaaatgtaagcaaggcttctgtttga

SEQ ID NO: 29652 - DNA, 60 bp, Artificial
  Synthetic oligonucleotide
gcacccacattagcaccaactcacaaaggagcaccaccaactgagccttttaagtcttac

SEQ ID NO: 29653 - DNA, 60 bp, Artificial
  Synthetic oligonucleotide
cactgcaagccaggcaacagacagtgtcagcattggaggataaactcgcagactacaaga

SEQ ID NO: 29654 - DNA, 60 bp, Artificial
  Synthetic oligonucleotide
ccctgctgtgctgacagctggcagaatcagtgaaatgggtgtctgctttggaacaatccc

SEQ ID NO: 29655 - DNA, 60 bp, Artificial
  Synthetic oligonucleotide
cttctccacttatgaacaggtttgcaaggtagccaaagtactttctgcttcacagattga

SEQ ID NO: 29656 - DNA, 60 bp, Artificial
  Synthetic oligonucleotide
gcttgagctgtacagggaatcaatacatcatctcaagcgcaacaggattgattacctcct

SEQ ID NO: 29657 - DNA, 60 bp, Artificial
  Synthetic oligonucleotide
ccagctattcttggattcagcatggtttccaagactagaaccaaaatctatgatggaacc

SEQ ID NO: 29658 - DNA, 60 bp, Artificial
  Synthetic oligonucleotide
cctgtcttggctctgtacttttcagcacacttgacaacactagctgtcagaagcaagtca

SEQ ID NO: 29659 - DNA, 60 bp, Artificial
  Synthetic oligonucleotide
aagcccagacccaatccttatcccatcccttaacccccctttacagcttacctgtcttgg

SEQ ID NO: 29660 - DNA, 60 bp, Artificial
  Synthetic oligonucleotide
ttcattgagttctactatgatgagttgatatatctgtctgaaactgacttaggcactgtc

SEQ ID NO: 29661 - DNA, 60 bp, Artificial
  Synthetic oligonucleotide
ataccaactttagagttcattgagttctactatgatgagttgatatatctgtctgaaact

SEQ ID NO: 29662 - DNA, 60 bp, Artificial
  Synthetic oligonucleotide
ttccagctattcttggattcagcatggtttccaagactagaaccaaaatctatgatggaa

SEQ ID NO: 29663 - DNA, 60 bp, Artificial
  Synthetic oligonucleotide
catcagaggcttccaagcaagcacggaaaaagagagataaggaagaaaagagactgacaa

SEQ ID NO: 29664 - DNA, 60 bp, Artificial
  Synthetic oligonucleotide
tgagaagtttatgaaagaagatattacatttagagaggacgccttatccactaaatgggg

SEQ ID NO: 29665 - DNA, 60 bp, Artificial
  Synthetic oligonucleotide
gctcagaaatatatgagaagtttatgaaagaagatattacatttagagaggacgccttat

SEQ ID NO: 29666 - DNA, 60 bp, Artificial
  Synthetic oligonucleotide
tatgatggaaccatgcttgagctgtacagggaatcaatacatcatctcaagcgcaacagg

SEQ ID NO: 29667 - DNA, 60 bp, Artificial
  Synthetic oligonucleotide
ccacccactattaacccaattcaagaccctaaccccaaacccaaccctaagcccagaccc

SEQ ID NO: 29668 - DNA, 60 bp, Artificial
  Synthetic oligonucleotide
acccacccactattaacccaattcaagaccctaaccccaaacccaaccctaagcccagac

SEQ ID NO: 29669 - DNA, 60 bp, Artificial
  Synthetic oligonucleotide
gactgacaaaatggctgccaaagtcccctgattacccacccctctgattacccacccact

SEQ ID NO: 29670 - DNA, 60 bp, Artificial
  Synthetic oligonucleotide
ctatgtcgaggccaatccggactcaaactatgatggagctcagtgtcttattgaaggaga

SEQ ID NO: 29671 - DNA, 60 bp, Artificial
  Synthetic oligonucleotide
gagaactaagccatccagcatgctagacagtagcttgttcaccatgacttgctcagaaat

SEQ ID NO: 29672 - DNA, 60 bp, Artificial
  Synthetic oligonucleotide
aagcatgaacaatccatgagcatcagcaatcatttctcctgtcttccttggaagctccag

SEQ ID NO: 29673 - DNA, 54 bp, Artificial
  Synthetic oligonucleotide
ctcctgtcttccttggaagctccagatcaactattcctgcaaagcttggatgca

SEQ ID NO: 29674 - DNA, 60 bp, Artificial
  Synthetic oligonucleotide
gtggcgatctcatttggctgtttggttctcagagacggatttatagtcttagagaactca

SEQ ID NO: 29675 - DNA, 60 bp, Artificial
  Synthetic oligonucleotide
agtcttagagaactcaagcatgaacaatccatgagcatcagcaatcatttctcctgtctt

SEQ ID NO: 29676 - DNA, 50 bp, Artificial
  Synthetic oligonucleotide
catggcagccatgttgggtttctcaaatgttgtggcgatctcatttggct

SEQ ID NO: 29677 - DNA, 60 bp, Artificial
  Synthetic oligonucleotide
cgaggccaatccggactcaaactatgatggagctcagtgtcttattgaaggagaatttcc

SEQ ID NO: 29678 - DNA, 60 bp, Artificial
  Synthetic oligonucleotide
aagcaagtcatcattgataatgcccacagacatgagaagctttttcttgtcttctctgga

SEQ ID NO: 29679 - DNA, 60 bp, Artificial
  Synthetic oligonucleotide
cttctctggagaagaatttcccagacatggcagccatgttgggtttctcaaatgttgtgg

SEQ ID NO: 29680 - DNA, 60 bp, Artificial
  Synthetic oligonucleotide
agactgacaaaatggctgccaaagtcccctgattacccacccctctgattacccacccac

SEQ ID NO: 29681 - DNA, 60 bp, Artificial
  Synthetic oligonucleotide
gtcaccccagcaatagcatccatggtggttccagtcacaggcaagtgatctgagagcact

SEQ ID NO: 29682 - DNA, 60 bp, Artificial
  Synthetic oligonucleotide
aatgttgtggcgatctcatttggctgtttggttctcagagacggatttatagtcttagag

SEQ ID NO: 29683 - DNA, 60 bp, Artificial
  Synthetic oligonucleotide
agactagcatgctacatagctcaccgccctatcgagttagctatcctaaagagaactaag

SEQ ID NO: 29684 - DNA, 60 bp, Artificial
  Synthetic oligonucleotide
catagctcaccgccctatcgagttagctatcctaaagagaactaagccatccagcatgct

SEQ ID NO: 29685 - DNA, 60 bp, Artificial
  Synthetic oligonucleotide
gtctgaaactgacttaggcactgtcaataagtatctgaaactgcttatcaaagcttctgg

SEQ ID NO: 29686 - DNA, 60 bp, Artificial
  Synthetic oligonucleotide
aagcttctggattgtacttttctagtgttgaggaccaaattgtggagattcacaggagga

SEQ ID NO: 29687 - DNA, 60 bp, Artificial
  Synthetic oligonucleotide
gtacttttctagtgttgaggaccaaattgtggagattcacaggaggaccctactagaagg

SEQ ID NO: 29688 - DNA, 60 bp, Artificial
  Synthetic oligonucleotide
cacaggaggaccctactagaaggaaagaagtatggattaaatcactatgatttgactgga

SEQ ID NO: 29689 - DNA, 60 bp, Artificial
  Synthetic oligonucleotide
tttgactggaaatgacataattgctgacatttgtgtggtccaggctgccagagttaccca

SEQ ID NO: 29690 - DNA, 60 bp, Artificial
  Synthetic oligonucleotide
cataattgctgacatttgtgtggtccaggctgccagagttacccactctatagtcaaggc

SEQ ID NO: 29691 - DNA, 60 bp, Artificial
  Synthetic oligonucleotide
gagttacccactctatagtcaaggccattccacgatgttagcatgatatgagactagcat

SEQ ID NO: 29692 - DNA, 60 bp, Artificial
  Synthetic oligonucleotide
cccactctatagtcaaggccattccacgatgttagcatgatatgagactagcatgctaca

SEQ ID NO: 29693 - DNA, 60 bp, Artificial
  Synthetic oligonucleotide
gagtgatagtgtcccttccaggattcccttctttaagttggtagactgagataagctggg

SEQ ID NO: 29694 - DNA, 60 bp, Artificial
  Synthetic oligonucleotide
cagagactcgtgagagagtgatagtgtcccttccaggattcccttctttaagttggtaga

SEQ ID NO: 29695 - DNA, 60 bp, Artificial
  Synthetic oligonucleotide
tcatcatcgcttctggcttgttccccctcactagattgagaacaatcatcatcttaacat

SEQ ID NO: 29696 - DNA, 60 bp, Artificial
  Synthetic oligonucleotide
caccccagcaatagcatccatggtggttccagtcacaggcaagtgatctgagagcactct

SEQ ID NO: 29697 - DNA, 56 bp, Artificial
  Synthetic oligonucleotide
aaaagtgctatcggcaagcacagtgtgtaagttgcagagttgcacacatggtgtgc

SEQ ID NO: 29698 - DNA, 54 bp, Artificial
  Synthetic oligonucleotide
aaaagtgttgtcggcaagcacagtgtgtaagttgcagagttgcacacatggtgt

SEQ ID NO: 29699 - DNA, 60 bp, Artificial
  Synthetic oligonucleotide
cattccagaatgcttacaacgtcaagggcaatgccaccagtgccaacatcatctaaaact

SEQ ID NO: 29700 - DNA, 53 bp, Artificial
  Synthetic oligonucleotide
tcagttgcccagatatcctgggctaaatctggcttctcacctgcagctagagc

SEQ ID NO: 29701 - DNA, 53 bp, Artificial
  Synthetic oligonucleotide
tcagttgcccaaatatcctgggccaaatctggcttctcacctgcagctagagc

SEQ ID NO: 29702 - DNA, 60 bp, Artificial
  Synthetic oligonucleotide
cagaggaatggatgacatctaagttggacgcagtcaaggctgcatttaactcagttgccc

SEQ ID NO: 29703 - DNA, 60 bp, Artificial
  Synthetic oligonucleotide
cagaggaatggatgacatctaagttggacgcagtcaaggctgcatttagctcagttgccc

SEQ ID NO: 29704 - DNA, 60 bp, Artificial
  Synthetic oligonucleotide
catctaagttggacgcagtcaaggctgcatttagctcagttgcccaaatatcctgggcca

SEQ ID NO: 29705 - DNA, 60 bp, Artificial
  Synthetic oligonucleotide
cagaagaatggatgacatctaagttggacgcagtcaaggctgcatttagctcagttgccc

SEQ ID NO: 29706 - DNA, 59 bp, Artificial
  Synthetic oligonucleotide
atctaagttggacgcagtcaaggctgcatttaactcagttgcccagatatcctgggcca

SEQ ID NO: 29707 - DNA, 60 bp, Artificial
  Synthetic oligonucleotide
catctaagttggacgcagtcaaggctgcatttagctcagttgcccagatatcctgggcca

SEQ ID NO: 29708 - DNA, 60 bp, Artificial
  Synthetic oligonucleotide
cccctggtgctgagatgtttctggaaacctttgagttttacccactggttatcgacatgc

SEQ ID NO: 29709 - DNA, 60 bp, Artificial
  Synthetic oligonucleotide
tgtcaacttcatgaggaaggtcttacgccagaggtatgggcagctgactgcagaagagtg

SEQ ID NO: 29710 - DNA, 60 bp, Artificial
  Synthetic oligonucleotide
agggtttgcccctggtgctgagatgtttctggaaacttttgagttttacccactggttat

SEQ ID NO: 29711 - DNA, 53 bp, Artificial
  Synthetic oligonucleotide
tcagttgcccagatatcctgggccaaatctggcttctcacctgcagctagagc

SEQ ID NO: 29712 - DNA, 60 bp, Artificial
  Synthetic oligonucleotide
cttctcttcatctctgatttaacatttctacctccgtacacttatatatatgcacgtagc

SEQ ID NO: 29713 - DNA, 60 bp, Artificial
  Synthetic oligonucleotide
gtagactccctaaagagctactagaacaacgatggcaactatggaggaattacagaggga

SEQ ID NO: 29714 - DNA, 60 bp, Artificial
  Synthetic oligonucleotide
ggagagggttgccaaatgttttgaaagctctcagctggccactaggtatccccgactgtg

SEQ ID NO: 29715 - DNA, 60 bp, Artificial
  Synthetic oligonucleotide
gtgctccctgggactggcaagaagttctcgaccacttctacggcttgaactgtccaccca

SEQ ID NO: 29716 - DNA, 60 bp, Artificial
  Synthetic oligonucleotide
ctggcatcaaacccttgatatgcaaatgcttgcagccaatcctggattacagcctcatca

SEQ ID NO: 29717 - DNA, 60 bp, Artificial
  Synthetic oligonucleotide
ttggaaaacatgagcaagaaaagcttgtgagcatccaacactgcattgaaatcctcctgg

SEQ ID NO: 29718 - DNA, 57 bp, Artificial
  Synthetic oligonucleotide
cctccctacaaccccaccccagacccaatcccagacccaacccacccttgctaccct

SEQ ID NO: 29719 - DNA, 60 bp, Artificial
  Synthetic oligonucleotide
gcttctgcaatcttcttcacaactgctgtggctcttgctccagaagttaggatcccaaat

SEQ ID NO: 29720 - DNA, 60 bp, Artificial
  Synthetic oligonucleotide
cctggatgagtgcatagttcaggcacataagaagatactgcaagaagctagaaggttggg

SEQ ID NO: 29721 - DNA, 60 bp, Artificial
  Synthetic oligonucleotide
aattggtaacaacgatcttaccatccacagattatctgggtatttagccagatgggtcct

SEQ ID NO: 29722 - DNA, 60 bp, Artificial
  Synthetic oligonucleotide
gttgggttgggtgggccatttatccgttatataatctcagggtggtttaggatgtcacct

SEQ ID NO: 29723 - DNA, 60 bp, Artificial
  Synthetic oligonucleotide
agggtggtttaggatgtcaccttaagtgacttttttctgtatatatggatgtagatttca

SEQ ID NO: 29724 - DNA, 60 bp, Artificial
  Synthetic oligonucleotide
tggtttaggatgtcaccttaagtgacttttttctgtatatatggatgtagatttcatttg

SEQ ID NO: 29725 - DNA, 60 bp, Artificial
  Synthetic oligonucleotide
tttctatgccaactgcccagtctacaatgaaagcagatgagattactcccgggaggttcc

SEQ ID NO: 29726 - DNA, 60 bp, Artificial
  Synthetic oligonucleotide
ctactaggggccgtcaaacaatcaaagaaaacaagggaacaagaattcgattcaaggatg

SEQ ID NO: 29727 - DNA, 60 bp, Artificial
  Synthetic oligonucleotide
cctggctgcacgttgcccatttctgcctgagcagaaagaccctagagatgctgcattggc

SEQ ID NO: 29728 - DNA, 60 bp, Artificial
  Synthetic oligonucleotide
ttaagtggggcagtaatcaacttatattcagggcattattataaccagggtaatgggcac

SEQ ID NO: 29729 - DNA, 60 bp, Artificial
  Synthetic oligonucleotide
gagccaagtgggcaaacagctgattggaaatccatcggactctacattctaagtttcgca

SEQ ID NO: 29730 - DNA, 60 bp, Artificial
  Synthetic oligonucleotide
gtttgggtctttgcatgtgctccagatcgttgtccacctacagcattatatgtggccggg

SEQ ID NO: 29731 - DNA, 60 bp, Artificial
  Synthetic oligonucleotide
ctggaccagaagataatcatcttatacatgagccattggggaagagaggccgtgaatcac

SEQ ID NO: 29732 - DNA, 66 bp, Artificial
  Synthetic oligonucleotide
cagggtttataaaattttctcaggtctatccctatattggaagattgttctattaaccgttcaaac

SEQ ID NO: 29733 - DNA, 60 bp, Artificial
  Synthetic oligonucleotide
gccatggtcttcttctgatgaaaagcttgctttgacgaaagctatggatacatccaaagg

SEQ ID NO: 29734 - DNA, 60 bp, Artificial
  Synthetic oligonucleotide
ccgcaggcaccttgggtatttgcatgtgcacctgataggtgccctcctacatgcatttac

SEQ ID NO: 29735 - DNA, 60 bp, Artificial
  Synthetic oligonucleotide
ccaacgatatgaattcgatgggttgggcgcaaattcacaaatgcatgatttaaattcaca

SEQ ID NO: 29736 - DNA, 60 bp, Artificial
  Synthetic oligonucleotide
gatggagtggggttctgatattgtcaaccactttcatctgggtgatgatatggaccctga

SEQ ID NO: 29737 - DNA, 60 bp, Artificial
  Synthetic oligonucleotide
tcatgatggaatggggttctgatattgtcaaccactttcatctgggtgatgatatggacc

SEQ ID NO: 29738 - DNA, 60 bp, Artificial
  Synthetic oligonucleotide
tattttgctgttcatgatggaatggggttctgatattgtcaaccactttcatctgggtga

SEQ ID NO: 29739 - DNA, 60 bp, Artificial
  Synthetic oligonucleotide
cagattccatcaagtctccgcaggcaccttgggtatttgcatgtgcacctgataggtgcc

SEQ ID NO: 29740 - DNA, 60 bp, Artificial
  Synthetic oligonucleotide
gcactacagcttgtcaatgaccactcaggtattctgctgctctgtatgtttaatgttagt

SEQ ID NO: 29741 - DNA, 60 bp, Artificial
  Synthetic oligonucleotide
tgaaccggatgatcaccttaaggagaggtcaagtctcagatatgggaatgtccttgatgt

SEQ ID NO: 29742 - DNA, 60 bp, Artificial
  Synthetic oligonucleotide
gaaccggatgatcaccttaaggagaggtcaagtctcagatatgggaatgtccttgatgtg

SEQ ID NO: 29743 - DNA, 60 bp, Artificial
  Synthetic oligonucleotide
gtctccgcaggcaccttgggtatttgcatgtgcacctgataggtgccctcctacatgcat

SEQ ID NO: 29744 - DNA, 60 bp, Artificial
  Synthetic oligonucleotide
ctccgcaggcaccttgggtatttgcatgtgcacctgataggtgccctcctacatgcattt

SEQ ID NO: 29745 - DNA, 51 bp, Artificial
  Synthetic oligonucleotide
tatgaattcgatgggttgggcacaaattcacaaatgcatgatttaaattca

SEQ ID NO: 29746 - DNA, 60 bp, Artificial
  Synthetic oligonucleotide
ttgattattgcactacagcttgtcaatgaccactcaggtattctgctgctctgtatgttt

SEQ ID NO: 29747 - DNA, 60 bp, Artificial
  Synthetic oligonucleotide
ctgtctctgtcatggacttgtctcagatgtactcccctgtcttcgagtacttatcgggtg

SEQ ID NO: 29748 - DNA, 60 bp, Artificial
  Synthetic oligonucleotide
actaggggacgggttgggtgggccatttatcaatcatataatctcagggtggtttaggat

SEQ ID NO: 29749 - DNA, 60 bp, Artificial
  Synthetic oligonucleotide
gtgtttgcactaggggacgggttgggtgggccatttatcaattatataatctcagggtgg

SEQ ID NO: 29750 - DNA, 60 bp, Artificial
  Synthetic oligonucleotide
tttgcactaggggacgggttgggtgggccatttatcaattatataatctcagggtggttt

SEQ ID NO: 29751 - DNA, 60 bp, Artificial
  Synthetic oligonucleotide
gttgccacgagtcagagccagaacaatcattttcttggcatccttctcccagtcagcccc

SEQ ID NO: 29752 - DNA, 60 bp, Artificial
  Synthetic oligonucleotide
tcccagtgacaggaagccactcactcaagacgaccaaagcctggcatgtccagccagcca

SEQ ID NO: 29753 - DNA, 60 bp, Artificial
  Synthetic oligonucleotide
caggggataggccgtccatggtagtcccagtgacaggaagccactcactcaagacgacca

SEQ ID NO: 29754 - DNA, 60 bp, Artificial
  Synthetic oligonucleotide
gtatgcaggggataggccgtccatggtagtcccagtgacaggaagccactcactcaagac

SEQ ID NO: 29755 - DNA, 60 bp, Artificial
  Synthetic oligonucleotide
ggtagtcccagtgacaggaagccactcactcaagacgaccaaagcctggcatgtccagcc

SEQ ID NO: 29756 - DNA, 60 bp, Artificial
  Synthetic oligonucleotide
ggttgtcccagtgacaggaagccactcactcaagacgaccaaagcctggcatgtccagcc

SEQ ID NO: 29757 - DNA, 60 bp, Artificial
  Synthetic oligonucleotide
cacgagttagagccaggacaatcattttcttggcatccttctcccagtcagccccaccat

SEQ ID NO: 29758 - DNA, 60 bp, Artificial
  Synthetic oligonucleotide
gttagagccagaacaatcattttcttggcatccttctcccagtcagccccaccatactgc

SEQ ID NO: 29759 - DNA, 53 bp, Artificial
  Synthetic oligonucleotide
ccaggacaatcattttcttggcatccttctcccagtcagccccaccatactgc

SEQ ID NO: 29760 - DNA, 60 bp, Artificial
  Synthetic oligonucleotide
tctcggacccactgttcaatctcattgcggtccactgcttgagcagcaaactggatcgca

SEQ ID NO: 29761 - DNA, 60 bp, Artificial
  Synthetic oligonucleotide
gttgccacgagttagagccagaacaatcattttcttggcatccttctcccagtcagcccc

SEQ ID NO: 29762 - DNA, 60 bp, Artificial
  Synthetic oligonucleotide
gttgccacgagttagagccagaacgatcattttcttggcatccttctcccagtcagcccc

SEQ ID NO: 29763 - DNA, 60 bp, Artificial
  Synthetic oligonucleotide
attgccacgagttagagccagaacaatcattttcttggcatccttctcccagtcagcccc

SEQ ID NO: 29764 - DNA, 60 bp, Artificial
  Synthetic oligonucleotide
cacgagttagagccagaacaatcattttcttggcatccttctcccagtcagccccaccat

SEQ ID NO: 29765 - DNA, 60 bp, Artificial
  Synthetic oligonucleotide
aatctcattgcggtccactgcttgagcagcaaactggatcgcaagctcttgatagttgtc

SEQ ID NO: 29766 - DNA, 60 bp, Artificial
  Synthetic oligonucleotide
tttcattgcggtccactgcttgagcagcaaactggatcgcaagctcttgatagttgtcca

SEQ ID NO: 29767 - DNA, 60 bp, Artificial
  Synthetic oligonucleotide
tctcattgcggtccactgcttgagcagcaaactggatcgcaagctcttgatagttgtcca

SEQ ID NO: 29768 - DNA, 60 bp, Artificial
  Synthetic oligonucleotide
cggacccactgttcaatctcattgcggtccactgcttgagcagcaaactggatcgcaagc

SEQ ID NO: 29769 - DNA, 60 bp, Artificial
  Synthetic oligonucleotide
aatttcattgcggtccactgcttgagcagcaaactggatcgcaagctcttgatagttgtc

SEQ ID NO: 29770 - DNA, 60 bp, Artificial
  Synthetic oligonucleotide
ctcattgcggtccactgcttgagcagcaaactggatcgcaagctcttgatagttgtccat

SEQ ID NO: 29771 - DNA, 60 bp, Artificial
  Synthetic oligonucleotide
tcgctatactgactcggttcgaagacgtcgagaagctggattgggcaaagacagccttca

SEQ ID NO: 29772 - DNA, 60 bp, Artificial
  Synthetic oligonucleotide
tcgctatactaactcggttcgaagacgtcgagaagctggattgggcaaagacagccttca

SEQ ID NO: 29773 - DNA, 60 bp, Artificial
  Synthetic oligonucleotide
tcgctatcctgactcggttcgaagacgtcgagaagctggattgggcaaagacagccttca

SEQ ID NO: 29774 - DNA, 60 bp, Artificial
  Synthetic oligonucleotide
tcgcaatcctgactcggttcgaagacgtcgagaagctggattgggcaaggacagccttca

SEQ ID NO: 29775 - DNA, 60 bp, Artificial
  Synthetic oligonucleotide
tcgctatcctcactcggttcgaagacgtcgagaagctggattgggcaaagacagccttca

SEQ ID NO: 29776 - DNA, 60 bp, Artificial
  Synthetic oligonucleotide
cgctatcctcactcggttcgaagacgtcgagaagctggattgggcaaagacagccttcac

SEQ ID NO: 29777 - DNA, 60 bp, Artificial
  Synthetic oligonucleotide
cgctatcctgactcggttcgaagacgtcgagaagctggattgggcaaagacagccttcac

SEQ ID NO: 29778 - DNA, 60 bp, Artificial
  Synthetic oligonucleotide
cgcaatcctgactcggttcgaagacgtcgagaagctggattgggcaaggacagccttcac

SEQ ID NO: 29779 - DNA, 60 bp, Artificial
  Synthetic oligonucleotide
ccagactcacttgaaaatccacatgcagcttgggtctttgcatgtgctcctgatcgatgt

SEQ ID NO: 29780 - DNA, 60 bp, Artificial
  Synthetic oligonucleotide
tagtagtattagggcctacctcatgaaccggcaggctgtcttggatgaaacacatctgcc

SEQ ID NO: 29781 - DNA, 60 bp, Artificial
  Synthetic oligonucleotide
tttatcagtcatacctacgaagaacacaatctatggggatccagctggaccaaaggatta

SEQ ID NO: 29782 - DNA, 60 bp, Artificial
  Synthetic oligonucleotide
gagcctgacgaccatcttaaggagaggtcaagcctccgatatggaaatgtccttgatgtg

SEQ ID NO: 29783 - DNA, 60 bp, Artificial
  Synthetic oligonucleotide
gagcttgacgaccatcttaaggagaggtcaagcctccaatatggaaatgtccttgatgtg

SEQ ID NO: 29784 - DNA, 60 bp, Artificial
  Synthetic oligonucleotide
aactggtattgagcttgacgaccatcttaaggagaggtcaagcctccgatatggaaatgt

SEQ ID NO: 29785 - DNA, 60 bp, Artificial
  Synthetic oligonucleotide
tgcaaagcagacggtcagcagtgtcaacattggaggacaagttggcagaattcaagaggc

SEQ ID NO: 29786 - DNA, 60 bp, Artificial
  Synthetic oligonucleotide
cagtagtattagggcctacctcatgaaccggcaagcagtcctagatgaaacacatctgcc

SEQ ID NO: 29787 - DNA, 60 bp, Artificial
  Synthetic oligonucleotide
aggggacaagaatcaggttcaaagatgatagttcctatgaggatgtgaatggcatcaggc

SEQ ID NO: 29788 - DNA, 60 bp, Artificial
  Synthetic oligonucleotide
ctgtgaaggaaaataaggggacaagaatcaggttcaaagatgatagttcctatgaggatg

SEQ ID NO: 29789 - DNA, 60 bp, Artificial
  Synthetic oligonucleotide
gagcttgacgaccatcttaaggagaggtcaagcctccgatatggaaatgtccttgatgtg

SEQ ID NO: 29790 - DNA, 60 bp, Artificial
  Synthetic oligonucleotide
gcattttatcagtcgtacctacgaagaacacaatctatggggatccagctagaccagagg

SEQ ID NO: 29791 - DNA, 60 bp, Artificial
  Synthetic oligonucleotide
tgcaaagcaggcggtcagcagtgtcaacattggaggacaaattggcagagttcaagaggc

SEQ ID NO: 29792 - DNA, 60 bp, Artificial
  Synthetic oligonucleotide
aagagatcactcgccatgagcagcagcttgtcattgcccggcagaagctcaaggaagctg

SEQ ID NO: 29793 - DNA, 60 bp, Artificial
  Synthetic oligonucleotide
gccatgagcagcagcttgtcattgcccggcagaagctcaaggatgctgaaaggacagtgg

SEQ ID NO: 29794 - DNA, 60 bp, Artificial
  Synthetic oligonucleotide
ggaagagatcactcgccatgagcagcagcttgtcattgcccggcagaagctcaaggaagc

SEQ ID NO: 29795 - DNA, 60 bp, Artificial
  Synthetic oligonucleotide
atgaggtcgttaaccacttccacctgggtgatgatatggatcccgagctaaggcagttag

SEQ ID NO: 29796 - DNA, 60 bp, Artificial
  Synthetic oligonucleotide
atgagcagcagcttgtcattgcccggcagaagctcaaggaagctgaacggacggtggagg

SEQ ID NO: 29797 - DNA, 60 bp, Artificial
  Synthetic oligonucleotide
aagagatcactcgccatgagcagcagcttgtcattgcccggcagaagctcaaggatgctg

SEQ ID NO: 29798 - DNA, 60 bp, Artificial
  Synthetic oligonucleotide
cagtcatacctacgaagaacacaatctatggggatccagctggaccaaaggattattctc

SEQ ID NO: 29799 - DNA, 60 bp, Artificial
  Synthetic oligonucleotide
ggaggaaagacataggtttccgtgtcaatgcaaacacggcagctttaagtaacaaagtcc

SEQ ID NO: 29800 - DNA, 60 bp, Artificial
  Synthetic oligonucleotide
aactagacatcagaaggcacaagctagaattgtgaggaagtttcagaggacagaagctga

SEQ ID NO: 29801 - DNA, 60 bp, Artificial
  Synthetic oligonucleotide
ctaaagttatgtattgaagtttggaggtgggcaaaagcaaataacgcaccatatagggac

SEQ ID NO: 29802 - DNA, 60 bp, Artificial
  Synthetic oligonucleotide
ggtatccttattagacccgtatgatttaactgagcttgagagtattgttaagggatgggg

SEQ ID NO: 29803 - DNA, 60 bp, Artificial
  Synthetic oligonucleotide
tatccttattagacccgtatgatttaactgagcttgagagtattgttaagggatggggtg

SEQ ID NO: 29804 - DNA, 60 bp, Artificial
  Synthetic oligonucleotide
gagagggataattaagcttttagaacctgtaaagttaataaagagctgggtttcaagggg

SEQ ID NO: 29805 - DNA, 60 bp, Artificial
  Synthetic oligonucleotide
ggtaagcaggtatccttattagacccgtatgatttaactgagcttgagagtattgttaag

SEQ ID NO: 29806 - DNA, 60 bp, Artificial
  Synthetic oligonucleotide
cgtgcaaaaatttctgtggacctttttatgtttaatgacttacttagactgataaaccca

SEQ ID NO: 29807 - DNA, 60 bp, Artificial
  Synthetic oligonucleotide
gatgcagtaagtaatgtgtggttcacacataagggaataaagctgtacctaaatccgatc

SEQ ID NO: 29808 - DNA, 60 bp, Artificial
  Synthetic oligonucleotide
attgtgtacagacttataatgaagagacaaagctttatgaaggggatctaagagtaacct

SEQ ID NO: 29809 - DNA, 60 bp, Artificial
  Synthetic oligonucleotide
gtgtacagacttataatgaagagacaaagctttatgaaggggatctaagagtaaccttta

SEQ ID NO: 29810 - DNA, 60 bp, Artificial
  Synthetic oligonucleotide
tcccttgaggttgcaggttcatttgtgcgatttatgactgcttttaaattaggtccagga

SEQ ID NO: 29811 - DNA, 60 bp, Artificial
  Synthetic oligonucleotide
ttgcattggtttaatgtaaatacagagatgtggaaaagcatgtttaacctgcatgagcat

SEQ ID NO: 29812 - DNA, 60 bp, Artificial
  Synthetic oligonucleotide
cccgtatgatttaactgagcttgagagtattgttaagggatggggtgagtctgttgtgga

SEQ ID NO: 29813 - DNA, 60 bp, Artificial
  Synthetic oligonucleotide
cagaagctgatcggggtttctttattacgacactaccaacaagatgtcgtcttgagatta

SEQ ID NO: 29814 - DNA, 60 bp, Artificial
  Synthetic oligonucleotide
gagaaaacttatgtatgtcagtgctgatgccaccaaatggtctccaggtgacaattcagc

SEQ ID NO: 29815 - DNA, 60 bp, Artificial
  Synthetic oligonucleotide
tcagacattgactagctgcacattttctaaggagtatgcatggaaagattttttgaataa

SEQ ID NO: 29816 - DNA, 60 bp, Artificial
  Synthetic oligonucleotide
gttgtataaaagtgcaaaatcacgggttgtcattgtccaggggaacgtggaaggaactgc

SEQ ID NO: 29817 - DNA, 60 bp, Artificial
  Synthetic oligonucleotide
aggtccaggactagttgataaagacaatttggattcaatacttgcagatggtgatatctt

SEQ ID NO: 29818 - DNA, 60 bp, Artificial
  Synthetic oligonucleotide
gcttgctatttgccaaaaaatgaaattatgtgcaatctttgacaacctaaggtatctgat

SEQ ID NO: 29819 - DNA, 60 bp, Artificial
  Synthetic oligonucleotide
gactgcttttaaattaggtcctgggctagttgataaagacaatttggattcaatacttgc

SEQ ID NO: 29820 - DNA, 60 bp, Artificial
  Synthetic oligonucleotide
acttagaagcccaaaatctagttcaaaagcagggtattgtacctgaggatgtgattccag

SEQ ID NO: 29821 - DNA, 60 bp, Artificial
  Synthetic oligonucleotide
cagaaggcacaagctaggattgtgaggaagtttcagaggacagaagctgatcggggtttc

SEQ ID NO: 29822 - DNA, 60 bp, Artificial
  Synthetic oligonucleotide
ggacagaagctgatcggggtttctttatcacgacactaccaacaagatgtcgtcttgaga

SEQ ID NO: 29823 - DNA, 60 bp, Artificial
  Synthetic oligonucleotide
aaggtttgcagactagatggggattgggtaacatttagagaggtacttgcagcagcaaac

SEQ ID NO: 29824 - DNA, 60 bp, Artificial
  Synthetic oligonucleotide
ttgcagactagatggggactgggtaacatttagagaggtacttgcagcagcaaacagttt

SEQ ID NO: 29825 - DNA, 60 bp, Artificial
  Synthetic oligonucleotide
aacaatatgatgcatattgtgtacagacttataatgaagagacaaagctttatgaagggg

SEQ ID NO: 29826 - DNA, 60 bp, Artificial
  Synthetic oligonucleotide
caggtcagtgttacaactccaagccaatagaagagcatattcagggaaacaatatgatgc

SEQ ID NO: 29827 - DNA, 60 bp, Artificial
  Synthetic oligonucleotide
gaagcccaaaatctagttcaaaagcagggtattgtacctgaggatgtgattccagattct

SEQ ID NO: 29828 - DNA, 60 bp, Artificial
  Synthetic oligonucleotide
gcccagaatctagttcaaaagcagggtattgtacctgaggatgtgattccagactcgttg

SEQ ID NO: 29829 - DNA, 60 bp, Artificial
  Synthetic oligonucleotide
gtcggcactaaagttatgtattgaagtttggaggtgggcaaaagcaaataatgcaccata

SEQ ID NO: 29830 - DNA, 60 bp, Artificial
  Synthetic oligonucleotide
gctagatagatttatcagagtaggtgtgcctcctattgatccagaaattcagtgtgcagc

SEQ ID NO: 29831 - DNA, 60 bp, Artificial
  Synthetic oligonucleotide
agagtgcaaaatcacgggttgtcattgtccaggggaatgtggaaggaactgcagaggcaa

SEQ ID NO: 29832 - DNA, 60 bp, Artificial
  Synthetic oligonucleotide
tggggactgggtaacatttagagaggtacttgcagcagcaaacagctttgctgagagcta

SEQ ID NO: 29833 - DNA, 60 bp, Artificial
  Synthetic oligonucleotide
aggatttgtcagcactaaagttatgtattgaagtttggaggtgggcaaaagcaaataacg

SEQ ID NO: 29834 - DNA, 60 bp, Artificial
  Synthetic oligonucleotide
cgggttgtcattgtccaggggaatgtggaaggaactgcagaggcaatctgtgcatactgg

SEQ ID NO: 29835 - DNA, 60 bp, Artificial
  Synthetic oligonucleotide
cagctcaggtttaggatgcaagcaaaacaacatatgaaggtttgcagactagatggggat

SEQ ID NO: 29836 - DNA, 60 bp, Artificial
  Synthetic oligonucleotide
cagatttaggatgcaagcaaaacaacatatgaaggtttgcagactagatggggactgggt

SEQ ID NO: 29837 - DNA, 60 bp, Artificial
  Synthetic oligonucleotide
gtgctgtatcaattccctttattaaaatccttcttggctcactatctgacctaccaggtc

SEQ ID NO: 29838 - DNA, 60 bp, Artificial
  Synthetic oligonucleotide
gggatattactgagagcttgattgcacattctggattgaggaggtctaaatattggtcaa

SEQ ID NO: 29839 - DNA, 60 bp, Artificial
  Synthetic oligonucleotide
attcaagctggaaaattgcattggtttaatgtaaatacagagatgtggaaaagcatgttt

SEQ ID NO: 29840 - DNA, 60 bp, Artificial
  Synthetic oligonucleotide
gcagtctcacttagtacgagtaaggttgagagattatatgggacatcaataggcatggta

SEQ ID NO: 29841 - DNA, 60 bp, Artificial
  Synthetic oligonucleotide
ttaggagcatcacctcaaatctcacaacttgcagtctcacttagtacgagtaaggttgag

SEQ ID NO: 29842 - DNA, 60 bp, Artificial
  Synthetic oligonucleotide
attccctttattaaaatccttcttggctcactatctgacctaccaggtcttggctacttc

SEQ ID NO: 29843 - DNA, 60 bp, Artificial
  Synthetic oligonucleotide
gagtttgtagaggtaactgtgactgcagatgtagataagggtattagagagaagaaaatg

SEQ ID NO: 29844 - DNA, 60 bp, Artificial
  Synthetic oligonucleotide
cgagtaaggttgagagattatatgggacatcaataggcatggttaattatcctggcacat

SEQ ID NO: 29845 - DNA, 60 bp, Artificial
  Synthetic oligonucleotide
gtgactgcagatgtagataagggtatcagagagaagaaaatgaaatatgagctaggtctg

SEQ ID NO: 29846 - DNA, 60 bp, Artificial
  Synthetic oligonucleotide
gaggttagtgcaggcagaaatcagttatgtaagggaacatctggttaaaactgaagaaag

SEQ ID NO: 29847 - DNA, 60 bp, Artificial
  Synthetic oligonucleotide
gtgcaggcagaaatcagttatgtaagggaacatctggttaaaactgaagaaagagctgca

SEQ ID NO: 29848 - DNA, 54 bp, Artificial
  Synthetic oligonucleotide
gtattagagagaagaaaatgaaatatgagctaggcctaaaatatctagagcaag

SEQ ID NO: 29849 - DNA, 60 bp, Artificial
  Synthetic oligonucleotide
gcaacttattcaattgctgggcagattgagggcaaaatcccacatactgcaaatgcagca

SEQ ID NO: 29850 - DNA, 60 bp, Artificial
  Synthetic oligonucleotide
atggcattgttgagcaagagagcacacaggtttatgatgatggtgcaccacaatgtggca

SEQ ID NO: 29851 - DNA, 60 bp, Artificial
  Synthetic oligonucleotide
gagcaagagagcacacaggtttatgatgatggtgcaccacaatgtggcatttcatgttgg

SEQ ID NO: 29852 - DNA, 60 bp, Artificial
  Synthetic oligonucleotide
acattggagaccaaactcggggaactcaagagacaacttgcagatctggtggcagctcaa

SEQ ID NO: 29853 - DNA, 60 bp, Artificial
  Synthetic oligonucleotide
ctacattggagaccaaactcggggaactcaagagacaacttgcagatctggtggcagctc

SEQ ID NO: 29854 - DNA, 60 bp, Artificial
  Synthetic oligonucleotide
tacattggagaccaaactcggggaactcaagagacaacttgcagatctggtggcagctca

SEQ ID NO: 29855 - DNA, 60 bp, Artificial
  Synthetic oligonucleotide
ctacattggagaccaaactcggggaactcaagaggcaacttgcagatctggtggcagctc

SEQ ID NO: 29856 - DNA, 60 bp, Artificial
  Synthetic oligonucleotide
aaacacaaaaatccatttgaagtaagaaaagtttgtgcagaagaaaatctttttgggttc

SEQ ID NO: 29857 - DNA, 60 bp, Artificial
  Synthetic oligonucleotide
caattagcttttgcacaggcactaaattatgagcaccgcttctatgcggtcttagcacct

SEQ ID NO: 29858 - DNA, 59 bp, Artificial
  Synthetic oligonucleotide
ctggaagaagaccaatgttagtgctgcagccagagacttcctggctaaatttggcatca

SEQ ID NO: 29859 - DNA, 57 bp, Artificial
  Synthetic oligonucleotide
ctacatgtgaatatcaaggtaatacagtgtctggattccaacgcatgatggcaactc

SEQ ID NO: 29860 - DNA, 60 bp, Artificial
  Synthetic oligonucleotide
caagaagaaacactcccttttcatttccagttagataaacaagtagtgcatgcagagatc

SEQ ID NO: 29861 - DNA, 60 bp, Artificial
  Synthetic oligonucleotide
actgccaaggtaccatccacagaaacaactgaaacaatgcaaggaattgcatttgctggg

SEQ ID NO: 29862 - DNA, 60 bp, Artificial
  Synthetic oligonucleotide
caagaggtgaagatcatgaccctgatcaaaatggacaagggttgatgagaatagctggac

SEQ ID NO: 29863 - DNA, 60 bp, Artificial
  Synthetic oligonucleotide
tgttacagctaaggtgccatctacagaaacaactgaaacaatgcaaggaattgcatttgc

SEQ ID NO: 29864 - DNA, 60 bp, Artificial
  Synthetic oligonucleotide
ggggacgcagcttaagctggctgttgagttagagaaattgattactggtgtgagctgcac

SEQ ID NO: 29865 - DNA, 60 bp, Artificial
  Synthetic oligonucleotide
ggggacacagcttaagctggctgttgagttagagaaattgattactggtgtgagctgcac

SEQ ID NO: 29866 - DNA, 60 bp, Artificial
  Synthetic oligonucleotide
ccaaaaagttggggacacagcttaagctggctgttgagttagagaaattgattactggtg

SEQ ID NO: 29867 - DNA, 60 bp, Artificial
  Synthetic oligonucleotide
gggaacacagcttaagctggctgttgagttagagaaactgattactggtgtaagttgcac

SEQ ID NO: 29868 - DNA, 60 bp, Artificial
  Synthetic oligonucleotide
atcttgttaatacttttctttatgtttgggtggaggatcctgttttgcttcaagtgttgc

SEQ ID NO: 29869 - DNA, 51 bp, Artificial
  Synthetic oligonucleotide
atcttgttaatacttttctttatgtttgggtggaggatcctgttttgcttc

SEQ ID NO: 29870 - DNA, 60 bp, Artificial
  Synthetic oligonucleotide
ccgcaagaaacagcagttaaataacagcaggatcatgtggagtttgctattactggccgc

SEQ ID NO: 29871 - DNA, 60 bp, Artificial
  Synthetic oligonucleotide
gacttattgatctaataggccatatgactcttagtgatttcacaaggttccccaatctga

SEQ ID NO: 29872 - DNA, 60 bp, Artificial
  Synthetic oligonucleotide
gagacttattgatctaataggccatatgactcttagtgatttcacaaggttccccaatct

SEQ ID NO: 29873 - DNA, 60 bp, Artificial
  Synthetic oligonucleotide
cttttcagagacttattgatctaataggccatatgactcttagtgatttcacaaggttcc

SEQ ID NO: 29874 - DNA, 60 bp, Artificial
  Synthetic oligonucleotide
gccttttcagagacttattgatctaataggccatatgactcttagtgatttcacaaggtt

SEQ ID NO: 29875 - DNA, 60 bp, Artificial
  Synthetic oligonucleotide
tcttagtgatttcacaaggttccccaatctgaaagaagccatatcctggcctcttggaga

SEQ ID NO: 29876 - DNA, 60 bp, Artificial
  Synthetic oligonucleotide
ctttcctgtgatatctgttgatttgcagagtggtcgtcgtgttgtgtcagtggagtacat

SEQ ID NO: 29877 - DNA, 60 bp, Artificial
  Synthetic oligonucleotide
ctgtgatatctgttgatttgcagagtggtcgtcgtgttgtgtcagtggagtacattagag

SEQ ID NO: 29878 - DNA, 60 bp, Artificial
  Synthetic oligonucleotide
aggtccgcttgcgattctctgatttctacaatgtcggagaattcccataccgagtcggac

SEQ ID NO: 29879 - DNA, 60 bp, Artificial
  Synthetic oligonucleotide
aggttcgcttgcgattctctgatttctacaatgtcggagaattcccataccgagtcggac

SEQ ID NO: 29880 - DNA, 60 bp, Artificial
  Synthetic oligonucleotide
tgatatctgttgatttgcagagtggtcgtcgtgttgtgtcagtggagtacattagaggtg

SEQ ID NO: 29881 - DNA, 60 bp, Artificial
  Synthetic oligonucleotide
gatatctgttgatttgcagagtggtcgtcgtgttgtgtcagtggagtacattagaggtga

SEQ ID NO: 29882 - DNA, 60 bp, Artificial
  Synthetic oligonucleotide
ccgcttgcgattctctgatttctacaatgtcggagaattcccataccgagtcggacttgg

SEQ ID NO: 29883 - DNA, 60 bp, Artificial
  Synthetic oligonucleotide
gcttgcgattctctgatttctacaatgtcggagaattcccataccgagtcggacttggag

SEQ ID NO: 29884 - DNA, 60 bp, Artificial
  Synthetic oligonucleotide
atcagatatagcaggagagtttgtgtccagtttggtgaagaaaacctttgtaaggttatt

SEQ ID NO: 29885 - DNA, 60 bp, Artificial
  Synthetic oligonucleotide
ccaactaaaacctgttggtagtgcatacaagattatcacaatcagatatagcaggagagt

SEQ ID NO: 29886 - DNA, 51 bp, Artificial
  Synthetic oligonucleotide
gcatgcacaaagtatgaatacccatggcataccgcaaaatgccattacgaa

SEQ ID NO: 29887 - DNA, 58 bp, Artificial
  Synthetic oligonucleotide
ttatggtgcatgcacaaagtatgaatacccatggcataccgcaaaatgccattacgaa

SEQ ID NO: 29888 - DNA, 60 bp, Artificial
  Synthetic oligonucleotide
gcacctcaccttgataaagtcaatggaatctctgaaagtgaaaatagcaaggtatatgat

SEQ ID NO: 29889 - DNA, 60 bp, Artificial
  Synthetic oligonucleotide
gcacctcaccttgataaagtcaatggaatctctgaaattgaaaatagcaaggtatatgat

SEQ ID NO: 29890 - DNA, 60 bp, Artificial
  Synthetic oligonucleotide
gtgctgtcatggagaagattgttcacagactgggcttcatgctgctgcacctcaccttga

SEQ ID NO: 29891 - DNA, 60 bp, Artificial
  Synthetic oligonucleotide
ttaagtgctgtcatggagaagattgttcacagactgggcttcatgctgctgcacctcacc

SEQ ID NO: 29892 - DNA, 60 bp, Artificial
  Synthetic oligonucleotide
ctgtgtattcctgctattctcattggtattgcttagtgtcctttgtcctgtaagaaagca

SEQ ID NO: 29893 - DNA, 60 bp, Artificial
  Synthetic oligonucleotide
gtactctgtgtattcctgctattctcattggtattgcttagtgtcctttgtcctgtaaga

SEQ ID NO: 29894 - DNA, 60 bp, Artificial
  Synthetic oligonucleotide
ccttgataaagtcaatggaatctctgaaagtgaaaatagcaaggtatatgatgatggggc

SEQ ID NO: 29895 - DNA, 60 bp, Artificial
  Synthetic oligonucleotide
ccttgataaagtcaatggaatctctgaaattgaaaatagcaaggtatatgatgatggggc

SEQ ID NO: 29896 - DNA, 60 bp, Artificial
  Synthetic oligonucleotide
tagtagctgtctaaccatataacttagatttctcctctgtatgatgtcttaacatcttgc

SEQ ID NO: 29897 - DNA, 60 bp, Artificial
  Synthetic oligonucleotide
gccagtttggtgaccctggtgatataatgagtccgagagataaaggatttctatgtcctg

SEQ ID NO: 29898 - DNA, 60 bp, Artificial
  Synthetic oligonucleotide
gatttctatgtcctgaattcccaggcagctttaggaaaaagtgcaattttgctactaccc

SEQ ID NO: 29899 - DNA, 60 bp, Artificial
  Synthetic oligonucleotide
tttctaagttttctcaaggtgatacactattgttctttggaccacttgagggtggtggtc

SEQ ID NO: 29900 - DNA, 60 bp, Artificial
  Synthetic oligonucleotide
tttggaccacttgagggtggtggtctaatattcaagcactggtgcacatctacatgccag

SEQ ID NO: 29901 - DNA, 60 bp, Artificial
  Synthetic oligonucleotide
gggtggtggtctaatattcaagcactggtgcacatctacatgccagtttggtgaccctgg

SEQ ID NO: 29902 - DNA, 60 bp, Artificial
  Synthetic oligonucleotide
tacatgccagtttggtgaccctggtgatataatgagtccgagagataaaggatttctatg

SEQ ID NO: 29903 - DNA, 60 bp, Artificial
  Synthetic oligonucleotide
gcaggagagtttgtgtccagtttggtgaagaaaacctttgtaaggttattgatatgaatg

SEQ ID NO: 29904 - DNA, 60 bp, Artificial
  Synthetic oligonucleotide
taaggttattgatatgaatgactgctttgtgtctagacatgtaaaagtgtgcataattgg

SEQ ID NO: 29905 - DNA, 60 bp, Artificial
  Synthetic oligonucleotide
gaatgactgctttgtgtctagacatgtaaaagtgtgcataattggtacagtttctaagtt

SEQ ID NO: 29906 - DNA, 60 bp, Artificial
  Synthetic oligonucleotide
gcataattggtacagtttctaagttttctcaaggtgatacactattgttctttggaccac

SEQ ID NO: 29907 - DNA, 57 bp, Artificial
  Synthetic oligonucleotide
gctactacccctctctgtgagtatgatggaaatatgatctcaggttataagaaagta

SEQ ID NO: 29908 - DNA, 60 bp, Artificial
  Synthetic oligonucleotide
ttttcaatcattcaatacaagcaccatgcattttactgatgagcgaattgaatggaaaga

SEQ ID NO: 29909 - DNA, 60 bp, Artificial
  Synthetic oligonucleotide
tacaagcaccatgcattttactgatgagcgaattgaatggaaagatcctgatggaatgtt

SEQ ID NO: 29910 - DNA, 54 bp, Artificial
  Synthetic oligonucleotide
acaaaggatatagactttgataaccttggagaaaacccttgcaaaattggcttg

SEQ ID NO: 29911 - DNA, 60 bp, Artificial
  Synthetic oligonucleotide
ggagcatggggctctggtgttggtttcacactcacatgtttagtatcattaacagaatgc

SEQ ID NO: 29912 - DNA, 60 bp, Artificial
  Synthetic oligonucleotide
gcatggggctctggtgttggtttcacactcacatgtttagtatcattaacagaatgccct

SEQ ID NO: 29913 - DNA, 60 bp, Artificial
  Synthetic oligonucleotide
tgtgacaaagctatctgttatggtgcagagagtgttaccctaacaagagggcagaataca

SEQ ID NO: 29914 - DNA, 60 bp, Artificial
  Synthetic oligonucleotide
gtgacaaagctatctgttatggtgcagagagtgttaccctaacaagagggcagaatacag

SEQ ID NO: 29915 - DNA, 60 bp, Artificial
  Synthetic oligonucleotide
gcagaatacagttaaagtatcagggaagggtggacatagtggatcaacatttaagtgctg

SEQ ID NO: 29916 - DNA, 60 bp, Artificial
  Synthetic oligonucleotide
agtatcagggaagggtggacatagtggatcaacatttaagtgctgtcatggagaagattg

SEQ ID NO: 29917 - DNA, 60 bp, Artificial
  Synthetic oligonucleotide
ttgcacatcatcaacctgcttacataaagaatggcctcactcaagaaactggagatgtaa

SEQ ID NO: 29918 - DNA, 60 bp, Artificial
  Synthetic oligonucleotide
ttgatcaagacaacaatcatcaaccccattgccgagtcaaatggagtgagatgggatagc

SEQ ID NO: 29919 - DNA, 60 bp, Artificial
  Synthetic oligonucleotide
caatcatcaaccccattgccgagtcaaatggagtgagatgggatagcggagcagagatct

SEQ ID NO: 29920 - DNA, 60 bp, Artificial
  Synthetic oligonucleotide
atgggatagcggagcagagatctatctgtccttcttcccagggactgaaatgtttttgga

SEQ ID NO: 29921 - DNA, 60 bp, Artificial
  Synthetic oligonucleotide
gggctaagcgacactgccagatcattcttgcagaagttcggcatcaggctcccataagta

SEQ ID NO: 29922 - DNA, 60 bp, Artificial
  Synthetic oligonucleotide
gagcctgaaggaagtagagcagcttaagtggggaagaggagggctaagcgacactgccag

SEQ ID NO: 29923 - DNA, 60 bp, Artificial
  Synthetic oligonucleotide
ccattgccaagagcctgaaggaagtagagcagcttaagtggggaagaggagggctaagcg

SEQ ID NO: 29924 - DNA, 60 bp, Artificial
  Synthetic oligonucleotide
gatgggttcttgagcagtataaagagaatgaagacgagtctcggcgtgagttgatcaaga

SEQ ID NO: 29925 - DNA, 60 bp, Artificial
  Synthetic oligonucleotide
acgctacggttcactcacagcagacaagtggatgtcgcagaaggtgacggccattgccaa

SEQ ID NO: 29926 - DNA, 60 bp, Artificial
  Synthetic oligonucleotide
atggatcctcagtacctgaagaaggctttaagacaacgctacggttcactcacagcagac

SEQ ID NO: 29927 - DNA, 60 bp, Artificial
  Synthetic oligonucleotide
gtcaagcagggaatgatggatcctcagtacctgaagaaggctttaagacaacgctacggt

SEQ ID NO: 29928 - DNA, 60 bp, Artificial
  Synthetic oligonucleotide
tcaaattctacccgctgaccattggaatttacagagtcaagcagggaatgatggatcctc

SEQ ID NO: 29929 - DNA, 60 bp, Artificial
  Synthetic oligonucleotide
tgtttttggagaccttcaaattctacccgctgaccattggaatttacagagtcaagcagg

SEQ ID NO: 29930 - DNA, 60 bp, Artificial
  Synthetic oligonucleotide
gccagatcattcttgcagaagttcggcatcaggctcccataagtaaggaggtgagtgccg

SEQ ID NO: 29931 - DNA, 60 bp, Artificial
  Synthetic oligonucleotide
gcgacgatcttaccatccacagattgtcaggatatttagccagatgggttcttgagcagt

SEQ ID NO: 29932 - DNA, 59 bp, Artificial
  Synthetic oligonucleotide
ttttacctaagggattgacttggaagtgtgatgtccgatttggtgttttatgatgtcgc

SEQ ID NO: 29933 - DNA, 60 bp, Artificial
  Synthetic oligonucleotide
cccataagtaaggaggtgagtgccgcaaattaggcttcaaattctaaattttcatattaa

SEQ ID NO: 29934 - DNA, 60 bp, Artificial
  Synthetic oligonucleotide
gcagggtatatggcattctgtgttaaatatgcagaatcagtcaatcttgctgcagttagg

SEQ ID NO: 29935 - DNA, 60 bp, Artificial
  Synthetic oligonucleotide
cactcacagcagacaagtggatgtcgcagaaggtgacggccattgccaagagcctgaagg

SEQ ID NO: 29936 - DNA, 60 bp, Artificial
  Synthetic oligonucleotide
ctttgttgctaattgtttttacctaagggattgacttggaagtgtgatgtccgatttggt

SEQ ID NO: 29937 - DNA, 60 bp, Artificial
  Synthetic oligonucleotide
gcaggcatggcagagttaggtgcatttttttctgtcctccaggacatgaggaatacaatc

SEQ ID NO: 29938 - DNA, 60 bp, Artificial
  Synthetic oligonucleotide
tatcgatctcaaccaccttgacattgatgaaccaactgggcagactgctgattggctaag

SEQ ID NO: 29939 - DNA, 60 bp, Artificial
  Synthetic oligonucleotide
tattgatctcaaccaccttgacattgatgaaccaactgggcagactgctgattggctaag

SEQ ID NO: 29940 - DNA, 60 bp, Artificial
  Synthetic oligonucleotide
cgaccttaaccaccttgacattgatgaaccaactgggcaaactgctgattggctgagcat

SEQ ID NO: 29941 - DNA, 60 bp, Artificial
  Synthetic oligonucleotide
gcaggcatggcagagttaggtgcattcttttctgtcctccaggacatgaggaatacaatc

SEQ ID NO: 29942 - DNA, 60 bp, Artificial
  Synthetic oligonucleotide
tgattataaaggtagttacaaaaactattgaatcccatctagtcattcctatcaggaatc

SEQ ID NO: 29943 - DNA, 55 bp, Artificial
  Synthetic oligonucleotide
aaatcaaaataagatcaaatggactacttccctctggatggtatcaagatgaatg

SEQ ID NO: 29944 - DNA, 53 bp, Artificial
  Synthetic oligonucleotide
aggtagttacaaaaactattgaatcccatctagtcattcctatcaggaatcac

SEQ ID NO: 29945 - DNA, 60 bp, Artificial
  Synthetic oligonucleotide
taatcagatgattgttaaagagttattgggtgttcatactcaatttgctatcaatttatc

SEQ ID NO: 29946 - DNA, 60 bp, Artificial
  Synthetic oligonucleotide
taaagagttattgggtgttcatactcaatttgctatcaatttatccttggtcataaagaa

SEQ ID NO: 29947 - DNA, 60 bp, Artificial
  Synthetic oligonucleotide
tcaatttatccttggtcataaagaaaccgatcattgtgttcaaaatgtatgatattgagt

SEQ ID NO: 29948 - DNA, 60 bp, Artificial
  Synthetic oligonucleotide
gggcttgttgattctattgaaagtgatcctaactataatcagatgattgttaaagagtta

SEQ ID NO: 29949 - DNA, 60 bp, Artificial
  Synthetic oligonucleotide
aacaatcatatagacgtttatggaaggatcctgaattaccagacagatgcagagggaaat

SEQ ID NO: 29950 - DNA, 60 bp, Artificial
  Synthetic oligonucleotide
tcataaagaagccgatcattgtgttcaaaatgtatgatattgagttgaacaacaatcata

SEQ ID NO: 29951 - DNA, 60 bp, Artificial
  Synthetic oligonucleotide
ggtgttcatactcaatttgctatcaatttatccttggtcataaagaagccgatcattgtg

SEQ ID NO: 29952 - DNA, 60 bp, Artificial
  Synthetic oligonucleotide
gagatttgactcttgactacgggttttctgttatgggaaagacaacatcctattggagag

SEQ ID NO: 29953 - DNA, 60 bp, Artificial
  Synthetic oligonucleotide
ggtctggtgcgatctactttcatagtacccctggccgaagagaatggtattacttggagc

SEQ ID NO: 29954 - DNA, 57 bp, Artificial
  Synthetic oligonucleotide
atctgatacggcctagccctgagtcagatattggtctggtgcgatctactttcatag

SEQ ID NO: 29955 - DNA, 60 bp, Artificial
  Synthetic oligonucleotide
gagcgacggggtgggtatgtaccttgccttcttgccgggagctgagatgtttatgtcaac

SEQ ID NO: 29956 - DNA, 60 bp, Artificial
  Synthetic oligonucleotide
gtccatggaccctaactgccttgagaaagcaatttggcagcgctacatgggaataggcgc

SEQ ID NO: 29957 - DNA, 60 bp, Artificial
  Synthetic oligonucleotide
actttcatagtacccctggccgaagagaatggtattacttggagcgacggggtgggtatg

SEQ ID NO: 29958 - DNA, 60 bp, Artificial
  Synthetic oligonucleotide
ccactgcctgactacggacttaccttacatcggttatcaggttacttagcaagatgggct

SEQ ID NO: 29959 - DNA, 60 bp, Artificial
  Synthetic oligonucleotide
acatttgatccagaagctgcttatctcagatttgagagtgcttacgggtctcaattggaa

SEQ ID NO: 29960 - DNA, 60 bp, Artificial
  Synthetic oligonucleotide
gatccagaagctgcttatctcagatttgagagtgcttacgggtctcaattggaatccgct

SEQ ID NO: 29961 - DNA, 60 bp, Artificial
  Synthetic oligonucleotide
ctttcgcattctacccgcttacgattggtatgtatagggtacgaaggtggtccatggacc

SEQ ID NO: 29962 - DNA, 60 bp, Artificial
  Synthetic oligonucleotide
gagagtttgtgagcagcttcggaatccggttagcttaaaccattaataataattgcagtt

SEQ ID NO: 29963 - DNA, 60 bp, Artificial
  Synthetic oligonucleotide
agagagtttgtgagcagcttcggaatccggttagcttaaaccattaataataattgcagt

SEQ ID NO: 29964 - DNA, 60 bp, Artificial
  Synthetic oligonucleotide
cgctattgttcgagtcttctacatcaatgctgcgaaggtcaaagcttacctccgaaggtc

SEQ ID NO: 29965 - DNA, 60 bp, Artificial
  Synthetic oligonucleotide
cattccactgcctgactacggacttaccttacatcggttatcaggttacttagcaagatg

SEQ ID NO: 29966 - DNA, 60 bp, Artificial
  Synthetic oligonucleotide
taattgcagtttttagggttccgtataaggccaataaaaaccacagcataatgggtgggt

SEQ ID NO: 29967 - DNA, 60 bp, Artificial
  Synthetic oligonucleotide
atgggtgggtggtaggggacaccaagataagcagatagtaagttcacgaatcttatctag

SEQ ID NO: 29968 - DNA, 60 bp, Artificial
  Synthetic oligonucleotide
aagacgtcgaaaagcttgattgggcaaaaacagccttcaccagtgcagctagagagtttg

SEQ ID NO: 29969 - DNA, 54 bp, Artificial
  Synthetic oligonucleotide
gcagcgctacatgggaataggcgctgatcagtggattacgaaggagacgctcgc

SEQ ID NO: 29970 - DNA, 60 bp, Artificial
  Synthetic oligonucleotide
tacttggagcgacggggtgggtatgtaccttgccttcttgccgggagctgagatgtttat

SEQ ID NO: 29971 - DNA, 60 bp, Artificial
  Synthetic oligonucleotide
gggtgggtggtaggggacaccaagataagcagatagtaagttcacgaatcttatctagaa

SEQ ID NO: 29972 - DNA, 60 bp, Artificial
  Synthetic oligonucleotide
agatgtttatgtcaactttcgcattctacccgcttacgattggtatgtatagggtacgaa

SEQ ID NO: 29973 - DNA, 60 bp, Artificial
  Synthetic oligonucleotide
tagcaagatgggctttatatctgatacggcctagccctgagtcagatattggtctggtgc

SEQ ID NO: 29974 - DNA, 60 bp, Artificial
  Synthetic oligonucleotide
cctcaggcagagcaatgagtgcaggcaaaattggtaatgtcctatcctatgcacataacc

SEQ ID NO: 29975 - DNA, 60 bp, Artificial
  Synthetic oligonucleotide
gaagttgctgggtcctttatcagattcatcactgttttccgaattggtcctggtttagtg

SEQ ID NO: 29976 - DNA, 60 bp, Artificial
  Synthetic oligonucleotide
tgatctggagttaaatataactgaaccatcaacccaggaatattcaacaaccaagcacac

SEQ ID NO: 29977 - DNA, 58 bp, Artificial
  Synthetic oligonucleotide
cttaaagaagactacagcatggcatatagggcatcttgtaagagacataactgaaagc

SEQ ID NO: 29978 - DNA, 60 bp, Artificial
  Synthetic oligonucleotide
ctatgatgccatagctaagaatataactgaggagtatatttcatatggaggtgagaagaa

SEQ ID NO: 29979 - DNA, 60 bp, Artificial
  Synthetic oligonucleotide
acgcccatcccacttggaggaaatggtgcaatgtctatcatggaattggcaacagcaggg

SEQ ID NO: 29980 - DNA, 60 bp, Artificial
  Synthetic oligonucleotide
ggctatccgctacttgtctacctcaagacccaatcccagtctccttaagctgtatgaaga

SEQ ID NO: 29981 - DNA, 60 bp, Artificial
  Synthetic oligonucleotide
ggagtcactagtagagaacggttacatgatgtgggaacttcgagaaaatgctgaattggc

SEQ ID NO: 29982 - DNA, 60 bp, Artificial
  Synthetic oligonucleotide
cgtgcacttataggttattcacacaagagacagaagtctatgctatatatattgggcctc

SEQ ID NO: 29983 - DNA, 60 bp, Artificial
  Synthetic oligonucleotide
ctgaattagaaagtattgttagaggttggggagagtgtgtcattgatcagtttgaaagtc

SEQ ID NO: 29984 - DNA, 60 bp, Artificial
  Synthetic oligonucleotide
ggaggagactgaatctaagaaaatgagaggtatagtaaagatacttgagccggtcaggtt

SEQ ID NO: 29985 - DNA, 60 bp, Artificial
  Synthetic oligonucleotide
aagggatattagatctcaagcagtagatgcagtaagcaatgtttggtttatacacaaagg

SEQ ID NO: 29986 - DNA, 60 bp, Artificial
  Synthetic oligonucleotide
tcattgatcagtttgaaagtcttgatagagaagctcaaaacatggtagtcaacaagggga

SEQ ID NO: 29987 - DNA, 60 bp, Artificial
  Synthetic oligonucleotide
gcaccaaggatacagtttaagcagacacaaaatgtgaaggaaccgggtacatttaaacta

SEQ ID NO: 29988 - DNA, 60 bp, Artificial
  Synthetic oligonucleotide
catcatataaacctgccactaccctttctgatcaaatcgatagcaggcgagcttgctcat

SEQ ID NO: 29989 - DNA, 59 bp, Artificial
  Synthetic oligonucleotide
taggagcgaatcttgaggatctagttgattactcaaaggaatggttatccagggctagg

SEQ ID NO: 29990 - DNA, 58 bp, Artificial
  Synthetic oligonucleotide
agagggctgcattggatagccatgttcaacctaaagtttaatataagcacacacaaaa

SEQ ID NO: 29991 - DNA, 60 bp, Artificial
  Synthetic oligonucleotide
cacagtggccaagtaggaggaatgatggtgttgttcaatacatgaggctggttcaagctg

SEQ ID NO: 29992 - DNA, 60 bp, Artificial
  Synthetic oligonucleotide
cagatctgtattggcaaatcacctcctcctggcaatatgtcagaaaatgaagctttgtgc

SEQ ID NO: 29993 - DNA, 60 bp, Artificial
  Synthetic oligonucleotide
gggcatcaggtgaaggctttattgaactcagtaaccagaagtttattagaatgaagcgga

SEQ ID NO: 29994 - DNA, 59 bp, Artificial
  Synthetic oligonucleotide
actacggtatccccaaccaatgctgaattcttgtcaacattctttgagggttgtgcagt

SEQ ID NO: 29995 - DNA, 51 bp, Artificial
  Synthetic oligonucleotide
gtctattcccagaacttgattgtttctttgagtttgctcaccattcagatg

SEQ ID NO: 29996 - DNA, 60 bp, Artificial
  Synthetic oligonucleotide
gccctcaagcaagtttacaagacagacttcttcatgtcaagaaaattaagaaattatatt

SEQ ID NO: 29997 - DNA, 60 bp, Artificial
  Synthetic oligonucleotide
catgagaggctaggacaattttcatttatcggaaaggtacaatggaagatcttcacacca

SEQ ID NO: 29998 - DNA, 60 bp, Artificial
  Synthetic oligonucleotide
gctgttgcattatgcactagcaaggttgaaagattatatggtactgcaccaggcatggta

SEQ ID NO: 29999 - DNA, 60 bp, Artificial
  Synthetic oligonucleotide
ctatttagttaggaagttgaatgacccgagtattgtaacagccatgacaatgcagtcacc

SEQ ID NO: 30000 - DNA, 60 bp, Artificial
  Synthetic oligonucleotide
agtatgcaggttggatggagactgggtaacttttagggaagttttagccgctgctaatag

SEQ ID NO: 30001 - DNA, 60 bp, Artificial
  Synthetic oligonucleotide
cacttgcacaaaataacaaggccagattttattctaaagttaaattgctgggactgactg

SEQ ID NO: 30002 - DNA, 60 bp, Artificial
  Synthetic oligonucleotide
agagtatgcatggaaagacttcttgaatgggattcattgtgatgtcataccaacaaaaca

SEQ ID NO: 30003 - DNA, 60 bp, Artificial
  Synthetic oligonucleotide
gccatgacaatgcagtcacctttacagctaagatttcgaatgcaggcaaagcagcatatg

SEQ ID NO: 30004 - DNA, 60 bp, Artificial
  Synthetic oligonucleotide
tatcatggaattggcaacagcagggatagggatgtcagataaaaatctgttaaagcgtgc

SEQ ID NO: 30005 - DNA, 60 bp, Artificial
  Synthetic oligonucleotide
cagactcattattctcattcagacatactatggtgctgttacgaaggttatttcctcagg

SEQ ID NO: 30006 - DNA, 60 bp, Artificial
  Synthetic oligonucleotide
ccagacgtgatgaagaggattgcaccaatgctgtacaaatcttctaagtcacgggtagtt

SEQ ID NO: 30007 - DNA, 60 bp, Artificial
  Synthetic oligonucleotide
ggctagatagattttgcagagtaggggttccacctattgacccagaaattcagtgtgcag

SEQ ID NO: 30008 - DNA, 60 bp, Artificial
  Synthetic oligonucleotide
aaagggagattattcagttttacaattgcaagcaaacagaagagcatattcaggtaagca

SEQ ID NO: 30009 - DNA, 60 bp, Artificial
  Synthetic oligonucleotide
gtaacatttaattttggtctcgattgtgctagacttgagatattttgggataagaaggct

SEQ ID NO: 30010 - DNA, 60 bp, Artificial
  Synthetic oligonucleotide
tggggaaagccaaatattccttgtattgtgtataaaaactgtgtccttaggacaagcctt

SEQ ID NO: 30011 - DNA, 60 bp, Artificial
  Synthetic oligonucleotide
gtggttgcagtccgtacagatggctccaatatttcaacacagtggccaagtaggaggaat

SEQ ID NO: 30012 - DNA, 60 bp, Artificial
  Synthetic oligonucleotide
ggaagcaatagggaaagtgttattatttgcagaggttccatcaaatatcataacagcatt

SEQ ID NO: 30013 - DNA, 60 bp, Artificial
  Synthetic oligonucleotide
gaaatcccacagccctacaagataaccctcaatgtggttgcagtccgtacagatggctcc

SEQ ID NO: 30014 - DNA, 52 bp, Artificial
  Synthetic oligonucleotide
tcatggtgatatttaggtatttgtagttgtttgtatttcagggttctttgtg

SEQ ID NO: 30015 - DNA, 60 bp, Artificial
  Synthetic oligonucleotide
gaagagccttgcagggacagctctcttcaggatgaatcctcaggcctctagatatgatca

SEQ ID NO: 30016 - DNA, 60 bp, Artificial
  Synthetic oligonucleotide
gagccttgcagggacagctctcttcaggatgaatcctcaggcctctagatatgatcaggt

SEQ ID NO: 30017 - DNA, 60 bp, Artificial
  Synthetic oligonucleotide
taccaaacgttgagatggcattaagctggcctctaggatatccaagcacaaacttcattc

SEQ ID NO: 30018 - DNA, 60 bp, Artificial
  Synthetic oligonucleotide
tggcattaagctggcctctaggatatccaagcacaaacttcattcaattagccggctgtc

SEQ ID NO: 30019 - DNA, 60 bp, Artificial
  Synthetic oligonucleotide
aacttcattcaattagccggctgtccaggacactgcacctccactggttggaagagcctt

SEQ ID NO: 30020 - DNA, 60 bp, Artificial
  Synthetic oligonucleotide
aattagccggctgtccaggacactgcacctccactggttggaagagccttgcagggacag

SEQ ID NO: 30021 - DNA, 60 bp, Artificial
  Synthetic oligonucleotide
acatttaactcccgggtggaacaagagacaactaagatcatggatgaccacatcaggagc

SEQ ID NO: 30022 - DNA, 60 bp, Artificial
  Synthetic oligonucleotide
ctcccgggtggaacaagagacaactaagatcatggatgaccacatcaggagcttggcctt

SEQ ID NO: 30023 - DNA, 60 bp, Artificial
  Synthetic oligonucleotide
catcaggagcttggccttattccctctggatgcatacagaaggtcattcttaccaaacgt

SEQ ID NO: 30024 - DNA, 53 bp, Artificial
  Synthetic oligonucleotide
cctctggatgcatacagaaggtcattcttaccaaacgttgagatggcattaag

SEQ ID NO: 30025 - DNA, 60 bp, Artificial
  Synthetic oligonucleotide
gccttcataagcaaactcattgacccagcccatgacttcagcattgttgattggctctcc

SEQ ID NO: 30026 - DNA, 60 bp, Artificial
  Synthetic oligonucleotide
agcattaaagccttcataagcaaactcattgacccagcccatgacttcagcattgttgat

SEQ ID NO: 30027 - DNA, 60 bp, Artificial
  Synthetic oligonucleotide
ccagatttcaggccatagatcgttattagcctcgatgctttcttcttaccttctgccgac

SEQ ID NO: 30028 - DNA, 60 bp, Artificial
  Synthetic oligonucleotide
gctgcagcaatcctagatagtgtcaggtcatctctgcctgggtttccagatttcaggcca

SEQ ID NO: 30029 - DNA, 60 bp, Artificial
  Synthetic oligonucleotide
ctgccaagtttgaggccctttctcttggactagctgaataatcctttgagcattaaagcc

SEQ ID NO: 30030 - DNA, 60 bp, Artificial
  Synthetic oligonucleotide
gtctgccaagtttgaggccctttctcttggactagctgaataatcctttgagcattaaag

SEQ ID NO: 30031 - DNA, 60 bp, Artificial
  Synthetic oligonucleotide
tactggaaggtaaggatgaagggttgcaagggcttgacaggtccacccagcaaatgctgc

SEQ ID NO: 30032 - DNA, 60 bp, Artificial
  Synthetic oligonucleotide
gccctagggtaccctggagaaatggcatccatagcagccccagttactggaaggtaagga

SEQ ID NO: 30033 - DNA, 60 bp, Artificial
  Synthetic oligonucleotide
caaatgctgcagcaatcctagatagtgtcaggtcatctctgcctgggtttccagatttca

SEQ ID NO: 30034 - DNA, 60 bp, Artificial
  Synthetic oligonucleotide
ggtaaggatgaagggttgcaagggcttgacaggtccacccagcaaatgctgcagcaatcc

SEQ ID NO: 30035 - DNA, 60 bp, Artificial
  Synthetic oligonucleotide
gttaggctagtgagctctgtggatgtggatcttgtatatagcagagttcctaccaggttg

SEQ ID NO: 30036 - DNA, 60 bp, Artificial
  Synthetic oligonucleotide
ccataatgcagcttgttaggctagtgagctctgtggatgtggatcttgtatatagcagag

SEQ ID NO: 30037 - DNA, 60 bp, Artificial
  Synthetic oligonucleotide
ctttctgccaggctatgatttgatcaaagaagttgccataatgcagcttgttaggctagt

SEQ ID NO: 30038 - DNA, 60 bp, Artificial
  Synthetic oligonucleotide
aggtgttagctatgactttctgccaggctatgatttgatcaaagaagttgccataatgca

SEQ ID NO: 30039 - DNA, 60 bp, Artificial
  Synthetic oligonucleotide
cgccctgcgggacctagacaatgccactgcccctcccccccatccatccccccaccccac

SEQ ID NO: 30040 - DNA, 50 bp, Artificial
  Synthetic oligonucleotide
ctctattgcgaaaccaccagctcttttgagtcagatgacgactgagagag

SEQ ID NO: 30041 - DNA, 59 bp, Artificial
  Synthetic oligonucleotide
ttctctagagaatgagaacccttctattttgggaaatggcttctggataccttcaccca

SEQ ID NO: 30042 - DNA, 60 bp, Artificial
  Synthetic oligonucleotide
tatagcagagttcctaccaggttgactgacaggctaatgcagataaaaaattctctagag

SEQ ID NO: 30043 - DNA, 58 bp, Artificial
  Synthetic oligonucleotide
cccaccccacacaagcagcacaccacccaccaccccactccccacacccctaaacccc

SEQ ID NO: 30044 - DNA, 60 bp, Artificial
  Synthetic oligonucleotide
cccaccccacacaagcagcacaccacccaccaccccactccccacacccctaaacccccc

SEQ ID NO: 30045 - DNA, 54 bp, Artificial
  Synthetic oligonucleotide
ccagaagtagaggttggctacttaccttttgagtcatacacatcaaggtgtata

SEQ ID NO: 30046 - DNA, 60 bp, Artificial
  Synthetic oligonucleotide
gagattccattggagtccttcaggttagcagtagatttcagacctcgattctctgacttc

SEQ ID NO: 30047 - DNA, 60 bp, Artificial
  Synthetic oligonucleotide
ggagattccattggagtccttcaggttagcagtagatttcagacctcgattctctgactt

SEQ ID NO: 30048 - DNA, 60 bp, Artificial
  Synthetic oligonucleotide
caagaggggacttcccttttagatggggagttggaacatttaactcccgggtggaacaag

SEQ ID NO: 30049 - DNA, 60 bp, Artificial
  Synthetic oligonucleotide
tctctgacttctactcaagaggggacttcccttttagatggggagttggaacatttaact

SEQ ID NO: 30050 - DNA, 60 bp, Artificial
  Synthetic oligonucleotide
ttgagttgtcaataagaccagcaaagctaggatgcatcattgccctagggtaccctggag

SEQ ID NO: 30051 - DNA, 60 bp, Artificial
  Synthetic oligonucleotide
atcattgccctagggtaccctggagaaatggcatccatagcagccccagttactggaagg

SEQ ID NO: 30052 - DNA, 60 bp, Artificial
  Synthetic oligonucleotide
ttgtcctcgcatattcctgttgatgaccctagagaactgcagcaggtatagagcatgggc

SEQ ID NO: 30053 - DNA, 60 bp, Artificial
  Synthetic oligonucleotide
gataggcttcaggtattgagttgtcaataagaccagcaaagctaggatgcatcattgccc

SEQ ID NO: 30054 - DNA, 59 bp, Artificial
  Synthetic oligonucleotide
ttctgtcattcgaaataaacccactgacaattgcagcattcattggttggagaaatgaa

SEQ ID NO: 30055 - DNA, 60 bp, Artificial
  Synthetic oligonucleotide
gggttgtcctcgcatattcctgttgatgaccctagagaactgcagcaggtatagagcatg

SEQ ID NO: 30056 - DNA, 60 bp, Artificial
  Synthetic oligonucleotide
tgctgattatgctgcattttagcctaagagatgatacttagactgctgtcatgaaagcct

SEQ ID NO: 30057 - DNA, 60 bp, Artificial
  Synthetic oligonucleotide
tatgctgcattttagcctaagagatgatacttagactgctgtcatgaaagcctttgcagc

SEQ ID NO: 30058 - DNA, 60 bp, Artificial
  Synthetic oligonucleotide
taaacccccctggcagccccaaaactatataatatgatctacgcctactttgctgattat

SEQ ID NO: 30059 - DNA, 60 bp, Artificial
  Synthetic oligonucleotide
cccctggcagccccaaaactatataatatgatctacgcctactttgctgattatgctgca

SEQ ID NO: 30060 - DNA, 60 bp, Artificial
  Synthetic oligonucleotide
atttttttcgtcatgtccaacataaactattatgctcgcgagttgcccgtaatgagcact

SEQ ID NO: 30061 - DNA, 60 bp, Artificial
  Synthetic oligonucleotide
tccaacataaactattatgctcgcgagttgcccgtaatgagcacttctccggaccagttg

SEQ ID NO: 30062 - DNA, 60 bp, Artificial
  Synthetic oligonucleotide
gactgacagcaatcatctcttttatcatgctctaatgctgtcatgaatctgatcagttgt

SEQ ID NO: 30063 - DNA, 51 bp, Artificial
  Synthetic oligonucleotide
ttttcgtcatgtccaacataaactattatgctcgcgagttgcccataatga

SEQ ID NO: 30064 - DNA, 51 bp, Artificial
  Synthetic oligonucleotide
ttttcgtcatgtccaacataaactattatgctcgcgagttgcccgtaatga

SEQ ID NO: 30065 - DNA, 53 bp, Artificial
  Synthetic oligonucleotide
gctcattacgggcaactcgcgagcataatagtttatgttggacatgacgaaaa

SEQ ID NO: 30066 - DNA, 60 bp, Artificial
  Synthetic oligonucleotide
gctcattacgggcaactcgcgagcataatagtttatgttggacatgacgaaaaaattcag

SEQ ID NO: 30067 - DNA, 54 bp, Artificial
  Synthetic oligonucleotide
tgctcattatgggcaactcgcgagcataatagtttatgttggacatgacgaaaa

SEQ ID NO: 30068 - DNA, 60 bp, Artificial
  Synthetic oligonucleotide
tgctcattatgggcaactcgcgagcataatagtttatgttggacatgacgaaaaaattca

SEQ ID NO: 30069 - DNA, 53 bp, Artificial
  Synthetic oligonucleotide
ttttcgtcatgtccaacataaactattatgctcgcgagttgcccgtaatgagc

SEQ ID NO: 30070 - DNA, 54 bp, Artificial
  Synthetic oligonucleotide
agtatggtggagaaaagcactaacgagaatgccaagcaagagatgtacacaaaa

SEQ ID NO: 30071 - DNA, 60 bp, Artificial
  Synthetic oligonucleotide
agtatggtggagaaaagcactaacgagaatgccaagcaagagatgtacacaaaaacaatg

SEQ ID NO: 30072 - DNA, 60 bp, Artificial
  Synthetic oligonucleotide
ggaactgccattggtggcagcttatggcttgaatgttcctgcagcttatgattcgtgtgc

SEQ ID NO: 30073 - DNA, 60 bp, Artificial
  Synthetic oligonucleotide
cagcttatgattcgtgtgctttaagaatgatgttgtgtattggaggtcctttacctctct

SEQ ID NO: 30074 - DNA, 60 bp, Artificial
  Synthetic oligonucleotide
agagcaatcgaggcgctaataaaatccgtttaaagtcaatcaattagacgtttccatagt

SEQ ID NO: 30075 - DNA, 60 bp, Artificial
  Synthetic oligonucleotide
cgaggcgctaataaaatccgtttaaagtcaatcaattagacgtttccatagtaaacacca

SEQ ID NO: 30076 - DNA, 60 bp, Artificial
  Synthetic oligonucleotide
cgtgtgctttaagaatgatgttgtgtattggaggtcctttacctctcttatctagtgtga

SEQ ID NO: 30077 - DNA, 53 bp, Artificial
  Synthetic oligonucleotide
ttacctctcttatctagtgtgaaagggctggcaccagttatattccctttagc

SEQ ID NO: 30078 - DNA, 60 bp, Artificial
  Synthetic oligonucleotide
caaatacatggatagagtcttcaatgctagtctttctatggatgactacggtgagcactc

SEQ ID NO: 30079 - DNA, 60 bp, Artificial
  Synthetic oligonucleotide
atgatcaagtcaaatacatggatagagtcttcaatgctagtctttctatggatgactacg

SEQ ID NO: 30080 - DNA, 60 bp, Artificial
  Synthetic oligonucleotide
gcaagagtaacccaggaacagccagttcaatctctctgaagaaatacgatgatcaagtca

SEQ ID NO: 30081 - DNA, 60 bp, Artificial
  Synthetic oligonucleotide
cagcaagagtaacccaggaacagccagttcaatctctctgaagaaatacgatgatcaagt

SEQ ID NO: 30082 - DNA, 60 bp, Artificial
  Synthetic oligonucleotide
gatgactacggtgagcactctaaaaagagctcaaaggctagcacttctttggaagtgtaa

SEQ ID NO: 30083 - DNA, 60 bp, Artificial
  Synthetic oligonucleotide
ctgtgtagcaaaggaggcgtggagcaacatagtgaggaggatttgagaaagctgttggtg

SEQ ID NO: 30084 - DNA, 60 bp, Artificial
  Synthetic oligonucleotide
gagagatggacctagatgttccttcgcagcactgttgagtctggttcatgaggactggca

SEQ ID NO: 30085 - DNA, 60 bp, Artificial
  Synthetic oligonucleotide
ttctacattctgggcagacgcactttgatgcacttagaatgctgccacagtttgaggccg

SEQ ID NO: 30086 - DNA, 60 bp, Artificial
  Synthetic oligonucleotide
gcatgaagaggtacattggcacaccttatgaaggaattatcgacaccttagtttctctga

SEQ ID NO: 30087 - DNA, 60 bp, Artificial
  Synthetic oligonucleotide
ctgatgatgcacaaaaggattccatctacgcatctgctctagtggaggcaaccaaattct

SEQ ID NO: 30088 - DNA, 60 bp, Artificial
  Synthetic oligonucleotide
cctgagaacatagacaaggcaaggagggatccaaagaactgggttagcatctctgaagtg

SEQ ID NO: 30089 - DNA, 60 bp, Artificial
  Synthetic oligonucleotide
cctgagaatatagataaggcaagaagagatccaaagaactgggttagcatctctgaggtg

SEQ ID NO: 30090 - DNA, 55 bp, Artificial
  Synthetic oligonucleotide
tctcaaagaaacacgtgccgcttacgcccacagtgttctcttgagtgctggcaaa

SEQ ID NO: 30091 - DNA, 55 bp, Artificial
  Synthetic oligonucleotide
tctcaaagaaacacgtgccgcttacgcccacagtgttctcttgagtgttggcaaa

SEQ ID NO: 30092 - DNA, 55 bp, Artificial
  Synthetic oligonucleotide
tctcaaagaaacacgtgccgcttacgcccacagtgttctcttgagtcttggcaaa

SEQ ID NO: 30093 - DNA, 55 bp, Artificial
  Synthetic oligonucleotide
tctcaaagaaacacgtgccgcttacgcccacagtgttctcttgagtgttagcaaa

SEQ ID NO: 30094 - DNA, 60 bp, Artificial
  Synthetic oligonucleotide
accactagagaagttaagacttgggtttggacgcagaagctcactgtctgacttttactc

SEQ ID NO: 30095 - DNA, 60 bp, Artificial
  Synthetic oligonucleotide
catctagactaacctcagatgggcttgctaggcatgtgacacaatgccctaagcggaagg

SEQ ID NO: 30096 - DNA, 60 bp, Artificial
  Synthetic oligonucleotide
cactcaagacgaccaaagcctggcatgtccagccagccagggcggcagcaactcttgata

SEQ ID NO: 30097 - DNA, 60 bp, Artificial
  Synthetic oligonucleotide
cactcaagacgaccaaagcctggcatgtccagccagccagggcggcagcaactcgtgata

SEQ ID NO: 30098 - DNA, 60 bp, Artificial
  Synthetic oligonucleotide
atcctggggcaaggaagcagtgaaccatttccatcttggtgatgatatggatcctgagct

SEQ ID NO: 30099 - DNA, 60 bp, Artificial
  Synthetic oligonucleotide
ttggaggtcctctacctctcttgtctagcataacaggtctggcaccaattatattccctc

SEQ ID NO: 30100 - DNA, 60 bp, Artificial
  Synthetic oligonucleotide
ggcagctgttgttggtggaagttggttttcaaactgacatcgatgggaaaataaggacag

SEQ ID NO: 30101 - DNA, 60 bp, Artificial
  Synthetic oligonucleotide
gtgtattggggtccaaagagaattgccatactcggtgaggccagtagaagggtcacttgc

SEQ ID NO: 30102 - DNA, 60 bp, Artificial
  Synthetic oligonucleotide
gcaagtgacccttctgctagtcttactgagtatggcaattctctttggaccccaatacac

SEQ ID NO: 30103 - DNA, 60 bp, Artificial
  Synthetic oligonucleotide
ctgtgtattggggtccaaagagaattgccatactcggtgaggccagtagaagggtcactt

SEQ ID NO: 30104 - DNA, 60 bp, Artificial
  Synthetic oligonucleotide
gtgacccttctactggcctcaccgagtatggcaattctctttggaccccaatacacagtc

SEQ ID NO: 30105 - DNA, 60 bp, Artificial
  Synthetic oligonucleotide
gaaatcaatgcccatgaaggccaactggtgatagccaggcagaaggtgagggatgcagaa

SEQ ID NO: 30106 - DNA, 60 bp, Artificial
  Synthetic oligonucleotide
cacggctgggttaacacggaatctttatgagttaaagatagaatgcccacatactgtggg

SEQ ID NO: 30107 - DNA, 60 bp, Artificial
  Synthetic oligonucleotide
ggttagatcttccatgtaagctgctatctgaaccatctccaacatccttgaccaaaggcc

SEQ ID NO: 30108 - DNA, 60 bp, Artificial
  Synthetic oligonucleotide
tctttcttactttctacctcagtgtacttatatatatgcaagtagcatatatataagtac

SEQ ID NO: 30109 - DNA, 57 bp, Artificial
  Synthetic oligonucleotide
cactttcagctccctggtgcttacactataaagcactagagtcttatctagtgaggc

SEQ ID NO: 30110 - DNA, 60 bp, Artificial
  Synthetic oligonucleotide
agctttttcagccatgcctaaaacttctctatgtttctacattgtggaaagagaatactg

SEQ ID NO: 30111 - DNA, 60 bp, Artificial
  Synthetic oligonucleotide
tctttactaacaacaactatctacctcaaaacaacaacactacctcaacaactactacct

SEQ ID NO: 30112 - DNA, 60 bp, Artificial
  Synthetic oligonucleotide
ctttactaacaacaactatctacctcaaaacaacaacactacctcaacaactactacctc

SEQ ID NO: 30113 - DNA, 53 bp, Artificial
  Synthetic oligonucleotide
tagtagtagactccgcaagaaacagcagttaaataacagcatgatcatgtggg

SEQ ID NO: 30114 - DNA, 60 bp, Artificial
  Synthetic oligonucleotide
tacacaagtatttgcctctttgtactaggaagcatcttatttatagtctcttgcctaatg

SEQ ID NO: 30115 - DNA, 60 bp, Artificial
  Synthetic oligonucleotide
gttctactacagaaagcacgaatgcaggtgcaactacatttgaggctaaaacaaaagagg

SEQ ID NO: 30116 - DNA, 60 bp, Artificial
  Synthetic oligonucleotide
tggcacagagcttgattgatgtcaaagtgaaggaaatctccaaccaagagcctttgaaac

SEQ ID NO: 30117 - DNA, 60 bp, Artificial
  Synthetic oligonucleotide
gatgatgttaacaagagcacactacagagtagacgggcagctgtgtcagcattggaggac

SEQ ID NO: 30118 - DNA, 60 bp, Artificial
  Synthetic oligonucleotide
ttctacctcagtgtacttatatatatgcaagtagcatatatataagtacacaattcacta

SEQ ID NO: 30119 - DNA, 60 bp, Artificial
  Synthetic oligonucleotide
caacaaacagtgtcagcactggaggataaactcgcagactacaagagaagaatggcagat

SEQ ID NO: 30120 - DNA, 60 bp, Artificial
  Synthetic oligonucleotide
gttccaagtatacataccgcaggaagctaacaaacccacttgaagcacaatccattgatc

SEQ ID NO: 30121 - DNA, 60 bp, Artificial
  Synthetic oligonucleotide
cctccaagaattgcaagagaatatcactgcacacgaacaacaactcgtgactgccaggca

SEQ ID NO: 30122 - DNA, 60 bp, Artificial
  Synthetic oligonucleotide
cttaccctccacagactcagtggattccttgccaggtacttacttgagaagatactgaaa

SEQ ID NO: 30123 - DNA, 52 bp, Artificial
  Synthetic oligonucleotide
cagacgggcagctgtgtcagcattggaggacaagttggcagacttcaagaga

SEQ ID NO: 30124 - DNA, 60 bp, Artificial
  Synthetic oligonucleotide
gtgaagaggaccagctagaaacaaggcagctgttgttggtggaagttggttttcaaactg

SEQ ID NO: 30125 - DNA, 60 bp, Artificial
  Synthetic oligonucleotide
cagctggagacaaggcagctgttgttggtggaagttggttttcagactgacattgatggg

SEQ ID NO: 30126 - DNA, 60 bp, Artificial
  Synthetic oligonucleotide
aggccaagatggtgctcagtaagacggcacaaccgagtgttgatcttacatttggaggca

SEQ ID NO: 30127 - DNA, 60 bp, Artificial
  Synthetic oligonucleotide
gccaagatggtgctcagtaagacggcacaaccgagtgttgatcttacatttggaggcatc

SEQ ID NO: 30128 - DNA, 60 bp, Artificial
  Synthetic oligonucleotide
gaatgcccatattgctttacccactgtgaaccgacagaaactgcaattcaggcacattac

SEQ ID NO: 30129 - DNA, 60 bp, Artificial
  Synthetic oligonucleotide
gagagggttgaagctaaagacatgactttcagaaggcttgatagcatgataagagtgaaa

SEQ ID NO: 30130 - DNA, 60 bp, Artificial
  Synthetic oligonucleotide
gggttgaagctaaagacatgactttcagaaggcttgatagcatgataagagtgaaactca

SEQ ID NO: 30131 - DNA, 57 bp, Artificial
  Synthetic oligonucleotide
gggacacaaagaccccctagattttataaagattagcaaaatgaatttcctctacga

SEQ ID NO: 30132 - DNA, 60 bp, Artificial
  Synthetic oligonucleotide
caggtccatccagcaaaggcagcagcaactcttgagagggttatgtcatctctccctgga

SEQ ID NO: 30133 - DNA, 60 bp, Artificial
  Synthetic oligonucleotide
tgggacacaaagaccccctagattttataaagattagcaaaatgaatttcctctacgaga

SEQ ID NO: 30134 - DNA, 60 bp, Artificial
  Synthetic oligonucleotide
aaagaccttgagtttgaggaagatcagaatctggtagcattcaacttcaagacttttgtc

SEQ ID NO: 30135 - DNA, 60 bp, Artificial
  Synthetic oligonucleotide
aaaaagtcttgaagttgaatgctaccagattctgatcttcctcaaactcaaggtctttgc

SEQ ID NO: 30136 - DNA, 56 bp, Artificial
  Synthetic oligonucleotide
aagaccttgagtttgaggaagatcagaatctggtagcattcaacttcaagactttt

SEQ ID NO: 30137 - DNA, 60 bp, Artificial
  Synthetic oligonucleotide
aaagaccttgagtttgaggaagatcagaatctggtagcattcaacttcaagactttttgt

SEQ ID NO: 30138 - DNA, 60 bp, Artificial
  Synthetic oligonucleotide
ggaccagaggataattgttatgtttatggttgcctggggaaaggaggcagtggacaactt

SEQ ID NO: 30139 - DNA, 60 bp, Artificial
  Synthetic oligonucleotide
cagaggataattgttatgtttatggttgcctggggaaaggaggcagtggacaactttcat

SEQ ID NO: 30140 - DNA, 60 bp, Artificial
  Synthetic oligonucleotide
gaccagaggataattgttatgtttatggttgcctggggaaaggaggcagtggacaacttt

SEQ ID NO: 30141 - DNA, 60 bp, Artificial
  Synthetic oligonucleotide
ctggaccagaggataattgttatgtttatggttgcctggggaaaggaggcagtggacaac

SEQ ID NO: 30142 - DNA, 60 bp, Artificial
  Synthetic oligonucleotide
tggaccagaggataattgttatgtttatggttgcctggggaaaggaggcagtggacaact

SEQ ID NO: 30143 - DNA, 60 bp, Artificial
  Synthetic oligonucleotide
ttgaaggcactgtacatgttaacaacaagaggtaggcagacttcaaaggacaacaaggga

SEQ ID NO: 30144 - DNA, 60 bp, Artificial
  Synthetic oligonucleotide
ttgaaggcactgtacatgttaacaacaagaggtaggcagacttcaaaggacaacaagggg

SEQ ID NO: 30145 - DNA, 55 bp, Artificial
  Synthetic oligonucleotide
cagcactaagctacgggaatacactggacctgaatagtcttgacattgatgaacc

SEQ ID NO: 30146 - DNA, 60 bp, Artificial
  Synthetic oligonucleotide
gcactaagctacgggaatacactggacctgaatagtcttgacattgatgaacctacagga

SEQ ID NO: 30147 - DNA, 60 bp, Artificial
  Synthetic oligonucleotide
atacaactggaccagaggataattgttatgtttatggttgcctggggaaaggaggcagtg

SEQ ID NO: 30148 - DNA, 60 bp, Artificial
  Synthetic oligonucleotide
ctcaaggaaagatcagcactaagctacgggaatacactggacctgaatagtcttgacatt

SEQ ID NO: 30149 - DNA, 60 bp, Artificial
  Synthetic oligonucleotide
ggcacagctgatgaaaagcttcgaaagaaatcatcattctatcaatcatacctcaggcgc

SEQ ID NO: 30150 - DNA, 60 bp, Artificial
  Synthetic oligonucleotide
ggggatacaactggaccagaggataattgttatgtttatggttgcctggggaaaggaggc

SEQ ID NO: 30151 - DNA, 60 bp, Artificial
  Synthetic oligonucleotide
tgagtcaccatcgtcaatatgggtgtttgctggggcccctgataggtgtccaccaacatg

SEQ ID NO: 30152 - DNA, 60 bp, Artificial
  Synthetic oligonucleotide
ggtaggcagacttcaaaggacaacaaggggatgaggatcagattcaaggatgacagctca

SEQ ID NO: 30153 - DNA, 60 bp, Artificial
  Synthetic oligonucleotide
ggatcagattcaaggatgacagctcatatgaggatgttaacggaattagaaagcccaaac

SEQ ID NO: 30154 - DNA, 60 bp, Artificial
  Synthetic oligonucleotide
aataattgttatgtttatggttgcctggggaaaggaggcagtggacaactttcatctcgg

SEQ ID NO: 30155 - DNA, 60 bp, Artificial
  Synthetic oligonucleotide
gataattgttatgtttatggttgcctggggaaaggaggcagtggacaactttcatctcgg

SEQ ID NO: 30156 - DNA, 60 bp, Artificial
  Synthetic oligonucleotide
catattgagtcaccatcgtcaatatgggtgtttgctggggcccctgataggtgtccacca

SEQ ID NO: 30157 - DNA, 60 bp, Artificial
  Synthetic oligonucleotide
actagttgaacatattgagtcaccatcgtcaatatgggtgtttgctggggcccctgatag

SEQ ID NO: 30158 - DNA, 60 bp, Artificial
  Synthetic oligonucleotide
ggagccaaaggaatttcaagccctcaggcaacattcaaaggatgctggatgtacactggt

SEQ ID NO: 30159 - DNA, 60 bp, Artificial
  Synthetic oligonucleotide
tggagccaaaggaatttcaagccctcaggcaacattcaaaggatgctggatgtacactgg

SEQ ID NO: 30160 - DNA, 60 bp, Artificial
  Synthetic oligonucleotide
agcccaaacatctgtatgtgtcaatgccaaacgcccaatccagcatgaaggctgaagaga

SEQ ID NO: 30161 - DNA, 60 bp, Artificial
  Synthetic oligonucleotide
agcccaaacatctgtatgtgtcaatgccaaacgcccaatccagcatgaaagctgaagaga

SEQ ID NO: 30162 - DNA, 60 bp, Artificial
  Synthetic oligonucleotide
cggaaagcccaaacatctgtatgtgtcaatgccaaacgcccaatccagcatgaaagctga

SEQ ID NO: 30163 - DNA, 60 bp, Artificial
  Synthetic oligonucleotide
tcaatggaatcggaaagcccaaacatctgtatgtgtcaatgccaaacgcccaatccagca

SEQ ID NO: 30164 - DNA, 60 bp, Artificial
  Synthetic oligonucleotide
tcaatggaatcagaaagcccaaacatctgtatgtgtcaatgccaaacgcccaatccagca

SEQ ID NO: 30165 - DNA, 60 bp, Artificial
  Synthetic oligonucleotide
ttaacggaattagaaagcccaaacatctgtatgtgtcaatgccaaacgcccaatccagca

SEQ ID NO: 30166 - DNA, 60 bp, Artificial
  Synthetic oligonucleotide
cagatttgtatttcagatggccggtgctactgatgatgcacaaaaggattccatctacgc

SEQ ID NO: 30167 - DNA, 60 bp, Artificial
  Synthetic oligonucleotide
cagatttgtattccagatggctagtgccactgatgatgcacaaaaggattccatctacgc

SEQ ID NO: 30168 - DNA, 60 bp, Artificial
  Synthetic oligonucleotide
cagatttgtatttcagatggccagtgctactgatgatgcacaaaaggattccatctacgc

SEQ ID NO: 30169 - DNA, 60 bp, Artificial
  Synthetic oligonucleotide
gataagactagaggcttggccagaatgagtagtgatgagtcatatagattctttcttaac

SEQ ID NO: 30170 - DNA, 52 bp, Artificial
  Synthetic oligonucleotide
attaaggaaggccaaggcaatctcacgataattctcctcagacatgttgtta

SEQ ID NO: 30171 - DNA, 60 bp, Artificial
  Synthetic oligonucleotide
taggcaaattcattaacccaggcagtgatagtgcccgagtctgctgcttcattaaggaag

SEQ ID NO: 30172 - DNA, 60 bp, Artificial
  Synthetic oligonucleotide
ccagttgaacgattcttttaggatcaaacccctggtaggcaaattcattaacccaggcag

SEQ ID NO: 30173 - DNA, 60 bp, Artificial
  Synthetic oligonucleotide
agcacccttagagcctgaacggtccaaggaacaaaagcagctgagaccctggataacgtg

SEQ ID NO: 30174 - DNA, 60 bp, Artificial
  Synthetic oligonucleotide
agcagctgagaccctggataacgtgatggtgtccctgccaggatttccctctttcagctg

SEQ ID NO: 30175 - DNA, 60 bp, Artificial
  Synthetic oligonucleotide
cagaaatcagttgagcaacaatcccagctcccttctctgacatcttcttcatcatggtct

SEQ ID NO: 30176 - DNA, 60 bp, Artificial
  Synthetic oligonucleotide
ctttcagctggtaaacagaaatcagttgagcaacaatcccagctcccttctctgacatct

SEQ ID NO: 30177 - DNA, 60 bp, Artificial
  Synthetic oligonucleotide
gacatcttcttcatcatggtctcaggcttgtttcctcttacaagattgaggacaatcatc

SEQ ID NO: 30178 - DNA, 60 bp, Artificial
  Synthetic oligonucleotide
taaatcatagtctagacaagctgatctaacaatgcaatcatccctggttttcttaaaacc

SEQ ID NO: 30179 - DNA, 60 bp, Artificial
  Synthetic oligonucleotide
ttcctctctcttttaccagttgaacgattcttttaggatcaaacccctggtaggcaaatt

SEQ ID NO: 30180 - DNA, 60 bp, Artificial
  Synthetic oligonucleotide
gaggacaatcatcatcttaacatcctttttccagtcccttcctttagcagttcctctctc

SEQ ID NO: 30181 - DNA, 60 bp, Artificial
  Synthetic oligonucleotide
tggtgtcaacacaaggtcctcgttgagcactccaacagccatcagaagtttctttttgtc

SEQ ID NO: 30182 - DNA, 60 bp, Artificial
  Synthetic oligonucleotide
cctcccgtattgcgataaatcatagtctagacaagctgatctaacaatgcaatcatccct

SEQ ID NO: 30183 - DNA, 60 bp, Artificial
  Synthetic oligonucleotide
ctgatgaacctgatcttgttatgagcaagtatctcaagcttttagttaaagcatcaggat

SEQ ID NO: 30184 - DNA, 60 bp, Artificial
  Synthetic oligonucleotide
acatcttcttatctgatgaacctgatcttgttatgagcaagtatctcaagcttttagtta

SEQ ID NO: 30185 - DNA, 60 bp, Artificial
  Synthetic oligonucleotide
cccgcctttgttggatatgactcaataaccggccaaagaaccaagttgtatgacccaact

SEQ ID NO: 30186 - DNA, 60 bp, Artificial
  Synthetic oligonucleotide
agcagcaaattgcggttgtggctgcccagccccccaacattccccccaatctaaaaccca

SEQ ID NO: 30187 - DNA, 60 bp, Artificial
  Synthetic oligonucleotide
ggcccactccaggagaacagctctataaaggaaagtccagcagcaaattgcggttgtggc

SEQ ID NO: 30188 - DNA, 60 bp, Artificial
  Synthetic oligonucleotide
ggaccaaagactggcccactccaggagaacagctctataaaggaaagtccagcagcaaat

SEQ ID NO: 30189 - DNA, 60 bp, Artificial
  Synthetic oligonucleotide
gtctatttgcctaccttggagcgatatttttcagcacatttgactatggctggtgtcaac

SEQ ID NO: 30190 - DNA, 60 bp, Artificial
  Synthetic oligonucleotide
aagtttcccagattctatgtcaatgtgaagatggggaagtttgaccctctaaaaaggttc

SEQ ID NO: 30191 - DNA, 60 bp, Artificial
  Synthetic oligonucleotide
acccaccctcaacccgataacccaccctcaccctaatccccacactggcagtctatttgc

SEQ ID NO: 30192 - DNA, 60 bp, Artificial
  Synthetic oligonucleotide
aaaaaggttctgcctgttggagagtgaaatcccaatttatgtggataaatacaaggtcgt

SEQ ID NO: 30193 - DNA, 60 bp, Artificial
  Synthetic oligonucleotide
ctaaaacccacccaaatcatcatctaatcatttgcccatagcaccccagtcccaatccca

SEQ ID NO: 30194 - DNA, 60 bp, Artificial
  Synthetic oligonucleotide
ggctgtttagttctaagggatgggttgatggtcttggagaactctagcatgaagagacca

SEQ ID NO: 30195 - DNA, 60 bp, Artificial
  Synthetic oligonucleotide
cccaccctcaacccgataacccaccctcaccctaatccccacactggcagtctatttgcc

SEQ ID NO: 30196 - DNA, 60 bp, Artificial
  Synthetic oligonucleotide
ctgcctgttggagagtgaaatcccaatttatgtggataaatacaaggtcgttctagactc

SEQ ID NO: 30197 - DNA, 60 bp, Artificial
  Synthetic oligonucleotide
caagttgtatgacccaactattcaggagctctttggggagtctataaacagcttaaaaag

SEQ ID NO: 30198 - DNA, 60 bp, Artificial
  Synthetic oligonucleotide
ctttcttaacaacagtgagtcttttaggaaaaatgctctttccacaacgtggaccaaaga

SEQ ID NO: 30199 - DNA, 60 bp, Artificial
  Synthetic oligonucleotide
aaggaatttcccgcctttgttggatatgactcaataaccggccaaagaaccaagttgtat

SEQ ID NO: 30200 - DNA, 60 bp, Artificial
  Synthetic oligonucleotide
agtagaagtgcatagaaagactctcatggaaggcatgaagtatggactcacaaaagagga

SEQ ID NO: 30201 - DNA, 60 bp, Artificial
  Synthetic oligonucleotide
acccaggcagtgatagtgcccgagtctgctgcttcattaaggaaggccaaggcaatctca

SEQ ID NO: 30202 - DNA, 60 bp, Artificial
  Synthetic oligonucleotide
aatcatccctggttttcttaaaaccaaagtcttcaaaagacaggaatcgaaagtttccca

SEQ ID NO: 30203 - DNA, 60 bp, Artificial
  Synthetic oligonucleotide
gggagagaatcagaaagcacccttagagcctgaacggtccaaggaacaaaagcagctgag

SEQ ID NO: 30204 - DNA, 60 bp, Artificial
  Synthetic oligonucleotide
gaaagactctcatggaaggcatgaagtatggactcacaaaagaggacctgcctgggaatg

SEQ ID NO: 30205 - DNA, 60 bp, Artificial
  Synthetic oligonucleotide
cttttagttaaagcatcaggattattcaacacatcaattgaagatcagatagtagaagtg

SEQ ID NO: 30206 - DNA, 60 bp, Artificial
  Synthetic oligonucleotide
tcaggattattcaacacatcaattgaagatcagatagtagaagtgcatagaaagactctc

SEQ ID NO: 30207 - DNA, 60 bp, Artificial
  Synthetic oligonucleotide
ccagtcgagcttcacttagtgaaaaggtcccggaaggttgataagactagaggcttggcc

SEQ ID NO: 30208 - DNA, 60 bp, Artificial
  Synthetic oligonucleotide
aactctagcatgaagagaccatgtgcgtcagcaatggtttcaccagctctattaggcagg

SEQ ID NO: 30209 - DNA, 57 bp, Artificial
  Synthetic oligonucleotide
agctgctagagtggcaagttctgtggcaaagtctgttaatcgtgggatcaatgattt

SEQ ID NO: 30210 - DNA, 60 bp, Artificial
  Synthetic oligonucleotide
tttctgttagtccagtcgagcttcacttagtgaaaaggtcccggaaggttgataagacta

SEQ ID NO: 30211 - DNA, 60 bp, Artificial
  Synthetic oligonucleotide
caatctcattaggctgtttagttctaagggatgggttgatggtcttggagaactctagca

SEQ ID NO: 30212 - DNA, 60 bp, Artificial
  Synthetic oligonucleotide
taaaacccacccaaatcatcatctaatcatttgcccatagcaccccagtcccaatcccac

SEQ ID NO: 30213 - DNA, 60 bp, Artificial
  Synthetic oligonucleotide
ggcttggccagaatgagtagtgatgagtcatatagattctttcttaacaacagtgagtct

SEQ ID NO: 30214 - DNA, 60 bp, Artificial
  Synthetic oligonucleotide
catgaagagaccatgtgcgtcagcaatggtttcaccagctctattaggcaggtctagatc

SEQ ID NO: 30215 - DNA, 60 bp, Artificial
  Synthetic oligonucleotide
attaggcaggtctagatctatgatccctgcgaagctggggtgcatcatagcccttggata

SEQ ID NO: 30216 - DNA, 60 bp, Artificial
  Synthetic oligonucleotide
gatctatgatccctgcgaagctggggtgcatcatagcccttggatatgtcacacctgcga

SEQ ID NO: 30217 - DNA, 60 bp, Artificial
  Synthetic oligonucleotide
cccttggatatgtcacacctgcgatggcatccatagtggtcccagttacagggagagaat

SEQ ID NO: 30218 - DNA, 60 bp, Artificial
  Synthetic oligonucleotide
cacacctgcgatggcatccatagtggtcccagttacagggagagaatcagaaagcaccct

SEQ ID NO: 30219 - DNA, 60 bp, Artificial
  Synthetic oligonucleotide
gattaaattcacacatacactgattgggttgggtgggtcgaatcaaacacatataagctg

SEQ ID NO: 30220 - DNA, 60 bp, Artificial
  Synthetic oligonucleotide
attacaattcacacatacactgattgggttgggtgggtcaaatcagacacatataagctg

SEQ ID NO: 30221 - DNA, 60 bp, Artificial
  Synthetic oligonucleotide
tttggctctggcaaaagattggagtgaccgtattgagcagtggctaagtgaaccttgtaa

SEQ ID NO: 30222 - DNA, 60 bp, Artificial
  Synthetic oligonucleotide
gtgctctttatggttgcctggggtaaagaggcagtagataatttccaccttggagatgat

SEQ ID NO: 30223 - DNA, 60 bp, Artificial
  Synthetic oligonucleotide
actgaggattgtgctttctgtaggaaaatcaagaagaaagctggtcagtctgttcaggtg

SEQ ID NO: 30224 - DNA, 60 bp, Artificial
  Synthetic oligonucleotide
atgtgagataggaacaaacaaagagtttaaatgtttcgaggagagagcttatataaaggg

SEQ ID NO: 30225 - DNA, 60 bp, Artificial
  Synthetic oligonucleotide
aatgatatcacttctagagactcaacaaagtgagaatgacataaagacacaagtactgat

SEQ ID NO: 30226 - DNA, 60 bp, Artificial
  Synthetic oligonucleotide
ccacacaccaggatcagggccattatacataaatctcatgggctcatggataaaacccca

SEQ ID NO: 30227 - DNA, 60 bp, Artificial
  Synthetic oligonucleotide
gcacaggaatgtacaaatatgatgaaaatgatgactcaggctgtagaccaataagatatg

SEQ ID NO: 30228 - DNA, 60 bp, Artificial
  Synthetic oligonucleotide
gatatcacttctagagactcaacaaagtgagaatgacataaagacacaagtactgatgtc

SEQ ID NO: 30229 - DNA, 60 bp, Artificial
  Synthetic oligonucleotide
gacatgtgaaataggaacaaacaaagagtttaaatgttttgaggagagagcttacataaa

SEQ ID NO: 30230 - DNA, 60 bp, Artificial
  Synthetic oligonucleotide
caggaatgtacaaatatgatgaaaatgatgactcaggctgtagaccaataagatatggag

SEQ ID NO: 30231 - DNA, 60 bp, Artificial
  Synthetic oligonucleotide
gttaagcagccattgcttgtaccagagcagaactgtgacacctgtgtttcagagtgtcta

SEQ ID NO: 30232 - DNA, 60 bp, Artificial
  Synthetic oligonucleotide
gccattgcttgtaccagagcagaactgtgacacctgtgtttcagagtgtctagatgaagg

SEQ ID NO: 30233 - DNA, 60 bp, Artificial
  Synthetic oligonucleotide
ccattgcttgcaccagaacagaactgtgacacctgtgtttcagagtgtctagatgagggg

SEQ ID NO: 30234 - DNA, 60 bp, Artificial
  Synthetic oligonucleotide
acacctctcacatacttctgattctgctagtgtacacatggtagtggtttgccctcccag

SEQ ID NO: 30235 - DNA, 60 bp, Artificial
  Synthetic oligonucleotide
gaagactgtgctttctgcaggaaaatcaagaagaaagctggtcagtctgttcaggtgcag

SEQ ID NO: 30236 - DNA, 60 bp, Artificial
  Synthetic oligonucleotide
gaggattgtgctttctgtaggaaaatcaagaagaaagctggtcagtctgttcaggtgcag

SEQ ID NO: 30237 - DNA, 60 bp, Artificial
  Synthetic oligonucleotide
ccatgcgccaggatcaggaccactgtacataaatctcatgggctcatggataaaacccca

SEQ ID NO: 30238 - DNA, 60 bp, Artificial
  Synthetic oligonucleotide
aactataactttaagggcaggtgtgattggtgctgagtcatgtttcataataaaaggccc

SEQ ID NO: 30239 - DNA, 60 bp, Artificial
  Synthetic oligonucleotide
aaaccagagaataggatgggttgaccatcatgatgtagagagaccaaggcacagagaacc

SEQ ID NO: 30240 - DNA, 60 bp, Artificial
  Synthetic oligonucleotide
gtgttctattactgcaactataactttaagggcaggtgtgattggtgctgagtcatgttt

SEQ ID NO: 30241 - DNA, 60 bp, Artificial
  Synthetic oligonucleotide
cccaggggttgcacactctcttgctgtagagttatgtgtaccaggtcttcatggctgggc

SEQ ID NO: 30242 - DNA, 60 bp, Artificial
  Synthetic oligonucleotide
caggtcttcatggctgggcaactatgttattgttactaacattttgctttggatgggttc

SEQ ID NO: 30243 - DNA, 60 bp, Artificial
  Synthetic oligonucleotide
ggctcatgtccttattgtcttaacccgtctgaggcaacaacatctgccctccaggcccat

SEQ ID NO: 30244 - DNA, 60 bp, Artificial
  Synthetic oligonucleotide
aaaagaactttgagactcttgtccagaagaatggttgtacagccaatagttttcaaggtt

SEQ ID NO: 30245 - DNA, 60 bp, Artificial
  Synthetic oligonucleotide
ggtttagtctggtgtgtgctattagttttagagttgattgtatgggctgctagtgctgag

SEQ ID NO: 30246 - DNA, 60 bp, Artificial
  Synthetic oligonucleotide
caacagcatccatagatggggcatggggttcaggggttggttttaacctggtctgtactg

SEQ ID NO: 30247 - DNA, 60 bp, Artificial
  Synthetic oligonucleotide
tggattgatcctgacagttcacttagggatcatataaatgtaattgtaagccgtgattta

SEQ ID NO: 30248 - DNA, 60 bp, Artificial
  Synthetic oligonucleotide
tgtatgggctgctagtgctgagacacagaatttgaatgcaggctggactgatacagcaca

SEQ ID NO: 30249 - DNA, 60 bp, Artificial
  Synthetic oligonucleotide
tgtcacagaaccccacatatctgcaagtgcattagaatggattgatcctgacagttcact

SEQ ID NO: 30250 - DNA, 60 bp, Artificial
  Synthetic oligonucleotide
gatggaaatacaatttcaggatacaaaaggatgattgctacaaaggattcatttcaatct

SEQ ID NO: 30251 - DNA, 60 bp, Artificial
  Synthetic oligonucleotide
ccctctgataccctcctattcctaggtcctctccaacagggtggtttaatatttaagcaa

SEQ ID NO: 30252 - DNA, 60 bp, Artificial
  Synthetic oligonucleotide
catactattgggttgggtcaaggccttgttgtaggatcagtggaactgccacctgtccca

SEQ ID NO: 30253 - DNA, 60 bp, Artificial
  Synthetic oligonucleotide
gctctttctcaacccagtcatacttatgatatagttactatgatggttcgttgttttcta

SEQ ID NO: 30254 - DNA, 60 bp, Artificial
  Synthetic oligonucleotide
gggcagttggttgagggtgtctgtttcaatccaatacatacaatggctctttctcaaccc

SEQ ID NO: 30255 - DNA, 60 bp, Artificial
  Synthetic oligonucleotide
tttcaaggttattacatctgtcttatagggagtagctcagagccactgtatgtcccaaca

SEQ ID NO: 30256 - DNA, 60 bp, Artificial
  Synthetic oligonucleotide
gcttaacagagtgttctgcatttcttacttcaattaaggcatgtgatgccgcaatgtgtt

SEQ ID NO: 30257 - DNA, 60 bp, Artificial
  Synthetic oligonucleotide
gtaattttgatttgcatactagtacagcaggacaacaggcatttacaaagtggacatggg

SEQ ID NO: 30258 - DNA, 60 bp, Artificial
  Synthetic oligonucleotide
cggttctttgttggtttagtctggtgtgtgctattagttttagagttgattgtatgggct

SEQ ID NO: 30259 - DNA, 60 bp, Artificial
  Synthetic oligonucleotide
ctatcatgtaatcaaacagtatgtcagcctactgtgtatcttatgggacccatccaaact

SEQ ID NO: 30260 - DNA, 60 bp, Artificial
  Synthetic oligonucleotide
aaaaggattatgagtatgagactggttggggctgtaacccacctgattgccctggagtag

SEQ ID NO: 30261 - DNA, 60 bp, Artificial
  Synthetic oligonucleotide
gggcctaggtgatcaaagaattcaagtgaattatgaaaagacatactgtgtttcagggca

SEQ ID NO: 30262 - DNA, 61 bp, Artificial
  Synthetic oligonucleotide
gaacaagaaaacataccatttcatctacagataagtaaacaggtaatccatgcagagatac

SEQ ID NO: 30263 - DNA, 60 bp, Artificial
  Synthetic oligonucleotide
gcacatggatctgggataatacctatgaaaactgaccttgaattggacttctctcttcct

SEQ ID NO: 30264 - DNA, 60 bp, Artificial
  Synthetic oligonucleotide
gacttctctcttccttcatctgcaagctatacatataggagacagctacagaatccagct

SEQ ID NO: 30265 - DNA, 60 bp, Artificial
  Synthetic oligonucleotide
tctaattccaactctagttattgagacagcagcaagaatgcggaaaacaatagcatgtta

SEQ ID NO: 30266 - DNA, 60 bp, Artificial
  Synthetic oligonucleotide
gctcgaccactggccttgttgcagctgcaccacatttagatcgtgtgacgggatacaatc

SEQ ID NO: 30267 - DNA, 60 bp, Artificial
  Synthetic oligonucleotide
ggacatgggaaataaaaggtgatcttgcagaaaatacacaggcatcatcaacaagttttc

SEQ ID NO: 30268 - DNA, 60 bp, Artificial
  Synthetic oligonucleotide
gggacccatccaaacttgcataacaactaagagttgtcttttgggcctaggtgatcaaag

SEQ ID NO: 30269 - DNA, 60 bp, Artificial
  Synthetic oligonucleotide
aacccacctgattgccctggagtagggacaggctgtactgcctgtggggcctatcttgat

SEQ ID NO: 30270 - DNA, 60 bp, Artificial
  Synthetic oligonucleotide
gaaagtgtgtattcaattaggcactgaacaaacctgtaagactgttgatagtaatgactg

SEQ ID NO: 30271 - DNA, 60 bp, Artificial
  Synthetic oligonucleotide
ggatgactatcgttctgctgaagtcctttcaagaatggcatttgcacctcatggggaaga

SEQ ID NO: 30272 - DNA, 60 bp, Artificial
  Synthetic oligonucleotide
gggaaagtgacagggaaagcaccatccaccgagtcttctgacacagtacaaggtgttgca

SEQ ID NO: 30273 - DNA, 60 bp, Artificial
  Synthetic oligonucleotide
ctgggccccgggtattatcatggaagggaaccattctgtctgtgagaaaaagaccttacc

SEQ ID NO: 30274 - DNA, 60 bp, Artificial
  Synthetic oligonucleotide
cctctcacatggactgggttcatctcattgcctggagaaattgagaagacaacacaatgc

SEQ ID NO: 30275 - DNA, 60 bp, Artificial
  Synthetic oligonucleotide
agactgtgaagcttattctgaaacaggcatttttaatataagctcaccaacttgcctaat

SEQ ID NO: 30276 - DNA, 60 bp, Artificial
  Synthetic oligonucleotide
tgttgggaagggtgggcattctggctcaaaatttatgtgttgtcatgacacaaaatgctc

SEQ ID NO: 30277 - DNA, 60 bp, Artificial
  Synthetic oligonucleotide
ttgttttctagttataaaaaaggtgacatctggtgatagcatgaagattgaaaagaactt

SEQ ID NO: 30278 - DNA, 60 bp, Artificial
  Synthetic oligonucleotide
gtggaactgccacctgtcccaatacagcaggtggaaacattgaagctggaaagttcttgt

SEQ ID NO: 30279 - DNA, 55 bp, Artificial
  Synthetic oligonucleotide
cagattctatcccctagcaattggcatttacaaggtgcagaggaaagagatggag

SEQ ID NO: 30280 - DNA, 60 bp, Artificial
  Synthetic oligonucleotide
ttgttaatccacttgcagaaaaaaacggtataacctgggcagatggggaggaggtttacc

SEQ ID NO: 30281 - DNA, 60 bp, Artificial
  Synthetic oligonucleotide
gaggtttacctctcattctttccagggtctgaaatgttcttaggaactttcagattctat

SEQ ID NO: 30282 - DNA, 60 bp, Artificial
  Synthetic oligonucleotide
aaagggtatatccgatgattgaattggaattcaatgatgtcgctgctaacaccagcagta

SEQ ID NO: 30283 - DNA, 60 bp, Artificial
  Synthetic oligonucleotide
ccatgcgccaaagatatatgggcttggaagcatcaacttggacagtcagtaagctgaacg

SEQ ID NO: 30284 - DNA, 60 bp, Artificial
  Synthetic oligonucleotide
ttcagtctgcactgactgtagtatcaggacttgggtggaagaagacaaatgtgagcagtg

SEQ ID NO: 30285 - DNA, 50 bp, Artificial
  Synthetic oligonucleotide
gctaaaagagtccctggactcaaaaagtaaaaacagcttgttgggtgggt

SEQ ID NO: 30286 - DNA, 60 bp, Artificial
  Synthetic oligonucleotide
ccactggttatcgacatgcaccgtgtgataaaggatggaatggatgtcaacttcatgagg

SEQ ID NO: 30287 - DNA, 60 bp, Artificial
  Synthetic oligonucleotide
tgtccctgcatctttcgatacatgtgctttaaggatgatgctctgcattggaggtcctct

SEQ ID NO: 30288 - DNA, 60 bp, Artificial
  Synthetic oligonucleotide
ggcagtggaagtggacccagatgacgttaacaaaagcacattacagggtagacgggcggc

SEQ ID NO: 30289 - DNA, 60 bp, Artificial
  Synthetic oligonucleotide
ggggcgatatcaacaagtcaggtcggtcaggaatagcacttgttgcaacaggccttgcca

SEQ ID NO: 30290 - DNA, 60 bp, Artificial
  Synthetic oligonucleotide
tcaatctgtgaagcagaaagtactttggctactttgcaaacctgttcataagtagaaaag

SEQ ID NO: 30291 - DNA, 60 bp, Artificial
  Synthetic oligonucleotide
gaatacaagaagggggtttcttttggtagtgtcatgtattcttggacaaaggagttttgt

SEQ ID NO: 30292 - DNA, 60 bp, Artificial
  Synthetic oligonucleotide
cctggatgtcaactccattgatctggaagaaccaagtggacagactgctgattggaggtc

SEQ ID NO: 30293 - DNA, 60 bp, Artificial
  Synthetic oligonucleotide
tgctggatgtcaactccattgatctggaagaaccaagtggccaaactgctgactggaggg

SEQ ID NO: 30294 - DNA, 60 bp, Artificial
  Synthetic oligonucleotide
ggtatggcaacgtcctggatgtcaactccattgatctggaagaaccaagtgggcagactg

SEQ ID NO: 30295 - DNA, 60 bp, Artificial
  Synthetic oligonucleotide
ggcaacgtcctggatgtcaactccattgatctggaagaaccaagtgggcagactgccgac

SEQ ID NO: 30296 - DNA, 60 bp, Artificial
  Synthetic oligonucleotide
tgcgatatgtaaaatgtaaggaaaatctggaaatgactgaggattgtgctttctgtagga

SEQ ID NO: 30297 - DNA, 60 bp, Artificial
  Synthetic oligonucleotide
catcagttgctcccattatagctgcacctccagattcaccgatgattaatccatggcctc

SEQ ID NO: 30298 - DNA, 60 bp, Artificial
  Synthetic oligonucleotide
gatatggagtttcatgcataggatttgactttatgctcaagatggacaaataccctttct

SEQ ID NO: 30299 - DNA, 60 bp, Artificial
  Synthetic oligonucleotide
caaacaaagagtttaaatgtttcgaggagagagcttatataaaggggacatgtccgacca

SEQ ID NO: 30300 - DNA, 60 bp, Artificial
  Synthetic oligonucleotide
cagacttgatggccaggaattctgacttacggaagcataatgacattctcactgctgaaa

SEQ ID NO: 30301 - DNA, 60 bp, Artificial
  Synthetic oligonucleotide
gaggtggttacgaatgtctcttttgtttgctacgaacatgtagggcaggatgagcaagag

SEQ ID NO: 30302 - DNA, 60 bp, Artificial
  Synthetic oligonucleotide
tgttcaggtgcagaaaacttcagttccactccaggatgcaatttgtcaagaaaattcaga

SEQ ID NO: 30303 - DNA, 60 bp, Artificial
  Synthetic oligonucleotide
aacaatcctcaaaacataaaaaaggaccggccctcatgcacacttcacccatgcagtcta

SEQ ID NO: 30304 - DNA, 60 bp, Artificial
  Synthetic oligonucleotide
caaaacaaacggcaagccaaatcaaaaatacaagacaacaacataacataggcaaacaaa

SEQ ID NO: 30305 - DNA, 60 bp, Artificial
  Synthetic oligonucleotide
ggggcaccctgtcattatccctggatgcagaaggcatcagcggaaccaacagcatcagct

SEQ ID NO: 30306 - DNA, 60 bp, Artificial
  Synthetic oligonucleotide
ctccagtgagacagtatgcagagagggatcaagcttctggactagtttatatatcccatc

SEQ ID NO: 30307 - DNA, 60 bp, Artificial
  Synthetic oligonucleotide
aagggcaggtgtgattggtgcagagtcgtgctttataataaaaggccctatggagaatca

SEQ ID NO: 30308 - DNA, 60 bp, Artificial
  Synthetic oligonucleotide
tgaaacagagctggtcacattgggaagtccaggcaccaagtttttaaactggggcaccct

SEQ ID NO: 30309 - DNA, 60 bp, Artificial
  Synthetic oligonucleotide
gcacagatgttggtttactgttcattttataaacttagtgagatgtgccggtctttgtgt

SEQ ID NO: 30310 - DNA, 60 bp, Artificial
  Synthetic oligonucleotide
ctcgtaatgagcatgtattctttaactacgtgggacagcaccagcagaaatgacatgtgc

SEQ ID NO: 30311 - DNA, 60 bp, Artificial
  Synthetic oligonucleotide
gattacattgtagactgcgtgactggcttgtatcagtcagatattggagtcggtgtgggg

SEQ ID NO: 30312 - DNA, 60 bp, Artificial
  Synthetic oligonucleotide
agactatcatattcttgtggatcagagcctaagctgatagtgatcaagggaacattggtt

SEQ ID NO: 30313 - DNA, 60 bp, Artificial
  Synthetic oligonucleotide
agagtctcagagatgcagagttggagattcagacaaaaaaatgataactaatgtcacaat

SEQ ID NO: 30314 - DNA, 60 bp, Artificial
  Synthetic oligonucleotide
tcaaagaagcgaaatgagagaggccaggagaaaagagatgctgagaaggtgatgtcagac

SEQ ID NO: 30315 - DNA, 60 bp, Artificial
  Synthetic oligonucleotide
gtacaggaaggatcaaacacaaagtgctcaatcactgcaactataactttaagggcaggt

SEQ ID NO: 30316 - DNA, 60 bp, Artificial
  Synthetic oligonucleotide
tccacatcagtaattgtcccatacccaggattgttggccagtgtgggcggaagaattggg

SEQ ID NO: 30317 - DNA, 60 bp, Artificial
  Synthetic oligonucleotide
ggggtccatataaagtccactggttttgagataacatcagcagtagcctgctcacatggg

SEQ ID NO: 30318 - DNA, 60 bp, Artificial
  Synthetic oligonucleotide
gattgttccacatcctatccagatgttacttgtatccatgcgccaggatcaggaccactg

SEQ ID NO: 30319 - DNA, 60 bp, Artificial
  Synthetic oligonucleotide
taaaaccccaatgtgtgggctatgagagagtcttagtagacagggaagtcaagcagccat

SEQ ID NO: 30320 - DNA, 60 bp, Artificial
  Synthetic oligonucleotide
cgcaattttccttaaaggatctcttcctcagactagaaatggacaaacattcaccagcac

SEQ ID NO: 30321 - DNA, 60 bp, Artificial
  Synthetic oligonucleotide
ggagctcatgtctgtgtgaaagttaaatcttcagagtcagctgatttctttgcagaatca

SEQ ID NO: 30322 - DNA, 60 bp, Artificial
  Synthetic oligonucleotide
gaggaaatgcttgctccaatacagtagtggctaactcaaagcaaaccagatgtgtacagg

SEQ ID NO: 30323 - DNA, 60 bp, Artificial
  Synthetic oligonucleotide
caggtggctcttcaacagtagtaaacccttcagaaggtgcctggagcatttcaaattggt

SEQ ID NO: 30324 - DNA, 60 bp, Artificial
  Synthetic oligonucleotide
tgttatgaggaggataaaccagagaataggatgggttgaccatcatgatgtagagagacc

SEQ ID NO: 30325 - DNA, 60 bp, Artificial
  Synthetic oligonucleotide
accaagagagggatttctaggtgagataaggtgtagttctgaatccgcagctatatcagc

SEQ ID NO: 30326 - DNA, 60 bp, Artificial
  Synthetic oligonucleotide
tattatatgtgctcagactaataccaaaacagctaaagagtccagtgggatggctcaagc

SEQ ID NO: 30327 - DNA, 60 bp, Artificial
  Synthetic oligonucleotide
tggtagtggtttgccctcctagagacagttgtgcagctcataattgcttgctatgctatc

SEQ ID NO: 30328 - DNA, 60 bp, Artificial
  Synthetic oligonucleotide
acgggcagctgtgtctacattggagaccaaactcggggaactcaagagacaacttgcaga

SEQ ID NO: 30329 - DNA, 60 bp, Artificial
  Synthetic oligonucleotide
gctggttgcaattcgggcagcatttgaagctgtcggagcactcccatgggcaaaaactgg

SEQ ID NO: 30330 - DNA, 55 bp, Artificial
  Synthetic oligonucleotide
gctggttgcaattcgggcagcatttgaagctgtcggagcactcccatgggcaaaa

SEQ ID NO: 30331 - DNA, 60 bp, Artificial
  Synthetic oligonucleotide
caccgcctctccggctaccttgcgagatggctaatgactttctactctcaaagcccagtc

SEQ ID NO: 30332 - DNA, 60 bp, Artificial
  Synthetic oligonucleotide
ggacagtgtacatttccagtggttaataaccattttccacagttccaatcaaatccggtt

SEQ ID NO: 30333 - DNA, 60 bp, Artificial
  Synthetic oligonucleotide
caaaaactggattcttttcagctgcaagagaattcttggctcaatttggtatccgcatat

SEQ ID NO: 30334 - DNA, 60 bp, Artificial
  Synthetic oligonucleotide
atggctgatgcgatagttttcaacgatgtacctcaacgggctcaatctacgtttgatccg

SEQ ID NO: 30335 - DNA, 60 bp, Artificial
  Synthetic oligonucleotide
gatgcgatagttttcaacgatgtacctcaacgggctcaatctacgtttgatccggaggca

SEQ ID NO: 30336 - DNA, 60 bp, Artificial
  Synthetic oligonucleotide
accgtgtgctcaaagacgggatggatgtaaacttcatgcggaaggttctccgccagcgct

SEQ ID NO: 30337 - DNA, 60 bp, Artificial
  Synthetic oligonucleotide
ccgtgtgctcaaagacgggatggatgtaaacttcatgcggaaggttctccgccagcgcta

SEQ ID NO: 30338 - DNA, 60 bp, Artificial
  Synthetic oligonucleotide
gtgaaaggatgctcatgggatgatggaccaccattctacttggggtttgcctcaggagct

SEQ ID NO: 30339 - DNA, 60 bp, Artificial
  Synthetic oligonucleotide
catgggatgatggaccaccattctacttggggtttgcctcaggagctgaaatgttcctgc

SEQ ID NO: 30340 - DNA, 60 bp, Artificial
  Synthetic oligonucleotide
ctgctttcagtgttggtaatcttggcagaaatgaagacattaaagctaatgaggctgaga

SEQ ID NO: 30341 - DNA, 52 bp, Artificial
  Synthetic oligonucleotide
ttgactctgcttctccatcctgctggaaagagtccaaaggtttaggacactt

SEQ ID NO: 30342 - DNA, 60 bp, Artificial
  Synthetic oligonucleotide
gcagaaatcaatgaataacccttcagttcctacaaacagactcttatcagcttccacaat

SEQ ID NO: 30343 - DNA, 61 bp, Artificial
  Synthetic oligonucleotide
gcttccacaataaaagcaatagaaatagcatcaaacattgcctgcaataaatctactgttc

SEQ ID NO: 30344 - DNA, 60 bp, Artificial
  Synthetic oligonucleotide
gcttccacaataaaagcaatagaaatagcatcaaacattgcctgcaataaatctactgtt

SEQ ID NO: 30345 - DNA, 60 bp, Artificial
  Synthetic oligonucleotide
tcagaacaggcccgggagctataactcaacactgcttcccaaaaatcattcagactgtag

SEQ ID NO: 30346 - DNA, 60 bp, Artificial
  Synthetic oligonucleotide
cagactgtaggaaagtggtcggagccagttttggtattgtcgaacaaaaatcaactgatc

SEQ ID NO: 30347 - DNA, 60 bp, Artificial
  Synthetic oligonucleotide
atccaccactcttgcaatcctacctgtgtcagtctcagtcttgtcatatcttgactctgc

SEQ ID NO: 30348 - DNA, 60 bp, Artificial
  Synthetic oligonucleotide
ttcagtctcatcagattcaattaccacatccacatctccgccagacagaagtttctcgat

SEQ ID NO: 30349 - DNA, 60 bp, Artificial
  Synthetic oligonucleotide
ttcaattaccacatccacatctccgccagacagaagtttctcgatttctgacggtttcac

SEQ ID NO: 30350 - DNA, 51 bp, Artificial
  Synthetic oligonucleotide
aacccggtaaagcctacggtcaaattctaagttctatctaagacttagagt

SEQ ID NO: 30351 - DNA, 60 bp, Artificial
  Synthetic oligonucleotide
gcctgctctgtttctaagaatagtgtagccattattgaatgtcatttggacaccttcatt

SEQ ID NO: 30352 - DNA, 60 bp, Artificial
  Synthetic oligonucleotide
acctcctgaatgtccaatcgtcttgattgggactcacattagcactaggaataacaatgg

SEQ ID NO: 30353 - DNA, 60 bp, Artificial
  Synthetic oligonucleotide
gtccaatcgtcttgattgggactcacattagcactaggaataacaatggtctttccttgg

SEQ ID NO: 30354 - DNA, 60 bp, Artificial
  Synthetic oligonucleotide
agaggaagcccgcagattttttcatacattttctgcttttccttttcatcctttgtttca

SEQ ID NO: 30355 - DNA, 60 bp, Artificial
  Synthetic oligonucleotide
ctttgtttcaatcagttctacgagcattctagctctgataaagccttccaacctcctgaa

SEQ ID NO: 30356 - DNA, 60 bp, Artificial
  Synthetic oligonucleotide
ctgtagttgcatgaaacttgctacttggtttcaaaccatatgcacttaccagaggaagcc

SEQ ID NO: 30357 - DNA, 60 bp, Artificial
  Synthetic oligonucleotide
gttgcatgaaacttgctacttggtttcaaaccatatgcacttaccagaggaagcccgcag

SEQ ID NO: 30358 - DNA, 60 bp, Artificial
  Synthetic oligonucleotide
ctacggcagtcgatttcctttcgaactacggaatatcttgtgactctcgttcaagcaacg

SEQ ID NO: 30359 - DNA, 60 bp, Artificial
  Synthetic oligonucleotide
tcttgtgactctcgttcaagcaacgattgttacagggtattctctggtaatggcaaaatt

SEQ ID NO: 30360 - DNA, 60 bp, Artificial
  Synthetic oligonucleotide
tgtctaccgttaggactacggcagtcgatttcctttcgaactacggaatatcttgtgact

SEQ ID NO: 30361 - DNA, 60 bp, Artificial
  Synthetic oligonucleotide
ggatgtttccatgcactcaacgatcggaatcaaacctgctttcagtgttggtaatcttgg

SEQ ID NO: 30362 - DNA, 60 bp, Artificial
  Synthetic oligonucleotide
gcaatcctacctgtgtcagtctcagtcttgtcatatcttgactctgcttctccatcctgc

SEQ ID NO: 30363 - DNA, 60 bp, Artificial
  Synthetic oligonucleotide
cttgtgactctcgttcaagcaacgattgttacagggtattctctggtaatggcaaaattt

SEQ ID NO: 30364 - DNA, 60 bp, Artificial
  Synthetic oligonucleotide
tggcaaaattttaatggatgtttccatgcactcaacgatcggaatcaaacctgctttcag

SEQ ID NO: 30365 - DNA, 60 bp, Artificial
  Synthetic oligonucleotide
gctttcagtgttggtaatcttggcagaaatgaagacattaaagctaatgaggctgagatg

SEQ ID NO: 30366 - DNA, 60 bp, Artificial
  Synthetic oligonucleotide
gaggctgagatgatagatgaatatcacaactatgatgttttcaacaaatttggtcttgat

SEQ ID NO: 30367 - DNA, 60 bp, Artificial
  Synthetic oligonucleotide
ttgtcttgtaaatgcctgctctgtttctaagaatagtgtagccattattgaatgtcattt

SEQ ID NO: 30368 - DNA, 60 bp, Artificial
  Synthetic oligonucleotide
aagacttgccatcaaagtgagaggaccacctagtgtcagcatgatcctagctgtagttgc

SEQ ID NO: 30369 - DNA, 60 bp, Artificial
  Synthetic oligonucleotide
ttgacattctggaaataagctaatggaagagcagctgcagcaaagatgtcaagacttgcc

SEQ ID NO: 30370 - DNA, 60 bp, Artificial
  Synthetic oligonucleotide
tttgagccttcaacacaattgctcaggcaaggtatgggcaaaatgactgaatctgatttc

SEQ ID NO: 30371 - DNA, 60 bp, Artificial
  Synthetic oligonucleotide
gtatttctctgtgaatttgaattcctttgctgccatgactcttgcaactttgcagagttg

SEQ ID NO: 30372 - DNA, 60 bp, Artificial
  Synthetic oligonucleotide
tacttcctactggaaagagaatatggacaaaacatctctaatatcagtaaagcagaaatc

SEQ ID NO: 30373 - DNA, 60 bp, Artificial
  Synthetic oligonucleotide
cctattcaaacctttctaaagacgaaatatacccgaacgaatggttcgtaagtgaagcaa

SEQ ID NO: 30374 - DNA, 60 bp, Artificial
  Synthetic oligonucleotide
atctgatttctatacctattcaaacctttctaaagacgaaatatacccgaacgaatggtt

SEQ ID NO: 30375 - DNA, 60 bp, Artificial
  Synthetic oligonucleotide
ccttcaacacaattgctcaggcaaggtatgggcaaaatgactgaatctgatttctatacc

SEQ ID NO: 30376 - DNA, 60 bp, Artificial
  Synthetic oligonucleotide
gccatcaaagtgagaggaccacctagtgtcagcatgatcctagctgtagttgcatgaaac

SEQ ID NO: 30377 - DNA, 60 bp, Artificial
  Synthetic oligonucleotide
attatgagacaaagtttcagatgcacaatcagatatttgagccttcaacacaattgctca

SEQ ID NO: 30378 - DNA, 60 bp, Artificial
  Synthetic oligonucleotide
aaccttctctaaagaattatgagacaaagtttcagatgcacaatcagatatttgagcctt

SEQ ID NO: 30379 - DNA, 60 bp, Artificial
  Synthetic oligonucleotide
tggtcttgatattagtttttgcaaccacttcatggagatatctgtaaagaaaccttctct

SEQ ID NO: 30380 - DNA, 60 bp, Artificial
  Synthetic oligonucleotide
tgcagagttgctcgtaagttgagaatctgcttataccgagtgcttcctttttgacattct

SEQ ID NO: 30381 - DNA, 51 bp, Artificial
  Synthetic oligonucleotide
tgcagagttgctcgtaagttgagaatctgcttataccgagtgcttcctttt

SEQ ID NO: 30382 - DNA, 60 bp, Artificial
  Synthetic oligonucleotide
gacattctggaaataagctaatggaagagcagctgcagcaaagatgtcaagacttgccat

SEQ ID NO: 30383 - DNA, 60 bp, Artificial
  Synthetic oligonucleotide
ccaaaagcaccttcaagaattttaatctgttcattgaatttgatcaatgaagcagcaccc

SEQ ID NO: 30384 - DNA, 51 bp, Artificial
  Synthetic oligonucleotide
aaacacaaaatgactggaaacacttataaaacttaactaacacaaatactg

SEQ ID NO: 30385 - DNA, 60 bp, Artificial
  Synthetic oligonucleotide
aaacacacaagaagaagattacaaataagacttaaacagatttaaacattaaacacaaaa

SEQ ID NO: 30386 - DNA, 60 bp, Artificial
  Synthetic oligonucleotide
agcagaaatcaatgaataacccttcagttcctacaaacagactcttatcagcttccacaa

SEQ ID NO: 30387 - DNA, 66 bp, Artificial
  Synthetic oligonucleotide
ctggaaagagaatatggacaaaacatctctaatatcagtaaagcagaaatcaatgaataacccttc

SEQ ID NO: 30388 - DNA, 60 bp, Artificial
  Synthetic oligonucleotide
tacagttgacagttaagccatacaatcagaagatagacttgtcgcagttagatgaatcaa

SEQ ID NO: 30389 - DNA, 60 bp, Artificial
  Synthetic oligonucleotide
cattgcctatgggcatccgctctcaacaagtcaaattggtgaccgctgttttgctggtgg

SEQ ID NO: 30390 - DNA, 60 bp, Artificial
  Synthetic oligonucleotide
aataacagcacatatctgtgggagagacattgatttacagttgacagttaagccatacaa

SEQ ID NO: 30391 - DNA, 60 bp, Artificial
  Synthetic oligonucleotide
gaacacaacgaaagatgcacaggccactgccccgaaaagattcctgcaaaagaaggttgg

SEQ ID NO: 30392 - DNA, 60 bp, Artificial
  Synthetic oligonucleotide
gaatcaaattacataagggaagaggacctccagtgtggaacatggttatgtaaggtgcaa

SEQ ID NO: 30393 - DNA, 60 bp, Artificial
  Synthetic oligonucleotide
gttaacattttctaaagagcatactagttcttggggatgtgaagaatatggctgtcttgc

SEQ ID NO: 30394 - DNA, 60 bp, Artificial
  Synthetic oligonucleotide
ggtctgagtgcaatccagtgctagacaaatttggaaattttatggttttaagtgttgatg

SEQ ID NO: 30395 - DNA, 60 bp, Artificial
  Synthetic oligonucleotide
gcgagcatgtaaccgtaaattgtggtcagaaatcagtaaaattccatgcatgctttagac

SEQ ID NO: 30396 - DNA, 60 bp, Artificial
  Synthetic oligonucleotide
ggacatattagaaccgattataggagataaattaagtgcatcctttcagaatacacagac

SEQ ID NO: 30397 - DNA, 58 bp, Artificial
  Synthetic oligonucleotide
gtcaaaaattgtgccttggtgacagtcattgcaacttggaatttacagccataactgc

SEQ ID NO: 30398 - DNA, 60 bp, Artificial
  Synthetic oligonucleotide
gcatcctttcagaatacacagactaatcaacttccgacccttatagcttataaaaaaggg

SEQ ID NO: 30399 - DNA, 60 bp, Artificial
  Synthetic oligonucleotide
gaggcagtacaccgcatacaaaccacctgctttgcaagatagacaacaaatataaagcat

SEQ ID NO: 30400 - DNA, 60 bp, Artificial
  Synthetic oligonucleotide
cgcatacaaaccacctgctttgcaagatagacaacaaatataaagcatttgactggccag

SEQ ID NO: 30401 - DNA, 60 bp, Artificial
  Synthetic oligonucleotide
atgcacactctatgtgtaagaatacagacatagattataacaaagagatcgaaacatatt

SEQ ID NO: 30402 - DNA, 60 bp, Artificial
  Synthetic oligonucleotide
ctaactgttataaagaatctttcactgcgcaaccagcagatatgcaggctggaattaaaa

SEQ ID NO: 30403 - DNA, 60 bp, Artificial
  Synthetic oligonucleotide
cttgcccaaactgtctacttgcatctcaccctttcaccagctgccccaaaatctgtatat

SEQ ID NO: 30404 - DNA, 60 bp, Artificial
  Synthetic oligonucleotide
gtctacttgcatctcaccctttcaccagctgccctaaattctgtatatgcggttctaggt

SEQ ID NO: 30405 - DNA, 60 bp, Artificial
  Synthetic oligonucleotide
cataatggacacattaaaaacagcattcagagggcttacaaaggtcctaattgaaaatta

SEQ ID NO: 30406 - DNA, 60 bp, Artificial
  Synthetic oligonucleotide
agccatacaatcagaagatagacttgtcgcagttagatgaatcaaattacataagggaag

SEQ ID NO: 30407 - DNA, 60 bp, Artificial
  Synthetic oligonucleotide
caagatgtcatacgcccagaattagatgtttataagaagattggcagtgaggtatcactg

SEQ ID NO: 30408 - DNA, 60 bp, Artificial
  Synthetic oligonucleotide
atagtgttttcaccgcaaatcaagaattacaatataaaagtccactgtaaatctaaggtt

SEQ ID NO: 30409 - DNA, 60 bp, Artificial
  Synthetic oligonucleotide
cattgcagtgcggctcaatccaagtaatcaatggatcaactatcggaactggcagcccca

SEQ ID NO: 30410 - DNA, 60 bp, Artificial
  Synthetic oligonucleotide
atacacaggtcaaatcaatgatattggaaacacagcattgcagtgcggctcaatccaagt

SEQ ID NO: 30411 - DNA, 60 bp, Artificial
  Synthetic oligonucleotide
gggaagatatacacaggtcaaatcaacgatattggaaacacagcattgcagtgcggctca

SEQ ID NO: 30412 - DNA, 52 bp, Artificial
  Synthetic oligonucleotide
ataaatgctgaagtgccagccgaaacagtctgccattgcaaaacaaactgtg

SEQ ID NO: 30413 - DNA, 60 bp, Artificial
  Synthetic oligonucleotide
gctgaaggtatttcatgctctataaatgctgaagtgccagccgaaacagtctgccattgc

SEQ ID NO: 30414 - DNA, 60 bp, Artificial
  Synthetic oligonucleotide
ctggcatttgtgctgggtgcattgactgtgctgaaggcatttcatgctctataaatgctg

SEQ ID NO: 30415 - DNA, 60 bp, Artificial
  Synthetic oligonucleotide
tgtcatcgaagtatcaaaaacaggatcgaacatgggccaaatgacatttaaaatagaact

SEQ ID NO: 30416 - DNA, 60 bp, Artificial
  Synthetic oligonucleotide
ggacatatatgccacactcaatgatcgaagcaatgtgcgttaacatagagctaataattc

SEQ ID NO: 30417 - DNA, 66 bp, Artificial
  Synthetic oligonucleotide
ccaggacaactatcagatgattggaatattgaaatttgctagtaagctattagatattaaccttgg

SEQ ID NO: 30418 - DNA, 60 bp, Artificial
  Synthetic oligonucleotide
gtaaaattccatgcatgctttagacaacataggggttgtgtaagattttttaaagggaca

SEQ ID NO: 30419 - DNA, 60 bp, Artificial
  Synthetic oligonucleotide
cccaaactgtctacttgcatctcaccctttcaccagctgccccaaaatctgtatatgcgg

SEQ ID NO: 30420 - DNA, 60 bp, Artificial
  Synthetic oligonucleotide
cctatagagctgacctgaacaccataatggacacattaaaaacagcattcagagggctta

SEQ ID NO: 30421 - DNA, 51 bp, Artificial
  Synthetic oligonucleotide
ggtgtggtaataattgtgatattggtttatatcctgttgcccataggtcgg

SEQ ID NO: 30422 - DNA, 60 bp, Artificial
  Synthetic oligonucleotide
agagggcttacaaaggtcctaattgaaaattatatagaaaaagatgactctgatgctctt

SEQ ID NO: 30423 - DNA, 60 bp, Artificial
  Synthetic oligonucleotide
ggactgcttaggttataagtctctaagcaaagctagacagatgtgtaaatcgaaaagctg

SEQ ID NO: 30424 - DNA, 60 bp, Artificial
  Synthetic oligonucleotide
cgaaaagctggtccttcacagcagctatattaactggattaatattgatggaattcatct

SEQ ID NO: 30425 - DNA, 60 bp, Artificial
  Synthetic oligonucleotide
tgattggaatattgaaatttgccagtaagctattagatattaaccttggtagatccaccc

SEQ ID NO: 30426 - DNA, 59 bp, Artificial
  Synthetic oligonucleotide
tagatattaaccttggtagatccacccgctcagctcatcattctataatgacaaacgaa

SEQ ID NO: 30427 - DNA, 60 bp, Artificial
  Synthetic oligonucleotide
agcacagtaccagaaagcatacaccacaggtcctagcatatccataaatattgaacacaa

SEQ ID NO: 30428 - DNA, 60 bp, Artificial
  Synthetic oligonucleotide
agcatacaccacaggtcctagcatatccataaatattgaacacaacgaaagatgcacagg

SEQ ID NO: 30429 - DNA, 55 bp, Artificial
  Synthetic oligonucleotide
aaatgtaattgggacaagacccacaaagaatttaggccatatgagacaaataact

SEQ ID NO: 30430 - DNA, 60 bp, Artificial
  Synthetic oligonucleotide
atctaaagttgaaaaaataacagcacatatctgtgggagagacattgatttacagttaac

SEQ ID NO: 30431 - DNA, 60 bp, Artificial
  Synthetic oligonucleotide
ggccaattgtattctgtagcggcaaatattactactctgatagcaaggagcatgccaaag

SEQ ID NO: 30432 - DNA, 60 bp, Artificial
  Synthetic oligonucleotide
cccaagatgcacatagaatgatactattagaaagaatactttacaagacagaatgtgaaa

SEQ ID NO: 30433 - DNA, 60 bp, Artificial
  Synthetic oligonucleotide
aattttatagatcctttatcgtaaaagactggtctgagtgcaatccagtgctagacaaat

SEQ ID NO: 30434 - DNA, 60 bp, Artificial
  Synthetic oligonucleotide
cattttttatcgttcttgctccatgtgcggcttgatacattatagaccaggactcaagat

SEQ ID NO: 30435 - DNA, 60 bp, Artificial
  Synthetic oligonucleotide
gattaatattgatggaattcatctcaccaattgcaggagagagaatgtataagcttgagg

SEQ ID NO: 30436 - DNA, 60 bp, Artificial
  Synthetic oligonucleotide
agagttgcacaactgcataggtccaaagataatgggcgatacttgtgtatcaaagagtga

SEQ ID NO: 30437 - DNA, 60 bp, Artificial
  Synthetic oligonucleotide
taaaataacatatcaagagttgcacaattgcataggtccaaagataatgggcgatacttg

SEQ ID NO: 30438 - DNA, 60 bp, Artificial
  Synthetic oligonucleotide
tagtccagtttgtctgtatctgcttctccagggtctattactattcaatacagggactgc

SEQ ID NO: 30439 - DNA, 60 bp, Artificial
  Synthetic oligonucleotide
gggaaaacttagtccagtttgtctgtatctgcttctccagggtctattactattcaatac

SEQ ID NO: 30440 - DNA, 60 bp, Artificial
  Synthetic oligonucleotide
ctatcaactgaagcaataagaggtaagctacctcctagcattatggcaagcctcacagac

SEQ ID NO: 30441 - DNA, 60 bp, Artificial
  Synthetic oligonucleotide
atcgattaaccttgctgcagttaggatcttcttcctcaatgccgcaaaagccaaggctgc

SEQ ID NO: 30442 - DNA, 60 bp, Artificial
  Synthetic oligonucleotide
agtcttatctcaggagaacacaatcaatgggaatacaactggatcagaggataattgtgc

SEQ ID NO: 30443 - DNA, 60 bp, Artificial
  Synthetic oligonucleotide
acgttaactttaagcgtatccacaccactgggcttagttatgaccacattcgaatcttct

SEQ ID NO: 30444 - DNA, 60 bp, Artificial
  Synthetic oligonucleotide
gcatacgttaactttaagcgtatccacaccactgggcttagttatgaccacattcgaatc

SEQ ID NO: 30445 - DNA, 60 bp, Artificial
  Synthetic oligonucleotide
agcagtacttttgacccagaggtcgcatacgctagttttaagcgtgtccacaccactggg

SEQ ID NO: 30446 - DNA, 60 bp, Artificial
  Synthetic oligonucleotide
gcagactacaagagaagaatggcagatgctgtgtcccggaaaaagatggatactaaacct

SEQ ID NO: 30447 - DNA, 60 bp, Artificial
  Synthetic oligonucleotide
ctacagagcagacgggcagctgtgtcagcattggaggacaaattggcagacttcaagagg

SEQ ID NO: 30448 - DNA, 60 bp, Artificial
  Synthetic oligonucleotide
gacccagatgacgttaacaagaacacactgcaggcacggcaacaaacagtgtcagcattg

SEQ ID NO: 30449 - DNA, 60 bp, Artificial
  Synthetic oligonucleotide
cggagaacttaaacgggagctggctgatcttattgcagctcagaaattggcttcaaaacc

SEQ ID NO: 30450 - DNA, 51 bp, Artificial
  Synthetic oligonucleotide
aggttaacttcagatggtcttgccagacatgtaatgcagtgtcctaagcgg

SEQ ID NO: 30451 - DNA, 60 bp, Artificial
  Synthetic oligonucleotide
ttgagcatctgcaaaaaaagaagggcaggaggcaatgtcatgctggctgtctgcaagcgc

SEQ ID NO: 30452 - DNA, 60 bp, Artificial
  Synthetic oligonucleotide
gacagatgcaccttggtcaccaattgtgtaataaaaggaagggaggttcgtaaaggccag

SEQ ID NO: 30453 - DNA, 60 bp, Artificial
  Synthetic oligonucleotide
acatagtggcctctgagcacttgctgcaccagtctcttgttggcaagcaatctccattcc

SEQ ID NO: 30454 - DNA, 60 bp, Artificial
  Synthetic oligonucleotide
gcctctgagcacttgctgcaccagtctcttgttggcaagcaatctccattccagaacgcc

SEQ ID NO: 30455 - DNA, 60 bp, Artificial
  Synthetic oligonucleotide
ggctttaatctagtttgttcagttagtctgacagagtgtgcaacatttctcacttcaata

SEQ ID NO: 30456 - DNA, 60 bp, Artificial
  Synthetic oligonucleotide
atagttcacttaaagatcatgtgaaccttattgtgaatagaggtctttcttttcaagact

SEQ ID NO: 30457 - DNA, 60 bp, Artificial
  Synthetic oligonucleotide
ggtgaccctggtgatattatgagtacgccacaggggatgaaatgcccagagcatgctggt

SEQ ID NO: 30458 - DNA, 60 bp, Artificial
  Synthetic oligonucleotide
atgtcagtttggtgaccctggtgatattatgagtacgccacaggggatgaaatgcccaga

SEQ ID NO: 30459 - DNA, 60 bp, Artificial
  Synthetic oligonucleotide
cagaaccccatatcacaactaactctctagagtgggtagatcctgatagttcacttaaag

SEQ ID NO: 30460 - DNA, 60 bp, Artificial
  Synthetic oligonucleotide
tattacagaaccccatatcacaactaactctctagagtgggtagatcctgatagttcact

SEQ ID NO: 30461 - DNA, 60 bp, Artificial
  Synthetic oligonucleotide
tgttcagttagtctgacagagtgtgcaacatttctcacttcaataaaggcttgtgattct

SEQ ID NO: 30462 - DNA, 60 bp, Artificial
  Synthetic oligonucleotide
cacttcaataaaggcttgtgattctgcaatgtgttatggttcaagcacagctaatttagt

SEQ ID NO: 30463 - DNA, 60 bp, Artificial
  Synthetic oligonucleotide
ctaatttagtacgagggcaaaacacagtacatgttgttgggaaaggtggtcactctggat

SEQ ID NO: 30464 - DNA, 60 bp, Artificial
  Synthetic oligonucleotide
cgagggcaaaacacagtacatgttgttgggaaaggtggtcactctggatcaaagtttatg

SEQ ID NO: 30465 - DNA, 60 bp, Artificial
  Synthetic oligonucleotide
ctgctacaggcttggtggcagcagcaccacatcttgatcgagtaactggatataaccaaa

SEQ ID NO: 30466 - DNA, 60 bp, Artificial
  Synthetic oligonucleotide
gtcttgattgccttgtttgtattctctttgctattgttcagcctctgttgcccgcgccgc

SEQ ID NO: 30467 - DNA, 60 bp, Artificial
  Synthetic oligonucleotide
cttgattgccttgtttgtattctctttgctattgttcagcctctgttgcccgcgccgcca

SEQ ID NO: 30468 - DNA, 60 bp, Artificial
  Synthetic oligonucleotide
acaatagtcatatctgctaatactatacatatatatactgcctgcactgctttattatta

SEQ ID NO: 30469 - DNA, 60 bp, Artificial
  Synthetic oligonucleotide
tccttgatgtgaatgccattgatatagaagaaccaagtggtcaaacagcagattggtata

SEQ ID NO: 30470 - DNA, 60 bp, Artificial
  Synthetic oligonucleotide
gtcgctgctaacaccagcagtacttttgacccagaggtcgcatatgctaactttaagcgt

SEQ ID NO: 30471 - DNA, 60 bp, Artificial
  Synthetic oligonucleotide
acatctacctcagtgtacttatatatatgcacgtagcatatatataagtacacaaattac

SEQ ID NO: 30472 - DNA, 60 bp, Artificial
  Synthetic oligonucleotide
cccaattcctgacgatggtcttaccctccaccgcctcagtggataccttgccaggtacct

SEQ ID NO: 30473 - DNA, 60 bp, Artificial
  Synthetic oligonucleotide
cagtctagtatgaaggcagaagagataacacctggaaggtacaggacagcaatctgtgga

SEQ ID NO: 30474 - DNA, 60 bp, Artificial
  Synthetic oligonucleotide
gagaacacaatcaatgggaatacaactggaccagaggataattgtgctcttcatggtagc

SEQ ID NO: 30475 - DNA, 60 bp, Artificial
  Synthetic oligonucleotide
caatttgtcagccgttaggatcttcttccttaatgccgcaaaagccaaagctgctctctc

SEQ ID NO: 30476 - DNA, 60 bp, Artificial
  Synthetic oligonucleotide
atcgctaatatacttgccagtgaattgagttctgtgaaacgagattctgaacgcgaaggt

SEQ ID NO: 30477 - DNA, 60 bp, Artificial
  Synthetic oligonucleotide
ggactgcaatttgtgggttatatcctgctcagattaaagccagacagatggtaagcccag

SEQ ID NO: 30478 - DNA, 60 bp, Artificial
  Synthetic oligonucleotide
gagatacaggactgcaatttgtgggttatatcctgctcagattaaagccagacagatggt

SEQ ID NO: 30479 - DNA, 60 bp, Artificial
  Synthetic oligonucleotide
ggaggtggaccccgatgatgttaacaaaagcacactacagagtagacgggcagctgtgtc

SEQ ID NO: 30480 - DNA, 60 bp, Artificial
  Synthetic oligonucleotide
gcatgaagaggtacattggcacaccttatgagggaattgtagacaccctagtttctctga

SEQ ID NO: 30481 - DNA, 60 bp, Artificial
  Synthetic oligonucleotide
gtatgtctcaatgccaactgcacagtccacaatgaaagcagatgagttaacaccaggaag

SEQ ID NO: 30482 - DNA, 60 bp, Artificial
  Synthetic oligonucleotide
atggaaatgttctagatgtgaatgctattgatattgaagaaccaagtggccaaacagctg

SEQ ID NO: 30483 - DNA, 60 bp, Artificial
  Synthetic oligonucleotide
cggcacgtcagtacgtaagtgtaaactttgagagagtggattgagcatcccgaatgcacc

SEQ ID NO: 30484 - DNA, 60 bp, Artificial
  Synthetic oligonucleotide
cggcacgtcagtacgtaagtgtaaactttgagagagtggattgagcatcccaaatgcacc

SEQ ID NO: 30485 - DNA, 60 bp, Artificial
  Synthetic oligonucleotide
tcagtacgtaagtgtaaactttgagagagtggattgagcatcccgaatgcaccatgccta

SEQ ID NO: 30486 - DNA, 60 bp, Artificial
  Synthetic oligonucleotide
ctaaagctggaatgagcaccctccaagaattacaagaaaacatcacagcacacgaacaac

SEQ ID NO: 30487 - DNA, 60 bp, Artificial
  Synthetic oligonucleotide
ggaatgagcaccctccaagaattacaagaaaacatcacagcacacgaacagcagctcgtg

SEQ ID NO: 30488 - DNA, 60 bp, Artificial
  Synthetic oligonucleotide
ctattccctgcacaagtcaaggcaaggagcattatcagtcctgtcatgggagtcatcgga

SEQ ID NO: 30489 - DNA, 60 bp, Artificial
  Synthetic oligonucleotide
caagagccactaaagctgtaagagccaacaactagtaaagccatcactgccaaaagagcc

SEQ ID NO: 30490 - DNA, 60 bp, Artificial
  Synthetic oligonucleotide
cactacaagcaaggcaacaaacagtgtcagcattggaggataaactcgcagactacaaga

SEQ ID NO: 30491 - DNA, 60 bp, Artificial
  Synthetic oligonucleotide
ctccttgaaaagctactactaaaaccgctggtatgagccaactcaaagaaatacaggagg

SEQ ID NO: 30492 - DNA, 60 bp, Artificial
  Synthetic oligonucleotide
ctaacaaatttctgtcatcaggaatgccaggttacggagactgagtgcctctgcccttat

SEQ ID NO: 30493 - DNA, 60 bp, Artificial
  Synthetic oligonucleotide
gctgttgtagattcttactggattcatgaacttggtactggttctcaactagttcagacc

SEQ ID NO: 30494 - DNA, 60 bp, Artificial
  Synthetic oligonucleotide
agctgttgtagattcttactggattcatgaacttggtactggttctcaactagttcagac

SEQ ID NO: 30495 - DNA, 58 bp, Artificial
  Synthetic oligonucleotide
ggtctgaactagttgagaaccagtaccaagttcatgaatccagtaagaatctacaaca

SEQ ID NO: 30496 - DNA, 60 bp, Artificial
  Synthetic oligonucleotide
ggttcctggtgagattgtgatgtctgtcaaagagatgctttcagacatgattagaaggag

SEQ ID NO: 30497 - DNA, 60 bp, Artificial
  Synthetic oligonucleotide
cgactcggacaaggtctatgatgatggtgcccctccatgtacatttaagtgctggttcac

SEQ ID NO: 30498 - DNA, 60 bp, Artificial
  Synthetic oligonucleotide
gcatcagcaccacatcttgagagagtcactggttttaaccaaatcgactcggacaaggtc

SEQ ID NO: 30499 - DNA, 60 bp, Artificial
  Synthetic oligonucleotide
tgacgggtcaattaatagagggccaatgttttaatcctgcacacactctgacacttgctc

SEQ ID NO: 30500 - DNA, 60 bp, Artificial
  Synthetic oligonucleotide
attgcacctgtgattacatgtatgtcaataaggagctgcatggcaagtgtctttattagc

SEQ ID NO: 30501 - DNA, 60 bp, Artificial
  Synthetic oligonucleotide
ccttgtaaggttgatttgcatacacaagctattgaaggggcttggggttctggtgttggg

SEQ ID NO: 30502 - DNA, 60 bp, Artificial
  Synthetic oligonucleotide
gccaccatgagtgtgagacagccaaagaattggaatctcataagcaaagttgcataaatg

SEQ ID NO: 30503 - DNA, 60 bp, Artificial
  Synthetic oligonucleotide
ctgcagggaacagcatttgcaggtgttccaatgtatagctctttatctactttggtgagg

SEQ ID NO: 30504 - DNA, 60 bp, Artificial
  Synthetic oligonucleotide
ggttctggtgttgggtttacattgacttgcactgttggtttaactgaatgcccaagcttt

SEQ ID NO: 30505 - DNA, 60 bp, Artificial
  Synthetic oligonucleotide
cctttaagtgttgccatgacactgactgctcttctgaaggccttgttgcatcagcaccac

SEQ ID NO: 30506 - DNA, 60 bp, Artificial
  Synthetic oligonucleotide
acctggactggttacttaccgatctcaggtgaaatggagaaggtaacaggctgtacagtc

SEQ ID NO: 30507 - DNA, 60 bp, Artificial
  Synthetic oligonucleotide
tatcaatatgagacaggttggggatgtaaccctggggactgccctggagtaggtacaggc

SEQ ID NO: 30508 - DNA, 60 bp, Artificial
  Synthetic oligonucleotide
gttatacacaggttgagtggagaaaaaagagcgacacaactgacacaactaatgctgcag

SEQ ID NO: 30509 - DNA, 60 bp, Artificial
  Synthetic oligonucleotide
cctgttctcattgatgcctgatgttgctcattctctagcagtagagctgtgtgttccagg

SEQ ID NO: 30510 - DNA, 60 bp, Artificial
  Synthetic oligonucleotide
taccgtactctaggagtttttagatacaagagcaggtgctatgttggcttagtttggtgt

SEQ ID NO: 30511 - DNA, 60 bp, Artificial
  Synthetic oligonucleotide
tgattgtccatcctagaggtgaggaccatgacccaatccaaaactcacagggttaccttc

SEQ ID NO: 30512 - DNA, 60 bp, Artificial
  Synthetic oligonucleotide
caactttatctgccaacgagttgatcaggatgtcgttgtatattgtaatggccagaagaa

SEQ ID NO: 30513 - DNA, 60 bp, Artificial
  Synthetic oligonucleotide
gctgcagccacgacattcgaatcacaagctaaaactgtgaaccttcgtgggacttgtgtt

SEQ ID NO: 30514 - DNA, 60 bp, Artificial
  Synthetic oligonucleotide
gaggtgaggaccatgacccaatccaaaactcacagggttaccttcggatagtgggaccat

SEQ ID NO: 30515 - DNA, 60 bp, Artificial
  Synthetic oligonucleotide
gttgtgaggcttactctgaaagcggtatattcaacataagttccccaacatgccttgtca

SEQ ID NO: 30516 - DNA, 60 bp, Artificial
  Synthetic oligonucleotide
gtgggaccattaacagcaaaagtaccgagcaccagctctagtgatactctgcagggaaca

SEQ ID NO: 30517 - DNA, 60 bp, Artificial
  Synthetic oligonucleotide
gggattataccagaatccaaccatagtgcgtgtgataagaagaccatcccactcacctgg

SEQ ID NO: 30518 - DNA, 60 bp, Artificial
  Synthetic oligonucleotide
agtttggtgtgtgttattgacatgtgagctcattgtatgggctgctagtgcagagacccc

SEQ ID NO: 30519 - DNA, 60 bp, Artificial
  Synthetic oligonucleotide
aagtgcgctacaagctcattttgctatttgtaagcttacagggagattccaggaagcctt

SEQ ID NO: 30520 - DNA, 60 bp, Artificial
  Synthetic oligonucleotide
ggcggaaacttaccaatcctgccaataaagaagaatcaatccccttccactttcagatgg

SEQ ID NO: 30521 - DNA, 60 bp, Artificial
  Synthetic oligonucleotide
gtttttttacacctaaaaagtctgatcagcttaagttgataaaaacatttgaggggataa

SEQ ID NO: 30522 - DNA, 60 bp, Artificial
  Synthetic oligonucleotide
caggctgtacagtcttttgcacattagctggccctggggcaagttgtgaggcttactctg

SEQ ID NO: 30523 - DNA, 60 bp, Artificial
  Synthetic oligonucleotide
caggctgtacagcatgtggtgtttatcttgataaactaaagtctgtagggaaggcataca

SEQ ID NO: 30524 - DNA, 60 bp, Artificial
  Synthetic oligonucleotide
gcttgaatggatcgatccagatggcaatacacgagatcatgtcaatcttgtattgaatag

SEQ ID NO: 30525 - DNA, 57 bp, Artificial
  Synthetic oligonucleotide
cagagacccccttgctagaatcaggctggtcagatacagcacatggggttggggagg

SEQ ID NO: 30526 - DNA, 60 bp, Artificial
  Synthetic oligonucleotide
acatgccttgtcaataaagttcaaaagttcagaggttcagagcagaagatcaactttatc

SEQ ID NO: 30527 - DNA, 60 bp, Artificial
  Synthetic oligonucleotide
tacacctttactagcctgttctcattgatgcctgatgttgctcattctctagcagtagag

SEQ ID NO: 30528 - DNA, 59 bp, Artificial
  Synthetic oligonucleotide
agtgctggttcactaaatctggagagtggctcttggggattctcaacggcaattggata

SEQ ID NO: 30529 - DNA, 60 bp, Artificial
  Synthetic oligonucleotide
gtgcatttggggaccctggtgacatcatgtcgacaacaagtgggatgagatgccctgagc

SEQ ID NO: 30530 - DNA, 60 bp, Artificial
  Synthetic oligonucleotide
tacgacacctgtatgtgagtaccaaggtaacactatatctggatacaagagaatgatggc

SEQ ID NO: 30531 - DNA, 60 bp, Artificial
  Synthetic oligonucleotide
agtcaaggttgagtatcaaaaaacaatgggctcaatggtctgtgacatatgccaccatga

SEQ ID NO: 30532 - DNA, 57 bp, Artificial
  Synthetic oligonucleotide
aaaatcattgaagaaaccagaagtcagaaagggctgttaccgtactctaggagtttt

SEQ ID NO: 30533 - DNA, 51 bp, Artificial
  Synthetic oligonucleotide
gaggggataattagtaaaacaggctgtacagaaaatgcactacaaggctat

SEQ ID NO: 30534 - DNA, 60 bp, Artificial
  Synthetic oligonucleotide
ggtcaatgtccatattgtatgactatgactgaggcaacagaaagtgcgctacaagctcat

SEQ ID NO: 30535 - DNA, 64 bp, Artificial
  Synthetic oligonucleotide
gggaaggcatacaaaatcatttccttaaagtatactagaaaagtgtgtattcaattgggtacag

SEQ ID NO: 30536 - DNA, 60 bp, Artificial
  Synthetic oligonucleotide
caattgggtacagaacagacatgtaaacatattgatgcaaatgattgcctggtgacccct

SEQ ID NO: 30537 - DNA, 60 bp, Artificial
  Synthetic oligonucleotide
gtttctaaacttcagccttctgacactttgctgtttctcgggccgttagagcaaggtggc

SEQ ID NO: 30538 - DNA, 60 bp, Artificial
  Synthetic oligonucleotide
aaaagacggtgttgtgctatgatcttacctgtaatcagacacattgtcagccaacagttt

SEQ ID NO: 30539 - DNA, 60 bp, Artificial
  Synthetic oligonucleotide
ccaccttttgctttgggtggatcctgataccagcaatcacattggtggttttgaaggttc

SEQ ID NO: 30540 - DNA, 60 bp, Artificial
  Synthetic oligonucleotide
ggttaccttcggatagtgggaccattaacagcaaaagtaccgagcaccagctctagtgat

SEQ ID NO: 30541 - DNA, 60 bp, Artificial
  Synthetic oligonucleotide
agcagtagagctgtgtgttccaggattgcatgggtgggcaactgtaatgcttttgtccac

SEQ ID NO: 30542 - DNA, 60 bp, Artificial
  Synthetic oligonucleotide
ggaagtggctagtgatggccagtttagtatggccagcttacacactgagaaatgtgtatg

SEQ ID NO: 30543 - DNA, 53 bp, Artificial
  Synthetic oligonucleotide
ggaagtggctagtgatggccagtttagtatggccagcttacacactgagaaat

SEQ ID NO: 30544 - DNA, 60 bp, Artificial
  Synthetic oligonucleotide
aaacatcaaggtcatttgaaggttttgtctcctgctcagctccactctattggatctatc

SEQ ID NO: 30545 - DNA, 57 bp, Artificial
  Synthetic oligonucleotide
cagagtagacgggcagctgtgtcagcattggaggacaaactggcagacttcaagagg

SEQ ID NO: 30546 - DNA, 60 bp, Artificial
  Synthetic oligonucleotide
agtagacgggcagctgtgtcagcattggaggacaaactggcagacttcaagaggcagctt

SEQ ID NO: 30547 - DNA, 60 bp, Artificial
  Synthetic oligonucleotide
catcttgaattggcacaagatatttctaagaaattgaacaagcctattaatgttttcacc

SEQ ID NO: 30548 - DNA, 60 bp, Artificial
  Synthetic oligonucleotide
gtttaaggtttcatcaggctatggcacttctggatatgtcttgaacaaagacaaggttga

SEQ ID NO: 30549 - DNA, 60 bp, Artificial
  Synthetic oligonucleotide
cactaacccaaagtttaaggtttcatcaggctatggcacttctggatatgtcttgaacaa

SEQ ID NO: 30550 - DNA, 60 bp, Artificial
  Synthetic oligonucleotide
tgttttcaccatcaaggatacttctaatatgactggagatacagtggatgtaaatggcaa

SEQ ID NO: 30551 - DNA, 60 bp, Artificial
  Synthetic oligonucleotide
aaagcttcataacttggaaacatccacagacagccaggacttctatgattccttcaatgg

SEQ ID NO: 30552 - DNA, 60 bp, Artificial
  Synthetic oligonucleotide
ctgacagagagaagataaatgagatcatatgcaaaaatctggtggcagtccatcttgaat

SEQ ID NO: 30553 - DNA, 55 bp, Artificial
  Synthetic oligonucleotide
catcttttgaatcagacattttcgtagggtaggatttcaaattttgaataaattg

SEQ ID NO: 30554 - DNA, 56 bp, Artificial
  Synthetic oligonucleotide
acttcggtcccacacttggcaaagatataacggctatcaaggactggtctaaacag

SEQ ID NO: 30555 - DNA, 60 bp, Artificial
  Synthetic oligonucleotide
cccaaaggagtatgacccagaatactgcagacaagcattgctgtctcatggcagtcaagt

SEQ ID NO: 30556 - DNA, 60 bp, Artificial
  Synthetic oligonucleotide
tcatggcagtcaagttgaaaaagcttcttctctagatgtttacaccatttatgagaagaa

SEQ ID NO: 30557 - DNA, 55 bp, Artificial
  Synthetic oligonucleotide
tgcagtaatttaaaagaagacctttctaatattcgagcttgaatcaaacagtcac

SEQ ID NO: 30558 - DNA, 52 bp, Artificial
  Synthetic oligonucleotide
gaccaattttggggatttctccctcttttttttaggttttcacttttttgat

SEQ ID NO: 30559 - DNA, 60 bp, Artificial
  Synthetic oligonucleotide
ccttcaatggtccatcaggtgtggactcgaccataagtcttactgggcctgaaattgtta

SEQ ID NO: 30560 - DNA, 53 bp, Artificial
  Synthetic oligonucleotide
ggagcagatcggaacacttccttcaaccatttcggtgtttggcaggtactttg

SEQ ID NO: 30561 - DNA, 60 bp, Artificial
  Synthetic oligonucleotide
ataatcccaaaggagtatgacccagaatactgcagacaagcattgctgtctcatggcagt

SEQ ID NO: 30562 - DNA, 60 bp, Artificial
  Synthetic oligonucleotide
cacatcagatggttcaaattgccaccagttatgactttgaagataacctcatcttttggt

SEQ ID NO: 30563 - DNA, 60 bp, Artificial
  Synthetic oligonucleotide
ggttcaaattgccaccagttatgactttgaagataacctcatcttttggtgacatctgtt

SEQ ID NO: 30564 - DNA, 60 bp, Artificial
  Synthetic oligonucleotide
gaatgtcttggcattgttctccttaccgatgagcttcaatctattggcactattgatgta

SEQ ID NO: 30565 - DNA, 60 bp, Artificial
  Synthetic oligonucleotide
ggcattgttctccttaccgatgagcttcaatctattggcactattgatgtaaagcaccat

SEQ ID NO: 30566 - DNA, 60 bp, Artificial
  Synthetic oligonucleotide
tagagcttttgctatcgaagaaagtcttaaaagtgaaagatatctgctcttgctcaagct

SEQ ID NO: 30567 - DNA, 60 bp, Artificial
  Synthetic oligonucleotide
cttttgctatcgaagaaagtcttaaaagtgaaagatatctgctcttgctcaagctcaacc

SEQ ID NO: 30568 - DNA, 60 bp, Artificial
  Synthetic oligonucleotide
ttcaaagagttctctgtcattctttacctttacaacgccttttgtagacatctttgcttt

SEQ ID NO: 30569 - DNA, 60 bp, Artificial
  Synthetic oligonucleotide
gttctctgtcattctttacctttacaacgccttttgtagacatctttgctttggtttctg

SEQ ID NO: 30570 - DNA, 55 bp, Artificial
  Synthetic oligonucleotide
taaatggcaaaaagttcagaattttgaaagactcttcaggggactgctactttac

SEQ ID NO: 30571 - DNA, 60 bp, Artificial
  Synthetic oligonucleotide
gcagttgatggcaaaactttattgcgttcacctatcactatcattctatcaagctgagcc

SEQ ID NO: 30572 - DNA, 60 bp, Artificial
  Synthetic oligonucleotide
gtggggcagttgatggcaaaactttattgcgttcacctatcactatcattctatcaagct

SEQ ID NO: 30573 - DNA, 60 bp, Artificial
  Synthetic oligonucleotide
cctatagctgcctgaagctcttcatatttggaagactgatccctttcggcagccttgact

SEQ ID NO: 30574 - DNA, 60 bp, Artificial
  Synthetic oligonucleotide
ggcatcaatagatgtcttgtcagttcacagctctccgttacctatagctgcctgaagctc

SEQ ID NO: 30575 - DNA, 60 bp, Artificial
  Synthetic oligonucleotide
agccttgacttttggcatggcatttttgaaatactgattgatcaaagtcagtggggcagt

SEQ ID NO: 30576 - DNA, 60 bp, Artificial
  Synthetic oligonucleotide
gctgcctgaagctcttcatatttggaagactgatccctttcggcagccttgacttttggc

SEQ ID NO: 30577 - DNA, 60 bp, Artificial
  Synthetic oligonucleotide
acacataaatctgatttaaacagacaagcacactttaacatttgcacaatagtgctgagg

SEQ ID NO: 30578 - DNA, 60 bp, Artificial
  Synthetic oligonucleotide
tataatgtctttaacacacataaatctgatttaaacagacaagcacactttaacatttgc

SEQ ID NO: 30579 - DNA, 60 bp, Artificial
  Synthetic oligonucleotide
gtaaacctttggcatcaatagatgtcttgtcagttcacagctctccgttacctatagctg

SEQ ID NO: 30580 - DNA, 60 bp, Artificial
  Synthetic oligonucleotide
ataagagaaaagaagctgaattataacagataaatgcaatttaagtactagtaaaccttt

SEQ ID NO: 30581 - DNA, 60 bp, Artificial
  Synthetic oligonucleotide
cttgactgcactcaatcagaggtttctcaccctacaacctactttgctggagctctttca

SEQ ID NO: 30582 - DNA, 60 bp, Artificial
  Synthetic oligonucleotide
taggtcaaactaagccaggcatttctacgtttttgttcaagatcatttgtcttgactgca

SEQ ID NO: 30583 - DNA, 60 bp, Artificial
  Synthetic oligonucleotide
gacccttaccagagacttgtttattgcaaatctgaatgcttaggtcaaactaagccaggc

SEQ ID NO: 30584 - DNA, 60 bp, Artificial
  Synthetic oligonucleotide
agctaaagatgacccttaccagagacttgtttattgcaaatctgaatgcttaggtcaaac

SEQ ID NO: 30585 - DNA, 60 bp, Artificial
  Synthetic oligonucleotide
ctgggatcatgccaaacactatttccaaaactacaatgcaaacaaagaagaattgcactg

SEQ ID NO: 30586 - DNA, 60 bp, Artificial
  Synthetic oligonucleotide
tagcttcggtgtctgggatcatgccaaacactatttccaaaactacaatgcaaacaaaga

SEQ ID NO: 30587 - DNA, 60 bp, Artificial
  Synthetic oligonucleotide
ctgtcaaagcagtgtctgatggtgcaaagtactctaatcaaggttcccacagacaacttc

SEQ ID NO: 30588 - DNA, 60 bp, Artificial
  Synthetic oligonucleotide
atatatgtctgtcaaagcagtgtctgatggtgcaaagtactctaatcaaggttcccacag

SEQ ID NO: 30589 - DNA, 60 bp, Artificial
  Synthetic oligonucleotide
ggaaacatccacagacagccaggacttctatgattccttcaatggtccatcaggtgtgga

SEQ ID NO: 30590 - DNA, 60 bp, Artificial
  Synthetic oligonucleotide
gccttctctcgttagacccgcatcagctaacctgaatgctatggttgacactgacagaga

SEQ ID NO: 30591 - DNA, 60 bp, Artificial
  Synthetic oligonucleotide
tgcactcaatcagaggtttctcaccctacaacctactttgctggagctctttcaacttgc

SEQ ID NO: 30592 - DNA, 53 bp, Artificial
  Synthetic oligonucleotide
aaaagatggatactaagcctgctgacccgactgggattgagcctgatgaccac

SEQ ID NO: 30593 - DNA, 58 bp, Artificial
  Synthetic oligonucleotide
aaaagatggatactaagcctactgacccgactgggattgagcctgatgaccacctcaa

SEQ ID NO: 30594 - DNA, 57 bp, Artificial
  Synthetic oligonucleotide
gtcacccaacacaatcatgcttcatttgtaaacctgctcaacattgagactggttac

SEQ ID NO: 30595 - DNA, 60 bp, Artificial
  Synthetic oligonucleotide
tttggcatgcttgcagggcttagtaggcttgtctgtcccaatgagctgggaaaaaagttt

SEQ ID NO: 30596 - DNA, 54 bp, Artificial
  Synthetic oligonucleotide
tttggcatgcttgcagggcttagtaggcttgtctgtcccaatgagctgggaaaa

SEQ ID NO: 30597 - DNA, 57 bp, Artificial
  Synthetic oligonucleotide
tggattgttcccaaagcttaaccatacaaactgtgataagagtgcaataccacttac

SEQ ID NO: 30598 - DNA, 60 bp, Artificial
  Synthetic oligonucleotide
atgatttcaggtccatggaggcttttacgggaatctttaagtcaccacatggagaagacc

SEQ ID NO: 30599 - DNA, 60 bp, Artificial
  Synthetic oligonucleotide
ggggtattacatctgtattgtgggaggaaattctgcaccgatctatgtccctacacttga

SEQ ID NO: 30600 - DNA, 60 bp, Artificial
  Synthetic oligonucleotide
ggagaagaccatgaccttgctggggaggagattgcttcatactctatagttggacctgca

SEQ ID NO: 30601 - DNA, 60 bp, Artificial
  Synthetic oligonucleotide
gctcagacacactgagtctaattgcttattcaggtataccatcctattcttccctgagta

SEQ ID NO: 30602 - DNA, 60 bp, Artificial
  Synthetic oligonucleotide
atcgaatgcccccacacagtaagtttcggagaaaacagtgtaatagggtatgtggagtta

SEQ ID NO: 30603 - DNA, 60 bp, Artificial
  Synthetic oligonucleotide
agtttagtatggcctgctttggcactgagaaatgtgtatgacatgaaaatcgaatgcccc

SEQ ID NO: 30604 - DNA, 60 bp, Artificial
  Synthetic oligonucleotide
gacatccagttctaagtacacataccgcaggaagctaacaaacccactggaggaggcaca

SEQ ID NO: 30605 - DNA, 60 bp, Artificial
  Synthetic oligonucleotide
cagaggcagcatttcaagcccactataaagtatgccaggttactcacaggttcagggatg

SEQ ID NO: 30606 - DNA, 60 bp, Artificial
  Synthetic oligonucleotide
atcattacaataagatatagcagaagagtctgtgttcagtttggagaagaaaacctttgc

SEQ ID NO: 30607 - DNA, 60 bp, Artificial
  Synthetic oligonucleotide
gtccccaatctcaatgcccttactgttttactcattgtgagcctacagaggcagcatttc

SEQ ID NO: 30608 - DNA, 60 bp, Artificial
  Synthetic oligonucleotide
cgggccacttgaaggcggtggattgatatttaaacactggtgtacatctacatgtcagtt

SEQ ID NO: 30609 - DNA, 60 bp, Artificial
  Synthetic oligonucleotide
ttttgctactactcctatttgtgagtatgatggaaatatggtttcaggctacaaaaaagt

SEQ ID NO: 30610 - DNA, 60 bp, Artificial
  Synthetic oligonucleotide
ctgtgggctgccagtgcatcagaaacaccgctaactcctgtttggaatgataatgcccat

SEQ ID NO: 30611 - DNA, 60 bp, Artificial
  Synthetic oligonucleotide
tcttgcagcatggataatcatcagtcaataaatactataacaaaatacacccaggtaacc

SEQ ID NO: 30612 - DNA, 60 bp, Artificial
  Synthetic oligonucleotide
gataaaggaggagtttgaaaagacaaagggttcaatggtatgtgatgtttgcaagtatga

SEQ ID NO: 30613 - DNA, 60 bp, Artificial
  Synthetic oligonucleotide
gtatgtgatgtttgcaagtatgaatgtgaaacctataaagaattaaaggcacatggggta

SEQ ID NO: 30614 - DNA, 60 bp, Artificial
  Synthetic oligonucleotide
ttttcacacaagcaaccaggagaacaggctgaaatcagtattgagaaagataaaggagga

SEQ ID NO: 30615 - DNA, 60 bp, Artificial
  Synthetic oligonucleotide
gctgtggaattatgtgtgcctggattccatggctgggccacagctgctttgcttgttaca

SEQ ID NO: 30616 - DNA, 60 bp, Artificial
  Synthetic oligonucleotide
cacagctgctttgcttgttacatactgttttggatgggtccttataccagctatcacatt

SEQ ID NO: 30617 - DNA, 60 bp, Artificial
  Synthetic oligonucleotide
ggttccggctaacagaacagcaggtaaactttgtgtgtcaaagagtagacatggacattg

SEQ ID NO: 30618 - DNA, 60 bp, Artificial
  Synthetic oligonucleotide
ggcatggggttctggtgtaggctttacacttacatgcttggtatcgttaacagagtgtcc

SEQ ID NO: 30619 - DNA, 60 bp, Artificial
  Synthetic oligonucleotide
gactctttccaatccttcaatacaagcactatgcactttactgatgagaggatagaatgg

SEQ ID NO: 30620 - DNA, 60 bp, Artificial
  Synthetic oligonucleotide
ccctgtaaaattggcttgcagacatcttctattgaaggggcatggggttctggtgtaggc

SEQ ID NO: 30621 - DNA, 58 bp, Artificial
  Synthetic oligonucleotide
ccaggtaacctggagaggaaaggcagatccgggacaatccagtcaaaattcattcgaa

SEQ ID NO: 30622 - DNA, 60 bp, Artificial
  Synthetic oligonucleotide
cagaaagtgtgacattaacgagaggacaaaatacagtgaaggtatcaggaaaaggtggtc

SEQ ID NO: 30623 - DNA, 60 bp, Artificial
  Synthetic oligonucleotide
acagagtgtcctacttttttaacctccattaaggcctgtgacaaagccatttgttatggt

SEQ ID NO: 30624 - DNA, 60 bp, Artificial
  Synthetic oligonucleotide
cgtgcacgctctaggacattggtttgatggccgtcttaacattaaaacatccttccactg

SEQ ID NO: 30625 - DNA, 60 bp, Artificial
  Synthetic oligonucleotide
ggtatcaggaaaaggtggtcatagtggttcaactttcaaatgttgccatggggaagactg

SEQ ID NO: 30626 - DNA, 60 bp, Artificial
  Synthetic oligonucleotide
ggggaagactgttcaaaaattgggctccatgctgctgcaccccaccttgacaaagttaat

SEQ ID NO: 30627 - DNA, 60 bp, Artificial
  Synthetic oligonucleotide
tgtcccagatcaaagtgttgttagcattattaagcatgggatctttgatattgcaagtgt

SEQ ID NO: 30628 - DNA, 60 bp, Artificial
  Synthetic oligonucleotide
tgtcactatgaacgagattaccaatatgagacaagttggggctgtaatccatcagactgc

SEQ ID NO: 30629 - DNA, 60 bp, Artificial
  Synthetic oligonucleotide
gagctgtctaattgcattagggccatacagagtgcaggtggtgtatgagaggacctactg

SEQ ID NO: 30630 - DNA, 60 bp, Artificial
  Synthetic oligonucleotide
attcttactgttttcattggtcttactcagtattctttgccctgtcaggaagcataaaaa

SEQ ID NO: 30631 - DNA, 60 bp, Artificial
  Synthetic oligonucleotide
tcataccgcagccggaagtcaataacctgttatgacctttcttgtaatagtacttattgc

SEQ ID NO: 30632 - DNA, 60 bp, Artificial
  Synthetic oligonucleotide
atggatgcccagtacctgaagaaggcattgagacagcgatatggaaccctgacagcagac

SEQ ID NO: 30633 - DNA, 60 bp, Artificial
  Synthetic oligonucleotide
aatcacaaaaagcctaaaggatgttgagcagttgaagtggggaagaggaggtttgagtga

SEQ ID NO: 30634 - DNA, 60 bp, Artificial
  Synthetic oligonucleotide
agaatccaatggaatacattgggcaaatggagcagaaatttacctttcattcttcccagg

SEQ ID NO: 30635 - DNA, 60 bp, Artificial
  Synthetic oligonucleotide
gtcaagcatggaatgatggatgcccagtacctgaagaaggcattgagacagcgatatgga

SEQ ID NO: 30636 - DNA, 60 bp, Artificial
  Synthetic oligonucleotide
ccgtgagggaggggatgaagctcagaaagaactaattcggacaacaatcattaaccctat

SEQ ID NO: 30637 - DNA, 60 bp, Artificial
  Synthetic oligonucleotide
ttaaccctattgcagaatccaatggaatacattgggcaaatggagcagaaatttaccttt

SEQ ID NO: 30638 - DNA, 60 bp, Artificial
  Synthetic oligonucleotide
cgcaaaagccaaagctgctctctctcgcaagccggagaggaaagctactcctaagtttgg

SEQ ID NO: 30639 - DNA, 60 bp, Artificial
  Synthetic oligonucleotide
ctgctctctctcgcaagccggagaggaaagctactcctaagtttggagactggcaggtgg

SEQ ID NO: 30640 - DNA, 60 bp, Artificial
  Synthetic oligonucleotide
catggggagtcgatcaatcttacagccgttagaatcttcttccttaatgccgcaaaagcc

SEQ ID NO: 30641 - DNA, 60 bp, Artificial
  Synthetic oligonucleotide
ataactttgttatatcgtttgcttcacaattgtgatgggagatttggttttttatgatgt

SEQ ID NO: 30642 - DNA, 60 bp, Artificial
  Synthetic oligonucleotide
cctaaaggatgttgagcagttgaagtggggaagaggaggtttgagtgatgctgccagaac

SEQ ID NO: 30643 - DNA, 60 bp, Artificial
  Synthetic oligonucleotide
gtttgagtgatgctgccagaacattcctatctaaatttggtgtcaagcttccataagttt

SEQ ID NO: 30644 - DNA, 60 bp, Artificial
  Synthetic oligonucleotide
ctgccagaacattcctatctaaatttggtgtcaagcttccataagtttgatgctatccac

SEQ ID NO: 30645 - DNA, 60 bp, Artificial
  Synthetic oligonucleotide
ccattccatgctttacagtctatggaacctttatcaacagcgatagacaactgatctttg

SEQ ID NO: 30646 - DNA, 56 bp, Artificial
  Synthetic oligonucleotide
aaaactcatcagcctcaatgtttcgacagaagaatactcagctgaggtgtctagac

SEQ ID NO: 30647 - DNA, 56 bp, Artificial
  Synthetic oligonucleotide
aaaactcatcagcctcaatgtttcgacagaagaatactcagctgaggtgtccagac

SEQ ID NO: 30648 - DNA, 60 bp, Artificial
  Synthetic oligonucleotide
ggcatggatgtaaactttatgcggaaagctcttcgccagaggtatgggctgcttactgca

SEQ ID NO: 30649 - DNA, 56 bp, Artificial
  Synthetic oligonucleotide
gaatgatggctataccatgtatcttggatttgcaccaggagcggaaatgtttctag

SEQ ID NO: 30650 - DNA, 60 bp, Artificial
  Synthetic oligonucleotide
gcttactgcagaacaatggatgactcaaaagattgttgaagtcaaagcagcattcgatgc

SEQ ID NO: 30651 - DNA, 60 bp, Artificial
  Synthetic oligonucleotide
ctttatgcggaaagctcttcgccagaggtatgggctgcttactgcagaacaatggatgac

SEQ ID NO: 30652 - DNA, 60 bp, Artificial
  Synthetic oligonucleotide
ctagatggacagcagagcaagttaagaacaatcaagtgaaacttgctgaagctactgctg

SEQ ID NO: 30653 - DNA, 60 bp, Artificial
  Synthetic oligonucleotide
taacaattttccccaatacacagctaatccggtgccagacaatgccctcaccctccacag

SEQ ID NO: 30654 - DNA, 60 bp, Artificial
  Synthetic oligonucleotide
gctactgctgcaattgttatgcctctggctgaagtcaaaggatgcacctggaatgatggc

SEQ ID NO: 30655 - DNA, 60 bp, Artificial
  Synthetic oligonucleotide
ggacagcagagcaagttaagaacaatcaagtgaaacttgctgaagctactgctgcaattg

SEQ ID NO: 30656 - DNA, 60 bp, Artificial
  Synthetic oligonucleotide
cattcgatgcagttgggcaaatagcttgggctaaatctggcttctcccctgctgctagag

SEQ ID NO: 30657 - DNA, 60 bp, Artificial
  Synthetic oligonucleotide
cagaacaatggatgactcaaaagattgttgaagtcaaagcagcattcgatgcagttgggc

SEQ ID NO: 30658 - DNA, 60 bp, Artificial
  Synthetic oligonucleotide
cggcacaaccaaatgttgatcttacttttggaggggtcaaatttacactggttaataaca

SEQ ID NO: 30659 - DNA, 60 bp, Artificial
  Synthetic oligonucleotide
gttaataacaattttccccaatacacagctaatccggtgccagacaatgccctcaccctc

SEQ ID NO: 30660 - DNA, 56 bp, Artificial
  Synthetic oligonucleotide
ttcacttcctagtacaacatgtctatgtgttgtacgccatttcagcagcttgtatc

SEQ ID NO: 30661 - DNA, 60 bp, Artificial
  Synthetic oligonucleotide
ttcactgggtaactttccaaaaaatcttatcatcctctcattttcatcctttcacttcct

SEQ ID NO: 30662 - DNA, 60 bp, Artificial
  Synthetic oligonucleotide
tcgatgcagttgggcaaatagcttgggctaaatctggcttctcccctgctgctagagcct

SEQ ID NO: 30663 - DNA, 60 bp, Artificial
  Synthetic oligonucleotide
tccggaggcagggtatgtggcatttattggtcggtatgggcaacaacttaacttcagtgt

SEQ ID NO: 30664 - DNA, 60 bp, Artificial
  Synthetic oligonucleotide
cggaggcagggtatgtggcatttattggtcggtatgggcaacaacttaacttcagtgttg

SEQ ID NO: 30665 - DNA, 60 bp, Artificial
  Synthetic oligonucleotide
aaccaattcatttttgaggatgtacctcaacggaacttatctacatttagtccggaggca

SEQ ID NO: 30666 - DNA, 60 bp, Artificial
  Synthetic oligonucleotide
gaggatgtacctcaacggaacttatctacatttagtccggaggcagggtatgtggcattt

SEQ ID NO: 30667 - DNA, 60 bp, Artificial
  Synthetic oligonucleotide
aagaaagaggaattaggaattaagaacttttctacttatgaacaggtttgcaaagtagcc

SEQ ID NO: 30668 - DNA, 61 bp, Artificial
  Synthetic oligonucleotide
gagaaattaggaattaagaacttttctacttatgaacaggtttgcaaagtagccgaagtac

SEQ ID NO: 30669 - DNA, 60 bp, Artificial
  Synthetic oligonucleotide
gtagtgtactccacttgaatactttgaaaatagtttgtcattacttgagataccgagagg

SEQ ID NO: 30670 - DNA, 60 bp, Artificial
  Synthetic oligonucleotide
gtagtgtactccacttgaatactttgaaaatagtttgtcattactcgagataccgagaga

SEQ ID NO: 30671 - DNA, 60 bp, Artificial
  Synthetic oligonucleotide
agtagtgtactccacttgaatactttgaaaatagtttgtcattactcgagataccgagag

SEQ ID NO: 30672 - DNA, 60 bp, Artificial
  Synthetic oligonucleotide
agtagtgtactccacttgaatactttgaaaatagtttgtcattacttgagataccgagag

SEQ ID NO: 30673 - DNA, 60 bp, Artificial
  Synthetic oligonucleotide
gtcataattggctatccaaaagggttccccaagagcccacaataatagcagctaaatggg

SEQ ID NO: 30674 - DNA, 60 bp, Artificial
  Synthetic oligonucleotide
gtctaatgggatcaggtgggacaatggagcagaaatatatttggcattcttcccaggcac

SEQ ID NO: 30675 - DNA, 60 bp, Artificial
  Synthetic oligonucleotide
ttcaatttttacccgctgacaattggcatttacagagtcaaacaaggaatgatggacccc

SEQ ID NO: 30676 - DNA, 60 bp, Artificial
  Synthetic oligonucleotide
ggtagaggcggccttagcgacactgcaagaacattcttgcagaaatttggaatcagactc

SEQ ID NO: 30677 - DNA, 60 bp, Artificial
  Synthetic oligonucleotide
tattaaacatggggaagcaattaatctccattccgttaggatcttcttccttaatgccgc

SEQ ID NO: 30678 - DNA, 60 bp, Artificial
  Synthetic oligonucleotide
cccatagctgagtctaatgggatcaggtgggacaatggagcagaaatatatttggcattc

SEQ ID NO: 30679 - DNA, 54 bp, Artificial
  Synthetic oligonucleotide
ttttacccgctgacaattggcatttacagagtcaaacaaggaatgatggacccc

SEQ ID NO: 30680 - DNA, 60 bp, Artificial
  Synthetic oligonucleotide
gtcattgacctcaaccatcttgacattgatgaacctacagggcaaaccgcagactggctg

SEQ ID NO: 30681 - DNA, 60 bp, Artificial
  Synthetic oligonucleotide
gccctatttagggacaacttgcaagttcaacacctggggagactcaaatagatctgggaa

SEQ ID NO: 30682 - DNA, 60 bp, Artificial
  Synthetic oligonucleotide
gttacaacttatataagcaaaggactcatggcgttaaacagttacaaccatatgggtcag

SEQ ID NO: 30683 - DNA, 60 bp, Artificial
  Synthetic oligonucleotide
ccctacttagggacaacttgcaagttcaacacctggggagactcaaacagatctggaaag

SEQ ID NO: 30684 - DNA, 60 bp, Artificial
  Synthetic oligonucleotide
gccttacttagggacaacttgcaagttcaacacctggggagactcaaatagatctggaaa

SEQ ID NO: 30685 - DNA, 60 bp, Artificial
  Synthetic oligonucleotide
ggacatggatattgtagcctctgagcacctgctgcaccagtctcttgttggtaagcagtc

SEQ ID NO: 30686 - DNA, 60 bp, Artificial
  Synthetic oligonucleotide
gttaaccttgcggtacttaacacgcatttccctggaacccagtccattccactgcctgac

SEQ ID NO: 30687 - DNA, 60 bp, Artificial
  Synthetic oligonucleotide
cgttaaccttgctgttcttaatacccattttcctggaacccagtccattccactgcctga

SEQ ID NO: 30688 - DNA, 60 bp, Artificial
  Synthetic oligonucleotide
cgttaaccttgctgttcttaatacacattttcctggaacccagtccattccactgcctga

SEQ ID NO: 30689 - DNA, 60 bp, Artificial
  Synthetic oligonucleotide
cagtctgcactgacagttgtctctagcttaggctggaagaaaaccaacgttagtgcagct

SEQ ID NO: 30690 - DNA, 60 bp, Artificial
  Synthetic oligonucleotide
cagggatgcattttgaatcgagctaaagtcatctgttttaatttggctaaaagggtaggt

SEQ ID NO: 30691 - DNA, 60 bp, Artificial
  Synthetic oligonucleotide
gcattttgaatcgagctaaagtcatctgttttaatttggctaaaagggtaggttcaaccc

SEQ ID NO: 30692 - DNA, 60 bp, Artificial
  Synthetic oligonucleotide
ctctaaaggcttggaatatgatacctctgaaaggcaggctgacccaaatgatgattactc

SEQ ID NO: 30693 - DNA, 60 bp, Artificial
  Synthetic oligonucleotide
tctatagttatattgaaacctattgctgggatgccaatcactgttactagtagcagggtt

SEQ ID NO: 30694 - DNA, 60 bp, Artificial
  Synthetic oligonucleotide
acaagtctccagttcagctttcagtactgaatcttgaatgtacaagcattcaggattttt

SEQ ID NO: 30695 - DNA, 60 bp, Artificial
  Synthetic oligonucleotide
acttgaataatcatcatttgggtcagcctgcctttctgaggtatcatattccaggccttt

SEQ ID NO: 30696 - DNA, 58 bp, Artificial
  Synthetic oligonucleotide
ctgagaaatggatacctgttgttgaaggctctccgggactagtagtgatgcatgctgt

SEQ ID NO: 30697 - DNA, 60 bp, Artificial
  Synthetic oligonucleotide
acatgtttgaatgtgtgctctataaagtaaagcatcattttcactttcatgctcatcaag

SEQ ID NO: 30698 - DNA, 56 bp, Artificial
  Synthetic oligonucleotide
cagcacaaaacaggcttttagcaattaacacatgctttactaggaaaagctttccc

SEQ ID NO: 30699 - DNA, 60 bp, Artificial
  Synthetic oligonucleotide
gggaagcttttcctagtaaagcatgtgttaattgctaaaagcctgttttgtgctgctatc

SEQ ID NO: 30700 - DNA, 60 bp, Artificial
  Synthetic oligonucleotide
agtggcttcacagtatcaaatgtgatcctatcacataacagtgaattgaacacaatccag

SEQ ID NO: 30701 - DNA, 60 bp, Artificial
  Synthetic oligonucleotide
cagcacaaaacaggcttttagcaattaacacatgctttactaggaaaagcttccccttct

SEQ ID NO: 30702 - DNA, 60 bp, Artificial
  Synthetic oligonucleotide
tcagctctccgaaaatatcatgccttgctaactctgtttctaggtatttttgctcaaaca

SEQ ID NO: 30703 - DNA, 60 bp, Artificial
  Synthetic oligonucleotide
tcatcctgttttcgtttctatagttatattgaaacctattgctgggatgccaatcactgt

SEQ ID NO: 30704 - DNA, 60 bp, Artificial
  Synthetic oligonucleotide
ctgggtgagatggtctctctgtttgagcaaaaatacctagaaacagagttagcaaggcat

SEQ ID NO: 30705 - DNA, 60 bp, Artificial
  Synthetic oligonucleotide
ttctatagttatattgaaacctattgctgggatgccaatcactgttactagcagcagggt

SEQ ID NO: 30706 - DNA, 60 bp, Artificial
  Synthetic oligonucleotide
ttctattgttatattgaaacctattgctgggatgccaatcactgttactagcagcagggt

SEQ ID NO: 30707 - DNA, 60 bp, Artificial
  Synthetic oligonucleotide
gatgcatcaggatttaaaagctatagagccactggaacgcacgctgttgaactaatggca

SEQ ID NO: 30708 - DNA, 60 bp, Artificial
  Synthetic oligonucleotide
gatgcatcaggatttaaaagctatagagccactggaatgcatgctgttgaactaatggca

SEQ ID NO: 30709 - DNA, 56 bp, Artificial
  Synthetic oligonucleotide
ttttgccattagttcaacagcatgcattccagtggctctatagcttttaaatcctg

SEQ ID NO: 30710 - DNA, 60 bp, Artificial
  Synthetic oligonucleotide
gatgcatcaggatttaaaagctatagagccactggaatgcatgctgttgagctaatggca

SEQ ID NO: 30711 - DNA, 60 bp, Artificial
  Synthetic oligonucleotide
ctttgatctgctgtgataagtttccaaaggcttctatgaaagttaaagaggtcatgagcc

SEQ ID NO: 30712 - DNA, 60 bp, Artificial
  Synthetic oligonucleotide
gtggcttcacagtgtcaaatgtgattctatcacataacagtgaattgaacacaatccaga

SEQ ID NO: 30713 - DNA, 60 bp, Artificial
  Synthetic oligonucleotide
ggcttatgacttctttaactttcatagaagcctttggaaacttatcacagcagatcaaag

SEQ ID NO: 30714 - DNA, 60 bp, Artificial
  Synthetic oligonucleotide
ggctcatgacctctttaactttcatagaagcctttggaaacttatcacagcagatcaaag

SEQ ID NO: 30715 - DNA, 64 bp, Artificial
  Synthetic oligonucleotide
ccaagctgtcagctatctcatttaagggacaatttacattcttatattccatataaacagttgc

SEQ ID NO: 30716 - DNA, 60 bp, Artificial
  Synthetic oligonucleotide
cattcctcaaacttgctaagtttaatatagagtcattgttgtggcatgtttcacaagctt

SEQ ID NO: 30717 - DNA, 60 bp, Artificial
  Synthetic oligonucleotide
gtggcgatgaaaatccacgaggcccagtgagccgtgaacatgtggagtggtgcagggagt

SEQ ID NO: 30718 - DNA, 60 bp, Artificial
  Synthetic oligonucleotide
ggtggcgatgaaaatccacgaggcccagtgagccgtgaacatgtggagtggtgcagggaa

SEQ ID NO: 30719 - DNA, 60 bp, Artificial
  Synthetic oligonucleotide
agaggtggcgatgaaaatccacgaggcccagtgagccgtgaacatgtggagtggtgcagg

SEQ ID NO: 30720 - DNA, 60 bp, Artificial
  Synthetic oligonucleotide
gctcgtgactgctcggcaaaagcttaaagatgccgaaaagacggtggaggtggacccgga

SEQ ID NO: 30721 - DNA, 60 bp, Artificial
  Synthetic oligonucleotide
gctcgtgactgctcggcaaaagctcaaagatgccgaaaagacggtggaggtggacccgga

SEQ ID NO: 30722 - DNA, 60 bp, Artificial
  Synthetic oligonucleotide
agcacacgaacaacagctcgtgactgctcggcaaaagcttaaagatgccgaaaagacggt

SEQ ID NO: 30723 - DNA, 60 bp, Artificial
  Synthetic oligonucleotide
cataggtactgttaccaaactaagtagaatgggaatctttgatttcatgagatatgcagg

SEQ ID NO: 30724 - DNA, 60 bp, Artificial
  Synthetic oligonucleotide
gtctcttcatactcatgtacataatcttactgctcttttaagtgtacctgcagaatggga

SEQ ID NO: 30725 - DNA, 60 bp, Artificial
  Synthetic oligonucleotide
cataaagagttctgaaatagtttcagctctgaaatcaacgcttggaaagcagcctgatga

SEQ ID NO: 30726 - DNA, 60 bp, Artificial
  Synthetic oligonucleotide
aaatgttttgaagaagatagagaatcgttgatgaaatttatggaagttgaaggtctggat

SEQ ID NO: 30727 - DNA, 60 bp, Artificial
  Synthetic oligonucleotide
cattcccagtgtctatgaactggctacaagggaatctcaattatttatcatctgtctacc

SEQ ID NO: 30728 - DNA, 60 bp, Artificial
  Synthetic oligonucleotide
ccttagaaagattaggtcggggtctgaaaggtaatagagtcacattcatacaactgctag

SEQ ID NO: 30729 - DNA, 60 bp, Artificial
  Synthetic oligonucleotide
ccaacactttagccatatggagcacaatatacagtcggttgacaaacatcaatttctaca

SEQ ID NO: 30730 - DNA, 60 bp, Artificial
  Synthetic oligonucleotide
tctttggaaacaggaagacattcgatgacgttaaggaatgcatccaagaagccaacggcc

SEQ ID NO: 30731 - DNA, 51 bp, Artificial
  Synthetic oligonucleotide
gaaactgataaaagcttgtgaagcctgccacactagcaactcagtgctcaa

SEQ ID NO: 30732 - DNA, 60 bp, Artificial
  Synthetic oligonucleotide
atattaagacagatgaacaagatgtcaggggttattatgtctctggtcacacatacaaga

SEQ ID NO: 30733 - DNA, 60 bp, Artificial
  Synthetic oligonucleotide
gcctgtactcaaacatagccaatgaggaaataagcagcatgatatttaacgctgtcagta

SEQ ID NO: 30734 - DNA, 60 bp, Artificial
  Synthetic oligonucleotide
tccagtggaaatcatagacgattcttctacttatgatcaaattgcaaggcagatgaggct

SEQ ID NO: 30735 - DNA, 60 bp, Artificial
  Synthetic oligonucleotide
gtgatacctctgtactgtaggcatttggccaactgcagcacagaaagctctcataatagt

SEQ ID NO: 30736 - DNA, 60 bp, Artificial
  Synthetic oligonucleotide
cagcaatacaagttcagtcacttagcatatattcaatgctgccaggagaagagaacgaca

SEQ ID NO: 30737 - DNA, 60 bp, Artificial
  Synthetic oligonucleotide
gtgaatttgttcaagacaagtttaatgtctgaagactgtgacagcttaaatgtgggaatg

SEQ ID NO: 30738 - DNA, 60 bp, Artificial
  Synthetic oligonucleotide
acactgacatactcaatgcactaaagcctgttgacttagatgaaaggaacttggatgagg

SEQ ID NO: 30739 - DNA, 60 bp, Artificial
  Synthetic oligonucleotide
cgaacagctatttgaaagcctatatgagggtcatttggaaaagataaaatctgatgttct

SEQ ID NO: 30740 - DNA, 60 bp, Artificial
  Synthetic oligonucleotide
catccagactataaacagtttcctagatacttcaggcgaaattaccgtgtaccttcaagc

SEQ ID NO: 30741 - DNA, 60 bp, Artificial
  Synthetic oligonucleotide
gagctgctattgcatcgaagcttatatctgtcaactcactaggtcagctcataggtctgg

SEQ ID NO: 30742 - DNA, 60 bp, Artificial
  Synthetic oligonucleotide
ccaagtggaaacatgtcgattacagccacaacaagcagagttatccaggaatttaggaac

SEQ ID NO: 30743 - DNA, 66 bp, Artificial
  Synthetic oligonucleotide
gccaagatattattgatctaattgatgctatgcctaatggtacaataaagaaagatatgctagtgc

SEQ ID NO: 30744 - DNA, 58 bp, Artificial
  Synthetic oligonucleotide
ggatataaagcacactgcgagatgatgaagattgcccctattgagacagaagaaagac

SEQ ID NO: 30745 - DNA, 60 bp, Artificial
  Synthetic oligonucleotide
ctggccaaagtcggtgaatatatgaataggtcatcagaggttttctttagccattggtca

SEQ ID NO: 30746 - DNA, 60 bp, Artificial
  Synthetic oligonucleotide
ttaattcagtctggaatgaactgtagttgtgatttctcaacctgacagtagagtctaaag

SEQ ID NO: 30747 - DNA, 58 bp, Artificial
  Synthetic oligonucleotide
ttttggtgtcttagcaggaaggaggttgcattttgctccgaaacacaggtctgatgtt

SEQ ID NO: 30748 - DNA, 60 bp, Artificial
  Synthetic oligonucleotide
agttaaagagggtgtgcatccctactgatatattcctaaaccttaaaagaggtcaaacag

SEQ ID NO: 30749 - DNA, 60 bp, Artificial
  Synthetic oligonucleotide
gaacctggaatgtaaaatggctttcttgtcggcagatcaatcaaagtggtctgcatcaga

SEQ ID NO: 30750 - DNA, 60 bp, Artificial
  Synthetic oligonucleotide
gatgttgtattttattgagcacacatacaagcatatcgcccaatctgatccttctgaggc

SEQ ID NO: 30751 - DNA, 60 bp, Artificial
  Synthetic oligonucleotide
tcagaggagacttaaagaaacttttgtccagctttaactgttctagtctgtctgaattgc

SEQ ID NO: 30752 - DNA, 59 bp, Artificial
  Synthetic oligonucleotide
agacatatggcatctcatccagaatcatttttgattgcaccaatgaatgacaaagatta

SEQ ID NO: 30753 - DNA, 60 bp, Artificial
  Synthetic oligonucleotide
gtctagaaacatgcaagacgtcagaagaattcgaaaactatctcaagagggttgatttcc

SEQ ID NO: 30754 - DNA, 60 bp, Artificial
  Synthetic oligonucleotide
ggcaactagccatgtcaaatcaagacatatcaatccatctgcattcaccctacgaatacc

SEQ ID NO: 30755 - DNA, 60 bp, Artificial
  Synthetic oligonucleotide
tgcattagatagaattttgaggtcgaaagccaaaacattcctggacccagattcaaaaga

SEQ ID NO: 30756 - DNA, 60 bp, Artificial
  Synthetic oligonucleotide
gcaaccaatcaaagtataagctacgcacagctgagacaggggagtgttatacagaactgt

SEQ ID NO: 30757 - DNA, 60 bp, Artificial
  Synthetic oligonucleotide
gtcacccggtttgattgtaatgtcagctgtctatggtatggattatctgatagaattagg

SEQ ID NO: 30758 - DNA, 60 bp, Artificial
  Synthetic oligonucleotide
gctgtgcttatatttcagatagattgcagagcttgttccctgatatgactgtagaatcca

SEQ ID NO: 30759 - DNA, 60 bp, Artificial
  Synthetic oligonucleotide
cagctagattggacaatgcagtggataaactaactagatggacaaatagcttgtcaacat

SEQ ID NO: 30760 - DNA, 60 bp, Artificial
  Synthetic oligonucleotide
cagccttatttcatctcattgtatacaaaggaactgatcgtgtcttttaagtgtgccaac

SEQ ID NO: 30761 - DNA, 60 bp, Artificial
  Synthetic oligonucleotide
gctatcctgaaggtaaaggagtaattgactctgggctgaattcaataatgtcaatgaact

SEQ ID NO: 30762 - DNA, 60 bp, Artificial
  Synthetic oligonucleotide
acaaagaaactaaaggtgagaaagcctgtctgatgatatatgattggaaagtctctgtag

SEQ ID NO: 30763 - DNA, 60 bp, Artificial
  Synthetic oligonucleotide
ctagtgaaaacctgtctggtagatctaagcatagatacaacaggtcactcagaagcagct

SEQ ID NO: 30764 - DNA, 60 bp, Artificial
  Synthetic oligonucleotide
cctttagggatgcttttagcgaccaggtgaagcttatccatcacaaatcatatggaggca

SEQ ID NO: 30765 - DNA, 58 bp, Artificial
  Synthetic oligonucleotide
gtctgtgtacacatacagtgaggacatgatgcagatggctaaagggctaatggtggct

SEQ ID NO: 30766 - DNA, 54 bp, Artificial
  Synthetic oligonucleotide
agtatcactgcgaatcaatgattgaagctatgtatgttctttacggcatggatg

SEQ ID NO: 30767 - DNA, 57 bp, Artificial
  Synthetic oligonucleotide
tggtatcaacacagggaagtcaggggttccgtatatcactttgcataaggtggaaaa

SEQ ID NO: 30768 - DNA, 60 bp, Artificial
  Synthetic oligonucleotide
gaactaatgctggcaatacagactttcttgtatctgtctttgagaaaatgcaaagaacaa

SEQ ID NO: 30769 - DNA, 60 bp, Artificial
  Synthetic oligonucleotide
cacagttgccaatgcttctattcctaaagcaaattataatttcaggtggttcattacaga

SEQ ID NO: 30770 - DNA, 60 bp, Artificial
  Synthetic oligonucleotide
ctggggcccatggaaggaggtggtataatctttaaacactggtgtacatctacctgtcac

SEQ ID NO: 30771 - DNA, 60 bp, Artificial
  Synthetic oligonucleotide
gcacattacaaagtttgtcaagccacccaccgattcagagaagatttaaaaaagactgta

SEQ ID NO: 30772 - DNA, 60 bp, Artificial
  Synthetic oligonucleotide
ggcacattacaaagtgtgtcaagccacccaccgattcagagaagatttaaaaaagactgt

SEQ ID NO: 30773 - DNA, 55 bp, Artificial
  Synthetic oligonucleotide
cagaacagctagtgccagagagctcatgcaacatggacaaccaccaatcactctc

SEQ ID NO: 30774 - DNA, 60 bp, Artificial
  Synthetic oligonucleotide
tagtagtagactccgcaagaaacagcagttaaatcacagcaggatcatgtggagtttgct

SEQ ID NO: 30775 - DNA, 60 bp, Artificial
  Synthetic oligonucleotide
ggtgacacactactatttcttgggcccatggaaggaggtggtataatctttaaacactgg

SEQ ID NO: 30776 - DNA, 60 bp, Artificial
  Synthetic oligonucleotide
taattgggactgtatctaagttttctcaaggtgacactctactatttcttgggcccatgg

SEQ ID NO: 30777 - DNA, 60 bp, Artificial
  Synthetic oligonucleotide
ccaacagagtgtctcattgcatatagaaattgaaagtcaaggcattggtgctgatgttca

SEQ ID NO: 30778 - DNA, 60 bp, Artificial
  Synthetic oligonucleotide
ctgacaatgtggactcttcttctcattattgaatccatcctctgggcagcaagtgcagca

SEQ ID NO: 30779 - DNA, 60 bp, Artificial
  Synthetic oligonucleotide
cttggctgagaatccttgtaaagtagggctccaggcagcaaacatagaaggtgcctgggg

SEQ ID NO: 30780 - DNA, 60 bp, Artificial
  Synthetic oligonucleotide
tattgattttgaaaatttggctgagaatccttgtaaagtagggctccaggcagcaaacat

SEQ ID NO: 30781 - DNA, 60 bp, Artificial
  Synthetic oligonucleotide
tttggctgagaatccttgtaaagtagggctccaggcagcaaacatagaaggtgcctgggg

SEQ ID NO: 30782 - DNA, 60 bp, Artificial
  Synthetic oligonucleotide
ttttgaaaatttggctgagaatccttgtaaagtagggctccaggcagcaaacatagaagg

SEQ ID NO: 30783 - DNA, 60 bp, Artificial
  Synthetic oligonucleotide
gatgaaggtcccttggtttcattgaccaaacgcaatgggaatgttgaagtctctagatcg

SEQ ID NO: 30784 - DNA, 60 bp, Artificial
  Synthetic oligonucleotide
gagtctgcaaagacagatgaaggtcccttggtttcattgaccaaacgcaatgggaatgtt

SEQ ID NO: 30785 - DNA, 60 bp, Artificial
  Synthetic oligonucleotide
ccctctgagtctgaaaagacagatgaaggtcccttggtttcattgaccaaacgcaatccc

SEQ ID NO: 30786 - DNA, 60 bp, Artificial
  Synthetic oligonucleotide
ggcagcaagaaaccctctgagtctgaaaagacagatgaaggtcccttggtttcattgacc

SEQ ID NO: 30787 - DNA, 60 bp, Artificial
  Synthetic oligonucleotide
ctatcacagaatcagagggttatgatctagctgcaagaatgatagtggatacaaaccatc

SEQ ID NO: 30788 - DNA, 60 bp, Artificial
  Synthetic oligonucleotide
tgaaggtcccttggtttcattgaccaaacgcaatgggaatgttgaagtctctagatcatg

SEQ ID NO: 30789 - DNA, 58 bp, Artificial
  Synthetic oligonucleotide
agaaggatatgatctagctgcaagaatgatagtggatacaaaccatcatatttctaac

SEQ ID NO: 30790 - DNA, 60 bp, Artificial
  Synthetic oligonucleotide
ggtagcttacctcttattgcttcagttgatagctttgagatgatcagtgttgtcttagct

SEQ ID NO: 30791 - DNA, 60 bp, Artificial
  Synthetic oligonucleotide
agccaagacaacactgatcatctcaaagctatcaactgaagcaataagaggtaagctact

SEQ ID NO: 30792 - DNA, 57 bp, Artificial
  Synthetic oligonucleotide
tgctttgctaatggagaattagtcaaaacagtaaatgctactaatgtgccagcagaa

SEQ ID NO: 30793 - DNA, 60 bp, Artificial
  Synthetic oligonucleotide
tattcaagcaatgcaagcaaatcccattgcgtgaagggacaactggctctcgctgctttg

SEQ ID NO: 30794 - DNA, 60 bp, Artificial
  Synthetic oligonucleotide
gtgccagcagaagtctgcgtgaaagatgatatatcaataattaagtctaacggagaacat

SEQ ID NO: 30795 - DNA, 60 bp, Artificial
  Synthetic oligonucleotide
ggcgctgtagttaaatattatcggctgtatcaaataaaagattgggctacttgcaatcct

SEQ ID NO: 30796 - DNA, 60 bp, Artificial
  Synthetic oligonucleotide
ttgcaatcctattttagatacgcatggaacattcatgctcctggatatagataatacagg

SEQ ID NO: 30797 - DNA, 60 bp, Artificial
  Synthetic oligonucleotide
gcagtacatggtcatttgcagtatgccaaggcttatattattacacaagtgctagacagc

SEQ ID NO: 30798 - DNA, 60 bp, Artificial
  Synthetic oligonucleotide
atctataccagcagatacgaactggttaactttctcaagagaaaggtccagcacatgggg

SEQ ID NO: 30799 - DNA, 52 bp, Artificial
  Synthetic oligonucleotide
atgtacgggagctaaaaaggtaatatgctttagccctcggggtgtgagtcag

SEQ ID NO: 30800 - DNA, 60 bp, Artificial
  Synthetic oligonucleotide
gaaatcagtgctatgtcattgattaaaagagatggacaaacagtaaattcgaagattccc

SEQ ID NO: 30801 - DNA, 60 bp, Artificial
  Synthetic oligonucleotide
gtatcagaagaaccagaaatcagtgctatgtcattgattaaaagagatggacaaacagta

SEQ ID NO: 30802 - DNA, 60 bp, Artificial
  Synthetic oligonucleotide
gaatgtgttgttgagaaatttggaacttgcactgtcaagagcagtacatggtcatttgca

SEQ ID NO: 30803 - DNA, 51 bp, Artificial
  Synthetic oligonucleotide
ggtctaacataccacaaagtttctagcaactgctatagcccagttaagatt

SEQ ID NO: 30804 - DNA, 60 bp, Artificial
  Synthetic oligonucleotide
gtgcaagggacacccactgcatatccatgtttgaacctgcgacacgtgggattgacagga

SEQ ID NO: 30805 - DNA, 60 bp, Artificial
  Synthetic oligonucleotide
gaagcatgtgcaagggacacccactgcatatccatgtttgaacctgcgacacgtgggatt

SEQ ID NO: 30806 - DNA, 60 bp, Artificial
  Synthetic oligonucleotide
caagggtgataaagtgtcctctggcgtaagaaactcatatatagaaagcaaattgcctgc

SEQ ID NO: 30807 - DNA, 60 bp, Artificial
  Synthetic oligonucleotide
aatttacctgctatagccccttcatacattggtgttactatcaagggtgataaagtgtcc

SEQ ID NO: 30808 - DNA, 60 bp, Artificial
  Synthetic oligonucleotide
ttcaggcccacgaaaaatttacctgctatagccccttcatacattggtgttactatcaag

SEQ ID NO: 30809 - DNA, 60 bp, Artificial
  Synthetic oligonucleotide
attcctcgctatattactcattgtcttcctgctgttcattttagtgccattctgtaagag

SEQ ID NO: 30810 - DNA, 60 bp, Artificial
  Synthetic oligonucleotide
gtgattattgttcaggcacagtttgggattcaacatatcgcacgaagttaaatactagac

SEQ ID NO: 30811 - DNA, 60 bp, Artificial
  Synthetic oligonucleotide
aagtgctagacagcatgcaaagacacatgatatcaccaaatattgtctgagtaatacatg

SEQ ID NO: 30812 - DNA, 60 bp, Artificial
  Synthetic oligonucleotide
ttgcattagttttttaaacaatataattatcgatccgcaacaaagtgaatactcaataaa

SEQ ID NO: 30813 - DNA, 61 bp, Artificial
  Synthetic oligonucleotide
gtggtttaaaattaaaagcacgaccatctataactaagcaaaacccaaagattagtcttgc

SEQ ID NO: 30814 - DNA, 61 bp, Artificial
  Synthetic oligonucleotide
cggaagtgctttgacaatgcatatgaatcgtgtaaatatcttgatttaaggaatgatttgc

SEQ ID NO: 30815 - DNA, 60 bp, Artificial
  Synthetic oligonucleotide
gatatgttcaaagaaagtgctgcgttgacagtagatgtactaaaatgcggtggttgtctc

SEQ ID NO: 30816 - DNA, 60 bp, Artificial
  Synthetic oligonucleotide
aaagcaaattgcctgcaatatccggattagcgactggagtagatataaaaatgcctgatg

SEQ ID NO: 30817 - DNA, 60 bp, Artificial
  Synthetic oligonucleotide
acttgtgaaactatcgatgtcacatgtggcttaaagacaatatcgtttcatgcttgtttc

SEQ ID NO: 30818 - DNA, 53 bp, Artificial
  Synthetic oligonucleotide
atagattaaaccattataggatatccggctcaatgcatatatctggatggttc

SEQ ID NO: 30819 - DNA, 60 bp, Artificial
  Synthetic oligonucleotide
gcttgtttccatacacataaatcttgcactaggtacttcaaaggttccgtgttgccggag

SEQ ID NO: 30820 - DNA, 60 bp, Artificial
  Synthetic oligonucleotide
cgatgtcacatgtggcttaaagacaatatcgtttcatgcttgtttccatacacataaatc

SEQ ID NO: 30821 - DNA, 60 bp, Artificial
  Synthetic oligonucleotide
tagatcttcagactgtaaccactgcaaacatgccaaacataataggagtgaaagatggga

SEQ ID NO: 30822 - DNA, 60 bp, Artificial
  Synthetic oligonucleotide
cagggatgttaattcccaaaatgcatacttgccgtgtagaatgcgatataacactcaaca

SEQ ID NO: 30823 - DNA, 60 bp, Artificial
  Synthetic oligonucleotide
tcttcttgcagtccatcctttcacaaactgtcctacaacctgtatctgcggtatgtcata

SEQ ID NO: 30824 - DNA, 60 bp, Artificial
  Synthetic oligonucleotide
tcattactcctatcaatgcagaatgctttactctagatatgctgcctgatgaattcagag

SEQ ID NO: 30825 - DNA, 50 bp, Artificial
  Synthetic oligonucleotide
aaaaaaatgcgggtcagtacagatgactgacaattcaataataggcacag

SEQ ID NO: 30826 - DNA, 60 bp, Artificial
  Synthetic oligonucleotide
tctaattcaatagcagaatgtgttgttgagaaatttggaacttgcactgtcaagagcagt

SEQ ID NO: 30827 - DNA, 60 bp, Artificial
  Synthetic oligonucleotide
gggccgactatatctgtgaatgttaaacacaatgaacagtgtactggtaaatgcccaaca

SEQ ID NO: 30828 - DNA, 60 bp, Artificial
  Synthetic oligonucleotide
gtggtatgttgcacaagaggcatgatttgaagatgtcaggagatatgactaattattgcc

SEQ ID NO: 30829 - DNA, 60 bp, Artificial
  Synthetic oligonucleotide
gcacatggggatgcgaagaatggggatgtatggctataaatgatgggtgtgtttacgggt

SEQ ID NO: 30830 - DNA, 55 bp, Artificial
  Synthetic oligonucleotide
ataaatgatgggtgtgtttacgggtcgtgtcaggatataattagacctgaactca

SEQ ID NO: 30831 - DNA, 60 bp, Artificial
  Synthetic oligonucleotide
tcagaaacaaaagaagctgaagtctgtataacaacagcacatgaaactttttgcaatacc

SEQ ID NO: 30832 - DNA, 60 bp, Artificial
  Synthetic oligonucleotide
tgtattgcaaccattgataagtcaaagaatacagttagatcttcagactgtaaccactgc

SEQ ID NO: 30833 - DNA, 60 bp, Artificial
  Synthetic oligonucleotide
gaattcagagaatgcagagaaaacacatcaatacttatacatgcatcgtccacaaaaatt

SEQ ID NO: 30834 - DNA, 60 bp, Artificial
  Synthetic oligonucleotide
taaccactgcaaacatgccaaacataataggagtgaaagatgggaagatatacagtgggg

SEQ ID NO: 30835 - DNA, 60 bp, Artificial
  Synthetic oligonucleotide
aaagatgggaagatatacagtggggatataaatgatctaggaacaactgcaaaaaaatgc

SEQ ID NO: 30836 - DNA, 60 bp, Artificial
  Synthetic oligonucleotide
ctccaatattcggaggtttgtcatattactgggcgatagcaatgtattcattcctcgcta

SEQ ID NO: 30837 - DNA, 60 bp, Artificial
  Synthetic oligonucleotide
ggagattttgactatgatatgttcaaagaaagtgctgcgttgacagtagatgtactaaaa

SEQ ID NO: 30838 - DNA, 60 bp, Artificial
  Synthetic oligonucleotide
ccatcaaaattacactgaatcagctaaaagtttagaggtaatactacaggagatgagcac

SEQ ID NO: 30839 - DNA, 60 bp, Artificial
  Synthetic oligonucleotide
agaagcacaagtgttttatgagcaaatcaagtctaaaatgtgcccatcagaagtcaacga

SEQ ID NO: 30840 - DNA, 60 bp, Artificial
  Synthetic oligonucleotide
actcattgtcttcctgctgttcattttagtgccattctgtaagagaatcaaaggtgtgct

SEQ ID NO: 30841 - DNA, 60 bp, Artificial
  Synthetic oligonucleotide
acgaagttaaatactagacatatatcgcaccctgatatagaaaattatattgctgcttta

SEQ ID NO: 30842 - DNA, 60 bp, Artificial
  Synthetic oligonucleotide
gggtatgtggcatttattgctaaacatggggcccaactcaatttcgataccgttagattc

SEQ ID NO: 30843 - DNA, 60 bp, Artificial
  Synthetic oligonucleotide
tgctaaacatggggcccaactcaatttcgataccgttagagtcttcttcctcaatcagaa

SEQ ID NO: 30844 - DNA, 60 bp, Artificial
  Synthetic oligonucleotide
gggtatgtggcatttattgctaaacatggggcccaactcaatttcgataccgttagagtc

SEQ ID NO: 30845 - DNA, 60 bp, Artificial
  Synthetic oligonucleotide
gctaaacatggggcccaactcaatttcgataccgttagagtcttcttcctcaatcagaag

SEQ ID NO: 30846 - DNA, 60 bp, Artificial
  Synthetic oligonucleotide
gctaaatatagggcccaactcaatttcgataccgttagagtcttcttcctcaatcagaag

SEQ ID NO: 30847 - DNA, 60 bp, Artificial
  Synthetic oligonucleotide
gggtgcacagattgacactgctttcagctcatactactggctctacaaggccggcgtgac

SEQ ID NO: 30848 - DNA, 60 bp, Artificial
  Synthetic oligonucleotide
ctacagagcagacgggcagctgtgtcagcattggaggacaagttggcagacttcaagagg

SEQ ID NO: 30849 - DNA, 60 bp, Artificial
  Synthetic oligonucleotide
cagctgtaaagctattgagtgagagcaaccctggaacagccagctctatttcactcaaga

SEQ ID NO: 30850 - DNA, 60 bp, Artificial
  Synthetic oligonucleotide
cacaaactgtttgaacatcttgaagtgcaggaagcagatctttgctgcttgcaaaagtgg

SEQ ID NO: 30851 - DNA, 60 bp, Artificial
  Synthetic oligonucleotide
ttcacaaactgtttgaacatcttgaagtgcaggaagcagatctttgctgcttgcaaaagt

SEQ ID NO: 30852 - DNA, 60 bp, Artificial
  Synthetic oligonucleotide
ctcttgtccctctctggacagataatgctcatggcgttgggagcgttcctatgcatacgg

SEQ ID NO: 30853 - DNA, 60 bp, Artificial
  Synthetic oligonucleotide
ttaatgaccaacagagtgtctcattgcatatagaaattgaaagtcaaggcattggtgctg

SEQ ID NO: 30854 - DNA, 60 bp, Artificial
  Synthetic oligonucleotide
gcccatattgctttacgcactgtgaaccgacagaaactgcaattcaggcacattacaaag

SEQ ID NO: 30855 - DNA, 60 bp, Artificial
  Synthetic oligonucleotide
cgacagaaactgcaattcaggcacattacaaagtttgtcaagccacccaccgattcagag

SEQ ID NO: 30856 - DNA, 65 bp, Artificial
  Synthetic oligonucleotide
gtcagctttaaagggttgtgtatgttaaagcatagaatggttgaagaatcatatagaaataggag

SEQ ID NO: 30857 - DNA, 60 bp, Artificial
  Synthetic oligonucleotide
ttttcactgttaccaggggttgcccattctattgctattgagttgtgtgttccaggtttt

SEQ ID NO: 30858 - DNA, 60 bp, Artificial
  Synthetic oligonucleotide
tcatacaagcaatcaagagaaccgattcaaagccattctacggaaaataaaggaggagtt

SEQ ID NO: 30859 - DNA, 60 bp, Artificial
  Synthetic oligonucleotide
caagcaatcaagagaaccgattcaaagccattctacggaaaataaaggaggagtttgaaa

SEQ ID NO: 30860 - DNA, 60 bp, Artificial
  Synthetic oligonucleotide
ggaggcagaacagctagtgccagagagctcatgcaacatggacaaccaccagtcactctc

SEQ ID NO: 30861 - DNA, 60 bp, Artificial
  Synthetic oligonucleotide
agtcagctttaaagggttgtgtatgttaaagcatagaatggttgaagaatcatatagaaa

SEQ ID NO: 30862 - DNA, 57 bp, Artificial
  Synthetic oligonucleotide
tccaggttttcatggctgggccacagctgcacttttgatcacattttgctttggatg

SEQ ID NO: 30863 - DNA, 60 bp, Artificial
  Synthetic oligonucleotide
tgccaggggttgcccattctattgctattgagttgtgtgttccaggttttcatggctggg

SEQ ID NO: 30864 - DNA, 60 bp, Artificial
  Synthetic oligonucleotide
ccaggggttgcccattctattgctattgagttgtgtgttccaggttttcatggctgggcc

SEQ ID NO: 30865 - DNA, 60 bp, Artificial
  Synthetic oligonucleotide
ccaggggtcgcccattctattgctattgagttgtgtgttccaggttttcatggctgggcc

SEQ ID NO: 30866 - DNA, 60 bp, Artificial
  Synthetic oligonucleotide
tcctccacacaagcaatcaagagaaccgattcaaagccattctacggaaaataaaggagg

SEQ ID NO: 30867 - DNA, 60 bp, Artificial
  Synthetic oligonucleotide
tccttcatacaagcaatcaagagaaccgattcaaagccattctacggaaaataaaggagg

SEQ ID NO: 30868 - DNA, 52 bp, Artificial
  Synthetic oligonucleotide
ggtttcatggctgggccacagctgcacttttgatcacattctgctttggctg

SEQ ID NO: 30869 - DNA, 57 bp, Artificial
  Synthetic oligonucleotide
tccaggttttcatggctgggccacagctgcacttttgatcacattttgctttggctg

SEQ ID NO: 30870 - DNA, 60 bp, Artificial
  Synthetic oligonucleotide
cttcatacaagcaatcaagagaaccgattcaaagccattctacggaaaataaaggaggag

SEQ ID NO: 30871 - DNA, 60 bp, Artificial
  Synthetic oligonucleotide
ctccacacaagcaatcaagagaaccgattcaaagccattctacggaaaataaaggaggag

SEQ ID NO: 30872 - DNA, 60 bp, Artificial
  Synthetic oligonucleotide
cggaaaataaaggaggagtttgaaaaaacaaagggttccatggtttgtgagatctgtaag

SEQ ID NO: 30873 - DNA, 60 bp, Artificial
  Synthetic oligonucleotide
agtgcccatattgctttacgcactgtgaaccgacagaaactgcaattcaggcacattaca

SEQ ID NO: 30874 - DNA, 53 bp, Artificial
  Synthetic oligonucleotide
gaacaccattatggcttcgaagacagtaggaacatctgaagaaaagctgaaaa

SEQ ID NO: 30875 - DNA, 60 bp, Artificial
  Synthetic oligonucleotide
gaacaccattatggcttcgaagacagtaggaacatctgaagaaaagctgaaaaagaaatc

SEQ ID NO: 30876 - DNA, 60 bp, Artificial
  Synthetic oligonucleotide
cacctgatcgttgtccacctacatgcctcttcgtcgcagggatggctgaactaggggcct

SEQ ID NO: 30877 - DNA, 60 bp, Artificial
  Synthetic oligonucleotide
ggggcaccatgtaagtttctacctgatctgtcaacccaaagtttgcatgcgagtccacca

SEQ ID NO: 30878 - DNA, 54 bp, Artificial
  Synthetic oligonucleotide
agttacgggaatgtgctggatctcaacaatttagatattgaggagccaacagga

SEQ ID NO: 30879 - DNA, 60 bp, Artificial
  Synthetic oligonucleotide
ttaagttagttaacctgattgaatatgtgattataaatgtgaaatatgtatactactgat

SEQ ID NO: 30880 - DNA, 60 bp, Artificial
  Synthetic oligonucleotide
cttactaacaacaacacactacctcacttaaacccataaactacctcttatataaactac

SEQ ID NO: 30881 - DNA, 60 bp, Artificial
  Synthetic oligonucleotide
cacctcggagatgacatggacccagaactcaggaatcttgcgcagctattgattgaccag

SEQ ID NO: 30882 - DNA, 60 bp, Artificial
  Synthetic oligonucleotide
aatcaatagagactaattattaaggataagtaaaggtaataagtaataagtaagtaatta

SEQ ID NO: 30883 - DNA, 60 bp, Artificial
  Synthetic oligonucleotide
taaccaagaaccattaaaactctaactgaacacattaactacatcgtagtaatcaataga

SEQ ID NO: 30884 - DNA, 60 bp, Artificial
  Synthetic oligonucleotide
atgaggattgctgggcctatcactgcaaaagtgccatccactgagactacagaggcgatg

SEQ ID NO: 30885 - DNA, 60 bp, Artificial
  Synthetic oligonucleotide
gggaacctgcaacatacctgtaactacgtttgaggcagcatataagtcaaggaaaacggt

SEQ ID NO: 30886 - DNA, 60 bp, Artificial
  Synthetic oligonucleotide
agaagttgtatgataggtttgctgtcaagccgaatccaagttatttatgagaagacatac

SEQ ID NO: 30887 - DNA, 60 bp, Artificial
  Synthetic oligonucleotide
cacattgcctaccgacagtacacctgattgctcctgttcaaacatgcatgtctgtaagaa

SEQ ID NO: 30888 - DNA, 60 bp, Artificial
  Synthetic oligonucleotide
aatggtcaagggcttatgaggattgctgggcctatcactgcaaaagtgccatccactgag

SEQ ID NO: 30889 - DNA, 60 bp, Artificial
  Synthetic oligonucleotide
tatttatgagaagacatactgtgttacaggtcaactagtggaaggtctttgtttcattcc

SEQ ID NO: 30890 - DNA, 60 bp, Artificial
  Synthetic oligonucleotide
gactacagagacgatgcaggggatagcctttgctggtgcacctacgtatagctcgttctc

SEQ ID NO: 30891 - DNA, 60 bp, Artificial
  Synthetic oligonucleotide
cctcttatagctataggcggaaacttgtggaccctgctaataaggaagaaaccctgcctt

SEQ ID NO: 30892 - DNA, 55 bp, Artificial
  Synthetic oligonucleotide
atcaggatggtcagacacagctcatggtgtaggtattgtgcctatgaagactgac

SEQ ID NO: 30893 - DNA, 60 bp, Artificial
  Synthetic oligonucleotide
ggcggaaacttgtggaccctgctaataaggaagaaaccctgccttttcacttccaactag

SEQ ID NO: 30894 - DNA, 60 bp, Artificial
  Synthetic oligonucleotide
accctgccttttcacttccaactagataagcaggtcgttcatgctgagatacaaaactta

SEQ ID NO: 30895 - DNA, 60 bp, Artificial
  Synthetic oligonucleotide
ctcgtatggttttgaacccgagaggtgaagatcatgatccagatcagaatggtcaagggc

SEQ ID NO: 30896 - DNA, 60 bp, Artificial
  Synthetic oligonucleotide
ggcattctggctcactgtttaaatgctgccatgatactgattgcactgaggagggactag

SEQ ID NO: 30897 - DNA, 60 bp, Artificial
  Synthetic oligonucleotide
gtgggaacaacacctattctcttgacccaggtaactgatctgaaaattgaaagttcttgt

SEQ ID NO: 30898 - DNA, 60 bp, Artificial
  Synthetic oligonucleotide
ataagaaaagctgtcctgaaggtcagtgtccatactgcatgacaatgacagaatccacag

SEQ ID NO: 30899 - DNA, 60 bp, Artificial
  Synthetic oligonucleotide
tgtttaagtgctgccatgatactgattgcactgaggagggactagcagcatctccgcccc

SEQ ID NO: 30900 - DNA, 60 bp, Artificial
  Synthetic oligonucleotide
gagggactagcagcatctccgccccatttagatcgggttactggttataaccagatagat

SEQ ID NO: 30901 - DNA, 60 bp, Artificial
  Synthetic oligonucleotide
ggatattcaatatcagttcaccgacatgcttagttaataaggttcaaaaattcagggggt

SEQ ID NO: 30902 - DNA, 60 bp, Artificial
  Synthetic oligonucleotide
catagtgtttgtgataaaaaggctataccccttacatggactggattccttgcagtttca

SEQ ID NO: 30903 - DNA, 60 bp, Artificial
  Synthetic oligonucleotide
ggctccttacattctcctgttcgcactactctacagaatccaagtttaaagcaatccttg

SEQ ID NO: 30904 - DNA, 51 bp, Artificial
  Synthetic oligonucleotide
ctggggttgcccactcccttgctgtggagctgtgtgtacctggcctgcatg

SEQ ID NO: 30905 - DNA, 60 bp, Artificial
  Synthetic oligonucleotide
cactgcctatcacttgttttctcgtggcaaagaagttgggaacacaattgaaaatagctg

SEQ ID NO: 30906 - DNA, 60 bp, Artificial
  Synthetic oligonucleotide
gtccacatacagtaggtttaggccaagggtatgtaacaggatcagtgggaacaacaccta

SEQ ID NO: 30907 - DNA, 60 bp, Artificial
  Synthetic oligonucleotide
gctgttgaacttgagaagcttatcacagctggcgggtgtacagagaatagctttcaaggt

SEQ ID NO: 30908 - DNA, 65 bp, Artificial
  Synthetic oligonucleotide
gctttcaaggttattatatctgttttctgggtaaacattcagagcctttatttgtaccaatgatg

SEQ ID NO: 30909 - DNA, 60 bp, Artificial
  Synthetic oligonucleotide
accaatgatggacgattacaggtctgctgagttattcactcgtatggttttgaacccgag

SEQ ID NO: 30910 - DNA, 60 bp, Artificial
  Synthetic oligonucleotide
tgcttgcggagtgtatttagataaattaagatcagttgggaaggcttataagattgtttc

SEQ ID NO: 30911 - DNA, 58 bp, Artificial
  Synthetic oligonucleotide
ccagatagattcagacaaagtatatgatgatggggcccctccttgtacaatcaaatgt

SEQ ID NO: 30912 - DNA, 60 bp, Artificial
  Synthetic oligonucleotide
ctaggcccgcttgagcaaggtggaatcattttaaaacaatggtgcacaacatcctgtgtc

SEQ ID NO: 30913 - DNA, 60 bp, Artificial
  Synthetic oligonucleotide
ccatggcagactgccaagtgtttctttgaaaaggattatcaatatgagacaagctggggt

SEQ ID NO: 30914 - DNA, 60 bp, Artificial
  Synthetic oligonucleotide
cttccaactagataagcaggtcgttcatgctgagatacaaaacttaggacactggatgga

SEQ ID NO: 30915 - DNA, 60 bp, Artificial
  Synthetic oligonucleotide
gggttgcaatcctccagactgcccaggggtaggaactggctgtactgcttgcggagtgta

SEQ ID NO: 30916 - DNA, 60 bp, Artificial
  Synthetic oligonucleotide
aactactacaggtatgaaatgtcctgaacatacaggttcctttaggaaaatttgtggttt

SEQ ID NO: 30917 - DNA, 60 bp, Artificial
  Synthetic oligonucleotide
ggggtaggtttcactctggtatgtacagtgggactgactgaatgtgcaaattttatcact

SEQ ID NO: 30918 - DNA, 60 bp, Artificial
  Synthetic oligonucleotide
ggatctacatacgcagtcaattgatggagcttggggctctggggtaggtttcactctggt

SEQ ID NO: 30919 - DNA, 60 bp, Artificial
  Synthetic oligonucleotide
ccacaccaacctgtgagtatcaaggtaatactatctcgggatttcagagaatgatggcta

SEQ ID NO: 30920 - DNA, 60 bp, Artificial
  Synthetic oligonucleotide
tggtccttgctactactacagctgggctgacacgaaacctttatgagttaaaaattgaat

SEQ ID NO: 30921 - DNA, 60 bp, Artificial
  Synthetic oligonucleotide
ccatctacatcaatccagaaatacaaccaggtagaatgggcaaagaaaagttcaaccaca

SEQ ID NO: 30922 - DNA, 60 bp, Artificial
  Synthetic oligonucleotide
tttgcccaataaggggtagaaagaataagtccaactaatacagcatgtttatagccttat

SEQ ID NO: 30923 - DNA, 60 bp, Artificial
  Synthetic oligonucleotide
gacaaatctactaaggggatcgaacacagttaaagtcgtagggaaaggtgggcattctgg

SEQ ID NO: 30924 - DNA, 60 bp, Artificial
  Synthetic oligonucleotide
aacccaccttggggggacatcaataagtcaggccgttcaggaatagcacttgttgcaaca

SEQ ID NO: 30925 - DNA, 60 bp, Artificial
  Synthetic oligonucleotide
ggaatgagcaccctccaagaattacaagaaaacatcacagcacacgaacaacagctcgtg

SEQ ID NO: 30926 - DNA, 56 bp, Artificial
  Synthetic oligonucleotide
taactacctcatttgcttgctccttgattgtctttttagggagcatactactacta

SEQ ID NO: 30927 - DNA, 51 bp, Artificial
  Synthetic oligonucleotide
actacctcattcgctttttccttgattgtctttttagggagcatactacta

SEQ ID NO: 30928 - DNA, 60 bp, Artificial
  Synthetic oligonucleotide
cactataattcctagtcctttatcacgtgggtatttctatatcttgcggagcatactact

SEQ ID NO: 30929 - DNA, 60 bp, Artificial
  Synthetic oligonucleotide
ctactataattcctagtcctttatcacgtgggtatttctatatcttgcggagcatactac

SEQ ID NO: 30930 - DNA, 60 bp, Artificial
  Synthetic oligonucleotide
tgggtgacatttagagaggttcttgctgctgcagatgcatttgcgtctgaatatcggcct

SEQ ID NO: 30931 - DNA, 60 bp, Artificial
  Synthetic oligonucleotide
gagagtattgtcaaaggatggggagagtgtgtcaaggatcgatttattgaacttgatcaa

SEQ ID NO: 30932 - DNA, 60 bp, Artificial
  Synthetic oligonucleotide
ggatggggagagtgtgtcaaggatcgatttattgaacttgatcaagaagcccagagaaag

SEQ ID NO: 30933 - DNA, 60 bp, Artificial
  Synthetic oligonucleotide
gggagagtgtgtcaaggatcgatttattgaacttgatcaagaagctcaacgaaaagttac

SEQ ID NO: 30934 - DNA, 60 bp, Artificial
  Synthetic oligonucleotide
caagctgagttcagagccactgtagtagtgcctttggttgaggtaaagggctgtacttgg

SEQ ID NO: 30935 - DNA, 54 bp, Artificial
  Synthetic oligonucleotide
gaactccaaaaagaaatcaacaaccacgagggccaattggtgatagccaggcag

SEQ ID NO: 30936 - DNA, 60 bp, Artificial
  Synthetic oligonucleotide
gcagtcaagcagcaacatgggtttatggaagtggctaataatagccgttttggtatggcc

SEQ ID NO: 30937 - DNA, 60 bp, Artificial
  Synthetic oligonucleotide
gcagtcaatcagcaacatgggtttatggaagtggctaataatagccgttttggtatggcc

SEQ ID NO: 30938 - DNA, 60 bp, Artificial
  Synthetic oligonucleotide
gccatcattgctgccgatggcttgaacaacatcacctgccatggtaaggatcctgaggac

SEQ ID NO: 30939 - DNA, 60 bp, Artificial
  Synthetic oligonucleotide
cacgacaccatcattgcaaaggctgatccacctagctgtgaccttcagagtgctcatggg

SEQ ID NO: 30940 - DNA, 57 bp, Artificial
  Synthetic oligonucleotide
ttgcttatttgtgcacacgtatctgcagtcagttagaaaagaggcccttagagtttt

SEQ ID NO: 30941 - DNA, 60 bp, Artificial
  Synthetic oligonucleotide
gggagctcaaaagctttgatatctctcagtgccccaagattggaggacatggtagtaaga

SEQ ID NO: 30942 - DNA, 60 bp, Artificial
  Synthetic oligonucleotide
ccctggtcagactaagagggagctcaaaagctttgatatctctcagtgccccaagattgg

SEQ ID NO: 30943 - DNA, 60 bp, Artificial
  Synthetic oligonucleotide
actctggtcaaactaagagggagctcaaaagctttgatatctctcagtgccccaagattg

SEQ ID NO: 30944 - DNA, 60 bp, Artificial
  Synthetic oligonucleotide
accctggtcagactaagagggagctcaaaagctttgatatctctcagtgccccaagattg

SEQ ID NO: 30945 - DNA, 60 bp, Artificial
  Synthetic oligonucleotide
ggactctggtcagactaagagggagctcaaaagctttgatatctctcagtgccccaagat

SEQ ID NO: 30946 - DNA, 60 bp, Artificial
  Synthetic oligonucleotide
agagggagctcaaaagctttgatatctctcagtgccccaagattggaggacatggtagca

SEQ ID NO: 30947 - DNA, 60 bp, Artificial
  Synthetic oligonucleotide
ctaagagggagctcaaaagctttgatatctctcagtgccccaagattggaggacatggta

SEQ ID NO: 30948 - DNA, 60 bp, Artificial
  Synthetic oligonucleotide
gactaagagggagctcaaaagctttgatatctctcagtgccccaagattggaggacatgg

SEQ ID NO: 30949 - DNA, 60 bp, Artificial
  Synthetic oligonucleotide
tacagggcattaaaagccatcattgctgccgatggcttgaacaacatcacctgccatggt

SEQ ID NO: 30950 - DNA, 60 bp, Artificial
  Synthetic oligonucleotide
gaccaagagggagctcaaaagctttgatatctctcagtgccccaagattggaggacatgg

SEQ ID NO: 30951 - DNA, 60 bp, Artificial
  Synthetic oligonucleotide
ttgcttatttgtgcacacgtatctgcagtcagttagaaaagaggcccttagagtttttaa

SEQ ID NO: 30952 - DNA, 60 bp, Artificial
  Synthetic oligonucleotide
tatatgtgaagcaactcctgttaatgcaatagatgctgaaatgcatgatcttaactgtag

SEQ ID NO: 30953 - DNA, 60 bp, Artificial
  Synthetic oligonucleotide
atttccctggaaaccagtccattccactgcctgactacggacttaccatacacagagtct

SEQ ID NO: 30954 - DNA, 60 bp, Artificial
  Synthetic oligonucleotide
acctggttgattttacagtcaccagacaaccttacagaaagccgggccacagtaggagat

SEQ ID NO: 30955 - DNA, 60 bp, Artificial
  Synthetic oligonucleotide
ctcctatagctgctgaaaataacacgtgtgatgtagttcccattaatagagccaaggtca

SEQ ID NO: 30956 - DNA, 60 bp, Artificial
  Synthetic oligonucleotide
tttgtcacctactgcactacaactccatgtgaaatcattttgagacaaagttgctggaac

SEQ ID NO: 30957 - DNA, 60 bp, Artificial
  Synthetic oligonucleotide
ggacgcgagattaaaactagtctctcaaaaagaagtgaatgggaggttacgcttaacctt

SEQ ID NO: 30958 - DNA, 60 bp, Artificial
  Synthetic oligonucleotide
ttaatacaaattttcctggcaacaggaacagtccagttccagacgatggtcttaccctcc

SEQ ID NO: 30959 - DNA, 60 bp, Artificial
  Synthetic oligonucleotide
aagtgaatgggaggttacgcttaaccttgggggctggaagattactgtatttaatacaaa

SEQ ID NO: 30960 - DNA, 60 bp, Artificial
  Synthetic oligonucleotide
tgtatttaatacaaattttcctggcaacaggaacagtccagttccagacgatggtcttac

SEQ ID NO: 30961 - DNA, 60 bp, Artificial
  Synthetic oligonucleotide
aaaagaagtgaatgggaggttacgcttaaccttgggggctggaaggttactgtatttaat

SEQ ID NO: 30962 - DNA, 60 bp, Artificial
  Synthetic oligonucleotide
aagtgaatgggaggttacgcttaaccttgggggctggaaggttactgtatttaatacaaa

SEQ ID NO: 30963 - DNA, 60 bp, Artificial
  Synthetic oligonucleotide
ggaattattacttagagggtgggtcagttaatccgttgtgggtgggtttagtttcaagct

SEQ ID NO: 30964 - DNA, 60 bp, Artificial
  Synthetic oligonucleotide
ggtgggaattattacttagagggtgggtcagttaatccgttgtgggtgggtttagttcca

SEQ ID NO: 30965 - DNA, 60 bp, Artificial
  Synthetic oligonucleotide
gtgtgtgtcgagctgactagtcaagagaggcagtgtagtttaattgaagcaggcacaaga

SEQ ID NO: 30966 - DNA, 60 bp, Artificial
  Synthetic oligonucleotide
cggcacgtcagtacgtaagtgttaactttgagtgtgtgtgaaaagcgatttgtgaggaac

SEQ ID NO: 30967 - DNA, 60 bp, Artificial
  Synthetic oligonucleotide
ttatgcttgcagctctggcatctcctgcaaagttaggattcatgtaaatgaaccggatga

SEQ ID NO: 30968 - DNA, 60 bp, Artificial
  Synthetic oligonucleotide
gtgttgagcttactagtcaagagaggcagtgtagtttaattgaagcaggcacaaggttta

SEQ ID NO: 30969 - DNA, 60 bp, Artificial
  Synthetic oligonucleotide
tatctgtattattggtggaaactctgctcctgtatatgcccctgctggtgaagactttag

SEQ ID NO: 30970 - DNA, 55 bp, Artificial
  Synthetic oligonucleotide
cagaacagctggtgccagagagctcatgcaacatggacaaccaccaatcactctc

SEQ ID NO: 30971 - DNA, 60 bp, Artificial
  Synthetic oligonucleotide
ctgggcatgccaaaatatgtataattgggactgtatctaagttttctcaaggtgacactc

SEQ ID NO: 30972 - DNA, 60 bp, Artificial
  Synthetic oligonucleotide
atgccaaaatatgtataattgggactgtatctaagttttctcaaggtgacactctactat

SEQ ID NO: 30973 - DNA, 60 bp, Artificial
  Synthetic oligonucleotide
taattgggactgtatctaagttttctcaaggtgacactctactatttctggggcccatgg

SEQ ID NO: 30974 - DNA, 60 bp, Artificial
  Synthetic oligonucleotide
ggccaatgcatttatactattacaagtctcttttcactgttaccaggggttgcccattct

SEQ ID NO: 30975 - DNA, 60 bp, Artificial
  Synthetic oligonucleotide
ccccagcattaaatcattacaccatacatgggacaactatcaagaatggctggtttaaga

SEQ ID NO: 30976 - DNA, 60 bp, Artificial
  Synthetic oligonucleotide
cccagcattaaaccattataccatacatgggacaactatcaagaatggctggtttaagac

SEQ ID NO: 30977 - DNA, 60 bp, Artificial
  Synthetic oligonucleotide
ggagtctccagcattaaatcattacaccatacatgggacaactatcaagaatggctggtt

SEQ ID NO: 30978 - DNA, 60 bp, Artificial
  Synthetic oligonucleotide
gaatccccagcattaaaccattataccatacatgggacaactatcaagaatggctggttc

SEQ ID NO: 30979 - DNA, 60 bp, Artificial
  Synthetic oligonucleotide
accaatcaaatggaatgttgaaacctgaaaggtctattcgactcctcaaaacaggcgagt

SEQ ID NO: 30980 - DNA, 60 bp, Artificial
  Synthetic oligonucleotide
caactatagttcataagaagagcgatttagttgatgagtattgtctaagcccaaattgtg

SEQ ID NO: 30981 - DNA, 60 bp, Artificial
  Synthetic oligonucleotide
cccagcattaaaccattataccatacatgggacaactatcaagaatggctggttcaagac

SEQ ID NO: 30982 - DNA, 60 bp, Artificial
  Synthetic oligonucleotide
cccagcattaaatcattacaccatacatgggacaactatcaagaatggctggtttaagac

SEQ ID NO: 30983 - DNA, 60 bp, Artificial
  Synthetic oligonucleotide
agtagtgaactaccacaacaaaatgattattacaattctcaacataattacattagcagt

SEQ ID NO: 30984 - DNA, 60 bp, Artificial
  Synthetic oligonucleotide
ccactatagttcataagaagagcggtttagttgatgagtattgtctaagcccaaattgtg

SEQ ID NO: 30985 - DNA, 60 bp, Artificial
  Synthetic oligonucleotide
gcatcagtgcaagaaagagatataagaggccatgcaacttgtggaggctgcacagattgt

SEQ ID NO: 30986 - DNA, 60 bp, Artificial
  Synthetic oligonucleotide
ccacaacaaaatgattattacaattctcaacgtgcttacattagtagtcactgtgactgc

SEQ ID NO: 30987 - DNA, 60 bp, Artificial
  Synthetic oligonucleotide
agtagtgaactaccacaacaaaatgattattacaattctcaacgtgcttacattagtagt

SEQ ID NO: 30988 - DNA, 60 bp, Artificial
  Synthetic oligonucleotide
ggccactggcaagatatattgtcgcaatacttaaagagaatgacaaagtgtacaaactgg

SEQ ID NO: 30989 - DNA, 60 bp, Artificial
  Synthetic oligonucleotide
ggctatgcaacttgtggaggctgcacagattgttttaacgatgttgcgtgtaaaatcagc

SEQ ID NO: 30990 - DNA, 60 bp, Artificial
  Synthetic oligonucleotide
ggccatgcaacttgtggaggctgcacagattgttttaacgatgttgcatgtaaaattagt

SEQ ID NO: 30991 - DNA, 60 bp, Artificial
  Synthetic oligonucleotide
ataaggccactggcaagatatattgtcgcaatacttaaagagaatgacaaagtgtacaaa

SEQ ID NO: 30992 - DNA, 60 bp, Artificial
  Synthetic oligonucleotide
gcaacttgtggaggctgcacagattgttttaacgatgttgcatgtaaaattagtatgact

SEQ ID NO: 30993 - DNA, 60 bp, Artificial
  Synthetic oligonucleotide
catcagttctcgagggtggtggcagcttttctctggtttccttttgccagtttggtcagt

SEQ ID NO: 30994 - DNA, 60 bp, Artificial
  Synthetic oligonucleotide
ggcggggcctttgtgcagacggaaactggtatgatgcaaggcatacttcattacacctct

SEQ ID NO: 30995 - DNA, 60 bp, Artificial
  Synthetic oligonucleotide
gggaagttgcacagatcccagtgttttaagggcttgcagtttgaggatgggtggttctgg

SEQ ID NO: 30996 - DNA, 60 bp, Artificial
  Synthetic oligonucleotide
gcaagtaccttggcatctactcatctgtaaagtccactaacaacaccctccacctactag

SEQ ID NO: 30997 - DNA, 60 bp, Artificial
  Synthetic oligonucleotide
gagtgcgcgggaacactctaaatctcacttacaaggaagtcaatccaggtgctggccaga

SEQ ID NO: 30998 - DNA, 60 bp, Artificial
  Synthetic oligonucleotide
ctggagtatgaggacaagcaccccggaaggtacacctacctagggcttggggaccctcct

SEQ ID NO: 30999 - DNA, 60 bp, Artificial
  Synthetic oligonucleotide
agtacctggctcacatcatattggactctctgaagcaagcacaggcggatctggatggca

SEQ ID NO: 31000 - DNA, 60 bp, Artificial
  Synthetic oligonucleotide
gagattccttagagcacgacctgaggacttgattgcggataaatggtttggcttcaccag

SEQ ID NO: 31001 - DNA, 60 bp, Artificial
  Synthetic oligonucleotide
gagtgtcagattacccgttcaaaatcacagcaggacacaaatcagccaactggacaggca

SEQ ID NO: 31002 - DNA, 60 bp, Artificial
  Synthetic oligonucleotide
cccgaaggtgagcggagacaccacatccctttctagacttgtcgagctaccagtgatcac

SEQ ID NO: 31003 - DNA, 60 bp, Artificial
  Synthetic oligonucleotide
gggctccccataggactatggcttttcatgtgcacctgcatcggagtggagttaagcatc

SEQ ID NO: 31004 - DNA, 60 bp, Artificial
  Synthetic oligonucleotide
gccagacttgataggaacagagaggagagcttgaacatggttaaggacttcgaacgagac

SEQ ID NO: 31005 - DNA, 60 bp, Artificial
  Synthetic oligonucleotide
ctgcatcatcagggtcatctcatcatcagtgtacatcctgagcaggagcattctaagtga

SEQ ID NO: 31006 - DNA, 60 bp, Artificial
  Synthetic oligonucleotide
tgagaagatcttccgacccatctgctgggacccatcgaagctggaatttagagtgcgcgg

SEQ ID NO: 31007 - DNA, 60 bp, Artificial
  Synthetic oligonucleotide
gaaagaaatggcagagactggtggacaggttgaacctcccagaggactggctggatgtga

SEQ ID NO: 31008 - DNA, 60 bp, Artificial
  Synthetic oligonucleotide
ctccggcacagctgtcaacgttgtttcccatgatggctgaatttgagaagttgcagaccc

SEQ ID NO: 31009 - DNA, 60 bp, Artificial
  Synthetic oligonucleotide
agcaacggaacagttgaaaggtgtgatgaggatgtggaaagagaaaggagggcagccctg

SEQ ID NO: 31010 - DNA, 60 bp, Artificial
  Synthetic oligonucleotide
ttcaaagccatgatttctcgagatattgtggatgccattgccagcttggatctggagaga

SEQ ID NO: 31011 - DNA, 60 bp, Artificial
  Synthetic oligonucleotide
tttccaagacccagagattctcaaaagcgtccttcttcatgcacaagttcaagatctctg

SEQ ID NO: 31012 - DNA, 60 bp, Artificial
  Synthetic oligonucleotide
ctggtcattacctacatgccaaagcagaagtcaaatgagctaaaatccataactgtcaac

SEQ ID NO: 31013 - DNA, 60 bp, Artificial
  Synthetic oligonucleotide
aacagggtcttaactgccctccagctgtgacctttacctccagccatatgagaccgccaa

SEQ ID NO: 31014 - DNA, 60 bp, Artificial
  Synthetic oligonucleotide
cgccctctgctgtacaaggttatgaatcagcctgagctggacctccattccaggttgact

SEQ ID NO: 31015 - DNA, 60 bp, Artificial
  Synthetic oligonucleotide
ggtcctttcggtgtgttcagtgtggagcaggagatgaacaccaagtactaccaccacttg

SEQ ID NO: 31016 - DNA, 60 bp, Artificial
  Synthetic oligonucleotide
ggctgagcggtttagacacttttatgctggatgatgaggcatacctggaagagtacaatc

SEQ ID NO: 31017 - DNA, 60 bp, Artificial
  Synthetic oligonucleotide
cgactgctcaacatcttgcaaagggatgcgagtcagataaagtggaagagcagagacctt

SEQ ID NO: 31018 - DNA, 60 bp, Artificial
  Synthetic oligonucleotide
ccttgaggcgtaagggagtgtttctatctgaattctcaagggccactcaaaagatgctgg

SEQ ID NO: 31019 - DNA, 57 bp, Artificial
  Synthetic oligonucleotide
tgtcgcctagacacaagttccatgggcgggagccgagcacttcttggatctgcatga

SEQ ID NO: 31020 - DNA, 60 bp, Artificial
  Synthetic oligonucleotide
tagactcccacaccacactggagacatctgatgcatacctccaaaagatccacagagggt

SEQ ID NO: 31021 - DNA, 60 bp, Artificial
  Synthetic oligonucleotide
ggaatcagtgccatcatgtcacgaagtttgctttaatgctctgccatttcacagatcctt

SEQ ID NO: 31022 - DNA, 60 bp, Artificial
  Synthetic oligonucleotide
gagtagctcacatgtccaccatatcatggaagaatgtcttcggaaggttgagagccaagg

SEQ ID NO: 31023 - DNA, 60 bp, Artificial
  Synthetic oligonucleotide
gaagtacccttctgggctgggaatgagaaagacttccaaacagggaaacagagagccaac

SEQ ID NO: 31024 - DNA, 57 bp, Artificial
  Synthetic oligonucleotide
ggaaacccctctgagactctggaactttctcctttccagcaccatgtccagctaaga

SEQ ID NO: 31025 - DNA, 60 bp, Artificial
  Synthetic oligonucleotide
ccacaggtgcaagatagacaatggaatgatggacaagttggatttagcaatgcaaggggt

SEQ ID NO: 31026 - DNA, 60 bp, Artificial
  Synthetic oligonucleotide
tccctttttcaggattacttctccaagagggggccagacatcatcttcaacagaattcag

SEQ ID NO: 31027 - DNA, 60 bp, Artificial
  Synthetic oligonucleotide
agaagctaaggttctttgacatcttcctcctgatcaagcccacgaattctggaagtcacg

SEQ ID NO: 31028 - DNA, 60 bp, Artificial
  Synthetic oligonucleotide
gcagcaggcattctgaaacatgctctcttcctcacagtgacaggaccttacaccgatcag

SEQ ID NO: 31029 - DNA, 60 bp, Artificial
  Synthetic oligonucleotide
gggttggacaagagtgcaaatccatggtacgcctcagctctctggttccttgggctcccc

SEQ ID NO: 31030 - DNA, 60 bp, Artificial
  Synthetic oligonucleotide
ggtcagttgctcctacactacactctattaggcatgacagtttccccactgttccttgag

SEQ ID NO: 31031 - DNA, 60 bp, Artificial
  Synthetic oligonucleotide
caccaaagtaggaaagtacgaggttgctcttcacaatcgatcgactaccagcagcatact

SEQ ID NO: 31032 - DNA, 60 bp, Artificial
  Synthetic oligonucleotide
agaagccaaaggaggttgacggcaagattgtctacactggtgatggtgtgtggcgaggaa

SEQ ID NO: 31033 - DNA, 60 bp, Artificial
  Synthetic oligonucleotide
gcgatgcgtccgacatgcccctcagagaccacttcccgctggtcaatgacacttttgacc

SEQ ID NO: 31034 - DNA, 60 bp, Artificial
  Synthetic oligonucleotide
tttgtcagtcccccttgcattccaaaaccccagaagatgatcgagaagttgcctaatctg

SEQ ID NO: 31035 - DNA, 60 bp, Artificial
  Synthetic oligonucleotide
acacaaagacgccaagatgcttttagcgatttgctcgaggaccatccgacaacagggtct

SEQ ID NO: 31036 - DNA, 60 bp, Artificial
  Synthetic oligonucleotide
gtgagcaacgtctctacagccattagggacaacttcttccccaggtttgtcctgactcac

SEQ ID NO: 31037 - DNA, 60 bp, Artificial
  Synthetic oligonucleotide
ggcagccctgtgctctctcactgtggaggagctagaagagtccaaggctctgaggatgaa

SEQ ID NO: 31038 - DNA, 60 bp, Artificial
  Synthetic oligonucleotide
ccaggacagaggaaattgctacgctgtctaggtatgtcatgatggaagggtttgtcagtc

SEQ ID NO: 31039 - DNA, 59 bp, Artificial
  Synthetic oligonucleotide
gtgaaggcagccttccactctgtacagccagattggaatgtgacagaagccaactttgc

SEQ ID NO: 31040 - DNA, 58 bp, Artificial
  Synthetic oligonucleotide
tttcctctgactgcagacactcgagacatcgacttgttcctccatcatgatgacttga

SEQ ID NO: 31041 - DNA, 60 bp, Artificial
  Synthetic oligonucleotide
cataaagttggtgtcagaaataaaggacccttccctgggctacttcctgatggatcaccc

SEQ ID NO: 31042 - DNA, 60 bp, Artificial
  Synthetic oligonucleotide
gcaatgcaaggggttgaggctaaagagttcaagaatcacccatccatcatcaagaagaga

SEQ ID NO: 31043 - DNA, 60 bp, Artificial
  Synthetic oligonucleotide
gtggaccccgatgatgttaacaagagtacattgcaaagcaggcgggcagcagtgtcaaca

SEQ ID NO: 31044 - DNA, 60 bp, Artificial
  Synthetic oligonucleotide
tgacctttgcccccctacatgtatttacattgcagggatggcagaacttggtgccttcct

SEQ ID NO: 31045 - DNA, 60 bp, Artificial
  Synthetic oligonucleotide
cctgattccattcaaaatccacatgcagcttgggtttttgcatgtgcccctgacctttgc

SEQ ID NO: 31046 - DNA, 60 bp, Artificial
  Synthetic oligonucleotide
cctcatgaaccggcagcgagccttggatgaaacacatctgcctgatattgatgcactaat

SEQ ID NO: 31047 - DNA, 60 bp, Artificial
  Synthetic oligonucleotide
ggggaatcagaatttctcagtagtaatagggtatacctcatgaaccggcagcgagccttg

SEQ ID NO: 31048 - DNA, 60 bp, Artificial
  Synthetic oligonucleotide
cccgggcaagccgttggggaatcagaatttctcagtagtaatagggtatacctcatgaac

SEQ ID NO: 31049 - DNA, 60 bp, Artificial
  Synthetic oligonucleotide
atcaaccatgtccgtttcttaaggcagaaccacgtcccgggcaagccgttggggaatcag

SEQ ID NO: 31050 - DNA, 60 bp, Artificial
  Synthetic oligonucleotide
taaaggaatttcttgatcaaccatgtccgtttcttaaggcagaaccacgtcccgggcaag

SEQ ID NO: 31051 - DNA, 60 bp, Artificial
  Synthetic oligonucleotide
aatgggtgtaattgggtttgctttctttgttaaggactgggccgaaaaaataaaggaatt

SEQ ID NO: 31052 - DNA, 60 bp, Artificial
  Synthetic oligonucleotide
ccagcacaaataatggcaagaaacatcataagtcctgtaatgggtgtaattgggtttgct

SEQ ID NO: 31053 - DNA, 60 bp, Artificial
  Synthetic oligonucleotide
tgtgggttgtttccagcacaaataatggcaagaaacatcataagtcctgtaatgggtgta

SEQ ID NO: 31054 - DNA, 60 bp, Artificial
  Synthetic oligonucleotide
tctaaagtgtcacaaactacctcaatacacttatatatatgcacgtagcatatatataag

SEQ ID NO: 31055 - DNA, 51 bp, Artificial
  Synthetic oligonucleotide
atcacataggttgatggaacagtactgtgaaactgagctatcccctccttt

SEQ ID NO: 31056 - DNA, 60 bp, Artificial
  Synthetic oligonucleotide
agggaacaagaattcgctttaaggatgacagttcatatgaagatgtgaatgggataagga

SEQ ID NO: 31057 - DNA, 60 bp, Artificial
  Synthetic oligonucleotide
cagtgaaagaaaataagggaacaagaattcgctttaaggatgacagttcatatgaagatg

SEQ ID NO: 31058 - DNA, 60 bp, Artificial
  Synthetic oligonucleotide
cagctgattggctcaaaataggcagctacataatcggctttgcactacctatcatcctta

SEQ ID NO: 31059 - DNA, 60 bp, Artificial
  Synthetic oligonucleotide
caaacagctgattggctcaaaataggcagctacataatcggctttgcactacctatcatc

SEQ ID NO: 31060 - DNA, 60 bp, Artificial
  Synthetic oligonucleotide
agcattatatatgttgtcaacaaggggaaggcaaacagtgaaagaaaataagggaacaag

SEQ ID NO: 31061 - DNA, 60 bp, Artificial
  Synthetic oligonucleotide
acctatcatccttaaagcattatatatgttgtcaacaaggggaaggcaaacagtgaaaga

SEQ ID NO: 31062 - DNA, 60 bp, Artificial
  Synthetic oligonucleotide
ggcgggcagcagtgtcaacattggaagacaaattggcagaattcaaacgacagctggcag

SEQ ID NO: 31063 - DNA, 60 bp, Artificial
  Synthetic oligonucleotide
agcaggcgggcagcagtgtcaacattggaagacaaattggcagaattcaaacgacagctg

SEQ ID NO: 31064 - DNA, 60 bp, Artificial
  Synthetic oligonucleotide
aatgttctagatgtgaatgctattgatattgaagaaccaagtggccaaacagctgattgg

SEQ ID NO: 31065 - DNA, 60 bp, Artificial
  Synthetic oligonucleotide
gagcctgatgaccatcttaaagagagatcaagcctcaggtatggaaatgttctagatgtg

SEQ ID NO: 31066 - DNA, 60 bp, Artificial
  Synthetic oligonucleotide
tatatatcatataatcactacatatagtatagacactatacttaatcaagcatattaccg

SEQ ID NO: 31067 - DNA, 60 bp, Artificial
  Synthetic oligonucleotide
catattaccgatatatctaccatattatattagcccacttactaattcacaacgaaattt

SEQ ID NO: 31068 - DNA, 53 bp, Artificial
  Synthetic oligonucleotide
cccctacatgtatttacattgcagggatggcagaacttggtgccttcctttca

SEQ ID NO: 31069 - DNA, 60 bp, Artificial
  Synthetic oligonucleotide
gtgccttcctttcaatccttcaggacatgcgcaataccatcatggcatctaagactgtag

SEQ ID NO: 31070 - DNA, 60 bp, Artificial
  Synthetic oligonucleotide
gccttcctttcaatccttcaggacatgcgcaataccatcatggcatctaagactgtagga

SEQ ID NO: 31071 - DNA, 60 bp, Artificial
  Synthetic oligonucleotide
ctggatcaacgtatcatactgctttacatgatccaatgggggaatgaagttgtgaatcat

SEQ ID NO: 31072 - DNA, 60 bp, Artificial
  Synthetic oligonucleotide
tgtgaatcatttccaccttggggacgatatggatccagaactgaggcagcttgcacaagc

SEQ ID NO: 31073 - DNA, 60 bp, Artificial
  Synthetic oligonucleotide
ccaccttggggacgatatggatccagaactgaggcagcttgcacaagcacttattgatca

SEQ ID NO: 31074 - DNA, 58 bp, Artificial
  Synthetic oligonucleotide
ttgcacaagcacttattgatcaaaaggttaaggagatttcaaatcaagagccccttaa

SEQ ID NO: 31075 - DNA, 60 bp, Artificial
  Synthetic oligonucleotide
ataatttaaccgacatgtagtgcatttattattcagtgcaatattagccatatatatcat

SEQ ID NO: 31076 - DNA, 60 bp, Artificial
  Synthetic oligonucleotide
gttaacaaagatcttagtctaatgacaaaaacatacatatgtagtagagattgcactata

SEQ ID NO: 31077 - DNA, 59 bp, Artificial
  Synthetic oligonucleotide
cagtttagaatcattggaagaattcaggagggcaatggcagagaagctatcacacaccc

SEQ ID NO: 31078 - DNA, 60 bp, Artificial
  Synthetic oligonucleotide
ttgcactataaccatagataaagaggaagctcagatcatcttccaaacagataagctaaa

SEQ ID NO: 31079 - DNA, 60 bp, Artificial
  Synthetic oligonucleotide
gtctgctacatctatatcagaattctgcctcaaggatgatgtctcaatgttaaaatctga

SEQ ID NO: 31080 - DNA, 60 bp, Artificial
  Synthetic oligonucleotide
ctgcctgaatgattttgagcctgcagatgaagaagttgtcaataaaattaagaaactcac

SEQ ID NO: 31081 - DNA, 60 bp, Artificial
  Synthetic oligonucleotide
taaaatctgaagtggtatacataaagaatgatactggattatttggtcataataaagttt

SEQ ID NO: 31082 - DNA, 60 bp, Artificial
  Synthetic oligonucleotide
gcaactttcaaatagtgacaaatatagacactgtgtgctcagtcgaagggccatgcacac

SEQ ID NO: 31083 - DNA, 60 bp, Artificial
  Synthetic oligonucleotide
aataggaggctaacaatcctggcaacacaagaactattaagtagatcgcactctggcagg

SEQ ID NO: 31084 - DNA, 60 bp, Artificial
  Synthetic oligonucleotide
tccagaaaaattgtataaatcaaataataaaggggaagtttggtgttcaaatgatgttca

SEQ ID NO: 31085 - DNA, 60 bp, Artificial
  Synthetic oligonucleotide
tcaaataataaaggggaagtttggtgttcaaatgatgttcactgcctgaatgattttgag

SEQ ID NO: 31086 - DNA, 60 bp, Artificial
  Synthetic oligonucleotide
cacagttgcaatactgagcgattccctatcaacccagacatattaaaagattgtacttgg

SEQ ID NO: 31087 - DNA, 60 bp, Artificial
  Synthetic oligonucleotide
gcttaaaatgagttgccaaacaaagcctaaccaaaatgaagagttcattatctgtaaccg

SEQ ID NO: 31088 - DNA, 53 bp, Artificial
  Synthetic oligonucleotide
tgtcagaatggtgattgggatttcgctggtgaaatgaatgaaacttacaatag

SEQ ID NO: 31089 - DNA, 60 bp, Artificial
  Synthetic oligonucleotide
catctttagttgtatctggattattgtccatgttaatcttaagcttcgtaacgcctatag

SEQ ID NO: 31090 - DNA, 56 bp, Artificial
  Synthetic oligonucleotide
aagacaacttcccattgttggatataattgtatttattaaaagcgcagtcatcagg

SEQ ID NO: 31091 - DNA, 60 bp, Artificial
  Synthetic oligonucleotide
gtggcttgaaatttgaggcatcagataggatgagaatccatagagaatctggcttgtgtc

SEQ ID NO: 31092 - DNA, 60 bp, Artificial
  Synthetic oligonucleotide
tccatgttaatcttaagcttcgtaacgcctatagaggggactataactagctacccagag

SEQ ID NO: 31093 - DNA, 60 bp, Artificial
  Synthetic oligonucleotide
acgcctatagaggggactataactagctacccagagagcagaaaatatacactagaagag

SEQ ID NO: 31094 - DNA, 60 bp, Artificial
  Synthetic oligonucleotide
cccagagagcagaaaatatacactggaagagataacagatgttgttgaaggactggtatc

SEQ ID NO: 31095 - DNA, 60 bp, Artificial
  Synthetic oligonucleotide
ccaggacacaggcaatgactttggtgagtattgtatatctcacagttgcaatactgagcg

SEQ ID NO: 31096 - DNA, 60 bp, Artificial
  Synthetic oligonucleotide
ctgtcaccctggatagaacctgtgagcatgttaaggttacttgtggaaagaaatctctgc

SEQ ID NO: 31097 - DNA, 60 bp, Artificial
  Synthetic oligonucleotide
ctgatgccaattttcatgccgatagcttatctttatggttgggcctacaataagagctgc

SEQ ID NO: 31098 - DNA, 60 bp, Artificial
  Synthetic oligonucleotide
gcctactataggtataaacacacaacatgatgagcactgtacagggccgtgcccagctgt

SEQ ID NO: 31099 - DNA, 60 bp, Artificial
  Synthetic oligonucleotide
tggttgggcctacaataagagctgcaaaaagtgcaactgttgtggtttagcataccatcc

SEQ ID NO: 31100 - DNA, 60 bp, Artificial
  Synthetic oligonucleotide
gttgtggtttagcataccatccatttactaattgtgggtcacattgtgtttgtggcttga

SEQ ID NO: 31101 - DNA, 60 bp, Artificial
  Synthetic oligonucleotide
agcatccctgcattaggtggaattagtgttggttataatgttcaaaccaaagacaacttc

SEQ ID NO: 31102 - DNA, 60 bp, Artificial
  Synthetic oligonucleotide
gtgatagtgggttatactattttacagaccatagagaaggccaagacacaggcaatgact

SEQ ID NO: 31103 - DNA, 60 bp, Artificial
  Synthetic oligonucleotide
gcacagaaattggtgagccagtctaaaataagtcaactagatgcagaccaagtatcgttg

SEQ ID NO: 31104 - DNA, 53 bp, Artificial
  Synthetic oligonucleotide
gctcagtcgaagggccatgcacactatttcataatcgaattattatatcagct

SEQ ID NO: 31105 - DNA, 60 bp, Artificial
  Synthetic oligonucleotide
tgaaagctactcctgcaactttcaaatagtgacaaatatagacactgtgtgctcagtcga

SEQ ID NO: 31106 - DNA, 60 bp, Artificial
  Synthetic oligonucleotide
gagttggaaattgatgcaaaatgtgtcgggtgtccatcatgttttgaaagctactcctgc

SEQ ID NO: 31107 - DNA, 60 bp, Artificial
  Synthetic oligonucleotide
tgcgattattacacaagtttcaaccataacagtggctattcacaagccaaatggcgattg

SEQ ID NO: 31108 - DNA, 60 bp, Artificial
  Synthetic oligonucleotide
gtgctattaaggcaatcagagcccagaaaacttaccctacaatgcacttgttggaaacaa

SEQ ID NO: 31109 - DNA, 60 bp, Artificial
  Synthetic oligonucleotide
catgtaagatggcagacaaaggcgtctgtacagtaaatggtgctaaatggaatataatca

SEQ ID NO: 31110 - DNA, 60 bp, Artificial
  Synthetic oligonucleotide
atggcgattgattgcaaaaacaggacactttgacatatgctccagacatagcacccacca

SEQ ID NO: 31111 - DNA, 61 bp, Artificial
  Synthetic oligonucleotide
ggtgctaaatggaatataatcaagtgtgatagtgggttatactattttacagaccatagag

SEQ ID NO: 31112 - DNA, 58 bp, Artificial
  Synthetic oligonucleotide
aaaacaggacattttgacatatgctccagacatagcacccaccatttctgccgatgta

SEQ ID NO: 31113 - DNA, 60 bp, Artificial
  Synthetic oligonucleotide
gctgatgatcacactagtcttgcttctaatagcgcaaaacactattctaattgttgcagc

SEQ ID NO: 31114 - DNA, 60 bp, Artificial
  Synthetic oligonucleotide
gcaactctatagatagtgctattaaggcaatcagagcccagaaaacttaccctacaatgc

SEQ ID NO: 31115 - DNA, 60 bp, Artificial
  Synthetic oligonucleotide
gcccagctgtggtgccacataaagagaactggatgacattttctcaggaaagaacaagta

SEQ ID NO: 31116 - DNA, 60 bp, Artificial
  Synthetic oligonucleotide
gagtttacgaattgccagacttttgtgtaaatctaaagggtcatctttagttgtatctgg

SEQ ID NO: 31117 - DNA, 60 bp, Artificial
  Synthetic oligonucleotide
aacagtcgatacaaaaaccttacccaaccttcttgcagtgcagaatcacaagctttacag

SEQ ID NO: 31118 - DNA, 60 bp, Artificial
  Synthetic oligonucleotide
ctggaagagataacagatgttgttgaaggactggtatctgagcagaatataaaggagtac

SEQ ID NO: 31119 - DNA, 60 bp, Artificial
  Synthetic oligonucleotide
ggactggtatctgagcagaatataaaggagtatattgttttctatacctcattgtttgga

SEQ ID NO: 31120 - DNA, 60 bp, Artificial
  Synthetic oligonucleotide
attgcgaagaatgctcaatgtatcattcaaaaagaggcataaagtacaatggtgacttca

SEQ ID NO: 31121 - DNA, 60 bp, Artificial
  Synthetic oligonucleotide
aggaaagatgtgatagtcaggaggtgctacaacaataattttgattcatgcaaattactg

SEQ ID NO: 31122 - DNA, 60 bp, Artificial
  Synthetic oligonucleotide
catccagaaactaaagtataccgcaaagcagtagaagaggaagttgtcttaacggtgtgc

SEQ ID NO: 31123 - DNA, 60 bp, Artificial
  Synthetic oligonucleotide
ggtgacttcacaaacaaatgcggcttttgcacatgcaatgaacaagaggatacggaagga

SEQ ID NO: 31124 - DNA, 60 bp, Artificial
  Synthetic oligonucleotide
aaccttacccaaccttcttgcagtgcagaatcacaagctttacagtggccagataaacga

SEQ ID NO: 31125 - DNA, 60 bp, Artificial
  Synthetic oligonucleotide
ccatagagaatctggcttgtgtcaagggtacaagagtttacgaattgccagacttttgtg

SEQ ID NO: 31126 - DNA, 60 bp, Artificial
  Synthetic oligonucleotide
aaacctgcaagaatgttaaggatgttgcctgcttatcgccaaggtcaggtgctatatatg

SEQ ID NO: 31127 - DNA, 60 bp, Artificial
  Synthetic oligonucleotide
cctgcgaacaccttaaagtttcctgcggcccaaaatctgtacagttccatgcctgcttca

SEQ ID NO: 31128 - DNA, 60 bp, Artificial
  Synthetic oligonucleotide
gtggctgacatttgcaagagagaggacaagctcatggggatgcgaagagtttggttgcct

SEQ ID NO: 31129 - DNA, 60 bp, Artificial
  Synthetic oligonucleotide
agatctgcaagaatgttaaggatgttgcctgcttatcgccaaggtcaggtgctatatatg

SEQ ID NO: 31130 - DNA, 60 bp, Artificial
  Synthetic oligonucleotide
gctgacatttgcaagagagaggacaagctcatggggatgcgaagagtttggttgcctggc

SEQ ID NO: 31131 - DNA, 60 bp, Artificial
  Synthetic oligonucleotide
taaaaacaaaattcccaggtgatgcattgttgaaggctataatagattatatagcatata

SEQ ID NO: 31132 - DNA, 60 bp, Artificial
  Synthetic oligonucleotide
agagaggacaagttcatggggatgcgaagagtttggttgcctggctgtaagtgatgggtg

SEQ ID NO: 31133 - DNA, 60 bp, Artificial
  Synthetic oligonucleotide
gagagtataaattggaactgcactgggccatttttgaacctcgggaattgccaaaagcaa

SEQ ID NO: 31134 - DNA, 51 bp, Artificial
  Synthetic oligonucleotide
aagagtttggttgcctggctgtaagtgatgggtgtgtatttgggtcatgcc

SEQ ID NO: 31135 - DNA, 60 bp, Artificial
  Synthetic oligonucleotide
aaaacctgcaagaatgttaaggatgttgcctgcttatcgccaaggtcaggtgctatatat

SEQ ID NO: 31136 - DNA, 59 bp, Artificial
  Synthetic oligonucleotide
caaaattcccaggtaatgcattgttgaaggctataatagattatatagcatatatgaaa

SEQ ID NO: 31137 - DNA, 60 bp, Artificial
  Synthetic oligonucleotide
tgcttggacctgcagtacaggcgtagtgcagaagagcttaagctggtttgataagaacaa

SEQ ID NO: 31138 - DNA, 60 bp, Artificial
  Synthetic oligonucleotide
ccctgtgtgatagagtacctgacctagctctagcagaaatgaaaatggcccttgccacag

SEQ ID NO: 31139 - DNA, 60 bp, Artificial
  Synthetic oligonucleotide
cacaaactctgcatccctgtgtgatagagtacctgacctagctctagcagaaatgaaaat

SEQ ID NO: 31140 - DNA, 60 bp, Artificial
  Synthetic oligonucleotide
ccttttagtgaaaagctccaattaaggtcaaacctcacaaactctgcatccctgtgtgat

SEQ ID NO: 31141 - DNA, 60 bp, Artificial
  Synthetic oligonucleotide
ggaggcaacacgtttctgtgctccaatctatgagtgtgcttggacctgcagtacaggcgt

SEQ ID NO: 31142 - DNA, 60 bp, Artificial
  Synthetic oligonucleotide
tctaatgctctggtggaggcaacacgtttctgtgctccaatctatgagtgtgcttggacc

SEQ ID NO: 31143 - DNA, 60 bp, Artificial
  Synthetic oligonucleotide
aaatgaaaatggcccttgccacagatgataaagaaaaagactcaatcttttctaatgctc

SEQ ID NO: 31144 - DNA, 60 bp, Artificial
  Synthetic oligonucleotide
gcgtgcacaaggagcacaaatagacactcctttctcagcctattattgggcttggagcgc

SEQ ID NO: 31145 - DNA, 60 bp, Artificial
  Synthetic oligonucleotide
gtctctcacacatccagttgttgcagagtacaaagtgcctggagaattgctgttgatgtc

SEQ ID NO: 31146 - DNA, 60 bp, Artificial
  Synthetic oligonucleotide
attgctgttgatgtcaaagaaatgctgtctgacatgatcaggcgcaggaatgtcctgctg

SEQ ID NO: 31147 - DNA, 60 bp, Artificial
  Synthetic oligonucleotide
gtcaaagaaatgctgtctgacatgatcaggcgcaggaatgtcctgctgaacggagacgga

SEQ ID NO: 31148 - DNA, 60 bp, Artificial
  Synthetic oligonucleotide
gggtcctatcagcagagagcatgtctcttggggccgtgagttggcaggaggaaagttcca

SEQ ID NO: 31149 - DNA, 60 bp, Artificial
  Synthetic oligonucleotide
atgccctgcgtgcacaaggagcacaaatagacactcctttctcagccttttattgggctt

SEQ ID NO: 31150 - DNA, 60 bp, Artificial
  Synthetic oligonucleotide
ccaaaaagtccaatgccctgcgtgcacaaggagcacaaatagacactcctttctcagcct

SEQ ID NO: 31151 - DNA, 60 bp, Artificial
  Synthetic oligonucleotide
tgagctcgtccagactatgacaaagcatctggctcaagcagtggaactatccaaaaagtc

SEQ ID NO: 31152 - DNA, 60 bp, Artificial
  Synthetic oligonucleotide
gactatgacaaagcatctggctcaagcagtggaactatccaaaaagtccaatgccctgcg

SEQ ID NO: 31153 - DNA, 60 bp, Artificial
  Synthetic oligonucleotide
attcctgttgcaagcccagaagatgcaatcctaggttcaggacactcaaaaaacatactg

SEQ ID NO: 31154 - DNA, 60 bp, Artificial
  Synthetic oligonucleotide
caaggtctctcacacatccagttgttgcagagtacaaagtgcctggagaattgctgttga

SEQ ID NO: 31155 - DNA, 60 bp, Artificial
  Synthetic oligonucleotide
aaagctggcattgtgtggccttccctaacatcttaaacaagttgcacatcagcgaaaggc

SEQ ID NO: 31156 - DNA, 60 bp, Artificial
  Synthetic oligonucleotide
cagttctgactcctggtcgaatgagtgaaatgggtgcatgctttggggttattcctgttg

SEQ ID NO: 31157 - DNA, 60 bp, Artificial
  Synthetic oligonucleotide
ctcctggtcgaatgagtgaaatgggtgcatgctttggggttattcctgttgcaagcccag

SEQ ID NO: 31158 - DNA, 60 bp, Artificial
  Synthetic oligonucleotide
cacaaggagcacaaatagacactcctttctcagccttttattgggcttggagcgctgggg

SEQ ID NO: 31159 - DNA, 60 bp, Artificial
  Synthetic oligonucleotide
acgcaaagtacatggatctcagaaagggtatccctgaaccagagcaactagtttcatacc

SEQ ID NO: 31160 - DNA, 60 bp, Artificial
  Synthetic oligonucleotide
ggatctcagaaagggtatccctgaaccagagcaactagtttcataccagcaggcggccca

SEQ ID NO: 31161 - DNA, 54 bp, Artificial
  Synthetic oligonucleotide
aaaagggtatccctgaaccagagcaactagtttcataccagcaggcggcccaaa

SEQ ID NO: 31162 - DNA, 60 bp, Artificial
  Synthetic oligonucleotide
ggatgcactagaggatgggaaaggcaatgagctcgtccagactatgacaaagcatctggc

SEQ ID NO: 31163 - DNA, 60 bp, Artificial
  Synthetic oligonucleotide
gaagataacaaggatgcactagaggatgggaaaggcaatgagctcgtccagactatgaca

SEQ ID NO: 31164 - DNA, 60 bp, Artificial
  Synthetic oligonucleotide
gggttgaagataacaaggatgcactagaggatgggaaaggcaatgagctcgtccagacta

SEQ ID NO: 31165 - DNA, 60 bp, Artificial
  Synthetic oligonucleotide
gcattcctctagcagctactgccatggtgaaggttgctgagctagatgggtcaaagaagc

SEQ ID NO: 31166 - DNA, 60 bp, Artificial
  Synthetic oligonucleotide
ggtaaatcaggcattcctctagcagctactgccatggtgaaggttgctgagctagatggg

SEQ ID NO: 31167 - DNA, 60 bp, Artificial
  Synthetic oligonucleotide
aagttccaagttgtgtttaaccctccttggggggatataaacaagtgtggtaaatcaggc

SEQ ID NO: 31168 - DNA, 60 bp, Artificial
  Synthetic oligonucleotide
ctgacttccacaccactaaggtggggcaagggattgattaacctgtttgcagatgatgac

SEQ ID NO: 31169 - DNA, 60 bp, Artificial
  Synthetic oligonucleotide
cctgtttgcagatgatgacttttcgggcaacagactatacatgcatcctgcagttctgac

SEQ ID NO: 31170 - DNA, 60 bp, Artificial
  Synthetic oligonucleotide
gtgtaagttgtaatcaatctgctaattctgcttaacacaggggggctgtgcggcaacgat

SEQ ID NO: 31171 - DNA, 60 bp, Artificial
  Synthetic oligonucleotide
tattgggcttggagcgctggggttaagccagagacatttttcactttgtctcaattcctc

SEQ ID NO: 31172 - DNA, 60 bp, Artificial
  Synthetic oligonucleotide
atcaaagcactgacttccacaccactaaggtggggcaagggattgattaacctgtttgca

SEQ ID NO: 31173 - DNA, 60 bp, Artificial
  Synthetic oligonucleotide
tgacttttcgggcaacagactatacatgcatcctgcagttctgactcctggtcgaatgag

SEQ ID NO: 31174 - DNA, 60 bp, Artificial
  Synthetic oligonucleotide
gatgagtggtttaaaccttttagtgaaaagctccaattaaggtcaaacctcacaaactct

SEQ ID NO: 31175 - DNA, 60 bp, Artificial
  Synthetic oligonucleotide
tgttaacatcatctaaaagctggcattatgtggccttccctaacatcttaaacaagttgc

SEQ ID NO: 31176 - DNA, 60 bp, Artificial
  Synthetic oligonucleotide
ctgcctctcttgtctagcataacaggtctggcaccaattatattccctctggcttattat

SEQ ID NO: 31177 - DNA, 60 bp, Artificial
  Synthetic oligonucleotide
caactgcaaacatagcactcagttggagctcagtggaacacagaggcaataagatcttgg

SEQ ID NO: 31178 - DNA, 60 bp, Artificial
  Synthetic oligonucleotide
tcaactgcaaacatagcactcagttggagctcagtggaacacagaggcaataagatcttg

SEQ ID NO: 31179 - DNA, 60 bp, Artificial
  Synthetic oligonucleotide
gtagactccctaaagagctaccagaacaacgatggcaactatggaggaattacagaggga

SEQ ID NO: 31180 - DNA, 60 bp, Artificial
  Synthetic oligonucleotide
ggaattacagagggaaatcaatgcccatgagggtcaattagtgatagccaggcagaaggt

SEQ ID NO: 31181 - DNA, 60 bp, Artificial
  Synthetic oligonucleotide
ggaattgcagagggaaatcaatgcccacgagggtcaactggtgatagccaggcagaaggt

SEQ ID NO: 31182 - DNA, 60 bp, Artificial
  Synthetic oligonucleotide
gggtcagttaatccgttgtgggtgggtttagttccaagctgccttaagtagctttttttg

SEQ ID NO: 31183 - DNA, 60 bp, Artificial
  Synthetic oligonucleotide
ggaggtgttaaccttgctgtacttaacacgcatttcccgggaacccagtccattccactg

SEQ ID NO: 31184 - DNA, 60 bp, Artificial
  Synthetic oligonucleotide
tacacaaagaatggccccattcaagaaattggagatgcaaccccacttggtgttggggag

SEQ ID NO: 31185 - DNA, 60 bp, Artificial
  Synthetic oligonucleotide
tacctccggcgcacacaatcaatgggaattcaactggatcagagaataattgttatgttc

SEQ ID NO: 31186 - DNA, 60 bp, Artificial
  Synthetic oligonucleotide
accaatcccttgttggcaagcagtctccattccaaaatgcctataacgtcaagggcaatg

SEQ ID NO: 31187 - DNA, 60 bp, Artificial
  Synthetic oligonucleotide
ctgccatgatactgactgtactgaagaaggtcttgctgcctccccaccacatctagatcg

SEQ ID NO: 31188 - DNA, 60 bp, Artificial
  Synthetic oligonucleotide
ctcattattcaagtgctgccatgatactgactgtactgaagaaggtcttgctgcctcccc

SEQ ID NO: 31189 - DNA, 56 bp, Artificial
  Synthetic oligonucleotide
ttgcaaaacaccaagcttcttcacatccccaataagaagttggtgttatacaaaaa

SEQ ID NO: 31190 - DNA, 60 bp, Artificial
  Synthetic oligonucleotide
acaaggtgagagaaatccataggtggccttcgtcttgtcattgtatctttcattaacata

SEQ ID NO: 31191 - DNA, 60 bp, Artificial
  Synthetic oligonucleotide
tcagacaaggtgagagaaatccataggtggccttcgtcttgtcattgtatctttcattaa

SEQ ID NO: 31192 - DNA, 60 bp, Artificial
  Synthetic oligonucleotide
ttgcaaaacaccaagcttcttcacatccccaataagaagttggtgttatacaaaaatctt

SEQ ID NO: 31193 - DNA, 56 bp, Artificial
  Synthetic oligonucleotide
ttgcaaaacaccaagcttcttcacatccccaataagaagttggtgtgatacaaaaa

SEQ ID NO: 31194 - DNA, 60 bp, Artificial
  Synthetic oligonucleotide
cattaattgcaaaacaccaagcttcttcacatccccaataagaagttggtgttatgcaaa

SEQ ID NO: 31195 - DNA, 60 bp, Artificial
  Synthetic oligonucleotide
cagtttcagctgccaatatagcacttagctggagttcagttgaacacaggggcaacaaaa

SEQ ID NO: 31196 - DNA, 60 bp, Artificial
  Synthetic oligonucleotide
actcctgaaaccttcccgacggtgtcacagttcctctttgagctagggaaacagccaaga

SEQ ID NO: 31197 - DNA, 60 bp, Artificial
  Synthetic oligonucleotide
ctggctgaggtgaagggttgcacctggagtgatgggtatgcaatgtacctaggatttgcc

SEQ ID NO: 31198 - DNA, 60 bp, Artificial
  Synthetic oligonucleotide
cagctcaaaagctggctgcaaagccagttgatccaacagggcttgagcctgatgaccatc

SEQ ID NO: 31199 - DNA, 57 bp, Artificial
  Synthetic oligonucleotide
tatagaaggaatacttggttgatatgggagatttagttttttatgatgtcgcatcca

SEQ ID NO: 31200 - DNA, 60 bp, Artificial
  Synthetic oligonucleotide
gatccaactggactagaccctggtgatcatcttaaagaaaaatcaatgctcagttatggg

SEQ ID NO: 31201 - DNA, 60 bp, Artificial
  Synthetic oligonucleotide
gatccaaccggactagaccctggtgatcatcttaaagaaaaatcaatgctcagttatggg

SEQ ID NO: 31202 - DNA, 60 bp, Artificial
  Synthetic oligonucleotide
gctctttatatgttaacaactagagggagacagactactaaggacaacaagggaatgagg

SEQ ID NO: 31203 - DNA, 60 bp, Artificial
  Synthetic oligonucleotide
agctctttacatgttgacaactagagggagacagactactaaggacaacaagggaatgag

SEQ ID NO: 31204 - DNA, 60 bp, Artificial
  Synthetic oligonucleotide
taatcccacatatgctgcattaaatgcttgaactggaatcattatactactgattattga

SEQ ID NO: 31205 - DNA, 60 bp, Artificial
  Synthetic oligonucleotide
gctttgtgtaatctcacatatgctgcattaaatgcttgaactggaatcattatactactg

SEQ ID NO: 31206 - DNA, 60 bp, Artificial
  Synthetic oligonucleotide
agtgctttgtgtaatctcacatatgctgcattaaatgcttgaactggaatcattatacta

SEQ ID NO: 31207 - DNA, 60 bp, Artificial
  Synthetic oligonucleotide
ctactaaggacaacaagggaatgaggattcgttttaaggatgatagctcgtttgaagatg

SEQ ID NO: 31208 - DNA, 60 bp, Artificial
  Synthetic oligonucleotide
actcttaaaggctctttatatgttaacaactagagggagacagactactaaggacaacaa

SEQ ID NO: 31209 - DNA, 54 bp, Artificial
  Synthetic oligonucleotide
cagttatgggaatgttatcgatctcaaccaccttgacattgatgaaccaactgg

SEQ ID NO: 31210 - DNA, 60 bp, Artificial
  Synthetic oligonucleotide
gatccaactggactagaccctggcgatcatcttaaagaaaaatcaatgctcagttatggg

SEQ ID NO: 31211 - DNA, 60 bp, Artificial
  Synthetic oligonucleotide
tctcagggtgggttaggatgtcaccttaagtgactttttctgtatatatggatgtagatt

SEQ ID NO: 31212 - DNA, 60 bp, Artificial
  Synthetic oligonucleotide
gcttatgtcagatttaagcctgcctatggctctgaattggagtcttctattgttcgagtc

SEQ ID NO: 31213 - DNA, 60 bp, Artificial
  Synthetic oligonucleotide
tgggaataggtgcagatgattggatcactaaagaaacagttactatcctagctcggtttg

SEQ ID NO: 31214 - DNA, 60 bp, Artificial
  Synthetic oligonucleotide
cgaaggtcaaagcttaccttcggaggtcatcagagcttttggttttacttacacttggag

SEQ ID NO: 31215 - DNA, 60 bp, Artificial
  Synthetic oligonucleotide
gttcttccctttgactattggtatgtacagggttcgcaggtggagcatggaccctaactg

SEQ ID NO: 31216 - DNA, 59 bp, Artificial
  Synthetic oligonucleotide
ttgaacactgagggaacatcttcttttggaacctatgaatctgattctatcacagaatc

SEQ ID NO: 31217 - DNA, 60 bp, Artificial
  Synthetic oligonucleotide
ctttggaacctatgaatctgattctatcacagaatcagagggtcacgacctttctgcaag

SEQ ID NO: 31218 - DNA, 60 bp, Artificial
  Synthetic oligonucleotide
ttgaacactgagggaacatcttcttttggaacctatgaatctgattctatcacagaatca

SEQ ID NO: 31219 - DNA, 60 bp, Artificial
  Synthetic oligonucleotide
tggaacctatgaatctgattctatcacagaatcagagggttacgatctttctgcaagaat

SEQ ID NO: 31220 - DNA, 50 bp, Artificial
  Synthetic oligonucleotide
tagtagtagactccttgaaaagctactactacaagtgctgggatgagcca

SEQ ID NO: 31221 - DNA, 60 bp, Artificial
  Synthetic oligonucleotide
gatgacgttaacaataacacactgcaagcaaggcaacaaacagtgtcagcattggaggat

SEQ ID NO: 31222 - DNA, 60 bp, Artificial
  Synthetic oligonucleotide
gaaatgtttaaatcagctgtaaagctattgagtgagagcaatcctggaacagccagctct

SEQ ID NO: 31223 - DNA, 60 bp, Artificial
  Synthetic oligonucleotide
gaaatgtttaaatcagctgtaaagctattgagtgagagcaaccctggaacagctagctct

SEQ ID NO: 31224 - DNA, 60 bp, Artificial
  Synthetic oligonucleotide
cctcggaggtttgggttgatgacccgggagaactgcagcagatacagagagtgagcatcc

SEQ ID NO: 31225 - DNA, 60 bp, Artificial
  Synthetic oligonucleotide
gcctcggaggtttgggttgatgacccgggagaactgcagcagatacagagagtgagcatc

SEQ ID NO: 31226 - DNA, 60 bp, Artificial
  Synthetic oligonucleotide
catggggagtcgatcagtttgtcttcagttaggatcttcttcctcaatgccgcaaaagcc

SEQ ID NO: 31227 - DNA, 60 bp, Artificial
  Synthetic oligonucleotide
ccttgctgtacttaacacgcatttcccgggaacccagtccattccactgcctgactacgg

SEQ ID NO: 31228 - DNA, 60 bp, Artificial
  Synthetic oligonucleotide
ccttgctgttcttaatacccattttcctggaacccagtccattccactgcctgactacgg

SEQ ID NO: 31229 - DNA, 60 bp, Artificial
  Synthetic oligonucleotide
ccttgctgttcttaatacacattttcctggaacccagtccattccactgcctgactacgg

SEQ ID NO: 31230 - DNA, 60 bp, Artificial
  Synthetic oligonucleotide
gaggcaccatggggagcaataaatgttcagtcaacctacaaaccaactgtatcaactgca

SEQ ID NO: 31231 - DNA, 60 bp, Artificial
  Synthetic oligonucleotide
acaaaactacctcactttaactacctcatttgctttttccttgattgtcttttagggagc

SEQ ID NO: 31232 - DNA, 60 bp, Artificial
  Synthetic oligonucleotide
tctaccctctaaccattggaatttacagagtcaaacatggtatgatggatccccaatact

SEQ ID NO: 31233 - DNA, 60 bp, Artificial
  Synthetic oligonucleotide
ccattggaatttacagagtcaaacatggtatgatggatccccaatacttaaagaaagccc

SEQ ID NO: 31234 - DNA, 60 bp, Artificial
  Synthetic oligonucleotide
gggggcaataaatgttcagtcaacctacaaaccaactgtgtcaactgcaaacatagcact

SEQ ID NO: 31235 - DNA, 60 bp, Artificial
  Synthetic oligonucleotide
gacccaggtgatatcatgagcacacccttagggatgaagtgcccagaacatgctggttcc

SEQ ID NO: 31236 - DNA, 60 bp, Artificial
  Synthetic oligonucleotide
gacccaggtgatatcatgagcacacccttagggatgaagtgcccagaacatgcaggttcc

SEQ ID NO: 31237 - DNA, 60 bp, Artificial
  Synthetic oligonucleotide
cgtcatgtcagtatgatggaaacactgtatctggatatcagagaatgattgccacaaaag

SEQ ID NO: 31238 - DNA, 60 bp, Artificial
  Synthetic oligonucleotide
catcatgtcagtatgatggaaacactgtatctggatatcagagaatgattgccacaaaag

SEQ ID NO: 31239 - DNA, 60 bp, Artificial
  Synthetic oligonucleotide
atgccaatttggagacccaggtgatatcatgagcacacccttagggatgaagtgcccaga

SEQ ID NO: 31240 - DNA, 60 bp, Artificial
  Synthetic oligonucleotide
gatggaaacactgtatctggatatcagagaatgattgccacaaaagattcattccagtca

SEQ ID NO: 31241 - DNA, 60 bp, Artificial
  Synthetic oligonucleotide
gccacaaaagattcattccagtcattcaatattacagaaccccatattacaacaaattca

SEQ ID NO: 31242 - DNA, 55 bp, Artificial
  Synthetic oligonucleotide
aaaagtcaggtgaatggttgctaggtattttaagtggtaactggatggttgttgc

SEQ ID NO: 31243 - DNA, 60 bp, Artificial
  Synthetic oligonucleotide
tggtgttcattgttggttcaaaaagtcaggtgaatggttgctaggtattttaagtggtaa

SEQ ID NO: 31244 - DNA, 55 bp, Artificial
  Synthetic oligonucleotide
taagtggtaactggatggttgttgctgttcttattgcactgtttatattttcact

SEQ ID NO: 31245 - DNA, 60 bp, Artificial
  Synthetic oligonucleotide
gaatggttgctaggtattttaagtggtaactggatggttgttgctgttcttattgcactg

SEQ ID NO: 31246 - DNA, 60 bp, Artificial
  Synthetic oligonucleotide
ctgccatgtgttatggttcaagcacagctaatctagtaaggggccaaaacacagtacatg

SEQ ID NO: 31247 - DNA, 60 bp, Artificial
  Synthetic oligonucleotide
atgggttgacccagatagttctctaaaggaccatgtcaatctgatagtaaaccgggatct

SEQ ID NO: 31248 - DNA, 60 bp, Artificial
  Synthetic oligonucleotide
aacaaattcactagaatgggttgacccagatagttctctaaaggaccatgtcaatctgat

SEQ ID NO: 31249 - DNA, 60 bp, Artificial
  Synthetic oligonucleotide
aacaaaatcactagaatgggttgacccagatagttctctaaaggaccatgtcaatctgat

SEQ ID NO: 31250 - DNA, 66 bp, Artificial
  Synthetic oligonucleotide
gattcattccagtcattcaatattacagaacctcatattacaacaaattcactagaatgggttgac

SEQ ID NO: 31251 - DNA, 66 bp, Artificial
  Synthetic oligonucleotide
gattcattccagtcattcaatattacagaacctcatattacaacaaaatcactagaatgggttgac

SEQ ID NO: 31252 - DNA, 60 bp, Artificial
  Synthetic oligonucleotide
gccacaaaagattcattccagtcattcaatattacagaacctcatattacaacaaaatca

SEQ ID NO: 31253 - DNA, 60 bp, Artificial
  Synthetic oligonucleotide
gccacaaaagattcattccagtcattcaatattacagaacctcatattacaacaaattca

SEQ ID NO: 31254 - DNA, 60 bp, Artificial
  Synthetic oligonucleotide
gtaaggggtcaaaacacagtacatgttgtaggcaaaggtggccattctggatccaaattc

SEQ ID NO: 31255 - DNA, 60 bp, Artificial
  Synthetic oligonucleotide
agcacagctaatctagtaaggggtcaaaacacagtacatgttgtaggcaaaggtggccat

SEQ ID NO: 31256 - DNA, 60 bp, Artificial
  Synthetic oligonucleotide
tttgatgatggtgcaccacaatgtggtgttcattgttggttcaagaagtcaggtgaatgg

SEQ ID NO: 31257 - DNA, 60 bp, Artificial
  Synthetic oligonucleotide
ccacaatgtggtgttcattgttggttcaagaagtcaggtgaatggttgctaggtatttta

SEQ ID NO: 31258 - DNA, 60 bp, Artificial
  Synthetic oligonucleotide
cacaccttgatagagtcacaggatacaatcaaattgacacaaataaggtttttgatgatg

SEQ ID NO: 31259 - DNA, 60 bp, Artificial
  Synthetic oligonucleotide
tacaatcaaattgacacaaataaggtttttgatgatggtgcaccacaatgtggtgttcat

SEQ ID NO: 31260 - DNA, 60 bp, Artificial
  Synthetic oligonucleotide
aaaatgttcagctacagggcttgttgcagcagcaccacaccttgatagagtcacaggata

SEQ ID NO: 31261 - DNA, 60 bp, Artificial
  Synthetic oligonucleotide
cagctacagggcttgttgcagcagcaccacaccttgatagagtcacaggatacaatcaaa

SEQ ID NO: 31262 - DNA, 60 bp, Artificial
  Synthetic oligonucleotide
aggtggccattctggatccaaattcatgtgctgccatgataaaaaatgttcagctacagg

SEQ ID NO: 31263 - DNA, 60 bp, Artificial
  Synthetic oligonucleotide
gtgctgccatgataaaaaatgttcagctacagggcttgttgcagcagcaccacaccttga

SEQ ID NO: 31264 - DNA, 60 bp, Artificial
  Synthetic oligonucleotide
aacacagtacatgttgtaggcaaaggtggccattctggatccaaattcatgtgctgccat

SEQ ID NO: 31265 - DNA, 60 bp, Artificial
  Synthetic oligonucleotide
cacagtacatgttgtaggcaaaggtggccattctggatccaaattcatgtgctgccatga

SEQ ID NO: 31266 - DNA, 60 bp, Artificial
  Synthetic oligonucleotide
tcttgaaatccgaagcacgtccaggccagtcagctgaggaggctgctatcttgagtagta

SEQ ID NO: 31267 - DNA, 60 bp, Artificial
  Synthetic oligonucleotide
gatatgggtctgccccactataccaaaccctacagggaaacttgtggttgccctagttga

SEQ ID NO: 31268 - DNA, 60 bp, Artificial
  Synthetic oligonucleotide
gatatgggtctgccccactataccaaaccctacagggaaacttgtggttgctttagttga

SEQ ID NO: 31269 - DNA, 60 bp, Artificial
  Synthetic oligonucleotide
gatatgggtctgccccactataccaaaccctacagggaaacttgtggttgccctggttga

SEQ ID NO: 31270 - DNA, 60 bp, Artificial
  Synthetic oligonucleotide
ggtcgtctttccagtggttaacaaccattatccagaataccaacggaatccggtgccaga

SEQ ID NO: 31271 - DNA, 60 bp, Artificial
  Synthetic oligonucleotide
gctaagacggcgagagcaactgttgatattacgtttggaggggtcgtctttccagtggtt

SEQ ID NO: 31272 - DNA, 60 bp, Artificial
  Synthetic oligonucleotide
gatcgtcttgctaagacggcgagagcaactgttgatattacgtttggaggggtcgtcttt

SEQ ID NO: 31273 - DNA, 60 bp, Artificial
  Synthetic oligonucleotide
cggtgccagatgacggccttaccttgcacaggctctctgggtacctggctagatggttga

SEQ ID NO: 31274 - DNA, 60 bp, Artificial
  Synthetic oligonucleotide
gtggttaacaaccattatccagaataccaacggaatccggtgccagatgacggccttacc

SEQ ID NO: 31275 - DNA, 60 bp, Artificial
  Synthetic oligonucleotide
tgcgccaaagatatgggaccaaaaccgcagaacaatggatgagagatgacatcgttgcag

SEQ ID NO: 31276 - DNA, 60 bp, Artificial
  Synthetic oligonucleotide
ttatgcgcaaagtattgcgccaaagatatgggaccaaaaccgcagaacaatggatgagag

SEQ ID NO: 31277 - DNA, 60 bp, Artificial
  Synthetic oligonucleotide
catcgttgcagttaaaactgcatttgaggccattaatacaatctcatgggccagatctgg

SEQ ID NO: 31278 - DNA, 60 bp, Artificial
  Synthetic oligonucleotide
tggatgagagatgacatcgttgcagttaaaactgcatttgaggccattaatacaatctca

SEQ ID NO: 31279 - DNA, 60 bp, Artificial
  Synthetic oligonucleotide
ggttgatcgatcaatgcaatgcaagccctgtccggatgaccgagatcaggacaaaagtga

SEQ ID NO: 31280 - DNA, 60 bp, Artificial
  Synthetic oligonucleotide
agatggttgatcgatcaatgcaatgcaagccctgtccggatgaccgagatcaggacaaaa

SEQ ID NO: 31281 - DNA, 60 bp, Artificial
  Synthetic oligonucleotide
tattcctcttgcagaagtgaaaggttgcacctggaatgatggtgcatcaatgtacctcgg

SEQ ID NO: 31282 - DNA, 60 bp, Artificial
  Synthetic oligonucleotide
caggacaaaagtgattattcctcttgcagaagtgaaaggttgcacctggaatgatggtgc

SEQ ID NO: 31283 - DNA, 53 bp, Artificial
  Synthetic oligonucleotide
tacaatctcatgggccagatctggattctctcctgctgcaagagagttcttgc

SEQ ID NO: 31284 - DNA, 60 bp, Artificial
  Synthetic oligonucleotide
tagtagtagactccttgaaaagctactactaaaaccgctggtatgagccaactcaaagaa

SEQ ID NO: 31285 - DNA, 59 bp, Artificial
  Synthetic oligonucleotide
gtagtagactccttgaaaagctactactaaaaccgctggtatgagccaactcaaagaaa

SEQ ID NO: 31286 - DNA, 60 bp, Artificial
  Synthetic oligonucleotide
tgctggagaaacacaaagtggtgtttgaaaatgagaaccctgacctccttgggaaccgca

SEQ ID NO: 31287 - DNA, 60 bp, Artificial
  Synthetic oligonucleotide
aagtggtgtttgaaaatgagaaccctgacctccttgggaaccgcaagtggatcccatctg

SEQ ID NO: 31288 - DNA, 60 bp, Artificial
  Synthetic oligonucleotide
ggcgtcaaagccttggtaggcgaagtcagtcacccaaccttgaatttcagcgaggttgat

SEQ ID NO: 31289 - DNA, 60 bp, Artificial
  Synthetic oligonucleotide
ttgggttcacaacctacagagtctcagtacacaatgagatggagataccagtcggcactt

SEQ ID NO: 31290 - DNA, 60 bp, Artificial
  Synthetic oligonucleotide
catggcctctgggttacccttgctctgagttcatacaactcagcaatgagactaggtccg

SEQ ID NO: 31291 - DNA, 60 bp, Artificial
  Synthetic oligonucleotide
cagcaactctagagagagtgatatcatccctgcctgggttcccgcttttcagcccatagg

SEQ ID NO: 31292 - DNA, 60 bp, Artificial
  Synthetic oligonucleotide
tctttccatcctgctcctcccttctgttgtaccagctccacaatcctgcgggcgtcaaag

SEQ ID NO: 31293 - DNA, 60 bp, Artificial
  Synthetic oligonucleotide
cctcccttctgttgtaccagctccacaatcctgcgggcgtcaaagccttggtaggcgaag

SEQ ID NO: 31294 - DNA, 60 bp, Artificial
  Synthetic oligonucleotide
tctggatattgacatgacctacagtaggatccctactgctctgacaaacatgctggagaa

SEQ ID NO: 31295 - DNA, 60 bp, Artificial
  Synthetic oligonucleotide
actcagtagggattgtctggtccactagccctgcaaagctcgggtgcatcattgccctgg

SEQ ID NO: 31296 - DNA, 60 bp, Artificial
  Synthetic oligonucleotide
cagcaatgagactaggtccgacctttcattgaggtcatggaaatcagctgcagccacttg

SEQ ID NO: 31297 - DNA, 58 bp, Artificial
  Synthetic oligonucleotide
agccaacaacagaggtctctctaggatgctcttccctggctttgacatagtcaaagag

SEQ ID NO: 31298 - DNA, 60 bp, Artificial
  Synthetic oligonucleotide
gtcaaagccttggtaggcgaagtcagtcacccaaccttgaatttcagcgaggttgatggc

SEQ ID NO: 31299 - DNA, 60 bp, Artificial
  Synthetic oligonucleotide
ctttccattccgatggggtccaggttgcttcaactcacgagttgattctcagacctgccc

SEQ ID NO: 31300 - DNA, 60 bp, Artificial
  Synthetic oligonucleotide
tccagcaaaggcagcagcaactctagagagagtgatatcatccctgcctgggttcccgct

SEQ ID NO: 31301 - DNA, 60 bp, Artificial
  Synthetic oligonucleotide
gggaaccgcaagtggatcccatctgaggacacatggtttgacgggctcaattacaatggt

SEQ ID NO: 31302 - DNA, 60 bp, Artificial
  Synthetic oligonucleotide
cccgagagaagcatacacaagatcattcttgcctaacatatcagaagccatttcatggcc

SEQ ID NO: 31303 - DNA, 60 bp, Artificial
  Synthetic oligonucleotide
ggctgatggcttgccgtttgcatccactattcccagggcaatcatgagcttcctcctctc

SEQ ID NO: 31304 - DNA, 60 bp, Artificial
  Synthetic oligonucleotide
atcagaagccatttcatggcctctgggttacccttgctctgagttcatacaactcagcaa

SEQ ID NO: 31305 - DNA, 60 bp, Artificial
  Synthetic oligonucleotide
caatcgtctggcaatactcagtagggattgtctggtccactagccctgcaaagctcgggt

SEQ ID NO: 31306 - DNA, 60 bp, Artificial
  Synthetic oligonucleotide
gacctacagtaggatccctactgctctgacaaacatgctggagaaacacaaagtggtgtt

SEQ ID NO: 31307 - DNA, 60 bp, Artificial
  Synthetic oligonucleotide
ctatggaggaatgaacacacctgaggcagaggtgggttactacccctatgttgggttcac

SEQ ID NO: 31308 - DNA, 60 bp, Artificial
  Synthetic oligonucleotide
tcctcctctctgctggggcaatgaatgagctagacatagcagcctgcataggctggatga

SEQ ID NO: 31309 - DNA, 60 bp, Artificial
  Synthetic oligonucleotide
tcaatcacaacctccttgggctgtcctctcaggcttttattgatggtcctggaaaactgg

SEQ ID NO: 31310 - DNA, 60 bp, Artificial
  Synthetic oligonucleotide
ggctggatgaatgactcaatcacaacctccttgggctgtcctctcaggcttttattgatg

SEQ ID NO: 31311 - DNA, 60 bp, Artificial
  Synthetic oligonucleotide
ccgcaagtggatcccatctgaggacacatggtttgacgggctcaattacaatggtgagtc

SEQ ID NO: 31312 - DNA, 60 bp, Artificial
  Synthetic oligonucleotide
ccagaaacaggcaggtgtgggtgcaggacattcagggcttggcaggtccatccagcaaag

SEQ ID NO: 31313 - DNA, 60 bp, Artificial
  Synthetic oligonucleotide
cttgccgtttgcatccactattcccagggcaatcatgagcttcctcctctctgctggggc

SEQ ID NO: 31314 - DNA, 60 bp, Artificial
  Synthetic oligonucleotide
cacacctgaggcagaggtgggttactacccctatgttgggttcacaacctacagagtctc

SEQ ID NO: 31315 - DNA, 60 bp, Artificial
  Synthetic oligonucleotide
atgatgcttttcccgagagaagcatacacaagatcattcttgcctaacatatcagaagcc

SEQ ID NO: 31316 - DNA, 60 bp, Artificial
  Synthetic oligonucleotide
gtgtgggtgcaggacattcagggcttggcaggtccatccagcaaaggcagcagcaactct

SEQ ID NO: 31317 - DNA, 60 bp, Artificial
  Synthetic oligonucleotide
ggtcctggaaaactggatcaggaagacactcatggcgtcaacaatcgtctggcaatactc

SEQ ID NO: 31318 - DNA, 60 bp, Artificial
  Synthetic oligonucleotide
tttattgatggtcctggaaaactggatcaggaagacactcatggcgtcaacaatcgtctg

SEQ ID NO: 31319 - DNA, 60 bp, Artificial
  Synthetic oligonucleotide
ctacagagttggccactttccattccgatggggtccaggttgcttcaactcacgagttga

SEQ ID NO: 31320 - DNA, 60 bp, Artificial
  Synthetic oligonucleotide
acagagtctcagtacacaatgagatggagataccagtcggcacttacagacaggtgatgg

SEQ ID NO: 31321 - DNA, 57 bp, Artificial
  Synthetic oligonucleotide
agactccgcaagaaatagcagttaaataacagcatgatcatgtggggtttactattg

SEQ ID NO: 31322 - DNA, 60 bp, Artificial
  Synthetic oligonucleotide
ctccgcaagaaatagcagttaaataacagcatgatcatgtggggtttactattgacaatg

SEQ ID NO: 31323 - DNA, 60 bp, Artificial
  Synthetic oligonucleotide
tagtagtagactccgcaagaaatagcagttaaataacagcatgatcatgtggggtttact

SEQ ID NO: 31324 - DNA, 60 bp, Artificial
  Synthetic oligonucleotide
ccgcaagaaatagcagttaaataacagcatgatcatgtggggtttactattgacaatgag

SEQ ID NO: 31325 - DNA, 53 bp, Artificial
  Synthetic oligonucleotide
aaactggctacaaaaccagttgatccaacagggattgagcctgatgaccatct

SEQ ID NO: 31326 - DNA, 60 bp, Artificial
  Synthetic oligonucleotide
aacccttaacacctatataatcccatttgcttattacgattcttttgttcctgcggagtc

SEQ ID NO: 31327 - DNA, 60 bp, Artificial
  Synthetic oligonucleotide
aacccttaacacctatataatcccatttgcttattacgaggcttttgttcccgcggagtc

SEQ ID NO: 31328 - DNA, 60 bp, Artificial
  Synthetic oligonucleotide
ctccttaacacctatataatcccatttgcttattacgaggcttttgttcctgcggagtct

SEQ ID NO: 31329 - DNA, 60 bp, Artificial
  Synthetic oligonucleotide
ccttaacacctatataatcccatttgcttattacgaggcttttgttcctgcggagtctac

SEQ ID NO: 31330 - DNA, 60 bp, Artificial
  Synthetic oligonucleotide
gccggcagaatcagtgagatgggtgtctgctttggaacaatccctgtggccgatcctgat

SEQ ID NO: 31331 - DNA, 60 bp, Artificial
  Synthetic oligonucleotide
gccggcagaatcagtgagatgggtgtctgctttggaacaatccctgtggccaatcctgat

SEQ ID NO: 31332 - DNA, 60 bp, Artificial
  Synthetic oligonucleotide
cagctggcagaatcagtgagatgggtgtctgctttggaacaatccctgtggccaatcccg

SEQ ID NO: 31333 - DNA, 60 bp, Artificial
  Synthetic oligonucleotide
gggacatcaataagtcaggccgttcaggaatagcacttgttgcaacaggccttgccaagc

SEQ ID NO: 31334 - DNA, 60 bp, Artificial
  Synthetic oligonucleotide
cttcaacatgcacttcggtccgtatttgcattccatttccttctttctgtatcccagaag

SEQ ID NO: 31335 - DNA, 60 bp, Artificial
  Synthetic oligonucleotide
tggccttgaatattgcatttgaaaaatcccttcttgccacagcaacatggtttcagtatt

SEQ ID NO: 31336 - DNA, 60 bp, Artificial
  Synthetic oligonucleotide
ctccgatatttgattccagctgtcacatctacctactctggctttgaacctttaatcaga

SEQ ID NO: 31337 - DNA, 60 bp, Artificial
  Synthetic oligonucleotide
agacaccattacagctattggctagagatatggcctataaatacatcacattagatcatg

SEQ ID NO: 31338 - DNA, 60 bp, Artificial
  Synthetic oligonucleotide
gcagtcaccatatttaccatcaacaattgcatctgatcagtatgatacacgattagcttg

SEQ ID NO: 31339 - DNA, 60 bp, Artificial
  Synthetic oligonucleotide
gttgaccaatcaacgattggagcaagcggagtgtatccctctcttatgtcaagggttgtt

SEQ ID NO: 31340 - DNA, 60 bp, Artificial
  Synthetic oligonucleotide
ggaagtgactggtcaacgtgttttcaatgtctttagggaggaggaagaaatacatgcatc

SEQ ID NO: 31341 - DNA, 60 bp, Artificial
  Synthetic oligonucleotide
aacaggtcctaaggttcgtacatttgatattccgaattatagacctcagccattatgcca

SEQ ID NO: 31342 - DNA, 60 bp, Artificial
  Synthetic oligonucleotide
gaatgatgagagaggagcacttgaggcaatgtttaatctaaaatttcatgtaacaggtcc

SEQ ID NO: 31343 - DNA, 56 bp, Artificial
  Synthetic oligonucleotide
atatttttcaacatgatcgtttaggagagttcagctttgttgggaaagttcaatgg

SEQ ID NO: 31344 - DNA, 60 bp, Artificial
  Synthetic oligonucleotide
aggaatagtgctatgtacaagtaaagttgaaaggttatatggcactgccccgggtatggt

SEQ ID NO: 31345 - DNA, 60 bp, Artificial
  Synthetic oligonucleotide
cagtgggtagacttattttgttcaagaggggtattgcctattgacccagaaattcagtgt

SEQ ID NO: 31346 - DNA, 60 bp, Artificial
  Synthetic oligonucleotide
caagccaatagacgagcatattcaggaaagcaatatgatgcatattgtgtgcaaacttac

SEQ ID NO: 31347 - DNA, 60 bp, Artificial
  Synthetic oligonucleotide
gcatttgcgtctgaatatcggcctacattacaagatatggagctatttcaaacattagtt

SEQ ID NO: 31348 - DNA, 60 bp, Artificial
  Synthetic oligonucleotide
gttttacaacagtgagcacaatctctagcacacagtggtcagaagaagtaagtttgacac

SEQ ID NO: 31349 - DNA, 60 bp, Artificial
  Synthetic oligonucleotide
aaacccgatcatatcagctggattactagaaaattttatgaaagggttgcctgcagcaat

SEQ ID NO: 31350 - DNA, 65 bp, Artificial
  Synthetic oligonucleotide
gtggtagtgtcttattatgcatattaccatctaaatcacttgaagttgctggatcatttataagg

SEQ ID NO: 31351 - DNA, 60 bp, Artificial
  Synthetic oligonucleotide
gacagagagtggctttgagtggggtaagcctaatgtgccctgtatagtttataggaattg

SEQ ID NO: 31352 - DNA, 60 bp, Artificial
  Synthetic oligonucleotide
gagcttgttaagtacttgatatctgttatacggaaaacaacagcctggcatctaggacat

SEQ ID NO: 31353 - DNA, 60 bp, Artificial
  Synthetic oligonucleotide
gacacccgacaaataaagcattctcaattacaattcaggctaatggctttagggctatgg

SEQ ID NO: 31354 - DNA, 60 bp, Artificial
  Synthetic oligonucleotide
ttagaagttaatctaggtgatgtggcaaatggattagatcaacctaagaaaacaactggt

SEQ ID NO: 31355 - DNA, 60 bp, Artificial
  Synthetic oligonucleotide
gcaggtgttccaaatgatgtaattcagagtatggagaaaagagtcatcccaggaagtccc

SEQ ID NO: 31356 - DNA, 60 bp, Artificial
  Synthetic oligonucleotide
caagggtttactttaagccaacacagaatattaaagaaccaggtaccttcaaattgaatc

SEQ ID NO: 31357 - DNA, 60 bp, Artificial
  Synthetic oligonucleotide
tcaaggaggcagtcccaggggaaacatcagcagtagaatgtttagatttattggatagat

SEQ ID NO: 31358 - DNA, 65 bp, Artificial
  Synthetic oligonucleotide
cagctgtaataggttataaatatgcaagtaaagtagatgagataagtgatgtattggatagtgcc

SEQ ID NO: 31359 - DNA, 60 bp, Artificial
  Synthetic oligonucleotide
tgtgatgtactaacaacaagacaaatccatagaccaaaagttgctcgtacattcacagtg

SEQ ID NO: 31360 - DNA, 60 bp, Artificial
  Synthetic oligonucleotide
ggaaatgttgagggtacagctgagtcaatctgtagttattggctgaaaactatgtctctt

SEQ ID NO: 31361 - DNA, 60 bp, Artificial
  Synthetic oligonucleotide
ggaggtattaaaggctgtatcactttatggtaagaaagagaaggtgggtgatctgacaca

SEQ ID NO: 31362 - DNA, 60 bp, Artificial
  Synthetic oligonucleotide
catgcagggcttaaaagatctaaatactggtctgctcacggttatgcatgtggtagtgtc

SEQ ID NO: 31363 - DNA, 60 bp, Artificial
  Synthetic oligonucleotide
tagtgtacctggtaagaaaattgaatgatcccagcatagttactgcaatgacaatgcaat

SEQ ID NO: 31364 - DNA, 60 bp, Artificial
  Synthetic oligonucleotide
ttttgagaagggattgcatggcaatcttacagaagaagctaaaatccacctagaaacagt

SEQ ID NO: 31365 - DNA, 60 bp, Artificial
  Synthetic oligonucleotide
gtcatggcaagcaacattatgaacaaacactgggataaaccttattttagccaaaccaga

SEQ ID NO: 31366 - DNA, 60 bp, Artificial
  Synthetic oligonucleotide
gcagcaagtgtgacattaattgaagcaattcggttcttaaaccattcacaaaataatcct

SEQ ID NO: 31367 - DNA, 60 bp, Artificial
  Synthetic oligonucleotide
agcaagcccttgaaaaggcacttcgatgggcctcaggtgaaagtgaaatacagtcttcac

SEQ ID NO: 31368 - DNA, 58 bp, Artificial
  Synthetic oligonucleotide
cgaataaagtatctgcatctattaaaggcaattggttgcaaggcaatctaaacaagtg

SEQ ID NO: 31369 - DNA, 60 bp, Artificial
  Synthetic oligonucleotide
ctgatgatgctttatttatttatggttatctggagcctatagatgatggtactgagtggt

SEQ ID NO: 31370 - DNA, 60 bp, Artificial
  Synthetic oligonucleotide
gagtggtttcaatatgtgacccaacaaattcaagcaggcaactttcattggcatgctgtg

SEQ ID NO: 31371 - DNA, 60 bp, Artificial
  Synthetic oligonucleotide
gatctgactgaatttgagagtgttgttaaaggctggggagagtgtgtcaaggatcgattt

SEQ ID NO: 31372 - DNA, 54 bp, Artificial
  Synthetic oligonucleotide
agtactgcctgaggatgtactcccagactccttcttttcatttagacatgctga

SEQ ID NO: 31373 - DNA, 60 bp, Artificial
  Synthetic oligonucleotide
ttcaacgatgttccacaacggaatgcagctacatttaatccagatgcagggtatgtggca

SEQ ID NO: 31374 - DNA, 60 bp, Artificial
  Synthetic oligonucleotide
ttcaacgatgttccacaacggaatgcagctacatttaacccggatgcagggtatgtggca

SEQ ID NO: 31375 - DNA, 60 bp, Artificial
  Synthetic oligonucleotide
attttcaacgatgttccacaacggaatgcagctacatttaacccggatgcagggtatgtg

SEQ ID NO: 31376 - DNA, 60 bp, Artificial
  Synthetic oligonucleotide
tttcaacgatgttccacaacggaatgcagctacatttaatccggacacggggtatgtggc

SEQ ID NO: 31377 - DNA, 60 bp, Artificial
  Synthetic oligonucleotide
tttcaacgatgttccacaacggaatgcagctacatttaacccggatgcagggtatgtggc

SEQ ID NO: 31378 - DNA, 60 bp, Artificial
  Synthetic oligonucleotide
tttcaacgatgttccacaacggaatgcagctacatttaatccagatgcagggtatgtggc

SEQ ID NO: 31379 - DNA, 60 bp, Artificial
  Synthetic oligonucleotide
ttcaacgatgttccacaacggaatgcagctacatttaatccggacacggggtatgtggca

SEQ ID NO: 31380 - DNA, 60 bp, Artificial
  Synthetic oligonucleotide
gccgtacttaacacgcatttcccaggaacccagtccattccactgcctgactacggactc

SEQ ID NO: 31381 - DNA, 60 bp, Artificial
  Synthetic oligonucleotide
gccgtacttaacacacatttcccaggaacccagtccattccactgcctgactacggactc

SEQ ID NO: 31382 - DNA, 60 bp, Artificial
  Synthetic oligonucleotide
caggatttaacatacaggacatggacattgtagcctctgagcacctgctgcaccaatccc

SEQ ID NO: 31383 - DNA, 60 bp, Artificial
  Synthetic oligonucleotide
caggatttaacatacaggacatggacattgtagcctctgagcacctgctgcaccagtccc

SEQ ID NO: 31384 - DNA, 60 bp, Artificial
  Synthetic oligonucleotide
aaaaacagggtttaacatacaggacatggacattgtagcctctgagcacctgctgcacca

SEQ ID NO: 31385 - DNA, 60 bp, Artificial
  Synthetic oligonucleotide
aaaaacaggatttaatatacaagacatggacattgtagcctctgagcacctgctgcacca

SEQ ID NO: 31386 - DNA, 60 bp, Artificial
  Synthetic oligonucleotide
aggaagtaatgtcatgctggctgtctgcaagcgcatgtgctttagggccaccatggaagt

SEQ ID NO: 31387 - DNA, 60 bp, Artificial
  Synthetic oligonucleotide
caggaagcaatgtcatgctggctgtctgcaagcgcatgtgctttagggccaccatggaag

SEQ ID NO: 31388 - DNA, 53 bp, Artificial
  Synthetic oligonucleotide
aaaagaagggcaggaggcaatgtcatgctggctgtctgcaagcgcatgtgcct

SEQ ID NO: 31389 - DNA, 60 bp, Artificial
  Synthetic oligonucleotide
gcaaaaaaaggaaaacaggaagcaatgtcatgctggctgtctgcaagcgcatgtgcttta

SEQ ID NO: 31390 - DNA, 60 bp, Artificial
  Synthetic oligonucleotide
cccaccttggggggacatcaacaagtcaggccgttcaggaatagcacttgttgcaacagg

SEQ ID NO: 31391 - DNA, 60 bp, Artificial
  Synthetic oligonucleotide
aacccaccttggggggacatcaacaagtcaggccgttcaggaatagcacttgttgcaaca

SEQ ID NO: 31392 - DNA, 60 bp, Artificial
  Synthetic oligonucleotide
gtgcggcagcctggtgatgggaactgcttctaccacagcatagctgagttaaccatgccc

SEQ ID NO: 31393 - DNA, 60 bp, Artificial
  Synthetic oligonucleotide
cctgctgccagagctttcttgcagcaatttggtattaacatctaaacctctccgttacac

SEQ ID NO: 31394 - DNA, 60 bp, Artificial
  Synthetic oligonucleotide
attctctcctgctgccagagctttcttgcagcaatttggtattaacatctaaacctctcc

SEQ ID NO: 31395 - DNA, 60 bp, Artificial
  Synthetic oligonucleotide
gtcgggatatctagcacgatgggttgctgatacgtgcaaggctagtgtccttaagttggc

SEQ ID NO: 31396 - DNA, 60 bp, Artificial
  Synthetic oligonucleotide
cacacttcataggatgtcgggatatctagcacgatgggttgctgatacgtgcaaggctag

SEQ ID NO: 31397 - DNA, 60 bp, Artificial
  Synthetic oligonucleotide
gctatccatatatccttctctcaatctgttggctatctttaaactggttaagttgccttt

SEQ ID NO: 31398 - DNA, 60 bp, Artificial
  Synthetic oligonucleotide
cagagggtgggtcagttaatccgttgtgggtgggtttagttcctggctgccttaagtagc

SEQ ID NO: 31399 - DNA, 60 bp, Artificial
  Synthetic oligonucleotide
tgggtgggaattattatttagagggtgggtcagttaatccgttgtgggtgggtttagttt

SEQ ID NO: 31400 - DNA, 60 bp, Artificial
  Synthetic oligonucleotide
gagggtgggtcagttaatccgttgtgggtgggtttagttcctggctgccttaagtagcct

SEQ ID NO: 31401 - DNA, 60 bp, Artificial
  Synthetic oligonucleotide
cttcaagagaagaatggcagatgctgtgtcccggaaaaagatggatactaaacctactga

SEQ ID NO: 31402 - DNA, 60 bp, Artificial
  Synthetic oligonucleotide
ggaggcgttaaccttgctgttcttaatacccattttcctggaacccagtccattccactg

SEQ ID NO: 31403 - DNA, 60 bp, Artificial
  Synthetic oligonucleotide
gcgttaaccttgctgttcttaatacccattttcctggaacccagtccattccactgcctg

SEQ ID NO: 31404 - DNA, 60 bp, Artificial
  Synthetic oligonucleotide
agacatagttgctgctagctcaagtctcatggcaagaaagcttgaattcgggacggatag

SEQ ID NO: 31405 - DNA, 60 bp, Artificial
  Synthetic oligonucleotide
cagccgccaatatagcacttagctggagttcagttgaacacaagggcaacaagatcttag

SEQ ID NO: 31406 - DNA, 60 bp, Artificial
  Synthetic oligonucleotide
caacatagcacttagctggagttcagttgaacacaagggcaacaagatcttagtttcagg

SEQ ID NO: 31407 - DNA, 60 bp, Artificial
  Synthetic oligonucleotide
ccaacatagcacttagctggagttcagttgaacacaagggcaacaagatcttagtttcag

SEQ ID NO: 31408 - DNA, 60 bp, Artificial
  Synthetic oligonucleotide
tgtccttgatgtgaatgcaattgatattgaggaaccaagtggccaaacagcagattggta

SEQ ID NO: 31409 - DNA, 60 bp, Artificial
  Synthetic oligonucleotide
gctaactttaagcgtatccacaccaatgggcttaactacgaccacatacgaatcttctac

SEQ ID NO: 31410 - DNA, 60 bp, Artificial
  Synthetic oligonucleotide
tgatatctgttgatttgcagagtggtcgtcgtgtcgtgtcagtggagtacattagaggtg

SEQ ID NO: 31411 - DNA, 60 bp, Artificial
  Synthetic oligonucleotide
gatatctgttgatttgcagagtggtcgtcgtgttgtgtcagtggagtactttagaggaga

SEQ ID NO: 31412 - DNA, 60 bp, Artificial
  Synthetic oligonucleotide
gatatctgttgatttgcagagtggtcgtcgtgtcgtgtcagtggagtacattagaggtga

SEQ ID NO: 31413 - DNA, 60 bp, Artificial
  Synthetic oligonucleotide
gtcttcagaggaattgtgctaggaaagtagccatcatccatcatctcccagagcgagtcg

SEQ ID NO: 31414 - DNA, 60 bp, Artificial
  Synthetic oligonucleotide
ccatcatctcccagagcgagtcgtagatcttgtcatgaggacgaaaagtgaagccctggg

SEQ ID NO: 31415 - DNA, 50 bp, Artificial
  Synthetic oligonucleotide
tcaagttcctgaagaaattgaggatgagagctcgattcttctccagaggc

SEQ ID NO: 31416 - DNA, 60 bp, Artificial
  Synthetic oligonucleotide
tcatttcttcatcagtcggtctaaggacatctaaaccatcaatcaggatgtcatacaggc

SEQ ID NO: 31417 - DNA, 60 bp, Artificial
  Synthetic oligonucleotide
gttatgaaggacctttgcaaagtataagtcccgatgatatccattctcaagttcctgaag

SEQ ID NO: 31418 - DNA, 52 bp, Artificial
  Synthetic oligonucleotide
tctcaagttcctgaagaaattgaggatgagagctcgattcttctccagaggc

SEQ ID NO: 31419 - DNA, 60 bp, Artificial
  Synthetic oligonucleotide
ggccctcatccacctcaagccaacccactgacggcatatccacaccgttgatggtagtct

SEQ ID NO: 31420 - DNA, 60 bp, Artificial
  Synthetic oligonucleotide
accgttgatggtagtcttcagaggaattgtgctaggaaagtagccatcatccatcatctc

SEQ ID NO: 31421 - DNA, 60 bp, Artificial
  Synthetic oligonucleotide
gtcggtctaaggacatctaaaccatcaatcaggatgtcatacaggccctcatccacctca

SEQ ID NO: 31422 - DNA, 60 bp, Artificial
  Synthetic oligonucleotide
tcatacaggccctcatccacctcaagccaacccactgacggcatatccacaccgttgatg

SEQ ID NO: 31423 - DNA, 60 bp, Artificial
  Synthetic oligonucleotide
tgggtgcgctttgcgattgaaatctcggatgctcagtgggaggaggaagagatccgagag

SEQ ID NO: 31424 - DNA, 60 bp, Artificial
  Synthetic oligonucleotide
attgggtgcgctttgcgattgaaatctcggatgctcagtgggaggaggaagagatccgag

SEQ ID NO: 31425 - DNA, 60 bp, Artificial
  Synthetic oligonucleotide
attctgagagcgagatcaaacagcatcttcccaagagagaccctggatctcttcttccgt

SEQ ID NO: 31426 - DNA, 53 bp, Artificial
  Synthetic oligonucleotide
cagatccttcaccagattctgcccagtgacctgaacctcagtgagcttcattc

SEQ ID NO: 31427 - DNA, 60 bp, Artificial
  Synthetic oligonucleotide
taacgcttaggttcatagttgcaaggtgcttgctcaattgcagtgaagaaccttttctct

SEQ ID NO: 31428 - DNA, 53 bp, Artificial
  Synthetic oligonucleotide
taacgcttaggttcatagttgcaaggtgcttgctcaattgcagtgaagaacct

SEQ ID NO: 31429 - DNA, 51 bp, Artificial
  Synthetic oligonucleotide
cattgcgatcgccaatgccgggctgacgtgccgcattctgccgcaagtggt

SEQ ID NO: 31430 - DNA, 60 bp, Artificial
  Synthetic oligonucleotide
ggctgcagatctgacactctcccgcattgcgatcgccaatgccgggctgacgtgccgcat

SEQ ID NO: 31431 - DNA, 60 bp, Artificial
  Synthetic oligonucleotide
ggtgtccagcagtcgctccctagcactctcaaaggtgatccagtgctcctcaaggttgac

SEQ ID NO: 31432 - DNA, 60 bp, Artificial
  Synthetic oligonucleotide
cttggtgaatgtggtgtccagcagtcgctccctagcactctcaaaggtgatccagtgctc

SEQ ID NO: 31433 - DNA, 60 bp, Artificial
  Synthetic oligonucleotide
ccctccatctgaccagaggtaacaagctctccagcattgagaagaggctgtctgaggagg

SEQ ID NO: 31434 - DNA, 60 bp, Artificial
  Synthetic oligonucleotide
tcagggctctgatcaccctccatctgaccagaggtaacaagctctccagcattgagaaga

SEQ ID NO: 31435 - DNA, 60 bp, Artificial
  Synthetic oligonucleotide
gaagaggctgtctgaggagggcaagaaagaattcgccctgctgaaggccaggtaccagct

SEQ ID NO: 31436 - DNA, 60 bp, Artificial
  Synthetic oligonucleotide
attgagaagaggctgtctgaggagggcaagaaagaattcgccctgctgaaggccaggtac

SEQ ID NO: 31437 - DNA, 60 bp, Artificial
  Synthetic oligonucleotide
ccaacttagctatcgatagatcatggctatgccggagaattgggtgcgctttgcgattga

SEQ ID NO: 31438 - DNA, 60 bp, Artificial
  Synthetic oligonucleotide
acacaaagacctccaacttagctatcgatagatcatggctatgccggagaattgggtgcg

SEQ ID NO: 31439 - DNA, 60 bp, Artificial
  Synthetic oligonucleotide
atgatcgttatgaaggacctttgcaaagtataagtcccgatgatatccattctcaagttc

SEQ ID NO: 31440 - DNA, 55 bp, Artificial
  Synthetic oligonucleotide
attctgagagcgagatcaaacagcatcttcccaagagagaccctggatctcttct

SEQ ID NO: 31441 - DNA, 60 bp, Artificial
  Synthetic oligonucleotide
aagccctgggggagatcctcgttctggatagtgaagtaagacatgcttaatgttggaggg

SEQ ID NO: 31442 - DNA, 60 bp, Artificial
  Synthetic oligonucleotide
catcatctcccagagcgagtcgtagatcttgtcatgaggacgaaaagtgaagccctgggg

SEQ ID NO: 31443 - DNA, 60 bp, Artificial
  Synthetic oligonucleotide
ggggagatcctcgttctggatagtgaagtaagacatgcttaatgttggagggtctttgtg

SEQ ID NO: 31444 - DNA, 60 bp, Artificial
  Synthetic oligonucleotide
ccagtgctcctcaaggttgactagagttggatggacagtaaggttcttccgatctgattc

SEQ ID NO: 31445 - DNA, 60 bp, Artificial
  Synthetic oligonucleotide
tccagtgctcctcaaggttgactagagttggatggacagtaaggttcttccgatctgatt

SEQ ID NO: 31446 - DNA, 60 bp, Artificial
  Synthetic oligonucleotide
tgaggactccatcaaggccctggtcgatgcccacaggctctatctgctggagttctccag

SEQ ID NO: 31447 - DNA, 60 bp, Artificial
  Synthetic oligonucleotide
ggccctggtcgatgcccacaggctctatctgctggagttctccaggaccatcaacgtgaa

SEQ ID NO: 31448 - DNA, 58 bp, Artificial
  Synthetic oligonucleotide
tgactctgctctgcaggctggtctggcaagctccttcctgactcccagtcagaagaga

SEQ ID NO: 31449 - DNA, 60 bp, Artificial
  Synthetic oligonucleotide
tgactctgctctgcaggctggtctggcaagctccttcctgactcccagtcagaagagagc

SEQ ID NO: 31450 - DNA, 60 bp, Artificial
  Synthetic oligonucleotide
agaagagagcttacctgctgagcttcaagctggtggacggaaatggcaaagtgaataaag

SEQ ID NO: 31451 - DNA, 60 bp, Artificial
  Synthetic oligonucleotide
cctgctgagcttcaagctggtggacggaaatggcaaagtgaataaagccgtccagcaggc

SEQ ID NO: 31452 - DNA, 60 bp, Artificial
  Synthetic oligonucleotide
gtgttttggaatttgatttaattcggccaaattaaaactctctaattggactctaaaagg

SEQ ID NO: 31453 - DNA, 57 bp, Artificial
  Synthetic oligonucleotide
taattcggccaaattaaaactctctaattggactctaaaagggcttcggcccaaact

SEQ ID NO: 31454 - DNA, 60 bp, Artificial
  Synthetic oligonucleotide
ctctaaaagggcttcggcccaaactacagtgatcctacgactggccaatccttggtgaat

SEQ ID NO: 31455 - DNA, 60 bp, Artificial
  Synthetic oligonucleotide
aaaagggcttcggcccaaactacagtgatcctacgactggccaatccttggtgaatgtgg

SEQ ID NO: 31456 - DNA, 60 bp, Artificial
  Synthetic oligonucleotide
gggctggaaggttactgtatttaatacaaattttcctgggaacaggaacagtccagttcc

SEQ ID NO: 31457 - DNA, 60 bp, Artificial
  Synthetic oligonucleotide
aggttacgcttaaccttgggggctggaaggttactgtatttaatacaaattttcctggga

SEQ ID NO: 31458 - DNA, 60 bp, Artificial
  Synthetic oligonucleotide
gcttaaccttgggggctggaaggttactgtatttaatacaaattttcctgggaacaggaa

SEQ ID NO: 31459 - DNA, 57 bp, Artificial
  Synthetic oligonucleotide
ggggctggaaggttactgtatttaatacaaattttcctgggaacaggaacagtccag

SEQ ID NO: 31460 - DNA, 60 bp, Artificial
  Synthetic oligonucleotide
aagaatggcctcactcaagaaactggagatgtaaccccacttggtgctggggagtaggaa

SEQ ID NO: 31461 - DNA, 60 bp, Artificial
  Synthetic oligonucleotide
gcagccacagagcatactaattgagcacaaagggacgataattggaaagcagaatgatac

SEQ ID NO: 31462 - DNA, 60 bp, Artificial
  Synthetic oligonucleotide
cttggtgaaagggctagttgacagtgtcagtgacagcttcttccccggcctatctgtctg

SEQ ID NO: 31463 - DNA, 60 bp, Artificial
  Synthetic oligonucleotide
caagcacactaagccccacggagccgtctcatgtcaggctaccaacagcagagcccttca

SEQ ID NO: 31464 - DNA, 60 bp, Artificial
  Synthetic oligonucleotide
tcctagatgagggtctacttcctaaatcatggggttttactaactcatttgtactgatga

SEQ ID NO: 31465 - DNA, 60 bp, Artificial
  Synthetic oligonucleotide
tcacagagtttcagttgactacataccatttggcaaaaaatatgattgccctgtgagttt

SEQ ID NO: 31466 - DNA, 60 bp, Artificial
  Synthetic oligonucleotide
gctcgagagatacccataatctcgcactcagtgggtcctcttcacagagtttcagttgac

SEQ ID NO: 31467 - DNA, 60 bp, Artificial
  Synthetic oligonucleotide
aaccattttgctcgagagatacccataatctcgcactcagtgggtcctcttcacagagtt

SEQ ID NO: 31468 - DNA, 55 bp, Artificial
  Synthetic oligonucleotide
cccctgacttatttcgaaatgtataaaactaaccattttgctcgagagataccca

SEQ ID NO: 31469 - DNA, 60 bp, Artificial
  Synthetic oligonucleotide
ttgggggggacaccaaagaccccctgacttatttcgaaatgtataaaactaaccattttg

SEQ ID NO: 31470 - DNA, 53 bp, Artificial
  Synthetic oligonucleotide
tcctattactatgctaaatcagtaagatagtctctgcctagtggtgggagggg

SEQ ID NO: 31471 - DNA, 60 bp, Artificial
  Synthetic oligonucleotide
gtcacatcacaacatattctggggaatgctaaatgggctcctattactatgctaaatcag

SEQ ID NO: 31472 - DNA, 60 bp, Artificial
  Synthetic oligonucleotide
ctttttttgggtggtgggatgggttatggaagagttctgaggagtggagtggatatttta

SEQ ID NO: 31473 - DNA, 60 bp, Artificial
  Synthetic oligonucleotide
tcctattactatgctaaatcagtaagatagtctctgcctagtggtgggagggggtattag

SEQ ID NO: 31474 - DNA, 60 bp, Artificial
  Synthetic oligonucleotide
ggatattttattgtagcttcttgaaagctttggcagcactagacacagcagttgaaacct

SEQ ID NO: 31475 - DNA, 60 bp, Artificial
  Synthetic oligonucleotide
gggtggtgggatgggttatggaagagttctgaggagtggagtggatattttattgtagct

SEQ ID NO: 31476 - DNA, 60 bp, Artificial
  Synthetic oligonucleotide
gttgaaaccttgaggttgtcatttatgaccccaagtgtcttcaacatggctctgcgctgg

SEQ ID NO: 31477 - DNA, 60 bp, Artificial
  Synthetic oligonucleotide
gtagcttcttgaaagctttggcagcactagacacagcagttgaaaccttgaggttgtcat

SEQ ID NO: 31478 - DNA, 60 bp, Artificial
  Synthetic oligonucleotide
tctgcgctgggcagaggttaagaaggtgctgtttatggcagcttgcatcggtctatcaaa

SEQ ID NO: 31479 - DNA, 60 bp, Artificial
  Synthetic oligonucleotide
ccttgaggttgtcatttatgaccccaagtgtcttcaacatggctctgcgctgggcagagg

SEQ ID NO: 31480 - DNA, 60 bp, Artificial
  Synthetic oligonucleotide
gcgctgggcagaggttaagaaggtgctgtttatggcagcttgcatcggtctatcaaaact

SEQ ID NO: 31481 - DNA, 57 bp, Artificial
  Synthetic oligonucleotide
gtctatcaaaacttgctacaatctcatccttactggcagaacgaattgtaggattaa

SEQ ID NO: 31482 - DNA, 60 bp, Artificial
  Synthetic oligonucleotide
gagttcttgatcaatcagaccagcaaaactaggatgcattagagctctaggaaagtctgc

SEQ ID NO: 31483 - DNA, 60 bp, Artificial
  Synthetic oligonucleotide
cagaccagcaaaactaggatgcattagagctctaggaaagtctgcagagaaagcatccat

SEQ ID NO: 31484 - DNA, 60 bp, Artificial
  Synthetic oligonucleotide
gaaagtctgcagagaaagcatccattgctcttcctgtcacaggtaaatattcctgcacat

SEQ ID NO: 31485 - DNA, 60 bp, Artificial
  Synthetic oligonucleotide
aagcatccattgctcttcctgtcacaggtaaatattcctgcacatactcagcagcctggc

SEQ ID NO: 31486 - DNA, 60 bp, Artificial
  Synthetic oligonucleotide
ctcttgacaaagttaagtcatcacgagagggattgccagatttcagtttgtaccgagtta

SEQ ID NO: 31487 - DNA, 60 bp, Artificial
  Synthetic oligonucleotide
agtcatcacgagagggattgccagatttcagtttgtaccgagttatgagatcattgactt

SEQ ID NO: 31488 - DNA, 60 bp, Artificial
  Synthetic oligonucleotide
aagtcagaaacccaagcagatattgtcgactcatctatagactcagaggcaaaatgaatc

SEQ ID NO: 31489 - DNA, 60 bp, Artificial
  Synthetic oligonucleotide
gtcagaaacccaagcagatattgtcgactcatctatagactcagaggcaaaatgaatcgc

SEQ ID NO: 31490 - DNA, 60 bp, Artificial
  Synthetic oligonucleotide
gcttgaaatggtgtgagccaaacataaagaaagccctttcttggcctctaggctacccat

SEQ ID NO: 31491 - DNA, 60 bp, Artificial
  Synthetic oligonucleotide
ggtgtgagccaaacataaagaaagccctttcttggcctctaggctacccatctttcaaat

SEQ ID NO: 31492 - DNA, 60 bp, Artificial
  Synthetic oligonucleotide
ggtctacttcctaaatcatggggttttactaactcatttgtactgatgaagtctccagag

SEQ ID NO: 31493 - DNA, 51 bp, Artificial
  Synthetic oligonucleotide
gtactgatgaagtctccagagttctttgatacaacaattgaaagactgtct

SEQ ID NO: 31494 - DNA, 60 bp, Artificial
  Synthetic oligonucleotide
gcaacgcaagtcatgaggataggccagggacttggcttagatgattccttgcgcaatttg

SEQ ID NO: 31495 - DNA, 60 bp, Artificial
  Synthetic oligonucleotide
ccttgcgcaatttgtataaattcatgctgaatgaactatcagacagagagatctcatctt

SEQ ID NO: 31496 - DNA, 57 bp, Artificial
  Synthetic oligonucleotide
ggctacccatctttcaaattcttccaactttctatgctgaagtcatatgagcacaac

SEQ ID NO: 31497 - DNA, 60 bp, Artificial
  Synthetic oligonucleotide
ctttgcaacgcaagtcatgaggataggccagggacttggcttagatgattccttgcgcaa

SEQ ID NO: 31498 - DNA, 60 bp, Artificial
  Synthetic oligonucleotide
tcgatcttaaagatgattgttgtcaatcacccttatttaacataatccaattacaatcag

SEQ ID NO: 31499 - DNA, 60 bp, Artificial
  Synthetic oligonucleotide
ttacaatcagaagtcacatcacaacatattctggggaatgctaaatgggctcctattact

SEQ ID NO: 31500 - DNA, 59 bp, Artificial
  Synthetic oligonucleotide
aatggcagatgctgtgtcccggaaaaaaatggatactaaacctactgacccgactggga

SEQ ID NO: 31501 - DNA, 60 bp, Artificial
  Synthetic oligonucleotide
aatggcagatgctgtgtcccggaaaaaaatggatactaaacctactgacccgactgggat

SEQ ID NO: 31502 - DNA, 60 bp, Artificial
  Synthetic oligonucleotide
tgccggagcaccagatcgctgtccaccgacatgcctgtttattgcagggattgctgaact

SEQ ID NO: 31503 - DNA, 60 bp, Artificial
  Synthetic oligonucleotide
ccaggtaggtacagaacagcaatctgtggactctatcctgcacagatcaaagccagacaa

SEQ ID NO: 31504 - DNA, 60 bp, Artificial
  Synthetic oligonucleotide
cccactggttatcgacatgcaccgtgtgctaaaggatgggatggatgtcaacttcatgag

SEQ ID NO: 31505 - DNA, 60 bp, Artificial
  Synthetic oligonucleotide
catgagaaaggtcttgcgccagaggtacgggcagctgactgcagaggagtggatgacatc

SEQ ID NO: 31506 - DNA, 60 bp, Artificial
  Synthetic oligonucleotide
ggatgtcaacttcatgagaaaggtcttgcgccagaggtacgggcagctgactgcagagga

SEQ ID NO: 31507 - DNA, 59 bp, Artificial
  Synthetic oligonucleotide
caatcaatgggaatacaactggaccagaggatcatcgttctctttatggttgcttgggg

SEQ ID NO: 31508 - DNA, 60 bp, Artificial
  Synthetic oligonucleotide
caatcaatgggaatacaactggaccagaggatcatcgttctctttatggttgcttggggg

SEQ ID NO: 31509 - DNA, 58 bp, Artificial
  Synthetic oligonucleotide
ctttactaattaaatcacttcataccgattatgcctggacttttgttcctgcggagtc

SEQ ID NO: 31510 - DNA, 60 bp, Artificial
  Synthetic oligonucleotide
agtgtctattactatggaatagaggaagtgccagaaacctaaatgaacttaaaatggaat

SEQ ID NO: 31511 - DNA, 60 bp, Artificial
  Synthetic oligonucleotide
gaggagatgccagaaacctaaatgaacttaaaatggagtgtccacacacaattggtttgg

SEQ ID NO: 31512 - DNA, 60 bp, Artificial
  Synthetic oligonucleotide
gagtaaacaccatgtctaacgtcaggcaacttaccgaaaagaaaattagggaactcttgg

SEQ ID NO: 31513 - DNA, 60 bp, Artificial
  Synthetic oligonucleotide
gaaatggacttgtggacaccttcacaaactcctactccttttgtgagagtgttccaaatt

SEQ ID NO: 31514 - DNA, 60 bp, Artificial
  Synthetic oligonucleotide
ccctattacctcaacgaaactacctcattataagtaaattcttgattgcttttcaaggcg

SEQ ID NO: 31515 - DNA, 60 bp, Artificial
  Synthetic oligonucleotide
gccttggaagatgctgaagtcattgctagagcagctcaaacacttcacatgaatagtgtg

SEQ ID NO: 31516 - DNA, 60 bp, Artificial
  Synthetic oligonucleotide
ctggctgaggtgaagggttgcacttggagtgacgggtatgcaatgtacctagggtttgcc

SEQ ID NO: 31517 - DNA, 60 bp, Artificial
  Synthetic oligonucleotide
tagtagtagactccgcaaaagaaagcagtcaatcagcaacatggggatatggaagtggct

SEQ ID NO: 31518 - DNA, 60 bp, Artificial
  Synthetic oligonucleotide
tagtagtagactccgcaaaagaaagcagtcaatcagcaacatggggatgtggaagtggct

SEQ ID NO: 31519 - DNA, 60 bp, Artificial
  Synthetic oligonucleotide
tttatgtttcgatgccgactgcacaatcaacaatgaaggctgaagagataacacctgggc

SEQ ID NO: 31520 - DNA, 60 bp, Artificial
  Synthetic oligonucleotide
agcagacgggcagctgtgtctacattggagactaaactcggggaactcaagcggcaactg

SEQ ID NO: 31521 - DNA, 60 bp, Artificial
  Synthetic oligonucleotide
caacaatgaaggctgaagagataacacctgggcgattccggacaattgcttgtggcctct

SEQ ID NO: 31522 - DNA, 60 bp, Artificial
  Synthetic oligonucleotide
gatgccgactgcacaatcaacaatgaaggctgaagagataacacctgggcggtttcgaac

SEQ ID NO: 31523 - DNA, 60 bp, Artificial
  Synthetic oligonucleotide
agcttgctgcataagtacctcaaatcaggaggtgtcagacagcggaacactgagatgctc

SEQ ID NO: 31524 - DNA, 60 bp, Artificial
  Synthetic oligonucleotide
ttcctggcaacaggaacaatccaattggtaacaacgatcttaccatccacagaatttcag

SEQ ID NO: 31525 - DNA, 60 bp, Artificial
  Synthetic oligonucleotide
ggtggacccagatgacgttaacaagaacacactacaagcaaggcaacaaacagtgtcagc

SEQ ID NO: 31526 - DNA, 60 bp, Artificial
  Synthetic oligonucleotide
cagggcttgagcctgatgaccatttgaaggagaaatcatctttgagatatggtaatgtgc

SEQ ID NO: 31527 - DNA, 60 bp, Artificial
  Synthetic oligonucleotide
agttccatgaacattttggctcttatgaagccttccaacctcctgaatgtccaatcatct

SEQ ID NO: 31528 - DNA, 60 bp, Artificial
  Synthetic oligonucleotide
cagttctacgagcattctagctctgataaagccttccaacctcctgaatgtccaatcgtc

SEQ ID NO: 31529 - DNA, 60 bp, Artificial
  Synthetic oligonucleotide
gatgcatgtgctttgaggatgatgctctgcattggaggtcctctgcctctcttgtctagc

SEQ ID NO: 31530 - DNA, 60 bp, Artificial
  Synthetic oligonucleotide
atcagcattctatcaatcttatttgagacgaacacagtcaatggggattcaactggacca

SEQ ID NO: 31531 - DNA, 60 bp, Artificial
  Synthetic oligonucleotide
atctgccttctaccagtcttacttacgcagaacacagtcaatggggattcaactggacca

SEQ ID NO: 31532 - DNA, 60 bp, Artificial
  Synthetic oligonucleotide
gtcctggcatcaaacccctgataagcaaaagcctgcaaccagtcctggatcacagtctca

SEQ ID NO: 31533 - DNA, 60 bp, Artificial
  Synthetic oligonucleotide
tagtagtagactccttgaaaagctactacgagaaagtctggaatgagtgacttgacagat

SEQ ID NO: 31534 - DNA, 60 bp, Artificial
  Synthetic oligonucleotide
tctccgttataaccctttactttccgtgcaatatgtctatgtattgcacaccattatact

SEQ ID NO: 31535 - DNA, 60 bp, Artificial
  Synthetic oligonucleotide
ctccactattaactactgaaatatgtcaagccaattcatttttgaagatgtaccacaacg

SEQ ID NO: 31536 - DNA, 60 bp, Artificial
  Synthetic oligonucleotide
cagccctggccgcctcatctacagccataccgttcagatcatactatgccaaagggtccc

SEQ ID NO: 31537 - DNA, 60 bp, Artificial
  Synthetic oligonucleotide
accgttccagccctggccgcctcatctacagccataccgttcagatcatactatgccaaa

SEQ ID NO: 31538 - DNA, 60 bp, Artificial
  Synthetic oligonucleotide
catctttcgatacatgtgctttaaggatgatgctctgcattggaggtcctctgcctctct

SEQ ID NO: 31539 - DNA, 60 bp, Artificial
  Synthetic oligonucleotide
ccggtgcaaatggatttgatcctgatgcagggtatctggcattctgtgttaaacatgggg

SEQ ID NO: 31540 - DNA, 60 bp, Artificial
  Synthetic oligonucleotide
atcaaccggtgcaaatggatttgatcctgatgcagggtatctggcattctgtgttaaaca

SEQ ID NO: 31541 - DNA, 60 bp, Artificial
  Synthetic oligonucleotide
gtcgcatccaccggtgcaaatggatttgatcctgatgcagggtatgtggacttttgtgtt

SEQ ID NO: 31542 - DNA, 60 bp, Artificial
  Synthetic oligonucleotide
tgtcaacttcatgaggaaggtcttacgccagaggtatgggcagctgactgcagaggaatg

SEQ ID NO: 31543 - DNA, 60 bp, Artificial
  Synthetic oligonucleotide
tttcttctacctcagtgtacttatatatatgcaagtagcatatatataagtacacaatat

SEQ ID NO: 31544 - DNA, 60 bp, Artificial
  Synthetic oligonucleotide
acagctcgtaactgccaggcagaagcttaaagatgcagaaaaggcagtggaagtggaccc

SEQ ID NO: 31545 - DNA, 60 bp, Artificial
  Synthetic oligonucleotide
caatccatgtgctaagacaattgttaaactgtttgaaatccaaaagacaggattcaacat

SEQ ID NO: 31546 - DNA, 60 bp, Artificial
  Synthetic oligonucleotide
aagtggggaaagaaactctatgaactctttgcagatgattctttccaggagaacaggatc

SEQ ID NO: 31547 - DNA, 60 bp, Artificial
  Synthetic oligonucleotide
aagtggggaaagaaactctatgaactctttgctgatgattctttccaggagaacagaatc

SEQ ID NO: 31548 - DNA, 60 bp, Artificial
  Synthetic oligonucleotide
cacaaggcgcacagattgacactcctttcagctcattttactggctttacaaggctggcg

SEQ ID NO: 31549 - DNA, 59 bp, Artificial
  Synthetic oligonucleotide
cagtctcttgttggaaagcagtctcctttccagaatgcctacaacgtcaaaggcaacgc

SEQ ID NO: 31550 - DNA, 60 bp, Artificial
  Synthetic oligonucleotide
ctgaacatctgctgcatcagtctcttgttggaaagcagtctcctttccagaatgcctaca

SEQ ID NO: 31551 - DNA, 61 bp, Artificial
  Synthetic oligonucleotide
ccatgtgctaagacaattgttaaactgtttgaaatccaaaagacaggattcaatatacagg

SEQ ID NO: 31552 - DNA, 60 bp, Artificial
  Synthetic oligonucleotide
caatccatgtgctaagacaattgttaaactgtttgaaatccaaaagacaggattcaatat

SEQ ID NO: 31553 - DNA, 60 bp, Artificial
  Synthetic oligonucleotide
gcacctatatacgagtgtgcatgggtcagctctaccggcatagtcaaaaaaggccttgag

SEQ ID NO: 31554 - DNA, 60 bp, Artificial
  Synthetic oligonucleotide
gtagaggcaaccaagttttgtgcacctatatacgagtgtgcatgggtcagctccaccggc

SEQ ID NO: 31555 - DNA, 60 bp, Artificial
  Synthetic oligonucleotide
aggccttgagtggttcgaaaaaaatgcaggaactatcaagtcttgggatgagagctacac

SEQ ID NO: 31556 - DNA, 60 bp, Artificial
  Synthetic oligonucleotide
ggtcagctccaccggcatagtcaagaaaggccttgagtggttcgaaaaaaatgcaggaac

SEQ ID NO: 31557 - DNA, 60 bp, Artificial
  Synthetic oligonucleotide
ggatgaaatgaacaggtggtttgaggagttcaagaagagtaatggacttgtggacacctt

SEQ ID NO: 31558 - DNA, 60 bp, Artificial
  Synthetic oligonucleotide
gctctagtagaggcaaccaagttttgtgcacctatatacgagtgtgcatgggtcagctcc

SEQ ID NO: 31559 - DNA, 60 bp, Artificial
  Synthetic oligonucleotide
atgcttctgctctagtggaggcaaccaagttttgtgcacctatatacgagtgtgcatggg

SEQ ID NO: 31560 - DNA, 60 bp, Artificial
  Synthetic oligonucleotide
ctacactgaacttaaggttggtgtccccaagatagagcagcttgcaaactaccagcaggc

SEQ ID NO: 31561 - DNA, 60 bp, Artificial
  Synthetic oligonucleotide
agagctacactgaacttaaggttggtgtccccaagatagagcagcttgcaaactaccagc

SEQ ID NO: 31562 - DNA, 60 bp, Artificial
  Synthetic oligonucleotide
tgaagggaaaggagtgtttgatgaagccaaaaaaactgtagaggcccttaatggctattt

SEQ ID NO: 31563 - DNA, 60 bp, Artificial
  Synthetic oligonucleotide
agcacaaggatgaggttgacaaggccagtgctgacggcatggtgacaaacctcctcaagc

SEQ ID NO: 31564 - DNA, 60 bp, Artificial
  Synthetic oligonucleotide
agcataaggatgaggtagacaaggctagtgctgacggcatggtgacaaacctcctcaagc

SEQ ID NO: 31565 - DNA, 60 bp, Artificial
  Synthetic oligonucleotide
ggttgacaaggccagtgctgacggcatggtgacaaacctcctcaagcacattgcaaaggc

SEQ ID NO: 31566 - DNA, 60 bp, Artificial
  Synthetic oligonucleotide
gatattggtttccgtgtcaatgctaatacggcagccttgagcaacaaagtccttgcagaa

SEQ ID NO: 31567 - DNA, 60 bp, Artificial
  Synthetic oligonucleotide
gatattggtttccgtgtcaatgctaatacggcagccttgagcaacaaagtccttgcagag

SEQ ID NO: 31568 - DNA, 60 bp, Artificial
  Synthetic oligonucleotide
tccgtgtcaatgctaatacggcagccttgagcaacaaagtccttgcagagtataaagtcc

SEQ ID NO: 31569 - DNA, 60 bp, Artificial
  Synthetic oligonucleotide
ccgtgtcaatgctaatacggcagccttgagcaacaaagtccttgcagaatataaagtccc

SEQ ID NO: 31570 - DNA, 60 bp, Artificial
  Synthetic oligonucleotide
gcaaggcgcacagattgacactcctttcagctcattttactggctttacaaggctggcgt

SEQ ID NO: 31571 - DNA, 60 bp, Artificial
  Synthetic oligonucleotide
cacaaggtgcacagattgatactccttttagctcattttactggctttacaaggctggcg

SEQ ID NO: 31572 - DNA, 60 bp, Artificial
  Synthetic oligonucleotide
ctgacagatatccaagaggatataacccgccatgaacaacagcttgttgttgccaggcaa

SEQ ID NO: 31573 - DNA, 60 bp, Artificial
  Synthetic oligonucleotide
tctgacagatatccaagaggatataacccgccatgaacaacagcttgttgttgccaggca

SEQ ID NO: 31574 - DNA, 60 bp, Artificial
  Synthetic oligonucleotide
cggtttgggttggggtcatggggtggggtgggtctgggggctgggcagcggagatcaaaa

SEQ ID NO: 31575 - DNA, 65 bp, Artificial
  Synthetic oligonucleotide
ccctattacctcaacaaaactacctcattataagtaaattcttgattgcttttcaaggagtctac

SEQ ID NO: 31576 - DNA, 60 bp, Artificial
  Synthetic oligonucleotide
ccctattacctcaacaaaactacctcattataagtaaattcttgattgcttttcaaggag

SEQ ID NO: 31577 - DNA, 60 bp, Artificial
  Synthetic oligonucleotide
tcacttcaacaaaactacctcattataagtaaattcttgattgcttttcaaggagtatac

SEQ ID NO: 31578 - DNA, 54 bp, Artificial
  Synthetic oligonucleotide
ctttctcagcctattattgggcttggagcgctggtgttaagccagagacatttt

SEQ ID NO: 31579 - DNA, 60 bp, Artificial
  Synthetic oligonucleotide
tctaatgctctggtggaggcaacacgtttctgtgctccaatttatgagtgtgcttggacc

SEQ ID NO: 31580 - DNA, 60 bp, Artificial
  Synthetic oligonucleotide
ctttctcagcctattattgggcttggagcgctggtgttaagccagagacatttttcactt

SEQ ID NO: 31581 - DNA, 52 bp, Artificial
  Synthetic oligonucleotide
ttctcagcctattattgggcttggagcgctggtgttaagccagagacatttt

SEQ ID NO: 31582 - DNA, 60 bp, Artificial
  Synthetic oligonucleotide
ttctcagcctattattgggcttggagcgctggtgttaagccagagacatttttcactttg

SEQ ID NO: 31583 - DNA, 60 bp, Artificial
  Synthetic oligonucleotide
ctgacttccacaccactaaggtggggtaagggattgattaacctgtttgcagatgatgac

SEQ ID NO: 31584 - DNA, 58 bp, Artificial
  Synthetic oligonucleotide
taaccctgatgacgctgcccagggatcaggacacaccaagtccattctcaaccttcgg

SEQ ID NO: 31585 - DNA, 51 bp, Artificial
  Synthetic oligonucleotide
cttgtccattgtttatgatgaaactgacactcagaccacataccacgaaaa

SEQ ID NO: 31586 - DNA, 60 bp, Artificial
  Synthetic oligonucleotide
ggcacggctgcctgtctattgtttatgatgaaactgacactcagaccacataccacgaga

SEQ ID NO: 31587 - DNA, 60 bp, Artificial
  Synthetic oligonucleotide
gcaagccaggcaacagacagtgtcagcattggaggataaactcgcagactacaagaggag

SEQ ID NO: 31588 - DNA, 60 bp, Artificial
  Synthetic oligonucleotide
gtcaccaactgtgtgataaaaggaagagaggttcgtaagggccaatcagtgctgaggcag

SEQ ID NO: 31589 - DNA, 59 bp, Artificial
  Synthetic oligonucleotide
tgttgttagtggaagttggttttcagactgacatcgatgggaaaataaggacagaccac

SEQ ID NO: 31590 - DNA, 60 bp, Artificial
  Synthetic oligonucleotide
gtccacaccactgggcttagttatgaccacatacgaatcttctacattaaaggacgcgag

SEQ ID NO: 31591 - DNA, 60 bp, Artificial
  Synthetic oligonucleotide
ggaacagccagctctatctcactcaagaaatatgatgaacaagtcaaatacatggacaaa

SEQ ID NO: 31592 - DNA, 60 bp, Artificial
  Synthetic oligonucleotide
tgccctcatacagtcaattttggggaaaacagtgtggtcgggtatgtagagctaccacca

SEQ ID NO: 31593 - DNA, 60 bp, Artificial
  Synthetic oligonucleotide
gggcattggtttgacggccgcttaaatctaaagacctcctttcattgttatggtgcatgc

SEQ ID NO: 31594 - DNA, 60 bp, Artificial
  Synthetic oligonucleotide
ggggcattggtttgacggccgcttaaatctaaagacctcctttcattgttatggtgcatg

SEQ ID NO: 31595 - DNA, 60 bp, Artificial
  Synthetic oligonucleotide
gccctcatacagtcaattttggggaaaacagtgtggtcgggtatgtagagctaccaccaa

SEQ ID NO: 31596 - DNA, 60 bp, Artificial
  Synthetic oligonucleotide
ttggggcattggtttgacggccgcttaaatctaaagacctcctttcattgttatggtgca

SEQ ID NO: 31597 - DNA, 60 bp, Artificial
  Synthetic oligonucleotide
gaacaacccagttcctgacgatggtcttaccctccaccgcctcagtggattccttgccag

SEQ ID NO: 31598 - DNA, 60 bp, Artificial
  Synthetic oligonucleotide
gggtgatgatatggaccctgaactcagaacacttgcacaaagtctcattgaccaaaaggt

SEQ ID NO: 31599 - DNA, 60 bp, Artificial
  Synthetic oligonucleotide
cttgacagatatccaagaggatataacccgccatgaacaacagcttgttgttgccagaca

SEQ ID NO: 31600 - DNA, 60 bp, Artificial
  Synthetic oligonucleotide
gtcaataatcattttcctggaaacaggaacaacccaattggtaacaacgatcttaccttg

SEQ ID NO: 31601 - DNA, 60 bp, Artificial
  Synthetic oligonucleotide
atcaataatcattttcctggaaacaggaacaacccaattggtaacaacgatcttaccatc

SEQ ID NO: 31602 - DNA, 60 bp, Artificial
  Synthetic oligonucleotide
gtcaataatcattttcctggaaacaggaacaacccaattgataacaacgatcttaccatc

SEQ ID NO: 31603 - DNA, 60 bp, Artificial
  Synthetic oligonucleotide
agtagtaggctccctaaagagcactacactaaagatggcaacactagaggaactccaaaa

SEQ ID NO: 31604 - DNA, 60 bp, Artificial
  Synthetic oligonucleotide
agtagtagactccctaaagagcactacactaaagatggcaacactagaggaactccaaaa

SEQ ID NO: 31605 - DNA, 60 bp, Artificial
  Synthetic oligonucleotide
catcagcagccgtggaaacaattgttttgtcacagaatttgtactttccacttttgcaag

SEQ ID NO: 31606 - DNA, 60 bp, Artificial
  Synthetic oligonucleotide
gcagccgtggaaacaattgttttgtcacagaatttgtactttccacttttgcaagcagca

SEQ ID NO: 31607 - DNA, 60 bp, Artificial
  Synthetic oligonucleotide
tttaaagctaaatccaggagttgaatcatcggtttctatttccacatctgcagttcctcc

SEQ ID NO: 31608 - DNA, 60 bp, Artificial
  Synthetic oligonucleotide
caggagttgaatcatcggtttctatttccacatctgcagttcctccagccaagagttccc

SEQ ID NO: 31609 - DNA, 60 bp, Artificial
  Synthetic oligonucleotide
cagttcctccagccaagagttccctaatcttcttctctgtaagttgcctgacggtagaca

SEQ ID NO: 31610 - DNA, 60 bp, Artificial
  Synthetic oligonucleotide
cctccagccaagagttccctaatcttcttctctgtaagttgcctgacggtagacatggtg

SEQ ID NO: 31611 - DNA, 60 bp, Artificial
  Synthetic oligonucleotide
ggccctccaatgcatagcatcattcttaaagcgcaagagtcaaatgaagcaggaatattc

SEQ ID NO: 31612 - DNA, 60 bp, Artificial
  Synthetic oligonucleotide
aactcttatcaaggcttctgttctcttaaaagtccagtcatctggaccgacatcagcagc

SEQ ID NO: 31613 - DNA, 60 bp, Artificial
  Synthetic oligonucleotide
ccatgtatttaacttgctcatcgtatttcttaagtgagatagagctggcagttccagggt

SEQ ID NO: 31614 - DNA, 60 bp, Artificial
  Synthetic oligonucleotide
gtaaaggccctccaatgcatagcatcattcttaaagcgcaagagtcaaatgaagcaggaa

SEQ ID NO: 31615 - DNA, 60 bp, Artificial
  Synthetic oligonucleotide
agctaatgggaaaatgattggtgcaaggcctttaatgctagacaaaaggggtaaaggccc

SEQ ID NO: 31616 - DNA, 60 bp, Artificial
  Synthetic oligonucleotide
gaagcaggaatattcaatccataagccgccactaatggcaactccatcacctttgaatac

SEQ ID NO: 31617 - DNA, 60 bp, Artificial
  Synthetic oligonucleotide
gtagagaaattcttaatgcccaatttctcctttttaacattctgataataagctaatggg

SEQ ID NO: 31618 - DNA, 60 bp, Artificial
  Synthetic oligonucleotide
caatccataagccgccactaatggcaactccatcacctttgaatacatctcctgcttagc

SEQ ID NO: 31619 - DNA, 60 bp, Artificial
  Synthetic oligonucleotide
cactgaaaactttgtccatgtatttaacttgctcatcgtatttcttaagtgagatagagc

SEQ ID NO: 31620 - DNA, 60 bp, Artificial
  Synthetic oligonucleotide
gtcttggttacacacagatatataagtttatgaacatactttaaactacttaaatacttg

SEQ ID NO: 31621 - DNA, 60 bp, Artificial
  Synthetic oligonucleotide
caaggcttctgttctcttaaaagtccagtcatctggaccgacatcagcagccgtggaaac

SEQ ID NO: 31622 - DNA, 60 bp, Artificial
  Synthetic oligonucleotide
gattggtgcaaggcctttaatgctagacaaaaggggtaaaggccctccaatgcatagcat

SEQ ID NO: 31623 - DNA, 60 bp, Artificial
  Synthetic oligonucleotide
agctagaggaaaggacaggaatcagctgggatctaggggtagaagatgcttctgagtcta

SEQ ID NO: 31624 - DNA, 60 bp, Artificial
  Synthetic oligonucleotide
gccaagaaacattcagcaaaagctccctccagagatagttacattgcaccccagaattga

SEQ ID NO: 31625 - DNA, 60 bp, Artificial
  Synthetic oligonucleotide
taatggtatagagaattcagatgggatagattcagcatacatattatctagcataccagc

SEQ ID NO: 31626 - DNA, 60 bp, Artificial
  Synthetic oligonucleotide
tatgaatcctgcaagctattaaaagaggaaacctctcttatatttgcagataatcatgaa

SEQ ID NO: 31627 - DNA, 60 bp, Artificial
  Synthetic oligonucleotide
gagctggaactgcaaaatttgattatgtctgtcatggagctagtaggaaagacgttatag

SEQ ID NO: 31628 - DNA, 60 bp, Artificial
  Synthetic oligonucleotide
tagatacaagtcatttgctgaatcaccagaattagaagtagatgcaaaatgtgtaggctg

SEQ ID NO: 31629 - DNA, 60 bp, Artificial
  Synthetic oligonucleotide
taatcatgaaacattagaagtagcgaatacaaagcatctaataggagaactgcaattcaa

SEQ ID NO: 31630 - DNA, 60 bp, Artificial
  Synthetic oligonucleotide
gtgtaggctgtccttcatgttttgaaagctattcttgcaatttccagattgttacaaata

SEQ ID NO: 31631 - DNA, 60 bp, Artificial
  Synthetic oligonucleotide
gtcatttgctgaatcaccagaattagaagtagatgcaaaatgtgtaggctgtccttcatg

SEQ ID NO: 31632 - DNA, 60 bp, Artificial
  Synthetic oligonucleotide
actgtttgttctgttgatgggccttgtacactcttccataacagactgataataagtgca

SEQ ID NO: 31633 - DNA, 60 bp, Artificial
  Synthetic oligonucleotide
gttacaaatattgatactgtttgttctgttgatgggccttgtacactcttccataacaga

SEQ ID NO: 31634 - DNA, 60 bp, Artificial
  Synthetic oligonucleotide
aataagtgcaacaaagcaatcttatggttttaaaatgagttgtccaaggaagcctgaacc

SEQ ID NO: 31635 - DNA, 60 bp, Artificial
  Synthetic oligonucleotide
ccataacagactgataataagtgcaacaaagcaatcttatggttttaaaatgagttgtcc

SEQ ID NO: 31636 - DNA, 60 bp, Artificial
  Synthetic oligonucleotide
tcaatgtaattgaagtaaattcagacctgagcttagcaacaagggcctatgtttgtagca

SEQ ID NO: 31637 - DNA, 60 bp, Artificial
  Synthetic oligonucleotide
gattggaaattgtgcaaccctatcccaacagcaggaggcagtatcaatgtaattgaagta

SEQ ID NO: 31638 - DNA, 54 bp, Artificial
  Synthetic oligonucleotide
gtttgtagcagagattgtactataaccattgataaagaagatgcccagataata

SEQ ID NO: 31639 - DNA, 60 bp, Artificial
  Synthetic oligonucleotide
gaagtaaattcagacctgagcttagcaacaagggcctatgtttgtagcagagattgtact

SEQ ID NO: 31640 - DNA, 60 bp, Artificial
  Synthetic oligonucleotide
cagtagccctatatccactagatgttttcatggagggcaacttattgcagaatcaaaatc

SEQ ID NO: 31641 - DNA, 60 bp, Artificial
  Synthetic oligonucleotide
ggagttacttataattatcttgctgttagggagcgcagccagtagccctatatccactag

SEQ ID NO: 31642 - DNA, 60 bp, Artificial
  Synthetic oligonucleotide
cataaaagattggaaattgtgcaaccctatcccaacagcaggaggcagtatcaatgtaat

SEQ ID NO: 31643 - DNA, 60 bp, Artificial
  Synthetic oligonucleotide
gctcatgccaggacattattcatcccgaggctaaagtatacaggaaagctatcgaggagg

SEQ ID NO: 31644 - DNA, 60 bp, Artificial
  Synthetic oligonucleotide
tttttggctcatgccaggacattattcatcccgaggctaaagtatacaggaaagctatcg

SEQ ID NO: 31645 - DNA, 60 bp, Artificial
  Synthetic oligonucleotide
gtccaaggaagcctgaaccaacagaagaattccagatatgtaaccgtaagtacaatgtcc

SEQ ID NO: 31646 - DNA, 60 bp, Artificial
  Synthetic oligonucleotide
caggtggggttgtgaagaatttggctgcctggcaattaatactgggtgtgtttttggctc

SEQ ID NO: 31647 - DNA, 60 bp, Artificial
  Synthetic oligonucleotide
tatatgacacaggtccgacaatagggataaatactcaacatgatgaacactgcactggac

SEQ ID NO: 31648 - DNA, 60 bp, Artificial
  Synthetic oligonucleotide
aacaccacatgtcatgcataagattcttccatcacactatactacctggaacaatggtgt

SEQ ID NO: 31649 - DNA, 52 bp, Artificial
  Synthetic oligonucleotide
acaaccttgagttcaggttggtttaagactaaggcctcagtcactctggaca

SEQ ID NO: 31650 - DNA, 52 bp, Artificial
  Synthetic oligonucleotide
gcataccagccttgggtggaatgagcgttggctataacattcagacaaaaga

SEQ ID NO: 31651 - DNA, 60 bp, Artificial
  Synthetic oligonucleotide
ttcagatgggatagattcagcatacatattatctagcataccagccttgggtggaatgag

SEQ ID NO: 31652 - DNA, 60 bp, Artificial
  Synthetic oligonucleotide
cataaattatatagtgggcagattgatgatcttggttccttttcccagggatgtggcaat

SEQ ID NO: 31653 - DNA, 60 bp, Artificial
  Synthetic oligonucleotide
ttccttttcccagggatgtggcaatgtgcaaaagactaatcagtctgtaattggagctgg

SEQ ID NO: 31654 - DNA, 60 bp, Artificial
  Synthetic oligonucleotide
ctaatggttcagaatcataaattatatagtgggcagattgatgatcttggttccttttcc

SEQ ID NO: 31655 - DNA, 60 bp, Artificial
  Synthetic oligonucleotide
aaatagaactacagtttaagacagtagatactaaaacattaccaaatttgctaatggttc

SEQ ID NO: 31656 - DNA, 60 bp, Artificial
  Synthetic oligonucleotide
gctatcgaggaggaagtagtcttaactgtctgtataacattcccagggaatacatactgc

SEQ ID NO: 31657 - DNA, 60 bp, Artificial
  Synthetic oligonucleotide
gaatacatactgcacagagataaatgcaatagagccaaaaataacagatgaaatagaact

SEQ ID NO: 31658 - DNA, 60 bp, Artificial
  Synthetic oligonucleotide
cccagggatgtggcaatgtgcaaaagactaatcagtctgtaattggagctggaactgcaa

SEQ ID NO: 31659 - DNA, 60 bp, Artificial
  Synthetic oligonucleotide
ttggagctggaactgcaaaatttgattatgtctgtcatggagctagtaggaaagacgtta

SEQ ID NO: 31660 - DNA, 60 bp, Artificial
  Synthetic oligonucleotide
atattatagttttcatcaagagtgctattattaaaacaacctacaatcatatatatgaca

SEQ ID NO: 31661 - DNA, 60 bp, Artificial
  Synthetic oligonucleotide
aaagaaatgagtatctgtacctacaggaattgaagcacaaataactaaccaatctgcctt

SEQ ID NO: 31662 - DNA, 60 bp, Artificial
  Synthetic oligonucleotide
gactatttatattttcttacccatgttcttcaagttaagagatatattaaaaagaaatga

SEQ ID NO: 31663 - DNA, 60 bp, Artificial
  Synthetic oligonucleotide
ttttgaaatatggagttacttataattatcttgctgttagggagcgcagccagtagccct

SEQ ID NO: 31664 - DNA, 60 bp, Artificial
  Synthetic oligonucleotide
cctacagccaatctcccccatataaagccaacttataaatttataaccgctaatggtata

SEQ ID NO: 31665 - DNA, 60 bp, Artificial
  Synthetic oligonucleotide
tgagttgtccaaggaagcctgaaccaacagaagaattccagatatgtaaccgtaagtaca

SEQ ID NO: 31666 - DNA, 60 bp, Artificial
  Synthetic oligonucleotide
caacagatgtaagacatggctttgtagagttagggatgagggaatcagtgttatttttga

SEQ ID NO: 31667 - DNA, 60 bp, Artificial
  Synthetic oligonucleotide
attcgaagcttcagatagaatgcgactacatagggagtcaggattgtgccaaggctacaa

SEQ ID NO: 31668 - DNA, 60 bp, Artificial
  Synthetic oligonucleotide
tagaatgcgactacatagggagtcaggattgtgccaaggctacaaaagtctcaggatagc

SEQ ID NO: 31669 - DNA, 60 bp, Artificial
  Synthetic oligonucleotide
aaggctacaaaagtctcaggatagcgaggatgctatgtaaatctaagggctcatcccttg

SEQ ID NO: 31670 - DNA, 60 bp, Artificial
  Synthetic oligonucleotide
aagtctcaggatagcgaggatgctatgtaaatctaagggctcatcccttgttatctcagg

SEQ ID NO: 31671 - DNA, 60 bp, Artificial
  Synthetic oligonucleotide
tcatgcataagattcttccatcacactatactacctggaacaatggtgtcatccatgtgc

SEQ ID NO: 31672 - DNA, 60 bp, Artificial
  Synthetic oligonucleotide
cttaaccaaaacatacatatgctacctgttaatgccagtatttatgccagttgcatacat

SEQ ID NO: 31673 - DNA, 60 bp, Artificial
  Synthetic oligonucleotide
ttgcatacatatatggctgggcatataataagagctgcaagaaatgtaattgctgtggct

SEQ ID NO: 31674 - DNA, 60 bp, Artificial
  Synthetic oligonucleotide
tatggctgggcatataataagagctgcaagaaatgtaattgctgtggcttagcttatcat

SEQ ID NO: 31675 - DNA, 60 bp, Artificial
  Synthetic oligonucleotide
gcaatacattccggaagacatcaaacctagcctgaccatgttgatacagactttgttccc

SEQ ID NO: 31676 - DNA, 60 bp, Artificial
  Synthetic oligonucleotide
ccaagatgttcctcaacggaatctcgctacgtttaacccggaggtcgggtatgtggcatt

SEQ ID NO: 31677 - DNA, 60 bp, Artificial
  Synthetic oligonucleotide
gctagcagataggattgcaaccggaaagaaccttggaaaggaacaggatccaacaggggt

SEQ ID NO: 31678 - DNA, 60 bp, Artificial
  Synthetic oligonucleotide
gagaaatcaatgcccatgagggtcaactggtgatagccaggcagaaggtaagagatgcag

SEQ ID NO: 31679 - DNA, 60 bp, Artificial
  Synthetic oligonucleotide
gagagatcaatgcccatgagggtcaactggtgatagccaggcagaaggtaagagatgcag

SEQ ID NO: 31680 - DNA, 60 bp, Artificial
  Synthetic oligonucleotide
aaaggcagctagcagataggattgcaaccggaaagaaccttggaaaggaacaggatccaa

SEQ ID NO: 31681 - DNA, 60 bp, Artificial
  Synthetic oligonucleotide
cagttagcagataggattgcaaccggaaagaaccttgggaaagaacaggatcccacaggg

SEQ ID NO: 31682 - DNA, 60 bp, Artificial
  Synthetic oligonucleotide
acctctcattctttccaggctcagagatgtttttgggcatattcaaattctacccattgg

SEQ ID NO: 31683 - DNA, 60 bp, Artificial
  Synthetic oligonucleotide
tacccattggctattggtatttacaaggttcagcgtaaagaaatggaaccaaaatacctg

SEQ ID NO: 31684 - DNA, 60 bp, Artificial
  Synthetic oligonucleotide
cccattggctattggtatttacaaggttcagcgtaaagaaatggaaccaaaatacctgga

SEQ ID NO: 31685 - DNA, 60 bp, Artificial
  Synthetic oligonucleotide
aaaatacctggaaaaaacaatgcgtcagaagtatatgaacatggatgccgctacgtggac

SEQ ID NO: 31686 - DNA, 60 bp, Artificial
  Synthetic oligonucleotide
cccagtcttttaatgattgaattagaatttcatgatgtcgctgctaactccagcagtact

SEQ ID NO: 31687 - DNA, 60 bp, Artificial
  Synthetic oligonucleotide
tccggaagacataacccagtcttttaatgattgaattagaatttcatgatgtcgctgcta

SEQ ID NO: 31688 - DNA, 60 bp, Artificial
  Synthetic oligonucleotide
agtagtgtactccacactaaaaacttgcgaactttgataaatctaaaaattccggaagac

SEQ ID NO: 31689 - DNA, 59 bp, Artificial
  Synthetic oligonucleotide
gtttctggccttggctggaagaaaactaatgttagtgcagcagccagagaattcttggc

SEQ ID NO: 31690 - DNA, 60 bp, Artificial
  Synthetic oligonucleotide
gtttctggccttggctggaagaaaactaatgttagtgcagcagccagagaattcttggct

SEQ ID NO: 31691 - DNA, 60 bp, Artificial
  Synthetic oligonucleotide
attcttggctaaatttggtattaatatgtaagtaaatcgaatcaccagaatcagggcaaa

SEQ ID NO: 31692 - DNA, 60 bp, Artificial
  Synthetic oligonucleotide
aaatggcataacatgggcagatggcgaagaggtttacctctcattctttccaggctcaga

SEQ ID NO: 31693 - DNA, 60 bp, Artificial
  Synthetic oligonucleotide
tccacttgcagaaaaaaatggcataacatgggcagatggcgaagaggtttacctctcatt

SEQ ID NO: 31694 - DNA, 60 bp, Artificial
  Synthetic oligonucleotide
gtgactcaagtcagtgaggttcaagcagctcttacagttgtttctggccttggctggaag

SEQ ID NO: 31695 - DNA, 60 bp, Artificial
  Synthetic oligonucleotide
ctacgtggactgtgactcaagtcagtgaggttcaagcagctcttacagttgtttctggcc

SEQ ID NO: 31696 - DNA, 60 bp, Artificial
  Synthetic oligonucleotide
aacaatgcgtcagaagtatatgaacatggatgccgctacgtggactgtgactcaagtcag

SEQ ID NO: 31697 - DNA, 51 bp, Artificial
  Synthetic oligonucleotide
ctcaacaaataaagctgcttattgggtgggtggttggggacagatatatca

SEQ ID NO: 31698 - DNA, 60 bp, Artificial
  Synthetic oligonucleotide
ttggctaaaagagtcctttgactcaacaaataaagctgcttattgggtgggtggttgggg

SEQ ID NO: 31699 - DNA, 60 bp, Artificial
  Synthetic oligonucleotide
acagagtcaaacatggtatgatggatccccagtatctgaagaaggctctcaggcaacgct

SEQ ID NO: 31700 - DNA, 60 bp, Artificial
  Synthetic oligonucleotide
aggtcttatgaccataaacatagcagcacaatgggtgggtggtaggggacagcaacttaa

SEQ ID NO: 31701 - DNA, 60 bp, Artificial
  Synthetic oligonucleotide
cagcaaactaaagctcagcttagtgttcactattagatggaaccactccatgctagtcca

SEQ ID NO: 31702 - DNA, 60 bp, Artificial
  Synthetic oligonucleotide
ctacagatgcttcgttttggcatgcttgcagggcttagtaggcttgtttgtcctaatgag

SEQ ID NO: 31703 - DNA, 60 bp, Artificial
  Synthetic oligonucleotide
gttgttggagctataagtactcaaaaggttaggagttacctaaaggcagggactgcaaca

SEQ ID NO: 31704 - DNA, 60 bp, Artificial
  Synthetic oligonucleotide
gttgttggagctataagtactcaaaaggttaggagttacctaaaggcaggaactgcaaca

SEQ ID NO: 31705 - DNA, 60 bp, Artificial
  Synthetic oligonucleotide
gacatagttgttggagctataagtactcaaaaggttagaagttatctaaaagcaggaact

SEQ ID NO: 31706 - DNA, 60 bp, Artificial
  Synthetic oligonucleotide
gacatagttgttggagctataagtactcaaaaggttagaagttatctaaaggcaggaact

SEQ ID NO: 31707 - DNA, 60 bp, Artificial
  Synthetic oligonucleotide
tgacatagttgttggagctataagtactcaaaaggttagaagttatctaaaggcaggaac

SEQ ID NO: 31708 - DNA, 60 bp, Artificial
  Synthetic oligonucleotide
tgacatagttgttggagctataagtactcaaaaggttagaagttatctaaaggcaggcac

SEQ ID NO: 31709 - DNA, 60 bp, Artificial
  Synthetic oligonucleotide
tgacatagttgttggagctataagtactcaaaaggttagaagctatctaaaggcaggaac

SEQ ID NO: 31710 - DNA, 60 bp, Artificial
  Synthetic oligonucleotide
cagatgcttcgttttggcatgcttgcagggcttagtaggcttgtttgtcctaatgagcta

SEQ ID NO: 31711 - DNA, 60 bp, Artificial
  Synthetic oligonucleotide
acagatgcttcgttttggcatgcttgcagggcttagtaggcttgtttgtcctaatgagct

SEQ ID NO: 31712 - DNA, 60 bp, Artificial
  Synthetic oligonucleotide
taagcaaaggactcatggcgttaaacagttacaaccatatgggtcagggtattcaccatg

SEQ ID NO: 31713 - DNA, 60 bp, Artificial
  Synthetic oligonucleotide
tcaattctctgacccgaacagacagaaacttagaatagttgagtctagacctgcggaatc

SEQ ID NO: 31714 - DNA, 60 bp, Artificial
  Synthetic oligonucleotide
gggctgccttccctggaacaggaatagaaaggcatatgcagctgctacactctgagatga

SEQ ID NO: 31715 - DNA, 60 bp, Artificial
  Synthetic oligonucleotide
atataagcaaaggactcatggcgttaaacagttacaaccatatgggtcagggtattcacc

SEQ ID NO: 31716 - DNA, 60 bp, Artificial
  Synthetic oligonucleotide
cccaaacagacagaaacttagaatagttgagtctagacctgcggaatctgagctagaggc

SEQ ID NO: 31717 - DNA, 60 bp, Artificial
  Synthetic oligonucleotide
ttctctgatccaaatagacagaaacttagaatagttgagtctagacctgcggaatctgag

SEQ ID NO: 31718 - DNA, 60 bp, Artificial
  Synthetic oligonucleotide
ccaaacagacagaaacttagaatagttgagtctagacctgcggaatctgagctagaggcg

SEQ ID NO: 31719 - DNA, 60 bp, Artificial
  Synthetic oligonucleotide
ccttccctggaacaggaatagaaaggcatatgcagctgctacactctgagatgatactgg

SEQ ID NO: 31720 - DNA, 60 bp, Artificial
  Synthetic oligonucleotide
gactgacatagttgttggagctataagtactcaaaaggttagaagctatctaaaggcagg

SEQ ID NO: 31721 - DNA, 60 bp, Artificial
  Synthetic oligonucleotide
gggctgctttccctggaacaggaatagaaaggcatatgcagctgctacactctgagatga

SEQ ID NO: 31722 - DNA, 60 bp, Artificial
  Synthetic oligonucleotide
gggctgctttccctggaacaggaatagaaaggcatatgcagctgctacactccgagatga

SEQ ID NO: 31723 - DNA, 60 bp, Artificial
  Synthetic oligonucleotide
ccaaatgcttcgttttggcatgcttgcagggcttagtaggcttgtttgccctaatgagct

SEQ ID NO: 31724 - DNA, 60 bp, Artificial
  Synthetic oligonucleotide
ctttccctggaacaggaatagaaaggcatatgcagctgctacactctgagatgatactgg

SEQ ID NO: 31725 - DNA, 60 bp, Artificial
  Synthetic oligonucleotide
ctgctaacaccagcagtacttttgacccagagattgcatacgttaactttaagcgtatcc

SEQ ID NO: 31726 - DNA, 60 bp, Artificial
  Synthetic oligonucleotide
gtcgctgctaacaccagcagtacttttgacccagagattgcatacgttaactttaagcgt

SEQ ID NO: 31727 - DNA, 58 bp, Artificial
  Synthetic oligonucleotide
tagtagtagactccttgaaaagctactactgaagccgctggtatgagccaactcaaag

SEQ ID NO: 31728 - DNA, 60 bp, Artificial
  Synthetic oligonucleotide
tagtagtagactccttgaaaagctactactgaagccgctggtatgagccaactcaaagaa

SEQ ID NO: 31729 - DNA, 56 bp, Artificial
  Synthetic oligonucleotide
gtagtagactccttgaaaagctactactgaaaccgctggtatgagccaactcaaag

SEQ ID NO: 31730 - DNA, 56 bp, Artificial
  Synthetic oligonucleotide
gtagtagactccttgaaaagctactactgaagccgctggtatgagccaactcaaag

SEQ ID NO: 31731 - DNA, 60 bp, Artificial
  Synthetic oligonucleotide
acatttgatccagaagctgcttacctcagatttgagagtgactatggttcccaattggag

SEQ ID NO: 31732 - DNA, 60 bp, Artificial
  Synthetic oligonucleotide
acatttgatccagaagctgcttacctcagatttgagagtgattacgggtcccaattggag

SEQ ID NO: 31733 - DNA, 60 bp, Artificial
  Synthetic oligonucleotide
acatttgatccagaagctgcttacctcagatttgagagtgattacggctcccaattggag

SEQ ID NO: 31734 - DNA, 60 bp, Artificial
  Synthetic oligonucleotide
acatttgatccagaagctgcttacctcagatttgagagtgactacgggtcccaattggag

SEQ ID NO: 31735 - DNA, 60 bp, Artificial
  Synthetic oligonucleotide
gtctactttcatcgtaccacttgccgaagagaatggtattacctggagtgacggggtggg

SEQ ID NO: 31736 - DNA, 60 bp, Artificial
  Synthetic oligonucleotide
acatttgatccagaagctgcttacctcagatttgagagtgactacggttcccaattggag

SEQ ID NO: 31737 - DNA, 60 bp, Artificial
  Synthetic oligonucleotide
ccaattggagtccgctatcgttcgagtcttctacatcaatgccgcgaaggtcaaagctta

SEQ ID NO: 31738 - DNA, 60 bp, Artificial
  Synthetic oligonucleotide
actttcatcgtaccacttgccgaagagaatggtattacctggagtgacggggtgggcatg

SEQ ID NO: 31739 - DNA, 60 bp, Artificial
  Synthetic oligonucleotide
tcggtctactttcatcgtacctcttgccgaagagaatggtattacctggagtgacggggt

SEQ ID NO: 31740 - DNA, 60 bp, Artificial
  Synthetic oligonucleotide
gatccagaagctgcttacctcagatttgagagtgactacggttcccaattggagtccgct

SEQ ID NO: 31741 - DNA, 60 bp, Artificial
  Synthetic oligonucleotide
gatccagaagctgcttacctcagatttgagagtgactatggttcccaattggagtccgct

SEQ ID NO: 31742 - DNA, 60 bp, Artificial
  Synthetic oligonucleotide
ggagtccgctatcgttcgagtcttctacatcaatgccgcgaaggtcaaagcttacctccg

SEQ ID NO: 31743 - DNA, 60 bp, Artificial
  Synthetic oligonucleotide
tacacttggaggtgttaaccttgcagtacttaacacgcatttccctggaacccagtccat

SEQ ID NO: 31744 - DNA, 60 bp, Artificial
  Synthetic oligonucleotide
gcggtctactttcatcgtaccactggccgaagagaatggtattacctggagtgacggggt

SEQ ID NO: 31745 - DNA, 60 bp, Artificial
  Synthetic oligonucleotide
aaaggaagtattgctatggaacattacagtgaaactcttaacaagttctatgaaatgttc

SEQ ID NO: 31746 - DNA, 60 bp, Artificial
  Synthetic oligonucleotide
aaaggaagtattgctatggaacattacagtgaaactcttaacaagttctatgaaatgttt

SEQ ID NO: 31747 - DNA, 60 bp, Artificial
  Synthetic oligonucleotide
tgcaggatatgcggaatacaatcatggcatccaagacagttggaacctctgaggagaagc

SEQ ID NO: 31748 - DNA, 60 bp, Artificial
  Synthetic oligonucleotide
cttgcaggacatgcggaatacaatcatggcatccaagacagttggaacctctgaggagaa

SEQ ID NO: 31749 - DNA, 60 bp, Artificial
  Synthetic oligonucleotide
tcttgcaggatatgcggaatacaatcatggcatccaagacagtgggtacatcggaggaaa

SEQ ID NO: 31750 - DNA, 60 bp, Artificial
  Synthetic oligonucleotide
ttgtcgattgaggcaccatggggggcaataaatgttcagtcaacctacaaaccaactgta

SEQ ID NO: 31751 - DNA, 60 bp, Artificial
  Synthetic oligonucleotide
ccaggacaagatagatagatgcagggatgactcaaaggccagtgctgaagagggaaaagc

SEQ ID NO: 31752 - DNA, 60 bp, Artificial
  Synthetic oligonucleotide
ccagagaggggcctagatgcagtgcctcagcccttaaacagctgcagtgttgtaatgtag

SEQ ID NO: 31753 - DNA, 60 bp, Artificial
  Synthetic oligonucleotide
gacgcatgggtgaagtgcgcccacaaacccagagatgcctcctccataataaacgagggg

SEQ ID NO: 31754 - DNA, 60 bp, Artificial
  Synthetic oligonucleotide
ggagatgctagacatcaagtgttcctttgtggcttgtgcagactgttcctcaacaccttc

SEQ ID NO: 31755 - DNA, 60 bp, Artificial
  Synthetic oligonucleotide
gagctcatccggcgccaactgttgcttgtggaggttggatatcagacagatgttgacagc

SEQ ID NO: 31756 - DNA, 60 bp, Artificial
  Synthetic oligonucleotide
cctcagtctgagcgacggcggcctaaacgaggacttgcagaagaccacagacgaaaaact

SEQ ID NO: 31757 - DNA, 60 bp, Artificial
  Synthetic oligonucleotide
gcctacctcgtcagacacccagaaatactggagttcagtggaagtgcgcccaccgaaagc

SEQ ID NO: 31758 - DNA, 60 bp, Artificial
  Synthetic oligonucleotide
gcacgaactgaactacagcagagtcactagtgagaaactactcttaggatggttgggcga

SEQ ID NO: 31759 - DNA, 60 bp, Artificial
  Synthetic oligonucleotide
actatcgcacactcactggaacgcttggacagacaaacaggctccaggtgttctgtcccg

SEQ ID NO: 31760 - DNA, 60 bp, Artificial
  Synthetic oligonucleotide
gcaacttgccttcgcccaggctttaaactacgaccacagattttatgctgtcttggcccc

SEQ ID NO: 31761 - DNA, 60 bp, Artificial
  Synthetic oligonucleotide
gagggacacctctgcttagaagacctgctggaggataccagtgtttcagatcccagggcc

SEQ ID NO: 31762 - DNA, 60 bp, Artificial
  Synthetic oligonucleotide
gttgaccctagcaacccaagactacttaggttcactgttgccaaaaggcagagcccagtg

SEQ ID NO: 31763 - DNA, 60 bp, Artificial
  Synthetic oligonucleotide
ggagtgttgctgatctccaaacaccataaactcacctgtgtctccaaacccacaactacc

SEQ ID NO: 31764 - DNA, 60 bp, Artificial
  Synthetic oligonucleotide
gggctactatgcgaggtggagcgctgtgtgctaagctggctgtctagacgtagaaccgac

SEQ ID NO: 31765 - DNA, 60 bp, Artificial
  Synthetic oligonucleotide
gagcgacttgctccttaattctctttgcctgctacatgccttcttgcgccacacagctac

SEQ ID NO: 31766 - DNA, 60 bp, Artificial
  Synthetic oligonucleotide
gagttcttggactttgttcttccatcacagtctgcttctgaggttgactatcaaaccata

SEQ ID NO: 31767 - DNA, 60 bp, Artificial
  Synthetic oligonucleotide
tagggacagcacaggcagattgttgacaggcagagtaatcactaagtactcacactggtt

SEQ ID NO: 31768 - DNA, 60 bp, Artificial
  Synthetic oligonucleotide
gtagagtcaaggccaccagagtcggagctagaggcaaacaaagtagtaatagtcaagtcc

SEQ ID NO: 31769 - DNA, 60 bp, Artificial
  Synthetic oligonucleotide
cgaccagagtgttgagccaattgctctcatctgcgatcggttagaagacagtttcaggcg

SEQ ID NO: 31770 - DNA, 60 bp, Artificial
  Synthetic oligonucleotide
ctgtcttttcactcttgaggacactccaggttgaatcacgagaaacagagaagttgggtg

SEQ ID NO: 31771 - DNA, 60 bp, Artificial
  Synthetic oligonucleotide
taaagggaaggctcaagcgggatctaagattcatgaatcaaaacagccagaccagcagtc

SEQ ID NO: 31772 - DNA, 60 bp, Artificial
  Synthetic oligonucleotide
actacttactctacagcagtaaaatagttgactcgtgctcgtggctcaaaaagggtcgtg

SEQ ID NO: 31773 - DNA, 60 bp, Artificial
  Synthetic oligonucleotide
gctctagctctgaaggcgaaggatttagcactgcaagcagcacaactgttgagtcaacac

SEQ ID NO: 31774 - DNA, 60 bp, Artificial
  Synthetic oligonucleotide
ggtacaccccagaagacattaagccaagcctgactatgctgatccagactctgtttcccg

SEQ ID NO: 31775 - DNA, 60 bp, Artificial
  Synthetic oligonucleotide
cagaccggaaggaggccaccgcagagtcaatgagtctcagacagctaggacacaagatgc

SEQ ID NO: 31776 - DNA, 60 bp, Artificial
  Synthetic oligonucleotide
gggttgacacactttgatgctctgcggctactagccacggaagaagacccccagcaggag

SEQ ID NO: 31777 - DNA, 60 bp, Artificial
  Synthetic oligonucleotide
gtgtccacagaagagtactcggcagaggtttccagacttaagcagaccctcacagctagg

SEQ ID NO: 31778 - DNA, 60 bp, Artificial
  Synthetic oligonucleotide
aagcttggtgccataagcacggatgtggagatagggaagaaggactgcctggacctcctg

SEQ ID NO: 31779 - DNA, 60 bp, Artificial
  Synthetic oligonucleotide
caatgttctaaggttttatctgagcgacaagggaggagttgagagactaagtgaagagga

SEQ ID NO: 31780 - DNA, 60 bp, Artificial
  Synthetic oligonucleotide
aagcctacgaaactaggaccaaacagtgccagctcggaggcaacttcctcagcagaagca

SEQ ID NO: 31781 - DNA, 60 bp, Artificial
  Synthetic oligonucleotide
caaccaaagacgacgggctaaccaaccctcacttgaaggaaaccattctcaatgcagggc

SEQ ID NO: 31782 - DNA, 60 bp, Artificial
  Synthetic oligonucleotide
cgacaggcgagagactacctagaagcgtcagaagcaaggtgatctacgagatggtcaagc

SEQ ID NO: 31783 - DNA, 60 bp, Artificial
  Synthetic oligonucleotide
gcagtggttgccatcccagcgggatagccctaaataaccaaacaaatgtgcagaaaaggc

SEQ ID NO: 31784 - DNA, 60 bp, Artificial
  Synthetic oligonucleotide
ggttccaggaatgcatcctgtacggcaaggtgtgtgaaactttcctccggtgttgcacag

SEQ ID NO: 31785 - DNA, 60 bp, Artificial
  Synthetic oligonucleotide
gtgcaggaaacatgggccagacagcaagagtacattatcaaccgtccgactgggatctct

SEQ ID NO: 31786 - DNA, 60 bp, Artificial
  Synthetic oligonucleotide
gggcattatggcgatgaatagttacaatcacatggggcaaggcattcatcatgcaacctc

SEQ ID NO: 31787 - DNA, 60 bp, Artificial
  Synthetic oligonucleotide
ggtgtgtcaatttgctgatcggtgagaacaaggttagagagctctccatcgtagtaagcc

SEQ ID NO: 31788 - DNA, 60 bp, Artificial
  Synthetic oligonucleotide
aagagggccctaagggatattgcgggcgcccaggagcacctgatcagcgacttctttagg

SEQ ID NO: 31789 - DNA, 60 bp, Artificial
  Synthetic oligonucleotide
agctggttagttttggagtgaaagaaggccgttatctaaggctgtctgactcagggctgg

SEQ ID NO: 31790 - DNA, 60 bp, Artificial
  Synthetic oligonucleotide
cccctgcttacaaatgcaaccttcactcttttgaggcaacaggttttcttctcacacgtt

SEQ ID NO: 31791 - DNA, 60 bp, Artificial
  Synthetic oligonucleotide
cctggtgaacgtagacaaaagtcctgccaagagtgagttgctatggaggttctcactgga

SEQ ID NO: 31792 - DNA, 60 bp, Artificial
  Synthetic oligonucleotide
tcagcgagttctcaggtcaggttataataaacactttagctagcgagttgagctctgtcc

SEQ ID NO: 31793 - DNA, 60 bp, Artificial
  Synthetic oligonucleotide
gagatgaacgtctccaactggaagctaaaagacctttgtccagaggtcaccataccctgc

SEQ ID NO: 31794 - DNA, 60 bp, Artificial
  Synthetic oligonucleotide
acaggtcgtgactggaggtagtgcgtattcagagtattcaccgaaccaggatagtttgct

SEQ ID NO: 31795 - DNA, 60 bp, Artificial
  Synthetic oligonucleotide
gcaactgtttcgcactgatgaatcccattagccttctcgcacttagaaaccttgactgcg

SEQ ID NO: 31796 - DNA, 60 bp, Artificial
  Synthetic oligonucleotide
tgaaagctcaaccatctcggggaggcggtcctacggctctagcaaaggcaagatacagag

SEQ ID NO: 31797 - DNA, 60 bp, Artificial
  Synthetic oligonucleotide
gggagctcaatctgcttgaaaccctaaacccaaacactaaagatgaccgtacagcaaggc

SEQ ID NO: 31798 - DNA, 60 bp, Artificial
  Synthetic oligonucleotide
caagcaactgcagatgctaaggtttggcatgctctgtggcctaagccgtctttcctgtcc

SEQ ID NO: 31799 - DNA, 60 bp, Artificial
  Synthetic oligonucleotide
cccttatccccaagttaacatggactttcttgaaggaataacgtgggatagtgtctctga

SEQ ID NO: 31800 - DNA, 60 bp, Artificial
  Synthetic oligonucleotide
cactggcatgaggctcgatgagtatttggacactgccctacgggacaatgagtggggtgg

SEQ ID NO: 31801 - DNA, 60 bp, Artificial
  Synthetic oligonucleotide
cttgccaagatgtcattagagaggaagcaacagttatttccagagtaaataatgagcagt

SEQ ID NO: 31802 - DNA, 60 bp, Artificial
  Synthetic oligonucleotide
gtcattagggaggaagcaacagttatttccagagtaaataatgaacagctagaagttgaa

SEQ ID NO: 31803 - DNA, 60 bp, Artificial
  Synthetic oligonucleotide
gccaagatgtcattagagaggaagcaacagttatttccagagtaaataatgagcagttgg

SEQ ID NO: 31804 - DNA, 60 bp, Artificial
  Synthetic oligonucleotide
gacaagttctacgagatgtttggagtcaagaaagaagccaagattgctggtgttgcatga

SEQ ID NO: 31805 - DNA, 54 bp, Artificial
  Synthetic oligonucleotide
cagttgagagcttcgaaatgattagcgttgtactagctatctaccaggattcaa

SEQ ID NO: 31806 - DNA, 60 bp, Artificial
  Synthetic oligonucleotide
atatgcaaatattctcaaggcttgtgacccaagaatgaaaggagccattgctatggaaca

SEQ ID NO: 31807 - DNA, 59 bp, Artificial
  Synthetic oligonucleotide
gacaatcaaagagcgactgcggaatactctgcacgacttgtaaaccctaaaccaaattc

SEQ ID NO: 31808 - DNA, 52 bp, Artificial
  Synthetic oligonucleotide
gaattctgataggattggaccaaatgacatgactttcaggagattggatagc

SEQ ID NO: 31809 - DNA, 60 bp, Artificial
  Synthetic oligonucleotide
gcaatgacaacctggatcagatcaaaaacatgaacttaatatcatgtttgacatttctta

SEQ ID NO: 31810 - DNA, 60 bp, Artificial
  Synthetic oligonucleotide
caccctctagttcaggcatacgggcttagcttgaatgatgcaaagtctgttagattggct

SEQ ID NO: 31811 - DNA, 60 bp, Artificial
  Synthetic oligonucleotide
gcttctcaccctctagttcaggcatacgggcttagcttgaatgatgcaaagtctgttaga

SEQ ID NO: 31812 - DNA, 60 bp, Artificial
  Synthetic oligonucleotide
gtctgttagattggctataatgcttggaggtagtctccctctcattgcttcagttgagag

SEQ ID NO: 31813 - DNA, 60 bp, Artificial
  Synthetic oligonucleotide
ggctataatgcttggaggtagtctccctctcattgcttcagttgagagcttcgaaatgat

SEQ ID NO: 31814 - DNA, 60 bp, Artificial
  Synthetic oligonucleotide
gaacagaaccaaattgcattcaacttccaaagtttctgcaatgacaacctggatcagatc

SEQ ID NO: 31815 - DNA, 60 bp, Artificial
  Synthetic oligonucleotide
tgaatttgaggaagaacagaaccaaattgcattcaacttccaaagtttctgcaatgacaa

SEQ ID NO: 31816 - DNA, 60 bp, Artificial
  Synthetic oligonucleotide
atattctcaaggcttgtgacccaagaatgaaaggagccattgctatggaacattacagtg

SEQ ID NO: 31817 - DNA, 60 bp, Artificial
  Synthetic oligonucleotide
atgagatgtttggagttcaaaagggatctaaacttattcctaaagatcttgtttaaagca

SEQ ID NO: 31818 - DNA, 60 bp, Artificial
  Synthetic oligonucleotide
gtttaaagcaaactattaaaatagcttatatatatataagtctaaagtttgttaaaggtg

SEQ ID NO: 31819 - DNA, 60 bp, Artificial
  Synthetic oligonucleotide
gttaaaggtgtgttaaagatttaaagtgtgtctaaagtgtgttaaagtaatatttatgtt

SEQ ID NO: 31820 - DNA, 59 bp, Artificial
  Synthetic oligonucleotide
acctaactacctcatttgctttttccttgattgtctttttagggagcatactactacta

SEQ ID NO: 31821 - DNA, 60 bp, Artificial
  Synthetic oligonucleotide
agaaactctccaacgcacagcacagcctggaagcatgcactccgattaaaagggactgca

SEQ ID NO: 31822 - DNA, 60 bp, Artificial
  Synthetic oligonucleotide
ctccctaaagagctactataataacgatggcaactatggaggaattgcaaaaggagatca

SEQ ID NO: 31823 - DNA, 60 bp, Artificial
  Synthetic oligonucleotide
ctccctaaagagctacgataacagcaatggcaactatggaggaattgcaaaaggagatca

SEQ ID NO: 31824 - DNA, 60 bp, Artificial
  Synthetic oligonucleotide
gtgcgatgtccaacagaagagacagctattcgggcgtcaccctcatgtaagatggctcct

SEQ ID NO: 31825 - DNA, 58 bp, Artificial
  Synthetic oligonucleotide
ctgaaatggacactgcagagtgcaccacaaacatgatagatcccatggccatattcaa

SEQ ID NO: 31826 - DNA, 60 bp, Artificial
  Synthetic oligonucleotide
ggcagtgcatgtgtgtggcccagttagacaaaacgaaatcttaggaagaatatggaaagc

SEQ ID NO: 31827 - DNA, 60 bp, Artificial
  Synthetic oligonucleotide
gcttggccattatagatgacccatattccccagagcctcgtaaaggctttttaggagaag

SEQ ID NO: 31828 - DNA, 60 bp, Artificial
  Synthetic oligonucleotide
gcctcgcaaaggctttttaggagaagtgcgatgtccaacagaagagacagctattcgggc

SEQ ID NO: 31829 - DNA, 60 bp, Artificial
  Synthetic oligonucleotide
tttaggagaagtgcgatgtccaacagaagagacagctattcgggcgtcaccctcatgtaa

SEQ ID NO: 31830 - DNA, 60 bp, Artificial
  Synthetic oligonucleotide
aagttcgggatggaatgacattcacacaatcaattgagaagaacacagttcaagcactga

SEQ ID NO: 31831 - DNA, 60 bp, Artificial
  Synthetic oligonucleotide
cttctcaagacctgtcatctctattgaagggaggtatgactgcgggcttagcaagaggcc

SEQ ID NO: 31832 - DNA, 60 bp, Artificial
  Synthetic oligonucleotide
ggaggttcctcattggttgtcaaccccaaaggcggcacagttgacttcttcgggtgggtg

SEQ ID NO: 31833 - DNA, 60 bp, Artificial
  Synthetic oligonucleotide
agggagagtccttctggactactctatatactcctgtctgtctaagttcgcgaaggtgcc

SEQ ID NO: 31834 - DNA, 60 bp, Artificial
  Synthetic oligonucleotide
caatcaagacaatatcaagtgaactcacatgccgagagggagagtccttctggactactc

SEQ ID NO: 31835 - DNA, 60 bp, Artificial
  Synthetic oligonucleotide
gcaaaagccagcgaccttcgtgtacctaccgtacccaggaaacagcgagattgttggagg

SEQ ID NO: 31836 - DNA, 60 bp, Artificial
  Synthetic oligonucleotide
gcgagattgttggaggtgatataggggtccacatgacagaggaatcatcaccctcaaaca

SEQ ID NO: 31837 - DNA, 60 bp, Artificial
  Synthetic oligonucleotide
gcactgttctccacttctcaagacctgtcatctctattgaagggaggtatgactgcgggc

SEQ ID NO: 31838 - DNA, 60 bp, Artificial
  Synthetic oligonucleotide
catcaccctcaaacatacacatggtggcacactgccctgcgaaggactcctgtgaggtta

SEQ ID NO: 31839 - DNA, 57 bp, Artificial
  Synthetic oligonucleotide
agatacatctagtagagaatgtgatacctgcttatgggaatgcgggaaaaataaact

SEQ ID NO: 31840 - DNA, 60 bp, Artificial
  Synthetic oligonucleotide
gactttgctgagtccacctgcacgctagcttatggctcagagtgcaaatcctgggagcac

SEQ ID NO: 31841 - DNA, 60 bp, Artificial
  Synthetic oligonucleotide
ctgcacgctagcttatggctcagagtgcaaatcctgggagcaccaattggatgagctgtc

SEQ ID NO: 31842 - DNA, 60 bp, Artificial
  Synthetic oligonucleotide
ggctcagagtgcaaatcctgggagcaccaattggatgagctgtcttttcccttcttccac

SEQ ID NO: 31843 - DNA, 60 bp, Artificial
  Synthetic oligonucleotide
ctgggagcaccaattggacgagctgtcttttcccttcttccactctaaccttgacaagta

SEQ ID NO: 31844 - DNA, 60 bp, Artificial
  Synthetic oligonucleotide
ggacgagctgtcttttcccttcttccactctaaccttgacaagtacagcatgctagaggc

SEQ ID NO: 31845 - DNA, 60 bp, Artificial
  Synthetic oligonucleotide
ggtgagcccagacgtaagtgactactgcactgttctccacttctcaagacctgtcatctc

SEQ ID NO: 31846 - DNA, 60 bp, Artificial
  Synthetic oligonucleotide
gatttaagatctttagatgtgtggcatggaaccataggattagacatgaagtcactaccc

SEQ ID NO: 31847 - DNA, 60 bp, Artificial
  Synthetic oligonucleotide
aataggtgctttgagcagagcggtggaataggctatggatgctttaatgtgaacccttct

SEQ ID NO: 31848 - DNA, 60 bp, Artificial
  Synthetic oligonucleotide
aagagtgtgatgcaaaagccagcgaccttcgtgtacctaccgtacccaggaaacagcgag

SEQ ID NO: 31849 - DNA, 60 bp, Artificial
  Synthetic oligonucleotide
tcactgggaaggcacatggagaagttatgcatgagaataggtgctttgagcagagcggtg

SEQ ID NO: 31850 - DNA, 60 bp, Artificial
  Synthetic oligonucleotide
gaaaaccaatgaaacatctgcagaattcactgggaaggcacatggagaagttatgcatga

SEQ ID NO: 31851 - DNA, 60 bp, Artificial
  Synthetic oligonucleotide
catggctaggtggacctctgaaaaccttcttgaccatccttggattcctagctctgggcc

SEQ ID NO: 31852 - DNA, 60 bp, Artificial
  Synthetic oligonucleotide
ggtgggtgtctggactaacctcatggctaggtgggcctctgaaaaccttcttgaccatcc

SEQ ID NO: 31853 - DNA, 60 bp, Artificial
  Synthetic oligonucleotide
ccccaaaggcggcacagttgacttcttcggatgggtgtctggactaacctcatggctagg

SEQ ID NO: 31854 - DNA, 60 bp, Artificial
  Synthetic oligonucleotide
gccacaccttgttctctgcactactaatatccaccactgtgatgtccattcttacactgc

SEQ ID NO: 31855 - DNA, 60 bp, Artificial
  Synthetic oligonucleotide
tgtgaggttagcagctgcctattctgtgtgcacggactgcttaactaccagtgccacacc

SEQ ID NO: 31856 - DNA, 60 bp, Artificial
  Synthetic oligonucleotide
gctgcctattctgtgtgcacggactgcttaactaccagtgccacaccttgttctctgcac

SEQ ID NO: 31857 - DNA, 60 bp, Artificial
  Synthetic oligonucleotide
cagcctctaagtgctctggggatgaatatttctgcagtaggtacccgtgtgagactgcaa

SEQ ID NO: 31858 - DNA, 60 bp, Artificial
  Synthetic oligonucleotide
caagcactgacaacaggggaggttagagcttccatacgccttacattggacgactatgat

SEQ ID NO: 31859 - DNA, 60 bp, Artificial
  Synthetic oligonucleotide
ctgcaaggctagtgggactgtgattatgaagctagggcctataggctcagagtcctgcct

SEQ ID NO: 31860 - DNA, 60 bp, Artificial
  Synthetic oligonucleotide
aagtgaatgttaatggtgtatgggttgtgccgagatgcattggttatgaagaggtccttg

SEQ ID NO: 31861 - DNA, 60 bp, Artificial
  Synthetic oligonucleotide
gtggtgtatcagaatagccagtccgactgctcagctacatttaagaatctcaccggctgt

SEQ ID NO: 31862 - DNA, 60 bp, Artificial
  Synthetic oligonucleotide
tgaatccatcaatgtcatcaacaaggtgagcccagacgtaagtgactactgcactgttct

SEQ ID NO: 31863 - DNA, 60 bp, Artificial
  Synthetic oligonucleotide
aaacatctgcagaattcactgggaaggcacatggagaagttatgcatgagaataggtgct

SEQ ID NO: 31864 - DNA, 60 bp, Artificial
  Synthetic oligonucleotide
tcattttatggagtgatgatccttggcctattaggtaatgtgcatagttgctctgagagt

SEQ ID NO: 31865 - DNA, 60 bp, Artificial
  Synthetic oligonucleotide
tcattggttgtcaaccccaaaggcggcacagttgacttcttcggatgggtgtctggacta

SEQ ID NO: 31866 - DNA, 60 bp, Artificial
  Synthetic oligonucleotide
ccatgtcttgtctaacgactgtgggaattgtatctcaaaaaccctgagcggccagaagat

SEQ ID NO: 31867 - DNA, 60 bp, Artificial
  Synthetic oligonucleotide
caggccagggaatggggcttacaccctaagtgactttgctgagtccacctgcacgctagc

SEQ ID NO: 31868 - DNA, 60 bp, Artificial
  Synthetic oligonucleotide
catgctagaggctgcaacagagacaataccgatactcaacaagagctcagctgtctgcac

SEQ ID NO: 31869 - DNA, 60 bp, Artificial
  Synthetic oligonucleotide
tactctgctcatggccagtgcagtaatggcaggacctttggagaacagggaaacaaacca

SEQ ID NO: 31870 - DNA, 60 bp, Artificial
  Synthetic oligonucleotide
gaacggcactagaacttctttttgttatagctcaaggaccagcttggggagcctcctgga

SEQ ID NO: 31871 - DNA, 59 bp, Artificial
  Synthetic oligonucleotide
acacagagaaggtgcccatgtttattgcaaagttgttattaatttcctgtttagtgcag

SEQ ID NO: 31872 - DNA, 52 bp, Artificial
  Synthetic oligonucleotide
gcctcctggaagcttgggacaacataactgagtctattggtctgacgtctgg

SEQ ID NO: 31873 - DNA, 60 bp, Artificial
  Synthetic oligonucleotide
tcagagaccaacccaagcacaaggtactcaaaagacctctgttctattggcttgcacact

SEQ ID NO: 31874 - DNA, 60 bp, Artificial
  Synthetic oligonucleotide
ccttgttggcaagcagtctccattccagaatgcctacaatgtcaagggcaatgccaccag

SEQ ID NO: 31875 - DNA, 60 bp, Artificial
  Synthetic oligonucleotide
tcccttgttggcaagcagtctccattccagaatgcctacaatgtcaagggcaatgccacc

SEQ ID NO: 31876 - DNA, 60 bp, Artificial
  Synthetic oligonucleotide
cctcccagcattatggcaagcctcacagactttgcatcatcaagaggtaatccataagct

SEQ ID NO: 31877 - DNA, 55 bp, Artificial
  Synthetic oligonucleotide
agctgcagtgcaaagatgctgtcaaatgaaagatagtgccaaaaccttagtgagc

SEQ ID NO: 31878 - DNA, 60 bp, Artificial
  Synthetic oligonucleotide
ccagtgaattgagttctgtgaaacgagactctgaacgcgaaggtctaactgatctccttg

SEQ ID NO: 31879 - DNA, 60 bp, Artificial
  Synthetic oligonucleotide
aaagcagaaaaccttgctattatcaagtctaagattgcctctcatcctcttgttcaagct

SEQ ID NO: 31880 - DNA, 60 bp, Artificial
  Synthetic oligonucleotide
tgttcaagcttatggtctgcctctgacagatgcaaagtctgtaaggcttgccataatgct

SEQ ID NO: 31881 - DNA, 60 bp, Artificial
  Synthetic oligonucleotide
tcagaaggcttgatagcatgataagagttaagctgattgaagaaactggaaaagcagaaa

SEQ ID NO: 31882 - DNA, 60 bp, Artificial
  Synthetic oligonucleotide
gcttgatagcatgataagagttaagctgattgaagaaactggaaaagcagaaaaccttgc

SEQ ID NO: 31883 - DNA, 56 bp, Artificial
  Synthetic oligonucleotide
agtaacgactgcggtctacagagtcgtactttcttaccttgaatcacatctctcga

SEQ ID NO: 31884 - DNA, 54 bp, Artificial
  Synthetic oligonucleotide
cgccagagcatcatgaaagttgtgaacctttgtgattttacctttgggaaaatc

SEQ ID NO: 31885 - DNA, 60 bp, Artificial
  Synthetic oligonucleotide
agagcaattgtgtcaattttattcaaaaacatactactcagcaacacaaatcatcacatt

SEQ ID NO: 31886 - DNA, 60 bp, Artificial
  Synthetic oligonucleotide
tcatcacattgccaggataagtaacgactgcggtctacagagtcgtactttcttaccttg

SEQ ID NO: 31887 - DNA, 60 bp, Artificial
  Synthetic oligonucleotide
gaattccatgatgtcactgctaacaccagcagtacttttgatccagaagccgggtatgct

SEQ ID NO: 31888 - DNA, 60 bp, Artificial
  Synthetic oligonucleotide
ttttgatccagaagccgggtatgctgcgtttaagcgtagacacaccacagggcttaatta

SEQ ID NO: 31889 - DNA, 58 bp, Artificial
  Synthetic oligonucleotide
agtagtgtactccacctagtatactacattttattgtgttgagatttgaaataaaaac

SEQ ID NO: 31890 - DNA, 60 bp, Artificial
  Synthetic oligonucleotide
ttgatgtctgagattgaattccatgatgtcactgctaacaccagcagtacttttgatcca

SEQ ID NO: 31891 - DNA, 60 bp, Artificial
  Synthetic oligonucleotide
agatgatggtcttaccctccacagagtcagtggatatcttgccaggtacctgcttgacag

SEQ ID NO: 31892 - DNA, 60 bp, Artificial
  Synthetic oligonucleotide
ggtcttaccctccacagagtcagtggatatcttgccaggtacctgcttgacagagtatac

SEQ ID NO: 31893 - DNA, 60 bp, Artificial
  Synthetic oligonucleotide
ccagaagccgggtatgctgcgtttaagcgtagacacaccacagggcttaattatgaccac

SEQ ID NO: 31894 - DNA, 60 bp, Artificial
  Synthetic oligonucleotide
tgagacaacaattacgcttaactttgggggctggaagatacctgtggttaatacgcattt

SEQ ID NO: 31895 - DNA, 53 bp, Artificial
  Synthetic oligonucleotide
cttatccttcttccctggctcagagatgtacttaaccacattcaaattttacc

SEQ ID NO: 31896 - DNA, 60 bp, Artificial
  Synthetic oligonucleotide
tacaaggtccagaggaaattgatggacccaaagtatcttgagaaaacaatgcgtcagagg

SEQ ID NO: 31897 - DNA, 60 bp, Artificial
  Synthetic oligonucleotide
cttcagctgtctaatgggtgggtggtaggggcagctcaatattggaacttaaggcatatt

SEQ ID NO: 31898 - DNA, 60 bp, Artificial
  Synthetic oligonucleotide
atatcttcagctgtctaatgggtgggtggtaggggcagctcaatattggaacttaaggca

SEQ ID NO: 31899 - DNA, 60 bp, Artificial
  Synthetic oligonucleotide
ataattaggcaccaaaaagagcatggcctcaaccaagtcaacagcatagtatatcttcag

SEQ ID NO: 31900 - DNA, 60 bp, Artificial
  Synthetic oligonucleotide
aaagagcatggcctcaaccaagtcaacagcatagtatatcttcagctgtctaatgggtgg

SEQ ID NO: 31901 - DNA, 60 bp, Artificial
  Synthetic oligonucleotide
gtgcacttactgtagtcgctggcttagggtggaagaaagccaatgttagcattgcagcca

SEQ ID NO: 31902 - DNA, 60 bp, Artificial
  Synthetic oligonucleotide
aaagccaatgttagcattgcagccaaagatttcctgaataaattcggaataaacatctaa

SEQ ID NO: 31903 - DNA, 60 bp, Artificial
  Synthetic oligonucleotide
gcattgcagccaaagatttcctgaataaattcggaataaacatctaaactaccccatcaa

SEQ ID NO: 31904 - DNA, 54 bp, Artificial
  Synthetic oligonucleotide
aaacatctaaactaccccatcaaattcttaataaatatggcttgtttctaaatt

SEQ ID NO: 31905 - DNA, 60 bp, Artificial
  Synthetic oligonucleotide
gtccagaggaaattgatggacccaaagtatcttgagaaaacaatgcgtcagaggtacatg

SEQ ID NO: 31906 - DNA, 60 bp, Artificial
  Synthetic oligonucleotide
gcgtcagaggtacatgaacttggatgcatcccaatggactcagaaacacttctcagatgt

SEQ ID NO: 31907 - DNA, 60 bp, Artificial
  Synthetic oligonucleotide
cgtcagaggtacatgaacttggatgcatcccaatggactcagaaacacttctcagatgtc

SEQ ID NO: 31908 - DNA, 60 bp, Artificial
  Synthetic oligonucleotide
tctcagatgtcaacagtgcacttactgtagtcgctggcttagggtggaagaaagccaatg

SEQ ID NO: 31909 - DNA, 60 bp, Artificial
  Synthetic oligonucleotide
ccagaccaaagtgttgtcagtatcatcaagcatgggatttttgatatagcaagtgttcac

SEQ ID NO: 31910 - DNA, 60 bp, Artificial
  Synthetic oligonucleotide
agggccttacagagtacaagtggtctatgaaagaacctactgcatgacaggggtcctgat

SEQ ID NO: 31911 - DNA, 60 bp, Artificial
  Synthetic oligonucleotide
gtctcaaaattctcccaaggtgatacactattattctttggaccacttgagggcggtggt

SEQ ID NO: 31912 - DNA, 60 bp, Artificial
  Synthetic oligonucleotide
gggtctgccttttggtcctggagtcaatactttgggctgccagtgcttcagaagtaccct

SEQ ID NO: 31913 - DNA, 60 bp, Artificial
  Synthetic oligonucleotide
atacacccagataagttggagaggtaaggctgaacaggcacaagccggccaaaattcatt

SEQ ID NO: 31914 - DNA, 60 bp, Artificial
  Synthetic oligonucleotide
cacactctattgctgttgaactatgtgtgcctgggttccatggttgggctacagctgccc

SEQ ID NO: 31915 - DNA, 60 bp, Artificial
  Synthetic oligonucleotide
gcccaggggtgggaacaggttgcacagcatgtggattataccttgatcaattaaagcctg

SEQ ID NO: 31916 - DNA, 60 bp, Artificial
  Synthetic oligonucleotide
gcgggattaccagtatgagacaagttggggctgtaacccagctgattgcccaggggtggg

SEQ ID NO: 31917 - DNA, 60 bp, Artificial
  Synthetic oligonucleotide
gactgttactcctcagaactttacacctggttgctatcggacactaaacctgttcagata

SEQ ID NO: 31918 - DNA, 60 bp, Artificial
  Synthetic oligonucleotide
gcaggaaagtttgtgtccagtttggggaggaaaatctatgtaaggtgatagatatgaatg

SEQ ID NO: 31919 - DNA, 60 bp, Artificial
  Synthetic oligonucleotide
caggcccattgtagagtgtgtcaagtcacccatagattcagagatgacttaaaaaagact

SEQ ID NO: 31920 - DNA, 60 bp, Artificial
  Synthetic oligonucleotide
tgtgacattaacaagaggccagaacacagtaaaagtgtcaggtaaaggtggtcatagtgg

SEQ ID NO: 31921 - DNA, 60 bp, Artificial
  Synthetic oligonucleotide
gatgatggggcacctcaatgtggggtaaagtgctggtttgtagagtctggagaatggatc

SEQ ID NO: 31922 - DNA, 60 bp, Artificial
  Synthetic oligonucleotide
attacatctgcattgtggggggaaactctgcaccaatatatgtaccaacacttgatgatt

SEQ ID NO: 31923 - DNA, 60 bp, Artificial
  Synthetic oligonucleotide
gtccatggaggcattttcagggatctttaggtcaccacatggagaggaccatgatctagc

SEQ ID NO: 31924 - DNA, 60 bp, Artificial
  Synthetic oligonucleotide
gcctcacagtgctagctcagacacattaagcctaattgcctattcaggtataccatccta

SEQ ID NO: 31925 - DNA, 60 bp, Artificial
  Synthetic oligonucleotide
ggccccggggcatcctgtgaagcattctctgaaggtgggatcttcaacataacatcccct

SEQ ID NO: 31926 - DNA, 60 bp, Artificial
  Synthetic oligonucleotide
ggtgcctgcacgaaatacgagtatccctggcacactgcaaagtgtcattatgagcgggat

SEQ ID NO: 31927 - DNA, 60 bp, Artificial
  Synthetic oligonucleotide
cccctatgtgcttagtatcaaaacaaaatcgattccggttgacagagcagcaagtaaact

SEQ ID NO: 31928 - DNA, 60 bp, Artificial
  Synthetic oligonucleotide
ggccattggtttgatggtcggcttaaccttaaaacatctttccactgttatggtgcctgc

SEQ ID NO: 31929 - DNA, 60 bp, Artificial
  Synthetic oligonucleotide
acatcaagctcaaagtatacataccgcagaaggctgacaaatccacttgaagaaacacaa

SEQ ID NO: 31930 - DNA, 60 bp, Artificial
  Synthetic oligonucleotide
gggtagggtctgtaccgatgcacacagatttagagctggacttttccctgacatcaagct

SEQ ID NO: 31931 - DNA, 60 bp, Artificial
  Synthetic oligonucleotide
tttgctaccacccctctttgtgagtatgatggcaatatggtctcaggttacaagaaagtg

SEQ ID NO: 31932 - DNA, 60 bp, Artificial
  Synthetic oligonucleotide
aacaccagtactatgcactttactgatgagagaatagaatggaaagaccccgatgggatg

SEQ ID NO: 31933 - DNA, 60 bp, Artificial
  Synthetic oligonucleotide
gccccgaattccctggaagttttaggaagaagtgtaattttgctaccacccctctttgtg

SEQ ID NO: 31934 - DNA, 60 bp, Artificial
  Synthetic oligonucleotide
actttgataatctcggtgaaaacccctgtaaaattggcttgcagacatcctcaattgaag

SEQ ID NO: 31935 - DNA, 60 bp, Artificial
  Synthetic oligonucleotide
gaaaattgagtgccctcacacagtcagctttggtgaaaacagcgtgataggttatgtgga

SEQ ID NO: 31936 - DNA, 60 bp, Artificial
  Synthetic oligonucleotide
gtccattccactgcctgactacggacttaccatacaccggttgtcaggttacctggccag

SEQ ID NO: 31937 - DNA, 60 bp, Artificial
  Synthetic oligonucleotide
ccagtccattccactgcctgactacggacttaccatacataggttgtccggttacctcgc

SEQ ID NO: 31938 - DNA, 60 bp, Artificial
  Synthetic oligonucleotide
ttgcacaatagtgctgaggtagcttacaggtaacatagtttgacatcaggtaacatagct

SEQ ID NO: 31939 - DNA, 60 bp, Artificial
  Synthetic oligonucleotide
tgactctcggtatggcatttttgaaatactgattgatcaaagccagtgggacatttgatg

SEQ ID NO: 31940 - DNA, 60 bp, Artificial
  Synthetic oligonucleotide
acaaaatctgatttaaacaaacaagcacaatttaacatttgcacaatagtgctgaggtag

SEQ ID NO: 31941 - DNA, 60 bp, Artificial
  Synthetic oligonucleotide
aacaaacaagcacaatttaacatttgcacaatagtgctgaggtagcttacaggtaacata

SEQ ID NO: 31942 - DNA, 60 bp, Artificial
  Synthetic oligonucleotide
taacatttgcacaatagtgctgaggtagcttacaggtaacatagtttgacatcaggtaac

SEQ ID NO: 31943 - DNA, 60 bp, Artificial
  Synthetic oligonucleotide
agtttagatgaagggctactctatttgagacctgaaaccagggaaagtgaagccacctca

SEQ ID NO: 31944 - DNA, 60 bp, Artificial
  Synthetic oligonucleotide
gtgctgtaccaaggttgtggctagaaacactaatcagagacttgagggttcctacaaagg

SEQ ID NO: 31945 - DNA, 60 bp, Artificial
  Synthetic oligonucleotide
gatactactttaaaagaattgtcatggatgagagtggcacagtgctgactgaagaggcac

SEQ ID NO: 31946 - DNA, 60 bp, Artificial
  Synthetic oligonucleotide
tttggaccaggcagggtatcaacagctctaaatcttatgcatgttggtcgcacacacttc

SEQ ID NO: 31947 - DNA, 60 bp, Artificial
  Synthetic oligonucleotide
cagttagcagcagaagtgtactatgacactgagccagaggcagtaggaactggaatctca

SEQ ID NO: 31948 - DNA, 60 bp, Artificial
  Synthetic oligonucleotide
aagtgctggattaagtgcctccaaggcagagcaggaagtttgcaacagcgctcaagacag

SEQ ID NO: 31949 - DNA, 60 bp, Artificial
  Synthetic oligonucleotide
gataggactcagctacatccagagtttcgggatcttacccctgattatgctctaactcag

SEQ ID NO: 31950 - DNA, 60 bp, Artificial
  Synthetic oligonucleotide
agattcaagctgagtgacaagggaggtgtagaaaagctttcagaagaggccataaggtca

SEQ ID NO: 31951 - DNA, 60 bp, Artificial
  Synthetic oligonucleotide
ccagttgacatgcatcaggtttcaaaatatgctaatcatctgactctgctctgtagaatg

SEQ ID NO: 31952 - DNA, 60 bp, Artificial
  Synthetic oligonucleotide
gccatagtaagtgaattttcaggacaagtattaatcaacactttagctagtgaactgagt

SEQ ID NO: 31953 - DNA, 60 bp, Artificial
  Synthetic oligonucleotide
atcggcatctttgtggctggcaaattgcacatccatcttacttctgactcacctggtttg

SEQ ID NO: 31954 - DNA, 60 bp, Artificial
  Synthetic oligonucleotide
ggtgtcaaggttgaagcagactttaactgccaggaatgtgctacatgggttagctggcgg

SEQ ID NO: 31955 - DNA, 60 bp, Artificial
  Synthetic oligonucleotide
ataccagagaagctaagaagagagctagaaagacttggtttatcaaggatggaagtggat

SEQ ID NO: 31956 - DNA, 60 bp, Artificial
  Synthetic oligonucleotide
ctgtagattgtctgagtcatgtgattggttgcttgacggtaagaagaggggtctgcttga

SEQ ID NO: 31957 - DNA, 65 bp, Artificial
  Synthetic oligonucleotide
gaacaaagttaaaacatgaagtcaatgaagatgtcaagacaagtgagaaattactgttaggttgg

SEQ ID NO: 31958 - DNA, 60 bp, Artificial
  Synthetic oligonucleotide
gctcctttattgcatgtgcagactgttcttcaacaccatcgaacaactggtggattagtg

SEQ ID NO: 31959 - DNA, 60 bp, Artificial
  Synthetic oligonucleotide
ggccaactggaatttcactgaacaaagagctggttggtgccctttatcaaggtcttgtgg

SEQ ID NO: 31960 - DNA, 60 bp, Artificial
  Synthetic oligonucleotide
gcttggggcagtctcgccatttggcagacttttcttacctaggttttcaggactggtcag

SEQ ID NO: 31961 - DNA, 60 bp, Artificial
  Synthetic oligonucleotide
ggcatgttatgcgggctaagcagattgtccagcgctctagagctaggtaagaagttctct

SEQ ID NO: 31962 - DNA, 60 bp, Artificial
  Synthetic oligonucleotide
gcagaacaactggggagaggttaccaagaagtgtaaggagcaaagtcatctacgaaatgg

SEQ ID NO: 31963 - DNA, 60 bp, Artificial
  Synthetic oligonucleotide
taacacctgcaccagcaatcttctgaacacagttaaagcagaactaacactggtaaactc

SEQ ID NO: 31964 - DNA, 60 bp, Artificial
  Synthetic oligonucleotide
cagctctgaacattatgaagttagaattgttgggcgaacatactgatggaatacagggca

SEQ ID NO: 31965 - DNA, 60 bp, Artificial
  Synthetic oligonucleotide
gatattagattgcagcatcttgagctaacccgaataaagaaagagaacccaactgttagc

SEQ ID NO: 31966 - DNA, 60 bp, Artificial
  Synthetic oligonucleotide
cttggcacccaaagcacaacttggtggctctcgagacttgctagttcaggaaacaggcac

SEQ ID NO: 31967 - DNA, 60 bp, Artificial
  Synthetic oligonucleotide
gtgagacagtctatagaggacaatttgcaagaggacgaattctttgactacgcaagagag

SEQ ID NO: 31968 - DNA, 60 bp, Artificial
  Synthetic oligonucleotide
ctggaagatgaaagatttatgccctgatattactatcccttgtttctcagtttatggtct

SEQ ID NO: 31969 - DNA, 60 bp, Artificial
  Synthetic oligonucleotide
ctggcttaggattagagaggtacatacagctgttgcactcagagcttgtgttagacttgg

SEQ ID NO: 31970 - DNA, 60 bp, Artificial
  Synthetic oligonucleotide
agtggccataatttgcgacaagctagaggaccaattcagaaagctattcagggagctgcc

SEQ ID NO: 31971 - DNA, 60 bp, Artificial
  Synthetic oligonucleotide
gaaactaatgctaaaggtgaagaacaacttagagggaatgggaccaataagcatgctagc

SEQ ID NO: 31972 - DNA, 60 bp, Artificial
  Synthetic oligonucleotide
gaacaggacaatgttaaacttcacttcaaactcaatctcacaacagacagtgcattaggc

SEQ ID NO: 31973 - DNA, 60 bp, Artificial
  Synthetic oligonucleotide
agagatgcactaaacagctcagggataaatgaccgagaaattgcaattgttgcgctattt

SEQ ID NO: 31974 - DNA, 60 bp, Artificial
  Synthetic oligonucleotide
ggttgatgatctcaagtacaattgactcagatagcaaaaggacattagaggatgatgccc

SEQ ID NO: 31975 - DNA, 60 bp, Artificial
  Synthetic oligonucleotide
ctgggattcagactgagctcggttgccattaacagtaacctactaactaaatctgtcaac

SEQ ID NO: 31976 - DNA, 60 bp, Artificial
  Synthetic oligonucleotide
ggagtgtgaattcttagaattttgcctacacagtgacctttcttatgccttgaactacag

SEQ ID NO: 31977 - DNA, 60 bp, Artificial
  Synthetic oligonucleotide
ggcggttttcaatagactcaatcagcggaaatttcggaccaataaaggacattagaacat

SEQ ID NO: 31978 - DNA, 60 bp, Artificial
  Synthetic oligonucleotide
gttctgtcacttctccccaaagcctggttcaggcttgtcatgtttctagtcaacagggca

SEQ ID NO: 31979 - DNA, 60 bp, Artificial
  Synthetic oligonucleotide
tgccatccaagaagttgagagcaagtgtaatgtgctggaaaggtatctaagatccggtgg

SEQ ID NO: 31980 - DNA, 60 bp, Artificial
  Synthetic oligonucleotide
gccaagaatagtctggggacatggtcaattatcgatagtgtatgatgaatgcgaaactga

SEQ ID NO: 31981 - DNA, 59 bp, Artificial
  Synthetic oligonucleotide
aactggtaaaggtgagacactgcgacaccaacttatcaataaaactgccatcaaataaa

SEQ ID NO: 31982 - DNA, 60 bp, Artificial
  Synthetic oligonucleotide
cgacatctgacgatggccttacaaacccacatctgaaagaaacaagattaaacattggac

SEQ ID NO: 31983 - DNA, 60 bp, Artificial
  Synthetic oligonucleotide
gtgaacaggcaaaagcttaaaattgttgaaagtagaccaccggagtgtgaattggaagca

SEQ ID NO: 31984 - DNA, 60 bp, Artificial
  Synthetic oligonucleotide
ggcagagacatttgaagaacttgctgttgattatatgaagaagcattttccaggcctcac

SEQ ID NO: 31985 - DNA, 60 bp, Artificial
  Synthetic oligonucleotide
agtgaaacgtaatgttgaaggtctaatcaggttcatgatgcaacagtcaagcttagactg

SEQ ID NO: 31986 - DNA, 60 bp, Artificial
  Synthetic oligonucleotide
gctggagtacttgtcaaccaactgccaaacaaagagtcactgcactgaatgccacccaag

SEQ ID NO: 31987 - DNA, 60 bp, Artificial
  Synthetic oligonucleotide
ccaagtttacccactggttggatactttcttgtcctgtgttgtgagtgccaaccgttcac

SEQ ID NO: 31988 - DNA, 60 bp, Artificial
  Synthetic oligonucleotide
gatctttggagggagacactagggatgttcgagcagcaaggctcctgctaggttgtccca

SEQ ID NO: 31989 - DNA, 60 bp, Artificial
  Synthetic oligonucleotide
ggtagtgactcctctagtattagtggcagaaggtcatatgcctcgagtggaaccagagtg

SEQ ID NO: 31990 - DNA, 60 bp, Artificial
  Synthetic oligonucleotide
cctggtctagaagtggtaaatgaccctcttcatgattataagcaggctgtacaagatagc

SEQ ID NO: 31991 - DNA, 60 bp, Artificial
  Synthetic oligonucleotide
gggtcagcatatctgaggtcactgaaacaacaagcatcgtctcacaacctagaacacatt

SEQ ID NO: 31992 - DNA, 60 bp, Artificial
  Synthetic oligonucleotide
gggttcatatgagttaattcaagcagtgacggaaaatgcgagacgaaaatatcctccaga

SEQ ID NO: 31993 - DNA, 60 bp, Artificial
  Synthetic oligonucleotide
gttcctcaacggaatctcgctacgtttaacccggaggtcgggtatgtggcatttattgct

SEQ ID NO: 31994 - DNA, 60 bp, Artificial
  Synthetic oligonucleotide
cggcagtgaagacgttccaaagaggggacctgtcagcaaagagcacattgactgggccag

SEQ ID NO: 31995 - DNA, 60 bp, Artificial
  Synthetic oligonucleotide
aaacagagacggcagtgaagacgttccaaagaggggacctgtcagcaaagagcacattga

SEQ ID NO: 31996 - DNA, 60 bp, Artificial
  Synthetic oligonucleotide
gatggtgaagatctgggatgcagattatgggaaactgagaacggaggtacccagtcctga

SEQ ID NO: 31997 - DNA, 60 bp, Artificial
  Synthetic oligonucleotide
ttctgtgctcctatcttagagtgcgcctggaccagctgcacagggatgatccaacgtggc

SEQ ID NO: 31998 - DNA, 60 bp, Artificial
  Synthetic oligonucleotide
ccagtcctgaacagttactaggttaccagagggctgctctaaagtggagaaaggacacca

SEQ ID NO: 31999 - DNA, 60 bp, Artificial
  Synthetic oligonucleotide
ctgggatgcagattatgggaaactgagaacggaggtacccagtcctgaacagttactagg

SEQ ID NO: 32000 - DNA, 60 bp, Artificial
  Synthetic oligonucleotide
gcaaccgagtacagagtccctggttcaattgtagtaaacgtcaaggacatgctatccgac

SEQ ID NO: 32001 - DNA, 60 bp, Artificial
  Synthetic oligonucleotide
tggctgctgcaattgcaaccgagtacagagtccctggttcaattgtagtaaacgtcaagg

SEQ ID NO: 32002 - DNA, 60 bp, Artificial
  Synthetic oligonucleotide
gctatccgacatgattaggagaaggaacaaaatcctaaacagagacggcagtgaagacgt

SEQ ID NO: 32003 - DNA, 60 bp, Artificial
  Synthetic oligonucleotide
aacgtcaaggacatgctatccgacatgattaggagaaggaacaaaatcctaaacagagac

SEQ ID NO: 32004 - DNA, 59 bp, Artificial
  Synthetic oligonucleotide
aaaagcaggcttcgacattgagagcatggacatagttgcctcagagcatctgctgcatc

SEQ ID NO: 32005 - DNA, 60 bp, Artificial
  Synthetic oligonucleotide
ccttgttcaacattcaaaaagcaggcttcgacattgagagcatggacatagttgcctcag

SEQ ID NO: 32006 - DNA, 60 bp, Artificial
  Synthetic oligonucleotide
gactgacacccaggctggtaacccctgtgcccagaacatcgttgccttgttcaacattca

SEQ ID NO: 32007 - DNA, 60 bp, Artificial
  Synthetic oligonucleotide
ctacaagactgacacccaggctggtaacccctgtgcccagaacatcgttgccttgttcaa

SEQ ID NO: 32008 - DNA, 60 bp, Artificial
  Synthetic oligonucleotide
gctgagggttcaggtcatatcaagaacatactgaactacaagactgacacccaggctggt

SEQ ID NO: 32009 - DNA, 60 bp, Artificial
  Synthetic oligonucleotide
aatcctgatgatgcagctgagggttcaggtcatatcaagaacatactgaactacaagact

SEQ ID NO: 32010 - DNA, 60 bp, Artificial
  Synthetic oligonucleotide
ggagcttggcgtttgctttggggcaattccagtggccaatcctgatgatgcagctgaggg

SEQ ID NO: 32011 - DNA, 60 bp, Artificial
  Synthetic oligonucleotide
cgggaagaatgtcggagcttggcgtttgctttggggcaattccagtggccaatcctgatg

SEQ ID NO: 32012 - DNA, 60 bp, Artificial
  Synthetic oligonucleotide
ccaatcggatttacatgcaccctggagtcttgacagcgggaagaatgtcggagcttggcg

SEQ ID NO: 32013 - DNA, 60 bp, Artificial
  Synthetic oligonucleotide
ctgaaatggggaaagaaattacttgcactctttgctgatgatagcttcactgccaatcgg

SEQ ID NO: 32014 - DNA, 60 bp, Artificial
  Synthetic oligonucleotide
tctcaaagacacacgtgccgctttcgcccgaattgtctttgaactttgaccatgcagaac

SEQ ID NO: 32015 - DNA, 60 bp, Artificial
  Synthetic oligonucleotide
cgtgccgctttcgcccgaattgtctttgaactttgaccatgcagaaccagattgtcgcag

SEQ ID NO: 32016 - DNA, 60 bp, Artificial
  Synthetic oligonucleotide
aaaacctacagcgagaagcacaaacttaagtctgttttgactaattcagcttctttctgt

SEQ ID NO: 32017 - DNA, 60 bp, Artificial
  Synthetic oligonucleotide
cgagaagcacaaacttaagtctgttttgactaattcagcttctttctgtgaaaccatacc

SEQ ID NO: 32018 - DNA, 60 bp, Artificial
  Synthetic oligonucleotide
ttctttctgtgaaaccatacctgatttgtcaggatatgaggttagcatgaggcttgtttc

SEQ ID NO: 32019 - DNA, 60 bp, Artificial
  Synthetic oligonucleotide
ccatacctgatttgtcaggatatgaggttagcatgaggcttgtttcatctgaaagtgaga

SEQ ID NO: 32020 - DNA, 60 bp, Artificial
  Synthetic oligonucleotide
ggcttgtttcatctgaaagtgagaaagattcagtatatgcttctgccttggttgctgcaa

SEQ ID NO: 32021 - DNA, 60 bp, Artificial
  Synthetic oligonucleotide
gcttgtttcatctgaaagtgagaaagattcagtatatgcttctgccttggttgctgcaac

SEQ ID NO: 32022 - DNA, 60 bp, Artificial
  Synthetic oligonucleotide
gttgctgcaactaagttctgtgctcctatcttagagtgcgcctggaccagctgcacaggg

SEQ ID NO: 32023 - DNA, 60 bp, Artificial
  Synthetic oligonucleotide
gtgtgactgcagagatgttcccgacagtctcacagtttctctttgagctaggcaaggtgc

SEQ ID NO: 32024 - DNA, 60 bp, Artificial
  Synthetic oligonucleotide
tcaagcatgcctctgaaatggggaaagaaattacttgcactctttgctgatgatagcttc

SEQ ID NO: 32025 - DNA, 60 bp, Artificial
  Synthetic oligonucleotide
ttcaacccaccatggggtgatatcaacaaggcagggaagtcaggaattgctctagcagca

SEQ ID NO: 32026 - DNA, 60 bp, Artificial
  Synthetic oligonucleotide
ccaccatggggtgatatcaacaaggcagggaagtcaggaattgctctagcagcaaccggc

SEQ ID NO: 32027 - DNA, 60 bp, Artificial
  Synthetic oligonucleotide
agcacattgactgggccagagatcttgcacagggcaagttccttgttgttttcaacccac

SEQ ID NO: 32028 - DNA, 60 bp, Artificial
  Synthetic oligonucleotide
ctgggccagagatcttgcacagggcaagttccttgttgttttcaacccaccatggggtga

SEQ ID NO: 32029 - DNA, 60 bp, Artificial
  Synthetic oligonucleotide
catgagagctcaaggagcccagattgacactgtttttagcagctactactggctttggaa

SEQ ID NO: 32030 - DNA, 60 bp, Artificial
  Synthetic oligonucleotide
ggctttggaaggcaggtgtgactgcagagatgttcccgacagtctcacagtttctctttg

SEQ ID NO: 32031 - DNA, 60 bp, Artificial
  Synthetic oligonucleotide
ttgaccaagcacctgcagaaagcccttgaactagccaagcagtcaagtgccatgagagct

SEQ ID NO: 32032 - DNA, 60 bp, Artificial
  Synthetic oligonucleotide
ctgcagaaagcccttgaactagccaagcagtcaagtgccatgagagctcaaggagcccag

SEQ ID NO: 32033 - DNA, 58 bp, Artificial
  Synthetic oligonucleotide
ttagggctcggaagcaatgtaaggggcctgtgtggacttgtgcaacatcagatgatgc

SEQ ID NO: 32034 - DNA, 60 bp, Artificial
  Synthetic oligonucleotide
gaggaattagaatcactggattctatagtttacaacaagggagaaatagacatcatccca

SEQ ID NO: 32035 - DNA, 60 bp, Artificial
  Synthetic oligonucleotide
ttagggctcgaaagcaatgtaaggggcctgtgtggacttgtgctacatcagatgatgcaa

SEQ ID NO: 32036 - DNA, 60 bp, Artificial
  Synthetic oligonucleotide
cacatatctgaatttctctctgcatgctctagtgacttgtgggcaacagatgaggacctg

SEQ ID NO: 32037 - DNA, 60 bp, Artificial
  Synthetic oligonucleotide
ccaagctggaactttgttggtgacttgttcaggtcttcagactctgcagcaatggatgcc

SEQ ID NO: 32038 - DNA, 60 bp, Artificial
  Synthetic oligonucleotide
agatcatgatgtggatcacatatctgaatttctctctgcatgctctagtgacttatgggc

SEQ ID NO: 32039 - DNA, 60 bp, Artificial
  Synthetic oligonucleotide
gatcacatatctgaatttctctctgcatgctctagtgacttgtgggcaacagatgaggac

SEQ ID NO: 32040 - DNA, 60 bp, Artificial
  Synthetic oligonucleotide
ctagccatggtctcctccatccaaataaattggtcagtcacagaatctgtgtttcctccc

SEQ ID NO: 32041 - DNA, 60 bp, Artificial
  Synthetic oligonucleotide
ccagatcatgatgtggatcacatatctgaatttctctctgcatgctctagtgacttgtgg

SEQ ID NO: 32042 - DNA, 60 bp, Artificial
  Synthetic oligonucleotide
gaagactgagagagagttgctagccatggtctcctccatccaaataaattggtcagtcac

SEQ ID NO: 32043 - DNA, 60 bp, Artificial
  Synthetic oligonucleotide
gactgagagagagttgctagccatggtctcctccatccaaataaattggtcagtcacaga

SEQ ID NO: 32044 - DNA, 60 bp, Artificial
  Synthetic oligonucleotide
taagatcctggatggtcatcgggagcttgatattagagatgactttgtgatggatctctt

SEQ ID NO: 32045 - DNA, 60 bp, Artificial
  Synthetic oligonucleotide
gggcctggtttgtgacatgatgcaaggatcagatgatagtagtatgctaatcagcttccc

SEQ ID NO: 32046 - DNA, 60 bp, Artificial
  Synthetic oligonucleotide
tttgtgacatgatgcaaggatcagatgatagtagcatgctaatcagcttcccagctgatg

SEQ ID NO: 32047 - DNA, 60 bp, Artificial
  Synthetic oligonucleotide
cctggtttgtgacatgatgcaaggatcagatgatagtagtatgctaatcagcttcccagc

SEQ ID NO: 32048 - DNA, 50 bp, Artificial
  Synthetic oligonucleotide
cggaagcaatgtaaggggcctgtgtggacttgtgcaacatcagatgatgc

SEQ ID NO: 32049 - DNA, 60 bp, Artificial
  Synthetic oligonucleotide
catcagatgatgcaaggaagtggaaccaaggccattttgttacaaagtttgccctcatgc

SEQ ID NO: 32050 - DNA, 56 bp, Artificial
  Synthetic oligonucleotide
gatgatgcaaggaagtggaaccaaggccattttgttacaaagtttgccctcatgct

SEQ ID NO: 32051 - DNA, 60 bp, Artificial
  Synthetic oligonucleotide
gatgatgcaaggaagtggaaccaaggccattttgttacaaagtttgccctcatgctatgt

SEQ ID NO: 32052 - DNA, 60 bp, Artificial
  Synthetic oligonucleotide
gcaggactatccagagaatagcaggtgagccctttattcttaagaagaaggatgggtcta

SEQ ID NO: 32053 - DNA, 60 bp, Artificial
  Synthetic oligonucleotide
gatgggtctatatcctggggtggcatgttcaatcctttttcagggcgtccactgcttgat

SEQ ID NO: 32054 - DNA, 60 bp, Artificial
  Synthetic oligonucleotide
ctgttaatgcgtgagtttcccatgatgaatgatggttttgatcatttgagccctgacatg

SEQ ID NO: 32055 - DNA, 60 bp, Artificial
  Synthetic oligonucleotide
ctgttaatgcgtgagtttcccatgatgaatgacgggtttgatcatttgagccctgacatg

SEQ ID NO: 32056 - DNA, 60 bp, Artificial
  Synthetic oligonucleotide
ctgttaatgcgtgagtttcccatgatgaatgacgggtttgatcatctgagccctgacatg

SEQ ID NO: 32057 - DNA, 60 bp, Artificial
  Synthetic oligonucleotide
ctcttaatgcgtgagtttcccatgatgaatgacgggtttgatcatttgagccctgacatg

SEQ ID NO: 32058 - DNA, 60 bp, Artificial
  Synthetic oligonucleotide
ctcttaatgcgtgagtttcccatgatgaatgacgggtttgatcatctgagccctgacatg

SEQ ID NO: 32059 - DNA, 60 bp, Artificial
  Synthetic oligonucleotide
cagactgttaatgcgtgagtttcccatgatgaatgacgggtttgatcatttgagccctga

SEQ ID NO: 32060 - DNA, 60 bp, Artificial
  Synthetic oligonucleotide
acagactgttaatgcgtgagtttcccatgatgaatgacgggtttgatcatttgagccctg

SEQ ID NO: 32061 - DNA, 60 bp, Artificial
  Synthetic oligonucleotide
caagactggttttgttagagtgccaatcaagcattatgactgtacaatgctaactctggc

SEQ ID NO: 32062 - DNA, 60 bp, Artificial
  Synthetic oligonucleotide
caaaactggttttgttagagtgccaatcaagcattatgactgtacaatgctaactctggc

SEQ ID NO: 32063 - DNA, 58 bp, Artificial
  Synthetic oligonucleotide
tcagggcccggaagcaatgtaaggggcctgtgtggacttgtgcaacatcagatgatgc

SEQ ID NO: 32064 - DNA, 58 bp, Artificial
  Synthetic oligonucleotide
tcagggctcggaagcaatgtaaggggcctgtgtggacttgtgcaacatcagatgatgc

SEQ ID NO: 32065 - DNA, 60 bp, Artificial
  Synthetic oligonucleotide
gggctcggaagcaatgtaaggggcctgtgtggacttgtgcgacatcagatgatgcaagga

SEQ ID NO: 32066 - DNA, 60 bp, Artificial
  Synthetic oligonucleotide
tcagggcccggaagcaatgtaaggggcctgtgtggacttgtgcaacatcagatgatgcaa

SEQ ID NO: 32067 - DNA, 60 bp, Artificial
  Synthetic oligonucleotide
ttagggctcggaagcaatgtaaggggcctgtgtggacttgtgcaacatcagatgatgcaa

SEQ ID NO: 32068 - DNA, 60 bp, Artificial
  Synthetic oligonucleotide
gacatgggggtcacaaacaaccaggattattcctctaaatctagcaggggggccagatat

SEQ ID NO: 32069 - DNA, 60 bp, Artificial
  Synthetic oligonucleotide
ggtccatacagtgagagctataagctacagctaatctacagagtcctaagctcagtgtca

SEQ ID NO: 32070 - DNA, 60 bp, Artificial
  Synthetic oligonucleotide
gggtccatacagtgagagctataagctacagctaatctacagagtcctaagctcagtgtc

SEQ ID NO: 32071 - DNA, 60 bp, Artificial
  Synthetic oligonucleotide
tgccagatattggatgcattcatttaggatgcaaggacctagcaagccatttggatgccc

SEQ ID NO: 32072 - DNA, 60 bp, Artificial
  Synthetic oligonucleotide
agccagatattggatgcattcatttaggatgcaaggacctagcaagccatttggatgccc

SEQ ID NO: 32073 - DNA, 60 bp, Artificial
  Synthetic oligonucleotide
gggctaggaagcaatgtaaggggcctgtgtggacttgtgcgacatcagatgatgcaagga

SEQ ID NO: 32074 - DNA, 60 bp, Artificial
  Synthetic oligonucleotide
gggctcgaaagcaatgtaaggggcctgtgtggacttgtgctacatcagatgatgcaagga

SEQ ID NO: 32075 - DNA, 60 bp, Artificial
  Synthetic oligonucleotide
gggtccatacagtgagagctataagctacagctaatctacagagtcctaagctcagtatc

SEQ ID NO: 32076 - DNA, 60 bp, Artificial
  Synthetic oligonucleotide
ggaatttctttgctagaatggaaagcaagcctagaacggtcagaataacaggagctcctg

SEQ ID NO: 32077 - DNA, 60 bp, Artificial
  Synthetic oligonucleotide
tagaatcactggattctatagtttacaacaagggagaaatagacatcatcccaagagtta

SEQ ID NO: 32078 - DNA, 60 bp, Artificial
  Synthetic oligonucleotide
tgaggaattagaatcactggattctatagtttacaacaagggagaaatagacatcatccc

SEQ ID NO: 32079 - DNA, 60 bp, Artificial
  Synthetic oligonucleotide
ctgagggaggtgggtcattctccttagctgcaatgattcagcaagctcagtgcactctcc

SEQ ID NO: 32080 - DNA, 59 bp, Artificial
  Synthetic oligonucleotide
ggagccagatattggatgcattcatttaggatgcaaggacctagcaagccatttggatg

SEQ ID NO: 32081 - DNA, 60 bp, Artificial
  Synthetic oligonucleotide
gatggatctatatcctggggtggcatgttcaatcctttttcagggcgtccactgcttgat

SEQ ID NO: 32082 - DNA, 60 bp, Artificial
  Synthetic oligonucleotide
gaattctaccctttggttattgacatgcatagagtgctaaaggacggaatggatgtcaac

SEQ ID NO: 32083 - DNA, 57 bp, Artificial
  Synthetic oligonucleotide
gaattctaccctttggttattgacatgcatagagtgctaaaggacggaatggatgtc

SEQ ID NO: 32084 - DNA, 60 bp, Artificial
  Synthetic oligonucleotide
cgtcatgccacttgctgaagtgaaaggctgcacttggactgaagggctgactatgtatct

SEQ ID NO: 32085 - DNA, 60 bp, Artificial
  Synthetic oligonucleotide
ctatgtatctgggatttgcacctggtgcagaaatgttcctggaaacatttgaattctacc

SEQ ID NO: 32086 - DNA, 51 bp, Artificial
  Synthetic oligonucleotide
ttctcaccagcagccaggaccttccttgcccaatttggtatcaatatctaa

SEQ ID NO: 32087 - DNA, 60 bp, Artificial
  Synthetic oligonucleotide
atgctgttggccaattgagctgggccaaatctggattctcaccagcagccaggaccttcc

SEQ ID NO: 32088 - DNA, 60 bp, Artificial
  Synthetic oligonucleotide
ttcgcgcagcttttaatgctgttggccaattgagctgggccaaatctggattctcaccag

SEQ ID NO: 32089 - DNA, 60 bp, Artificial
  Synthetic oligonucleotide
gctaggaggtagcttacctcttattgcttcagttgatagctttgagatgatcagtgttgt

SEQ ID NO: 32090 - DNA, 60 bp, Artificial
  Synthetic oligonucleotide
aagacaacactgatcatctcaaagctatcaactgaagcaataagaggtaagctacctccc

SEQ ID NO: 32091 - DNA, 60 bp, Artificial
  Synthetic oligonucleotide
ctaggaggtagcttacctcttattgcttcagttgatagctttgagatgatcagtgttgtc

SEQ ID NO: 32092 - DNA, 60 bp, Artificial
  Synthetic oligonucleotide
gggaggtagcttacctcttattgcttcagttgatagctttgagatgatcagtgttgtctt

SEQ ID NO: 32093 - DNA, 60 bp, Artificial
  Synthetic oligonucleotide
ggaggtagcttacctcttattgcttcagttgatagctttgagatgatcagtgttgtctta

SEQ ID NO: 32094 - DNA, 60 bp, Artificial
  Synthetic oligonucleotide
ctgggaggtagcttacctcttattgcttcagttgatagctttgagatgatcagtgttgtc

SEQ ID NO: 32095 - DNA, 60 bp, Artificial
  Synthetic oligonucleotide
atagccaagacaacactgatcatctcaaagctatcaactgaagcaataagaggtaagcta

SEQ ID NO: 32096 - DNA, 60 bp, Artificial
  Synthetic oligonucleotide
tagccaagacaacactgatcatctcaaagctatcaactgaagcaataagaggtaagctac

SEQ ID NO: 32097 - DNA, 60 bp, Artificial
  Synthetic oligonucleotide
cataatgctaggaggtagcttacctcttattgcttcagttgatagctttgagatgatcag

SEQ ID NO: 32098 - DNA, 60 bp, Artificial
  Synthetic oligonucleotide
caagacaacactgatcatctcaaagctatcaactgaagcaataagaggtaagctacctcc

SEQ ID NO: 32099 - DNA, 60 bp, Artificial
  Synthetic oligonucleotide
aagacaacactgatcatctcaaagctatcaactgaagcaataagaggtaagctacctcct

SEQ ID NO: 32100 - DNA, 60 bp, Artificial
  Synthetic oligonucleotide
ggtagcttacctcttattgcttcagttgatagctttgagatgatcagtgttgtcttggct

SEQ ID NO: 32101 - DNA, 60 bp, Artificial
  Synthetic oligonucleotide
gccaagacaacactgatcatctcaaagctatcaactgaagcaataagaggtaagctacct

SEQ ID NO: 32102 - DNA, 60 bp, Artificial
  Synthetic oligonucleotide
gaggctgtatgccctacaggaagattctgaggtggagccgatagccataatttgtgatgg

SEQ ID NO: 32103 - DNA, 60 bp, Artificial
  Synthetic oligonucleotide
tacacttggaggtgttaaccttgcagtacttaacacgcatttcccgggaacccagtccat

SEQ ID NO: 32104 - DNA, 60 bp, Artificial
  Synthetic oligonucleotide
gttaaccttgcagtacttaacacgcatttcccgggaacccagtccattccactgcctgac

SEQ ID NO: 32105 - DNA, 60 bp, Artificial
  Synthetic oligonucleotide
tacctactgcaaacctaccctgtacatgattgtaccaatccatgcatgtaatatgatgaa

SEQ ID NO: 32106 - DNA, 60 bp, Artificial
  Synthetic oligonucleotide
cgcaatgggaacgttgaagtctctagatcgtggtctcaatctaatgagaaagaagctcta

SEQ ID NO: 32107 - DNA, 60 bp, Artificial
  Synthetic oligonucleotide
ctatgtattgtgaagaatgcgatatgtatcatgataggtctggtattaaatggaacggtg

SEQ ID NO: 32108 - DNA, 60 bp, Artificial
  Synthetic oligonucleotide
gctgtgtggtttagtttatcacccaattacagagtgtggtacccattgcgtctgtggcgc

SEQ ID NO: 32109 - DNA, 65 bp, Artificial
  Synthetic oligonucleotide
ctgcttagtatcataagtaaaacatacatatgctatctgttgatgcctatatttatcccaatcgc

SEQ ID NO: 32110 - DNA, 60 bp, Artificial
  Synthetic oligonucleotide
tatatttatcccaatcgcttatatatatggcctaatttataacaaatcatgcaaaaaatg

SEQ ID NO: 32111 - DNA, 60 bp, Artificial
  Synthetic oligonucleotide
agcctagaccagacttgcgaacatttgaaggtttcttgcggtccaaagtccatacaattc

SEQ ID NO: 32112 - DNA, 60 bp, Artificial
  Synthetic oligonucleotide
agcacgacatatattagcctagaccagacttgcgaacatttgaaggtttcttgcggtcca

SEQ ID NO: 32113 - DNA, 60 bp, Artificial
  Synthetic oligonucleotide
gacttgacactccatactgagtcatacgtttgcagtgctgattgcactataggtgtggac

SEQ ID NO: 32114 - DNA, 60 bp, Artificial
  Synthetic oligonucleotide
ctataggtgtggacaaagaaacagcccaagttaggttgcagactgatacaacgaatcatt

SEQ ID NO: 32115 - DNA, 60 bp, Artificial
  Synthetic oligonucleotide
gaaacaaacaggaacattaccattcaaaatctgtaactcaaaaatcgatgccactctgac

SEQ ID NO: 32116 - DNA, 60 bp, Artificial
  Synthetic oligonucleotide
ggccagttgtccagttactagtccttgcactttgttccatgataggatattgatcactcc

SEQ ID NO: 32117 - DNA, 60 bp, Artificial
  Synthetic oligonucleotide
acttatagtctgcccagggttgtagcagtccagaatcatgagattaggataggacagatc

SEQ ID NO: 32118 - DNA, 60 bp, Artificial
  Synthetic oligonucleotide
acgaatctatttgaagtacaattcaagactgtggaaacttatagtctgcccagggttgta

SEQ ID NO: 32119 - DNA, 60 bp, Artificial
  Synthetic oligonucleotide
aactatgcttgacttttgcagacaagacctactgtacagaattaaatcctgtaacaccta

SEQ ID NO: 32120 - DNA, 60 bp, Artificial
  Synthetic oligonucleotide
tcatttctgccttagccccaggtgtgccactgttagattccctatccatccaaagcatat

SEQ ID NO: 32121 - DNA, 60 bp, Artificial
  Synthetic oligonucleotide
agttatcgttcaagcaaaaggaacagatttcagtgaatgtattgatgcagataaaataaa

SEQ ID NO: 32122 - DNA, 60 bp, Artificial
  Synthetic oligonucleotide
acatacaattgcctaatacagtacaaatctaagtggattatgaacttcttgataacttat

SEQ ID NO: 32123 - DNA, 60 bp, Artificial
  Synthetic oligonucleotide
gggcttgagtgctatctctatactagatgttcctataattgcaagcatccctgaggatat

SEQ ID NO: 32124 - DNA, 60 bp, Artificial
  Synthetic oligonucleotide
gcaaaagaaagaaccatactctaatattgctgctcaattgaagggcttgagtgctatctc

SEQ ID NO: 32125 - DNA, 60 bp, Artificial
  Synthetic oligonucleotide
gacatatgactcaataatagcctgtggtgaagggtctagcccgaatatctacaaaatacc

SEQ ID NO: 32126 - DNA, 60 bp, Artificial
  Synthetic oligonucleotide
ctgtaaggatgtaaagggtgttgtgtgtttatcgcctagatctggtgtgacatatgactc

SEQ ID NO: 32127 - DNA, 60 bp, Artificial
  Synthetic oligonucleotide
acctggagagtttaccttagatcacatgtttttgaggcatgcattttgtacccaaatcag

SEQ ID NO: 32128 - DNA, 60 bp, Artificial
  Synthetic oligonucleotide
ccagagatcataccactctcagttgactgttgagtatgctatgttaaccagatattgtga

SEQ ID NO: 32129 - DNA, 60 bp, Artificial
  Synthetic oligonucleotide
cgtaagaagctgccgtatgaaagatgctgggcactgcaatgtcactacaaacagatggcc

SEQ ID NO: 32130 - DNA, 60 bp, Artificial
  Synthetic oligonucleotide
taaacaaagtgatggcgtaagaagctgccgtatgaaagatgctgggcactgcaatgtcac

SEQ ID NO: 32131 - DNA, 60 bp, Artificial
  Synthetic oligonucleotide
cgataaggaagtggctagtctcagattggcatgattgcagacccagaaaagtcgttgggg

SEQ ID NO: 32132 - DNA, 60 bp, Artificial
  Synthetic oligonucleotide
caaacaacgtggcgataaggaagtggctagtctcagattggcatgattgcagacccagaa

SEQ ID NO: 32133 - DNA, 60 bp, Artificial
  Synthetic oligonucleotide
ggccagatataccaagaatagtactggagtgttctcaaacaacgtggcgataaggaagtg

SEQ ID NO: 32134 - DNA, 60 bp, Artificial
  Synthetic oligonucleotide
tttttgggtcctgtcaagatctaataaaggaagaactaacagtgtataggaaagagacag

SEQ ID NO: 32135 - DNA, 60 bp, Artificial
  Synthetic oligonucleotide
ccccaggtgtgccactgttagattccctatccatccaaagcatataagcaactgcgattg

SEQ ID NO: 32136 - DNA, 60 bp, Artificial
  Synthetic oligonucleotide
gcagtacaggaaggccataacgcaaaagctccagaatagcttgtcaatatttaagtatgc

SEQ ID NO: 32137 - DNA, 60 bp, Artificial
  Synthetic oligonucleotide
aactgcagaaggaattgaaagtgcctatatagagtcagaaataccagcattagcagggac

SEQ ID NO: 32138 - DNA, 60 bp, Artificial
  Synthetic oligonucleotide
cagaaataccagcattagcagggacttctatcggatttaaaataaataccaaggagggga

SEQ ID NO: 32139 - DNA, 60 bp, Artificial
  Synthetic oligonucleotide
gatgagttgtgcactggcccttgccctgttaatgtcccacattcagacgggtggctaaca

SEQ ID NO: 32140 - DNA, 54 bp, Artificial
  Synthetic oligonucleotide
ttcttggggttgtgaggaattcgggtgtttagcaattagtgatggatgcgtttt

SEQ ID NO: 32141 - DNA, 60 bp, Artificial
  Synthetic oligonucleotide
ggcagtgaaacagtttatgatttcaaatcagctacgtccaacttgggtgaaaagaactgt

SEQ ID NO: 32142 - DNA, 60 bp, Artificial
  Synthetic oligonucleotide
gaaatgaaaataagataataagcaaaaggatttagttaacaagaggggtatatatttagt

SEQ ID NO: 32143 - DNA, 60 bp, Artificial
  Synthetic oligonucleotide
cggtgatttcacaaataagtgtggccaatgtacatgcggacagtacgaagatgcatccgg

SEQ ID NO: 32144 - DNA, 60 bp, Artificial
  Synthetic oligonucleotide
cactctgactttagtagaagccaaacctattttagagctagcccctgtcgatcaaactgc

SEQ ID NO: 32145 - DNA, 60 bp, Artificial
  Synthetic oligonucleotide
gttttaaactgaaagacactttacaacggcatgaagatgcatacaaaagagaaatgaaaa

SEQ ID NO: 32146 - DNA, 60 bp, Artificial
  Synthetic oligonucleotide
agacttgaatttggcccttacatctctacaccatgccttcagagggacctcctcgtctta

SEQ ID NO: 32147 - DNA, 60 bp, Artificial
  Synthetic oligonucleotide
ctaacctttgtcacacctataaatgcaatgatggttggagggagcaaagagacctttgaa

SEQ ID NO: 32148 - DNA, 59 bp, Artificial
  Synthetic oligonucleotide
tggagggagcaaagagacctttgaacttgaggagctccctgatgacatgctagaaatgg

SEQ ID NO: 32149 - DNA, 60 bp, Artificial
  Synthetic oligonucleotide
ctgcagatgtgtaaaacatggagataaatgtagcagctccaactgggactttgcctctga

SEQ ID NO: 32150 - DNA, 60 bp, Artificial
  Synthetic oligonucleotide
tgagcaacttcaaaaaggatgagttttgggatgagttggtatatgtgcctgaccctacta

SEQ ID NO: 32151 - DNA, 60 bp, Artificial
  Synthetic oligonucleotide
gcgtctgtggcgcaagatatgacacatcagataggatgaaactccatagagcatcaggtc

SEQ ID NO: 32152 - DNA, 60 bp, Artificial
  Synthetic oligonucleotide
tatacatctaaaatcagagagaagttccccgggaatgcattactaaaggcaataattgac

SEQ ID NO: 32153 - DNA, 60 bp, Artificial
  Synthetic oligonucleotide
ccatagagcatcaggtctttgccctgggtacaaaagtcttagagctgctagagttatgtg

SEQ ID NO: 32154 - DNA, 60 bp, Artificial
  Synthetic oligonucleotide
ctagagttatgtgtaagtcaaaaggaccagcctctatactgtcaataatcactgctgttt

SEQ ID NO: 32155 - DNA, 60 bp, Artificial
  Synthetic oligonucleotide
cccttacatctctacaccatgccttcagagggacctcctcgtcttacatagcaggattgc

SEQ ID NO: 32156 - DNA, 60 bp, Artificial
  Synthetic oligonucleotide
aaaacaggagtgtaccaatccaattcagaaccatctaactactgtgtgtcagatagccac

SEQ ID NO: 32157 - DNA, 60 bp, Artificial
  Synthetic oligonucleotide
tagctgatattacccagatggttcccgaaagttcttgtaatatggataaccaccagtccc

SEQ ID NO: 32158 - DNA, 60 bp, Artificial
  Synthetic oligonucleotide
tatgacatgaagatagagtgcccgcatacagtcaactttggtgaaaacagtgtgataggc

SEQ ID NO: 32159 - DNA, 60 bp, Artificial
  Synthetic oligonucleotide
gccgagtgttgcacactcaattgctgtagagctttgtgttcctgggtttcatggttgggc

SEQ ID NO: 32160 - DNA, 60 bp, Artificial
  Synthetic oligonucleotide
tcactgagaaatgtttatgacatgaagatagagtgcccgcatacagtcaactttggtgaa

SEQ ID NO: 32161 - DNA, 60 bp, Artificial
  Synthetic oligonucleotide
agttacaccacaaaactttacccctggttgttacaggacattaaaccttttcaggtataa

SEQ ID NO: 32162 - DNA, 60 bp, Artificial
  Synthetic oligonucleotide
cctggctgagaatccatgtaaaattggcctccaagtatctgccattgaaggtgcatgggg

SEQ ID NO: 32163 - DNA, 60 bp, Artificial
  Synthetic oligonucleotide
tcttcatttagtattcttgcaggttctgtggagccaaagcatgtcttccagccaggatta

SEQ ID NO: 32164 - DNA, 60 bp, Artificial
  Synthetic oligonucleotide
agcactacaacattgagtttgacagcattttccagaaattcccgacatattcttcattta

SEQ ID NO: 32165 - DNA, 60 bp, Artificial
  Synthetic oligonucleotide
cctgggtttcatggttgggcaactgcagcactgctaataacattctgctttggctgggtt

SEQ ID NO: 32166 - DNA, 60 bp, Artificial
  Synthetic oligonucleotide
ggcaactattgattcattccaagcatttaatacaagtactatacatttcacagatgagcg

SEQ ID NO: 32167 - DNA, 60 bp, Artificial
  Synthetic oligonucleotide
ggcccaacagatggaaaggttcctcatagttccaagcactacaacattgagtttgacagc

SEQ ID NO: 32168 - DNA, 60 bp, Artificial
  Synthetic oligonucleotide
ccccgcgtgtgaatatggtggtaatatggtttcaggctacaggaaagtgatggcaactat

SEQ ID NO: 32169 - DNA, 60 bp, Artificial
  Synthetic oligonucleotide
catatgcatcataggagggaattcagcacctgtttatgccccatcacctgatgactttag

SEQ ID NO: 32170 - DNA, 60 bp, Artificial
  Synthetic oligonucleotide
ccccatcacctgatgactttagatccatggaggcattttcaggtattttcaggtcgccgc

SEQ ID NO: 32171 - DNA, 60 bp, Artificial
  Synthetic oligonucleotide
tgggatgcttcgtgatcacatcaatatattagtaacaagggacattgactttgacaacct

SEQ ID NO: 32172 - DNA, 60 bp, Artificial
  Synthetic oligonucleotide
atcattgggacagtctctaaattttctcaaggtgatactctattgttcttgggccctatg

SEQ ID NO: 32173 - DNA, 60 bp, Artificial
  Synthetic oligonucleotide
gtctctaaattttctcaaggtgatactctattgttcttgggccctatggaaggaggcggg

SEQ ID NO: 32174 - DNA, 60 bp, Artificial
  Synthetic oligonucleotide
cttgggccctatggaaggaggcgggatcatctttaaacattggtgtacatccacctgcca

SEQ ID NO: 32175 - DNA, 60 bp, Artificial
  Synthetic oligonucleotide
gaggcgggatcatctttaaacattggtgtacatccacctgccaatttggggaccctggtg

SEQ ID NO: 32176 - DNA, 60 bp, Artificial
  Synthetic oligonucleotide
attcagctgccctgagtttccagggagttttagaaagaaatgcaattttgcaacaacccc

SEQ ID NO: 32177 - DNA, 60 bp, Artificial
  Synthetic oligonucleotide
aaactttccaactaaataacatagattgtttctctgctgagtgtcttgacatcttgcgga

SEQ ID NO: 32178 - DNA, 60 bp, Artificial
  Synthetic oligonucleotide
ggtgctacatctttacaatgtggatcctcttactagtctttgaatctatcttgtgggctg

SEQ ID NO: 32179 - DNA, 60 bp, Artificial
  Synthetic oligonucleotide
aattcagggttattacatatgcatcataggagggaattcagcacctgtttatgccccatc

SEQ ID NO: 32180 - DNA, 60 bp, Artificial
  Synthetic oligonucleotide
caactcatttggaggaaaaaggctgagcaggcacaagcaagccagaattcatttgaaact

SEQ ID NO: 32181 - DNA, 60 bp, Artificial
  Synthetic oligonucleotide
agcataaaatggttgaggagtcttacaaaaatcggaagtctatcatttgttatgatctat

SEQ ID NO: 32182 - DNA, 60 bp, Artificial
  Synthetic oligonucleotide
tctatgagagaacttattgcatgtcgggcatactcacagaagggcggtgcttcgtaccat

SEQ ID NO: 32183 - DNA, 60 bp, Artificial
  Synthetic oligonucleotide
gggaacttattgcatgtcgggcatactcacagaagggcggtgcttcgtaccagaccagag

SEQ ID NO: 32184 - DNA, 60 bp, Artificial
  Synthetic oligonucleotide
attgcatgtcgggcatactcacagaagggcggtgcttcgtaccataccagagtgtagtga

SEQ ID NO: 32185 - DNA, 60 bp, Artificial
  Synthetic oligonucleotide
gctgtggaagggaacacctacaaattatttgaagaggtaaagaagtcatttgccctaaat

SEQ ID NO: 32186 - DNA, 60 bp, Artificial
  Synthetic oligonucleotide
gtctttgaatctatcttgtgggctgcaagtgcttctgatgtccctttatcaactgactgg

SEQ ID NO: 32187 - DNA, 60 bp, Artificial
  Synthetic oligonucleotide
cttgtgggctgcaagtgcttctgatgtccctttatcaactgactggaatgacaatgcaca

SEQ ID NO: 32188 - DNA, 60 bp, Artificial
  Synthetic oligonucleotide
atacatacaggcggaaactcacaaaccctgtggatacctctcaggcagtggacttgcata

SEQ ID NO: 32189 - DNA, 51 bp, Artificial
  Synthetic oligonucleotide
gcttagcatcttatgccctgttaggaagcacaaaaagtcatagataaactg

SEQ ID NO: 32190 - DNA, 60 bp, Artificial
  Synthetic oligonucleotide
gggttggatgtccatgccttagggcactggtttgatggccgtttaaatctcaagacatcc

SEQ ID NO: 32191 - DNA, 60 bp, Artificial
  Synthetic oligonucleotide
cctgttttctctgctgccgagtgttgcacactcaattgctgtagagctttgtgttcctgg

SEQ ID NO: 32192 - DNA, 60 bp, Artificial
  Synthetic oligonucleotide
agtatgaaacaagttggggctgtaatccccctgactgccctggtgtagggactgggtgca

SEQ ID NO: 32193 - DNA, 60 bp, Artificial
  Synthetic oligonucleotide
gtgaagccttttctgaaggggggatcttcaatatcacatctccgatgtgtcttgtgtcaa

SEQ ID NO: 32194 - DNA, 60 bp, Artificial
  Synthetic oligonucleotide
actgggtgcactgcatgtggtctttatattgatcagttaaggccagtgggaaatgcttac

SEQ ID NO: 32195 - DNA, 60 bp, Artificial
  Synthetic oligonucleotide
ccaaagttgaatcatacaaaatgcacaaagtctgcaattccattggtctggactggtcga

SEQ ID NO: 32196 - DNA, 60 bp, Artificial
  Synthetic oligonucleotide
cttgcaggttctgtggagccaaagcatgtcttccagccaggattatttccaaagttgaat

SEQ ID NO: 32197 - DNA, 59 bp, Artificial
  Synthetic oligonucleotide
cacagacaggattgcaggcaaatgcaccacaccttgataaagtcaatggcatttcagaa

SEQ ID NO: 32198 - DNA, 60 bp, Artificial
  Synthetic oligonucleotide
ggggcacctgagtgtggtataaagtgttggtttgtaaaatcaggagaatgggtagcaggg

SEQ ID NO: 32199 - DNA, 60 bp, Artificial
  Synthetic oligonucleotide
cctgccaatttggggaccctggtgatattatgagtcccaaggataagggattcagctgcc

SEQ ID NO: 32200 - DNA, 60 bp, Artificial
  Synthetic oligonucleotide
ggtgcatggggatctggggttggctttacattaacatgtcaagtctccctaacggagtgt

SEQ ID NO: 32201 - DNA, 60 bp, Artificial
  Synthetic oligonucleotide
ctccctaacggagtgttcaacattcctgacctcaattaaagcatgtgataaggcaatttg

SEQ ID NO: 32202 - DNA, 60 bp, Artificial
  Synthetic oligonucleotide
aggcaatttgttatggtgcacagagtgtaacacttgtgagagggcaaaacacagttaaaa

SEQ ID NO: 32203 - DNA, 60 bp, Artificial
  Synthetic oligonucleotide
aacaacccccgcgtgtgaatatggtggtaatatggtttcaggctacaggaaagtgatggc

SEQ ID NO: 32204 - DNA, 60 bp, Artificial
  Synthetic oligonucleotide
aaataaattaaaggctgtcctaaggaagattaaagaggagtttgaaaaaacaaaaggctc

SEQ ID NO: 32205 - DNA, 60 bp, Artificial
  Synthetic oligonucleotide
ttaaccattctcaagtttattgcaaatatctttcatacaagcaatcaggaaaataaatta

SEQ ID NO: 32206 - DNA, 60 bp, Artificial
  Synthetic oligonucleotide
ggaatgtatatgacatgaagattgaatgcccccatacagtcaactttgggaaaaacagtg

SEQ ID NO: 32207 - DNA, 60 bp, Artificial
  Synthetic oligonucleotide
aaacagtgtggtcgggtatgtggagctaccgcctatgccaatcgctgacatcactcagat

SEQ ID NO: 32208 - DNA, 60 bp, Artificial
  Synthetic oligonucleotide
gtggtcgggtatgtggagctaccgcctatgccaatcgctgacatcactcagatgatgcca

SEQ ID NO: 32209 - DNA, 60 bp, Artificial
  Synthetic oligonucleotide
tagctgaacagaccataggtgtagacgtgcatgctttggggcattggtttgacggccgct

SEQ ID NO: 32210 - DNA, 60 bp, Artificial
  Synthetic oligonucleotide
tgtgagacatataaagagttgaaggcacatggagtatcatgtcctcaatctcaatgccca

SEQ ID NO: 32211 - DNA, 60 bp, Artificial
  Synthetic oligonucleotide
ggtttgcgatgtgtgtaaatatgaatgtgagacatataaagagttgaaggcacatggagt

SEQ ID NO: 32212 - DNA, 60 bp, Artificial
  Synthetic oligonucleotide
gaatttgagaagactaaaggctccatggtttgcgatgtgtgtaaatatgaatgtgagaca

SEQ ID NO: 32213 - DNA, 63 bp, Artificial
  Synthetic oligonucleotide
cctgcagtcacccttgtcatattaacaattttaaagtttattgcaaacatcttccatacaagc

SEQ ID NO: 32214 - DNA, 60 bp, Artificial
  Synthetic oligonucleotide
ggaagctcacaaacccacttgaggagactcaagcagtagatcttcatattgagttagctg

SEQ ID NO: 32215 - DNA, 60 bp, Artificial
  Synthetic oligonucleotide
atcttcatattgagttagctgaacagaccataggtgtagacgtgcatgctttggggcatt

SEQ ID NO: 32216 - DNA, 60 bp, Artificial
  Synthetic oligonucleotide
agcccactacaaagtatgccaagtcactcatagatttcgggatgatttaaagaaaacagt

SEQ ID NO: 32217 - DNA, 60 bp, Artificial
  Synthetic oligonucleotide
aggcacatggagtatcatgtcctcaatctcaatgcccatattgcttcacccactgtgagc

SEQ ID NO: 32218 - DNA, 60 bp, Artificial
  Synthetic oligonucleotide
accctttatctaattgtgcctgtgcatgcctgtaacatgatgaagagctgcctaatagca

SEQ ID NO: 32219 - DNA, 52 bp, Artificial
  Synthetic oligonucleotide
tgaccaagcacagtcaagccaaacctcctttgagacagtttcttccgaggtg

SEQ ID NO: 32220 - DNA, 60 bp, Artificial
  Synthetic oligonucleotide
actgtatgtcaggggtccttctagaaggaaaatgctttgtaccagaccagagtgttgtga

SEQ ID NO: 32221 - DNA, 60 bp, Artificial
  Synthetic oligonucleotide
gtgtcctcacaggatctacagatgcccgtcatgtctttagcccaggtttctttccacaac

SEQ ID NO: 32222 - DNA, 60 bp, Artificial
  Synthetic oligonucleotide
gggagggaattcagcacccatatatgtgccaacccttgatgacttcaggtcaatggaggc

SEQ ID NO: 32223 - DNA, 60 bp, Artificial
  Synthetic oligonucleotide
cagatgcccgtcatgtctttagcccaggtttctttccacaactaaaccagacaaggtgtg

SEQ ID NO: 32224 - DNA, 60 bp, Artificial
  Synthetic oligonucleotide
atgtctttagcccaggtttctttccacaactaaaccagacaaggtgtgataaaactgcca

SEQ ID NO: 32225 - DNA, 60 bp, Artificial
  Synthetic oligonucleotide
tacacccttgcactgtcttctgtgttttgtccggtcctggtgcgtcatgtgaagcctttt

SEQ ID NO: 32226 - DNA, 60 bp, Artificial
  Synthetic oligonucleotide
acggttgggctacagctgctttgcttgtaacattttgctttggctgggttttaatacctg

SEQ ID NO: 32227 - DNA, 60 bp, Artificial
  Synthetic oligonucleotide
tgaatctgttcagatataagagtcgatgttacatcttcacaatgtgggtatttttgctga

SEQ ID NO: 32228 - DNA, 60 bp, Artificial
  Synthetic oligonucleotide
ttgctgatcctggaatccattttatgggctgcaagtgcttctgaaacaccctcaacccct

SEQ ID NO: 32229 - DNA, 60 bp, Artificial
  Synthetic oligonucleotide
aaagaaaacagtgaccccccagaattttacaccaggctgttatcgtaccttgaatctgtt

SEQ ID NO: 32230 - DNA, 60 bp, Artificial
  Synthetic oligonucleotide
caatcaacaatgaaggctgaagagataacacctgggcggtttcgaacaattgcttgtggc

SEQ ID NO: 32231 - DNA, 60 bp, Artificial
  Synthetic oligonucleotide
gccgactgcacaatcaacaatgaaggctgaagagataacacctgggcggtttcgaacaat

SEQ ID NO: 32232 - DNA, 60 bp, Artificial
  Synthetic oligonucleotide
tgccaactgcacaatcaacaatgaaggctgaagagataacacctgggcggtttcgaacaa

SEQ ID NO: 32233 - DNA, 60 bp, Artificial
  Synthetic oligonucleotide
tgccgactgcacaatcaacaatgaaggctgaagagataacacctgggcggtttcgaacaa

SEQ ID NO: 32234 - DNA, 60 bp, Artificial
  Synthetic oligonucleotide
cctgtaaatgcaatagatgctgaaatgcatgaccttaactgcagttacaatatatgtccc

SEQ ID NO: 32235 - DNA, 60 bp, Artificial
  Synthetic oligonucleotide
tacacaaggaatggccccattcaaggaattggagatgcaaccccacttggtgttggggag

SEQ ID NO: 32236 - DNA, 60 bp, Artificial
  Synthetic oligonucleotide
caccactatctctcttactttctacctcagtgtacttatatatatgcaagtagcatatat

SEQ ID NO: 32237 - DNA, 60 bp, Artificial
  Synthetic oligonucleotide
catgaggaaggtcttacgccagaggtatgggcagctgactgcagaagagtggatgacatc

SEQ ID NO: 32238 - DNA, 60 bp, Artificial
  Synthetic oligonucleotide
tctcttctatctcccaatcttttattgattcaccggggtgttgtcttgacatcttgcgga

SEQ ID NO: 32239 - DNA, 60 bp, Artificial
  Synthetic oligonucleotide
taactttcacaaactgtttgaatattttgaagtgcaggaagcagatctttgctgcttgta

SEQ ID NO: 32240 - DNA, 60 bp, Artificial
  Synthetic oligonucleotide
gatatcccttttatctcacattttaatgaagaagcattcaagcaattgttgggaagatcc

SEQ ID NO: 32241 - DNA, 60 bp, Artificial
  Synthetic oligonucleotide
gactccctaagagctacgatacaaacaatggcaactatggaggaattgcaaaaggagatc

SEQ ID NO: 32242 - DNA, 60 bp, Artificial
  Synthetic oligonucleotide
tctacctcggaggtttgggttgatgacccgggagaactgcagcagatacagagagtgagc

SEQ ID NO: 32243 - DNA, 60 bp, Artificial
  Synthetic oligonucleotide
aagaagagtaatggacttgtggacaccttcacaaactcttactccttttgtgagagtgtc

SEQ ID NO: 32244 - DNA, 60 bp, Artificial
  Synthetic oligonucleotide
atctttctttctacctcagtgtacttatatatatgcaagtagcatatatataagtacaca

SEQ ID NO: 32245 - DNA, 60 bp, Artificial
  Synthetic oligonucleotide
ctcttactttctacctcagtgtacttatatatatgcaagtagcatatatataagtacaca

SEQ ID NO: 32246 - DNA, 60 bp, Artificial
  Synthetic oligonucleotide
ggttaagggctgcacctgggctgatggctatacaatgtatcttggatttgcacctggagc

SEQ ID NO: 32247 - DNA, 53 bp, Artificial
  Synthetic oligonucleotide
tttattggtaagtatgggcaacaactcaatttcagtgttgctagagtcttctt

SEQ ID NO: 32248 - DNA, 60 bp, Artificial
  Synthetic oligonucleotide
ggttaagggatgtacctgggctgatggttatacaatgtatcttggatttgcacctggggc

SEQ ID NO: 32249 - DNA, 60 bp, Artificial
  Synthetic oligonucleotide
gggtgcgacgatggtctatggacccgaactgcctcgagaaggcaatttggcaacgctaca

SEQ ID NO: 32250 - DNA, 60 bp, Artificial
  Synthetic oligonucleotide
gggtgcgacgatggtctatggacccgaactgcctcgagaaggcaatttggcaacgctata

SEQ ID NO: 32251 - DNA, 60 bp, Artificial
  Synthetic oligonucleotide
gggtgcgacgatggtctatggacccgaactgcctcgagaaggcaatttggcaacgataca

SEQ ID NO: 32252 - DNA, 60 bp, Artificial
  Synthetic oligonucleotide
cactgcaagccaggcaacagacagtgtcagcactggaggataaactcgcagactacaaga

SEQ ID NO: 32253 - DNA, 60 bp, Artificial
  Synthetic oligonucleotide
cacaagtacctcaaatcaggaggtgtcagacagcgaaacactgaagtactcttcagagaa

SEQ ID NO: 32254 - DNA, 60 bp, Artificial
  Synthetic oligonucleotide
cacaagtacctcaaatcaggaggtgtcagacagcgaaacactgaagtactcttcagagag

SEQ ID NO: 32255 - DNA, 60 bp, Artificial
  Synthetic oligonucleotide
aggtggaaagtaaaagtagcttgctacataagtacctcaaatcaggaggtgtcagacagc

SEQ ID NO: 32256 - DNA, 60 bp, Artificial
  Synthetic oligonucleotide
tagtagtagactccgcaagaaacagcagttaaaaaacagcaggatcatgtggagtttgct

SEQ ID NO: 32257 - DNA, 60 bp, Artificial
  Synthetic oligonucleotide
tagtagtagactccgcaagaaacagcagttaaagaacaataggatcatgtggagtttgct

SEQ ID NO: 32258 - DNA, 60 bp, Artificial
  Synthetic oligonucleotide
gggacatcaacaagtcaggccgttcaggaatagcacttgtcgctacaggccttgccaagc

SEQ ID NO: 32259 - DNA, 60 bp, Artificial
  Synthetic oligonucleotide
caacaacattctacctcaacacaaaactatctcaacctaactacctcattagcttgctcc

SEQ ID NO: 32260 - DNA, 60 bp, Artificial
  Synthetic oligonucleotide
tcaggcgaacccaatcaatgggaatacaactggaccaaagaatcatagtgctctttatgg

SEQ ID NO: 32261 - DNA, 60 bp, Artificial
  Synthetic oligonucleotide
acaacaacattctacctcaacacaaaactatctcaacctaactacctcattagcttgctc

SEQ ID NO: 32262 - DNA, 60 bp, Artificial
  Synthetic oligonucleotide
caaaggattatagtgctctttatggttgcctggggtaaagaggcagtagataatttccac

SEQ ID NO: 32263 - DNA, 60 bp, Artificial
  Synthetic oligonucleotide
tgcagccctttcagctccttggtgcttacactataaagcactagagtcttatttggtgag

SEQ ID NO: 32264 - DNA, 60 bp, Artificial
  Synthetic oligonucleotide
acaaatggcagatgctgtctcaaggaaaaagatggatactaaacctactgacccgactgg

SEQ ID NO: 32265 - DNA, 60 bp, Artificial
  Synthetic oligonucleotide
agtgctgcaaaagtcttcagatccctttgaaacaccagaggccttgatgaaacctagaca

SEQ ID NO: 32266 - DNA, 60 bp, Artificial
  Synthetic oligonucleotide
tgtcccattcggtaagcgtcataatgccccagtcagcctttacaaaggtatggagatccc

SEQ ID NO: 32267 - DNA, 60 bp, Artificial
  Synthetic oligonucleotide
atctgggtgatgatatggaccctgaactcagaacacttgcacaaagtctcattgaccaaa

SEQ ID NO: 32268 - DNA, 60 bp, Artificial
  Synthetic oligonucleotide
gaacctgctgaattcaacaagcttagaaacaagcttatcaattgaggcaccatggggagc

SEQ ID NO: 32269 - DNA, 60 bp, Artificial
  Synthetic oligonucleotide
ctcctgttaatgcaatagatgctgaaatgcacgacctcaactgcagttacaatatatgtc

SEQ ID NO: 32270 - DNA, 60 bp, Artificial
  Synthetic oligonucleotide
ctcctgttaatgcaatagatgctgaaatgcacgacctcaattgcagttacaatatatgtc

SEQ ID NO: 32271 - DNA, 60 bp, Artificial
  Synthetic oligonucleotide
gcgaaacaactcctgttaatgcaatagatgctgaaatgcacgacctcaactgcagttaca

SEQ ID NO: 32272 - DNA, 60 bp, Artificial
  Synthetic oligonucleotide
aactcctgttaatgcaatagatgctgaaatgcacgaccttaactgcagttacaatatatg

SEQ ID NO: 32273 - DNA, 60 bp, Artificial
  Synthetic oligonucleotide
cctgcaacaaacagggattacctacggcagcgccaggtggcactgggtaatatggaaaca

SEQ ID NO: 32274 - DNA, 60 bp, Artificial
  Synthetic oligonucleotide
tatcataagtcctgtcatgggagtcattggatttagcttctttgtaaaggactggatgga

SEQ ID NO: 32275 - DNA, 60 bp, Artificial
  Synthetic oligonucleotide
aactcggggaactcaagagacaacttgcagatctggtggcagctcaaaaactggctacaa

SEQ ID NO: 32276 - DNA, 60 bp, Artificial
  Synthetic oligonucleotide
aacttgcagatctggtggcagctcaaaaactggctacaagaccagttgatccaacagggc

SEQ ID NO: 32277 - DNA, 60 bp, Artificial
  Synthetic oligonucleotide
gcagtggaggtggacccagatgacgttaacaagagcacattacaaagcagacgggcagct

SEQ ID NO: 32278 - DNA, 60 bp, Artificial
  Synthetic oligonucleotide
ggaggtggacccagatgacgttaacaagagcacattacaaagcagacgggcagctgtgtc

SEQ ID NO: 32279 - DNA, 60 bp, Artificial
  Synthetic oligonucleotide
agtggaagtggacccagatgacgttaacaagagcacattacaaagcagacgggcagctgt

SEQ ID NO: 32280 - DNA, 60 bp, Artificial
  Synthetic oligonucleotide
ggaagtggacccagatgacgttaacaagagcacattacaaagcagacgggcagctgtgtc

SEQ ID NO: 32281 - DNA, 60 bp, Artificial
  Synthetic oligonucleotide
taaaagtagatgttacatttttacaatgtgggtcttcctcctggttttggagtccatact

SEQ ID NO: 32282 - DNA, 60 bp, Artificial
  Synthetic oligonucleotide
tagtagtagactccttgaaaagctactacgagaacgattggaatgagtgacttaaaggaa

SEQ ID NO: 32283 - DNA, 60 bp, Artificial
  Synthetic oligonucleotide
ctgaagcaataagaggtaagctacctcctagcattatggcaagcctcacagactttgcat

SEQ ID NO: 32284 - DNA, 60 bp, Artificial
  Synthetic oligonucleotide
ccatgaagctgaggttattgatacatgccatgattataattactttgagaagtttggcct

SEQ ID NO: 32285 - DNA, 60 bp, Artificial
  Synthetic oligonucleotide
ctctacaccactgggcttagttatgaccacattcgaatcttctacattaaaggacgcgag

SEQ ID NO: 32286 - DNA, 60 bp, Artificial
  Synthetic oligonucleotide
cacatgcaatttgaagtccacagtgtacagactaatctattacctgaagtggctttgatc

SEQ ID NO: 32287 - DNA, 60 bp, Artificial
  Synthetic oligonucleotide
tggtttaagacaaaggtctctatagatctggacaacacatgtgaggacctacatattaca

SEQ ID NO: 32288 - DNA, 60 bp, Artificial
  Synthetic oligonucleotide
agacaaaggtctctatagatctggacaacacatgtgaggacctacatattacatgcggtc

SEQ ID NO: 32289 - DNA, 60 bp, Artificial
  Synthetic oligonucleotide
agaatggctggtttaagacaaaggtctctatagatctggacaacacatgtgaggacctac

SEQ ID NO: 32290 - DNA, 60 bp, Artificial
  Synthetic oligonucleotide
tggctggtttaagacaaaggtctctatagatctggacaacacctgtgaagacctacatat

SEQ ID NO: 32291 - DNA, 60 bp, Artificial
  Synthetic oligonucleotide
gtagacgggcagctgtgtcagcattggaggacaaactggcagacttcaagaggcagcttg

SEQ ID NO: 32292 - DNA, 60 bp, Artificial
  Synthetic oligonucleotide
cgataacagcaatggcaactatggaggaattgcaaaaggagatcaatgcccatgagggtc

SEQ ID NO: 32293 - DNA, 60 bp, Artificial
  Synthetic oligonucleotide
tcgggtatgcaggggataggccgtccatggtagtcccagtgacaggaagccactcactca

SEQ ID NO: 32294 - DNA, 60 bp, Artificial
  Synthetic oligonucleotide
gtatgcaggggataggccgtccatggtagtcccagtgacaggaagccactcacttaagac

SEQ ID NO: 32295 - DNA, 54 bp, Artificial
  Synthetic oligonucleotide
cgcacacgaacaacagctcgtgactgccaggcagaagcttaaagatgcagaaaa

SEQ ID NO: 32296 - DNA, 54 bp, Artificial
  Synthetic oligonucleotide
agtacacgaacaacagctcgtgactgccaggcagaaacttaaagatgccgaaaa

SEQ ID NO: 32297 - DNA, 60 bp, Artificial
  Synthetic oligonucleotide
cgcacacgaacaacagctcgtgactgccaggcagaagcttaaagatgcagaaaaagcagt

SEQ ID NO: 32298 - DNA, 60 bp, Artificial
  Synthetic oligonucleotide
agtacacgaacaacagctcgtgactgccaggcagaagcttaaagatgccgagaaagcagt

SEQ ID NO: 32299 - DNA, 60 bp, Artificial
  Synthetic oligonucleotide
agtacacgaacaacagctcgtgactgccaggcagaaacttaaagatgccgaaaaagcagt

SEQ ID NO: 32300 - DNA, 60 bp, Artificial
  Synthetic oligonucleotide
atatgctaactttaagcgtatccacaccactgggcttagttatgacaacatacgaatctt

SEQ ID NO: 32301 - DNA, 60 bp, Artificial
  Synthetic oligonucleotide
gcgtatccacaccactgggcttagttatgacaacatacgaatcttctacattaaaggacg

SEQ ID NO: 32302 - DNA, 60 bp, Artificial
  Synthetic oligonucleotide
gcagtacttttgacccagaggttgcatacattaactttaagcgtctctacaccactgggc

SEQ ID NO: 32303 - DNA, 60 bp, Artificial
  Synthetic oligonucleotide
aacacactgcaagcaaggcaacagacagtgtcagcactggaggataaactcgcagacttc

SEQ ID NO: 32304 - DNA, 60 bp, Artificial
  Synthetic oligonucleotide
ggctgcacttggagtgatgggtatgcaatgtacttgggatttgccccaggtgctgaaatg

SEQ ID NO: 32305 - DNA, 60 bp, Artificial
  Synthetic oligonucleotide
cccggaaggtgggtatgtggcatttattggtaagtatgggcaacaactcaatttcggggt

SEQ ID NO: 32306 - DNA, 60 bp, Artificial
  Synthetic oligonucleotide
aatggtcctacataagacggcacaaccaagtgtcgatcttacttttggtggggtcaaatt

SEQ ID NO: 32307 - DNA, 60 bp, Artificial
  Synthetic oligonucleotide
tggtcctacataagacggcacaaccaagtgtcgatcttacttttggtggggtcaaattca

SEQ ID NO: 32308 - DNA, 60 bp, Artificial
  Synthetic oligonucleotide
cccggaggttgggtatgtggcatttattggtaagtatgggcagcaactcaacttcggtgt

SEQ ID NO: 32309 - DNA, 60 bp, Artificial
  Synthetic oligonucleotide
aatggtcctacataagacgggacaaccaagtgtcgatcttacttttggtggggtcaaatt

SEQ ID NO: 32310 - DNA, 60 bp, Artificial
  Synthetic oligonucleotide
atttaacccggaaggtgggtatgtggcatttattggtaagtatgggcaacaactcaattt

SEQ ID NO: 32311 - DNA, 60 bp, Artificial
  Synthetic oligonucleotide
ggtcctacataagacgggacaaccaagtgtcgatcttacttttggtggggtcaaattcac

SEQ ID NO: 32312 - DNA, 60 bp, Artificial
  Synthetic oligonucleotide
taccacaacggaatgcagctacatttaacccggaggttgggtatgtggcatttattggta

SEQ ID NO: 32313 - DNA, 60 bp, Artificial
  Synthetic oligonucleotide
ggaatgcagctacatttaacccggaggttgggtatgtggcatttattggtaagtatgggc

SEQ ID NO: 32314 - DNA, 58 bp, Artificial
  Synthetic oligonucleotide
ttttgaagatgtaccacaacggaatgcagctacatttaacccggaaggtgggtatgtg

SEQ ID NO: 32315 - DNA, 58 bp, Artificial
  Synthetic oligonucleotide
ttttgaagatgtaccacaacggaatgcagctacatttaacccggaggttgggtatgtg

SEQ ID NO: 32316 - DNA, 60 bp, Artificial
  Synthetic oligonucleotide
ggtcctacataagacggcacaaccaagtgtcgatcttacttttggtggggtcaaattcac

SEQ ID NO: 32317 - DNA, 60 bp, Artificial
  Synthetic oligonucleotide
tggtcttacataagacggcacaaccaagtgtcgatcttacttttggtggggtcaaattca

SEQ ID NO: 32318 - DNA, 60 bp, Artificial
  Synthetic oligonucleotide
gctgcgttcaactccgttggacaacttgcttgggctaaatctggattctctcctgctgcc

SEQ ID NO: 32319 - DNA, 60 bp, Artificial
  Synthetic oligonucleotide
cagaacagacatgcaagcatattgatgtgaatgattgtcttgttactccatcagtgaagg

SEQ ID NO: 32320 - DNA, 60 bp, Artificial
  Synthetic oligonucleotide
tgtcatgatactgactgtactgatgaagggcttgctgcctctccaccacatcttgaccga

SEQ ID NO: 32321 - DNA, 60 bp, Artificial
  Synthetic oligonucleotide
tgcctctccaccacatcttgaccgagtcactggattcaatcaaatagattctgacaaagt

SEQ ID NO: 32322 - DNA, 60 bp, Artificial
  Synthetic oligonucleotide
tcctaatactgtctattctactattcagctttttttgccccattcgaagtagaaagagca

SEQ ID NO: 32323 - DNA, 55 bp, Artificial
  Synthetic oligonucleotide
gtgataagaagacaatgcctatcacctggacgggatttcttgcagtatctggaga

SEQ ID NO: 32324 - DNA, 60 bp, Artificial
  Synthetic oligonucleotide
acaagttggggctgtaatccacctgactgcccaggggtagggacaggatggacagcttgt

SEQ ID NO: 32325 - DNA, 60 bp, Artificial
  Synthetic oligonucleotide
ttccaccttcaattggagaaacaagttgttcatgctgaaatccacaatttggggcattgg

SEQ ID NO: 32326 - DNA, 60 bp, Artificial
  Synthetic oligonucleotide
aggtgccttcaacagagacaactgaaacaatgcaaggggtagcatttgctggaacaccaa

SEQ ID NO: 32327 - DNA, 60 bp, Artificial
  Synthetic oligonucleotide
ctgaattgataatctgggcagcaagtgcagaaactccattgatggaatcaggttggtcag

SEQ ID NO: 32328 - DNA, 60 bp, Artificial
  Synthetic oligonucleotide
ggaagcttgtgaatcctgcaaattcagaagagacactgccattccaccttcaattggaga

SEQ ID NO: 32329 - DNA, 60 bp, Artificial
  Synthetic oligonucleotide
taggggttttcagatataaaagcaggtgttacgtaggattagtttggggtatactcttaa

SEQ ID NO: 32330 - DNA, 60 bp, Artificial
  Synthetic oligonucleotide
cagtcttttgcacacttgctggaccaggtgcaagttgtgaagcctactcagaaactggca

SEQ ID NO: 32331 - DNA, 60 bp, Artificial
  Synthetic oligonucleotide
ttcttactactgccacggctgggttaacacggaatctttatgagttaaagatagaatgcc

SEQ ID NO: 32332 - DNA, 60 bp, Artificial
  Synthetic oligonucleotide
gggcaggtgactgatttaaagattgagagctcttgtaactttgatttgcatgtaccgtca

SEQ ID NO: 32333 - DNA, 60 bp, Artificial
  Synthetic oligonucleotide
gcatgtaccgtcaacaacaattcagaagtacaatcaagtggaatgggcaaagaaaacatc

SEQ ID NO: 32334 - DNA, 60 bp, Artificial
  Synthetic oligonucleotide
caacttgtgagtatcaagggaacacagtttcagggtttaagaggatgatggccacgaggg

SEQ ID NO: 32335 - DNA, 60 bp, Artificial
  Synthetic oligonucleotide
cagtggtgcacaacatcatgtgtttttggggacccaggggacataatgtccacaaccagt

SEQ ID NO: 32336 - DNA, 60 bp, Artificial
  Synthetic oligonucleotide
tgaggggttcaaatacagttaaggttgttgggaagggtgggcattcaggttcactattca

SEQ ID NO: 32337 - DNA, 54 bp, Artificial
  Synthetic oligonucleotide
tctggagtgggcttcactttagtgtgtacagtaggcttgacagaatgcgcaaac

SEQ ID NO: 32338 - DNA, 60 bp, Artificial
  Synthetic oligonucleotide
gacttacacacacagtctatagatggtgcatggggttctggagtgggcttcactttagtg

SEQ ID NO: 32339 - DNA, 60 bp, Artificial
  Synthetic oligonucleotide
ttgcccctgtccagacatgcatgtctgttcgaagttgtatgatagggcttttatctagta

SEQ ID NO: 32340 - DNA, 60 bp, Artificial
  Synthetic oligonucleotide
agttctttctcaacactactaagaaaggctgaccctgagtatgtgttttctccagggata

SEQ ID NO: 32341 - DNA, 60 bp, Artificial
  Synthetic oligonucleotide
tttaggggatcagaacaacgagtaaattttatgtgtcagagagttgaccaagatgtagta

SEQ ID NO: 32342 - DNA, 60 bp, Artificial
  Synthetic oligonucleotide
ttcaccagtctcttctccttgcttccaggtgtggcccattcacttgccgttgaattatgt

SEQ ID NO: 32343 - DNA, 60 bp, Artificial
  Synthetic oligonucleotide
ctccttgcttccaggtgtggcccattcacttgccgttgaattatgtgtaccagggcttca

SEQ ID NO: 32344 - DNA, 60 bp, Artificial
  Synthetic oligonucleotide
tgaattatgtgtaccagggcttcatggctgggcaacgactgctttactcatcacattctg

SEQ ID NO: 32345 - DNA, 60 bp, Artificial
  Synthetic oligonucleotide
cagggcttcatggctgggcaacgactgctttactcatcacattctgttttggatggctgc

SEQ ID NO: 32346 - DNA, 50 bp, Artificial
  Synthetic oligonucleotide
gaatcttacggctcctcacattttcttgctcacactactcaacagagtca

SEQ ID NO: 32347 - DNA, 60 bp, Artificial
  Synthetic oligonucleotide
cctgggtccattggagcaaggaggtatcattctaaaacagtggtgcacaacatcatgtgt

SEQ ID NO: 32348 - DNA, 54 bp, Artificial
  Synthetic oligonucleotide
caggcccacttttcagtctgcaagctcacaaataggttccaggaaaatttaaaa

SEQ ID NO: 32349 - DNA, 60 bp, Artificial
  Synthetic oligonucleotide
gtatgattggtactgtatcaaagttacagcctggtgatacattgttgttcctgggtccat

SEQ ID NO: 32350 - DNA, 60 bp, Artificial
  Synthetic oligonucleotide
gaactcgatacacacagaaaaagctgtcctgaaggtcaatgtccttactgcatgacaatg

SEQ ID NO: 32351 - DNA, 60 bp, Artificial
  Synthetic oligonucleotide
gcttgtggagtttaccttgataagctaagatcagttgggaaggcatataaaattgtctcc

SEQ ID NO: 32352 - DNA, 60 bp, Artificial
  Synthetic oligonucleotide
ctccttaaaatataccaggaaagtctgcatccaactaggcacagaacagacatgcaagca

SEQ ID NO: 32353 - DNA, 60 bp, Artificial
  Synthetic oligonucleotide
ttgaagcaaagacaaaggaagtaaatctgaagggcacatgcaacattccagtaactacgt

SEQ ID NO: 32354 - DNA, 60 bp, Artificial
  Synthetic oligonucleotide
gacaaaggaagtaaatctgaagggcacatgcaacattccagtaactacgtttgaggctgc

SEQ ID NO: 32355 - DNA, 60 bp, Artificial
  Synthetic oligonucleotide
catctacaacagaaagtactaatgcaggtgcatctacatttgaagcaaagacaaaggaag

SEQ ID NO: 32356 - DNA, 55 bp, Artificial
  Synthetic oligonucleotide
catattgtgtcaccggacaagtagtggaagggttatgtttcattcccacacacac

SEQ ID NO: 32357 - DNA, 60 bp, Artificial
  Synthetic oligonucleotide
gcatgtaatcagacccattgccttcccacagtccatttaattgcccctgtccagacatgc

SEQ ID NO: 32358 - DNA, 60 bp, Artificial
  Synthetic oligonucleotide
aaaaaagtctttaaagcatccagaagtgaaacaaggctgttataggacattaggggtttt

SEQ ID NO: 32359 - DNA, 60 bp, Artificial
  Synthetic oligonucleotide
ttagggacacaattaaagattgctgtagagcttgagaagttgatcactgcaagtggctgt

SEQ ID NO: 32360 - DNA, 60 bp, Artificial
  Synthetic oligonucleotide
gttctaaaccccaaaggtgaggatcatgatcctgatcaggatgggcagggactgatgagg

SEQ ID NO: 32361 - DNA, 60 bp, Artificial
  Synthetic oligonucleotide
cctcaggtatggaaatgtccttgatgtgaacgccatcgatattgaagagccgagtggaca

SEQ ID NO: 32362 - DNA, 60 bp, Artificial
  Synthetic oligonucleotide
tgtccttgatgtgaacgccatcgatattgaagagccgagtggacaaacagcagactggtt

SEQ ID NO: 32363 - DNA, 60 bp, Artificial
  Synthetic oligonucleotide
gcagacttcaagaggcagctcgcggatcatgtttctcgtcagaagatggatgagaggcct

SEQ ID NO: 32364 - DNA, 60 bp, Artificial
  Synthetic oligonucleotide
cagctcgcggatcatgtttctcgtcagaagatggatgagaggccttctgatccgactggg

SEQ ID NO: 32365 - DNA, 59 bp, Artificial
  Synthetic oligonucleotide
acagaaactcagggatactgagaaggcggtggaggaggaccccgatgatgttaacaaaa

SEQ ID NO: 32366 - DNA, 57 bp, Artificial
  Synthetic oligonucleotide
tacaggatatgaggaataccatcatggcctccaaaacagtcgggacagcagaagaga

SEQ ID NO: 32367 - DNA, 60 bp, Artificial
  Synthetic oligonucleotide
gaatggggtaaggaaatggtggatcacttccatcttggtgatgacatggacccagatctc

SEQ ID NO: 32368 - DNA, 60 bp, Artificial
  Synthetic oligonucleotide
gccctgtgatgggagtaattgggttctctttctttgtaaaggattggccggaaagggtaa

SEQ ID NO: 32369 - DNA, 60 bp, Artificial
  Synthetic oligonucleotide
cctgtgatgggagtaattgggttctctttctttgtaaaggattggccggaaagggtaagg

SEQ ID NO: 32370 - DNA, 60 bp, Artificial
  Synthetic oligonucleotide
gaaagggtaaggaagtttcttgataatagctgtccattcatcaagccagaagtaaaacca

SEQ ID NO: 32371 - DNA, 60 bp, Artificial
  Synthetic oligonucleotide
tttcttgataatagctgtccattcatcaagccagaagtaaaaccagggactccagccggg

SEQ ID NO: 32372 - DNA, 60 bp, Artificial
  Synthetic oligonucleotide
gacaggaagttctagaagagaaccatattcctgatattgataaacttctggagtatgcag

SEQ ID NO: 32373 - DNA, 51 bp, Artificial
  Synthetic oligonucleotide
atattcctgatattgataaacttctggagtatgcagcctctggagatccaa

SEQ ID NO: 32374 - DNA, 60 bp, Artificial
  Synthetic oligonucleotide
gagtatgcagcctctggagatccaactgcaccagattctatagagtcaccatatgctcca

SEQ ID NO: 32375 - DNA, 60 bp, Artificial
  Synthetic oligonucleotide
gcagcctctggagatccaactgcaccagattctatagagtcaccatatgctccatgggtg

SEQ ID NO: 32376 - DNA, 60 bp, Artificial
  Synthetic oligonucleotide
gctatccttttccattcttcctttcttttctcttctttaatacacacatctacctcagtg

SEQ ID NO: 32377 - DNA, 60 bp, Artificial
  Synthetic oligonucleotide
catgtattcagaatgtatccgaattagcactataatcacctcaggtattgctgcttgtat

SEQ ID NO: 32378 - DNA, 60 bp, Artificial
  Synthetic oligonucleotide
actgagctatccttttccattcttcctttcttttctcttctttaatacacacatctacct

SEQ ID NO: 32379 - DNA, 60 bp, Artificial
  Synthetic oligonucleotide
gtccatgccaactgcacaatctaccatgaaggcagaagagctaacaccgggccgtttcag

SEQ ID NO: 32380 - DNA, 60 bp, Artificial
  Synthetic oligonucleotide
gtgtccatgccaactgcacaatctaccatgaaggcagaagagctaacaccgggccgtttc

SEQ ID NO: 32381 - DNA, 60 bp, Artificial
  Synthetic oligonucleotide
gatgtgaatgggatacgtcgtccaaagcatctctatgtgtccatgccaactgcacaatct

SEQ ID NO: 32382 - DNA, 60 bp, Artificial
  Synthetic oligonucleotide
atagttcctttgatgatgtgaatgggatacgtcgtccaaagcatctctatgtgtccatgc

SEQ ID NO: 32383 - DNA, 60 bp, Artificial
  Synthetic oligonucleotide
tcgccagacagttaaagagaacaaaggaacaaggatccgctttaaggatgatagttcctt

SEQ ID NO: 32384 - DNA, 59 bp, Artificial
  Synthetic oligonucleotide
tcgccagacagttaaagagaacaaaggaacaaggatccgctttaaggatgatagttcct

SEQ ID NO: 32385 - DNA, 60 bp, Artificial
  Synthetic oligonucleotide
cacactgcctattatcttgaaagcactgtatatgttgtcaacgaggggtcgccagacagt

SEQ ID NO: 32386 - DNA, 60 bp, Artificial
  Synthetic oligonucleotide
ttcacactgcctattatcttgaaagcactgtatatgttgtcaacgaggggtcgccagaca

SEQ ID NO: 32387 - DNA, 60 bp, Artificial
  Synthetic oligonucleotide
gagtggacaaacagcagactggtttacaataggtgtctatattattagcttcacactgcc

SEQ ID NO: 32388 - DNA, 60 bp, Artificial
  Synthetic oligonucleotide
cgagtggacaaacagcagactggtttacaataggtgtctatattattagcttcacactgc

SEQ ID NO: 32389 - DNA, 60 bp, Artificial
  Synthetic oligonucleotide
aatcatcacacacacactcaaatcacagtagaattagaaaattgattatatccaatcaca

SEQ ID NO: 32390 - DNA, 60 bp, Artificial
  Synthetic oligonucleotide
ccaagagccactcaaaatataatcactattaatcaacactaatcatcacacacacactca

SEQ ID NO: 32391 - DNA, 60 bp, Artificial
  Synthetic oligonucleotide
gtttgggggacaatactggaattacagggatattataactaattgtaaggcagctactaa

SEQ ID NO: 32392 - DNA, 60 bp, Artificial
  Synthetic oligonucleotide
tagtttagatcaaattgattaatactaaatttaaacacatttattctagggtttggggga

SEQ ID NO: 32393 - DNA, 60 bp, Artificial
  Synthetic oligonucleotide
cccagatctcagggccttggctcagtccctgattgatcagaaggttaaagaaatttccaa

SEQ ID NO: 32394 - DNA, 60 bp, Artificial
  Synthetic oligonucleotide
atggtggatcacttccatcttggtgatgacatggacccagatctcagggccttggctcag

SEQ ID NO: 32395 - DNA, 60 bp, Artificial
  Synthetic oligonucleotide
aaatttccaaccaagagccactcaaaatataatcactattaatcaacactaatcatcaca

SEQ ID NO: 32396 - DNA, 60 bp, Artificial
  Synthetic oligonucleotide
gggccttggctcagtccctgattgatcagaaggttaaagaaatttccaaccaagagccac

SEQ ID NO: 32397 - DNA, 60 bp, Artificial
  Synthetic oligonucleotide
cagctactaattcatgtattcagaatgtatccgaattagcactataatcacctcaggtat

SEQ ID NO: 32398 - DNA, 60 bp, Artificial
  Synthetic oligonucleotide
gggacaatactggaattacagggatattataactaattgtaaggcagctactaattcatg

SEQ ID NO: 32399 - DNA, 60 bp, Artificial
  Synthetic oligonucleotide
ggcaggtggaaattgtcaacaatcattttcctggaaacaggaacaacccaattggtaaca

SEQ ID NO: 32400 - DNA, 60 bp, Artificial
  Synthetic oligonucleotide
tggcaggtggaggttatcaataatcattttcctggaaacaggaacaacccaattggtaac

SEQ ID NO: 32401 - DNA, 60 bp, Artificial
  Synthetic oligonucleotide
caggtggaggttatcaataatcattttcctggaaacaggaacaacccaattggtaacaac

SEQ ID NO: 32402 - DNA, 60 bp, Artificial
  Synthetic oligonucleotide
ggcaggtggaggttatcaataatcattttcctggaaacaggaacaacccaattggtaaca

SEQ ID NO: 32403 - DNA, 60 bp, Artificial
  Synthetic oligonucleotide
ggagagtggcaggtggaggtcgtcaataatcattttcctggaaacaggaacaacccaatt

SEQ ID NO: 32404 - DNA, 60 bp, Artificial
  Synthetic oligonucleotide
ggagagtggcaggtggaggtcgtcaattatcattttcctggaaacaggaacaacccaatt

SEQ ID NO: 32405 - DNA, 60 bp, Artificial
  Synthetic oligonucleotide
tggcaggtggaaattgtcaacaatcattttcctggaaacaggaacaacccaattggtaac

SEQ ID NO: 32406 - DNA, 60 bp, Artificial
  Synthetic oligonucleotide
ggacttgtggacaccttcacaaactcctattccttttgtgagagtgttccaaatttggac

SEQ ID NO: 32407 - DNA, 60 bp, Artificial
  Synthetic oligonucleotide
ggaacggacttgtggacaccttcacaaactcctattccttttgtgagagtgttccaaatt

SEQ ID NO: 32408 - DNA, 60 bp, Artificial
  Synthetic oligonucleotide
gaaatggacttgtggacaccttcacaaactcctattccttttgtgaaaacgttccaaatc

SEQ ID NO: 32409 - DNA, 58 bp, Artificial
  Synthetic oligonucleotide
gaaatggacttgtggacaccttcacaaactcctattccttttgtgagagtgttccaaa

SEQ ID NO: 32410 - DNA, 60 bp, Artificial
  Synthetic oligonucleotide
tagtagtagactccgcaaaagaaagcagtcaagtagcaacatgggggtatggaagtggct

SEQ ID NO: 32411 - DNA, 59 bp, Artificial
  Synthetic oligonucleotide
cctcaaagaattacaagacaacatcacagcacacgaacaacagctcgtgactgctcggc

SEQ ID NO: 32412 - DNA, 60 bp, Artificial
  Synthetic oligonucleotide
atgtttgactttcttgaagaatcgccaaagcatcatgaaagtcgtgaaccaaagtgattt

SEQ ID NO: 32413 - DNA, 60 bp, Artificial
  Synthetic oligonucleotide
gaagctcatagaagagactgcaaacaatgagaatcttgctatcatcaaggcaaaaattgc

SEQ ID NO: 32414 - DNA, 60 bp, Artificial
  Synthetic oligonucleotide
ggtcttaccctccaccgcctcagtggattccttgccaggtttctacttgaaaagatgctg

SEQ ID NO: 32415 - DNA, 60 bp, Artificial
  Synthetic oligonucleotide
gtcttaccctccaccgcctcagtggattccttgccaggtatctacttgagaaaatgctga

SEQ ID NO: 32416 - DNA, 60 bp, Artificial
  Synthetic oligonucleotide
tacgaatcttctacattaaaggacgcgagattaaaactagtctcgcaaagagaagtgaat

SEQ ID NO: 32417 - DNA, 60 bp, Artificial
  Synthetic oligonucleotide
cgaatcttctacattaaaggacgcgagattaaaactagtctcacaaaaagaagtgaatgg

SEQ ID NO: 32418 - DNA, 60 bp, Artificial
  Synthetic oligonucleotide
gacaacatacgaatcttctacattaaaggacgcgagattaaaactagtctcgcaaagaga

SEQ ID NO: 32419 - DNA, 60 bp, Artificial
  Synthetic oligonucleotide
acattcgaatcttctacattaaaggacgcgagattaaaactagtctcacaaaaagaagtg

SEQ ID NO: 32420 - DNA, 60 bp, Artificial
  Synthetic oligonucleotide
agtgcaggaagcagatctttgctgcttgcaaaagtggtaagtatgttttttgtggtaaaa

SEQ ID NO: 32421 - DNA, 55 bp, Artificial
  Synthetic oligonucleotide
gaagctcatagaagagactgcaaacaatgagaatcttgctatcatcaaggcaaaa

SEQ ID NO: 32422 - DNA, 60 bp, Artificial
  Synthetic oligonucleotide
agagtgaaactcatagaagagactgcaaacaatgagaatcttgctatcatcaaggcaaaa

SEQ ID NO: 32423 - DNA, 60 bp, Artificial
  Synthetic oligonucleotide
aagagtgaaactcatagaagagactgcaaacaatgagaatcttgctatcatcaaggcaaa

SEQ ID NO: 32424 - DNA, 52 bp, Artificial
  Synthetic oligonucleotide
tagacagtagacaagtagatagtatttcttcattcttaagaggtatttcaag

SEQ ID NO: 32425 - DNA, 59 bp, Artificial
  Synthetic oligonucleotide
aaaatactctcttctatctcccaatcttctattgattcaccggggtgttgtcttgacat

SEQ ID NO: 32426 - DNA, 60 bp, Artificial
  Synthetic oligonucleotide
actgcaaaagctggaatgagcaccctccaagaattacaagaaaatatcacagcacacgaa

SEQ ID NO: 32427 - DNA, 60 bp, Artificial
  Synthetic oligonucleotide
caagcttatcaattgaggcaccatggggtgcaataaatgtccaatcaaccttcaaaccca

SEQ ID NO: 32428 - DNA, 60 bp, Artificial
  Synthetic oligonucleotide
acatgcaccctgctgtgctgacagctggcagaattagtgagatgggtgtctgctttggga

SEQ ID NO: 32429 - DNA, 60 bp, Artificial
  Synthetic oligonucleotide
tcagctgcatttgatgtgcagccaagaatacaagaaaggggtttcttttggtagtgtcat

SEQ ID NO: 32430 - DNA, 60 bp, Artificial
  Synthetic oligonucleotide
cagctgcatttgatgtgcagccaagaatacaagaaaggggtttcttttggtagtgtcatg

SEQ ID NO: 32431 - DNA, 60 bp, Artificial
  Synthetic oligonucleotide
gctagtcctaaatttggagagtggcaggtggaggtcgtcaataatcattttcctggaaac

SEQ ID NO: 32432 - DNA, 60 bp, Artificial
  Synthetic oligonucleotide
gctagtcctaaatttggagagtggcaggtggaggtcgtcaattatcattttcctggaaac

SEQ ID NO: 32433 - DNA, 60 bp, Artificial
  Synthetic oligonucleotide
ctctcgcgtaagccagagaggaaggctaaccctaaatttggagagtggcaggtggaggtt

SEQ ID NO: 32434 - DNA, 60 bp, Artificial
  Synthetic oligonucleotide
actggggtgttacactatcaatagagtgaggtcattcaagctatgcgaaaacagtgccac

SEQ ID NO: 32435 - DNA, 60 bp, Artificial
  Synthetic oligonucleotide
gagccacacttcaacacctcctggatgtcctgggatggttgtgacctagactactactgc

SEQ ID NO: 32436 - DNA, 60 bp, Artificial
  Synthetic oligonucleotide
ctattccgaaaatgaataacactccagaaaactgctgtcagctgcatttgatgtgcagcc

SEQ ID NO: 32437 - DNA, 60 bp, Artificial
  Synthetic oligonucleotide
taggatcttcttccttaatgccgcaaaagccaaagctgctctcactcgtaagccggagcg

SEQ ID NO: 32438 - DNA, 60 bp, Artificial
  Synthetic oligonucleotide
ccgttaggatcttcttccttaatgccgcaaaagccaaagctgctctctctcgtaaaccgg

SEQ ID NO: 32439 - DNA, 60 bp, Artificial
  Synthetic oligonucleotide
cctcagatgggcttgctaggcatgtgacacaatgccctaagcggaaggagaaggtagaag

SEQ ID NO: 32440 - DNA, 60 bp, Artificial
  Synthetic oligonucleotide
ggaatgagcaccctccaagaattgcaggaaaatatcaccgcacacgaacaacatctcgtc

SEQ ID NO: 32441 - DNA, 60 bp, Artificial
  Synthetic oligonucleotide
cttgggggctggaagattactgtatataatacgaattttcctggcaaccggaacaaccca

SEQ ID NO: 32442 - DNA, 60 bp, Artificial
  Synthetic oligonucleotide
acacttaaccttgggggctggaagattgccgtatataatacgaattttcctggcaaccgg

SEQ ID NO: 32443 - DNA, 60 bp, Artificial
  Synthetic oligonucleotide
ggctggaagattactgtatataatacgaattttcctggcaaccggaacaacccaagtcct

SEQ ID NO: 32444 - DNA, 57 bp, Artificial
  Synthetic oligonucleotide
ggggctggaagattactgtatataatacgaattttcctggcaaccggaacaacccag

SEQ ID NO: 32445 - DNA, 60 bp, Artificial
  Synthetic oligonucleotide
gaggcaccatggggagcaataaatgtccaatcaaccttcaaacctactgtgtcagctgcg

SEQ ID NO: 32446 - DNA, 60 bp, Artificial
  Synthetic oligonucleotide
gactcaataaaatcaccacaggcaccatgggtgtttgcttgtgcacctgatagatgcccc

SEQ ID NO: 32447 - DNA, 60 bp, Artificial
  Synthetic oligonucleotide
ccaaaatgagtgcagtaagagagatggacctagatgttccttcgcagcactgttaagctt

SEQ ID NO: 32448 - DNA, 60 bp, Artificial
  Synthetic oligonucleotide
gtcgctgctgacaccagcagtacttttgacccagagattgcatacgttaactttaagcgt

SEQ ID NO: 32449 - DNA, 60 bp, Artificial
  Synthetic oligonucleotide
tttatgatggagtggggttctgatattgtcaaccatttccatctgggtgatgatatggac

SEQ ID NO: 32450 - DNA, 60 bp, Artificial
  Synthetic oligonucleotide
cagacatttgccaattttctgagtacacaccaaacaaagaaagcattttgaaggactgcc

SEQ ID NO: 32451 - DNA, 61 bp, Artificial
  Synthetic oligonucleotide
gacatttgtcaattttctgagtacacaccaaacaaagaaagcattttgaaagactgtcttc

SEQ ID NO: 32452 - DNA, 60 bp, Artificial
  Synthetic oligonucleotide
cagacatttgccaattttctgagtacacaccaaacaaagaaagcattttgaaagactgtc

SEQ ID NO: 32453 - DNA, 60 bp, Artificial
  Synthetic oligonucleotide
catttgccaattttctgagtacacaccaaacaaagaaagcattttgaaagactgtcttca

SEQ ID NO: 32454 - DNA, 50 bp, Artificial
  Synthetic oligonucleotide
aacgatatggccaaaagactgccgagcagtggatgcgtgaagaaatagtt

SEQ ID NO: 32455 - DNA, 60 bp, Artificial
  Synthetic oligonucleotide
aacataatggcagtgttgaagtctcaaaaccatggtcttcttctgatgaaaagcttgctt

SEQ ID NO: 32456 - DNA, 60 bp, Artificial
  Synthetic oligonucleotide
aacataatggcaatgttgaagtctcaaaaccatggtcttcttctgatgaaaagcttgctt

SEQ ID NO: 32457 - DNA, 60 bp, Artificial
  Synthetic oligonucleotide
taaacataatggcaatgttgaagtctcaaaaccatggtcttcttctgatgaaaagcttgc

SEQ ID NO: 32458 - DNA, 60 bp, Artificial
  Synthetic oligonucleotide
aacataatggcaatgttgaagtctcaaaacaatggtcttcttctgatgaaaagcttgctt

SEQ ID NO: 32459 - DNA, 60 bp, Artificial
  Synthetic oligonucleotide
cttgacagacattcaggaggatataacccgccatgaacaacaacttgttgttgccagaca

SEQ ID NO: 32460 - DNA, 60 bp, Artificial
  Synthetic oligonucleotide
tagtagtagactccctaaagagctactataataacgatggcaactatggaggaattgcaa

SEQ ID NO: 32461 - DNA, 60 bp, Artificial
  Synthetic oligonucleotide
tagtagtagactccctaaagagctactataacaacgatggcaactatggaggaactacag

SEQ ID NO: 32462 - DNA, 57 bp, Artificial
  Synthetic oligonucleotide
tagtagtagactccctaaagagctactataacaacgatggcaaccatggaagaattg

SEQ ID NO: 32463 - DNA, 60 bp, Artificial
  Synthetic oligonucleotide
aaagaggatccaataatgtcagagttccttttcaacgatgtaccacaacggactacatct

SEQ ID NO: 32464 - DNA, 60 bp, Artificial
  Synthetic oligonucleotide
aaagaggatccaataatgtcagagttcattttcaacgatgtaccacaacggactacatct

SEQ ID NO: 32465 - DNA, 60 bp, Artificial
  Synthetic oligonucleotide
ccaccctctggttcaagcctacgggctgcctctggcggatgcaaaatctgtgagacttgc

SEQ ID NO: 32466 - DNA, 60 bp, Artificial
  Synthetic oligonucleotide
caaaaattgcctcccaccctctggttcaagcctacgggctgcctctggcggatgcaaaat

SEQ ID NO: 32467 - DNA, 53 bp, Artificial
  Synthetic oligonucleotide
atgtcttcaagtgtttatgagtcaatcattcagacaagagcttcagtctgggg

SEQ ID NO: 32468 - DNA, 60 bp, Artificial
  Synthetic oligonucleotide
gttaataaccattttccccagtatactgcaaatccggtgtcagacactgcctttacgctc

SEQ ID NO: 32469 - DNA, 60 bp, Artificial
  Synthetic oligonucleotide
ccgatgatgcacaaaaggattccatctacgcatcagctctggtggaagcaaccaaatttt

SEQ ID NO: 32470 - DNA, 60 bp, Artificial
  Synthetic oligonucleotide
agaacaaagcttttaaatggcaaaccaatttattttccaagatgttcctcaacggaatct

SEQ ID NO: 32471 - DNA, 60 bp, Artificial
  Synthetic oligonucleotide
agaacaaagcttttaaatggcaaaccaattcattttccaagatgttcctcaacggaatct

SEQ ID NO: 32472 - DNA, 60 bp, Artificial
  Synthetic oligonucleotide
acatgccatagatgctggttgtaacatcattgaccatattgactcaccgtcatcaatttg

SEQ ID NO: 32473 - DNA, 60 bp, Artificial
  Synthetic oligonucleotide
gcctcagatatggaaatgtccttgatgtgaatgccattgatattgaagaaccaagtggcc

SEQ ID NO: 32474 - DNA, 60 bp, Artificial
  Synthetic oligonucleotide
agcctcagatatggaaatgtccttgatgtgaatgccattgatattgaagaaccaagtggc

SEQ ID NO: 32475 - DNA, 55 bp, Artificial
  Synthetic oligonucleotide
aaaacaggatttaatatacaagacatggacattgtagcctctgagcacctgctgc

SEQ ID NO: 32476 - DNA, 60 bp, Artificial
  Synthetic oligonucleotide
ggtgatgtgtcattgaaggttaacatcattttggtgcctctcaaggacatgtctaagccg

SEQ ID NO: 32477 - DNA, 52 bp, Artificial
  Synthetic oligonucleotide
gcaaaacaccaagcttcttcacatccccaataagaagttggtgttatacaaa

SEQ ID NO: 32478 - DNA, 54 bp, Artificial
  Synthetic oligonucleotide
tgcaaaacaccaagcttcttcacatccccaataagaagttggtgtgatacaaaa

SEQ ID NO: 32479 - DNA, 60 bp, Artificial
  Synthetic oligonucleotide
gaagaaataagcagcatgatatttaacgctgttagcaagattgacttagaattggcaaac

SEQ ID NO: 32480 - DNA, 60 bp, Artificial
  Synthetic oligonucleotide
aacacaagcatgatatgcctagcattcaaaggagatggtatcaacacagggaagtcaggg

SEQ ID NO: 32481 - DNA, 60 bp, Artificial
  Synthetic oligonucleotide
tcaaattctacccattgacaattggcatctacagagtgaaacatggaatgatggatgctc

SEQ ID NO: 32482 - DNA, 60 bp, Artificial
  Synthetic oligonucleotide
ctacccattgacaattggcatctacagagtgaaacatggaatgatggatgctcagtacct

SEQ ID NO: 32483 - DNA, 60 bp, Artificial
  Synthetic oligonucleotide
attacaaagagcctcaaagatgtggagcagctaaagtggggaaagggtggtctcagcgat

SEQ ID NO: 32484 - DNA, 60 bp, Artificial
  Synthetic oligonucleotide
gatcctgatgcagggtatgtggcatttatggctaaccatggggagtcgatcagtctgtca

SEQ ID NO: 32485 - DNA, 56 bp, Artificial
  Synthetic oligonucleotide
taaagtccattacactattgcaatgggtgatttggttttctatgatgtcgcatcca

SEQ ID NO: 32486 - DNA, 60 bp, Artificial
  Synthetic oligonucleotide
tcttaccttgcaccggatttcaggatatctagctagatgggtgctggagcactttggaga

SEQ ID NO: 32487 - DNA, 60 bp, Artificial
  Synthetic oligonucleotide
gcagggtatgtggcatttatggctaaccatggggagtcgatcagtctgtcaaccgttagg

SEQ ID NO: 32488 - DNA, 60 bp, Artificial
  Synthetic oligonucleotide
ctctccttcttcccaggaactgaaatgtttctggaattgttcaaattctacccattgaca

SEQ ID NO: 32489 - DNA, 60 bp, Artificial
  Synthetic oligonucleotide
ccaaaaggtccattgggccacaaatatagcagcaaaatgggtgggtggtaggggacagca

SEQ ID NO: 32490 - DNA, 60 bp, Artificial
  Synthetic oligonucleotide
ttggcttccaaaaggtccattgggccacaaatatagcagcaaaatgggtgggtggtaggg

SEQ ID NO: 32491 - DNA, 60 bp, Artificial
  Synthetic oligonucleotide
actgccagagctttccttgctaaattcggcgtgagacttccatgagtctgatgctctcct

SEQ ID NO: 32492 - DNA, 60 bp, Artificial
  Synthetic oligonucleotide
gaggacgagtcacaaaaggagctgatcaagagcactgtcatcaatccaattgccgagtcc

SEQ ID NO: 32493 - DNA, 60 bp, Artificial
  Synthetic oligonucleotide
actttggagagggtgaggacgagtcacaaaaggagctgatcaagagcactgtcatcaatc

SEQ ID NO: 32494 - DNA, 60 bp, Artificial
  Synthetic oligonucleotide
gccgagtccaacgggattcgctggggcaacggtgtagaaatctatctctccttcttccca

SEQ ID NO: 32495 - DNA, 60 bp, Artificial
  Synthetic oligonucleotide
cggatttcaggatatctagctagatgggtgctggagcactttggagagggtgaggacgag

SEQ ID NO: 32496 - DNA, 60 bp, Artificial
  Synthetic oligonucleotide
tctcagcgatactgccagagctttccttgctaaattcggcgtgagacttccatgagtctg

SEQ ID NO: 32497 - DNA, 60 bp, Artificial
  Synthetic oligonucleotide
agaaatctatctctccttcttcccaggaactgaaatgtttctggaattgttcaaattcta

SEQ ID NO: 32498 - DNA, 60 bp, Artificial
  Synthetic oligonucleotide
gtcatcaatccaattgccgagtccaacgggattcgctggggcaacggtgtagaaatctat

SEQ ID NO: 32499 - DNA, 60 bp, Artificial
  Synthetic oligonucleotide
cctcaaagatgtggagcagctaaagtggggaaagggtggtctcagcgatactgccagagc

SEQ ID NO: 32500 - DNA, 60 bp, Artificial
  Synthetic oligonucleotide
ccaacagggcttgagcctgatgaccatctgaaggagaagtcttccttacggtatggcaat

SEQ ID NO: 32501 - DNA, 60 bp, Artificial
  Synthetic oligonucleotide
ccggcacgtcagtacgtaagtgttaactttgaggaagtggattgagcatcttaattgcaa

SEQ ID NO: 32502 - DNA, 59 bp, Artificial
  Synthetic oligonucleotide
cggcacgtcagtacgtaagtgttaactttgaggaagtggattgagcatcttaattgcag

SEQ ID NO: 32503 - DNA, 60 bp, Artificial
  Synthetic oligonucleotide
cggcacgtcagtacgtaagtgttaactttgaggaagtggattgagcatcttaattgcagc

SEQ ID NO: 32504 - DNA, 60 bp, Artificial
  Synthetic oligonucleotide
cggcacgtcagtacgtaagtgttaactttgaggaagtggattgagcatctcaattgcaac

SEQ ID NO: 32505 - DNA, 60 bp, Artificial
  Synthetic oligonucleotide
caactttcgatgcatgtgctttgaggatgatgctctgcattggaggtcctctgcctctct

SEQ ID NO: 32506 - DNA, 60 bp, Artificial
  Synthetic oligonucleotide
gggatgacttcatatttgaagttcctcctacaaagagcccatcaataagaagattagagt

SEQ ID NO: 32507 - DNA, 60 bp, Artificial
  Synthetic oligonucleotide
ttttgagattgcaggaacaacagttaagtcagggtggttcaaaagcacaacttatatcac

SEQ ID NO: 32508 - DNA, 60 bp, Artificial
  Synthetic oligonucleotide
aatttagcattgatgtccttacaccacgcatttagaggaacatctagtttttatattgct

SEQ ID NO: 32509 - DNA, 60 bp, Artificial
  Synthetic oligonucleotide
tcccaatcagcatttttgcagatgtgtcaagcatggggacaaatgctcaagctccaattg

SEQ ID NO: 32510 - DNA, 60 bp, Artificial
  Synthetic oligonucleotide
catggagggtttacttgagatcccacgattttgaggcatgtattttatatcccaatcggc

SEQ ID NO: 32511 - DNA, 60 bp, Artificial
  Synthetic oligonucleotide
gatatttcagaaatgctaccggaacatatgccaacaatgttgccattagaaagtggcttg

SEQ ID NO: 32512 - DNA, 60 bp, Artificial
  Synthetic oligonucleotide
ctgcagtgttaatccttacttttgtcactcccataaatgccatggtagctggggacacac

SEQ ID NO: 32513 - DNA, 60 bp, Artificial
  Synthetic oligonucleotide
tggggacacacaagaaacatttaagcttgaggacctaccagatgacatgctgagcatggc

SEQ ID NO: 32514 - DNA, 60 bp, Artificial
  Synthetic oligonucleotide
aactatgcggattagtttaccatcccttcactgagtgcggcacccattgcgtatgtggtg

SEQ ID NO: 32515 - DNA, 60 bp, Artificial
  Synthetic oligonucleotide
cagggcatctgggttgtgtccaggttataaaagtctcagggctgcaagagtcatgtgcaa

SEQ ID NO: 32516 - DNA, 60 bp, Artificial
  Synthetic oligonucleotide
gttgcctatatgtttcaaacttagagacacactgaggcagcatgaagacgcttataagag

SEQ ID NO: 32517 - DNA, 55 bp, Artificial
  Synthetic oligonucleotide
caccagcaagttataggctagaagaggagggaggttcagttacagtcatagacta

SEQ ID NO: 32518 - DNA, 60 bp, Artificial
  Synthetic oligonucleotide
gagcacaagtatgctataaaggtgatctgcaatgaaaagccaggtcctacattgccgttc

SEQ ID NO: 32519 - DNA, 60 bp, Artificial
  Synthetic oligonucleotide
aggtcctacattgccgttcaagatctgcagtgcaaagacagatgctgcaatgacactggc

SEQ ID NO: 32520 - DNA, 60 bp, Artificial
  Synthetic oligonucleotide
tgacactggcagatgctaagccaatattagagctagcacctgtagaccaaacaacatata

SEQ ID NO: 32521 - DNA, 60 bp, Artificial
  Synthetic oligonucleotide
cccgctctagcaggaacatcaataggtttcaagatcacatccaagtctggaaagcattta

SEQ ID NO: 32522 - DNA, 60 bp, Artificial
  Synthetic oligonucleotide
gtacgtggcaggttaatcacaacaatatagacaagattgaggtacatgaactggaggatc

SEQ ID NO: 32523 - DNA, 60 bp, Artificial
  Synthetic oligonucleotide
ttgaggtacatgaactggaggatcttgaacagtataagaaggccataacacagaagttgc

SEQ ID NO: 32524 - DNA, 60 bp, Artificial
  Synthetic oligonucleotide
tggaggatcttgaacagtataagaaggccataacacagaagttgcagacaagcctaaccc

SEQ ID NO: 32525 - DNA, 60 bp, Artificial
  Synthetic oligonucleotide
atcgtcaagcaaaacccatccaaacaggctgtaacagaggtatgcctaaaggatgacgtt

SEQ ID NO: 32526 - DNA, 60 bp, Artificial
  Synthetic oligonucleotide
ggaacagagactgctgagggtttagaaagtgcttatatagaatcagagatacccgctcta

SEQ ID NO: 32527 - DNA, 54 bp, Artificial
  Synthetic oligonucleotide
tgccagctccatatgccaaaatgtagagataataatattaacagtgctaaccct

SEQ ID NO: 32528 - DNA, 60 bp, Artificial
  Synthetic oligonucleotide
aagtggctagtctcagattggcatgactgcagaccaaaaaaagtctcagggggtcacata

SEQ ID NO: 32529 - DNA, 57 bp, Artificial
  Synthetic oligonucleotide
ttttgcagatgtgtcaagcatggggacaaatgctcaagctccaattgggatttcgcc

SEQ ID NO: 32530 - DNA, 60 bp, Artificial
  Synthetic oligonucleotide
cagaggcatatgtatgcaatgcagactgcacaataggtgtagataaagaaaccgcacaag

SEQ ID NO: 32531 - DNA, 60 bp, Artificial
  Synthetic oligonucleotide
gcaagaatatcaaaactgtggtctgcttgtcaccaaagtcaggagtgtcatatgattcaa

SEQ ID NO: 32532 - DNA, 50 bp, Artificial
  Synthetic oligonucleotide
agactcaggagaatgtacagtcaccaccaatagatggcctataatactct

SEQ ID NO: 32533 - DNA, 60 bp, Artificial
  Synthetic oligonucleotide
gagtgtcatatgattcaataattgcctgtggggagccaagccagccaagcatctacagaa

SEQ ID NO: 32534 - DNA, 60 bp, Artificial
  Synthetic oligonucleotide
actactctgagttgcagaaagattatgataaggaccaggatataggtcacttctgtctca

SEQ ID NO: 32535 - DNA, 60 bp, Artificial
  Synthetic oligonucleotide
ccatgtccaactgactgcagaatatgctatgctaactagatactgcgattattacaccca

SEQ ID NO: 32536 - DNA, 60 bp, Artificial
  Synthetic oligonucleotide
ctgtctcagcccaagatgcaacacaattaggcaccctataaatcggaaacatatatcaaa

SEQ ID NO: 32537 - DNA, 60 bp, Artificial
  Synthetic oligonucleotide
ggatatagctggagccctaagattcattgaagagcaaagatcataccatgtccaactgac

SEQ ID NO: 32538 - DNA, 60 bp, Artificial
  Synthetic oligonucleotide
cagaagttgcagacaagcctaaccctatttaaatactcaaagacaaaaaacttgccccat

SEQ ID NO: 32539 - DNA, 56 bp, Artificial
  Synthetic oligonucleotide
aggcggatataacatggaattgtacaggaccattcttgagtctaggtaattgtgag

SEQ ID NO: 32540 - DNA, 60 bp, Artificial
  Synthetic oligonucleotide
caaatgtagacagtgcacatgcgggcagtacggagatgccgcaggtctactaacccacag

SEQ ID NO: 32541 - DNA, 60 bp, Artificial
  Synthetic oligonucleotide
cttgtgttagattcttacataggacaatcctacctgggtctattgccagctccatatgcc

SEQ ID NO: 32542 - DNA, 60 bp, Artificial
  Synthetic oligonucleotide
aagtttcttgtgggcctaaatctatacagttccatgcgtgtttcaatcaacatatgtctt

SEQ ID NO: 32543 - DNA, 60 bp, Artificial
  Synthetic oligonucleotide
tggggtttagatattaaggggaggggggctaacaacagcgtaatctatttgacaaacatt

SEQ ID NO: 32544 - DNA, 60 bp, Artificial
  Synthetic oligonucleotide
gcaagcccagtttatcagaggtgtttccaggatggtgcaatcgtcaagcaaaacccatcc

SEQ ID NO: 32545 - DNA, 60 bp, Artificial
  Synthetic oligonucleotide
cgtgtaaaaaatgtaaactatgcggattagtttaccatcccttcactgagtgcggcaccc

SEQ ID NO: 32546 - DNA, 60 bp, Artificial
  Synthetic oligonucleotide
tgaaaattaggtaaggagcatagctgctaaggaattggggtttagatattaaggggaggg

SEQ ID NO: 32547 - DNA, 60 bp, Artificial
  Synthetic oligonucleotide
gtgtgcctaagtttgattacctgtgtcatttagcaagtagaaaagaagtgatagtgagga

SEQ ID NO: 32548 - DNA, 55 bp, Artificial
  Synthetic oligonucleotide
aactgtagaggcttacagtctgcctagaatcattgcagtgcggaatcatgagatt

SEQ ID NO: 32549 - DNA, 60 bp, Artificial
  Synthetic oligonucleotide
cctgtcaatgtgcctcatggcacaggttggctcacatttgctaaggagaggacaagctcc

SEQ ID NO: 32550 - DNA, 60 bp, Artificial
  Synthetic oligonucleotide
ctactataggtgttaacactaaacatgatgaattatgcacagggccatgtcctgtcaatg

SEQ ID NO: 32551 - DNA, 59 bp, Artificial
  Synthetic oligonucleotide
gaaagcatttattagatgtcattggttatgttaagagcgcatcttattcggccgtttat

SEQ ID NO: 32552 - DNA, 60 bp, Artificial
  Synthetic oligonucleotide
gcaattacccctataatcaccgaccagtttgaagtccaatttaaaactgtagaggcttac

SEQ ID NO: 32553 - DNA, 60 bp, Artificial
  Synthetic oligonucleotide
gtctataggaaggagactgaggagaccacagatgtggaattgtgcctgacatttgcagac

SEQ ID NO: 32554 - DNA, 60 bp, Artificial
  Synthetic oligonucleotide
gacaagctcctgggggtgtgaagaatttggctgcctggcaattagcgatgggtgtgtttt

SEQ ID NO: 32555 - DNA, 60 bp, Artificial
  Synthetic oligonucleotide
ttaaagtcaattcacaagttccaagatgatgttcgtattgtttttcattgcactaagtgc

SEQ ID NO: 32556 - DNA, 60 bp, Artificial
  Synthetic oligonucleotide
attcaagcttatggattacctcttgatgatgcaaagtctgtgaggcttgccataatgcta

SEQ ID NO: 32557 - DNA, 54 bp, Artificial
  Synthetic oligonucleotide
gtggataccttgccaggtacctacttgagaagatgctaaaagtcagtgaaccag

SEQ ID NO: 32558 - DNA, 57 bp, Artificial
  Synthetic oligonucleotide
tcagtggataccttgccaggtacctacttgagaagatgctaaaagtcagtgaaccag

SEQ ID NO: 32559 - DNA, 54 bp, Artificial
  Synthetic oligonucleotide
gtggataccttgccaggtacctacttgagaagatgctaaaagtcagtgaaccgg

SEQ ID NO: 32560 - DNA, 60 bp, Artificial
  Synthetic oligonucleotide
gtcaatcttacttttggacagtgtacatttccagtggttaataaccattttccacagttc

SEQ ID NO: 32561 - DNA, 60 bp, Artificial
  Synthetic oligonucleotide
aaatgtttctgcagacattcactttcttccctttggtgattgagatgcacagggtcctca

SEQ ID NO: 32562 - DNA, 60 bp, Artificial
  Synthetic oligonucleotide
ctgctggtgctgagatgttcctgcagacattcactttcttccctttggtgattgagatgc

SEQ ID NO: 32563 - DNA, 60 bp, Artificial
  Synthetic oligonucleotide
ctgctggtgctgagatgttcctgcaaacattcactttcttccctttggtgattgagatgc

SEQ ID NO: 32564 - DNA, 60 bp, Artificial
  Synthetic oligonucleotide
ggtttgctgctggtgctgagatgttcctgcagacattcactttcttccctttggtgattg

SEQ ID NO: 32565 - DNA, 60 bp, Artificial
  Synthetic oligonucleotide
catctacatttgatccggaggcagcatatgtggcatttgaagctagatacggacaagtgc

SEQ ID NO: 32566 - DNA, 60 bp, Artificial
  Synthetic oligonucleotide
catctacatttgatccggaggcagcatatgtggcatttgaatctagatacggacaagtgc

SEQ ID NO: 32567 - DNA, 60 bp, Artificial
  Synthetic oligonucleotide
gactacatctacatttgatccggaggcagcatatgtggcatttgaagctagatacggaca

SEQ ID NO: 32568 - DNA, 60 bp, Artificial
  Synthetic oligonucleotide
gactacatctacatttgatccggaggcagcatatgtggcatttgaatctagatacggaca

SEQ ID NO: 32569 - DNA, 60 bp, Artificial
  Synthetic oligonucleotide
ctgcaaacattcactttcttccctttggtgattgagatgcatagggttctcaaggatggc

SEQ ID NO: 32570 - DNA, 60 bp, Artificial
  Synthetic oligonucleotide
ctgcagacattcactttcttccctttggtgattgagatgcatagggttctcaaggatggc

SEQ ID NO: 32571 - DNA, 60 bp, Artificial
  Synthetic oligonucleotide
atgtcagagttccttttcaacgatgtaccacaacggactacatctacatttgatccggag

SEQ ID NO: 32572 - DNA, 60 bp, Artificial
  Synthetic oligonucleotide
agagttcattttcaacgatgtaccacaacggactacatctacatttgatccggaggcagc

SEQ ID NO: 32573 - DNA, 60 bp, Artificial
  Synthetic oligonucleotide
atgtcagagttcattttcaacgatgtaccacaacggactacatctacatttgatccggag

SEQ ID NO: 32574 - DNA, 60 bp, Artificial
  Synthetic oligonucleotide
ctgcagacattcactttcttccctttggtgattgagatgcacagggtcctcaaggacggt

SEQ ID NO: 32575 - DNA, 60 bp, Artificial
  Synthetic oligonucleotide
cgatgtaccacaacggactacatctacatttgatccggaggcagcatatgtggcatttga

SEQ ID NO: 32576 - DNA, 60 bp, Artificial
  Synthetic oligonucleotide
gagttcattttcaacgatgtaccacaacggactacatctacatttgatccggaggcagca

SEQ ID NO: 32577 - DNA, 60 bp, Artificial
  Synthetic oligonucleotide
tctggcctgggccagaactggattctccccagcagcaagagacttcttgcgccaattcgg

SEQ ID NO: 32578 - DNA, 60 bp, Artificial
  Synthetic oligonucleotide
tctaaaggctttatatatgctgtcaacccgtggaaggcagaccatcaaggaaaataaagg

SEQ ID NO: 32579 - DNA, 60 bp, Artificial
  Synthetic oligonucleotide
gcactagggccttacagagtacaagtggtctatgaaagaacctactgcatgacaggggtc

SEQ ID NO: 32580 - DNA, 53 bp, Artificial
  Synthetic oligonucleotide
actaggaccccacagggtccaagtggtctatgaaagaacctactgcatgacag

SEQ ID NO: 32581 - DNA, 60 bp, Artificial
  Synthetic oligonucleotide
ctatgcactttactgatgagagaatagaatggaaagaccccgatgggatgttaagggacc

SEQ ID NO: 32582 - DNA, 60 bp, Artificial
  Synthetic oligonucleotide
gcacttcactgatgagagaatagaatggaaagaccctgatggaatgttacgagaccacat

SEQ ID NO: 32583 - DNA, 60 bp, Artificial
  Synthetic oligonucleotide
catgaggaaggtcttacgccagaggtatgggcagctgactgcagaggaatggatgacatc

SEQ ID NO: 32584 - DNA, 60 bp, Artificial
  Synthetic oligonucleotide
cagacattcaggaggatataacccgccatgaacaacagcttgttgttgccagacaaaagc

SEQ ID NO: 32585 - DNA, 60 bp, Artificial
  Synthetic oligonucleotide
gctacgtttaacccggaggtcgggtatgtggcatttattgctaaacatggggcccaactc

SEQ ID NO: 32586 - DNA, 60 bp, Artificial
  Synthetic oligonucleotide
caacggaatctcgctacgtttaacccggaggtcgggtatgtggcatttattgctaaacat

SEQ ID NO: 32587 - DNA, 60 bp, Artificial
  Synthetic oligonucleotide
gctacatttaacccggaggtcgggtatgtggcatttattgctaaatatagggcccaactc

SEQ ID NO: 32588 - DNA, 60 bp, Artificial
  Synthetic oligonucleotide
aacggaatctcgctacatttaacccggaggtcgggtatgtggcatttattgctaaatata

SEQ ID NO: 32589 - DNA, 60 bp, Artificial
  Synthetic oligonucleotide
gaccaagactgtttcggagaacccgctaccactcagctgttggtctgaagttcaaaacta

SEQ ID NO: 32590 - DNA, 60 bp, Artificial
  Synthetic oligonucleotide
agactctatcacagaatcagagggttatgatctagctgcaagaatgatagtggatacaaa

SEQ ID NO: 32591 - DNA, 57 bp, Artificial
  Synthetic oligonucleotide
ggcactccatcatgagtcaattgtgggtgaccaaacattttcacaggatcattcaag

SEQ ID NO: 32592 - DNA, 60 bp, Artificial
  Synthetic oligonucleotide
ggcgctccatcatgagtcaattgtgggtgaccaaacattttcacaggatcattcaagttt

SEQ ID NO: 32593 - DNA, 56 bp, Artificial
  Synthetic oligonucleotide
gcactccatcatgagtcaattgtgggtgaccaaacattttcacaggatcattcaag

SEQ ID NO: 32594 - DNA, 51 bp, Artificial
  Synthetic oligonucleotide
cattaattgcaaaacaccaagcttcttcacatccccaataagaagttggtg

SEQ ID NO: 32595 - DNA, 60 bp, Artificial
  Synthetic oligonucleotide
cctaaaagagattgttctatcatgtatctatatttcccgtctacaacagaatcaaagatc

SEQ ID NO: 32596 - DNA, 60 bp, Artificial
  Synthetic oligonucleotide
gagattgttctatcatgtatctatatttcccgtctacaacagaatcaaagatcaatgatt

SEQ ID NO: 32597 - DNA, 60 bp, Artificial
  Synthetic oligonucleotide
ccaaagctgctctcgctcgtaagccggagaggaaggctagtcctaaatttggagagtggc

SEQ ID NO: 32598 - DNA, 60 bp, Artificial
  Synthetic oligonucleotide
ttttccttaatgccgctaaggccaaggctgctctcgctcgtaagccggagaggaaggcta

SEQ ID NO: 32599 - DNA, 60 bp, Artificial
  Synthetic oligonucleotide
ctgttacaattatagaggccataaggtacctttcatcctcacaaaacaatcccagtgtgc

SEQ ID NO: 32600 - DNA, 60 bp, Artificial
  Synthetic oligonucleotide
gcactgattgctacagcaacatggtttcaatactatacagaagaccaaggccaatttcct

SEQ ID NO: 32601 - DNA, 60 bp, Artificial
  Synthetic oligonucleotide
gtcaaagagtcatgagttttcttttcatgaagtgaagggtcctgctgtatttgattgttt

SEQ ID NO: 32602 - DNA, 60 bp, Artificial
  Synthetic oligonucleotide
aggtgccttaattgagagtttgaacttaagcagccacatagttcaatctgaatgcgtgag

SEQ ID NO: 32603 - DNA, 60 bp, Artificial
  Synthetic oligonucleotide
aagacccagtttatccctacacagagtgtaaaggagcctggaactttcaagttgactgct

SEQ ID NO: 32604 - DNA, 60 bp, Artificial
  Synthetic oligonucleotide
aattgctcattcaggtctcaagaggtcaaagtactggtctgtacatgcctacaataatgg

SEQ ID NO: 32605 - DNA, 60 bp, Artificial
  Synthetic oligonucleotide
cttgagttaaatataagtgagccaacaagctataattcctttactactaaacatacttac

SEQ ID NO: 32606 - DNA, 60 bp, Artificial
  Synthetic oligonucleotide
tgagaggtattataaaattgttagaacctgttcggctcataaagagctgggtatccaaag

SEQ ID NO: 32607 - DNA, 59 bp, Artificial
  Synthetic oligonucleotide
aatggtcttagagccattgcccaatatgatgatgaaagccctaggttcttacttgcgca

SEQ ID NO: 32608 - DNA, 60 bp, Artificial
  Synthetic oligonucleotide
acactccgatctttcttcaagatgacccctgacaactacaagataacaggttcaacgatc

SEQ ID NO: 32609 - DNA, 60 bp, Artificial
  Synthetic oligonucleotide
gtggaatgtatagactatctggaccgtctttacgcaataaggcatgatattgttgaccaa

SEQ ID NO: 32610 - DNA, 55 bp, Artificial
  Synthetic oligonucleotide
aaaacctaccagctgcaatacctcctgctgcctactcattaatcatgaatagagc

SEQ ID NO: 32611 - DNA, 60 bp, Artificial
  Synthetic oligonucleotide
gaggatggatttagtactgtaagctgcatgtcaagtcggctatggtcagaagaggtaagc

SEQ ID NO: 32612 - DNA, 60 bp, Artificial
  Synthetic oligonucleotide
ctgacattgagcatttcctacaagatgaaagctcatatacgggtgatttacttatcatgt

SEQ ID NO: 32613 - DNA, 60 bp, Artificial
  Synthetic oligonucleotide
gggcccttaagtttagacaaaaggaagaccaatatggagaatctatggttgaaaatgggt

SEQ ID NO: 32614 - DNA, 60 bp, Artificial
  Synthetic oligonucleotide
gcattcaatcagcactagaaaaggcacttagatgggcttctggggaaagctttatagagc

SEQ ID NO: 32615 - DNA, 60 bp, Artificial
  Synthetic oligonucleotide
tagaagatttactgcagctctacacaatggattgcctgatgaacgtctaaagaattgtgt

SEQ ID NO: 32616 - DNA, 60 bp, Artificial
  Synthetic oligonucleotide
caacaaagcaaattcaaagggcaaaggtggctaggacttttactgtaagagagaaggatc

SEQ ID NO: 32617 - DNA, 60 bp, Artificial
  Synthetic oligonucleotide
cccagtgtgctacaactttatgaggagactagaaagatcaaggcccaagcccgtatagtc

SEQ ID NO: 32618 - DNA, 60 bp, Artificial
  Synthetic oligonucleotide
gggaggttttagctgcagcaaacagctttgcacaatcatatgaggtaactcaggaggacc

SEQ ID NO: 32619 - DNA, 60 bp, Artificial
  Synthetic oligonucleotide
cagctatgacaatgcagtcaccacttcaattaagatttagaatgcaggcaaaacagcaca

SEQ ID NO: 32620 - DNA, 60 bp, Artificial
  Synthetic oligonucleotide
caatgaaagatggagtttatagagaacttggattagatatctcaaaggctgaggtaatga

SEQ ID NO: 32621 - DNA, 60 bp, Artificial
  Synthetic oligonucleotide
ggcaaaacagcacatgaatgtatgtaagcttgatgataactgggttacattcagggaggt

SEQ ID NO: 32622 - DNA, 60 bp, Artificial
  Synthetic oligonucleotide
gaaggatcaaataattcagaacagtatcccggctgtaataggttacaagtttgcggtgac

SEQ ID NO: 32623 - DNA, 60 bp, Artificial
  Synthetic oligonucleotide
agatatcagaggtgatttgtctgttttacaggtccaagctaatagaagggcgtattcagg

SEQ ID NO: 32624 - DNA, 60 bp, Artificial
  Synthetic oligonucleotide
gcttagtaatggaaagtttattagaatgaagagaaagttgatgtatgtgagtgctgatgc

SEQ ID NO: 32625 - DNA, 60 bp, Artificial
  Synthetic oligonucleotide
ttacaagtttgcggtgactgtagatgaaatgtcagatgtcctagactctgcaaaattccc

SEQ ID NO: 32626 - DNA, 60 bp, Artificial
  Synthetic oligonucleotide
gctgctttggaggccatgttcaatttgaaatttaatataagtaatgtgaaaaatcaacca

SEQ ID NO: 32627 - DNA, 60 bp, Artificial
  Synthetic oligonucleotide
ggagatattccacagccttacaagttaacatttcaggttgtttcggttagaacagacgga

SEQ ID NO: 32628 - DNA, 60 bp, Artificial
  Synthetic oligonucleotide
ataggtgaactcaatgacaaccaagagttagttgaacagcaactttattgccaagatgct

SEQ ID NO: 32629 - DNA, 60 bp, Artificial
  Synthetic oligonucleotide
ccaggtggatagtagaagggcatgtaattctgtattaaatttgatccctgaaaccccaac

SEQ ID NO: 32630 - DNA, 60 bp, Artificial
  Synthetic oligonucleotide
aggcttgacagtagatcaatcaactgttggtgctagtggaatttacccctcattcatgtc

SEQ ID NO: 32631 - DNA, 60 bp, Artificial
  Synthetic oligonucleotide
tgagaatgaacttgaacatgccatcaaatatccaatttcaagacatccaagaaacttcct

SEQ ID NO: 32632 - DNA, 57 bp, Artificial
  Synthetic oligonucleotide
ttttaatagaaaggaggatattggccaacaaaaggaccttgctgcattaaggttatg

SEQ ID NO: 32633 - DNA, 60 bp, Artificial
  Synthetic oligonucleotide
ttgggaagttccttattttagtcagactaggaacataagtttgaaagggatgtcaggcca

SEQ ID NO: 32634 - DNA, 60 bp, Artificial
  Synthetic oligonucleotide
cattcagacatactatagttcttctgcgtagactctttcctcaggactctgtttcaactt

SEQ ID NO: 32635 - DNA, 60 bp, Artificial
  Synthetic oligonucleotide
ctgaaatgtggaaaagcatgtttaatcttcatgagcatgttctacttcttggatccatca

SEQ ID NO: 32636 - DNA, 60 bp, Artificial
  Synthetic oligonucleotide
cctattcccttaggtgggagcggtgctatgtcaataatggagttagcaactgctggtatt

SEQ ID NO: 32637 - DNA, 60 bp, Artificial
  Synthetic oligonucleotide
ggaaacaaagctttatgaaggtgatcttcgagttacttttaattttggactggactgtgc

SEQ ID NO: 32638 - DNA, 59 bp, Artificial
  Synthetic oligonucleotide
ttggtgtaggaatgtcattgctcttcaagcagttgtggagtgaactattcccagagtta

SEQ ID NO: 32639 - DNA, 60 bp, Artificial
  Synthetic oligonucleotide
gggttgttattgtccaaggaaacgtagagggaacagcagaggctatctgtggttactggt

SEQ ID NO: 32640 - DNA, 60 bp, Artificial
  Synthetic oligonucleotide
agatttattcgagtaggtgtccctccagttgatccggagattcattgtgctgcattaatg

SEQ ID NO: 32641 - DNA, 60 bp, Artificial
  Synthetic oligonucleotide
gcctgctgtcaagaacttcttggagttctttcctgatggtcattgtggggaagtccgggg

SEQ ID NO: 32642 - DNA, 60 bp, Artificial
  Synthetic oligonucleotide
ggtttgaagacaagacattctccgagtggttggatagatttattcgagtaggtgtccctc

SEQ ID NO: 32643 - DNA, 60 bp, Artificial
  Synthetic oligonucleotide
gtgaagcaccttgtgttgtttaaaacagaggcaggttttgaatggggcaagcctaatatt

SEQ ID NO: 32644 - DNA, 60 bp, Artificial
  Synthetic oligonucleotide
gagtgagcaacatgtcacttatgattacattatccccaagggtagagacaatttgctgat

SEQ ID NO: 32645 - DNA, 60 bp, Artificial
  Synthetic oligonucleotide
gtaacaacatgtttcttcttatttgaaaaggggctccatggtaatatgaacgaggaagca

SEQ ID NO: 32646 - DNA, 60 bp, Artificial
  Synthetic oligonucleotide
agagtactaaaagatggaatggatgtcaactttatgagaaaggtgctccgccaacgttat

SEQ ID NO: 32647 - DNA, 60 bp, Artificial
  Synthetic oligonucleotide
atctagctaaatgggttgcagatcaatgcaaaacaaaccagataaaactggccgaggcca

SEQ ID NO: 32648 - DNA, 60 bp, Artificial
  Synthetic oligonucleotide
atgcagttcgtgcagccttcaatgctgttggacaattgagctgggctaaatcaggattct

SEQ ID NO: 32649 - DNA, 60 bp, Artificial
  Synthetic oligonucleotide
cctggactgaggggctgactatgtatttaggctttgcaccaggcgcagaaatgttccttg

SEQ ID NO: 32650 - DNA, 60 bp, Artificial
  Synthetic oligonucleotide
ggcaacgggaagcagaatgcaactaagatcattaagatatgtcctacatgggatagcaga

SEQ ID NO: 32651 - DNA, 60 bp, Artificial
  Synthetic oligonucleotide
ggcaacgggaagcagaatgcaactaagatcattaagatatgtcccacatgggatagcaga

SEQ ID NO: 32652 - DNA, 60 bp, Artificial
  Synthetic oligonucleotide
ggatagcagaaagcaatacatgatggtttcaaggattgtgatatgggtttgtcctaccat

SEQ ID NO: 32653 - DNA, 60 bp, Artificial
  Synthetic oligonucleotide
ggatagcagaaagcaatacatgatggtttcaaggattgtgatatggatttgtccaaccat

SEQ ID NO: 32654 - DNA, 60 bp, Artificial
  Synthetic oligonucleotide
aagcagaatgcaactaagatcattaagatatgtcctacatgggacagcagaaagcaatac

SEQ ID NO: 32655 - DNA, 60 bp, Artificial
  Synthetic oligonucleotide
aagatcattaagatatgtcctacatgggacagcagaaagcaatacatgatggtttcaagg

SEQ ID NO: 32656 - DNA, 60 bp, Artificial
  Synthetic oligonucleotide
atacatgatggtttcaaggattgtgatatggatttgtccaaccataccagaccctacagg

SEQ ID NO: 32657 - DNA, 60 bp, Artificial
  Synthetic oligonucleotide
aaagcaatacatgatggtttcaaggattgtgatatgggtttgtcctaccataccagatcc

SEQ ID NO: 32658 - DNA, 60 bp, Artificial
  Synthetic oligonucleotide
atacatgatggtttcaaggattgtgatatgggtttgtcctaccataccagatcctacagg

SEQ ID NO: 32659 - DNA, 60 bp, Artificial
  Synthetic oligonucleotide
cattatgcagatcaactgtcatatccagttggtagtgatcggtctgaataggagttctat

SEQ ID NO: 32660 - DNA, 60 bp, Artificial
  Synthetic oligonucleotide
ctgacttaatacacacttctgctgtaacatgactctccaccacttggtatatattcacta

SEQ ID NO: 32661 - DNA, 60 bp, Artificial
  Synthetic oligonucleotide
gagtcaaccacgtgtgatgttatcccaataaatagagctaaagtgatcagatcagctgct

SEQ ID NO: 32662 - DNA, 60 bp, Artificial
  Synthetic oligonucleotide
ggccacatatagatccttcatttatggcaagacatccaagttcttcacaaccccaccaag

SEQ ID NO: 32663 - DNA, 60 bp, Artificial
  Synthetic oligonucleotide
aaacagtcattgcatgatcctgtgcatgttactagataatctgctattgtggtctctatc

SEQ ID NO: 32664 - DNA, 60 bp, Artificial
  Synthetic oligonucleotide
ggtctctatcttagaggtagaatacttgtatcttacgctgtactcaactccaacactctt

SEQ ID NO: 32665 - DNA, 60 bp, Artificial
  Synthetic oligonucleotide
caacactcttaacatatatcaaaaactccatcggcagatgggtggaatcatcgttgagca

SEQ ID NO: 32666 - DNA, 60 bp, Artificial
  Synthetic oligonucleotide
cccttgattgcagacacattcattagaacaattatgaatggcaagagagaagcacccaca

SEQ ID NO: 32667 - DNA, 60 bp, Artificial
  Synthetic oligonucleotide
gagaataataagagttacttaagtagacaggtctcacaggtcgatgtagaagcagcaatg

SEQ ID NO: 32668 - DNA, 60 bp, Artificial
  Synthetic oligonucleotide
cccaaaggatttgttaaagcaacgttagttgatcaaaataagactacaattgacgagaag

SEQ ID NO: 32669 - DNA, 60 bp, Artificial
  Synthetic oligonucleotide
tagatatacttcagaaattaaaaacaataacaagagaactagacagtagacaagtagata

SEQ ID NO: 32670 - DNA, 60 bp, Artificial
  Synthetic oligonucleotide
gtattgtacctacacttatcaacgcacaatgaagttttgcttgctgccagactagatggt

SEQ ID NO: 32671 - DNA, 60 bp, Artificial
  Synthetic oligonucleotide
gaccattgcctgtcattggacctctatctattgtaagagcgcttagatccgtattgtacc

SEQ ID NO: 32672 - DNA, 60 bp, Artificial
  Synthetic oligonucleotide
ggaactgttggatcactttaaggtctttccacttgcctttctggtcaccgatgatgtagc

SEQ ID NO: 32673 - DNA, 60 bp, Artificial
  Synthetic oligonucleotide
aactctgaaccactgtacaatctgttgaagtttgtggtaggtatgtctttcagtgatttc

SEQ ID NO: 32674 - DNA, 60 bp, Artificial
  Synthetic oligonucleotide
acatgcaatcattctcctttgttctcttagaaacaactacaccgtctctgtagatagttt

SEQ ID NO: 32675 - DNA, 60 bp, Artificial
  Synthetic oligonucleotide
caggtcgatgtagaagcagcaatgaaaagcaaagctatgacagcgaatggtaagcaatat

SEQ ID NO: 32676 - DNA, 60 bp, Artificial
  Synthetic oligonucleotide
ggttatcgttagcccaatagagcattcacatgtctctagaccattgcctgtcattggacc

SEQ ID NO: 32677 - DNA, 60 bp, Artificial
  Synthetic oligonucleotide
cagctgctttaatagaagcatgcaaactcttggtacctaaagggactagtgggaagcaga

SEQ ID NO: 32678 - DNA, 60 bp, Artificial
  Synthetic oligonucleotide
gctgcaaaagattgcagaaaaatgtgcaatggagtcagagggtgaggactatgctgaaga

SEQ ID NO: 32679 - DNA, 60 bp, Artificial
  Synthetic oligonucleotide
gcctgggcaaagaatttctgtgatactcctattgcagctgagtcaaccacgtgtgatgtt

SEQ ID NO: 32680 - DNA, 60 bp, Artificial
  Synthetic oligonucleotide
atacaatcaaagtaaaacagaaattatgtctcctttgtctactgtgctagctgtttttag

SEQ ID NO: 32681 - DNA, 60 bp, Artificial
  Synthetic oligonucleotide
gatccccatagatattgacgagccagaaaggagtagactagaaatctaatgttgattgcg

SEQ ID NO: 32682 - DNA, 60 bp, Artificial
  Synthetic oligonucleotide
ctgatgtgtacgagatattgcaatctatccccattgcacattgaatacaaccagaacatg

SEQ ID NO: 32683 - DNA, 60 bp, Artificial
  Synthetic oligonucleotide
agagcaagagtctgcaactagtcgcgcagagaaagtagtgtctgatgtgtacgagatatt

SEQ ID NO: 32684 - DNA, 60 bp, Artificial
  Synthetic oligonucleotide
gtcaacaggtacaaaatcatctatgggtattctcactgttaaatcgctctggtcttcagg

SEQ ID NO: 32685 - DNA, 56 bp, Artificial
  Synthetic oligonucleotide
gtcccagaaagtagccaacgatgtgtcagagtgatgtttgttctcatcatgtgcac

SEQ ID NO: 32686 - DNA, 60 bp, Artificial
  Synthetic oligonucleotide
gctccaaagaatgatgcaacccaattaaatggtgctttgacccagtcccagaaagtagcc

SEQ ID NO: 32687 - DNA, 60 bp, Artificial
  Synthetic oligonucleotide
aaatgctgaaccccacaacgataacgaccaatataattctgacgatatcaaagaatgctc

SEQ ID NO: 32688 - DNA, 57 bp, Artificial
  Synthetic oligonucleotide
aaactcataattccttggtggtgttcttctcttcctagctgtactgacatgcattga

SEQ ID NO: 32689 - DNA, 60 bp, Artificial
  Synthetic oligonucleotide
ccacattgctttatattgattttcttttctccaattgctgaacagctccatgtaaagtca

SEQ ID NO: 32690 - DNA, 51 bp, Artificial
  Synthetic oligonucleotide
ttttactttgcagcttcatcacaggggccacagggtaagttttgaaaacca

SEQ ID NO: 32691 - DNA, 60 bp, Artificial
  Synthetic oligonucleotide
gctcaggtataggcaattcgttatccataaggtcctcagggtcatcgacgttatacctgt

SEQ ID NO: 32692 - DNA, 60 bp, Artificial
  Synthetic oligonucleotide
ggacagtgatagtttgtaaatggaatttaacatgtaaatgctgaaccccacaacgataac

SEQ ID NO: 32693 - DNA, 60 bp, Artificial
  Synthetic oligonucleotide
cacccacatattctgcattggaaagggaaatacttccacaaccaattgagcagccaaagg

SEQ ID NO: 32694 - DNA, 60 bp, Artificial
  Synthetic oligonucleotide
ccaattgagcagccaaaggattggatatatcactatgcccataatatcataccagatgct

SEQ ID NO: 32695 - DNA, 60 bp, Artificial
  Synthetic oligonucleotide
catctaaaatactggaagttggtacagaagaatatctttttgggttcgtctgaaaacttc

SEQ ID NO: 32696 - DNA, 60 bp, Artificial
  Synthetic oligonucleotide
tatcaccacaaagcaagaagtgatttccatcaagttcatcaggtctgaagttgattgtag

SEQ ID NO: 32697 - DNA, 60 bp, Artificial
  Synthetic oligonucleotide
cttgacaacaactccaatgttctcagttgcttttagagaaacctgatagggggctaccat

SEQ ID NO: 32698 - DNA, 60 bp, Artificial
  Synthetic oligonucleotide
tgtgattttctgcatactgacaagcatagctaccatacatgcaatcattctcctttgttc

SEQ ID NO: 32699 - DNA, 60 bp, Artificial
  Synthetic oligonucleotide
ctaaagagagaaacactttaaagcaatgtactcaattgatcttcactagcaatgaaaaat

SEQ ID NO: 32700 - DNA, 64 bp, Artificial
  Synthetic oligonucleotide
cacttacagatccaatgtgttttattttccatttaagttggtcgatacctaaagagagaaacac

SEQ ID NO: 32701 - DNA, 60 bp, Artificial
  Synthetic oligonucleotide
ctcgtaaagactcactctctaaagcctgggcttctttaaaactgtctacgaacccattcc

SEQ ID NO: 32702 - DNA, 60 bp, Artificial
  Synthetic oligonucleotide
ctttccatcaatttctgtggaaaacactagagactgtcgaggcataagattctctggtgg

SEQ ID NO: 32703 - DNA, 60 bp, Artificial
  Synthetic oligonucleotide
ctggtggtatgtcttctattttcaaggagttatagaacatatactctcgtaaagactcac

SEQ ID NO: 32704 - DNA, 60 bp, Artificial
  Synthetic oligonucleotide
tcgttgagcaggaaaattgatcctgtgttagatttaatgtccatttctatcatatagcgg

SEQ ID NO: 32705 - DNA, 60 bp, Artificial
  Synthetic oligonucleotide
gactctagctctgatgacattctatccagacttgttatagagcgaagtacccatttaagt

SEQ ID NO: 32706 - DNA, 60 bp, Artificial
  Synthetic oligonucleotide
ccatttaagtagttggaagaacgattccttagttgggaacggtgaaaagaaagtaacttt

SEQ ID NO: 32707 - DNA, 60 bp, Artificial
  Synthetic oligonucleotide
ccaacttgataccaacttggaacagtaataagaaattcatgcatctctcaagacttatcg

SEQ ID NO: 32708 - DNA, 60 bp, Artificial
  Synthetic oligonucleotide
ggtaggtatgtctttcagtgatttcaaagcattgcaaccatttctgcaagcaaagagatt

SEQ ID NO: 32709 - DNA, 60 bp, Artificial
  Synthetic oligonucleotide
gcctctcttgtctagcataacaggtctggcaccaattatattccctctggcttattatca

SEQ ID NO: 32710 - DNA, 60 bp, Artificial
  Synthetic oligonucleotide
cggcgttttttcaaaaaacatagcatacaggaaatggctagtttcagattggaatgagtg

SEQ ID NO: 32711 - DNA, 60 bp, Artificial
  Synthetic oligonucleotide
gaagttcaaccagacctatctttgcaaactaactcctatgtctgtgctgcaacatgtgtt

SEQ ID NO: 32712 - DNA, 60 bp, Artificial
  Synthetic oligonucleotide
gtttgacaaatcaagaatagtcgatccacaaactacatgtacctctttgaaaggagtgaa

SEQ ID NO: 32713 - DNA, 60 bp, Artificial
  Synthetic oligonucleotide
ccaagtatggccgataactatatgctctgacgatcaatattattatacagacacgaaaca

SEQ ID NO: 32714 - DNA, 60 bp, Artificial
  Synthetic oligonucleotide
ggatataaatgctgaaggtgtctgcgcagggtgcatcaattgttttgagagaattaactg

SEQ ID NO: 32715 - DNA, 60 bp, Artificial
  Synthetic oligonucleotide
ataatagatgcaaaacctatattggagcttgcccctgtggatcaaacagcatatattaag

SEQ ID NO: 32716 - DNA, 60 bp, Artificial
  Synthetic oligonucleotide
gtagtgtactaccaagtatagataacgttcttgaatagaatcgagagacaaaatgaggaa

SEQ ID NO: 32717 - DNA, 60 bp, Artificial
  Synthetic oligonucleotide
ccatctggcaagcagaagagaagtcataatgaggaagtgttttgacaatgattaccaagc

SEQ ID NO: 32718 - DNA, 60 bp, Artificial
  Synthetic oligonucleotide
cggtgattctcattgcttaacaaaattcacgcccataacagaagaattgttggcagctgt

SEQ ID NO: 32719 - DNA, 60 bp, Artificial
  Synthetic oligonucleotide
cactctaaagaagcacgaggatgcttacaaaagagaaatgaaaataaggtaaagatagca

SEQ ID NO: 32720 - DNA, 60 bp, Artificial
  Synthetic oligonucleotide
tgtgtaaaaatgggggaaaaatgtacaagttcaaattgggactttgcaaatcaaatggct

SEQ ID NO: 32721 - DNA, 60 bp, Artificial
  Synthetic oligonucleotide
gtgcaggccacaaaagtcagcaaatggacacatcaatgtgattgaagttcaaccagacct

SEQ ID NO: 32722 - DNA, 60 bp, Artificial
  Synthetic oligonucleotide
cctatattggagcttgcccctgtggatcaaacagcatatattaaggagaaagatgaaagg

SEQ ID NO: 32723 - DNA, 60 bp, Artificial
  Synthetic oligonucleotide
tgtgcaggtatttaatggaacaaattatggttcaggaacccccagatttgactatctatg

SEQ ID NO: 32724 - DNA, 60 bp, Artificial
  Synthetic oligonucleotide
aaacatagcatacaggaaatggctagtttcagattggaatgagtgcaggccacaaaagtc

SEQ ID NO: 32725 - DNA, 60 bp, Artificial
  Synthetic oligonucleotide
attgaaagcactgataggctaccaaatctatttaaaaagccttagtgaaatgtctagttt

SEQ ID NO: 32726 - DNA, 54 bp, Artificial
  Synthetic oligonucleotide
cagatacaacaaaccattttgaaatatctggcacaactgtgaaatctggatggt

SEQ ID NO: 32727 - DNA, 60 bp, Artificial
  Synthetic oligonucleotide
gtgttatcagtattgataaagaaacagcacaggtacgccttcagacagatacaacaaacc

SEQ ID NO: 32728 - DNA, 60 bp, Artificial
  Synthetic oligonucleotide
caactacatgcgtgcttcaatcagcatatgagctgtgttagatttctacataggacaatt

SEQ ID NO: 32729 - DNA, 60 bp, Artificial
  Synthetic oligonucleotide
ggttcaaagtctgtacaactacatgcgtgcttcaatcagcatatgagctgtgttagattt

SEQ ID NO: 32730 - DNA, 60 bp, Artificial
  Synthetic oligonucleotide
ctatgtggactggtatatcacccttttacagaatgcggcagtcattgtgtttgtggggca

SEQ ID NO: 32731 - DNA, 60 bp, Artificial
  Synthetic oligonucleotide
caataataagtaagacatatatatgttatgtactaataccaatattcataccaatagctt

SEQ ID NO: 32732 - DNA, 59 bp, Artificial
  Synthetic oligonucleotide
ttgtggggcaaaatatgacacatctgacaggatgaaaatgcatagatcatcaggattat

SEQ ID NO: 32733 - DNA, 59 bp, Artificial
  Synthetic oligonucleotide
atcgttattgagtgcagtcttgatcctaacttttgtaacacctataacggccatatcac

SEQ ID NO: 32734 - DNA, 60 bp, Artificial
  Synthetic oligonucleotide
ggctgcaagatctatgtgcaaatcaaaaggaccagctcccatactatcgttattgagtgc

SEQ ID NO: 32735 - DNA, 60 bp, Artificial
  Synthetic oligonucleotide
gccccaacatttaaaccaaatctcggcagaagtggagacaatgaatacaagtttgacaaa

SEQ ID NO: 32736 - DNA, 60 bp, Artificial
  Synthetic oligonucleotide
gacgatgttagtatgataaaaacagaggctgaatacttcaagaattcaaccggcgttttt

SEQ ID NO: 32737 - DNA, 60 bp, Artificial
  Synthetic oligonucleotide
ggttcctgtcaagatataattaaacctgagatgactgtttataggaagcaaacagatgaa

SEQ ID NO: 32738 - DNA, 60 bp, Artificial
  Synthetic oligonucleotide
tttgaggtacaattcaaaacagtagaaagttacagtttacccaaaatagttgcaattaaa

SEQ ID NO: 32739 - DNA, 60 bp, Artificial
  Synthetic oligonucleotide
agatgcacaagacctcaaaaaaaggaaaactacggaaatatagcaactcaactgaaaggc

SEQ ID NO: 32740 - DNA, 60 bp, Artificial
  Synthetic oligonucleotide
gcaatatgctgacaattcaggctacagtcagacaacatggagggcatacataagatctca

SEQ ID NO: 32741 - DNA, 51 bp, Artificial
  Synthetic oligonucleotide
ggagggcatacataagatctcatgactttggggtttgtataatgtacccga

SEQ ID NO: 32742 - DNA, 60 bp, Artificial
  Synthetic oligonucleotide
aaataccagaagatattgctggggcattgtcatacatcgaatctaaaaagacatatcatg

SEQ ID NO: 32743 - DNA, 60 bp, Artificial
  Synthetic oligonucleotide
tgatttctataagcaatatgctgacaattcaggctacagtcagacaacatggagggcata

SEQ ID NO: 32744 - DNA, 60 bp, Artificial
  Synthetic oligonucleotide
cacgaaacaatcatatgactcatatcaagatattggacacttctgcctatctccaaggtg

SEQ ID NO: 32745 - DNA, 60 bp, Artificial
  Synthetic oligonucleotide
tctattacaaaaattgcagacagggctgaacattttcaaatacaggaagacaagcaatct

SEQ ID NO: 32746 - DNA, 60 bp, Artificial
  Synthetic oligonucleotide
gcatcatgcttttagaggaagtactagttacttaatatctaaagtcctccatgagaaaaa

SEQ ID NO: 32747 - DNA, 60 bp, Artificial
  Synthetic oligonucleotide
ggcgtagaaaatgcttacatagaatctgaaatgcctgctttggccggtagttcttctgga

SEQ ID NO: 32748 - DNA, 60 bp, Artificial
  Synthetic oligonucleotide
agttcttctggatttaaagttttatctaaagaaggtaatcatttatttgatgttgtggcc

SEQ ID NO: 32749 - DNA, 60 bp, Artificial
  Synthetic oligonucleotide
gggacccaccttaggcataaatgtaaaacatgatgagaaatgcacagggccatgtcctgc

SEQ ID NO: 32750 - DNA, 52 bp, Artificial
  Synthetic oligonucleotide
tagagagagaacaagcacctggggacgtgaagaatatggatgcttggcaatt

SEQ ID NO: 32751 - DNA, 60 bp, Artificial
  Synthetic oligonucleotide
actgaaaggcctagatgtgttatctgctttagatatgccagctgtaggtaaaataccaga

SEQ ID NO: 32752 - DNA, 60 bp, Artificial
  Synthetic oligonucleotide
ctgacgagctctgggatgatctgcaatatgtcccagccccaacatttaaaccaaatctcg

SEQ ID NO: 32753 - DNA, 57 bp, Artificial
  Synthetic oligonucleotide
tgcaagcaatacagatgtcaaggattgcttggaccaagaagaaataacctggaattg

SEQ ID NO: 32754 - DNA, 60 bp, Artificial
  Synthetic oligonucleotide
gtgaacagtatgaggatgctactggattactaacacatcggaaatcatataatcgtctag

SEQ ID NO: 32755 - DNA, 60 bp, Artificial
  Synthetic oligonucleotide
tggacgttgaatttcttgataacatatgctatcttagttatcatcaaagactctgtaatg

SEQ ID NO: 32756 - DNA, 60 bp, Artificial
  Synthetic oligonucleotide
cttgattattatgctgtctattgccatgaatgtgacatgtatcatgaaaagacgagcctg

SEQ ID NO: 32757 - DNA, 60 bp, Artificial
  Synthetic oligonucleotide
ttaccagaattacctgatgataaggttaatttggaaaccaagattgacttatacttccaa

SEQ ID NO: 32758 - DNA, 60 bp, Artificial
  Synthetic oligonucleotide
aatagtcgatccacaaactacatgtacctctttgaaaggagtgaattgcttatcgccaag

SEQ ID NO: 32759 - DNA, 60 bp, Artificial
  Synthetic oligonucleotide
gaaataacctggaattgtactggacccttcttgaatatgggaagatgcacaagacctcaa

SEQ ID NO: 32760 - DNA, 54 bp, Artificial
  Synthetic oligonucleotide
attccaaaccatgacttgttctctctactgctctgttctcggagcatactacta

SEQ ID NO: 32761 - DNA, 58 bp, Artificial
  Synthetic oligonucleotide
ttatgaaaggcttgccagcagcaattcctcctgcagcttattctttaattatgaataa

SEQ ID NO: 32762 - DNA, 51 bp, Artificial
  Synthetic oligonucleotide
atagattctatggatgagcattctgaggctgtccaagatttcctcgatttt

SEQ ID NO: 32763 - DNA, 60 bp, Artificial
  Synthetic oligonucleotide
catcgctatatagattctatggatgagcattctgaggctgtgcaagatttcctcgacttc

SEQ ID NO: 32764 - DNA, 60 bp, Artificial
  Synthetic oligonucleotide
gcagacaaagcagcacaaagctcaagcacgtattgtaagaaaatatcaacgtactgaggc

SEQ ID NO: 32765 - DNA, 60 bp, Artificial
  Synthetic oligonucleotide
aacgttattgacatgtatgaacagacaaagcagcacaaagctcaagcacgtattgtgagg

SEQ ID NO: 32766 - DNA, 60 bp, Artificial
  Synthetic oligonucleotide
ggcgaaccattagaaagtataaatatatcaagccagattcaacagaatgagtgttcacgc

SEQ ID NO: 32767 - DNA, 60 bp, Artificial
  Synthetic oligonucleotide
gcctgatgaacgtgcatcattagaagccatgtttaatcttaagtttcatgtaggaggccc

SEQ ID NO: 32768 - DNA, 51 bp, Artificial
  Synthetic oligonucleotide
ccagatcatgacttgttctctctactgctctgttctcggagcatactacta

SEQ ID NO: 32769 - DNA, 60 bp, Artificial
  Synthetic oligonucleotide
ctcaatggcctagtcggcgtaatgatggtgttgttcaacatatgaggcttgttcaggctg

SEQ ID NO: 32770 - DNA, 60 bp, Artificial
  Synthetic oligonucleotide
gggagcacctcataaaacctgacgagcgtgcatcattagaagccatgtttaatcttaagt

SEQ ID NO: 32771 - DNA, 60 bp, Artificial
  Synthetic oligonucleotide
ggctgtaaagacagatggttcaaatatatctactcaatggcctagtcggcgtaatgatgg

SEQ ID NO: 32772 - DNA, 66 bp, Artificial
  Synthetic oligonucleotide
cacaaatcataaagttaccaagctttgttagtgaaggatcattactcaagaattctagctttcaag

SEQ ID NO: 32773 - DNA, 60 bp, Artificial
  Synthetic oligonucleotide
gtcgaacatcgtggaaagagggtatcctgaagggaaaggagtaattgaatctggtctcaa

SEQ ID NO: 32774 - DNA, 60 bp, Artificial
  Synthetic oligonucleotide
tgcatctgaatctgaggtggagtttatctctgaaagaatcattaatggagcagttatacc

SEQ ID NO: 32775 - DNA, 61 bp, Artificial
  Synthetic oligonucleotide
gtgaaaagagccataaataatataaagacatcaactcatgttactctctcattcagacctc

SEQ ID NO: 32776 - DNA, 60 bp, Artificial
  Synthetic oligonucleotide
cagaacaagaataaaagggagataatctatgggcgagagaaaaggtataagtcatagaat

SEQ ID NO: 32777 - DNA, 60 bp, Artificial
  Synthetic oligonucleotide
agctactccaaattatgcagtacaagagccatttaaagcagaagctttaatcaaaaaagc

SEQ ID NO: 32778 - DNA, 65 bp, Artificial
  Synthetic oligonucleotide
gctgatgtagaattcttgacagaaaagtgtttgtattcgaacataactaacgaagaaataagcag

SEQ ID NO: 32779 - DNA, 60 bp, Artificial
  Synthetic oligonucleotide
cagatggtttattacagagaaagtccctagtgtaattgaaggatcaccaggcttaattgt

SEQ ID NO: 32780 - DNA, 58 bp, Artificial
  Synthetic oligonucleotide
cgaattaggtctaaaaaagcttcccttaactgaaacttccatttctatactgcatgat

SEQ ID NO: 32781 - DNA, 60 bp, Artificial
  Synthetic oligonucleotide
gtgtctgataggttgcaaagtctgttcccagccatgactatagaatcaatcaagcaagtg

SEQ ID NO: 32782 - DNA, 60 bp, Artificial
  Synthetic oligonucleotide
ggaagaattaagcaggcacatgtcttctcatccagaatcatttctgattgcaccaatgaa

SEQ ID NO: 32783 - DNA, 60 bp, Artificial
  Synthetic oligonucleotide
cctttccagcttcaattgttctagcttatcagagttactattcagaagcatccagtctca

SEQ ID NO: 32784 - DNA, 60 bp, Artificial
  Synthetic oligonucleotide
gtgagggatatgaattttgaaatggttgtatcactcatggagaacactgttgccaacgcc

SEQ ID NO: 32785 - DNA, 60 bp, Artificial
  Synthetic oligonucleotide
ctacctgtcatctgtctatcattcttgtgccatgatgggttatgtaaaagctatgcagaa

SEQ ID NO: 32786 - DNA, 60 bp, Artificial
  Synthetic oligonucleotide
gcttctgcagcaaagcttatttctgtaaattccctgggacagcttattggcctaggcgca

SEQ ID NO: 32787 - DNA, 60 bp, Artificial
  Synthetic oligonucleotide
gtgtgcctgctgaatgggaaattaaatttagggaaaagatgggatttatgataggtgatg

SEQ ID NO: 32788 - DNA, 60 bp, Artificial
  Synthetic oligonucleotide
catttggaaagcatccggatgatattaaagggtctgacttatacatattgaaaggagtct

SEQ ID NO: 32789 - DNA, 60 bp, Artificial
  Synthetic oligonucleotide
aggaagtaacaaggtgctcatgaaaacaaatcaggacaaattctattacaaaagtcatcc

SEQ ID NO: 32790 - DNA, 60 bp, Artificial
  Synthetic oligonucleotide
tttaaaacaactccggtgctgaagtcaaagaaagttagcgaagaattatatgacttgatc

SEQ ID NO: 32791 - DNA, 60 bp, Artificial
  Synthetic oligonucleotide
cctattcaaggctcctagtaaagtacctatactcttttcgcaatactctttgctgagcac

SEQ ID NO: 32792 - DNA, 60 bp, Artificial
  Synthetic oligonucleotide
gtactgtgaccaagctcagcagaatggggatatttgatttcatgaggtatgctggctttt

SEQ ID NO: 32793 - DNA, 60 bp, Artificial
  Synthetic oligonucleotide
ttaggtcgtggattgaaaggtaatagagtgacatttatccaattgctagagtttatcttg

SEQ ID NO: 32794 - DNA, 60 bp, Artificial
  Synthetic oligonucleotide
catgtagcacaatctgatccatctgaagcaatctcaatctctggagattacaagataaag

SEQ ID NO: 32795 - DNA, 60 bp, Artificial
  Synthetic oligonucleotide
gggacagcttattggcctaggcgcagattgctttagacgattttactcagaaacgcaaac

SEQ ID NO: 32796 - DNA, 60 bp, Artificial
  Synthetic oligonucleotide
catgcaagacatcggaagagtttgaaaattatttgaagagagttgactttcaatctacgg

SEQ ID NO: 32797 - DNA, 55 bp, Artificial
  Synthetic oligonucleotide
gacaaacagagtgctattaaaaccttcttgaatgtcagggctgatctgatgccaa

SEQ ID NO: 32798 - DNA, 60 bp, Artificial
  Synthetic oligonucleotide
gaccaaatcaggcaaagtgaagtccattacatcaaaacagatgaacaagatgtgagaggt

SEQ ID NO: 32799 - DNA, 60 bp, Artificial
  Synthetic oligonucleotide
caggtgttagaagcacatgggtttagtgtgactgggcaaaacttgaagttggatgaagta

SEQ ID NO: 32800 - DNA, 60 bp, Artificial
  Synthetic oligonucleotide
cctccacaaacattattaaccagatagttgacatagatggattgaaagagaagttggtct

SEQ ID NO: 32801 - DNA, 60 bp, Artificial
  Synthetic oligonucleotide
gccaacggagctgatttccactcactatctgcaagtgaggtcatgacatcccaaggattt

SEQ ID NO: 32802 - DNA, 60 bp, Artificial
  Synthetic oligonucleotide
aattgatgcaatgcctaacaacacagtgaacaaagagacacttgtgcatttcttatttgg

SEQ ID NO: 32803 - DNA, 60 bp, Artificial
  Synthetic oligonucleotide
ccgatgttttcttaaaggactgtcttatgtcttatatagaattctgcaacacctccacaa

SEQ ID NO: 32804 - DNA, 60 bp, Artificial
  Synthetic oligonucleotide
tcacataatagttattttgatgacctaatgtctctttctatccacataaccatgcttttg

SEQ ID NO: 32805 - DNA, 60 bp, Artificial
  Synthetic oligonucleotide
gtgagggaaaatagattgctttgtgttcaagatgctgtcatgacttgcagaataagtgga

SEQ ID NO: 32806 - DNA, 60 bp, Artificial
  Synthetic oligonucleotide
cagcaatacaaattcaatcacttagcatatactctatgcttccaggtgaggaaaatgaca

SEQ ID NO: 32807 - DNA, 59 bp, Artificial
  Synthetic oligonucleotide
gcatgcccctattgaactactgtctatcctgggtccgtcttcaaatgatcagttaatat

SEQ ID NO: 32808 - DNA, 60 bp, Artificial
  Synthetic oligonucleotide
aaaatcagatgtgttatataggaaagccaaagaagtggaaatagaaagcattgaacgtgc

SEQ ID NO: 32809 - DNA, 65 bp, Artificial
  Synthetic oligonucleotide
gtgaaatcaacctaatgtgtgaatgcataatgatgtatgtgaaattgaaaagagtttgcattccc

SEQ ID NO: 32810 - DNA, 60 bp, Artificial
  Synthetic oligonucleotide
gatgtctgaagattgtgatagtctaaatgtagggatgaagttccagtctatgataacaca

SEQ ID NO: 32811 - DNA, 60 bp, Artificial
  Synthetic oligonucleotide
gaagagggaaatccctatatgtgctggtggttggatgcatgcccctattgaactactgtc

SEQ ID NO: 32812 - DNA, 60 bp, Artificial
  Synthetic oligonucleotide
agcattcaaaggtgatggcataaacacaggaaaatcaggtgtaccatatatcactttgca

SEQ ID NO: 32813 - DNA, 66 bp, Artificial
  Synthetic oligonucleotide
gaacaacctaaattaattcatcacaaatcatatggaggtagcaagatggatattcacttttccatg

SEQ ID NO: 32814 - DNA, 60 bp, Artificial
  Synthetic oligonucleotide
gacaaacttttcaatctgttggtcacctatgacagaagaattagaaatgaatgagcgaaa

SEQ ID NO: 32815 - DNA, 60 bp, Artificial
  Synthetic oligonucleotide
ggcaaagggtttaatggtagctgacagatttatgaagaaaacagatttcaagatcctaac

SEQ ID NO: 32816 - DNA, 60 bp, Artificial
  Synthetic oligonucleotide
ggcatgataaccctgatgtgaagtatcattgtgaatcaatgatagaagccatgtatgttc

SEQ ID NO: 32817 - DNA, 60 bp, Artificial
  Synthetic oligonucleotide
gcaaaatacaagaatctatagcaaaacagaaagatgaagactcgaatggacctagtggag

SEQ ID NO: 32818 - DNA, 60 bp, Artificial
  Synthetic oligonucleotide
ctagaatgtaaaatggctttcttgtcagccgaccaatcaaaatggtcagcttcagattta

SEQ ID NO: 32819 - DNA, 60 bp, Artificial
  Synthetic oligonucleotide
cgatctatttggtgtccttgctgggagaagattgcattttgcacccaagcatagatccga

SEQ ID NO: 32820 - DNA, 60 bp, Artificial
  Synthetic oligonucleotide
ttttgaattctaccctttaacgatcgggatgtatagggtgcgacgatggtctatggaccc

SEQ ID NO: 32821 - DNA, 50 bp, Artificial
  Synthetic oligonucleotide
attccactgcctgactacggactcacgttgcatcgcatatcgggttactt

SEQ ID NO: 32822 - DNA, 60 bp, Artificial
  Synthetic oligonucleotide
gtggtgttaaccttgccgtacttaacacacatttcccaggaacccagtccattccactgc

SEQ ID NO: 32823 - DNA, 60 bp, Artificial
  Synthetic oligonucleotide
ggccaggacagcgttcacgagtgctgctagagaattcgtgagccgatttggtatacgttt

SEQ ID NO: 32824 - DNA, 60 bp, Artificial
  Synthetic oligonucleotide
ttttgaattctaccctttaacgattggcatgtatagggtgcgacgatggtctatggaccc

SEQ ID NO: 32825 - DNA, 59 bp, Artificial
  Synthetic oligonucleotide
cagcgttcacgagtgctgctagagaattcgtgagccgatttggtatacgtttagcgtaa

SEQ ID NO: 32826 - DNA, 60 bp, Artificial
  Synthetic oligonucleotide
ggtataggtgctgaccagtggataacgaaggagacggtcgcaatcctgacacgttttgag

SEQ ID NO: 32827 - DNA, 60 bp, Artificial
  Synthetic oligonucleotide
gatgttcatgtcgacttttgaattctaccctttaacgattggcatgtatagggtgcgacg

SEQ ID NO: 32828 - DNA, 60 bp, Artificial
  Synthetic oligonucleotide
gatgtttatgtcgacttttgaattctaccctttaacgatagggatgtatagggtgcgacg

SEQ ID NO: 32829 - DNA, 60 bp, Artificial
  Synthetic oligonucleotide
gatgtttatgtcgacttttgaattctaccctttaacgatcgggatgtatagggtgcgacg

SEQ ID NO: 32830 - DNA, 60 bp, Artificial
  Synthetic oligonucleotide
ttgggccaggacagcgttcacgagtgctgctagagaattcgtgagccgatttggtatccg

SEQ ID NO: 32831 - DNA, 60 bp, Artificial
  Synthetic oligonucleotide
acatggcgtgacggagtggagatgtacctagcgtttttgccaggtgcagagatgtttatg

SEQ ID NO: 32832 - DNA, 60 bp, Artificial
  Synthetic oligonucleotide
acatggcgtgacggagtggagatgtacctagcatttttgccaggggctgagatgttcatg

SEQ ID NO: 32833 - DNA, 52 bp, Artificial
  Synthetic oligonucleotide
cacgagtgctgctagagaattcgtgagccgatttggtatacgtttagcgtaa

SEQ ID NO: 32834 - DNA, 60 bp, Artificial
  Synthetic oligonucleotide
gatgttcatgtcgacttttgaattctaccctttaacgattggtatgtatagggtgcgacg

SEQ ID NO: 32835 - DNA, 52 bp, Artificial
  Synthetic oligonucleotide
cacgagtgctgctagagaattcgtgagccgatttggtatccgtttagcgtaa

SEQ ID NO: 32836 - DNA, 60 bp, Artificial
  Synthetic oligonucleotide
ttttgaattctaccctttaacgattggtatgtatagggtgcgacgatggtctatggaccc

SEQ ID NO: 32837 - DNA, 60 bp, Artificial
  Synthetic oligonucleotide
ttttgaattctaccctttaacgatagggatgtatagggtgcgacgatggtctatggaccc

SEQ ID NO: 32838 - DNA, 60 bp, Artificial
  Synthetic oligonucleotide
acatggcgtgacggagtggagatgtacctagcctttttgccaggggctgagatgttcatg

SEQ ID NO: 32839 - DNA, 57 bp, Artificial
  Synthetic oligonucleotide
cacgagtgctgctagagaattcgtgagccgatttggtatccgtttagcgtaacaata

SEQ ID NO: 32840 - DNA, 60 bp, Artificial
  Synthetic oligonucleotide
caacgttacatgggtataggtgctgaccagtggataactaaggagacggtcgcaatcctg

SEQ ID NO: 32841 - DNA, 60 bp, Artificial
  Synthetic oligonucleotide
caacgctacatgggtataggtgctgaccagtggataaccaaggagacggtcgcaatcctg

SEQ ID NO: 32842 - DNA, 60 bp, Artificial
  Synthetic oligonucleotide
gtaccgctagccgaagaaaacggtattacatggcgtgacggagtggagatgtacctagcc

SEQ ID NO: 32843 - DNA, 60 bp, Artificial
  Synthetic oligonucleotide
gtagtaccgctagccgaagaaaacggtattacatggcgtgacggagtggagatgtaccta

SEQ ID NO: 32844 - DNA, 60 bp, Artificial
  Synthetic oligonucleotide
cttttgtagtgcctctagccgaagagaacggtattacatggcgtgacggagtggagatgt

SEQ ID NO: 32845 - DNA, 53 bp, Artificial
  Synthetic oligonucleotide
aattctaccctttaacgattggcatgtatagggtgcgacgatggtctatggac

SEQ ID NO: 32846 - DNA, 60 bp, Artificial
  Synthetic oligonucleotide
tttgtagtaccgctagccgaagaaaacggtattacatggcgtgacggagtggagatgtac

SEQ ID NO: 32847 - DNA, 60 bp, Artificial
  Synthetic oligonucleotide
cttttgtagtgccgctagccgaagagaacggtattacatggcgtgacggagtggagatgt

SEQ ID NO: 32848 - DNA, 60 bp, Artificial
  Synthetic oligonucleotide
caacgttacatgggtataggtgctgaccagtggataacgaaggagacggtcgcaatcctg

SEQ ID NO: 32849 - DNA, 60 bp, Artificial
  Synthetic oligonucleotide
caacgatacatgggtataggtgctgaccagtggataaccaaggagacggtcgcaatcctg

SEQ ID NO: 32850 - DNA, 60 bp, Artificial
  Synthetic oligonucleotide
caacgctatatgggtataggtgctgaccagtggataacgaaggagacggtcgctatcctg

SEQ ID NO: 32851 - DNA, 60 bp, Artificial
  Synthetic oligonucleotide
ggcaacgatacatgggtataggtgctgaccagtggataacgaaggagacggtcgcaatcc

SEQ ID NO: 32852 - DNA, 60 bp, Artificial
  Synthetic oligonucleotide
aattctaccctttaacgattggcatgtatagggtgcgacgatggtctatggacccgaact

SEQ ID NO: 32853 - DNA, 53 bp, Artificial
  Synthetic oligonucleotide
attccactgcctgactacggactcacgttgcatcgcatatcaggttacttggc

SEQ ID NO: 32854 - DNA, 60 bp, Artificial
  Synthetic oligonucleotide
ttgaattctaccctttaacgattgggatgtatagggtgcgacgatggtctatggacccga

SEQ ID NO: 32855 - DNA, 60 bp, Artificial
  Synthetic oligonucleotide
ctgcttgatggtgaaagacttgctgatagaagaattgccgaactgttctctacaaaaaca

SEQ ID NO: 32856 - DNA, 57 bp, Artificial
  Synthetic oligonucleotide
ctctgacatcttcttcatcatggcctcaggcttgttgccccgtactaggttaaggac

SEQ ID NO: 32857 - DNA, 60 bp, Artificial
  Synthetic oligonucleotide
caagcggtgatagtgcctgagtctgcagcttcatcaagaaaagccaaggcaatctcacgg

SEQ ID NO: 32858 - DNA, 60 bp, Artificial
  Synthetic oligonucleotide
gttgcagggatggctgaattaggtgcattcttttccatattacaggatatgagaaatacc

SEQ ID NO: 32859 - DNA, 60 bp, Artificial
  Synthetic oligonucleotide
gttgcagggatggctgaattaggtgcattcttttccatattacaggatatgaggaatact

SEQ ID NO: 32860 - DNA, 60 bp, Artificial
  Synthetic oligonucleotide
tgcagggatggctgaattaggtgcattcttttccatattacaggatatgagaaatactat

SEQ ID NO: 32861 - DNA, 60 bp, Artificial
  Synthetic oligonucleotide
cctctgctctatttaccctgacttaaatcttgactgcgtgccgccactatatctttgaga

SEQ ID NO: 32862 - DNA, 60 bp, Artificial
  Synthetic oligonucleotide
ctttcttgcagcaattcggtatcaacatctaaacctcttcatcacagatcttcaattccg

SEQ ID NO: 32863 - DNA, 60 bp, Artificial
  Synthetic oligonucleotide
tacacttcacaggatgtcgggatatctagcacgctggattgctgacacatgcaaggctag

SEQ ID NO: 32864 - DNA, 60 bp, Artificial
  Synthetic oligonucleotide
cttctacacttttgcagttttccaaaccttctaagcaggtatcccggatgttcattaaga

SEQ ID NO: 32865 - DNA, 60 bp, Artificial
  Synthetic oligonucleotide
gtttaaggaatgttcttagcaggacatatgccacatttgggaggagaataaaattggatc

SEQ ID NO: 32866 - DNA, 60 bp, Artificial
  Synthetic oligonucleotide
tcattcacttcaccaggaagcattgaatagatgcttaatgcttgtacttgcacagcccca

SEQ ID NO: 32867 - DNA, 60 bp, Artificial
  Synthetic oligonucleotide
cgtacacttatatatatgcacgtagcatatatataagtgtacgattccactacctcaaac

SEQ ID NO: 32868 - DNA, 60 bp, Artificial
  Synthetic oligonucleotide
atgtaaatttcgttcattgctttgctgctttacgctatactaaccacaacaaactacctc

SEQ ID NO: 32869 - DNA, 60 bp, Artificial
  Synthetic oligonucleotide
gccactagatgtaaatttcgttcattgctttgctgctttatgctatactaaccacaacaa

SEQ ID NO: 32870 - DNA, 60 bp, Artificial
  Synthetic oligonucleotide
ctattctacaggatatgcggaatacaatcatggcatcaaagtctgtaggaacagctgaag

SEQ ID NO: 32871 - DNA, 60 bp, Artificial
  Synthetic oligonucleotide
gctattctacaggatatgcggaatacaatcatggcatcaaagtctgtaggaacagctgaa

SEQ ID NO: 32872 - DNA, 60 bp, Artificial
  Synthetic oligonucleotide
tcagcataaccatgcttcatttgtaaacctgctcaacattgaaactgattatacaaaaac

SEQ ID NO: 32873 - DNA, 60 bp, Artificial
  Synthetic oligonucleotide
gagtctacgtgtggctagattgttgtgcaagtcaaaaggttcatctctcgtaatctcaat

SEQ ID NO: 32874 - DNA, 60 bp, Artificial
  Synthetic oligonucleotide
ggcaaagtgtgttgggtgcccatcatgttttactagttactcctgcagcttcaagattgc

SEQ ID NO: 32875 - DNA, 60 bp, Artificial
  Synthetic oligonucleotide
ccctttacagcaagtggatacatgcgacgataaagcaagcagatcttatagtggggaggc

SEQ ID NO: 32876 - DNA, 60 bp, Artificial
  Synthetic oligonucleotide
aggtctcttgcataagtcccaggtttagtgttccgatggaaggattaatggcatgtgggg

SEQ ID NO: 32877 - DNA, 60 bp, Artificial
  Synthetic oligonucleotide
cgactggaccttcaaaagaacggaagctttcatcaggaccaaaatggctagtatggttga

SEQ ID NO: 32878 - DNA, 60 bp, Artificial
  Synthetic oligonucleotide
gactggaccttcaaaagaacagaagctttcatcaggaccaaaatggctagtatggttgaa

SEQ ID NO: 32879 - DNA, 60 bp, Artificial
  Synthetic oligonucleotide
cgactggaccttcaaaagaacagaagctttcatcaggaccaaaatggctagtatggttga

SEQ ID NO: 32880 - DNA, 51 bp, Artificial
  Synthetic oligonucleotide
aggcatacttggttgatatgggagatttggttttctatgatgttgcatcca

SEQ ID NO: 32881 - DNA, 56 bp, Artificial
  Synthetic oligonucleotide
ataaaaggcatacttggttgatatgggagatttggttttctatgatgaagcatcca

SEQ ID NO: 32882 - DNA, 51 bp, Artificial
  Synthetic oligonucleotide
aggcatacttggttgatatgggagatttggttttctatgatgaagcatcca

SEQ ID NO: 32883 - DNA, 56 bp, Artificial
  Synthetic oligonucleotide
atagaaggcatacttggttgatatgggagatttggttttctatgatgtcgcatcca

SEQ ID NO: 32884 - DNA, 56 bp, Artificial
  Synthetic oligonucleotide
ataaaaggcatacttggttgatatgggagatttggttttctatgatgttgcatcca

SEQ ID NO: 32885 - DNA, 60 bp, Artificial
  Synthetic oligonucleotide
cagccagatattctcccacatattgcacttgcgaagcgactgcaaagcccttaacacagc

SEQ ID NO: 32886 - DNA, 60 bp, Artificial
  Synthetic oligonucleotide
aaacactcagccagatattctcccacatattgcacttgcgaagcgactgcaaagccctta

SEQ ID NO: 32887 - DNA, 60 bp, Artificial
  Synthetic oligonucleotide
tatatatcaagattcaaaacataaagagctaggaattgacctgaagaaatatgatactac

SEQ ID NO: 32888 - DNA, 60 bp, Artificial
  Synthetic oligonucleotide
aaaatcaaactgctttcaactttaaaacttcctatgagggaaatctcaagctgatcaaga

SEQ ID NO: 32889 - DNA, 60 bp, Artificial
  Synthetic oligonucleotide
tcctctggttcaggcttatgggttgagtttaaccaatgccaaatcagttcgccttgcaat

SEQ ID NO: 32890 - DNA, 51 bp, Artificial
  Synthetic oligonucleotide
gtttctgacaaaattggacctaatgatatgacttttaggagactggacagc

SEQ ID NO: 32891 - DNA, 61 bp, Artificial
  Synthetic oligonucleotide
cctcttattgcttctgttgacagttttgagatgatcagtgttgttttagctatatatcaag

SEQ ID NO: 32892 - DNA, 60 bp, Artificial
  Synthetic oligonucleotide
cctctggttcaggcttatgggttgagtttaaccaatgccaaatcagttcgccttgcaatc

SEQ ID NO: 32893 - DNA, 60 bp, Artificial
  Synthetic oligonucleotide
gctttcaactttaaaacttcctatgagggaaatctcaagctgatcaagaacatgagcatc

SEQ ID NO: 32894 - DNA, 60 bp, Artificial
  Synthetic oligonucleotide
ctgatcaagaacatgagcatcacatcgtgtttgacgttcctgaaaaaccgccagagcatt

SEQ ID NO: 32895 - DNA, 60 bp, Artificial
  Synthetic oligonucleotide
atgatactactgaagcccttgggaaagtttgctctgttctcagaagcaaaggctttgaca

SEQ ID NO: 32896 - DNA, 60 bp, Artificial
  Synthetic oligonucleotide
caaaacataaagagctaggaattgacctgaagaaatatgatactactgaagcccttggga

SEQ ID NO: 32897 - DNA, 60 bp, Artificial
  Synthetic oligonucleotide
ggctttgacattgatgatgctcagatggaaaaaggaaaggaatatgcaaatatcctcaaa

SEQ ID NO: 32898 - DNA, 60 bp, Artificial
  Synthetic oligonucleotide
gcccttgggaaagtttgctctgttctcagaagcaaaggctttgacattgatgatgctcag

SEQ ID NO: 32899 - DNA, 60 bp, Artificial
  Synthetic oligonucleotide
ccagagcattatgaaggttgtcaaacaaagtgattttaattttggcaaagtcactattaa

SEQ ID NO: 32900 - DNA, 60 bp, Artificial
  Synthetic oligonucleotide
tcactattaaaaaagtttctgacaaaattggacctaatgatatgacttttaggagactgg

SEQ ID NO: 32901 - DNA, 60 bp, Artificial
  Synthetic oligonucleotide
cctcttattgcttctgttgacagttttgagatgatcagtgttgttttagctatatatcaa

SEQ ID NO: 32902 - DNA, 60 bp, Artificial
  Synthetic oligonucleotide
ttaacccggaggttgggtatgtggcatttattggtaagtatgggcagcaactcaacttcg

SEQ ID NO: 32903 - DNA, 60 bp, Artificial
  Synthetic oligonucleotide
atttaacccggaggttgggtatgtggcatttattggtaagtatgggcagcaactcaactt

SEQ ID NO: 32904 - DNA, 60 bp, Artificial
  Synthetic oligonucleotide
gtgcagaaagcagatctttgctgcttgtaaaagtggtaagtatgttttttgtggtaaaac

SEQ ID NO: 32905 - DNA, 58 bp, Artificial
  Synthetic oligonucleotide
gcaggaagcagatctttgctgcttgtaaaagtggtaagtatgttttttgtggtaaaac

SEQ ID NO: 32906 - DNA, 58 bp, Artificial
  Synthetic oligonucleotide
ttattgttgccagacaaaaacttaaggatgcagagagagcagtggaagtggacccaga

SEQ ID NO: 32907 - DNA, 60 bp, Artificial
  Synthetic oligonucleotide
cttgaggaaggataggcaggatgcagtagtcatgttctgaatcttttcacggttgttggt

SEQ ID NO: 32908 - DNA, 60 bp, Artificial
  Synthetic oligonucleotide
tctttaccaacaaccgtgaaaagattcagaacatgactactgcatcctgcctatccttcc

SEQ ID NO: 32909 - DNA, 60 bp, Artificial
  Synthetic oligonucleotide
accgtgaaaagattcagaacatgactactgcatcctgcctatccttcctcaagaataggc

SEQ ID NO: 32910 - DNA, 60 bp, Artificial
  Synthetic oligonucleotide
ctattcttgaggaaggataggcaggatgcagtagtcatgttctgaatcttttcacggttg

SEQ ID NO: 32911 - DNA, 60 bp, Artificial
  Synthetic oligonucleotide
gagcagcttaagtggggcaaaggagggctcagtgatactgccagaactttcttgcagaag

SEQ ID NO: 32912 - DNA, 60 bp, Artificial
  Synthetic oligonucleotide
gatattgagcagcttaagtggggcaaaggagggctcagtgatactgccagaactttcttg

SEQ ID NO: 32913 - DNA, 60 bp, Artificial
  Synthetic oligonucleotide
ttcctggaaacaggaacaatccaattgacaacctcgatcttaccatccacagattgtctg

SEQ ID NO: 32914 - DNA, 60 bp, Artificial
  Synthetic oligonucleotide
cccgttgacaattgggatctacagagtaaagcagggaatgatggaccctcagtatttgaa

SEQ ID NO: 32915 - DNA, 60 bp, Artificial
  Synthetic oligonucleotide
aacatttatatatgggtaattaggcttaattggctatccaaaagggttctctaggaccca

SEQ ID NO: 32916 - DNA, 60 bp, Artificial
  Synthetic oligonucleotide
gacgacagtcataaatcctattgcagaatcaaatgggataaaatgggaaaatggggcaga

SEQ ID NO: 32917 - DNA, 52 bp, Artificial
  Synthetic oligonucleotide
cacaacattagcagctaattgggtgggtggtaggggacagcaaagtaataga

SEQ ID NO: 32918 - DNA, 60 bp, Artificial
  Synthetic oligonucleotide
cccaaaaggttggtgcaattgctaaaagcttgaaggatattgagcagcttaagtggggca

SEQ ID NO: 32919 - DNA, 60 bp, Artificial
  Synthetic oligonucleotide
cagacaaatggatgtcccaaaaggttggtgcaattgctaaaagcttgaaggatattgagc

SEQ ID NO: 32920 - DNA, 60 bp, Artificial
  Synthetic oligonucleotide
aaaagctcttcggcagcgctatggttcgcttactgcagacaaatggatgtcccaaaaggt

SEQ ID NO: 32921 - DNA, 60 bp, Artificial
  Synthetic oligonucleotide
ccctcagtatttgaaaaaagctcttcggcagcgctatggttcgcttactgcagacaaatg

SEQ ID NO: 32922 - DNA, 60 bp, Artificial
  Synthetic oligonucleotide
cggttcaaaattctaaacatttatatatgggtaattaggcttaattggctatccaaaagg

SEQ ID NO: 32923 - DNA, 60 bp, Artificial
  Synthetic oligonucleotide
gagctgatcaagacgacagtcataaatcctattgcagaatcaaatgggataaaatgggaa

SEQ ID NO: 32924 - DNA, 60 bp, Artificial
  Synthetic oligonucleotide
caggaacaatccaattgacaacctcgatcttaccatccacagattgtctggatacctggc

SEQ ID NO: 32925 - DNA, 60 bp, Artificial
  Synthetic oligonucleotide
ttttacccgttgacaattgggatctacagagtaaagcagggaatgatggaccctcagtat

SEQ ID NO: 32926 - DNA, 60 bp, Artificial
  Synthetic oligonucleotide
gtgttaaacatggggagtcgatcagtttgtcttcagttaggatcttcttcctcaatgccg

SEQ ID NO: 32927 - DNA, 60 bp, Artificial
  Synthetic oligonucleotide
ctctgagtgtaatgtctgaattggttttctatgatgtcgcatcaaccggtgcaaatggat

SEQ ID NO: 32928 - DNA, 60 bp, Artificial
  Synthetic oligonucleotide
caaagaaatactctgagtgtaatgtctgaattggttttctatgatgtcgcatcaaccggt

SEQ ID NO: 32929 - DNA, 60 bp, Artificial
  Synthetic oligonucleotide
atccaaaagggttctctaggacccacaacattagcagctaattgggtgggtggtagggga

SEQ ID NO: 32930 - DNA, 60 bp, Artificial
  Synthetic oligonucleotide
gcttggaaacaagcttatcaattgaggcaccatggggagcaataaatgtccagtcaacct

SEQ ID NO: 32931 - DNA, 60 bp, Artificial
  Synthetic oligonucleotide
aacaagcttggaaacaagcttatcaattgaggcaccatggggagcaataaatgtccagtc

SEQ ID NO: 32932 - DNA, 60 bp, Artificial
  Synthetic oligonucleotide
cttagaaacaagcttatcaattgaggcaccatggggagcaataaatgtccagtcaacctt

SEQ ID NO: 32933 - DNA, 60 bp, Artificial
  Synthetic oligonucleotide
gcttagaaacaagcttatcaattgaggcaccatggggagcaataaatgtccagtcaacct

SEQ ID NO: 32934 - DNA, 60 bp, Artificial
  Synthetic oligonucleotide
cttggcaacttaggaaatgaactgttgtataaggcacccagaagggccttgacaaccgtc

SEQ ID NO: 32935 - DNA, 60 bp, Artificial
  Synthetic oligonucleotide
gactggggaaaagaggcagttgatagttttcatcttggtgatgatatggatcctgagctc

SEQ ID NO: 32936 - DNA, 60 bp, Artificial
  Synthetic oligonucleotide
tttcagttgcaaaatctttgttaaagcttgatttaagcgggatcaaaaagaaagaatcta

SEQ ID NO: 32937 - DNA, 60 bp, Artificial
  Synthetic oligonucleotide
ctactacgaaaaaaactggaatgagtgacttgacagacattcaggaggatataactcgcc

SEQ ID NO: 32938 - DNA, 60 bp, Artificial
  Synthetic oligonucleotide
cggtgaaaacccctgtaaaattggcttgcagacatcctcaattgaaggggcctggggttc

SEQ ID NO: 32939 - DNA, 60 bp, Artificial
  Synthetic oligonucleotide
tcttggtgaaaacccctgtaaaattggcttgcagacatcttctattgaaggggcatgggg

SEQ ID NO: 32940 - DNA, 60 bp, Artificial
  Synthetic oligonucleotide
ggacttatggacactttcacaaactcctactccttttgcgagaatgtaccaaatctggat

SEQ ID NO: 32941 - DNA, 59 bp, Artificial
  Synthetic oligonucleotide
cacaaattactacctcaaaaagttattttcttgattgcttttcaaggagtctactacta

SEQ ID NO: 32942 - DNA, 60 bp, Artificial
  Synthetic oligonucleotide
ataactttcacaaactgcttgaatattttaaagtgcaggaagcagatctttgctgcttgt

SEQ ID NO: 32943 - DNA, 60 bp, Artificial
  Synthetic oligonucleotide
actgcgaaagctggaatgagcaccctccaagaattacaagaaaacatcacagcacacgaa

SEQ ID NO: 32944 - DNA, 60 bp, Artificial
  Synthetic oligonucleotide
actgcgaaagctggaatgagcaccctccaagaattacaagaaaatatcacagcacacgaa

SEQ ID NO: 32945 - DNA, 60 bp, Artificial
  Synthetic oligonucleotide
gctgcgaaagctggaatgagcaccctccaagaattacaagaaaacatcacagcacacgaa

SEQ ID NO: 32946 - DNA, 60 bp, Artificial
  Synthetic oligonucleotide
ctgtcatggacttgtctcagatgtactctcctgtctttgagtacttatcaggtgacagac

SEQ ID NO: 32947 - DNA, 60 bp, Artificial
  Synthetic oligonucleotide
ccacaccaatgggcttagttatgacaacatacgaatcttctacattaaaggacgcgagat

SEQ ID NO: 32948 - DNA, 60 bp, Artificial
  Synthetic oligonucleotide
ctcagcttagtgttcactattagatggaaccactccatgctagtccacttgtgtttgttg

SEQ ID NO: 32949 - DNA, 60 bp, Artificial
  Synthetic oligonucleotide
gctcagcttagtgttcactattagatggaaccactccatgctagtccacttgtgtttgtc

SEQ ID NO: 32950 - DNA, 60 bp, Artificial
  Synthetic oligonucleotide
cacaatcaatccagggcaaaattgatgagctaaggagacagctggctgaccgtgtggctg

SEQ ID NO: 32951 - DNA, 60 bp, Artificial
  Synthetic oligonucleotide
ccataccagatcctacaggtaagctcttaatagcattaattgaccctaacatgccttcag

SEQ ID NO: 32952 - DNA, 60 bp, Artificial
  Synthetic oligonucleotide
ggtctatcccaaaagcaaacaacacgcctgaaaactgctgtcaactgcatctaatgtgca

SEQ ID NO: 32953 - DNA, 60 bp, Artificial
  Synthetic oligonucleotide
aggctgttgaaaccaacatgttgacacttttcggcagcaaaaaaccctctgagtctgcaa

SEQ ID NO: 32954 - DNA, 60 bp, Artificial
  Synthetic oligonucleotide
ctttagcaaaaaatatggacatatctaaagggaaaatattattaaacactgaaggaactt

SEQ ID NO: 32955 - DNA, 60 bp, Artificial
  Synthetic oligonucleotide
tggacatatctaaagggaaaatattattaaacactgaaggaacttcgtctctaggaacct

SEQ ID NO: 32956 - DNA, 60 bp, Artificial
  Synthetic oligonucleotide
gaaggaacttcgtctctaggaacctatgagtcagactctatcacagaatcagaaggatat

SEQ ID NO: 32957 - DNA, 60 bp, Artificial
  Synthetic oligonucleotide
gaacttcgtctctaggaacctatgagtcagactctatcacagaatcagaaggatatgatc

SEQ ID NO: 32958 - DNA, 60 bp, Artificial
  Synthetic oligonucleotide
gtcctaccataccagatcctacaggtaagctcttaatagcattaattgaccctaacatgc

SEQ ID NO: 32959 - DNA, 60 bp, Artificial
  Synthetic oligonucleotide
agctgacaaagacaagtgttgcactgtcatacctttgaacagagctatccgggctagatc

SEQ ID NO: 32960 - DNA, 60 bp, Artificial
  Synthetic oligonucleotide
gggctagatctcaagcctttattgaagcctgtaagctaataattcctaaaggcaatagtg

SEQ ID NO: 32961 - DNA, 60 bp, Artificial
  Synthetic oligonucleotide
ggctagatctcaagcctttattgaagcctgtaagctaataattcctaaaggcaatagtgc

SEQ ID NO: 32962 - DNA, 60 bp, Artificial
  Synthetic oligonucleotide
aactggcagatctggttgcagctcagaaactggctacaaaaccagttgatccaacagggc

SEQ ID NO: 32963 - DNA, 60 bp, Artificial
  Synthetic oligonucleotide
gaggcagcttgcggatctggtggcagctcaaaaactggctacaaaaccagttgatccaac

SEQ ID NO: 32964 - DNA, 60 bp, Artificial
  Synthetic oligonucleotide
gaggcagcttgccgatttggtggcagctcaaaaactggctacaaaaccagttgatccaac

SEQ ID NO: 32965 - DNA, 60 bp, Artificial
  Synthetic oligonucleotide
caagagcacactacaaaatagacgggcagctgtgtctacattggagaccaaactcgggga

SEQ ID NO: 32966 - DNA, 60 bp, Artificial
  Synthetic oligonucleotide
gaaagagaagttaggcattaaaaacttctctacttatgaacaggtgtgcaaagtagctaa

SEQ ID NO: 32967 - DNA, 60 bp, Artificial
  Synthetic oligonucleotide
aaaaataatggaactgccattggtagcagcctatggcttgaatgttcctgcagcttatga

SEQ ID NO: 32968 - DNA, 60 bp, Artificial
  Synthetic oligonucleotide
ccgaagatgcaacacctggattcagttttaaatctttctacgacaataataaggatgttg

SEQ ID NO: 32969 - DNA, 60 bp, Artificial
  Synthetic oligonucleotide
atcttaaagtgcagaaagcagatctttactgcttgcaagaatgggaaatataatttctgt

SEQ ID NO: 32970 - DNA, 60 bp, Artificial
  Synthetic oligonucleotide
atcttaaagtgcagaaagcagatctttactgcttgcaagaatgggaaatataatttctgc

SEQ ID NO: 32971 - DNA, 60 bp, Artificial
  Synthetic oligonucleotide
tctacgacaataataaggatgttgaaataacttttacaacctgcttgaatatcttaaagt

SEQ ID NO: 32972 - DNA, 60 bp, Artificial
  Synthetic oligonucleotide
tctacgacaataataaggatgttgaaataacttttacaacctgcttaaatatcttaaagt

SEQ ID NO: 32973 - DNA, 60 bp, Artificial
  Synthetic oligonucleotide
tgttgaaattgaaaccgaagatgcaacacctggattcagttttaaatctttctacgacaa

SEQ ID NO: 32974 - DNA, 60 bp, Artificial
  Synthetic oligonucleotide
taatttctgcgggaaaaatatcgttgcaacaactgctcaagtaggccctgacgattggac

SEQ ID NO: 32975 - DNA, 60 bp, Artificial
  Synthetic oligonucleotide
acgattggacttttaaaaggacagaagctttcatcagaacaaagatggttagtatggtgg

SEQ ID NO: 32976 - DNA, 60 bp, Artificial
  Synthetic oligonucleotide
aaatatcgttgcaacgactgctcaagtaggccctgacgattggacttttaaaaggacaga

SEQ ID NO: 32977 - DNA, 60 bp, Artificial
  Synthetic oligonucleotide
aaaaacaatggaactgccattggtggcagcttatggcttgaatgttcctgcagcttatga

SEQ ID NO: 32978 - DNA, 60 bp, Artificial
  Synthetic oligonucleotide
acgattggacttttaaaaggacagaagcttttatcagaacaaaaatggttagtatggtgg

SEQ ID NO: 32979 - DNA, 60 bp, Artificial
  Synthetic oligonucleotide
ctacttatgaacaggtgtgcaaagtagctaaagttctttctgcctcacaaattgagttca

SEQ ID NO: 32980 - DNA, 60 bp, Artificial
  Synthetic oligonucleotide
taatttctgtgggaaaaatatcgttgcaacgactgctcaagtaggccctgacgattggac

SEQ ID NO: 32981 - DNA, 60 bp, Artificial
  Synthetic oligonucleotide
aagtagctaaagttctttctgcctcacaaattgagtttaagggcgaattggataacatgt

SEQ ID NO: 32982 - DNA, 60 bp, Artificial
  Synthetic oligonucleotide
gtagctaaagttctttctgcctcacaaattgagtttaagggcgaattggataacatgttc

SEQ ID NO: 32983 - DNA, 51 bp, Artificial
  Synthetic oligonucleotide
gaaagcagatctttactgcttgcaagaatgggaaatataatttctgcggga

SEQ ID NO: 32984 - DNA, 60 bp, Artificial
  Synthetic oligonucleotide
ggtgtgcaaagtagctaaagttctttctgcctcacaaattgagttcaagggagaaatgga

SEQ ID NO: 32985 - DNA, 60 bp, Artificial
  Synthetic oligonucleotide
aaatatcgttgcaacaactgctcaagtaggccctgacgattggacttttaaaaggacaga

SEQ ID NO: 32986 - DNA, 60 bp, Artificial
  Synthetic oligonucleotide
ccacaccaatgggcttaactacgaccacatacgaatcttctacattaaaggacgcgagat

SEQ ID NO: 32987 - DNA, 60 bp, Artificial
  Synthetic oligonucleotide
ttcaatgatgtcactgctaacaccagcagtacttttgacccagaggtcgcatacgctaac

SEQ ID NO: 32988 - DNA, 60 bp, Artificial
  Synthetic oligonucleotide
tatacaagacatggacattgtagcctctgagcacctgctgcaccaatcccttgtcggcaa

SEQ ID NO: 32989 - DNA, 58 bp, Artificial
  Synthetic oligonucleotide
ccagcacaatcatgcttcatttgtaaacctgctcaacattgaaactgattacacaaaa

SEQ ID NO: 32990 - DNA, 60 bp, Artificial
  Synthetic oligonucleotide
cttactcttggaggagttaaccttgctgtgcttaatacccattttcctggaacccagtcc

SEQ ID NO: 32991 - DNA, 60 bp, Artificial
  Synthetic oligonucleotide
ctgcctacacaaagaatggccccattcaagaaactggagatgcaaccccacctggtgttg

SEQ ID NO: 32992 - DNA, 60 bp, Artificial
  Synthetic oligonucleotide
tagtagtagactccgcaagaaacagcagttaaataacagcaggatcatgtggagtttgct

SEQ ID NO: 32993 - DNA, 60 bp, Artificial
  Synthetic oligonucleotide
acccctctaatggagtctggttggtcagatacagcacatggtgtaggtatagtccctatg

SEQ ID NO: 32994 - DNA, 60 bp, Artificial
  Synthetic oligonucleotide
tggagtcaggttggtcagatacagcacatggtgtaggtatagtccctatgaaaacagatt

SEQ ID NO: 32995 - DNA, 60 bp, Artificial
  Synthetic oligonucleotide
caggttggtcagatacagcacatggtgtaggtatagtccctatgaaaacagatttagagc

SEQ ID NO: 32996 - DNA, 60 bp, Artificial
  Synthetic oligonucleotide
gttcaagtgctgccatgatactgactgtactgaagaaggtttagcagcatcaccacctca

SEQ ID NO: 32997 - DNA, 60 bp, Artificial
  Synthetic oligonucleotide
tttcatgatgtcgctgctaacaccagcagtacttttgacccagaggtcgcatatgctaac

SEQ ID NO: 32998 - DNA, 60 bp, Artificial
  Synthetic oligonucleotide
atgtcttttcattgcaggtattgctgagcttggggcatttttttccatcttgcaggatat

SEQ ID NO: 32999 - DNA, 60 bp, Artificial
  Synthetic oligonucleotide
acatgtcttttcattgcaggtattgctgagcttggggcatttttttccatcttgcaggac

SEQ ID NO: 33000 - DNA, 60 bp, Artificial
  Synthetic oligonucleotide
ccaacatgtcttttcattgcaggtattgctgagcttggggcatttttttccattttgcag

SEQ ID NO: 33001 - DNA, 60 bp, Artificial
  Synthetic oligonucleotide
gggtgcacagattgacactgctttcagctcatactactggctctacaaggcaggcgtgac

SEQ ID NO: 33002 - DNA, 60 bp, Artificial
  Synthetic oligonucleotide
actacgtgcacagggtgcacagattgacactgctttcagctcatactactggctctacaa

SEQ ID NO: 33003 - DNA, 60 bp, Artificial
  Synthetic oligonucleotide
gttgtgggtgggttaggtccaggctgccttaagtagcctttttctgtatatatggatgta

SEQ ID NO: 33004 - DNA, 60 bp, Artificial
  Synthetic oligonucleotide
gtttaggtccaggctgccttaagtagcctttttctgtatatatggatgtagatttcattt

SEQ ID NO: 33005 - DNA, 60 bp, Artificial
  Synthetic oligonucleotide
gtttaggtccaggctgccttaagtagcctttttctgtatatatggatgtagatttcatgt

SEQ ID NO: 33006 - DNA, 60 bp, Artificial
  Synthetic oligonucleotide
tttaggtccaggctgccttaagtagcctttttctgtatatatggatgtagatttcatttg

SEQ ID NO: 33007 - DNA, 60 bp, Artificial
  Synthetic oligonucleotide
cccaccgcttcgactgcaaatatagcgctcagttggagctcagtagaacacagaggcaat

SEQ ID NO: 33008 - DNA, 60 bp, Artificial
  Synthetic oligonucleotide
actgcaaaagctggaatgagcaccctccaagaattgcaggaaaatatcaccgcacacgaa

SEQ ID NO: 33009 - DNA, 60 bp, Artificial
  Synthetic oligonucleotide
tgggacagatttcaccacctgcctagagactgagagtataaattggaactgcactgggcc

SEQ ID NO: 33010 - DNA, 60 bp, Artificial
  Synthetic oligonucleotide
agttggacaagctactgggacagatttcaccacctgcctagagactgagagtataaattg

SEQ ID NO: 33011 - DNA, 60 bp, Artificial
  Synthetic oligonucleotide
ggaaccgatttcaccacctgcctagagactgagagtataaattggaactgcactgggccg

SEQ ID NO: 33012 - DNA, 60 bp, Artificial
  Synthetic oligonucleotide
cgaactagtgttcaaagatgttgcctctttcacagacaatacatttgatccagaagctgc

SEQ ID NO: 33013 - DNA, 60 bp, Artificial
  Synthetic oligonucleotide
atgatcgaactagtgttcaaagatgtcgcctctttcacagacaatacatttgatccagaa

SEQ ID NO: 33014 - DNA, 60 bp, Artificial
  Synthetic oligonucleotide
catgatcgaactagtgttcaaagatgttgcctctttcacagacaatacatttgatccaga

SEQ ID NO: 33015 - DNA, 60 bp, Artificial
  Synthetic oligonucleotide
cgaactagtgttcaaagatgtcgcctctttcacagacaatacatttgatccagaagctgc

SEQ ID NO: 33016 - DNA, 60 bp, Artificial
  Synthetic oligonucleotide
ggacgggttgggtgggccatttatcaatcatataatctcagggtggtttaggatgtcacc

SEQ ID NO: 33017 - DNA, 60 bp, Artificial
  Synthetic oligonucleotide
ctggatgtcctgggatggctgtgacctagactactactgcaacatgggagactggccttc

SEQ ID NO: 33018 - DNA, 60 bp, Artificial
  Synthetic oligonucleotide
aatgcaggcaatgtacatgtgggcaatttgaggatgttactgggttaatggtgcataaga

SEQ ID NO: 33019 - DNA, 60 bp, Artificial
  Synthetic oligonucleotide
ggtccaactataggagtaaatactaagcatgatgaaaagtgtacaggaccttgcccacct

SEQ ID NO: 33020 - DNA, 60 bp, Artificial
  Synthetic oligonucleotide
gcatgggatgttagtataggtttaaatagattttgggttttataggggtggggtcaaaca

SEQ ID NO: 33021 - DNA, 60 bp, Artificial
  Synthetic oligonucleotide
gcattcagaggaactggtacttcatatattgcagaaagtatggcccggaaagataacagg

SEQ ID NO: 33022 - DNA, 60 bp, Artificial
  Synthetic oligonucleotide
gtgagcatgataaagacagaagcaaaatacatcaaaaatgcgacagggacatttgccaac

SEQ ID NO: 33023 - DNA, 59 bp, Artificial
  Synthetic oligonucleotide
tagagcatctggattgtgtccaggatataagaacctcagagcagccagagttatgtgta

SEQ ID NO: 33024 - DNA, 60 bp, Artificial
  Synthetic oligonucleotide
acagagactatgataaagatcaagatgttggccatttttgtctcagccctcggtgtagta

SEQ ID NO: 33025 - DNA, 60 bp, Artificial
  Synthetic oligonucleotide
atagtgacagactgtgtttcattccatgatagaatactgatcacaccagacgagcataaa

SEQ ID NO: 33026 - DNA, 60 bp, Artificial
  Synthetic oligonucleotide
cccgagggaagcatacacacgatcgttcctgccaaacatctctgaggccatctcatggcc

SEQ ID NO: 33027 - DNA, 60 bp, Artificial
  Synthetic oligonucleotide
tatacacgatcgttcctgccaaacatctctgaggccatctcatggccactgggatatcct

SEQ ID NO: 33028 - DNA, 60 bp, Artificial
  Synthetic oligonucleotide
cagacctgcccagactttgacacaatgctcaaagacatgatgcttttcccgagggaagca

SEQ ID NO: 33029 - DNA, 60 bp, Artificial
  Synthetic oligonucleotide
cacaatgctcaaagacatgatgcttttcccgagggaagcatatacacgatcgttcctgcc

SEQ ID NO: 33030 - DNA, 60 bp, Artificial
  Synthetic oligonucleotide
tgcttttcccgagggaagcatacacacgatcgttcctgccaaacatctctgaggccatct

SEQ ID NO: 33031 - DNA, 57 bp, Artificial
  Synthetic oligonucleotide
ctcctcagacagcgatgctgcctgagcccccctcccccctaatccctcagccaatat

SEQ ID NO: 33032 - DNA, 60 bp, Artificial
  Synthetic oligonucleotide
cacaagcaacccacccttagctccccaaaacccaaaccctaaaccccaaaccctcctacc

SEQ ID NO: 33033 - DNA, 60 bp, Artificial
  Synthetic oligonucleotide
actataacggagagtctgaatttgactcctcagacagcgatgctgcctgagcccccctcc

SEQ ID NO: 33034 - DNA, 60 bp, Artificial
  Synthetic oligonucleotide
gaagacacctggtttgacggactgaactataacggagagtctgaatttgactcctcagac

SEQ ID NO: 33035 - DNA, 60 bp, Artificial
  Synthetic oligonucleotide
cctgcatactgaggatgaacccctgggtttcaacttttgaccaagcattcgtggaagctc

SEQ ID NO: 33036 - DNA, 60 bp, Artificial
  Synthetic oligonucleotide
caaggctgtgtttgagaatgaaaatcctgacctccttgggaatcgcaagtggatcccatc

SEQ ID NO: 33037 - DNA, 60 bp, Artificial
  Synthetic oligonucleotide
gcaagtggatcccatcagaagacacctggtttgatggactgaactataacggagagtctg

SEQ ID NO: 33038 - DNA, 60 bp, Artificial
  Synthetic oligonucleotide
ctctacgagatgcctgtcatactctcctatggaggtatgaacacacccgaggcagaagtg

SEQ ID NO: 33039 - DNA, 60 bp, Artificial
  Synthetic oligonucleotide
ggaggtatgaacacacctgaggcagaagtgggttactacccctatgctgggttcacaaca

SEQ ID NO: 33040 - DNA, 60 bp, Artificial
  Synthetic oligonucleotide
cacctgaggcagaagtgggttactacccctatgctgggttcacaacatacagagtgtcgg

SEQ ID NO: 33041 - DNA, 60 bp, Artificial
  Synthetic oligonucleotide
atcattgctctggggtagttaggagaaattgcatccatggtggttccagaaacaggcaga

SEQ ID NO: 33042 - DNA, 60 bp, Artificial
  Synthetic oligonucleotide
gctctggggtagttaggagaaattgcatccatggtggttccagaaacaggcagataaggg

SEQ ID NO: 33043 - DNA, 59 bp, Artificial
  Synthetic oligonucleotide
gggagacatcttctccaccattttcgtgggcttatttcctctggtaaggcacaggacaa

SEQ ID NO: 33044 - DNA, 60 bp, Artificial
  Synthetic oligonucleotide
tactagctccacaatcctgcgggcatcaaagccttgataagcaaaatcagtcacccaacc

SEQ ID NO: 33045 - DNA, 60 bp, Artificial
  Synthetic oligonucleotide
cctgcgggcatcaaagccttgataagcaaaatcagtcacccaaccttgtatttcagcgag

SEQ ID NO: 33046 - DNA, 60 bp, Artificial
  Synthetic oligonucleotide
gccttgataagcaaaatcagtcacccaaccttgtatttcagcgaggttgatggcttctcc

SEQ ID NO: 33047 - DNA, 60 bp, Artificial
  Synthetic oligonucleotide
gtagggattgtctggtctaccagtccggcaaagcatgggtgcatcattgctctggggtag

SEQ ID NO: 33048 - DNA, 60 bp, Artificial
  Synthetic oligonucleotide
agcaaagcatgggtgcatcattgctctggggtagttaggagaaattgcatccatggtggt

SEQ ID NO: 33049 - DNA, 60 bp, Artificial
  Synthetic oligonucleotide
tgtccagaatgctctttccaggatttgacattgtcaaagaggttgctatagtccaacttg

SEQ ID NO: 33050 - DNA, 60 bp, Artificial
  Synthetic oligonucleotide
gtggaagctcacaaaatggttgtagctgaagctaacaacagaggtctgtccaggatgctc

SEQ ID NO: 33051 - DNA, 60 bp, Artificial
  Synthetic oligonucleotide
cttgccattggcatcaacaattcccagagcaatcatgagcttcctcctctcagctggggc

SEQ ID NO: 33052 - DNA, 60 bp, Artificial
  Synthetic oligonucleotide
gtctggcagtactcagtagggattgtctggtctaccagtccagcaaagcatgggtgcatc

SEQ ID NO: 33053 - DNA, 60 bp, Artificial
  Synthetic oligonucleotide
caagcaacccacccttagctccccaaaacccaaaccctaaaccccaaaccctcctacccc

SEQ ID NO: 33054 - DNA, 58 bp, Artificial
  Synthetic oligonucleotide
cccctgcagcctcagtgtctgcttttagagcaggcgagggaagacagctgcagcagct

SEQ ID NO: 33055 - DNA, 60 bp, Artificial
  Synthetic oligonucleotide
cacattagcagacggcttgccattggcatcaacaattcccagagcaatcatgagcttcct

SEQ ID NO: 33056 - DNA, 60 bp, Artificial
  Synthetic oligonucleotide
gctgcagcagctgccacattggcagatggcttgccattggcatcaacaattcccagagca

SEQ ID NO: 33057 - DNA, 60 bp, Artificial
  Synthetic oligonucleotide
gttcacaacatacagagtgtcggtacacaacgagatggagataccagttggtacttacag

SEQ ID NO: 33058 - DNA, 60 bp, Artificial
  Synthetic oligonucleotide
ctacccctatgctgggttcacaacatacagagtatcggtacacaacgagatggagatacc

SEQ ID NO: 33059 - DNA, 60 bp, Artificial
  Synthetic oligonucleotide
gagtgtcggtacacaacgagatggagataccagttggtacttacaggcaggtgatggatc

SEQ ID NO: 33060 - DNA, 60 bp, Artificial
  Synthetic oligonucleotide
agagttggccatttcccattccgttggggaccaggatgtttcaactcacgtgtggattca

SEQ ID NO: 33061 - DNA, 60 bp, Artificial
  Synthetic oligonucleotide
ccgtgataactttgaagacttctacagggttggccatttcccattccgttggggaccagg

SEQ ID NO: 33062 - DNA, 60 bp, Artificial
  Synthetic oligonucleotide
ccgttggggaccaggatgtttcaactcacgtgtggattcacaaacctgcccagactttga

SEQ ID NO: 33063 - DNA, 60 bp, Artificial
  Synthetic oligonucleotide
tgtggattcacagacctgcccagactttgacacaatgctcaaagacatgatgcttttccc

SEQ ID NO: 33064 - DNA, 60 bp, Artificial
  Synthetic oligonucleotide
atgctggagaaacacaaggctgtgtttgagaatgaaaatcctgacctccttgggaatcgc

SEQ ID NO: 33065 - DNA, 60 bp, Artificial
  Synthetic oligonucleotide
tctcaaagatatcaatcccccctctatccacattgtcactggtggcatagatagcaggcc

SEQ ID NO: 33066 - DNA, 60 bp, Artificial
  Synthetic oligonucleotide
gcatagcggagctaaccatgccgaacaagacagaccactcatatcacaacatcaagcaca

SEQ ID NO: 33067 - DNA, 60 bp, Artificial
  Synthetic oligonucleotide
gcagcagcataagtgacacaacagtgacttctcaagactcagggtcttctgcatcaagtt

SEQ ID NO: 33068 - DNA, 60 bp, Artificial
  Synthetic oligonucleotide
ggtcaggggagtcaattggaatattcattgctggaaaattgcatgtccacctttcttctg

SEQ ID NO: 33069 - DNA, 60 bp, Artificial
  Synthetic oligonucleotide
tcagccgaagtttcaaggctcaagcaaacacttactgctcgtaatgtcttacatggtctg

SEQ ID NO: 33070 - DNA, 60 bp, Artificial
  Synthetic oligonucleotide
ctgaaatgtttagcaggaatcttttgaaaacaacctctgatgatggtctcactaacccac

SEQ ID NO: 33071 - DNA, 60 bp, Artificial
  Synthetic oligonucleotide
acttcgatgagggatgtatcagtgtcctagaagaaactgctgaaagacacatgctctggg

SEQ ID NO: 33072 - DNA, 60 bp, Artificial
  Synthetic oligonucleotide
aagttgtgttctaagggaggcgtagagcagcatagtgaagaagacctgaggaagctgctg

SEQ ID NO: 33073 - DNA, 60 bp, Artificial
  Synthetic oligonucleotide
cagccaacacctttccaagtcgattgcatactattcaaggaagttgcagcagaatgtatg

SEQ ID NO: 33074 - DNA, 60 bp, Artificial
  Synthetic oligonucleotide
agtaggatgatacagcaagcaaagccaactgttactgttttctacatgttgaaaggcaac

SEQ ID NO: 33075 - DNA, 60 bp, Artificial
  Synthetic oligonucleotide
ccaggcctaaatcggaaaggatcgtcactgccagaagatcactgaatcatgctttgacct

SEQ ID NO: 33076 - DNA, 60 bp, Artificial
  Synthetic oligonucleotide
gcgaggaggaccgaggtgttctttcacagcactgctaggcttaatccacgaagactggca

SEQ ID NO: 33077 - DNA, 60 bp, Artificial
  Synthetic oligonucleotide
gaggcaggcatattaagtgaatttgatgggcaggttattgcaaacatacttgctagcgag

SEQ ID NO: 33078 - DNA, 60 bp, Artificial
  Synthetic oligonucleotide
gctgacctcaaccaactcacatctcggcttatcacattgagaaaagaaaaggacactgat

SEQ ID NO: 33079 - DNA, 60 bp, Artificial
  Synthetic oligonucleotide
ggctgcaaacaaggaagggaaaaggttgatgaagttgagtgatgacgcgtccactgacac

SEQ ID NO: 33080 - DNA, 60 bp, Artificial
  Synthetic oligonucleotide
cagaaggtatggaatcctgactcttgggacactatcccctttcggtagactgttcgtccc

SEQ ID NO: 33081 - DNA, 60 bp, Artificial
  Synthetic oligonucleotide
cataaggacggtagcgcaatgtcagtcatacctgataacagcaatccccggcttctcaag

SEQ ID NO: 33082 - DNA, 60 bp, Artificial
  Synthetic oligonucleotide
gagcaacgaactactgtacaaagcacctagaaaagctcttacaattgtctgcagcgccct

SEQ ID NO: 33083 - DNA, 60 bp, Artificial
  Synthetic oligonucleotide
gctggctattacagatcgttcggaggagaaggaacagaaaagcaagttaaagcatcacta

SEQ ID NO: 33084 - DNA, 60 bp, Artificial
  Synthetic oligonucleotide
gagctgcctttccaggaacagggattgaaagacacatgcagctgcttcactctgaaatga

SEQ ID NO: 33085 - DNA, 60 bp, Artificial
  Synthetic oligonucleotide
gagggcacagagcaggtagggcagcctacttcacaaggcactgatgagcccgaaagcact

SEQ ID NO: 33086 - DNA, 59 bp, Artificial
  Synthetic oligonucleotide
acggcgagccattctcactcagcctgaatgatggtgggctggaccttgatctccataaa

SEQ ID NO: 33087 - DNA, 60 bp, Artificial
  Synthetic oligonucleotide
gtaagaggttgacaggcaggagtaccggagaaagactcccaagaagtgttaggagcaaag

SEQ ID NO: 33088 - DNA, 60 bp, Artificial
  Synthetic oligonucleotide
aatgcttcgaggaaagttgaagaagctaggtgccatctctacaaacgttgaaattgggaa

SEQ ID NO: 33089 - DNA, 60 bp, Artificial
  Synthetic oligonucleotide
ggcagcctgaagaagaaactaaaattcatgaacatacattcccctgagctcatgcccgac

SEQ ID NO: 33090 - DNA, 60 bp, Artificial
  Synthetic oligonucleotide
gtcagccccttggtgtcttcactataaggcactagaatcttacctggtcagacatccaga

SEQ ID NO: 33091 - DNA, 60 bp, Artificial
  Synthetic oligonucleotide
gtctcacatccatttgtttcttttacctccaccctagtattatgcctgttatttgcaagg

SEQ ID NO: 33092 - DNA, 60 bp, Artificial
  Synthetic oligonucleotide
ttaccagggaaaacagagaaggaaagaagaatcaagcgcaatgtagagtaccttataaaa

SEQ ID NO: 33093 - DNA, 60 bp, Artificial
  Synthetic oligonucleotide
atgttgacggggagagcagtgaggcccagcattgtgactccagcagcgcctgagtttgag

SEQ ID NO: 33094 - DNA, 60 bp, Artificial
  Synthetic oligonucleotide
aggcttgatgttgccaaacaaccttgagcaggcaatgcgtaaaggcctggtggaaggtgt

SEQ ID NO: 33095 - DNA, 60 bp, Artificial
  Synthetic oligonucleotide
aagggctgtctacttctcacatggaattcacggaacccagcatgtctatgctcaacactc

SEQ ID NO: 33096 - DNA, 60 bp, Artificial
  Synthetic oligonucleotide
ggaggtatcagacaacgtaactcagaagagctgttcagagagaagctggacaaagtggtg

SEQ ID NO: 33097 - DNA, 60 bp, Artificial
  Synthetic oligonucleotide
ctaccacctgactgtgcaagagaatgcgaggtcctctttgatgatatcagaaactcacct

SEQ ID NO: 33098 - DNA, 60 bp, Artificial
  Synthetic oligonucleotide
cggtatgctcgcagggctcagcagacttgtttgtccaggtgagcttggaaagaagttctc

SEQ ID NO: 33099 - DNA, 60 bp, Artificial
  Synthetic oligonucleotide
cgctagacactaatgtaagtactacaagcaccatcaaggacatcagaactctcgtctcct

SEQ ID NO: 33100 - DNA, 60 bp, Artificial
  Synthetic oligonucleotide
gacaggcagaagtgcttagacagaaagcatctcaactttccaagctagtcaacaagagcc

SEQ ID NO: 33101 - DNA, 60 bp, Artificial
  Synthetic oligonucleotide
caagaccaagctgttctcagcaactgagcaggtccgcctctccaacaatcccgcagttgt

SEQ ID NO: 33102 - DNA, 60 bp, Artificial
  Synthetic oligonucleotide
tgctacagcaatatagatgtttggaagtaattaacagcgtgagtgacaaaatgctacagg

SEQ ID NO: 33103 - DNA, 60 bp, Artificial
  Synthetic oligonucleotide
gctgctctgtctccatcaatagacataccaccgtcaaggagccatcattattcaatccca

SEQ ID NO: 33104 - DNA, 60 bp, Artificial
  Synthetic oligonucleotide
tgaaacgttctggaaacatgcatgcaggttgaagaatttcacagcggcagtacaaaggtg

SEQ ID NO: 33105 - DNA, 60 bp, Artificial
  Synthetic oligonucleotide
aagtttgaagagttcttagacaggacccaattgcacccagagttcagggacctgacacct

SEQ ID NO: 33106 - DNA, 60 bp, Artificial
  Synthetic oligonucleotide
gcaatgagtgctggcaagattggcaatgtgttgtcctatgcgcacaatttgtacctgagc

SEQ ID NO: 33107 - DNA, 60 bp, Artificial
  Synthetic oligonucleotide
gcattctaccagtcttacctcaggagaacacaatcaatgggaatacaactggatcaacgt

SEQ ID NO: 33108 - DNA, 60 bp, Artificial
  Synthetic oligonucleotide
cagcattctaccagtcttacctcaggagaacacaatcaatgggaatacaactggatcaac

SEQ ID NO: 33109 - DNA, 60 bp, Artificial
  Synthetic oligonucleotide
actacgactaaagctggaatgagcaccctcaaagaagtgcaagacaacatcacattacat

SEQ ID NO: 33110 - DNA, 60 bp, Artificial
  Synthetic oligonucleotide
ttttaagcgtgtccacaccactgggcttagttacgaccacattcgaatcttctacattaa

SEQ ID NO: 33111 - DNA, 60 bp, Artificial
  Synthetic oligonucleotide
ccatgatagaatacttgtaactccgaacgagcataaatatgcattaaaagttgtatgcac

SEQ ID NO: 33112 - DNA, 60 bp, Artificial
  Synthetic oligonucleotide
agtggaggaaagacataggtttccgtgtcaatgcaaacacagcggctctgagcaacaaag

SEQ ID NO: 33113 - DNA, 60 bp, Artificial
  Synthetic oligonucleotide
ccttagatatggaaatgtccttgatgtgaatgccattgacatcgaagaaccaagtggtca

SEQ ID NO: 33114 - DNA, 60 bp, Artificial
  Synthetic oligonucleotide
gaggtagtataattgaggtagtataaaggggaggggatttgggatgaggtagttgttgtg

SEQ ID NO: 33115 - DNA, 60 bp, Artificial
  Synthetic oligonucleotide
cttatgaggtagtataattgaggtagtataaaggggaggggatttgggatgaggtagttg

SEQ ID NO: 33116 - DNA, 60 bp, Artificial
  Synthetic oligonucleotide
tgattaaatatgagatgatagtgttgattgtggccctttacccttagtaatcaccacccc

SEQ ID NO: 33117 - DNA, 60 bp, Artificial
  Synthetic oligonucleotide
ccccgagtttactctccaatgtagacacagctgcccgtctgttttgtaatgtgctcttat

SEQ ID NO: 33118 - DNA, 60 bp, Artificial
  Synthetic oligonucleotide
taatgtggcagattctgcctcagctgtctggatgaggtccacaatttcagccacctggga

SEQ ID NO: 33119 - DNA, 60 bp, Artificial
  Synthetic oligonucleotide
ggcagattctgcctcagctgtctggatgaggtccacaatttcagccacctgggattcccg

SEQ ID NO: 33120 - DNA, 60 bp, Artificial
  Synthetic oligonucleotide
gccgagcagcaactaattgctgttcgtgtactgtgatgttttcctgtatttcttggaggt

SEQ ID NO: 33121 - DNA, 57 bp, Artificial
  Synthetic oligonucleotide
ctctggatccatatcatcccctagatggaaatgattcacagcctcctttccccagtg

SEQ ID NO: 33122 - DNA, 60 bp, Artificial
  Synthetic oligonucleotide
gatcttctggtcgagctggattcccattgattgtgttctgcggagatatgattggtaaaa

SEQ ID NO: 33123 - DNA, 60 bp, Artificial
  Synthetic oligonucleotide
gcagcaactaattgctgttcgtgtactgtgatgttttcctgtatttcttggaggttgctc

SEQ ID NO: 33124 - DNA, 60 bp, Artificial
  Synthetic oligonucleotide
cttggtgtcaatcaatgactgtgctagctgcctcagctctggatccatatcatcccctag

SEQ ID NO: 33125 - DNA, 60 bp, Artificial
  Synthetic oligonucleotide
catccttgaacctgatccgggtccctttgttttcctttactgtctgtctccctcttgtgg

SEQ ID NO: 33126 - DNA, 60 bp, Artificial
  Synthetic oligonucleotide
tcccaattgacaaccaatctgctgtttgcccacttggctcttccagatcaatcgagttga

SEQ ID NO: 33127 - DNA, 60 bp, Artificial
  Synthetic oligonucleotide
caaccaatctgctgtttgcccacttggctcttccagatcaatcgagttgacatcaaggac

SEQ ID NO: 33128 - DNA, 60 bp, Artificial
  Synthetic oligonucleotide
atcgagttgacatcaaggacatttccataacgcagtgatgatttttccttcaaatggtca

SEQ ID NO: 33129 - DNA, 60 bp, Artificial
  Synthetic oligonucleotide
cttatctactgattaaatatgagatgatagtgttgattgtggccctttacccttagtaat

SEQ ID NO: 33130 - DNA, 60 bp, Artificial
  Synthetic oligonucleotide
gagaagaatgccccaagctcaggaacgcctgcaacatataaagcagttggagggcatcga

SEQ ID NO: 33131 - DNA, 60 bp, Artificial
  Synthetic oligonucleotide
ccccaagctcaggaacgcctgcaacatataaagcagttggagggcatcgatcaggtgcac

SEQ ID NO: 33132 - DNA, 60 bp, Artificial
  Synthetic oligonucleotide
tgcctacagactttgaggccatgatggtatttctcatgtcctgtaggatggagaagaatg

SEQ ID NO: 33133 - DNA, 60 bp, Artificial
  Synthetic oligonucleotide
gaggccatgatggtatttctcatgtcctgtaggatggagaagaatgccccaagctcagga

SEQ ID NO: 33134 - DNA, 60 bp, Artificial
  Synthetic oligonucleotide
ccagtctgactcacaacttcaaaggctcttggttggaaatctcttttaccttggtgtcaa

SEQ ID NO: 33135 - DNA, 60 bp, Artificial
  Synthetic oligonucleotide
cctcaatctttactaccagtctgactcacaacttcaaaggctcttggttggaaatctctt

SEQ ID NO: 33136 - DNA, 55 bp, Artificial
  Synthetic oligonucleotide
tttgttgacatgaaattctctgactgggattttggtttggggaggaatggacatt

SEQ ID NO: 33137 - DNA, 60 bp, Artificial
  Synthetic oligonucleotide
ccacctgggattcccgaacttgctgttgtctgttaattagataagccctatttgttgaca

SEQ ID NO: 33138 - DNA, 60 bp, Artificial
  Synthetic oligonucleotide
atagagacataaagatgttttggtttcctgatgccattaacttcttcaaaagaggaatca

SEQ ID NO: 33139 - DNA, 60 bp, Artificial
  Synthetic oligonucleotide
ccctggtgttatctcatcagccttcatagttgactgtgctgttggcatagagacataaag

SEQ ID NO: 33140 - DNA, 60 bp, Artificial
  Synthetic oligonucleotide
atctccctggtgttatctcatcagccttcatagttgactgtgctgttggcatagagacat

SEQ ID NO: 33141 - DNA, 50 bp, Artificial
  Synthetic oligonucleotide
aaaagaccacaggcaatcgtccgaaatctccctggtgttatctcatcagc

SEQ ID NO: 33142 - DNA, 60 bp, Artificial
  Synthetic oligonucleotide
tacagattaaacatcaaagaaaacttacacctatgtcttaacaacaattacttatctact

SEQ ID NO: 33143 - DNA, 60 bp, Artificial
  Synthetic oligonucleotide
gaggtagttgttgtgatgttagtaaaaaggcatagcaaagcagcaaagcatggaacgaaa

SEQ ID NO: 33144 - DNA, 60 bp, Artificial
  Synthetic oligonucleotide
agaggaatcatccttgaacctgatccgggtccctttgttttcctttactgtctgtctccc

SEQ ID NO: 33145 - DNA, 60 bp, Artificial
  Synthetic oligonucleotide
tgttttggtttcctgatgccattaacttcttcaaaagaggaatcatccttgaacctgatc

SEQ ID NO: 33146 - DNA, 59 bp, Artificial
  Synthetic oligonucleotide
ccccacccatcacattataaaggaacccagtgcaattaattagacagtagcccctgagt

SEQ ID NO: 33147 - DNA, 60 bp, Artificial
  Synthetic oligonucleotide
ccttagtaatcaccacccccacccatcacattataaaggaacccagtgcaattaattaga

SEQ ID NO: 33148 - DNA, 60 bp, Artificial
  Synthetic oligonucleotide
gcccctgagtaacaattggcacaagcccgaaaagccctcaatctttactaccagtctgac

SEQ ID NO: 33149 - DNA, 60 bp, Artificial
  Synthetic oligonucleotide
attaattagacagtagcccctgagtaacaattggcacaagcccgaaaagccctcaatctt

SEQ ID NO: 33150 - DNA, 60 bp, Artificial
  Synthetic oligonucleotide
attccttgccttcacctgtgcaggaaaaagaccacaggcaatcgtccgaaatctccctgg

SEQ ID NO: 33151 - DNA, 50 bp, Artificial
  Synthetic oligonucleotide
tcaatcctatccatccagtccttcacaaagaagctaaacccaatgacacc

SEQ ID NO: 33152 - DNA, 60 bp, Artificial
  Synthetic oligonucleotide
gaaatctcttttaccttggtgtcaatcaatgactgtgctagctgcctcagctctggatcc

SEQ ID NO: 33153 - DNA, 60 bp, Artificial
  Synthetic oligonucleotide
gctgcgaaagctggaatgagcaacctccaagaattacaggaaaacatcaccgcacacgaa

SEQ ID NO: 33154 - DNA, 60 bp, Artificial
  Synthetic oligonucleotide
tgcaacaccagcaatcttggcctctttcttaactccaaacatttcatagaatttgtcaag

SEQ ID NO: 33155 - DNA, 60 bp, Artificial
  Synthetic oligonucleotide
ttttgaagcaaatagccatacagaagctcttcaagtttgcaggagacgaaaccggtaaaa

SEQ ID NO: 33156 - DNA, 60 bp, Artificial
  Synthetic oligonucleotide
tttcaaaaacactcgaatgcttgccagtaaatgtgcagactatgtcttatttggatagca

SEQ ID NO: 33157 - DNA, 60 bp, Artificial
  Synthetic oligonucleotide
cccaaaaagatcccaaaagggacgatttggttgatttactctgttttaggcttatctaag

SEQ ID NO: 33158 - DNA, 60 bp, Artificial
  Synthetic oligonucleotide
tatcaagcctcctgaaagtcatatccttagctccaactctttcagaatttttctttatcg

SEQ ID NO: 33159 - DNA, 60 bp, Artificial
  Synthetic oligonucleotide
cgatcattcagacaaaggcttcagtttggggatcgacagcatctggtaagtccatcgtgg

SEQ ID NO: 33160 - DNA, 60 bp, Artificial
  Synthetic oligonucleotide
cccaattgcatccctttgaacctgtgatgagcaggtcagagattgctagcagattccggc

SEQ ID NO: 33161 - DNA, 60 bp, Artificial
  Synthetic oligonucleotide
tcctcttcgatgacataagaaactctccaacgcacagcacagcctggaagcatgcactcc

SEQ ID NO: 33162 - DNA, 60 bp, Artificial
  Synthetic oligonucleotide
gtcccaattcatgcttgcaacatgatgaaaagctgtttgatcggacttgggccctacaga

SEQ ID NO: 33163 - DNA, 60 bp, Artificial
  Synthetic oligonucleotide
catgcttgcaacatgatgaaaagctgtttgatcggacttgggccctacagaatccaggta

SEQ ID NO: 33164 - DNA, 60 bp, Artificial
  Synthetic oligonucleotide
gttgatcaatcaactgttggtgcaagtgggatttacccttcctttatgtcacgtatagtt

SEQ ID NO: 33165 - DNA, 60 bp, Artificial
  Synthetic oligonucleotide
gtcccatccaacattataacagcattggaaaagaagatcataccaaatcatcctacaggg

SEQ ID NO: 33166 - DNA, 60 bp, Artificial
  Synthetic oligonucleotide
gtcccatccaacattataacagcattggaaaagaaggtcataccaaatcatcctacaggg

SEQ ID NO: 33167 - DNA, 60 bp, Artificial
  Synthetic oligonucleotide
ctatttgcaggagtcccatccaacattataacagcattggaaaagaagatcataccaaat

SEQ ID NO: 33168 - DNA, 60 bp, Artificial
  Synthetic oligonucleotide
gactacaagaggagaatggcagatgctgtgtcccggaaaaagatggatactaagcctgct

SEQ ID NO: 33169 - DNA, 60 bp, Artificial
  Synthetic oligonucleotide
catccttactaaaaccttagttattggacagtgcatttatacttttacaagtatcttctc

SEQ ID NO: 33170 - DNA, 60 bp, Artificial
  Synthetic oligonucleotide
ccttagttattggacagtgcatttatacttttacaagtatcttctcactaatccctggga

SEQ ID NO: 33171 - DNA, 60 bp, Artificial
  Synthetic oligonucleotide
cttagttattggacagtgcatttatacttttacaagtatcttttccatgattccaggaat

SEQ ID NO: 33172 - DNA, 60 bp, Artificial
  Synthetic oligonucleotide
cagctggcagaccttattgcagctcagaaattggcttcaaaacctattgatccaacaggg

SEQ ID NO: 33173 - DNA, 60 bp, Artificial
  Synthetic oligonucleotide
ggtttgttaaatcaggggaatggatttcagggatattcagtggtaattggattgtactca

SEQ ID NO: 33174 - DNA, 57 bp, Artificial
  Synthetic oligonucleotide
tggtttgtcaaatcaggggaatggatttcagggatatttagtggcaattggattgtg

SEQ ID NO: 33175 - DNA, 58 bp, Artificial
  Synthetic oligonucleotide
cataactacctcatttgcttgctccttgattgtctttttagggagcatactactacta

SEQ ID NO: 33176 - DNA, 60 bp, Artificial
  Synthetic oligonucleotide
ctcaacctaactacctcatttgcttgctccttgattgtctttttagggagcatactacta

SEQ ID NO: 33177 - DNA, 60 bp, Artificial
  Synthetic oligonucleotide
ctcaacataactacctcatttgcttgctccttgattgtctttttagggagcatactacta

SEQ ID NO: 33178 - DNA, 60 bp, Artificial
  Synthetic oligonucleotide
acacccaaagaccccctgatttatttcacaatgtacaaaaacaacaattatgcattacag

SEQ ID NO: 33179 - DNA, 60 bp, Artificial
  Synthetic oligonucleotide
caagttgactgcatactgttcaaagaagtggcagctgaatgcatgaagaggtacattggc

SEQ ID NO: 33180 - DNA, 60 bp, Artificial
  Synthetic oligonucleotide
tgaacaagcagtgagcttgggttatctcagacaacacatctgctggaagctcttggtcaa

SEQ ID NO: 33181 - DNA, 60 bp, Artificial
  Synthetic oligonucleotide
ggcaaactgaacggcaatctcctcgtatgacattttgtattaagtaaattttcagggagc

SEQ ID NO: 33182 - DNA, 60 bp, Artificial
  Synthetic oligonucleotide
cagtcacccaaccggcaaccgcttgctcatctatagactcagaggcaaactgaacggcaa

SEQ ID NO: 33183 - DNA, 60 bp, Artificial
  Synthetic oligonucleotide
acattaactttaagcgtgtctacaccactgggcttagttatgaccacattcgaatcttct

SEQ ID NO: 33184 - DNA, 60 bp, Artificial
  Synthetic oligonucleotide
ataaagaaagtgacttctggtgacagtatgaagattgaaaagaactttgagactcttgtt

SEQ ID NO: 33185 - DNA, 56 bp, Artificial
  Synthetic oligonucleotide
ctgacacagtacaaggtgttgcattttcaggtagtcctctttatacatctaccggg

SEQ ID NO: 33186 - DNA, 60 bp, Artificial
  Synthetic oligonucleotide
atatgggagaacttagtccagtttgtctgtatctgcttctccagggtctattactatgta

SEQ ID NO: 33187 - DNA, 60 bp, Artificial
  Synthetic oligonucleotide
gtccagtttgtctgtatctgcttctccagggtctattactatgtaatacaggggctgcca

SEQ ID NO: 33188 - DNA, 60 bp, Artificial
  Synthetic oligonucleotide
gccacaaaggattcatttcaatctttcaatgtgacagaaccccatatttctacaagtgca

SEQ ID NO: 33189 - DNA, 60 bp, Artificial
  Synthetic oligonucleotide
aagcaataagaggtaagctacctcccagcattatggcaagcctcacagactttgcatcat

SEQ ID NO: 33190 - DNA, 60 bp, Artificial
  Synthetic oligonucleotide
actgaagcaataagaggtaagctacctcccagcattatggcaagcctcacagactttgca

SEQ ID NO: 33191 - DNA, 60 bp, Artificial
  Synthetic oligonucleotide
aactgaagcaataagaggtaagctacctcccagcattatggcaagcctcacagactttgc

SEQ ID NO: 33192 - DNA, 60 bp, Artificial
  Synthetic oligonucleotide
aagttacacttaaccttgggggctggaagattactgtatataatacgaattttcctggca

SEQ ID NO: 33193 - DNA, 60 bp, Artificial
  Synthetic oligonucleotide
gtgcagaaagcagatctttgctgcttgtaaaagtggtaagtatgttttttgtggtaagac

SEQ ID NO: 33194 - DNA, 60 bp, Artificial
  Synthetic oligonucleotide
caagtatgaatgtgaaacctataaagaattaaaggcacatggggtatcttgtccccaatc

SEQ ID NO: 33195 - DNA, 60 bp, Artificial
  Synthetic oligonucleotide
ctacccctatttgtgagtatgatggaaatatggtctcaggttacaagaaagtgatggcga

SEQ ID NO: 33196 - DNA, 60 bp, Artificial
  Synthetic oligonucleotide
acccctatttgtgagtatgatggaaatatggtctcaggttacaagaaagtgatggcgaca

SEQ ID NO: 33197 - DNA, 60 bp, Artificial
  Synthetic oligonucleotide
ctagcccagactcgagcataggtctcgtacgggctacttttgtcgttccgctggccgaag

SEQ ID NO: 33198 - DNA, 60 bp, Artificial
  Synthetic oligonucleotide
gtcgttccgctggccgaagaaaacggaataacttggtgtgatggcgtagcgatgtacctg

SEQ ID NO: 33199 - DNA, 60 bp, Artificial
  Synthetic oligonucleotide
gagacttctttcgctgacaatacatttaatccggaagctgcttttgtcgcatttaagcct

SEQ ID NO: 33200 - DNA, 60 bp, Artificial
  Synthetic oligonucleotide
gacaatacatttaatccggaagctgcttttgtcgcatttaagcctacccatggatcggag

SEQ ID NO: 33201 - DNA, 60 bp, Artificial
  Synthetic oligonucleotide
tcacacctagccctacatttatcctgatgatcgaactagtgttcaaagatgagacttctt

SEQ ID NO: 33202 - DNA, 60 bp, Artificial
  Synthetic oligonucleotide
gccctacatttatcctgatgatcgaactagtgttcaaagatgagacttctttcgctgaca

SEQ ID NO: 33203 - DNA, 60 bp, Artificial
  Synthetic oligonucleotide
acaaaaccacagcacaatgggtgggtggtcggggacaccaagaaattagatgtaagttca

SEQ ID NO: 33204 - DNA, 60 bp, Artificial
  Synthetic oligonucleotide
ccacagcacaatgggtgggtggtcggggacaccaagaaattagatgtaagttcagagata

SEQ ID NO: 33205 - DNA, 60 bp, Artificial
  Synthetic oligonucleotide
atttaagcctacccatggatcggagttggagtcgtctactgttcgaatcttctacatcaa

SEQ ID NO: 33206 - DNA, 60 bp, Artificial
  Synthetic oligonucleotide
cccatggatcggagttggagtcgtctactgttcgaatcttctacatcaatgcggcgaagg

SEQ ID NO: 33207 - DNA, 60 bp, Artificial
  Synthetic oligonucleotide
tttacctggcgccgaaatgtttatgtcaacttttgcgttcttcccgctcacaatcggaat

SEQ ID NO: 33208 - DNA, 60 bp, Artificial
  Synthetic oligonucleotide
aaagagacagtatctatccttgcgcgtttcgaggacgttgaaaagctcgattgggctaag

SEQ ID NO: 33209 - DNA, 60 bp, Artificial
  Synthetic oligonucleotide
gtgctccactcgaataatttgaaggttcttttatcatagcttgttcacacctagccctac

SEQ ID NO: 33210 - DNA, 60 bp, Artificial
  Synthetic oligonucleotide
ataattgcgatactcagagctccgcatagagcaacacaaaaccacagcacaatgggtggg

SEQ ID NO: 33211 - DNA, 60 bp, Artificial
  Synthetic oligonucleotide
gttagcgtaaattatataattgcgatactcagagctccgcatagagcaacacaaaaccac

SEQ ID NO: 33212 - DNA, 57 bp, Artificial
  Synthetic oligonucleotide
cgttgaaaagctcgattgggctaagactgcatttacaagtgcagcaagagagtttgt

SEQ ID NO: 33213 - DNA, 60 bp, Artificial
  Synthetic oligonucleotide
ggcgaaggtcaaagcttacctgcgaaggtcagcggagcaactggtttcgcttactcttgg

SEQ ID NO: 33214 - DNA, 60 bp, Artificial
  Synthetic oligonucleotide
gacgaatggataactaaagagacagtatctatccttgcgcgtttcgaggacgttgaaaag

SEQ ID NO: 33215 - DNA, 60 bp, Artificial
  Synthetic oligonucleotide
cccgctcacaatcggaatgtatagagttcggaggtggaccatggaccctcaatgtctaga

SEQ ID NO: 33216 - DNA, 60 bp, Artificial
  Synthetic oligonucleotide
cgttcttcccgctcacaatcggaatgtatagagttcggaggtggaccatggaccctcaat

SEQ ID NO: 33217 - DNA, 60 bp, Artificial
  Synthetic oligonucleotide
agtagtgtgctccactcgaataatttgaaggttcttttatcatagcttgttcacacctag

SEQ ID NO: 33218 - DNA, 60 bp, Artificial
  Synthetic oligonucleotide
gatgtacctggcatttttacctggcgccgaaatgtttatgtcaacttttgcgttcttccc

SEQ ID NO: 33219 - DNA, 60 bp, Artificial
  Synthetic oligonucleotide
taatttgccctagcccagactcgagcataggtctcgtacgggctacttttgtcgttccgc

SEQ ID NO: 33220 - DNA, 60 bp, Artificial
  Synthetic oligonucleotide
cgttccgctggccgaagaaaacggaataacttggtgtgatggcgtagcgatgtacctggc

SEQ ID NO: 33221 - DNA, 60 bp, Artificial
  Synthetic oligonucleotide
tcctggaaacaggaacaacccaattgataacaacgatcttaccatccaccggctgtcagg

SEQ ID NO: 33222 - DNA, 60 bp, Artificial
  Synthetic oligonucleotide
cctggaaacaggaacaacccaattgataacaacgatcttaccatccaccggctgtcaggg

SEQ ID NO: 33223 - DNA, 60 bp, Artificial
  Synthetic oligonucleotide
gcttcccttagcattgggattgcaagaactaagtatcttggcatattctttccctttgtt

SEQ ID NO: 33224 - DNA, 60 bp, Artificial
  Synthetic oligonucleotide
tgcacagataaacaaaggaaaagaatatgccaagatacttagttcttgcaatcccaatgc

SEQ ID NO: 33225 - DNA, 60 bp, Artificial
  Synthetic oligonucleotide
aaagtgattttacttttggtaaggtcacgataaagaaaaattctgagagagttggagcca

SEQ ID NO: 33226 - DNA, 60 bp, Artificial
  Synthetic oligonucleotide
gtgaccttaccaaaagtaaaatcactttggttcacaactttcataatgccttggcgattc

SEQ ID NO: 33227 - DNA, 60 bp, Artificial
  Synthetic oligonucleotide
gcactgtgcaaaccttccccagagcttccttagtgttgtacttagttggttcaatcccta

SEQ ID NO: 33228 - DNA, 60 bp, Artificial
  Synthetic oligonucleotide
gttggagccaaagacatgactttcaggaggcttgatagcatgataagagtgaagctcata

SEQ ID NO: 33229 - DNA, 60 bp, Artificial
  Synthetic oligonucleotide
gaagaatcgccaaagcatcatgaaagtcgtgaaccaaagtgattttacttttggtaaggt

SEQ ID NO: 33230 - DNA, 60 bp, Artificial
  Synthetic oligonucleotide
tctcaaagaaacacgtgccgcttacgcccacagtgttctcttgagtgttagcagaatgga

SEQ ID NO: 33231 - DNA, 60 bp, Artificial
  Synthetic oligonucleotide
tctcaaagaaacacgtgccgcttacgcccacagtgttctcttgagtgttagcaaaatgga

SEQ ID NO: 33232 - DNA, 51 bp, Artificial
  Synthetic oligonucleotide
actacctcatttgctttttccttgattgtctttttagggagcatactacta

SEQ ID NO: 33233 - DNA, 60 bp, Artificial
  Synthetic oligonucleotide
ttacattctacctcagtgtacttatatatatgcaattagcatatatataagtacacaatt

SEQ ID NO: 33234 - DNA, 60 bp, Artificial
  Synthetic oligonucleotide
ggtgggaatcattactcaggggtgggtcagttaatccgttgtgggtgggtttagctccag

SEQ ID NO: 33235 - DNA, 60 bp, Artificial
  Synthetic oligonucleotide
gggaatcattactcaagggtgggtcagttaatccgttgtgggtgggtttagttccaggct

SEQ ID NO: 33236 - DNA, 60 bp, Artificial
  Synthetic oligonucleotide
caacaagcttggaaacaagcttatcaattgaggcaccatggggagcaataaatgtccagt

SEQ ID NO: 33237 - DNA, 60 bp, Artificial
  Synthetic oligonucleotide
gttgcagagttgcacacatggtgtgccaggagatctacaggtctaccacatcggaaattt

SEQ ID NO: 33238 - DNA, 60 bp, Artificial
  Synthetic oligonucleotide
ccttagctctaattactctgacttaatccccgactgcgtgccgccactatatctttgaga

SEQ ID NO: 33239 - DNA, 60 bp, Artificial
  Synthetic oligonucleotide
ctcaacagaggtggtgatgagaacccacgtggcccagtgagccgtgaacatgtggagtgg

SEQ ID NO: 33240 - DNA, 60 bp, Artificial
  Synthetic oligonucleotide
cctggaaacaggaacaacccaattggtaacaacgatcttaccatccataggctttcagga

SEQ ID NO: 33241 - DNA, 60 bp, Artificial
  Synthetic oligonucleotide
aagcctggcatgtccagccagccagggcggcagcaactcgtgatagagtcaactcatctc

SEQ ID NO: 33242 - DNA, 60 bp, Artificial
  Synthetic oligonucleotide
agagcctggcatgtccagccagccagggcggcagcaactcgtgatagagtcaactcatcc

SEQ ID NO: 33243 - DNA, 60 bp, Artificial
  Synthetic oligonucleotide
aaagcctggcatgtccagccagccagggcggcagcaactcgtgatagagtcaactcatcc

SEQ ID NO: 33244 - DNA, 60 bp, Artificial
  Synthetic oligonucleotide
tttaggttcaggctgccttaagtagcctttttttgtatatatggatgtagatttcatttg

SEQ ID NO: 33245 - DNA, 60 bp, Artificial
  Synthetic oligonucleotide
tttaggttcaggctgccttaagtagcctttttttgtatatatggatgtagatttcattta

SEQ ID NO: 33246 - DNA, 60 bp, Artificial
  Synthetic oligonucleotide
caatctcacgataattctcctcagacatgatgttttgtttagttaaataacgggattctt

SEQ ID NO: 33247 - DNA, 60 bp, Artificial
  Synthetic oligonucleotide
cgataattctcctcagacatgatgttttgtttagttaaataacgggattctttgtgtccc

SEQ ID NO: 33248 - DNA, 59 bp, Artificial
  Synthetic oligonucleotide
tagttctcctcagacatgttgttttgtttagttaaataacgggattctttgtgtccccc

SEQ ID NO: 33249 - DNA, 58 bp, Artificial
  Synthetic oligonucleotide
tagttctcctcagacatgttgttttgtttagttaaataacgggattctttgtgtcccc

SEQ ID NO: 33250 - DNA, 60 bp, Artificial
  Synthetic oligonucleotide
tccagcaaacaggaacaatccaattggtaacaacgatcttaccatccaccgcatctcagg

SEQ ID NO: 33251 - DNA, 60 bp, Artificial
  Synthetic oligonucleotide
ttccagcaaacaggaacaatccaattggtaacaacgatcttaccatccaccgcatctcag

SEQ ID NO: 33252 - DNA, 60 bp, Artificial
  Synthetic oligonucleotide
gaagctagaggaaaggacaggaatcagctgggatctaggggtagaagatgcctctgagtc

SEQ ID NO: 33253 - DNA, 60 bp, Artificial
  Synthetic oligonucleotide
caaagcaagaagggatccgaagaactgggttagcatctctgaggtgacagaaacaacaag

SEQ ID NO: 33254 - DNA, 60 bp, Artificial
  Synthetic oligonucleotide
caaagcaaggagggatccgaagaactgggttagcatctctgaggtgacagaaacaacaag

SEQ ID NO: 33255 - DNA, 60 bp, Artificial
  Synthetic oligonucleotide
gtacgattctactacctcagacagttgctttcttgattgcttttcaaggagtctactact

SEQ ID NO: 33256 - DNA, 60 bp, Artificial
  Synthetic oligonucleotide
gtcccttcttgaaaaaacaaggttccaccaaagaagaagaatttcttgtgagcaatgatg

SEQ ID NO: 33257 - DNA, 60 bp, Artificial
  Synthetic oligonucleotide
caacaaacagtgtcagcattggaggataaactcgctgactacaagagaagaatggcagat

SEQ ID NO: 33258 - DNA, 60 bp, Artificial
  Synthetic oligonucleotide
caacaaacagtgtcagcattggaggataaactcgcagactataagagaagaatggcagat

SEQ ID NO: 33259 - DNA, 60 bp, Artificial
  Synthetic oligonucleotide
gtatccacaccactgggcttagttatgaccacattcgagtcctctacattaaaggacgcg

SEQ ID NO: 33260 - DNA, 60 bp, Artificial
  Synthetic oligonucleotide
tcctagccacacaatgggctcttttgagttgatccaggcaatctcagagttcggcatgag

SEQ ID NO: 33261 - DNA, 60 bp, Artificial
  Synthetic oligonucleotide
ggaagccgacccagatgatgttaacaaaagcacactacagagtagacgggcagctgtgtc

SEQ ID NO: 33262 - DNA, 60 bp, Artificial
  Synthetic oligonucleotide
taagtcctgtaatgggagtcattggattcagcttctttgtaaaggactggatggaaagga

SEQ ID NO: 33263 - DNA, 60 bp, Artificial
  Synthetic oligonucleotide
acacaaaggtccctagttaatctgagtgagctaagtttgaaatggacgagtaccagaaaa

SEQ ID NO: 33264 - DNA, 60 bp, Artificial
  Synthetic oligonucleotide
tagttcagacccagctgtattctgattcaagaagcaaaagtagctttggctatactgcaa

SEQ ID NO: 33265 - DNA, 60 bp, Artificial
  Synthetic oligonucleotide
tcagacccagctgtattctgattcaagaagcaaaagtagctttggctatactgcaaaagt

SEQ ID NO: 33266 - DNA, 60 bp, Artificial
  Synthetic oligonucleotide
tagttcaaacccagctgtattctgattcaagaagcaaaagtagctttggctatactgcaa

SEQ ID NO: 33267 - DNA, 60 bp, Artificial
  Synthetic oligonucleotide
aaggaaatggacttatggacactttcacaaactcctactccttttgtgagaatgtaccaa

SEQ ID NO: 33268 - DNA, 60 bp, Artificial
  Synthetic oligonucleotide
agggaaatggacttatggacactttcacaaactcctactccttttgtgagaatgtaccaa

SEQ ID NO: 33269 - DNA, 60 bp, Artificial
  Synthetic oligonucleotide
gggacatcaacaagtcaggccgttcaggaatagcacttgttgcaacaggccttgccaagc

SEQ ID NO: 33270 - DNA, 54 bp, Artificial
  Synthetic oligonucleotide
ggggcaataaatgttcagtcaacctacaaaccaactgtatcaactgcaaacata

SEQ ID NO: 33271 - DNA, 60 bp, Artificial
  Synthetic oligonucleotide
gagcttgaaggatgttgagcagctcaaatggggaagaggaggtcttagtgatgctgcaag

SEQ ID NO: 33272 - DNA, 60 bp, Artificial
  Synthetic oligonucleotide
ctcattgctaagagcttgaaggatgttgagcagctcaaatggggaagaggaggtcttagt

SEQ ID NO: 33273 - DNA, 60 bp, Artificial
  Synthetic oligonucleotide
tttaaatcttgaaattggtccaaattcattttttataattggctcccaaaaggtcttatg

SEQ ID NO: 33274 - DNA, 60 bp, Artificial
  Synthetic oligonucleotide
atctatccaacatctacctcagtgtacttatatatatgcaattagcatatatataagtac

SEQ ID NO: 33275 - DNA, 60 bp, Artificial
  Synthetic oligonucleotide
ctgcgcaagagagtgtgaagtcctcttcgatgacataagaaactctccaacgcacagcac

SEQ ID NO: 33276 - DNA, 60 bp, Artificial
  Synthetic oligonucleotide
gagctatatgacataaggctgcagcacctggaactgtcaaagcttaagcaagagcaccct

SEQ ID NO: 33277 - DNA, 60 bp, Artificial
  Synthetic oligonucleotide
cttttgagcaccccaatgaagtggggtaagaagctttatgagctctttgctgatgactca

SEQ ID NO: 33278 - DNA, 60 bp, Artificial
  Synthetic oligonucleotide
tgatgactcattccagcaaaacaggatctacatgcaccctgccgtgttgacagctggcag

SEQ ID NO: 33279 - DNA, 60 bp, Artificial
  Synthetic oligonucleotide
tgatgactcattccagcaaaacaggatctacatgcaccctgccgtgttgacggctggcag

SEQ ID NO: 33280 - DNA, 60 bp, Artificial
  Synthetic oligonucleotide
ccctttacagcaagtggatacatgcgatgataaatcaagcaggtcttacagtggggaggc

SEQ ID NO: 33281 - DNA, 60 bp, Artificial
  Synthetic oligonucleotide
catgttgtggcctagcttatcacccctttacaaattgtggatcacactgtgtatgcgggc

SEQ ID NO: 33282 - DNA, 60 bp, Artificial
  Synthetic oligonucleotide
ggtctcttgtataagccctaggtttggtgttccgatggaaggattattggcatgtgggga

SEQ ID NO: 33283 - DNA, 60 bp, Artificial
  Synthetic oligonucleotide
cactgtatgctcaattgaagggccttgtacaacttttcataataggttgatgatcacctc

SEQ ID NO: 33284 - DNA, 60 bp, Artificial
  Synthetic oligonucleotide
tgatggtgcaccagaatgtggcatgtcttgttggtttaaaaaatcaggtgaatggattct

SEQ ID NO: 33285 - DNA, 60 bp, Artificial
  Synthetic oligonucleotide
accagaatgtggtatgtcatgttggtttaaaaaatcaggtgaatggattcttggggtttt

SEQ ID NO: 33286 - DNA, 60 bp, Artificial
  Synthetic oligonucleotide
cataatgctgggaggtagcttacctcttattgcttcagttgatagctttgagatgatcag

SEQ ID NO: 33287 - DNA, 60 bp, Artificial
  Synthetic oligonucleotide
caacactgatcatctcaaagctatcaactgaagcaataagaggtaagctacctcccagca

SEQ ID NO: 33288 - DNA, 60 bp, Artificial
  Synthetic oligonucleotide
tataatgctgggaggtagcttacctcttattgcttcagttgatagctttgagatgatcag

SEQ ID NO: 33289 - DNA, 60 bp, Artificial
  Synthetic oligonucleotide
atcctgatatatagccaagacaacactgatcatctcaaagctatcaactgaagcaataag

SEQ ID NO: 33290 - DNA, 60 bp, Artificial
  Synthetic oligonucleotide
tcctgatatatagccaagacaacactgatcatctcaaagctatcaactgaagcaataaga

SEQ ID NO: 33291 - DNA, 60 bp, Artificial
  Synthetic oligonucleotide
ggaatgagcaccctcaaagaagtgcaagacaacatcactctccacgaacaacaactcgtg

SEQ ID NO: 33292 - DNA, 60 bp, Artificial
  Synthetic oligonucleotide
actacgactaaagctggaatgagcaccctcaaagaagtgcaagacaacatcacattacac

SEQ ID NO: 33293 - DNA, 60 bp, Artificial
  Synthetic oligonucleotide
actacgactaaagctggaatgagcaccctcaaagaagtgcaagacaacattacattacac

SEQ ID NO: 33294 - DNA, 60 bp, Artificial
  Synthetic oligonucleotide
ctggaatgagcaccctcaaagaagtgcaagacaacattacattacacgaacaacagctcg

SEQ ID NO: 33295 - DNA, 60 bp, Artificial
  Synthetic oligonucleotide
ctggaatgagcaccctcaaagaagtgcaagacaacatcacattacacgaacaacagctcg

SEQ ID NO: 33296 - DNA, 60 bp, Artificial
  Synthetic oligonucleotide
ggaatgagcaccctcaaagaagtgcaagacaacatcacacttcacgaacaacaactcgtg

SEQ ID NO: 33297 - DNA, 60 bp, Artificial
  Synthetic oligonucleotide
ggaatgagcaccctcaaagaagtgcaagacaacatcacattacatgaacagcagctcgtg

SEQ ID NO: 33298 - DNA, 60 bp, Artificial
  Synthetic oligonucleotide
acgactaaagctggaatgagcaccctcaaagaagtgcaagacaacatcacacttcacgaa

SEQ ID NO: 33299 - DNA, 60 bp, Artificial
  Synthetic oligonucleotide
acgactaaagctggaatgagcaccctcaaagaagtgcaagacaacatcactctccacgaa

SEQ ID NO: 33300 - DNA, 60 bp, Artificial
  Synthetic oligonucleotide
tatacaactggaccagaggataatactgttgttcatgatggagtggggttctgatattgt

SEQ ID NO: 33301 - DNA, 60 bp, Artificial
  Synthetic oligonucleotide
ctgaacatgacgcccggaacaatttcagaagatgctttctatgacagaagcaaaatagca

SEQ ID NO: 33302 - DNA, 60 bp, Artificial
  Synthetic oligonucleotide
gattttggtttcaggtagatcagagtcaatcatgaagctagaggaaaggacaggaatcag

SEQ ID NO: 33303 - DNA, 60 bp, Artificial
  Synthetic oligonucleotide
gagcaaacctcactgttaacaccgctcgaattttcttcctcaatcagaagagagccaagg

SEQ ID NO: 33304 - DNA, 60 bp, Artificial
  Synthetic oligonucleotide
aaatacataccgagcaaacctcactgttaacaccgctcgaattttcttcctcaatcagaa

SEQ ID NO: 33305 - DNA, 60 bp, Artificial
  Synthetic oligonucleotide
gagcaaacctcactattaacaccgctcgaattttcttcctcaatcagaagagagccaagg

SEQ ID NO: 33306 - DNA, 60 bp, Artificial
  Synthetic oligonucleotide
aaatacataccgagcaaacctcactattaacaccgctcgaattttcttcctcaatcagaa

SEQ ID NO: 33307 - DNA, 60 bp, Artificial
  Synthetic oligonucleotide
tcaatcagaagagagccaaggatactttacgtcagacgccgaggcctactgtcaatctta

SEQ ID NO: 33308 - DNA, 60 bp, Artificial
  Synthetic oligonucleotide
tcaatcagaagagagccaaggatactttacgtcagacgccgaggcccactgtcaatctta

SEQ ID NO: 33309 - DNA, 60 bp, Artificial
  Synthetic oligonucleotide
gccaaggatactttacgtcagacgccgaggcccactgtcaatcttacttttggacagtgc

SEQ ID NO: 33310 - DNA, 60 bp, Artificial
  Synthetic oligonucleotide
gccaaggatactttacgtcagacgccgaggcctactgtcaatcttacttttggacagtgt

SEQ ID NO: 33311 - DNA, 60 bp, Artificial
  Synthetic oligonucleotide
tgcaccgcctctccggctaccttgcgagatggctaatgactttctactctcaaagcccag

SEQ ID NO: 33312 - DNA, 60 bp, Artificial
  Synthetic oligonucleotide
tggaggaccggaatgggataaaacaacacaagtacctttacatatcccttccaacaagcc

SEQ ID NO: 33313 - DNA, 60 bp, Artificial
  Synthetic oligonucleotide
aggatgactcatgcatggaggaccggaatgggataaaacaacacaagtacctttacatat

SEQ ID NO: 33314 - DNA, 60 bp, Artificial
  Synthetic oligonucleotide
ccttccaacaagccaatcttccatccaagatgatgaactcacacctggacgttttaggac

SEQ ID NO: 33315 - DNA, 60 bp, Artificial
  Synthetic oligonucleotide
ctttacatatcccttccaacaagccaatcttccatccaagatgatgaactcacacctgga

SEQ ID NO: 33316 - DNA, 60 bp, Artificial
  Synthetic oligonucleotide
ccttacacaggttcttctccttaaaggcctctacatcttgaccacccgaggaagacagac

SEQ ID NO: 33317 - DNA, 60 bp, Artificial
  Synthetic oligonucleotide
ttgacccttacacaggttcttctccttaaaggcctctacatcttgaccacccgaggaaga

SEQ ID NO: 33318 - DNA, 55 bp, Artificial
  Synthetic oligonucleotide
aagaaattagaacatgagtacaatcaaactgagaaggcattgacagagtcatctc

SEQ ID NO: 33319 - DNA, 60 bp, Artificial
  Synthetic oligonucleotide
cagacaaagatgactcaagggaaaatgactcccgaagagctaaagaaattagaacatgag

SEQ ID NO: 33320 - DNA, 60 bp, Artificial
  Synthetic oligonucleotide
aaatctttcagacaaagatgactcaagggaaaatgactcccgaagagctaaagaaattag

SEQ ID NO: 33321 - DNA, 60 bp, Artificial
  Synthetic oligonucleotide
ggactccctgcttacaacagaagagactactactactatatagaaatctttcagacaaag

SEQ ID NO: 33322 - DNA, 60 bp, Artificial
  Synthetic oligonucleotide
tagtagtggactccctgcttacaacagaagagactactactactatatagaaatctttca

SEQ ID NO: 33323 - DNA, 60 bp, Artificial
  Synthetic oligonucleotide
taaaggcaaaaaagctgatgagccctgtaatgggtgtcattggttttcaacatttagctg

SEQ ID NO: 33324 - DNA, 60 bp, Artificial
  Synthetic oligonucleotide
cacacctggacgttttaggacaatgatctcaggactcttgccaaatgagataaaggcaaa

SEQ ID NO: 33325 - DNA, 60 bp, Artificial
  Synthetic oligonucleotide
tagtaaagacaacaaaggtactagaatcaagcttaaggatgactcatgcatggaggaccg

SEQ ID NO: 33326 - DNA, 60 bp, Artificial
  Synthetic oligonucleotide
ccgaggaagacagactagtaaagacaacaaaggtactagaatcaagcttaaggatgactc

SEQ ID NO: 33327 - DNA, 60 bp, Artificial
  Synthetic oligonucleotide
agaaagccagatgtgccgggggttgaagaaggtgattatctcactgcaaagtcatccctt

SEQ ID NO: 33328 - DNA, 57 bp, Artificial
  Synthetic oligonucleotide
ggggttgaagaaggtgattatctcactgcaaagtcatcccttcggtatgggaacgtt

SEQ ID NO: 33329 - DNA, 60 bp, Artificial
  Synthetic oligonucleotide
gtcatcccttcggtatgggaacgttgtcgacctcaatccactcagcctagaagaacctgc

SEQ ID NO: 33330 - DNA, 60 bp, Artificial
  Synthetic oligonucleotide
atcatatgtgagaagaacacaatcaatgggtgttaactgtgatcagaagatcatccacat

SEQ ID NO: 33331 - DNA, 60 bp, Artificial
  Synthetic oligonucleotide
gagaagaacacaatcaatgggtgttaactgtgatcagaagatcatccacatctttatgga

SEQ ID NO: 33332 - DNA, 60 bp, Artificial
  Synthetic oligonucleotide
aagaacctgcaggccaaactgccaattggggaaagatattcgaatacattttgaccctta

SEQ ID NO: 33333 - DNA, 60 bp, Artificial
  Synthetic oligonucleotide
ctgcaggccaaactgccaattggggaaagatattcgaatacattttgacccttacacagg

SEQ ID NO: 33334 - DNA, 60 bp, Artificial
  Synthetic oligonucleotide
cagaagccaccccatggttatttgcaaatgcaccagaccgatgccctcctactgttcttc

SEQ ID NO: 33335 - DNA, 60 bp, Artificial
  Synthetic oligonucleotide
ccgatgccctcctactgttcttcaagtggcaggtatcccggaacttggtgctttccttgc

SEQ ID NO: 33336 - DNA, 60 bp, Artificial
  Synthetic oligonucleotide
gctgatgagccctgtaatgggtgtcattggttttcaacatttagctgaggcttggccagg

SEQ ID NO: 33337 - DNA, 60 bp, Artificial
  Synthetic oligonucleotide
gcagatattgagtcagaagccaccccatggttatttgcaaatgcaccagaccgatgccct

SEQ ID NO: 33338 - DNA, 60 bp, Artificial
  Synthetic oligonucleotide
cttcgtggaacaggagaagagaagatagctaagaaatcatcattctatcaatcatatgtg

SEQ ID NO: 33339 - DNA, 60 bp, Artificial
  Synthetic oligonucleotide
cgtggaacaggagaagagaagatagctaagaaatcatcattctatcaatcatatgtgaga

SEQ ID NO: 33340 - DNA, 60 bp, Artificial
  Synthetic oligonucleotide
acagagatctgatgttgttgatgcttacaggaacaaattgaaagagttgcagggcatgat

SEQ ID NO: 33341 - DNA, 60 bp, Artificial
  Synthetic oligonucleotide
ctggtcaaaaccctgactccatccaacaacagtccataaaacagagatctgatgttgttg

SEQ ID NO: 33342 - DNA, 60 bp, Artificial
  Synthetic oligonucleotide
ctttccttgcactcatgcaggacatacggggtgggattcttgcctctagtcttcgtggaa

SEQ ID NO: 33343 - DNA, 60 bp, Artificial
  Synthetic oligonucleotide
cccttcggtatgggaacgttgtcgacctcaatccactcagcctagaagaacctgcaggcc

SEQ ID NO: 33344 - DNA, 60 bp, Artificial
  Synthetic oligonucleotide
tgttgttgatgcttacaggaacaaattgaaagagttgcagggcatgattgctgccgggca

SEQ ID NO: 33345 - DNA, 60 bp, Artificial
  Synthetic oligonucleotide
ggagatttcaagtcaggagcctattaaactgtaattaaccgatactcttattctgtaaat

SEQ ID NO: 33346 - DNA, 51 bp, Artificial
  Synthetic oligonucleotide
aaccttggtgatgatatggatccagaactcaaggccaaggctcaggcccta

SEQ ID NO: 33347 - DNA, 60 bp, Artificial
  Synthetic oligonucleotide
tggattacttgggctcatattgtgttgaccactttaaccttggtgatgatatggatccag

SEQ ID NO: 33348 - DNA, 60 bp, Artificial
  Synthetic oligonucleotide
tcatccacatctttatggattacttgggctcatattgtgttgaccactttaaccttggtg

SEQ ID NO: 33349 - DNA, 50 bp, Artificial
  Synthetic oligonucleotide
aaccccaagttatttgatctctaattgttgtataggggtgtctactacta

SEQ ID NO: 33350 - DNA, 60 bp, Artificial
  Synthetic oligonucleotide
cttgcttactaacttgcttactcctaaccccgttagctttccccactactaaccccaagt

SEQ ID NO: 33351 - DNA, 60 bp, Artificial
  Synthetic oligonucleotide
ccttgcactcatgcaggacatacggggtgggattcttgcctctagtcttcgtggaacagg

SEQ ID NO: 33352 - DNA, 60 bp, Artificial
  Synthetic oligonucleotide
atagatcaagctggtcaaaaccctgactccatccaacaacagtccataaaacagagatct

SEQ ID NO: 33353 - DNA, 60 bp, Artificial
  Synthetic oligonucleotide
caactgtggtaattgatggtgtaagttggtgtttcagcaaggttatgagtttagacctaa

SEQ ID NO: 33354 - DNA, 60 bp, Artificial
  Synthetic oligonucleotide
gaatgtctaattgcacatgctggcttgaaaagatcaaagtactggtcaatacatgggttc

SEQ ID NO: 33355 - DNA, 60 bp, Artificial
  Synthetic oligonucleotide
ttaagagatataacagaatgtctaattgcacatgctggcttgaaaagatcaaagtactgg

SEQ ID NO: 33356 - DNA, 60 bp, Artificial
  Synthetic oligonucleotide
aggtgttgatgatatcttaaagaagttttatgacaatgagttggtcaagtatatgttaca

SEQ ID NO: 33357 - DNA, 60 bp, Artificial
  Synthetic oligonucleotide
ataatttaagatatctaatccctgcagtgacctcgctttattcaggatataaaccgttga

SEQ ID NO: 33358 - DNA, 58 bp, Artificial
  Synthetic oligonucleotide
ttcaatactatacagaggaccaaggtcactttcccttacaacatgcattgaggtctgt

SEQ ID NO: 33359 - DNA, 53 bp, Artificial
  Synthetic oligonucleotide
ttagacctaaatcgactattggctctgaatatatcttttgagaagacactatt

SEQ ID NO: 33360 - DNA, 60 bp, Artificial
  Synthetic oligonucleotide
atggtgtaagttggtgtttcagcaaggttatgagtttagacctaaatcgactattggctc

SEQ ID NO: 33361 - DNA, 60 bp, Artificial
  Synthetic oligonucleotide
ggagtttaattgagtttattgaggtgacagttacagctgatgtggcaagaggaacacgtg

SEQ ID NO: 33362 - DNA, 60 bp, Artificial
  Synthetic oligonucleotide
acaagattacagggagtttaattgagtttattgaggtgacagttacagctgatgtggcaa

SEQ ID NO: 33363 - DNA, 60 bp, Artificial
  Synthetic oligonucleotide
tgcatcaggagtcagaaagaggcaatctgccaggtggttatagaataaagtttgatgtag

SEQ ID NO: 33364 - DNA, 60 bp, Artificial
  Synthetic oligonucleotide
gatatctaatccctgcagtgacctcgctttattcaggatataaaccgttgattgtaaagt

SEQ ID NO: 33365 - DNA, 60 bp, Artificial
  Synthetic oligonucleotide
caacgaaatgagggtgtcgttcaaacaatgaggttaattcaggcagatatcaattacgtg

SEQ ID NO: 33366 - DNA, 60 bp, Artificial
  Synthetic oligonucleotide
aaagaggcaatctgccaggtggttatagaataaagtttgatgtagtggcagtgaggactg

SEQ ID NO: 33367 - DNA, 60 bp, Artificial
  Synthetic oligonucleotide
gatgagagatcagcactagaagccatgttcaatttaaaattccatgtcagtggacctaaa

SEQ ID NO: 33368 - DNA, 60 bp, Artificial
  Synthetic oligonucleotide
gaaatgagggtgtcgttcaaacaatgaggttaattcaggcagatatcaattacgtgagag

SEQ ID NO: 33369 - DNA, 60 bp, Artificial
  Synthetic oligonucleotide
cagcactagaagccatgttcaatttaaaattccatgtcagtggacctaaagccaggacct

SEQ ID NO: 33370 - DNA, 60 bp, Artificial
  Synthetic oligonucleotide
gcaaactgctaatataaaggaacctggcacttttaagctgaatttatcatcaatggatcc

SEQ ID NO: 33371 - DNA, 60 bp, Artificial
  Synthetic oligonucleotide
tcctagtgggcagattctgagatcattttttaagatgacaccagataactacaagattac

SEQ ID NO: 33372 - DNA, 60 bp, Artificial
  Synthetic oligonucleotide
tgtgtaacccaaacatagataatctcttgaactactgtaaaaattggttgacacgagagc

SEQ ID NO: 33373 - DNA, 60 bp, Artificial
  Synthetic oligonucleotide
ccgaatgaagtcatacaaggtatggaaaagaagatcatacctggaagtcctagtgggcag

SEQ ID NO: 33374 - DNA, 60 bp, Artificial
  Synthetic oligonucleotide
taagcataaagaaagatacaatccatcacgtaaaccaaggaattttttattgatacaagg

SEQ ID NO: 33375 - DNA, 60 bp, Artificial
  Synthetic oligonucleotide
gcttatggtgcatatattatggaggaaggttacacaataaaggatgtagtagatggcaat

SEQ ID NO: 33376 - DNA, 60 bp, Artificial
  Synthetic oligonucleotide
gtctactaaaaatggagaaatacacagagatccacaatagaatgagagaatgtgtgccag

SEQ ID NO: 33377 - DNA, 60 bp, Artificial
  Synthetic oligonucleotide
ggagaaatacacagagatccacaatagaatgagagaatgtgtgccaggggaggtatctgc

SEQ ID NO: 33378 - DNA, 60 bp, Artificial
  Synthetic oligonucleotide
tgtgtgccaggggaggtatctgcagtagagtgcctggatctattagatcggttttacgct

SEQ ID NO: 33379 - DNA, 60 bp, Artificial
  Synthetic oligonucleotide
aaaccgttgattgtaaagttttttgaaaggccatttaagagtgcacttgatgtatacctg

SEQ ID NO: 33380 - DNA, 52 bp, Artificial
  Synthetic oligonucleotide
ataaagcatgattggtctgacaacaaagacaaagaacagcctataggccatg

SEQ ID NO: 33381 - DNA, 50 bp, Artificial
  Synthetic oligonucleotide
gatgtggcaagaggaacacgtgagaaaatcttgaagtatcaagcaggtct

SEQ ID NO: 33382 - DNA, 59 bp, Artificial
  Synthetic oligonucleotide
tctcaaagaactcaaaaaaaggtgtgtttggtgaggtaattgatagtatagagataagt

SEQ ID NO: 33383 - DNA, 60 bp, Artificial
  Synthetic oligonucleotide
gtagtccctgaagagtatatatcatatggaggagagcggaagatattaaatattcaacag

SEQ ID NO: 33384 - DNA, 60 bp, Artificial
  Synthetic oligonucleotide
ccctgaagagtatatatcatatggaggagagcggaagatattaaatattcaacaggcact

SEQ ID NO: 33385 - DNA, 60 bp, Artificial
  Synthetic oligonucleotide
catttagagacagtcgaatgggctaggaaatttagtgacaaagagaaggcttatggtgca

SEQ ID NO: 33386 - DNA, 60 bp, Artificial
  Synthetic oligonucleotide
tgatacaaggaaccgttcaaggtccatacttgccctcaactatagcatccgaccagtacg

SEQ ID NO: 33387 - DNA, 60 bp, Artificial
  Synthetic oligonucleotide
ggacctaaagccaggacctttgacattcctgattatcggccccaacaactgtgtaaccca

SEQ ID NO: 33388 - DNA, 60 bp, Artificial
  Synthetic oligonucleotide
gcttaaaaggtatgtcaggcgcattacaagaagatggtcatttatcagctagtgttacat

SEQ ID NO: 33389 - DNA, 60 bp, Artificial
  Synthetic oligonucleotide
tattcaaaagttcggctattggggcttacagtagaccaatcaaccattggtgcaagtgga

SEQ ID NO: 33390 - DNA, 60 bp, Artificial
  Synthetic oligonucleotide
cggctattggggcttacagtagaccaatcaaccattggtgcaagtggagtttacccttct

SEQ ID NO: 33391 - DNA, 60 bp, Artificial
  Synthetic oligonucleotide
tgcaagtggagtttacccttctttaatgtcaagagtggtttataaacattataaaagttt

SEQ ID NO: 33392 - DNA, 60 bp, Artificial
  Synthetic oligonucleotide
agagcatatttcaagcaaactgctaatataaaggaacctggcacttttaagctgaattta

SEQ ID NO: 33393 - DNA, 60 bp, Artificial
  Synthetic oligonucleotide
caaggaaccgttcaaggtccatacttgccctcaactatagcatccgaccagtacgataca

SEQ ID NO: 33394 - DNA, 60 bp, Artificial
  Synthetic oligonucleotide
aagattttttatcattctttccaaataaagtatctgctgctatcaaaggaaattggctgc

SEQ ID NO: 33395 - DNA, 60 bp, Artificial
  Synthetic oligonucleotide
gtgtagtggatgccttacggaatatatatgaaactgattttttcatgtctaggaagttac

SEQ ID NO: 33396 - DNA, 60 bp, Artificial
  Synthetic oligonucleotide
gctgaatttatcatcaatggatcctaaggccaaggcactgttagatgttatctcaaagaa

SEQ ID NO: 33397 - DNA, 60 bp, Artificial
  Synthetic oligonucleotide
tctttccaaataaagtatctgctgctatcaaaggaaattggctgcaaggaaatctaaaca

SEQ ID NO: 33398 - DNA, 60 bp, Artificial
  Synthetic oligonucleotide
ggtcattaaactaaaacggaagttaatgtatgttagtgcagatgcaacaaaatggtcccc

SEQ ID NO: 33399 - DNA, 60 bp, Artificial
  Synthetic oligonucleotide
aattagtatgggacaggtcattaaactaaaacggaagttaatgtatgttagtgcagatgc

SEQ ID NO: 33400 - DNA, 60 bp, Artificial
  Synthetic oligonucleotide
aatggtccccaggagataactctgcgaaattccgaagattcacccaggcattacacgatg

SEQ ID NO: 33401 - DNA, 60 bp, Artificial
  Synthetic oligonucleotide
gtgcagatgcaacaaaatggtccccaggagataactctgcgaaattccgaagattcaccc

SEQ ID NO: 33402 - DNA, 60 bp, Artificial
  Synthetic oligonucleotide
gccaggggaggtatctgcagtagagtgcctggatctattagatcggttttacgctgtgag

SEQ ID NO: 33403 - DNA, 60 bp, Artificial
  Synthetic oligonucleotide
ttgctattatcaagtctaagattgcctctcatcctcttgttcaagcttatggtctgcctt

SEQ ID NO: 33404 - DNA, 60 bp, Artificial
  Synthetic oligonucleotide
gctattatcaagtctaagattgcctctcatcctcttgttcaagcttatggtctgcctctg

SEQ ID NO: 33405 - DNA, 60 bp, Artificial
  Synthetic oligonucleotide
cgccagagcatcatgaaagttgtgaaccaaagtgattttacctttgggaaaatcacaatc

SEQ ID NO: 33406 - DNA, 60 bp, Artificial
  Synthetic oligonucleotide
aatcacaatcaaaaagaattctggaagggttggagctaatgatatgactttcagaaggct

SEQ ID NO: 33407 - DNA, 60 bp, Artificial
  Synthetic oligonucleotide
gaattctggaagggttggagctaatgatatgactttcagaaggcttgatagtatgataag

SEQ ID NO: 33408 - DNA, 60 bp, Artificial
  Synthetic oligonucleotide
gaattctggaagggttggagctaatgatatgactttcagaaggcttgatagcatgataag

SEQ ID NO: 33409 - DNA, 60 bp, Artificial
  Synthetic oligonucleotide
aaggtcaagctcaccagagagaacattatctctcttctaactcaggctggagaaatcgag

SEQ ID NO: 33410 - DNA, 52 bp, Artificial
  Synthetic oligonucleotide
gctcaccagagagaacattatctctcttctaactcaggctggagaaatcgag

SEQ ID NO: 33411 - DNA, 50 bp, Artificial
  Synthetic oligonucleotide
ttgcggagaaaatcttgattcaatcaagaaaatgagcattacctcatgtt

SEQ ID NO: 33412 - DNA, 60 bp, Artificial
  Synthetic oligonucleotide
cgccagagcatcatgaaagttgtgaacctttgtgattttacctttgggaaaatcacaatc

SEQ ID NO: 33413 - DNA, 60 bp, Artificial
  Synthetic oligonucleotide
gacaaattctatgcaatgttcggagtaaggaaagaagccaaaatttcaggtgttgcatga

SEQ ID NO: 33414 - DNA, 60 bp, Artificial
  Synthetic oligonucleotide
gctaaaggaagcattgctatggaacattacagtgagcatcttgacaaattctatgcaatg

SEQ ID NO: 33415 - DNA, 60 bp, Artificial
  Synthetic oligonucleotide
gagcaagtgcagaaagggaaagaatatgctacaatactcagctcttgcaatcctaatgct

SEQ ID NO: 33416 - DNA, 60 bp, Artificial
  Synthetic oligonucleotide
gcacaagtgcagaaagggaaagaatatgctacaatactcagctcttgcaatcctaatgct

SEQ ID NO: 33417 - DNA, 60 bp, Artificial
  Synthetic oligonucleotide
atcctaatgctaaaggaagcattgctatggaacattacagtgagcatcttgacaaattct

SEQ ID NO: 33418 - DNA, 60 bp, Artificial
  Synthetic oligonucleotide
agagcaagtgcagaaagggaaagaatatgctacaatactcagctcttgcaatcctaatgc

SEQ ID NO: 33419 - DNA, 60 bp, Artificial
  Synthetic oligonucleotide
agcacaagtgcagaaagggaaagaatatgctacaatactcagctcttgcaatcctaatgc

SEQ ID NO: 33420 - DNA, 56 bp, Artificial
  Synthetic oligonucleotide
tcatccttgccatataccaagatgctaaatataaagatcttggaattgaaccttcg

SEQ ID NO: 33421 - DNA, 60 bp, Artificial
  Synthetic oligonucleotide
gaaatgatcagcatcatccttgccatataccaagatgctaaatataaagatcttggaatt

SEQ ID NO: 33422 - DNA, 60 bp, Artificial
  Synthetic oligonucleotide
ggtagtatccctctgattgcttctgtggacagctttgaaatgatcagcatcatccttgcc

SEQ ID NO: 33423 - DNA, 60 bp, Artificial
  Synthetic oligonucleotide
ggtagtatccctctgattgcttctgtggacagctttgaaatgattagcatcatccttgcc

SEQ ID NO: 33424 - DNA, 60 bp, Artificial
  Synthetic oligonucleotide
aggtagtatccctctgattgcttctgtggacagctttgaaatgattagcatcatccttgc

SEQ ID NO: 33425 - DNA, 60 bp, Artificial
  Synthetic oligonucleotide
ccataatgctaggaggtagtatccctctgattgcttctgtggacagctttgaaatgatca

SEQ ID NO: 33426 - DNA, 60 bp, Artificial
  Synthetic oligonucleotide
tctgcctctgacagatgcaaagtctgtaaggcttgccataatgctaggaggtagtatccc

SEQ ID NO: 33427 - DNA, 60 bp, Artificial
  Synthetic oligonucleotide
ggtctgcctttgacagatgcaaagtctgtgaggcttgccataatgctaggaggtagtatc

SEQ ID NO: 33428 - DNA, 60 bp, Artificial
  Synthetic oligonucleotide
caagtctaagattgcctctcatcctcttgttcaagcttatggtctgcctttgacagatgc

SEQ ID NO: 33429 - DNA, 60 bp, Artificial
  Synthetic oligonucleotide
gagactacatttgaaagcaagtccacggaagtgcacttaaaaggagtatgtacaattccc

SEQ ID NO: 33430 - DNA, 60 bp, Artificial
  Synthetic oligonucleotide
ttacaggattcaatcagatagattctgacaaggtttatgatgatggagctccaccgtgtt

SEQ ID NO: 33431 - DNA, 60 bp, Artificial
  Synthetic oligonucleotide
agctcaaatgggcaaaaacagcaagcacaactgacaccacaaatgcagccgagactacat

SEQ ID NO: 33432 - DNA, 60 bp, Artificial
  Synthetic oligonucleotide
ccaccgtgttctataaaatgctggtttgcaaagtcaggtgagtggcttttggggatatta

SEQ ID NO: 33433 - DNA, 60 bp, Artificial
  Synthetic oligonucleotide
ccataagatctcacaaaaagcaactttaaatagcctctaaccacccttaataacaatgac

SEQ ID NO: 33434 - DNA, 60 bp, Artificial
  Synthetic oligonucleotide
cttgatcaagtaacagatttaaagattgagagctcctgtagctttgatcatcatgcagca

SEQ ID NO: 33435 - DNA, 60 bp, Artificial
  Synthetic oligonucleotide
gcccgcatactgtcgtattagggcaaggatatgtcacaggttctgttgagcttggcttta

SEQ ID NO: 33436 - DNA, 60 bp, Artificial
  Synthetic oligonucleotide
ccttgttatcatattactaatctctatctttctattcagcttcttctgccccataagatc

SEQ ID NO: 33437 - DNA, 60 bp, Artificial
  Synthetic oligonucleotide
tacaattcccagcaatgtgctcgacggaccatctcgccctgtaacagggagaaaaacagt

SEQ ID NO: 33438 - DNA, 60 bp, Artificial
  Synthetic oligonucleotide
catttcaagacttaagtgacaatccgtgcaaagtggacctttcaacacaggcaattgatg

SEQ ID NO: 33439 - DNA, 60 bp, Artificial
  Synthetic oligonucleotide
gctttgatcatcatgcagcacctacaacaacacagaacttcacacagctcaaatgggcaa

SEQ ID NO: 33440 - DNA, 60 bp, Artificial
  Synthetic oligonucleotide
cacttcaggcttactatatatgctttataggacagcactctgagccattaactgtcccga

SEQ ID NO: 33441 - DNA, 60 bp, Artificial
  Synthetic oligonucleotide
ggtgaagatcatgatatggaacagtcttcccaaggtgctttgcgaattgttgggcctata

SEQ ID NO: 33442 - DNA, 60 bp, Artificial
  Synthetic oligonucleotide
taacatcactaaaaaaaactaagaatttaataacatataatagatttgcctcaaaccagg

SEQ ID NO: 33443 - DNA, 60 bp, Artificial
  Synthetic oligonucleotide
aattgttgggcctataaaaggtaaagtgccacccactgagacatcagacactgtgcaggg

SEQ ID NO: 33444 - DNA, 60 bp, Artificial
  Synthetic oligonucleotide
gtgaaattgaaagaattactggctgtaatgtcttttgtacacttgctggcccaggtgcaa

SEQ ID NO: 33445 - DNA, 60 bp, Artificial
  Synthetic oligonucleotide
ctgtgcaggggattgcttttgcaggtttgcctatgtatagttctttttcgagccttgtaa

SEQ ID NO: 33446 - DNA, 60 bp, Artificial
  Synthetic oligonucleotide
gacctttcaacacaggcaattgatggtgcatggggctctggtgtaggttttacattgaca

SEQ ID NO: 33447 - DNA, 60 bp, Artificial
  Synthetic oligonucleotide
gctctagtttcatgacctctattaaggtatgtgacatggctatgtgttatggagcctcag

SEQ ID NO: 33448 - DNA, 60 bp, Artificial
  Synthetic oligonucleotide
cctcagtagtaaacctagttagaggctccaatacagttaaaattgttggaaaaggtggtc

SEQ ID NO: 33449 - DNA, 60 bp, Artificial
  Synthetic oligonucleotide
gttggaaaaggtggtcattctggttcgacatttagatgctgtcatgataaggactgtaca

SEQ ID NO: 33450 - DNA, 65 bp, Artificial
  Synthetic oligonucleotide
gcaagaaaagtttgcattcaattaggtacggaacaaacatgtaagaatatcgatgttaatgactg

SEQ ID NO: 33451 - DNA, 60 bp, Artificial
  Synthetic oligonucleotide
ggactgtacaagtaatggtctgcttgcatctgcaccacatcttgaacgggttacaggatt

SEQ ID NO: 33452 - DNA, 60 bp, Artificial
  Synthetic oligonucleotide
gtaatccgccagactgtccaggggtaggtactggttgtactgcatgtggcatatatctgg

SEQ ID NO: 33453 - DNA, 60 bp, Artificial
  Synthetic oligonucleotide
gcatttcactgctatggtgagtgcaagaaatactcttacccttggcaaacagcaaaatgt

SEQ ID NO: 33454 - DNA, 60 bp, Artificial
  Synthetic oligonucleotide
cctggctggtcagatacagctcatggggtaggtgatattccgatgaagacagacctagag

SEQ ID NO: 33455 - DNA, 60 bp, Artificial
  Synthetic oligonucleotide
gtcgttgctatgtgggcttagtatggatgtgtttgttgactcttgagttgatcgtttggg

SEQ ID NO: 33456 - DNA, 60 bp, Artificial
  Synthetic oligonucleotide
ggcaggttatacctgattgtgcttggggtcctgattactgctacagctggtttcccgcgg

SEQ ID NO: 33457 - DNA, 60 bp, Artificial
  Synthetic oligonucleotide
tactgctacagctggtttcccgcggagtgtgcatgaattaaaaattgaatgcccgcatac

SEQ ID NO: 33458 - DNA, 60 bp, Artificial
  Synthetic oligonucleotide
aaacagcaagcacaactgacaccacaaatgcagccgagactacatttgaaagcaagtcca

SEQ ID NO: 33459 - DNA, 60 bp, Artificial
  Synthetic oligonucleotide
cacaacctgggcacacatatgacacatttacattgccaattacatgctttctggtggcca

SEQ ID NO: 33460 - DNA, 60 bp, Artificial
  Synthetic oligonucleotide
tgctttctggtggccaaaaagggtgcaaacctgaaaattgctgttgagctagagaaactg

SEQ ID NO: 33461 - DNA, 60 bp, Artificial
  Synthetic oligonucleotide
ctgttatgatttagcatgcaatcaaactcattgtcagccaactgttcatttgctagcacc

SEQ ID NO: 33462 - DNA, 60 bp, Artificial
  Synthetic oligonucleotide
agcttattggcaagtaggattcaggtggtctatgagaagacatactgtgttacaggacaa

SEQ ID NO: 33463 - DNA, 60 bp, Artificial
  Synthetic oligonucleotide
agaaggcttgtgttttaaccctgtccctaaccttgcactgacacaacctgggcacacata

SEQ ID NO: 33464 - DNA, 60 bp, Artificial
  Synthetic oligonucleotide
tacaggacaacttatagaaggcttgtgttttaaccctgtccctaaccttgcactgacaca

SEQ ID NO: 33465 - DNA, 60 bp, Artificial
  Synthetic oligonucleotide
acaaaggactcgtttcagtcatttaatgtatctgaagtacacattacaacaaccaagcta

SEQ ID NO: 33466 - DNA, 60 bp, Artificial
  Synthetic oligonucleotide
caagggaatacagtctctggttttaaaagattgatggctacaaaggactcgtttcagtca

SEQ ID NO: 33467 - DNA, 60 bp, Artificial
  Synthetic oligonucleotide
caggctcctttaggaagatctgtgggtttgcaacaacacctgtttgtgagtatcaaggga

SEQ ID NO: 33468 - DNA, 60 bp, Artificial
  Synthetic oligonucleotide
ccagaggttcagaggggttgttatagaacacttggtgttttccgttataagagtcgttgc

SEQ ID NO: 33469 - DNA, 60 bp, Artificial
  Synthetic oligonucleotide
gatccaggtgatattatgtctacaacttcaggaatgcgttgccctgaacatacaggctcc

SEQ ID NO: 33470 - DNA, 56 bp, Artificial
  Synthetic oligonucleotide
tgggctacaattgcattagtaatcacattttgctttggctggttacttattcctac

SEQ ID NO: 33471 - DNA, 60 bp, Artificial
  Synthetic oligonucleotide
cttgaaagccataaaaaaagttgtgctgatgggcagtgcccatactgtatgactattacc

SEQ ID NO: 33472 - DNA, 60 bp, Artificial
  Synthetic oligonucleotide
gcctgaggctgctaacttactcgtgctctcactattctactgaatcaaagttcaaagtca

SEQ ID NO: 33473 - DNA, 60 bp, Artificial
  Synthetic oligonucleotide
gatcaagatgtgattgtctattgtaatggacaaaagaaggtcattctgacaaaaacacta

SEQ ID NO: 33474 - DNA, 60 bp, Artificial
  Synthetic oligonucleotide
ctcccacatgcttagtcaataaagtccaaaagtttaggggctcagaacagagaatcaact

SEQ ID NO: 33475 - DNA, 60 bp, Artificial
  Synthetic oligonucleotide
gcacattccttggctgtcgagctctgtgtaccagggatccatggatgggctacaattgca

SEQ ID NO: 33476 - DNA, 60 bp, Artificial
  Synthetic oligonucleotide
taaaccgagatgtatcatttcaagacttaagtgacaatccgtgcaaagtggacctttcaa

SEQ ID NO: 33477 - DNA, 60 bp, Artificial
  Synthetic oligonucleotide
tatagactcaccatcatcaatctgggtctttgcaggagcacccgacagatgccctcctac

SEQ ID NO: 33478 - DNA, 60 bp, Artificial
  Synthetic oligonucleotide
ggacatggacattgtggcctctgaacatctgctgcatcagtctcttgttggaaagcagtc

SEQ ID NO: 33479 - DNA, 60 bp, Artificial
  Synthetic oligonucleotide
atgatcagaagaaggaacttgattcttaacagaggtggtgatgagaacccacgcggcccg

SEQ ID NO: 33480 - DNA, 60 bp, Artificial
  Synthetic oligonucleotide
ccctggggagacattaacaagtcaggccgctcagggatagcgcttgtcgcaacgggtctt

SEQ ID NO: 33481 - DNA, 60 bp, Artificial
  Synthetic oligonucleotide
atggctatttggataagcataaggatgaggtagacaaggctagtgctgacggcatggtga

SEQ ID NO: 33482 - DNA, 60 bp, Artificial
  Synthetic oligonucleotide
gagttttggcaaaatggagaataaaatcgaagtgactagcaaggatgaaatgaacaggtg

SEQ ID NO: 33483 - DNA, 60 bp, Artificial
  Synthetic oligonucleotide
agatgggtgtctgcttcggaaccatccctgtagctaaccctgatgacgctgcccaaggat

SEQ ID NO: 33484 - DNA, 60 bp, Artificial
  Synthetic oligonucleotide
caatcttgacaggtttgtattccagatggccagtgctacagacgatgcacaaaaggactc

SEQ ID NO: 33485 - DNA, 60 bp, Artificial
  Synthetic oligonucleotide
acctcaaagagagatcagcactaagctatgggaatacactggatctgaacagccttgaca

SEQ ID NO: 33486 - DNA, 60 bp, Artificial
  Synthetic oligonucleotide
cactgaaggaacttcctctctaggaacctatgattcagactctatcacagaatcagaggg

SEQ ID NO: 33487 - DNA, 60 bp, Artificial
  Synthetic oligonucleotide
cactgaaggaacttcctctctaggaacctatgagtcagactttatcacagaatcggaggg

SEQ ID NO: 33488 - DNA, 60 bp, Artificial
  Synthetic oligonucleotide
aagatattattaaacactgaaggaacttcctctctaggaacctatgattcagactctatc

SEQ ID NO: 33489 - DNA, 60 bp, Artificial
  Synthetic oligonucleotide
acactgaaggaacttcctctctaggaacctatgagtcagactttatcacagaatcggagg

SEQ ID NO: 33490 - DNA, 60 bp, Artificial
  Synthetic oligonucleotide
gatgtgtctaaaggtaagatattattaaacactgaaggaacttcctctctaggaacctat

SEQ ID NO: 33491 - DNA, 60 bp, Artificial
  Synthetic oligonucleotide
ggtaagatattattaaacactgaaggaacttcctctctaggaacctatgagtcagactcc

SEQ ID NO: 33492 - DNA, 60 bp, Artificial
  Synthetic oligonucleotide
agaagctctagcaaaaaatatggacatatctaaaggtaagatattattaaacactgaagg

SEQ ID NO: 33493 - DNA, 60 bp, Artificial
  Synthetic oligonucleotide
caatcccaatgttgaagtctctagatcatggtctcaatctaatgagaaagaagctctggc

SEQ ID NO: 33494 - DNA, 60 bp, Artificial
  Synthetic oligonucleotide
cccaattggtaacaacgatcttaccatccataggctttcaggatatctagccagatgggt

SEQ ID NO: 33495 - DNA, 60 bp, Artificial
  Synthetic oligonucleotide
atttagagggtgggtcagttaatccgttgtgggtgggtttagttttgtgctaccttaagt

SEQ ID NO: 33496 - DNA, 60 bp, Artificial
  Synthetic oligonucleotide
tatttgacttgttcatcatatttcttgagtgagatagagctggctgttccagggttgctc

SEQ ID NO: 33497 - DNA, 59 bp, Artificial
  Synthetic oligonucleotide
tggctcacaggaaaacctataactgcttagtgcagtacaaagcaaagtggatgatgaac

SEQ ID NO: 33498 - DNA, 60 bp, Artificial
  Synthetic oligonucleotide
ggctgaagtgaagggctgcacctggagtgatgggtatgcaatgtacctaggctttgcccc

SEQ ID NO: 33499 - DNA, 60 bp, Artificial
  Synthetic oligonucleotide
ttaaatcagctgtaaagctattgagtgagagcaaccctggaacagccagctctatctcac

SEQ ID NO: 33500 - DNA, 60 bp, Artificial
  Synthetic oligonucleotide
tcacatatacactgattgggttgggtgggtcaaatcaaacacatataagctggggtaggt

SEQ ID NO: 33501 - DNA, 54 bp, Artificial
  Synthetic oligonucleotide
cacttatatatatgcacgtagcatatatataagtgtatacatactacctcaaca

SEQ ID NO: 33502 - DNA, 60 bp, Artificial
  Synthetic oligonucleotide
tgtcgcaacaggccttgccaagcttgcagagactgagggaaagggagtatttgacgaagc

SEQ ID NO: 33503 - DNA, 60 bp, Artificial
  Synthetic oligonucleotide
gtcgcaacaggccttgccaagcttgcagagactgagggaaagggagtatttgacgaagcc

SEQ ID NO: 33504 - DNA, 60 bp, Artificial
  Synthetic oligonucleotide
cagtgatcctggaaagagtcaagtcatctcgagaagggtttcctgatttgagcttgtatt

SEQ ID NO: 33505 - DNA, 55 bp, Artificial
  Synthetic oligonucleotide
gccaatagaagagcaatgttgaagactcttgggatcataaatgataacctaaagc

SEQ ID NO: 33506 - DNA, 60 bp, Artificial
  Synthetic oligonucleotide
tgctgattgcagcttgcattggtcgctcaaagctggagacaatttcatccttactcaaac

SEQ ID NO: 33507 - DNA, 60 bp, Artificial
  Synthetic oligonucleotide
gcgggcaccattaagtcttgggatgaaagttatactgagctaaaagttgacgtcccgaaa

SEQ ID NO: 33508 - DNA, 60 bp, Artificial
  Synthetic oligonucleotide
acttgaatggttcgaaaaaaatgcgggcaccattaagtcttgggatgaaagttatactga

SEQ ID NO: 33509 - DNA, 60 bp, Artificial
  Synthetic oligonucleotide
tggttcgaaaaaaatgcgggcaccattaagtcttgggatgaaagttatactgagctaaaa

SEQ ID NO: 33510 - DNA, 60 bp, Artificial
  Synthetic oligonucleotide
cctgtatatgagtgtgcatgggttagctccactggcattgtgaaaaggggacttgaatgg

SEQ ID NO: 33511 - DNA, 60 bp, Artificial
  Synthetic oligonucleotide
atgctggttgcaacctcattgaccatatagactcaccatcatcaatctgggtctttgcag

SEQ ID NO: 33512 - DNA, 60 bp, Artificial
  Synthetic oligonucleotide
ttatgactttgaagataacttcatcctttggtgacatctgtttcaagttaaagatctcca

SEQ ID NO: 33513 - DNA, 60 bp, Artificial
  Synthetic oligonucleotide
gaagataacttcatcctttggtgacatctgtttcaagttaaagatctccaacagccagtt

SEQ ID NO: 33514 - DNA, 58 bp, Artificial
  Synthetic oligonucleotide
gtttcggtaaaacccttctaatattcaagtttgaatcagaagctctccaaacctccaa

SEQ ID NO: 33515 - DNA, 60 bp, Artificial
  Synthetic oligonucleotide
gctgaggtagcttacaggtaacatagtctgacatcaggtaacatagcttataaatgcaca

SEQ ID NO: 33516 - DNA, 60 bp, Artificial
  Synthetic oligonucleotide
taaatgcacaaacagaaacacttctctatcaaaagggaagagaaaggaagctggattata

SEQ ID NO: 33517 - DNA, 60 bp, Artificial
  Synthetic oligonucleotide
gcacaaacagaaacacttctctatcaaaagggaagagaaaggaagctggattataacaga

SEQ ID NO: 33518 - DNA, 60 bp, Artificial
  Synthetic oligonucleotide
cctctgacatcaacagatgccttataagttcacagctctccgctgcctatagctgcctga

SEQ ID NO: 33519 - DNA, 60 bp, Artificial
  Synthetic oligonucleotide
gcgcaaaagttgttttaaaacacatcagatggttcagattaccaccggttatgactttga

SEQ ID NO: 33520 - DNA, 60 bp, Artificial
  Synthetic oligonucleotide
ctttgctttggtctctgattgattagacttggtctctgattgattagactatgctgtaga

SEQ ID NO: 33521 - DNA, 60 bp, Artificial
  Synthetic oligonucleotide
gacatcaacagatgccttataagttcacagctctccgctgcctatagctgcctgaagctc

SEQ ID NO: 33522 - DNA, 60 bp, Artificial
  Synthetic oligonucleotide
agctgcctgaagctcttcatatttcgaagactggtccctttcagcagtcttgactctcgg

SEQ ID NO: 33523 - DNA, 60 bp, Artificial
  Synthetic oligonucleotide
gctgcctgaagctcttcatatttcgaagactggtccctttcagcagtcttgactctcggt

SEQ ID NO: 33524 - DNA, 60 bp, Artificial
  Synthetic oligonucleotide
tatcactatcatcctgtcaagctgagcctttgtatcaaagtttgtgattccaagctgctc

SEQ ID NO: 33525 - DNA, 60 bp, Artificial
  Synthetic oligonucleotide
gtcaagctgagcctttgtatcaaagtttgtgattccaagctgctcagcccttttgtgctg

SEQ ID NO: 33526 - DNA, 52 bp, Artificial
  Synthetic oligonucleotide
cttatcacggaatccaatctactccaagtgaactcatccacgcctggtgaac

SEQ ID NO: 33527 - DNA, 60 bp, Artificial
  Synthetic oligonucleotide
ctcaaagagttctctgtcattcttcactttaataacgcctttgtggacatctttgctttg

SEQ ID NO: 33528 - DNA, 60 bp, Artificial
  Synthetic oligonucleotide
atgcgcaaaagttgttttaaaacacatcagatggttcagattaccaccggttatgacttt

SEQ ID NO: 33529 - DNA, 60 bp, Artificial
  Synthetic oligonucleotide
ctctgtcattcttcactttaataacgcctttgtggacatctttgctttggtctctgattg

SEQ ID NO: 33530 - DNA, 60 bp, Artificial
  Synthetic oligonucleotide
ccaacagccagttattcaactttgcactttcagctttcagcttttcttcgttgtaatcct

SEQ ID NO: 33531 - DNA, 60 bp, Artificial
  Synthetic oligonucleotide
ggtctctgattgattagacttggtctctgattgattagactatgctgtagattttggttg

SEQ ID NO: 33532 - DNA, 60 bp, Artificial
  Synthetic oligonucleotide
aagatctccaacagccagttattcaactttgcactttcagctttcagcttttcttcgttg

SEQ ID NO: 33533 - DNA, 60 bp, Artificial
  Synthetic oligonucleotide
agtcgacgggcagctgtgtctacattggagaccaaactcggagaactcaagaggcagctt

SEQ ID NO: 33534 - DNA, 60 bp, Artificial
  Synthetic oligonucleotide
gacgggcagctgtgtctacattggagaccaaactcggagaacttaagaggcagcttgcgg

SEQ ID NO: 33535 - DNA, 60 bp, Artificial
  Synthetic oligonucleotide
gacgggcagctgtgtctacattggagaccaaactcggagaactcaagaggcagcttgccg

SEQ ID NO: 33536 - DNA, 60 bp, Artificial
  Synthetic oligonucleotide
acgggcagctgtgtctacattggagaccaaactcggggaactcaagaggcaacttgcaga

SEQ ID NO: 33537 - DNA, 60 bp, Artificial
  Synthetic oligonucleotide
cattaaaggacgcgagattaaaactagtctcgcaaagagaagtgaatgggaggttacact

SEQ ID NO: 33538 - DNA, 60 bp, Artificial
  Synthetic oligonucleotide
cattaaaggacgcgagattaaaactagtctcacaaaaagaagtgagtgggaggttacgct

SEQ ID NO: 33539 - DNA, 60 bp, Artificial
  Synthetic oligonucleotide
cttctacattaaaggacgcgagattaaaactagtctcgcaaagagaagtgaatgggaggt

SEQ ID NO: 33540 - DNA, 50 bp, Artificial
  Synthetic oligonucleotide
agccatcggaatctacaaagtgcagaagggaatgatggatgttaagttcc

SEQ ID NO: 33541 - DNA, 60 bp, Artificial
  Synthetic oligonucleotide
caaaaatatgctggacttgatgcaactgtttggactcagcagaagtacacagacgtcatc

SEQ ID NO: 33542 - DNA, 60 bp, Artificial
  Synthetic oligonucleotide
ttctttcctggctctgaatgttttctggaagcttttaaattctaccctctagccatcgga

SEQ ID NO: 33543 - DNA, 60 bp, Artificial
  Synthetic oligonucleotide
cctggctctgaatgttttctggaagcttttaaattctaccctctagccatcggaatctac

SEQ ID NO: 33544 - DNA, 60 bp, Artificial
  Synthetic oligonucleotide
ctgcttctaatgggatcacatgggatgatgggtatgaagtctatctctctttctttcctg

SEQ ID NO: 33545 - DNA, 60 bp, Artificial
  Synthetic oligonucleotide
gggatcacatgggatgatgggtatgaagtctatctctctttctttcctggctctgaatgt

SEQ ID NO: 33546 - DNA, 56 bp, Artificial
  Synthetic oligonucleotide
gcagatgatgcactcactctgcacagagtaagcggctacttggccagatacttact

SEQ ID NO: 33547 - DNA, 60 bp, Artificial
  Synthetic oligonucleotide
gcggctacttggccagatacttacttgaaaaggtcttgagcgcccaggaacctgagaaag

SEQ ID NO: 33548 - DNA, 60 bp, Artificial
  Synthetic oligonucleotide
cggtggctggaggattcctatcgttaatactcattttccggggaatcgaaatattgacct

SEQ ID NO: 33549 - DNA, 60 bp, Artificial
  Synthetic oligonucleotide
gaatcgaaatattgaccttgcagatgatgcactcactctgcacagagtaagcggctactt

SEQ ID NO: 33550 - DNA, 60 bp, Artificial
  Synthetic oligonucleotide
ctgaatttcggtggctggaggattcctatcgttaatactcattttccggggaatcgaaat

SEQ ID NO: 33551 - DNA, 60 bp, Artificial
  Synthetic oligonucleotide
gccaaggagacattatctaaaagaagtgaagaaactgtcactctgaatttcggtggctgg

SEQ ID NO: 33552 - DNA, 60 bp, Artificial
  Synthetic oligonucleotide
agtagtgtactccacactaatacaaaaccagaataatataaatagtacagattactaagt

SEQ ID NO: 33553 - DNA, 60 bp, Artificial
  Synthetic oligonucleotide
ctttactattgggcttacttatgatcaaatcagaattttcttcctgaatgggaagaaggc

SEQ ID NO: 33554 - DNA, 60 bp, Artificial
  Synthetic oligonucleotide
gcagcaagcactttcaatccggacaatcagtacataggctttaaaaaggtctttactatt

SEQ ID NO: 33555 - DNA, 60 bp, Artificial
  Synthetic oligonucleotide
ggaagaaggccaaggagacattatctaaaagaagtgaagaaactgtcactctgaatttcg

SEQ ID NO: 33556 - DNA, 60 bp, Artificial
  Synthetic oligonucleotide
gggcttacttatgatcaaatcagaattttcttcctgaatgggaagaaggccaaggagaca

SEQ ID NO: 33557 - DNA, 60 bp, Artificial
  Synthetic oligonucleotide
caaacgtgagtgctgctgctaaagacttcctgtccaaattcggaattcagatttaagaat

SEQ ID NO: 33558 - DNA, 60 bp, Artificial
  Synthetic oligonucleotide
caatgccctccttgttgtaaatggccttggctggaagaagtcaaacgtgagtgctgctgc

SEQ ID NO: 33559 - DNA, 60 bp, Artificial
  Synthetic oligonucleotide
agacgtcatcaatgccctccttgttgtaaatggccttggctggaagaagtcaaacgtgag

SEQ ID NO: 33560 - DNA, 60 bp, Artificial
  Synthetic oligonucleotide
ctggacttgatgcaactgtttggactcagcagaagtacacagacgtcatcaatgccctcc

SEQ ID NO: 33561 - DNA, 60 bp, Artificial
  Synthetic oligonucleotide
cccaaacacaaagacagcttaaattgggtgggtggtaggggaaaataggcagcagaggtc

SEQ ID NO: 33562 - DNA, 60 bp, Artificial
  Synthetic oligonucleotide
cccccaaacacaaagacagcttaaattgggtgggtggtaggggaaaataggcagcagagg

SEQ ID NO: 33563 - DNA, 52 bp, Artificial
  Synthetic oligonucleotide
atttaagaatgcatgctgatctctaaataatcacattataatctaatcaaac

SEQ ID NO: 33564 - DNA, 60 bp, Artificial
  Synthetic oligonucleotide
gctgctgctaaagacttcctgtccaaattcggaattcagatttaagaatgcatgctgatc

SEQ ID NO: 33565 - DNA, 57 bp, Artificial
  Synthetic oligonucleotide
ctcttatttatattgtacttgatttaactttgaaagtattaggtggagcacactact

SEQ ID NO: 33566 - DNA, 60 bp, Artificial
  Synthetic oligonucleotide
gcagcagaggtcatgatgcaataataaacttaattatctctttaacaactctcttattta

SEQ ID NO: 33567 - DNA, 60 bp, Artificial
  Synthetic oligonucleotide
gccagacactgccctcactctccaccgcctctcgggatatctagctaaatgggttgcaga

SEQ ID NO: 33568 - DNA, 60 bp, Artificial
  Synthetic oligonucleotide
gccagacactgccctcactctccaccgcctctcgggatatttagctaaatgggttgcaga

SEQ ID NO: 33569 - DNA, 60 bp, Artificial
  Synthetic oligonucleotide
cagacactgccctcactctccaccgcctctcaggctatctagctaaatgggttgcagacc

SEQ ID NO: 33570 - DNA, 60 bp, Artificial
  Synthetic oligonucleotide
tatgtgtaaatcaagaggtcctgcatcaatactttctatactaactgctgtactaatatt

SEQ ID NO: 33571 - DNA, 60 bp, Artificial
  Synthetic oligonucleotide
ggtccaaaatcaatacaattccatgcatgcttcaaccagcatatgtcctgtgtaagattc

SEQ ID NO: 33572 - DNA, 60 bp, Artificial
  Synthetic oligonucleotide
agatgaacgctgtaagacatggatgtgccgagttagagatgaaggcattcaagttcttct

SEQ ID NO: 33573 - DNA, 60 bp, Artificial
  Synthetic oligonucleotide
ttgttactcctatgagtgcactagttataggctcatcagaagaattgtacaaattagatg

SEQ ID NO: 33574 - DNA, 60 bp, Artificial
  Synthetic oligonucleotide
acctattatagaattagcacctgtggatcagacagcttatataagagaaaaagatgaacg

SEQ ID NO: 33575 - DNA, 60 bp, Artificial
  Synthetic oligonucleotide
ccctatcagtccgcgacatatcaactcatgtaaatggcaaatctcacattctacaattgg

SEQ ID NO: 33576 - DNA, 60 bp, Artificial
  Synthetic oligonucleotide
cttacaatggggattcaccaacaaatgcctggcaatgtacatgcggacagtatgaagatg

SEQ ID NO: 33577 - DNA, 54 bp, Artificial
  Synthetic oligonucleotide
agacactatagttttacacaagcaaagtgatgggctaaggagttgtcgcataaa

SEQ ID NO: 33578 - DNA, 60 bp, Artificial
  Synthetic oligonucleotide
ctaccagtcgaatacagaaagaagtcactattgtattgctgattcacattgtctagaaga

SEQ ID NO: 33579 - DNA, 60 bp, Artificial
  Synthetic oligonucleotide
gcggcgaacatgcaaacccatcagtgtacatgattccaaacacaacaatctaccagtcga

SEQ ID NO: 33580 - DNA, 50 bp, Artificial
  Synthetic oligonucleotide
ttgcaacttgtattgaagaaaaaactataacatggaattgcacagggccg

SEQ ID NO: 33581 - DNA, 60 bp, Artificial
  Synthetic oligonucleotide
ggtgctgtgcttatcacctagatctagagccacttttgatgatgtcatagcatgcggcga

SEQ ID NO: 33582 - DNA, 61 bp, Artificial
  Synthetic oligonucleotide
gaggtcctgcatcaatactttctatactaactgctgtactaatattaacttttgttactcc

SEQ ID NO: 33583 - DNA, 60 bp, Artificial
  Synthetic oligonucleotide
attgtgtttgtggtgcaaggtatgagacctcagacagaatgaaattacatagatcctctg

SEQ ID NO: 33584 - DNA, 60 bp, Artificial
  Synthetic oligonucleotide
gacgtcagtatgataaagacacaggctaattatatgaaaaataccacagggacattctcc

SEQ ID NO: 33585 - DNA, 60 bp, Artificial
  Synthetic oligonucleotide
gatgtatcttcagtcactaggggaaatttctggcttcaaactgacagatgaatgggagga

SEQ ID NO: 33586 - DNA, 60 bp, Artificial
  Synthetic oligonucleotide
caaacttcaagacacattaaaacagcatgaagatgcatataagagagagatgaagatcag

SEQ ID NO: 33587 - DNA, 60 bp, Artificial
  Synthetic oligonucleotide
acaattagataccctatcagtccgcgacatatcaactcatgtaaatggcaaatctcacat

SEQ ID NO: 33588 - DNA, 60 bp, Artificial
  Synthetic oligonucleotide
tattatttagtgattgtgttaaattacagtgctacatggggtttgttattacttatgggt

SEQ ID NO: 33589 - DNA, 60 bp, Artificial
  Synthetic oligonucleotide
ccacgataggatattagtaactccaaatgagcacaaatatgccctcaaggtgatctgtca

SEQ ID NO: 33590 - DNA, 60 bp, Artificial
  Synthetic oligonucleotide
ataaaaaagaattaacttacaatggggattcaccaacaaatgcctggcaatgtacatgcg

SEQ ID NO: 33591 - DNA, 60 bp, Artificial
  Synthetic oligonucleotide
gtcatagcatgcggcgaacatgcaaacccatcagtgtacatgattccaaacacaacaatc

SEQ ID NO: 33592 - DNA, 60 bp, Artificial
  Synthetic oligonucleotide
aggagttgaaaatgcatttatagaatctgaaattccagctctagctggtactgccattgg

SEQ ID NO: 33593 - DNA, 60 bp, Artificial
  Synthetic oligonucleotide
aattatggtaatggggtgcctaaatttgattatttatgccatttagctagtagaaaagaa

SEQ ID NO: 33594 - DNA, 60 bp, Artificial
  Synthetic oligonucleotide
ctaaaggttgtggcaatgtccagaaagtaaatggcactaattatggtaatggggtgccta

SEQ ID NO: 33595 - DNA, 60 bp, Artificial
  Synthetic oligonucleotide
tatagccaaactacatggaggacatatttgcgatctcatgattttgaggtatgtattgcc

SEQ ID NO: 33596 - DNA, 60 bp, Artificial
  Synthetic oligonucleotide
gtggtctcgtatatcacccttttactgaatgcggcacccattgtgtttgtggtgcaaggt

SEQ ID NO: 33597 - DNA, 60 bp, Artificial
  Synthetic oligonucleotide
ggaggattttaaatatgaagaggaacctacagaacagacactaatgcctagaggacatcg

SEQ ID NO: 33598 - DNA, 60 bp, Artificial
  Synthetic oligonucleotide
agcattaatgacattccacacagcatttcgaggtactgcaacatcatatgtaacagagct

SEQ ID NO: 33599 - DNA, 60 bp, Artificial
  Synthetic oligonucleotide
ctccaacaatgtagctatgaggaaatggcttgttgctgattggcatgattgtagaccaca

SEQ ID NO: 33600 - DNA, 60 bp, Artificial
  Synthetic oligonucleotide
gattgtagaccacaaaagtcatctggtggccacataaatgtaatagaagttggagatgat

SEQ ID NO: 33601 - DNA, 57 bp, Artificial
  Synthetic oligonucleotide
cgcagattgtgttataagcattgacaaagagacagcacagatcaggctgcaaactga

SEQ ID NO: 33602 - DNA, 60 bp, Artificial
  Synthetic oligonucleotide
ccagtctataaatacattgcaatagaaggtacagaaacagttgaaggagttgaaaatgca

SEQ ID NO: 33603 - DNA, 60 bp, Artificial
  Synthetic oligonucleotide
atgccctcaaggtgatctgtcatgacaaacccaaaacaatattcaacttcaaaatatgta

SEQ ID NO: 33604 - DNA, 60 bp, Artificial
  Synthetic oligonucleotide
actgacagatgaatgggaggattttaaatatgaagaggaacctacagaacagacactaat

SEQ ID NO: 33605 - DNA, 60 bp, Artificial
  Synthetic oligonucleotide
gtcaaaagcgcatcttactcttcaacatacacaaaactatacacaacaggaccaaccata

SEQ ID NO: 33606 - DNA, 58 bp, Artificial
  Synthetic oligonucleotide
cataaaactgggtggttaacattttctaaagaacgaacaagcacatggggttgcgaag

SEQ ID NO: 33607 - DNA, 57 bp, Artificial
  Synthetic oligonucleotide
atgcaaatagtctagatatcaatgcagagggaacatgttcagggtgtgtaggttgct

SEQ ID NO: 33608 - DNA, 60 bp, Artificial
  Synthetic oligonucleotide
caaaacatattgtactaatttaaatgcagtgactccaattattacagataaatttgaggt

SEQ ID NO: 33609 - DNA, 60 bp, Artificial
  Synthetic oligonucleotide
cacaccactatagaagctagttgtcagatagaaagtgactgtacaacattccacgatagg

SEQ ID NO: 33610 - DNA, 60 bp, Artificial
  Synthetic oligonucleotide
gcaaggtatgagacctcagacagaatgaaattacatagatcctctggcttatgtcctggt

SEQ ID NO: 33611 - DNA, 60 bp, Artificial
  Synthetic oligonucleotide
atcaaggaactgtgactatcataaattataaaaagattttgggttccataaaaatgaagc

SEQ ID NO: 33612 - DNA, 60 bp, Artificial
  Synthetic oligonucleotide
tcaagacagttgagtcatattcactgcctagaatagtgggagtgcgaaaccacaaaattc

SEQ ID NO: 33613 - DNA, 60 bp, Artificial
  Synthetic oligonucleotide
agatcctctggcttatgtcctggttataaaagtttacgagcagctagagttatgtgtaaa

SEQ ID NO: 33614 - DNA, 60 bp, Artificial
  Synthetic oligonucleotide
ccgaaattgaagcagccatagctattgtggatgcaaaacctattatagaattagcacctg

SEQ ID NO: 33615 - DNA, 60 bp, Artificial
  Synthetic oligonucleotide
agcaaaacttatatctgctacatcttaatgccaatatttatacctatagcttatatctat

SEQ ID NO: 33616 - DNA, 60 bp, Artificial
  Synthetic oligonucleotide
gatgatatgcatattactcttgatagcacttgcttcagcaagccctgtctatcaaaggtg

SEQ ID NO: 33617 - DNA, 60 bp, Artificial
  Synthetic oligonucleotide
agtagtgtactaccaagtataaataacgttcaaagtataaagtcaaaacaaatcattcga

SEQ ID NO: 33618 - DNA, 60 bp, Artificial
  Synthetic oligonucleotide
tgtcctggttataaaagtttacgagcagctagagttatgtgtaaatcaagaggtcctgca

SEQ ID NO: 33619 - DNA, 60 bp, Artificial
  Synthetic oligonucleotide
gcaacaatagctagtcaactcaaaggcattgatgcaatctctattttagatgtcccaatg

SEQ ID NO: 33620 - DNA, 60 bp, Artificial
  Synthetic oligonucleotide
aggttctaccttactgactaaagtggataaggagctgtacataggcaatccagcaaaggc

SEQ ID NO: 33621 - DNA, 60 bp, Artificial
  Synthetic oligonucleotide
ggcaacaccctgcattgtatcagaagcactagagctcgggactttagccttaacaggccc

SEQ ID NO: 33622 - DNA, 60 bp, Artificial
  Synthetic oligonucleotide
ttagccttaacaggccctactacacgtaatgagccttgtgcctcatttgggaagtcatga

SEQ ID NO: 33623 - DNA, 60 bp, Artificial
  Synthetic oligonucleotide
cacatgctttaattgaagtcataaaacttggacattctgtcagactaactgtgcatgtta

SEQ ID NO: 33624 - DNA, 60 bp, Artificial
  Synthetic oligonucleotide
gatctggtgataaaacacaagttcccctcagattcaccccttttgactgtgcctcaaatg

SEQ ID NO: 33625 - DNA, 60 bp, Artificial
  Synthetic oligonucleotide
ccttttgactgtgcctcaaatgtttctgcaccagcatttgttgtttctgtaacactagac

SEQ ID NO: 33626 - DNA, 60 bp, Artificial
  Synthetic oligonucleotide
caagttaggataggagcaatcagatgtagtgtaggacggcaatgagtctggttgcatgat

SEQ ID NO: 33627 - DNA, 60 bp, Artificial
  Synthetic oligonucleotide
gacgacttgaactcgactatccaatacactagccatacaactcctaatggacatacaagt

SEQ ID NO: 33628 - DNA, 60 bp, Artificial
  Synthetic oligonucleotide
gaatgtcctcctttaccaacaaccttgactgtatttgaacccctagctaagttggtaact

SEQ ID NO: 33629 - DNA, 60 bp, Artificial
  Synthetic oligonucleotide
ccaatttccattcaaaatcccccataaccactctccagactttgtgaaccagcactttaa

SEQ ID NO: 33630 - DNA, 61 bp, Artificial
  Synthetic oligonucleotide
gacataatatccttgaaatgcattactacagtctgtcttaccaacaataccttcaaaagtg

SEQ ID NO: 33631 - DNA, 60 bp, Artificial
  Synthetic oligonucleotide
gtggggttgaagcattgaccttctattagctgaccataaacacagtgagttttctcaaag

SEQ ID NO: 33632 - DNA, 60 bp, Artificial
  Synthetic oligonucleotide
catgcagcccagggacacataactccacagcaatagagtgtgcaacattaggcatcagtg

SEQ ID NO: 33633 - DNA, 60 bp, Artificial
  Synthetic oligonucleotide
acagacttcagcttatccagatagatcccacaagcagtacagccagttccaacaccaggg

SEQ ID NO: 33634 - DNA, 60 bp, Artificial
  Synthetic oligonucleotide
cattggcatcaatatgtttgcatgtctgctcagttcctagctgtatacaaactttccttg

SEQ ID NO: 33635 - DNA, 60 bp, Artificial
  Synthetic oligonucleotide
cagaataggcctcacagctggctccaggccccaccaatgtacaaaagactgtacaacctg

SEQ ID NO: 33636 - DNA, 60 bp, Artificial
  Synthetic oligonucleotide
gaacccttaagctcttcaatacaatcaaagtcacagtaggtatcaagagccatccaaagc

SEQ ID NO: 33637 - DNA, 60 bp, Artificial
  Synthetic oligonucleotide
tcaagagccatccaaagcaaaatgttgtgagtaaagacactgtagcccagccatgcagcc

SEQ ID NO: 33638 - DNA, 60 bp, Artificial
  Synthetic oligonucleotide
tccagatagatcccacaagcagtacagccagttccaacaccagggcaatcaccagggtta

SEQ ID NO: 33639 - DNA, 60 bp, Artificial
  Synthetic oligonucleotide
agtctgccatggataagaatacttctgacatgcaccataacagtggaatgcagttttgat

SEQ ID NO: 33640 - DNA, 61 bp, Artificial
  Synthetic oligonucleotide
ctgaaagtgaaaaggtatggattcttctttatttgcaggattggtcaactttcttctatag

SEQ ID NO: 33641 - DNA, 50 bp, Artificial
  Synthetic oligonucleotide
cggcagagaaaaatctagctccaaatcagtcttcagtggcacttcaccca

SEQ ID NO: 33642 - DNA, 60 bp, Artificial
  Synthetic oligonucleotide
catttactgtggtttgactctggtataatccctggcgaaaacacatactcaggttctacc

SEQ ID NO: 33643 - DNA, 60 bp, Artificial
  Synthetic oligonucleotide
ccttcagtagagcaatctgtatcatggcaacatttgaaggcagaacctgaatgtcctcct

SEQ ID NO: 33644 - DNA, 60 bp, Artificial
  Synthetic oligonucleotide
gccgtctggatcaatccattctaatttgtttgttgtgagatgaggatccgttaaattgaa

SEQ ID NO: 33645 - DNA, 60 bp, Artificial
  Synthetic oligonucleotide
cctcaatggactgtgtgtgaaggtctactttgcaagggttgtcactcaagtcctgaaagg

SEQ ID NO: 33646 - DNA, 60 bp, Artificial
  Synthetic oligonucleotide
atcccgccttgttctaatggaccaaggaacaagatggtatcagctggctgtagctttgaa

SEQ ID NO: 33647 - DNA, 60 bp, Artificial
  Synthetic oligonucleotide
tcctgaaaggaaacatctcggttcaacacgagattcacatgatctcttgtattgccgtct

SEQ ID NO: 33648 - DNA, 60 bp, Artificial
  Synthetic oligonucleotide
ccttgaatactttagggagataatcttgtatgccttacctacagacttcagcttatccag

SEQ ID NO: 33649 - DNA, 60 bp, Artificial
  Synthetic oligonucleotide
aggcatcagtgaaaataggctagtaaatgtatagatgcattgtccaattactagtgtttt

SEQ ID NO: 33650 - DNA, 60 bp, Artificial
  Synthetic oligonucleotide
ctgctgaacggatgtcttctaagtttggcacaatcaatggttctgaatgacttcccaaaa

SEQ ID NO: 33651 - DNA, 60 bp, Artificial
  Synthetic oligonucleotide
atatcttttacctggcttaacggaactaaaccaacatcaactgaaccagtaatgtaccct

SEQ ID NO: 33652 - DNA, 60 bp, Artificial
  Synthetic oligonucleotide
gaagtcatgatcttctcctctcggatggacaatcattcgactgacaacttctgctgaacg

SEQ ID NO: 33653 - DNA, 60 bp, Artificial
  Synthetic oligonucleotide
cttggcagtgcaaagacgatagtagagcagaccccaagaatggctaaaaccaacccttta

SEQ ID NO: 33654 - DNA, 59 bp, Artificial
  Synthetic oligonucleotide
atcaactgaaccagtaatgtacccttggcctagaccaacagtatgcgggcattccatct

SEQ ID NO: 33655 - DNA, 60 bp, Artificial
  Synthetic oligonucleotide
gactaaagtggataaggagctgtacataggcaatccagcaaaggcaacaccctgcattgt

SEQ ID NO: 33656 - DNA, 60 bp, Artificial
  Synthetic oligonucleotide
cacctggatcaccaaatgtgcaagatgtcgtacaccattgcttgaggataatcccgcctt

SEQ ID NO: 33657 - DNA, 60 bp, Artificial
  Synthetic oligonucleotide
ctcctctcggatggacaatcattcgactgacaacttctgctgaacggatgtcttctaagt

SEQ ID NO: 33658 - DNA, 60 bp, Artificial
  Synthetic oligonucleotide
aacactagacttttttgcccaatcaacctgtgtatagctctgttgaaggacagatgttgt

SEQ ID NO: 33659 - DNA, 60 bp, Artificial
  Synthetic oligonucleotide
ccctactacacgtaatgagccttgtgcctcatttgggaagtcatgatcttctcctctcgg

SEQ ID NO: 33660 - DNA, 60 bp, Artificial
  Synthetic oligonucleotide
gagctttctacttttatatcttttacctggcttaacggaactaaaccaacatcaactgaa

SEQ ID NO: 33661 - DNA, 60 bp, Artificial
  Synthetic oligonucleotide
ctgaacaccccgagtgtacgatagcaacctcggtggatttctggtttctttagtgatttc

SEQ ID NO: 33662 - DNA, 60 bp, Artificial
  Synthetic oligonucleotide
atggaggtgcaccatcatcataaactttgtcagaatctatttggtttacaccagtaacgc

SEQ ID NO: 33663 - DNA, 60 bp, Artificial
  Synthetic oligonucleotide
ctttagagcctcttgaaacctaccagtcaatttgcaaatcccaaaatgtgcctgaagagc

SEQ ID NO: 33664 - DNA, 60 bp, Artificial
  Synthetic oligonucleotide
cccaaaatgtgcctgaagagcactttgtgtggcctcagtcattgtcatacagtatggaca

SEQ ID NO: 33665 - DNA, 60 bp, Artificial
  Synthetic oligonucleotide
ccatccaaagcaaaatgttgtgagtaaagacactgtagcccagccatgcagcccagggac

SEQ ID NO: 33666 - DNA, 60 bp, Artificial
  Synthetic oligonucleotide
ggacattgcccttcggggcagctctgtttatgtgtctctagctcttttgccgtctcacac

SEQ ID NO: 33667 - DNA, 53 bp, Artificial
  Synthetic oligonucleotide
ctcttttgccgtctcacactcatgatgacaaacatcacataccattgaaccca

SEQ ID NO: 33668 - DNA, 57 bp, Artificial
  Synthetic oligonucleotide
cagttttgatgttaaaggttgcatccatccaatgcccaaggacttgcacttcagcat

SEQ ID NO: 33669 - DNA, 60 bp, Artificial
  Synthetic oligonucleotide
gtgttagtttaaatgagtttagtaaataaatctgataatgtgacaacgatcatcatgtga

SEQ ID NO: 33670 - DNA, 60 bp, Artificial
  Synthetic oligonucleotide
gacaagttggggttgtaacccacctgattgcccaggggtagggacaggatgtacagcatg

SEQ ID NO: 33671 - DNA, 60 bp, Artificial
  Synthetic oligonucleotide
cattagcatcatcatcctcatacagctatagaaggaagctcgtaaaccctgccaatacag

SEQ ID NO: 33672 - DNA, 60 bp, Artificial
  Synthetic oligonucleotide
gctagtgcagaaactccattgatggagtcagggtggtctgatacagcacatggtgtaggt

SEQ ID NO: 33673 - DNA, 60 bp, Artificial
  Synthetic oligonucleotide
gggacaggatgtacagcatgtggggtttatcttgataagttgcgatcagttgggaaggca

SEQ ID NO: 33674 - DNA, 60 bp, Artificial
  Synthetic oligonucleotide
cttcaatcaaggcatgtgatatggcaatgtgttatggggcaactgtgacaaacttattga

SEQ ID NO: 33675 - DNA, 60 bp, Artificial
  Synthetic oligonucleotide
agaatggctgcttgggatattaaatggcaattggatggtagtggctgtcttggttgtgat

SEQ ID NO: 33676 - DNA, 60 bp, Artificial
  Synthetic oligonucleotide
ctgcctccccaccacatctagatcgggttactggttacaatcaaatagactcagataaag

SEQ ID NO: 33677 - DNA, 60 bp, Artificial
  Synthetic oligonucleotide
cagatcctgagtatgtgttttcaccaggcataatccctgaatcaaatcatagtgtctgtg

SEQ ID NO: 33678 - DNA, 60 bp, Artificial
  Synthetic oligonucleotide
gactggctttcttgcactttctggagaaatagaaaggataacaggatgtacagttttttg

SEQ ID NO: 33679 - DNA, 60 bp, Artificial
  Synthetic oligonucleotide
aatattagctcaccaacttgcctagtcaataaagtacaaaagtttaggggttcagagcaa

SEQ ID NO: 33680 - DNA, 60 bp, Artificial
  Synthetic oligonucleotide
caattggtagagggattgtgttttatacctactcatacaatagcactgacacaaccaggg

SEQ ID NO: 33681 - DNA, 60 bp, Artificial
  Synthetic oligonucleotide
tacagttcatctcattgctcctgtacaaacatgtatgtctgttcgaagttgtatggtagg

SEQ ID NO: 33682 - DNA, 60 bp, Artificial
  Synthetic oligonucleotide
tgcccaatccggagtaaaaagagtaagcccaattaatccgatgtacttttaaggccttta

SEQ ID NO: 33683 - DNA, 60 bp, Artificial
  Synthetic oligonucleotide
ccctacaaagtagatttgcacacacaatctatagacggtgcatggggttctggggtaggt

SEQ ID NO: 33684 - DNA, 60 bp, Artificial
  Synthetic oligonucleotide
ggtattatactaaagcagtggtgtacaacatcatgtgtgtttggagatcctggagacata

SEQ ID NO: 33685 - DNA, 58 bp, Artificial
  Synthetic oligonucleotide
tgaatcaacagaaagtgctctccaggcccatttttcagtctgcaaacttacaaataga

SEQ ID NO: 33686 - DNA, 60 bp, Artificial
  Synthetic oligonucleotide
ctccatcagtaaaagtttgcatgattggcactgtctcaaaactacagcctggtgacacac

SEQ ID NO: 33687 - DNA, 60 bp, Artificial
  Synthetic oligonucleotide
gacacaaccagggcatacatatgacacaatgaccttacctattacctgctttcttgtagc

SEQ ID NO: 33688 - DNA, 60 bp, Artificial
  Synthetic oligonucleotide
tctccctgcttcctggtgtggcccattcccttgctgttgaactatgtgtgcctggcctcc

SEQ ID NO: 33689 - DNA, 60 bp, Artificial
  Synthetic oligonucleotide
gatcagctgagctattcacaaggatggttttaaaccctaaaggtgaagatcatgaccctg

SEQ ID NO: 33690 - DNA, 60 bp, Artificial
  Synthetic oligonucleotide
gggttctggggtaggttttactctagtatgtattgtgggtcttacagagtgtgcaaattt

SEQ ID NO: 33691 - DNA, 60 bp, Artificial
  Synthetic oligonucleotide
ctcatcacattttgctttggctggttgctcatacctgcaatcacattgattgtgctgaaa

SEQ ID NO: 33692 - DNA, 60 bp, Artificial
  Synthetic oligonucleotide
agatagaatgcccgcatacagtagggttaggtcaaggttatgtgacagggtcggttgaga

SEQ ID NO: 33693 - DNA, 60 bp, Artificial
  Synthetic oligonucleotide
ggcatataagattgtttctttaaaatacacaagaaaggtttgcatccaattgggcacgga

SEQ ID NO: 33694 - DNA, 60 bp, Artificial
  Synthetic oligonucleotide
gagaattgtatcatgaacaagcagtgagcgtgaacaatatcctctaccacattctctgga

SEQ ID NO: 33695 - DNA, 60 bp, Artificial
  Synthetic oligonucleotide
aatatcctctaccacattctctggaagtgtagggtcaataaggcccgcaaagctaggatg

SEQ ID NO: 33696 - DNA, 60 bp, Artificial
  Synthetic oligonucleotide
tctttttaacatcctctttccagtcatcccctcctctctgcttaaccagatttatcactt

SEQ ID NO: 33697 - DNA, 60 bp, Artificial
  Synthetic oligonucleotide
ctttccagtcatcccctcctctctgcttaaccagatttatcacttgtcttgcatcaaagc

SEQ ID NO: 33698 - DNA, 51 bp, Artificial
  Synthetic oligonucleotide
cgcagcaatagttgttgcatctacagattcgcttgcaaattggatagctat

SEQ ID NO: 33699 - DNA, 60 bp, Artificial
  Synthetic oligonucleotide
gcatcaaagccttgataagcaaattccgaaacccacgcagcaatagttgttgcatctaca

SEQ ID NO: 33700 - DNA, 51 bp, Artificial
  Synthetic oligonucleotide
tattccacattctcctgtcacaaaaaactgtcatatctgaccagattcttg

SEQ ID NO: 33701 - DNA, 60 bp, Artificial
  Synthetic oligonucleotide
gtcagagataatcagattcagtcgctgcctaatgggggagaggggtttgtaagggatgag

SEQ ID NO: 33702 - DNA, 60 bp, Artificial
  Synthetic oligonucleotide
gtgggtttgaaagggcagccgcattatagcttcctataggccttggcagcagcagtgaca

SEQ ID NO: 33703 - DNA, 60 bp, Artificial
  Synthetic oligonucleotide
gggtttgaaagggcagccgcattatagcttcctataggccttggcagcagcagtgacagc

SEQ ID NO: 33704 - DNA, 60 bp, Artificial
  Synthetic oligonucleotide
cctcctgtttgcagcagtaagaaaaggactgtttattgcagcttgcattggtctatcaaa

SEQ ID NO: 33705 - DNA, 60 bp, Artificial
  Synthetic oligonucleotide
gcagtaagaaaaggactgtttattgcagcttgcattggtctatcaaagctagagacaacc

SEQ ID NO: 33706 - DNA, 60 bp, Artificial
  Synthetic oligonucleotide
gtctatcaaagctagagacaacctcactttttgaggatgatcttagagacgggttgattg

SEQ ID NO: 33707 - DNA, 60 bp, Artificial
  Synthetic oligonucleotide
gggttgattgtcttagagaattgtatcatgaacaagcagtgagcgtgaacaatatcctct

SEQ ID NO: 33708 - DNA, 59 bp, Artificial
  Synthetic oligonucleotide
tgcattacagattccttgcatttcgtcctcagttgggccactcagcagacagtcagttc

SEQ ID NO: 33709 - DNA, 60 bp, Artificial
  Synthetic oligonucleotide
aaacagtatcactgtccagtatccaattatagagggttggaagtccctgtacataacctt

SEQ ID NO: 33710 - DNA, 60 bp, Artificial
  Synthetic oligonucleotide
gtccagtatccaattatagagggttggaagtccctgtacataaccttaagcaatcctctg

SEQ ID NO: 33711 - DNA, 54 bp, Artificial
  Synthetic oligonucleotide
cagattcctcatatgtgggggtcttcatactctcaggttacacaatattcgcct

SEQ ID NO: 33712 - DNA, 60 bp, Artificial
  Synthetic oligonucleotide
gaatttgatctttctgatgactgctgccagtccccattattccacattctcctgtcacaa

SEQ ID NO: 33713 - DNA, 60 bp, Artificial
  Synthetic oligonucleotide
gttaacagctttagaatttgatctttctgatgactgctgccagtccccattattccacat

SEQ ID NO: 33714 - DNA, 60 bp, Artificial
  Synthetic oligonucleotide
tttatcacttgtcttgcatcaaagccttgataagcaaattccgaaacccacgcagcaata

SEQ ID NO: 33715 - DNA, 60 bp, Artificial
  Synthetic oligonucleotide
ctactcaaagatcttgagcgaactatcactgcgccagatcccgagtgaagtgttttctgg

SEQ ID NO: 33716 - DNA, 60 bp, Artificial
  Synthetic oligonucleotide
cctactcaaagatcttgagcgaactatcactgcgccagatcccgagtgaagtgttttctg

SEQ ID NO: 33717 - DNA, 60 bp, Artificial
  Synthetic oligonucleotide
agctaggatgcatgatagctctaggaaatttatctgataaagcatccattgctcttccag

SEQ ID NO: 33718 - DNA, 60 bp, Artificial
  Synthetic oligonucleotide
ccacattctctggaagtgtagggtcaataaggcccgcaaagctaggatgcatgatagctc

SEQ ID NO: 33719 - DNA, 58 bp, Artificial
  Synthetic oligonucleotide
gctcttccagttacggggagatagtcttgaacaacctcagcagcctgacatgtccacc

SEQ ID NO: 33720 - DNA, 60 bp, Artificial
  Synthetic oligonucleotide
catgatagctctaggaaatttatctgataaagcatccattgctcttccagttacggggag

SEQ ID NO: 33721 - DNA, 60 bp, Artificial
  Synthetic oligonucleotide
ggtcatttctgccaggattcccagacttcagcttatacttgcttatcaggtcatttacaa

SEQ ID NO: 33722 - DNA, 60 bp, Artificial
  Synthetic oligonucleotide
ctctcgataatgttaggtcatttctgccaggattcccagacttcagcttatacttgctta

SEQ ID NO: 33723 - DNA, 60 bp, Artificial
  Synthetic oligonucleotide
ggtcatttacaattttctgcccactttctgacatcttagtcaccattctagatggtttgt

SEQ ID NO: 33724 - DNA, 60 bp, Artificial
  Synthetic oligonucleotide
tacttgcttatcaggtcatttacaattttctgcccactttctgacatcttagtcaccatt

SEQ ID NO: 33725 - DNA, 56 bp, Artificial
  Synthetic oligonucleotide
agtcaccattctagatggtttgtttccccttgtcaatgacagtacaatcatctttt

SEQ ID NO: 33726 - DNA, 60 bp, Artificial
  Synthetic oligonucleotide
agtcaccattctagatggtttgtttccccttgtcaatgacagtacaatcatctttttaac

SEQ ID NO: 33727 - DNA, 60 bp, Artificial
  Synthetic oligonucleotide
ggtgcaagaaatgtgattttgctacacagctattaaggataggaggaggtctgggtctag

SEQ ID NO: 33728 - DNA, 60 bp, Artificial
  Synthetic oligonucleotide
cttgaactggtgcaagaaatgtgattttgctacacagctattaaggataggaggaggtct

SEQ ID NO: 33729 - DNA, 51 bp, Artificial
  Synthetic oligonucleotide
tatcactcgaacattgactcatacagcttgaactggtgcaagaaatgtgat

SEQ ID NO: 33730 - DNA, 60 bp, Artificial
  Synthetic oligonucleotide
ggttatccttctctaaagtttttttatcactcgaacattgactcatacagcttgaactgg

SEQ ID NO: 33731 - DNA, 60 bp, Artificial
  Synthetic oligonucleotide
gagagaatatcagaattgagcatagaaacttgcttacgctggtgtgaaccaaatataaaa

SEQ ID NO: 33732 - DNA, 60 bp, Artificial
  Synthetic oligonucleotide
tattgagagaatatcagaattgagcatagaaacttgcttacgctggtgtgaaccaaatat

SEQ ID NO: 33733 - DNA, 60 bp, Artificial
  Synthetic oligonucleotide
gtgcatgctctaggacactggtttgatggtcgtcttaaccttaaaacatcctttcactgt

SEQ ID NO: 33734 - DNA, 60 bp, Artificial
  Synthetic oligonucleotide
atagcaaagaatatgatgatggagcaccgcaatgtgggataaaatgttggtttgttaaat

SEQ ID NO: 33735 - DNA, 60 bp, Artificial
  Synthetic oligonucleotide
ggggcaccgcaatgtgggataaaatgttggtttgttaaatcaggggaatggatttcaggg

SEQ ID NO: 33736 - DNA, 60 bp, Artificial
  Synthetic oligonucleotide
cctttcactgttatggtgcttgtacaaagtatgaatacccttggcatactgcaaagtgcc

SEQ ID NO: 33737 - DNA, 60 bp, Artificial
  Synthetic oligonucleotide
ttgacctcaataaaggcttgtgataaggctatctgttatggtgcagagagtggaacattg

SEQ ID NO: 33738 - DNA, 50 bp, Artificial
  Synthetic oligonucleotide
tcacaaattggactccatgctgctgcacctcacctagacaaggtcaatgg

SEQ ID NO: 33739 - DNA, 60 bp, Artificial
  Synthetic oligonucleotide
ggtatagcaggagggtctgtgttcaattcggggaggaaaacctttgtaagataatagaca

SEQ ID NO: 33740 - DNA, 60 bp, Artificial
  Synthetic oligonucleotide
ggataaaatgttggtttgttaaatcaggggaatggatttcagggatattcagtggtaatt

SEQ ID NO: 33741 - DNA, 60 bp, Artificial
  Synthetic oligonucleotide
tttgttaaatcaggggaatggatttcagggatattcagtggtaattggattgtactcatt

SEQ ID NO: 33742 - DNA, 60 bp, Artificial
  Synthetic oligonucleotide
tcttaaccttaaaacatcctttcactgttatggtgcttgtacaaagtatgaatacccttg

SEQ ID NO: 33743 - DNA, 60 bp, Artificial
  Synthetic oligonucleotide
tgtcctacctttttgacctcaataaaggcttgtgataaggctatctgttacggtgcagag

SEQ ID NO: 33744 - DNA, 60 bp, Artificial
  Synthetic oligonucleotide
gcagctttctaaccacaaaacttagattcttcttctgtatgatgtcttaacatcttgcgg

SEQ ID NO: 33745 - DNA, 60 bp, Artificial
  Synthetic oligonucleotide
gcaggagggtctgtgttcaattcggggaggaaaacctttgtaagataatagacatgaatg

SEQ ID NO: 33746 - DNA, 60 bp, Artificial
  Synthetic oligonucleotide
atttctattgttctccttggttttactaagcattctctgtcccgtaaggaagcataaaaa

SEQ ID NO: 33747 - DNA, 57 bp, Artificial
  Synthetic oligonucleotide
agcataaaaaatcatagctaaattctgtgactatcctgttcttatgtatagccttaa

SEQ ID NO: 33748 - DNA, 60 bp, Artificial
  Synthetic oligonucleotide
gacatgaatgattgttttgtatctaggcatgttaaggtctgcataattggtacagtatct

SEQ ID NO: 33749 - DNA, 60 bp, Artificial
  Synthetic oligonucleotide
atgttccaacacttgatgatttcagatccatggaagcattcacaggaatctttagatcac

SEQ ID NO: 33750 - DNA, 60 bp, Artificial
  Synthetic oligonucleotide
cataacctcccccatgtgcttagtgtcaaagcaaaatcgattccggttaacagaacagca

SEQ ID NO: 33751 - DNA, 60 bp, Artificial
  Synthetic oligonucleotide
cctctcccatgtgcttagtgtcaaaacaaaatcgattccggttaacagaacagcaagtga

SEQ ID NO: 33752 - DNA, 60 bp, Artificial
  Synthetic oligonucleotide
cctaccccatgtgcttagtgtcaaagcaaaatcgattccggttaacagaacagcaagtga

SEQ ID NO: 33753 - DNA, 60 bp, Artificial
  Synthetic oligonucleotide
ggtgttgatgtgcatgctctaggacactggtttgatggtcgtcttaaccttaaaacatcc

SEQ ID NO: 33754 - DNA, 60 bp, Artificial
  Synthetic oligonucleotide
aacaaaaggctcaatggtatgtgatgtctgcaagtatgagtgtgaaacctataaagagtt

SEQ ID NO: 33755 - DNA, 60 bp, Artificial
  Synthetic oligonucleotide
gatgatggagcaccgcaatgtgggataaaatgttggtttgttaaatcaggggaatggatt

SEQ ID NO: 33756 - DNA, 60 bp, Artificial
  Synthetic oligonucleotide
tgaaaagctgtttgattgcattgggaccatacagagtacaggtggtttatgagagaagtt

SEQ ID NO: 33757 - DNA, 60 bp, Artificial
  Synthetic oligonucleotide
caacactatacatgattgtaccaattcatgcatgtaacatgatgaaaagctgtttgattg

SEQ ID NO: 33758 - DNA, 60 bp, Artificial
  Synthetic oligonucleotide
ctgcataattggtacagtatctaaattctctcagggcgataccttattgttttttggacc

SEQ ID NO: 33759 - DNA, 60 bp, Artificial
  Synthetic oligonucleotide
gggggaaactctgcaccaatatatgttccaacacttgatgatttcagatccatggaagca

SEQ ID NO: 33760 - DNA, 60 bp, Artificial
  Synthetic oligonucleotide
tgtttgattgcattgggaccatacagagtacaggtagtttatgagagaacctattgcatg

SEQ ID NO: 33761 - DNA, 60 bp, Artificial
  Synthetic oligonucleotide
ggggcatggggttcaggagtaggttttaatttagtttgttcagtgagcctgacagagtgt

SEQ ID NO: 33762 - DNA, 60 bp, Artificial
  Synthetic oligonucleotide
acagaacattgtcccttttccgttatagaagcaggtttttcgtgggttttatttggtgtt

SEQ ID NO: 33763 - DNA, 60 bp, Artificial
  Synthetic oligonucleotide
attttcctctttacattatgttgtccacggaggcctagttatgcaaaagaacataaacct

SEQ ID NO: 33764 - DNA, 60 bp, Artificial
  Synthetic oligonucleotide
aaggcgggttgatcttcaagcagtggtgcactacaacatgtcaatttggtgacccagggg

SEQ ID NO: 33765 - DNA, 60 bp, Artificial
  Synthetic oligonucleotide
gctgtggaattatgtgtgccaggtctccatggctgggccacaatgctacttttattaaca

SEQ ID NO: 33766 - DNA, 60 bp, Artificial
  Synthetic oligonucleotide
aggagatgccagaaacctgaatgaacttaaaattgaatgtccacacacaattggtttggg

SEQ ID NO: 33767 - DNA, 60 bp, Artificial
  Synthetic oligonucleotide
gggcgttgccttttcagggaaccctctttacacatcgactggggtcttaacagcaaagga

SEQ ID NO: 33768 - DNA, 60 bp, Artificial
  Synthetic oligonucleotide
ccaactgtgtcaactgcaaacatagcacttagttggagctcagttgaacacagaggtaat

SEQ ID NO: 33769 - DNA, 60 bp, Artificial
  Synthetic oligonucleotide
gccaactgtttcaactgcaaacatagcacttagttggagttcaattgaacacagaggtaa

SEQ ID NO: 33770 - DNA, 60 bp, Artificial
  Synthetic oligonucleotide
caatctgtcagccgttaggatcttcttccttaatgcagcaaaagccaaagctgctctcgc

SEQ ID NO: 33771 - DNA, 53 bp, Artificial
  Synthetic oligonucleotide
gccattatttcttctttgattattcacaattttataggggcctttgtgtccca

SEQ ID NO: 33772 - DNA, 60 bp, Artificial
  Synthetic oligonucleotide
cgtaatcagccattatttcttctttgattattcacaattttataggggtctttgtgtccc

SEQ ID NO: 33773 - DNA, 60 bp, Artificial
  Synthetic oligonucleotide
tcacccaaccttgtatttcagcgaggttgatggcttctcctgaaaactcaacagcaatcc

SEQ ID NO: 33774 - DNA, 51 bp, Artificial
  Synthetic oligonucleotide
caggtccatccagcaaaggcagcagcaactcttgagagggttatgtcatcc

SEQ ID NO: 33775 - DNA, 60 bp, Artificial
  Synthetic oligonucleotide
gtacttacaggcaggtgatggatcaccgtgacaactttgaagacttctacagagttggcc

SEQ ID NO: 33776 - DNA, 52 bp, Artificial
  Synthetic oligonucleotide
gccattatttcttctttgattattcacaattttataggggtctttgtgtccc

SEQ ID NO: 33777 - DNA, 60 bp, Artificial
  Synthetic oligonucleotide
acagcaatcctagcgtaatcagccattatttcttctttgattattcacaattttataggg

SEQ ID NO: 33778 - DNA, 60 bp, Artificial
  Synthetic oligonucleotide
gaggttgatggcttctcctgaaaactcaacagcaatcctagcgtaatcagccattatttc

SEQ ID NO: 33779 - DNA, 60 bp, Artificial
  Synthetic oligonucleotide
cgaggttgatggcttctcctgaaaactcaacagcaatcctagcgtaatcagccattattt

SEQ ID NO: 33780 - DNA, 60 bp, Artificial
  Synthetic oligonucleotide
tttcagcgaggttgatggcttctcctgaaaactcaacagcaatcctagcgtaatcagcca

SEQ ID NO: 33781 - DNA, 56 bp, Artificial
  Synthetic oligonucleotide
gtacttacaggcaggtgatggatcaccgtgacaactttgaagacttctacagagtt

SEQ ID NO: 33782 - DNA, 53 bp, Artificial
  Synthetic oligonucleotide
gctaaatgggtgggtggtaggggacacgaaaaaaatagaagttagatcattta

SEQ ID NO: 33783 - DNA, 60 bp, Artificial
  Synthetic oligonucleotide
aaaattgcagtagaaaatgtcaaatctgagaaaaattctaaaatgcaagataaaccttga

SEQ ID NO: 33784 - DNA, 60 bp, Artificial
  Synthetic oligonucleotide
gaaattgcagtagaaaatgtcaaatctgagaaaaattctaaaatgcaagataaaccttga

SEQ ID NO: 33785 - DNA, 60 bp, Artificial
  Synthetic oligonucleotide
tatagatgtagcaagtcaagttcaacagaatgaatgtgcaaaaactatcgagaagattct

SEQ ID NO: 33786 - DNA, 60 bp, Artificial
  Synthetic oligonucleotide
tcaagtacgcaatggtcagaagaagtgagcctgactatggatgacagtgatgatgacggt

SEQ ID NO: 33787 - DNA, 60 bp, Artificial
  Synthetic oligonucleotide
aagtatctgatttcagtcatacggaaaacaactgcaaggcatttaggtcatttattacgt

SEQ ID NO: 33788 - DNA, 60 bp, Artificial
  Synthetic oligonucleotide
tgaaaggggagcacttgaagcaatgttcaatttaaagttccatgtcacaggcccaaaagt

SEQ ID NO: 33789 - DNA, 60 bp, Artificial
  Synthetic oligonucleotide
gcccagagaaaggtcactgaagagagagtgctaccggaagatgtattacctgactctctt

SEQ ID NO: 33790 - DNA, 60 bp, Artificial
  Synthetic oligonucleotide
cgttctgctcaagaggggttttgccagttgatcctgagattcaatgtttgggtcttcttg

SEQ ID NO: 33791 - DNA, 60 bp, Artificial
  Synthetic oligonucleotide
gtatgcaagtaaagtggatgagattagtgatgtgctggacagtgctatccatcctgattc

SEQ ID NO: 33792 - DNA, 60 bp, Artificial
  Synthetic oligonucleotide
cgagttgttagcattgataaacccacaaaatgttcttaatttagatgggatcgaggaaac

SEQ ID NO: 33793 - DNA, 60 bp, Artificial
  Synthetic oligonucleotide
gagggtacggcagaatcaatttgtagttactggctaaagacaatgtcccttgtgaagact

SEQ ID NO: 33794 - DNA, 60 bp, Artificial
  Synthetic oligonucleotide
ggagggtgtgtatagagaattaggcctggatatcagtcaaccaaatgtactaaaaaaagt

SEQ ID NO: 33795 - DNA, 60 bp, Artificial
  Synthetic oligonucleotide
gtgtgcagacatataatgaggagacaaagctttatgaaggagacttgagggtaacattca

SEQ ID NO: 33796 - DNA, 60 bp, Artificial
  Synthetic oligonucleotide
tatctctcatggacccgtatgacttaactgaatttgagagtattgtcaaaggatggggag

SEQ ID NO: 33797 - DNA, 60 bp, Artificial
  Synthetic oligonucleotide
ggagaaatacagagagatccatgagagagtaaaggaagcagtcccaggggagacatcagc

SEQ ID NO: 33798 - DNA, 60 bp, Artificial
  Synthetic oligonucleotide
ggtctgcccatggatatgcttatggtagtgtgttattatgtattttgccgtctaaatcac

SEQ ID NO: 33799 - DNA, 60 bp, Artificial
  Synthetic oligonucleotide
ttgggtcttattgatgcagacaaccttgattcaaaagtagagatagatggtgttacatgg

SEQ ID NO: 33800 - DNA, 60 bp, Artificial
  Synthetic oligonucleotide
ttatgtgcaatatttgataacttgcgctacctcatcccagcagttacatccacatattct

SEQ ID NO: 33801 - DNA, 60 bp, Artificial
  Synthetic oligonucleotide
gagcaagtggagtgtacccttcactaatgtcaagggttgtctataaacattatcgcagtc

SEQ ID NO: 33802 - DNA, 60 bp, Artificial
  Synthetic oligonucleotide
ttttttgccaggaggtggttgaacttgctgctcaagagttaaatacttatctacatgcaa

SEQ ID NO: 33803 - DNA, 60 bp, Artificial
  Synthetic oligonucleotide
cccaatgatgtgatacagagtatggagaaaagaatcatcccagggagtcctagtggccag

SEQ ID NO: 33804 - DNA, 60 bp, Artificial
  Synthetic oligonucleotide
gtacattctctaaagagtatgcctggagagattttttaaatgaggtgcaatgtgatgtct

SEQ ID NO: 33805 - DNA, 58 bp, Artificial
  Synthetic oligonucleotide
gaaattgtactcttagaacaggcttgagagtgcggcagcctacaaacaaagcattctc

SEQ ID NO: 33806 - DNA, 60 bp, Artificial
  Synthetic oligonucleotide
acttgctcatgcataccataatttaaaggatgtaagatatcaggcattacaggcagttgg

SEQ ID NO: 33807 - DNA, 60 bp, Artificial
  Synthetic oligonucleotide
caattaggaatagtattatgtacgagtaaagttgagagattatatggtactgctcctggg

SEQ ID NO: 33808 - DNA, 60 bp, Artificial
  Synthetic oligonucleotide
gagtttaatccctatacctttaggtggtgatggatctatgtcaattatggagcttgcaac

SEQ ID NO: 33809 - DNA, 60 bp, Artificial
  Synthetic oligonucleotide
cagtatcccctacaaatgctgagtttctatctacattctttgaaggttgtgcagtctcaa

SEQ ID NO: 33810 - DNA, 60 bp, Artificial
  Synthetic oligonucleotide
gtagggaaggttcaatggaaagtattcacccctaagagcgaatttgaattctatgatcag

SEQ ID NO: 33811 - DNA, 60 bp, Artificial
  Synthetic oligonucleotide
ggcaaagcaacacatgaaagtatgcaagctagatggtgaatgggtgacatttagagaggt

SEQ ID NO: 33812 - DNA, 60 bp, Artificial
  Synthetic oligonucleotide
acagggaatctaatagagttcattgaggtaacagtaactgctgatgtagcaaggggtgtt

SEQ ID NO: 33813 - DNA, 60 bp, Artificial
  Synthetic oligonucleotide
gaggaagtgaccaaggagttactacgctgtggtatgagattcaaaacagagcaagttaac

SEQ ID NO: 33814 - DNA, 60 bp, Artificial
  Synthetic oligonucleotide
gacatgatgttgtagatcagatgataaagcatgactggtcagacaataaagataaggaac

SEQ ID NO: 33815 - DNA, 60 bp, Artificial
  Synthetic oligonucleotide
cagaatggtttcaatacgtgactcagcagatacaagcaggaaacttccactggcatgctg

SEQ ID NO: 33816 - DNA, 60 bp, Artificial
  Synthetic oligonucleotide
ggtgcagcagtgtcattgttatttaaacgtgtatgggccaaattatacccagagttagag

SEQ ID NO: 33817 - DNA, 60 bp, Artificial
  Synthetic oligonucleotide
ctagaaagctacataggtatattgataatatgggtgaattatctgatgaggtcttggact

SEQ ID NO: 33818 - DNA, 60 bp, Artificial
  Synthetic oligonucleotide
ccctggaaaaggcactcaggtgggcctcaggagaaagtgaaattcagtcttcaataggcc

SEQ ID NO: 33819 - DNA, 60 bp, Artificial
  Synthetic oligonucleotide
gaagcagaccgtggtttttttattaccacactaccaactagagtgagattagagattatt

SEQ ID NO: 33820 - DNA, 60 bp, Artificial
  Synthetic oligonucleotide
cttgtatatgatctgaaagggcaaaagggtttgttgcagatacaagctaataggcgggca

SEQ ID NO: 33821 - DNA, 60 bp, Artificial
  Synthetic oligonucleotide
cattacaagaagatggtcatttagctgcaagtgttacccttattgaggcaattcgctttt

SEQ ID NO: 33822 - DNA, 60 bp, Artificial
  Synthetic oligonucleotide
ttgattattgcactacagcttggtcattgaccactcaggtaatctgctgctctgtatgtt

SEQ ID NO: 33823 - DNA, 60 bp, Artificial
  Synthetic oligonucleotide
ttgattattgcactacagcttggtcattgaccacttaggtaatctgctgctctgtatgtt

SEQ ID NO: 33824 - DNA, 60 bp, Artificial
  Synthetic oligonucleotide
tcgattattgcactacagcttggtcattgaccactcaggtaatctgctgctctgtatgtt

SEQ ID NO: 33825 - DNA, 60 bp, Artificial
  Synthetic oligonucleotide
tcgcccttccagaatgcctacaatgtcaagggcaatgccaccagtgccaacatcatctag

SEQ ID NO: 33826 - DNA, 60 bp, Artificial
  Synthetic oligonucleotide
agatggccagtgccaccgatgatgcacaaaaggattccatctacgcatcagctctggtgg

SEQ ID NO: 33827 - DNA, 60 bp, Artificial
  Synthetic oligonucleotide
tcagccagtgagtttctgcgtccaaacccaagtcttaacttctctagtggtatttcacaa

SEQ ID NO: 33828 - DNA, 60 bp, Artificial
  Synthetic oligonucleotide
tcagccagtgagtttctgcgtccatacccaagtcttaacttctctagtggtatttcacaa

SEQ ID NO: 33829 - DNA, 60 bp, Artificial
  Synthetic oligonucleotide
gaacagccaatacatgtttgactacccggcaattaacattgatgtgaggtgtcatagact

SEQ ID NO: 33830 - DNA, 60 bp, Artificial
  Synthetic oligonucleotide
gatgaacagccagtacatgtttgactacccggcaattaacattgatgtgaggtgtcatag

SEQ ID NO: 33831 - DNA, 60 bp, Artificial
  Synthetic oligonucleotide
gacacactggagaggagtctatgacacctcacatcaatgttaattgccgggtagtcaaac

SEQ ID NO: 33832 - DNA, 60 bp, Artificial
  Synthetic oligonucleotide
acagccaatacatgtttgactacccggcaattaacattgatgtgaggtgtcatagactcc

SEQ ID NO: 33833 - DNA, 58 bp, Artificial
  Synthetic oligonucleotide
tcatgacgtttcaacgtatgagcattgtgaaataccactagagaagttaagacttggg

SEQ ID NO: 33834 - DNA, 60 bp, Artificial
  Synthetic oligonucleotide
acactcatgacgtttcaacttatgagcattgtgaaataccactagagaagttaagacttg

SEQ ID NO: 33835 - DNA, 60 bp, Artificial
  Synthetic oligonucleotide
gccagtgagtttctgcgtccatacccaagtcttaacttctctagtggtatttcacaatgc

SEQ ID NO: 33836 - DNA, 60 bp, Artificial
  Synthetic oligonucleotide
gccagtgagtttctgcgtccaaacccaagtcttaacttctctagtggtatttcacaatgc

SEQ ID NO: 33837 - DNA, 60 bp, Artificial
  Synthetic oligonucleotide
tgctgtagctcttgctccagaagttaggatcccaaacttagtcaagaatgccctcctctg

SEQ ID NO: 33838 - DNA, 60 bp, Artificial
  Synthetic oligonucleotide
gggtgatgccattcctgcctggtctgccctctactattttatactttgcaaccaggctct

SEQ ID NO: 33839 - DNA, 60 bp, Artificial
  Synthetic oligonucleotide
aagtctgagacaaaccagagatcctatctctctaaatagatcgtatccattgtaatgctc

SEQ ID NO: 33840 - DNA, 60 bp, Artificial
  Synthetic oligonucleotide
ctgtttagagagataggatctctggtttgtctcaggcttatcaatgcagagccttttgac

SEQ ID NO: 33841 - DNA, 60 bp, Artificial
  Synthetic oligonucleotide
ataccactagagaagttaagacttgggtttggacgcagaaactcactggctgacttttat

SEQ ID NO: 33842 - DNA, 60 bp, Artificial
  Synthetic oligonucleotide
agtgatgagcattataatggatacgatctgtttagagagataggatctctggtttgtctc

SEQ ID NO: 33843 - DNA, 60 bp, Artificial
  Synthetic oligonucleotide
ccccagaggaggcagtgtcaaaaggctctgcattgataagtctgagacaaaccagagatc

SEQ ID NO: 33844 - DNA, 60 bp, Artificial
  Synthetic oligonucleotide
caggcttatcaatgcagagccttttgacactgccttttctggggaggcacttgatgtcag

SEQ ID NO: 33845 - DNA, 60 bp, Artificial
  Synthetic oligonucleotide
ttagagagataggatctctggtttgtctcagacttatcaatgcagagccttttgacactg

SEQ ID NO: 33846 - DNA, 60 bp, Artificial
  Synthetic oligonucleotide
cccagaggaggcagtgtcaaaaggctctgcattgataagtctgagacaaaccagagatcc

SEQ ID NO: 33847 - DNA, 60 bp, Artificial
  Synthetic oligonucleotide
ggtaattccattcctgcctggtctgccctctactatcttatactttgcaaccaggctctt

SEQ ID NO: 33848 - DNA, 60 bp, Artificial
  Synthetic oligonucleotide
gcaagagaagttaagagcctggttgcaaagtataagatagtagagggcagaccaggcagg

SEQ ID NO: 33849 - DNA, 60 bp, Artificial
  Synthetic oligonucleotide
agcaagagaagttaagagcctggttgcaaagtataagatagtagagggcagaccaggcag

SEQ ID NO: 33850 - DNA, 60 bp, Artificial
  Synthetic oligonucleotide
gcctggtctgccctctactatcttatactttgcaaccaggctcttaacttctcttgctcc

SEQ ID NO: 33851 - DNA, 60 bp, Artificial
  Synthetic oligonucleotide
tgtctccagagggagcaagagaagttaagagcctggttgcaaagtataagatagtagagg

SEQ ID NO: 33852 - DNA, 60 bp, Artificial
  Synthetic oligonucleotide
gaagaaagagaaattaggaattaagaacttttctacttatgaacaggtttgcaaagtagc

SEQ ID NO: 33853 - DNA, 60 bp, Artificial
  Synthetic oligonucleotide
aatgtgaagaaagagaaattaggaattaagaacttttctacttatgaacaggtttgcaaa

SEQ ID NO: 33854 - DNA, 61 bp, Artificial
  Synthetic oligonucleotide
gagaaattaggaattaagaacttttctacttatgaacaggtttgcaaagtagccaaggtac

SEQ ID NO: 33855 - DNA, 60 bp, Artificial
  Synthetic oligonucleotide
aagaaagagaaattaggaattaagaacttttctacttatgaacaggtttgcaaagtagcc

SEQ ID NO: 33856 - DNA, 60 bp, Artificial
  Synthetic oligonucleotide
agggtcctcaaggacggtatggatgtcaactttatgaagaaagttctccggcagaggtac

SEQ ID NO: 33857 - DNA, 60 bp, Artificial
  Synthetic oligonucleotide
gaacgacggtgacgcaatgtatctgggatttgctgctggtgctgaaatgtttctgcagac

SEQ ID NO: 33858 - DNA, 60 bp, Artificial
  Synthetic oligonucleotide
tacttggaacgacggtgacgcaatgtatctgggatttgctgctggtgctgaaatgtttct

SEQ ID NO: 33859 - DNA, 60 bp, Artificial
  Synthetic oligonucleotide
ccttgcaccgtctgtcgggatacctagctcgctgggcatttacccagatgcgatcaccaa

SEQ ID NO: 33860 - DNA, 60 bp, Artificial
  Synthetic oligonucleotide
ttgctgtaagagcagcctttgaggctgtaggcactctggcctgggccaggactgggttct

SEQ ID NO: 33861 - DNA, 60 bp, Artificial
  Synthetic oligonucleotide
gaaaactgctgagcaatggatgcgtgaagagatagttgctgtaagagcagcctttgaggc

SEQ ID NO: 33862 - DNA, 60 bp, Artificial
  Synthetic oligonucleotide
gcagaggtacggtcagaaaactgctgagcaatggatgcgtgaagagatagttgctgtaag

SEQ ID NO: 33863 - DNA, 60 bp, Artificial
  Synthetic oligonucleotide
agtagtgtgctccacaattcaaaacataaaaagaaactccaataatgtcagagttcattt

SEQ ID NO: 33864 - DNA, 60 bp, Artificial
  Synthetic oligonucleotide
ccaactgtatcaactgcaaacatagcgcttagttggagctcagtagaacacagaggcaat

SEQ ID NO: 33865 - DNA, 60 bp, Artificial
  Synthetic oligonucleotide
tagactaacctcagatgggcttgctaggcatgtgacacaatgccctaagcggaaggagaa

SEQ ID NO: 33866 - DNA, 60 bp, Artificial
  Synthetic oligonucleotide
tagtagtaggctccctaaagagcactatactgaagatggcaacactagaggaactccaaa

SEQ ID NO: 33867 - DNA, 60 bp, Artificial
  Synthetic oligonucleotide
agcactatactgaagatggcaacactagaggaactccaaaaagagatcaatagccacgaa

SEQ ID NO: 33868 - DNA, 60 bp, Artificial
  Synthetic oligonucleotide
tctacaaacatagagatcgggaaaagggattgcctggatctactcagcacggttgatggt

SEQ ID NO: 33869 - DNA, 60 bp, Artificial
  Synthetic oligonucleotide
ctcccaatcttttattgattcaccggggtgttgtcttgacatcttgcggagtctactact

SEQ ID NO: 33870 - DNA, 60 bp, Artificial
  Synthetic oligonucleotide
ctcctaatcttttattgattcaccggggtgttgtcttgacatcttgcggagtctactact

SEQ ID NO: 33871 - DNA, 60 bp, Artificial
  Synthetic oligonucleotide
tgtcgctgctaacaccagcagtacttttgacccagaggtcgcatatgctaactttaagcg

SEQ ID NO: 33872 - DNA, 60 bp, Artificial
  Synthetic oligonucleotide
taatgatgtcgctgctaacaccagcagtacttttgacccagaggttgcatacattaactt

SEQ ID NO: 33873 - DNA, 55 bp, Artificial
  Synthetic oligonucleotide
actatgcactttactgatgagaggatagaatggaaagaccctgatgggatgttga

SEQ ID NO: 33874 - DNA, 60 bp, Artificial
  Synthetic oligonucleotide
caatacaagcactatgcatttcactgatgagaggatagaatggaaagaccctgatgggat

SEQ ID NO: 33875 - DNA, 60 bp, Artificial
  Synthetic oligonucleotide
cagcacctcaggcagagcaatgagtgcaggcaaaattggtaatgtcctttcttatgcaca

SEQ ID NO: 33876 - DNA, 60 bp, Artificial
  Synthetic oligonucleotide
caacgcacagtacagcttggaagcatgcccttcgattaaaggggaccgcatatgagggtc

SEQ ID NO: 33877 - DNA, 60 bp, Artificial
  Synthetic oligonucleotide
aaactacctcaactaaactacctcatttgattgctccttgattgtctttttagggagcat

SEQ ID NO: 33878 - DNA, 60 bp, Artificial
  Synthetic oligonucleotide
aaactatctcaacctaactacctcatttgcttgctccttgattgtctttttagggagcat

SEQ ID NO: 33879 - DNA, 60 bp, Artificial
  Synthetic oligonucleotide
ccctgccgtgttgacagccggcagaatcagtgagatgggtgtctgctttggaacaatccc

SEQ ID NO: 33880 - DNA, 60 bp, Artificial
  Synthetic oligonucleotide
ctacatgcaccctgccgtgttgacagccggcagaatcagtgagatgggtgtctgctttgg

SEQ ID NO: 33881 - DNA, 60 bp, Artificial
  Synthetic oligonucleotide
gatttccaggattgtgatatgggtctgccccactataccaaaccctacaggaaaacttgt

SEQ ID NO: 33882 - DNA, 60 bp, Artificial
  Synthetic oligonucleotide
gatttctaggattgtgatatgggtctgccccactataccaaaccctacaggaaaacttgt

SEQ ID NO: 33883 - DNA, 60 bp, Artificial
  Synthetic oligonucleotide
gatatgggtctgccccactataccaaaccctacaggaaaacttgtggttgccctggttga

SEQ ID NO: 33884 - DNA, 60 bp, Artificial
  Synthetic oligonucleotide
cagaattgtgatatgggtctgccccactataccaaaccctacaggaaaacttgtggttgc

SEQ ID NO: 33885 - DNA, 60 bp, Artificial
  Synthetic oligonucleotide
gatttccaggattgtgatatgggtctgccccactataccaaaccctacaggaaaacctgt

SEQ ID NO: 33886 - DNA, 60 bp, Artificial
  Synthetic oligonucleotide
gatttccagaattgtgatatgggtctgccccactataccaaaccctacaggaaaacttgt

SEQ ID NO: 33887 - DNA, 60 bp, Artificial
  Synthetic oligonucleotide
tctccacaaagtaaaaagtggttaccatctagttcttcaggtttaaagtttattgttgag

SEQ ID NO: 33888 - DNA, 60 bp, Artificial
  Synthetic oligonucleotide
agagcaatcggtgcgccaattactagttaaatcatcaaataattaacaagaaataatgta

SEQ ID NO: 33889 - DNA, 54 bp, Artificial
  Synthetic oligonucleotide
gttacaatgcccattacatcgtaccagatacttaatgcatctttagtcttccag

SEQ ID NO: 33890 - DNA, 60 bp, Artificial
  Synthetic oligonucleotide
atacagcttatttttggattcatctagatgtgatatgtcttttgatggagataaaacata

SEQ ID NO: 33891 - DNA, 60 bp, Artificial
  Synthetic oligonucleotide
ataaaacataaatagcactgtatgtgtacagtccgcattgccttatgttaacttttttgt

SEQ ID NO: 33892 - DNA, 60 bp, Artificial
  Synthetic oligonucleotide
aagaaggagaagcatccacagatcccacattttagagggaaatatggccatgaccaatta

SEQ ID NO: 33893 - DNA, 60 bp, Artificial
  Synthetic oligonucleotide
ttgctggattaaagtcaatttgcgccattcaaatttatctctggtggatagatagcattc

SEQ ID NO: 33894 - DNA, 60 bp, Artificial
  Synthetic oligonucleotide
gcaggtgtccatcatcagccttgcagagaatgttgtgtctgacgtataagttatattgca

SEQ ID NO: 33895 - DNA, 60 bp, Artificial
  Synthetic oligonucleotide
gatgcttttctcatttggacccaagaatgttcctatttgatcagatttaaaagagcaggt

SEQ ID NO: 33896 - DNA, 60 bp, Artificial
  Synthetic oligonucleotide
tggacccaagaatgttcctatttgatcagatttaaaagagcaggtgtccatcatcagcct

SEQ ID NO: 33897 - DNA, 60 bp, Artificial
  Synthetic oligonucleotide
caaaaggtagacatcagggacgaacaaaagcgaagccagacctagacagtagacaagtag

SEQ ID NO: 33898 - DNA, 60 bp, Artificial
  Synthetic oligonucleotide
ggcatatctataaccattttaagcttaccgaccagaaaatctttctccatatacagctta

SEQ ID NO: 33899 - DNA, 60 bp, Artificial
  Synthetic oligonucleotide
cacagtttctaactgggatgtctacttttgcaattaaactggacttatctccacaaagta

SEQ ID NO: 33900 - DNA, 60 bp, Artificial
  Synthetic oligonucleotide
tcaatccctatagcacactttgagcatccagagcacaccattttagcctctgaaaggaca

SEQ ID NO: 33901 - DNA, 60 bp, Artificial
  Synthetic oligonucleotide
gctgtttcgtgacagcaaatagcttatcagtactcatataatcattgtgtagatccactg

SEQ ID NO: 33902 - DNA, 60 bp, Artificial
  Synthetic oligonucleotide
atcattgtgtagatccactgacatgtcaagttgataataatctgtttgaataggtgacct

SEQ ID NO: 33903 - DNA, 60 bp, Artificial
  Synthetic oligonucleotide
tgcttgtgcaatggccacagatggatccttcattgattgctaaacagccaagctcttcac

SEQ ID NO: 33904 - DNA, 60 bp, Artificial
  Synthetic oligonucleotide
cacaattgcctgtgcatgtgaccaaataatctgctactgttgtatcaatttttgccgttg

SEQ ID NO: 33905 - DNA, 60 bp, Artificial
  Synthetic oligonucleotide
atgaattccattggggagtgcatagcatcatcgttaagcaaatatatcgatcctgtgtta

SEQ ID NO: 33906 - DNA, 60 bp, Artificial
  Synthetic oligonucleotide
ctctaagaaggacatagatgaggctataatgaacaaagttaagacagcaaatgggaaaca

SEQ ID NO: 33907 - DNA, 60 bp, Artificial
  Synthetic oligonucleotide
tcattttccacttgaattggtctttccctaaagaaaggaatacacctaagcagtgcatgc

SEQ ID NO: 33908 - DNA, 60 bp, Artificial
  Synthetic oligonucleotide
taagttatattgcaatcaatccctatagcacactttgagcatccagagcacaccatttta

SEQ ID NO: 33909 - DNA, 60 bp, Artificial
  Synthetic oligonucleotide
caaagtcagtttcactataagcataatgcctacatggaatagtgggaggagattcatgca

SEQ ID NO: 33910 - DNA, 60 bp, Artificial
  Synthetic oligonucleotide
gaacctactccagtgaattagatacaggtgagtcagatgtaggagacagttcagatgata

SEQ ID NO: 33911 - DNA, 60 bp, Artificial
  Synthetic oligonucleotide
caaagaacagcatcaaggtcactctactcgatcaaaacaaaatgactcgtgaagagaaga

SEQ ID NO: 33912 - DNA, 60 bp, Artificial
  Synthetic oligonucleotide
ctagactcatattgtgggttgtcccaactattcccgattcaaagaacagcatcaaggtca

SEQ ID NO: 33913 - DNA, 60 bp, Artificial
  Synthetic oligonucleotide
aacttgattttcttgaattctttttcatactggcaaatatcaaatatattagcagaattg

SEQ ID NO: 33914 - DNA, 60 bp, Artificial
  Synthetic oligonucleotide
ccagacaaccttacagaaagtcttgctacagttggggacttcagatccaccttcgggtcg

SEQ ID NO: 33915 - DNA, 60 bp, Artificial
  Synthetic oligonucleotide
ttgcaatcaccagacaaccttacagaaagtcttgctacagttggggacttcagatccacc

SEQ ID NO: 33916 - DNA, 60 bp, Artificial
  Synthetic oligonucleotide
ctctgttgaaaatactaaagattgcctaggcatcaaatttctaggtggaacatcatctgc

SEQ ID NO: 33917 - DNA, 60 bp, Artificial
  Synthetic oligonucleotide
aagagatggtccctgctgtgaaaacggaaaacaacaagagcattatagttagaaatgtct

SEQ ID NO: 33918 - DNA, 60 bp, Artificial
  Synthetic oligonucleotide
taggacaggagactgtgttgtgctcccatcgtttcttaagatccgtgacaatttctcttc

SEQ ID NO: 33919 - DNA, 60 bp, Artificial
  Synthetic oligonucleotide
ctgtatctatcttggattctttttaactggacattgtcgtctacctgattcaaaaggtag

SEQ ID NO: 33920 - DNA, 60 bp, Artificial
  Synthetic oligonucleotide
gttgtgggttcctctttctcaatgaggtcttcagggtcgtctactctgtatctatcttgg

SEQ ID NO: 33921 - DNA, 60 bp, Artificial
  Synthetic oligonucleotide
gacagcaaatgggaaacaatatgtttctggcatagattctagtatcttgggaacctactc

SEQ ID NO: 33922 - DNA, 60 bp, Artificial
  Synthetic oligonucleotide
ggatggaactgataacgggatgccatctatagttatctgcggatgaccaaatgatgatcc

SEQ ID NO: 33923 - DNA, 60 bp, Artificial
  Synthetic oligonucleotide
ccttctctcaatctgttggctatctttaaactggttaagttgcctttaaaagaatgacct

SEQ ID NO: 33924 - DNA, 60 bp, Artificial
  Synthetic oligonucleotide
gaccaaatgatgatcctgaaaaatcacccaaatcagcaatattccctgtgagaattttct

SEQ ID NO: 33925 - DNA, 60 bp, Artificial
  Synthetic oligonucleotide
acaaaaaccagaaaattgctacttaacttggtgtttattataaactggaattgctggatt

SEQ ID NO: 33926 - DNA, 60 bp, Artificial
  Synthetic oligonucleotide
agttttgagcttgattgttgctcaccatacacagatctgagcctaaaacacaattgttta

SEQ ID NO: 33927 - DNA, 60 bp, Artificial
  Synthetic oligonucleotide
caagggagttacagccatttctgcatgcaaacaagttttgagcttgattgttgctcacca

SEQ ID NO: 33928 - DNA, 60 bp, Artificial
  Synthetic oligonucleotide
acagcactgcaactccatgtaaactcattttgagataaagtggatggaactgataacggg

SEQ ID NO: 33929 - DNA, 60 bp, Artificial
  Synthetic oligonucleotide
cagtgcatgcaacttaacctgacaagtgatgaaaagtatgctaaaggggtaagctttgca

SEQ ID NO: 33930 - DNA, 60 bp, Artificial
  Synthetic oligonucleotide
aagctttgcatcagttatgtattcgtgggtaaaaaacttctgtgatactcctattgcatc

SEQ ID NO: 33931 - DNA, 51 bp, Artificial
  Synthetic oligonucleotide
aaggtaattaaatctgctgctttgattgaagcatgtaagctaatgatacca

SEQ ID NO: 33932 - DNA, 60 bp, Artificial
  Synthetic oligonucleotide
ttgagttacagataagacacgtttatatatctaaagaaaaatcatagcctttctgaggag

SEQ ID NO: 33933 - DNA, 60 bp, Artificial
  Synthetic oligonucleotide
tcactaaaattactctaactaaatcaaagaaactaccgaagaaagaagctacccaattaa

SEQ ID NO: 33934 - DNA, 57 bp, Artificial
  Synthetic oligonucleotide
gaattattgtgtctcgatcaacctgaatgaactcatctacttgtatgtctactgtaa

SEQ ID NO: 33935 - DNA, 60 bp, Artificial
  Synthetic oligonucleotide
aacacttaggcacataattgatggaacaatactgtaaaactgagctatccctgtgattca

SEQ ID NO: 33936 - DNA, 60 bp, Artificial
  Synthetic oligonucleotide
aagaagtctgcattttatcagtcgtacctacgaagaacacaatctatggggatccagcta

SEQ ID NO: 33937 - DNA, 60 bp, Artificial
  Synthetic oligonucleotide
gatccagctagaccagaggattatcctcatgtacatgattgagtggggaaatgaggtcgt

SEQ ID NO: 33938 - DNA, 60 bp, Artificial
  Synthetic oligonucleotide
ataccatcatggcatctaaaaccgtaggaacagctgaagaaaagcttaaaaagaagtctg

SEQ ID NO: 33939 - DNA, 60 bp, Artificial
  Synthetic oligonucleotide
tatacaagttattgtcatgttaatctcacttactaattcacaattaaacattgcacttaa

SEQ ID NO: 33940 - DNA, 60 bp, Artificial
  Synthetic oligonucleotide
ttgcacttaactaacacttaggcacataattgatggaacaatactgtgaaactgagctat

SEQ ID NO: 33941 - DNA, 60 bp, Artificial
  Synthetic oligonucleotide
ccacttccacctgggtgatgatatggatcccgagctaaggcagttagctcaagctctcat

SEQ ID NO: 33942 - DNA, 60 bp, Artificial
  Synthetic oligonucleotide
aggcagttagctcaagctctcattgaccaaaaggtcaaagagatatctaaccaagagcca

SEQ ID NO: 33943 - DNA, 60 bp, Artificial
  Synthetic oligonucleotide
tacactgcaaagcaggcggtcagcagtgtcaacattggaggacaaattggcagagttcaa

SEQ ID NO: 33944 - DNA, 60 bp, Artificial
  Synthetic oligonucleotide
aactggtattgagcttgacgaccatcttaaggagaggtcaagcctccaatatggaaatgt

SEQ ID NO: 33945 - DNA, 60 bp, Artificial
  Synthetic oligonucleotide
atggaaatgtccttgatgtgaattccattgatatagaagaacctagtggccagacagctg

SEQ ID NO: 33946 - DNA, 60 bp, Artificial
  Synthetic oligonucleotide
gtccttgatgtgaattccattgatatagaagaacctagtggccagacagctgattggctt

SEQ ID NO: 33947 - DNA, 60 bp, Artificial
  Synthetic oligonucleotide
tagaatttgcactacctatcatcttgaaagccttgcatatgttgtcaactagagggaggc

SEQ ID NO: 33948 - DNA, 60 bp, Artificial
  Synthetic oligonucleotide
gcactacctatcatcttgaaagccttgcatatgttgtcaactagagggaggcaaactgta

SEQ ID NO: 33949 - DNA, 60 bp, Artificial
  Synthetic oligonucleotide
agagggaggcaaactgtaaaagagaataaggggacaaggatcaggttcaaagatgatagt

SEQ ID NO: 33950 - DNA, 60 bp, Artificial
  Synthetic oligonucleotide
gggaggcaaactgtaaaagagaataaggggacaaggatcaggttcaaagatgatagttcc

SEQ ID NO: 33951 - DNA, 60 bp, Artificial
  Synthetic oligonucleotide
cccggcagaagctcaaggaagctgaacggacggtggaggtggacccagatgacgttaaca

SEQ ID NO: 33952 - DNA, 60 bp, Artificial
  Synthetic oligonucleotide
ttgcccggcagaagctcaaggaagctgaacggacggtggaggtggacccagatgacgtta

SEQ ID NO: 33953 - DNA, 60 bp, Artificial
  Synthetic oligonucleotide
gacggtggaggtggacccagatgacgttaacaaaagtacactgcaaagcaggcggtcagc

SEQ ID NO: 33954 - DNA, 60 bp, Artificial
  Synthetic oligonucleotide
aaggaagctgaacggacggtggaggtggacccagatgacgttaacaaaagtacactgcaa

SEQ ID NO: 33955 - DNA, 60 bp, Artificial
  Synthetic oligonucleotide
gatgacgttaacaaaagtacactgcaaagcaggcggtcagcagtgtcaacattggaggac

SEQ ID NO: 33956 - DNA, 60 bp, Artificial
  Synthetic oligonucleotide
gctgaggaattaacaccagggagattcaggacaattgtttgtggactatttcctgcacag

SEQ ID NO: 33957 - DNA, 60 bp, Artificial
  Synthetic oligonucleotide
agatgatagttcctatgaagatgtgaatggcattagacgcccaaagcacctttatgtgtc

SEQ ID NO: 33958 - DNA, 60 bp, Artificial
  Synthetic oligonucleotide
cacatctgccagacatagatgcactagttgaacttgctgcctcaggggatccaacactgc

SEQ ID NO: 33959 - DNA, 60 bp, Artificial
  Synthetic oligonucleotide
cagtcctagatgaaacacatctgccagacatagatgcactagttgaacttgctgcctcag

SEQ ID NO: 33960 - DNA, 60 bp, Artificial
  Synthetic oligonucleotide
tgaagcagaatttctcagtagtattagggcctacctcatgaaccggcaagcagtcctaga

SEQ ID NO: 33961 - DNA, 60 bp, Artificial
  Synthetic oligonucleotide
attgggctgacaaagtaaaggcatttcttgaccagaaatgtccattcctaaaggctgagc

SEQ ID NO: 33962 - DNA, 60 bp, Artificial
  Synthetic oligonucleotide
agggatggcagaacttggcgcattttttgcaatcctacaggatatgcgaaataccatcat

SEQ ID NO: 33963 - DNA, 60 bp, Artificial
  Synthetic oligonucleotide
gctgcctcaggggatccaacactgccagactcacttgaaaatccacatgcagcttgggtc

SEQ ID NO: 33964 - DNA, 60 bp, Artificial
  Synthetic oligonucleotide
ggtacactgatatcagattggccactatagacgcacccttctctgacatcttcttcatca

SEQ ID NO: 33965 - DNA, 60 bp, Artificial
  Synthetic oligonucleotide
tcattcacccatgcattgatggtcccagaatctgcagactcatcaagaaaagcaagagca

SEQ ID NO: 33966 - DNA, 60 bp, Artificial
  Synthetic oligonucleotide
atctaggtcaataatcccagcaaagctggggtgcatcatggctcttgggtaggtcacgcc

SEQ ID NO: 33967 - DNA, 60 bp, Artificial
  Synthetic oligonucleotide
aatcccagcaaagctggggtgcatcatggctcttgggtaggtcacgccggcaatggcatc

SEQ ID NO: 33968 - DNA, 60 bp, Artificial
  Synthetic oligonucleotide
atgaacaatccatgagcgtcagcaatggtggccccagctccatttggcagatctaggtca

SEQ ID NO: 33969 - DNA, 60 bp, Artificial
  Synthetic oligonucleotide
gcgtcagcaatggtggccccagctccatttggcagatctaggtcaataatcccagcaaag

SEQ ID NO: 33970 - DNA, 60 bp, Artificial
  Synthetic oligonucleotide
ttctttttgtcctccctagtgaagaaccgtccactcatggcagccatgttgggcttttca

SEQ ID NO: 33971 - DNA, 60 bp, Artificial
  Synthetic oligonucleotide
ctgatgccaaaaccaggtcctcatcaataattccgactgctatgagtagcttctttttgt

SEQ ID NO: 33972 - DNA, 60 bp, Artificial
  Synthetic oligonucleotide
ccttaaccagttggacaatgcgctttgggtcaaacccttggtaagcaaactcattcaccc

SEQ ID NO: 33973 - DNA, 60 bp, Artificial
  Synthetic oligonucleotide
caatgcgctttgggtcaaacccttggtaagcaaactcattcacccatgcattgatggtcc

SEQ ID NO: 33974 - DNA, 60 bp, Artificial
  Synthetic oligonucleotide
aggtcacgccggcaatggcatccatagtggtcccagaaactggcagcgattctgacagaa

SEQ ID NO: 33975 - DNA, 58 bp, Artificial
  Synthetic oligonucleotide
gatggtcccagaatctgcagactcatcaagaaaagcaagagcaatgtcgcgataattc

SEQ ID NO: 33976 - DNA, 60 bp, Artificial
  Synthetic oligonucleotide
atatctcaaattactggtcaaggcctctggactctacagttcaaccattgaggagcaaat

SEQ ID NO: 33977 - DNA, 60 bp, Artificial
  Synthetic oligonucleotide
ggtcaaggcctctggactctacagttcaaccattgaggagcaaatagtggaaattcatag

SEQ ID NO: 33978 - DNA, 60 bp, Artificial
  Synthetic oligonucleotide
tttgaggagctcctgttcttgtctgagtttgatcctggatctattcagagatatctcaaa

SEQ ID NO: 33979 - DNA, 54 bp, Artificial
  Synthetic oligonucleotide
ctcccaggaaatgacatcctcggagacatatgtgtggttcaagcagcacgggtg

SEQ ID NO: 33980 - DNA, 60 bp, Artificial
  Synthetic oligonucleotide
atgtgtggttcaagcagcacgggtgactaaattggttgcaaaggcattctctaggatgac

SEQ ID NO: 33981 - DNA, 60 bp, Artificial
  Synthetic oligonucleotide
aggagcaaatagtggaaattcataggagagttctcctagaaggcaagaagcatggattaa

SEQ ID NO: 33982 - DNA, 60 bp, Artificial
  Synthetic oligonucleotide
cagcacgggtgactaaattggttgcaaaggcattctctaggatgaccagagactcccaac

SEQ ID NO: 33983 - DNA, 60 bp, Artificial
  Synthetic oligonucleotide
ctaggatgaccagagactcccaactgatgatatacttttcaataagcccagtggaattag

SEQ ID NO: 33984 - DNA, 60 bp, Artificial
  Synthetic oligonucleotide
cacaatacatgagtctgtgttgtccaatagacgatgccctaaggaagacaagagagtgac

SEQ ID NO: 33985 - DNA, 60 bp, Artificial
  Synthetic oligonucleotide
gtggaattagttctgagcaagcttgataggaaagatgacaagaaggctaaggcaaagggt

SEQ ID NO: 33986 - DNA, 60 bp, Artificial
  Synthetic oligonucleotide
gagactcccaactgatgatatacttttcaataagcccagtggaattagttctgagcaagc

SEQ ID NO: 33987 - DNA, 60 bp, Artificial
  Synthetic oligonucleotide
actgctctttccaccttctgggctaaagattggcccacaatacatgagtctgtgttgtcc

SEQ ID NO: 33988 - DNA, 60 bp, Artificial
  Synthetic oligonucleotide
gtctgtgttgtccaatagacgatgccctaaggaagacaagagagtgacaaagtggctgcc

SEQ ID NO: 33989 - DNA, 60 bp, Artificial
  Synthetic oligonucleotide
ccccttcccctaatcccagacccttaaccccatggcagcttacttacccaccttagcccg

SEQ ID NO: 33990 - DNA, 60 bp, Artificial
  Synthetic oligonucleotide
ccttcttccagtctctgccctttgctgttcctctctccttaaccagttggacaatgcgct

SEQ ID NO: 33991 - DNA, 60 bp, Artificial
  Synthetic oligonucleotide
catcatcttcacgtccttcttccagtctctgccctttgctgttcctctctccttaaccag

SEQ ID NO: 33992 - DNA, 60 bp, Artificial
  Synthetic oligonucleotide
cccaccttagcccgatacttctctgcgcttctcactactgctgatgccaaaaccaggtcc

SEQ ID NO: 33993 - DNA, 60 bp, Artificial
  Synthetic oligonucleotide
agcttacttacccaccttagcccgatacttctctgcgcttctcactactgctgatgccaa

SEQ ID NO: 33994 - DNA, 60 bp, Artificial
  Synthetic oligonucleotide
cagattggccactatagacgcacccttctctgacatcttcttcatcatagcctcaggctt

SEQ ID NO: 33995 - DNA, 60 bp, Artificial
  Synthetic oligonucleotide
agattccctaggttccccttcccctaatcccagacccttaaccccatggcagcttactta

SEQ ID NO: 33996 - DNA, 60 bp, Artificial
  Synthetic oligonucleotide
gatggtgtctctgccaggatttccctccttcagctggtacactgatatcagattggccac

SEQ ID NO: 33997 - DNA, 60 bp, Artificial
  Synthetic oligonucleotide
tctgacagaacgcgaagtgcctgaacggtccatggaacaaaagcagccgacactctagat

SEQ ID NO: 33998 - DNA, 60 bp, Artificial
  Synthetic oligonucleotide
cctcaggcttattccctctgacaaggttcagcacaatcatcatcttcacgtccttcttcc

SEQ ID NO: 33999 - DNA, 58 bp, Artificial
  Synthetic oligonucleotide
ttctggggccaggcatgattagtgctgttcgaactaggctttatgagccaacaatgag

SEQ ID NO: 34000 - DNA, 60 bp, Artificial
  Synthetic oligonucleotide
ccaacactctcacacttcctcatgaatggagaattccctgcagttctggggccaggcatg

SEQ ID NO: 34001 - DNA, 60 bp, Artificial
  Synthetic oligonucleotide
ttcttcatcatagcctcaggcttattccctctgacaaggttcagcacaatcatcatcttc

SEQ ID NO: 34002 - DNA, 60 bp, Artificial
  Synthetic oligonucleotide
ctgtgacctggacacctttgattttgaaaaggactgctctttaatcgagaatgggttccc

SEQ ID NO: 34003 - DNA, 60 bp, Artificial
  Synthetic oligonucleotide
gtcaagaccaacactctcacacttcctcatgaatggagaattccctgcagttctggggcc

SEQ ID NO: 34004 - DNA, 60 bp, Artificial
  Synthetic oligonucleotide
atcgagaatgggttccctatttacataaaaaattatgaggtagtatacaagtcaagacca

SEQ ID NO: 34005 - DNA, 60 bp, Artificial
  Synthetic oligonucleotide
ccagaactaataatagacttctagacagccatgcaatccagagctgtcatcctgaagcac

SEQ ID NO: 34006 - DNA, 60 bp, Artificial
  Synthetic oligonucleotide
cctgaagcacaagtctggttcaagccataagaggtctttacctagattctacatagactg

SEQ ID NO: 34007 - DNA, 60 bp, Artificial
  Synthetic oligonucleotide
atataacccgccatgaacaacaactggttgttgccagacaaaaacttaaggatgcagaaa

SEQ ID NO: 34008 - DNA, 60 bp, Artificial
  Synthetic oligonucleotide
tttctctgctcactaacaacaacattctacctcaacacaaaactacctcactttaactac

SEQ ID NO: 34009 - DNA, 60 bp, Artificial
  Synthetic oligonucleotide
aacccaccatggggggacatcaacaagtcaggccgttcaggaatagcacttgtcgctaca

SEQ ID NO: 34010 - DNA, 60 bp, Artificial
  Synthetic oligonucleotide
gggacatcaacaagtcaggccgttcaggaatagcactcgttgcaacaggccttgccaagc

SEQ ID NO: 34011 - DNA, 60 bp, Artificial
  Synthetic oligonucleotide
caacaagcttggaaacaagcttatcaattgaggcaccatggggtgcaataaatgtccaat

SEQ ID NO: 34012 - DNA, 60 bp, Artificial
  Synthetic oligonucleotide
ttaaaccaacagtatcgactgcaaacatagcactcagttggagctcagtggagcacaggg

SEQ ID NO: 34013 - DNA, 60 bp, Artificial
  Synthetic oligonucleotide
caacctttaaaccaacagtatcgactgcgaacatagcactcagttggagctcagtggagc

SEQ ID NO: 34014 - DNA, 60 bp, Artificial
  Synthetic oligonucleotide
ggaggtggacccggatgacgttaacaagagcacactacaaaatagacgggcagctgtgtc

SEQ ID NO: 34015 - DNA, 60 bp, Artificial
  Synthetic oligonucleotide
gaatttaatgatgtcgctgctaacaccagcagtacttttgacccagagattgcatacgtt

SEQ ID NO: 34016 - DNA, 60 bp, Artificial
  Synthetic oligonucleotide
gactgggcagtgaactggggtgttacactatcaatagagtgaagtcattcaagctgtgcg

SEQ ID NO: 34017 - DNA, 60 bp, Artificial
  Synthetic oligonucleotide
acttatatatatgcaagtagcatatatataagtacacaacatactacctcaacagactga

SEQ ID NO: 34018 - DNA, 60 bp, Artificial
  Synthetic oligonucleotide
ccctgcagctttcgatgcatgtgctttgaggatgatgctctgcattggaggtcctctgcc

SEQ ID NO: 34019 - DNA, 60 bp, Artificial
  Synthetic oligonucleotide
gagaacacaatcaatgggaatacaactggatcagaggataattgtgctcttcatggtagc

SEQ ID NO: 34020 - DNA, 53 bp, Artificial
  Synthetic oligonucleotide
gctaaatgggtgggtggtaggggacagcaaaaaaatagaagttagatcattta

SEQ ID NO: 34021 - DNA, 60 bp, Artificial
  Synthetic oligonucleotide
agaaagctctgctcagcactcccatgaagtggggaaagaagctctatgagctctttgcag

SEQ ID NO: 34022 - DNA, 60 bp, Artificial
  Synthetic oligonucleotide
gcaccaagaaaatgaagaaagctctgctcagcactcccatgaagtggggaaagaagctct

SEQ ID NO: 34023 - DNA, 60 bp, Artificial
  Synthetic oligonucleotide
tcaggcgaacacaatcaatgggaatacaactggaccaaaggattatagtgctctttatgg

SEQ ID NO: 34024 - DNA, 60 bp, Artificial
  Synthetic oligonucleotide
ctaggaaatgaactgttgtataaggcacctagaaaggccttagcaactgtctgtagtgcc

SEQ ID NO: 34025 - DNA, 60 bp, Artificial
  Synthetic oligonucleotide
tatgatgatggtgcaccacaatgtggcatttcatgctggtttgttaagtctggggagtgg

SEQ ID NO: 34026 - DNA, 60 bp, Artificial
  Synthetic oligonucleotide
gagttttacccactggttatcgacatgcaccgtgtgctaaaggatgggatggatgtcaac

SEQ ID NO: 34027 - DNA, 60 bp, Artificial
  Synthetic oligonucleotide
ctgtgcaagagagtgtgaggtcctctttgatgacataagaaactctccaacgcacagcac

SEQ ID NO: 34028 - DNA, 60 bp, Artificial
  Synthetic oligonucleotide
gttaagtgaaccctgtaagcttcttccagacacagcagcagttagcctccttggtggtcc

SEQ ID NO: 34029 - DNA, 57 bp, Artificial
  Synthetic oligonucleotide
gttgtgggtgggtttagttccaggctgccttaagtagctttttttgtatataaagat

SEQ ID NO: 34030 - DNA, 60 bp, Artificial
  Synthetic oligonucleotide
tctctcttactctctacctcagtgtacttatatatatgcaagtagcatatatataagtac

SEQ ID NO: 34031 - DNA, 54 bp, Artificial
  Synthetic oligonucleotide
ggctgttccagggttgctctcactcaatagctttacagctgatttaaacatttc

SEQ ID NO: 34032 - DNA, 59 bp, Artificial
  Synthetic oligonucleotide
atggtcattggtgaatcaagtgaagtgtacacactagatgaattgcctgatgatatggt

SEQ ID NO: 34033 - DNA, 60 bp, Artificial
  Synthetic oligonucleotide
ctaacgtttgtcactcctattagtgctatggtcattggtgaatcaagtgaagtgtacaca

SEQ ID NO: 34034 - DNA, 60 bp, Artificial
  Synthetic oligonucleotide
tgtgggttagtttaccacccatttactgagtgtgggacacattgtgtttgtggtgcaagg

SEQ ID NO: 34035 - DNA, 60 bp, Artificial
  Synthetic oligonucleotide
gtgtgggttagtttaccacccatttaccgagtgtgggacacattgtgtttgtggtgcaag

SEQ ID NO: 34036 - DNA, 60 bp, Artificial
  Synthetic oligonucleotide
acagcagttctcatactaacgtttgtcactcctattagtgctatggtcattggtgaatca

SEQ ID NO: 34037 - DNA, 60 bp, Artificial
  Synthetic oligonucleotide
gacagcaattcttatactaacatttgttactcctattagtgctatggtcattggtgaatc

SEQ ID NO: 34038 - DNA, 60 bp, Artificial
  Synthetic oligonucleotide
caaactgacaacacaaaccactttgaggttgctggtactacagttaaatcagggtggttc

SEQ ID NO: 34039 - DNA, 60 bp, Artificial
  Synthetic oligonucleotide
cccatcaaaggaggcagtgacagaagtttgcctaaaagatgacgtgagcatgataaagac

SEQ ID NO: 34040 - DNA, 60 bp, Artificial
  Synthetic oligonucleotide
tgtgtgggttagtttaccacccatttaccgagtgtgggacacattgtgtttgtggtgcaa

SEQ ID NO: 34041 - DNA, 60 bp, Artificial
  Synthetic oligonucleotide
gacaacacaaatcactttgaagttgctggtactacagttaaatcagggtggttcaagagt

SEQ ID NO: 34042 - DNA, 60 bp, Artificial
  Synthetic oligonucleotide
agcaaaacccatcaaaggaggcagtgacagaagtttgcctaaaagatgacgtgagcatga

SEQ ID NO: 34043 - DNA, 60 bp, Artificial
  Synthetic oligonucleotide
gcaaaacccatcaaaggaggcagtgacagaagtttgcctaaaggatgacgtgagcatgat

SEQ ID NO: 34044 - DNA, 60 bp, Artificial
  Synthetic oligonucleotide
agtagtgtactaccaagcatagaaaacgttcaaatcttaacttattccaaatatggaagt

SEQ ID NO: 34045 - DNA, 61 bp, Artificial
  Synthetic oligonucleotide
gtagtgtactaccaagcatagaaaacgttcaaatcttaacttattccaaatatggaagtcc

SEQ ID NO: 34046 - DNA, 60 bp, Artificial
  Synthetic oligonucleotide
aatatcagtgctagatattccaatgataaaaaggatgccggatgagatatctgggtcact

SEQ ID NO: 34047 - DNA, 52 bp, Artificial
  Synthetic oligonucleotide
aggacttatttgcgatctcatgattttggtgcatgtgtcgtttatccaaatc

SEQ ID NO: 34048 - DNA, 60 bp, Artificial
  Synthetic oligonucleotide
caggcaatgcacatgtgggcaatttgaggatgttactgggttgatggtgcataagaaatc

SEQ ID NO: 34049 - DNA, 60 bp, Artificial
  Synthetic oligonucleotide
caggcaatgtacatgtgggcaatttgaggatgttactgggttaatggtgcataagaaatc

SEQ ID NO: 34050 - DNA, 60 bp, Artificial
  Synthetic oligonucleotide
gcagaaagtatggcccgaaaagataacaggtctatgacacattttgccttagagataaag

SEQ ID NO: 34051 - DNA, 60 bp, Artificial
  Synthetic oligonucleotide
ccagcatataaatacataactgtggaaggtattgaaactgttgaagggatagaaaatgct

SEQ ID NO: 34052 - DNA, 51 bp, Artificial
  Synthetic oligonucleotide
ggacttatttgcgatctcatgattttggtgcatgtgtcgtttatccaaatc

SEQ ID NO: 34053 - DNA, 60 bp, Artificial
  Synthetic oligonucleotide
tatattgcagaaagtatggcccgaaaagataacaggtctatgacacattttgccttagag

SEQ ID NO: 34054 - DNA, 60 bp, Artificial
  Synthetic oligonucleotide
ggaaggtgttgaaactgttgaagggatagaaaatgcttttatagaatctgaaattcctgc

SEQ ID NO: 34055 - DNA, 60 bp, Artificial
  Synthetic oligonucleotide
tgaagggatagaaaatgcttttatagaatctgaaatccctgcactagctggaacagctat

SEQ ID NO: 34056 - DNA, 60 bp, Artificial
  Synthetic oligonucleotide
ttactatacataccacagtagaagcaagttgccctatagtgacagactgtgtttcattcc

SEQ ID NO: 34057 - DNA, 60 bp, Artificial
  Synthetic oligonucleotide
ctatacataccacagtagaagcaagttgccctatagtgacagactgggtttcattccatg

SEQ ID NO: 34058 - DNA, 60 bp, Artificial
  Synthetic oligonucleotide
tctgtaacacaaatattgatgcgtctatgactatagtggattccaagccaatcctagagc

SEQ ID NO: 34059 - DNA, 60 bp, Artificial
  Synthetic oligonucleotide
gggatagaaaatgcttttatagaatctgaaatccctgcactagctggaacagctattggt

SEQ ID NO: 34060 - DNA, 60 bp, Artificial
  Synthetic oligonucleotide
cagctattggttttaaaataaactcgagggagggcaactacctaatggatgtaataggct

SEQ ID NO: 34061 - DNA, 60 bp, Artificial
  Synthetic oligonucleotide
atgaaaagtgcacaggaccctgcccagctataatagatcataaagaaggctggttaactt

SEQ ID NO: 34062 - DNA, 60 bp, Artificial
  Synthetic oligonucleotide
cccacctataatagatcataaagaaggctggttaacctttgcaaaagaaagaactagcac

SEQ ID NO: 34063 - DNA, 60 bp, Artificial
  Synthetic oligonucleotide
gcttgcggttctctgatttctacaatgtcggagaattcccataccgagtcggacttggag

SEQ ID NO: 34064 - DNA, 60 bp, Artificial
  Synthetic oligonucleotide
gattactttcctgtgatatctgttgatttgcagagtggtcgtcgtgtcgtgtcagtggag

SEQ ID NO: 34065 - DNA, 60 bp, Artificial
  Synthetic oligonucleotide
gattactttcctgtgatatctgttgatttgcagagtggtcgtcatgttgtgtcagtggag

SEQ ID NO: 34066 - DNA, 60 bp, Artificial
  Synthetic oligonucleotide
gattactttcctgtgatatctgttgatttgcagagtggtcgtcgtgttgtgtcagtggag

SEQ ID NO: 34067 - DNA, 60 bp, Artificial
  Synthetic oligonucleotide
agcaaagacagaggtcctccaatgcatagcattaatctcaaagctgtcatgtcaaacttt

SEQ ID NO: 34068 - DNA, 60 bp, Artificial
  Synthetic oligonucleotide
gcagactagcaagcaaagacagaggtcctccaatgcatagcattagtctcaaagctgtca

SEQ ID NO: 34069 - DNA, 60 bp, Artificial
  Synthetic oligonucleotide
cgtctagtaaattagcagattaatctaaataaaagtcctctaggaggcaaataatgacct

SEQ ID NO: 34070 - DNA, 58 bp, Artificial
  Synthetic oligonucleotide
cagcttcagttcttttaaatgtccaatcattaggaccaacattatccccagatgcaac

SEQ ID NO: 34071 - DNA, 60 bp, Artificial
  Synthetic oligonucleotide
attctttattcctaattgctctttcttgacattctgaaaataggccaaaggcaggacaac

SEQ ID NO: 34072 - DNA, 60 bp, Artificial
  Synthetic oligonucleotide
ataatgacctagatactctggatcagattggccaacatcaccctttcgggttttattgta

SEQ ID NO: 34073 - DNA, 60 bp, Artificial
  Synthetic oligonucleotide
gagctctcacccattccatcaactacaagagaagatttgaaagcctgttccatgaattgc

SEQ ID NO: 34074 - DNA, 60 bp, Artificial
  Synthetic oligonucleotide
ctcttagaagagctctcacccattccatcaactacaagagaggatttgaaagcctgttcc

SEQ ID NO: 34075 - DNA, 60 bp, Artificial
  Synthetic oligonucleotide
aagaatgaatggaagttaaatccttcggttgattcctctgtttctatttcaacttccgac

SEQ ID NO: 34076 - DNA, 60 bp, Artificial
  Synthetic oligonucleotide
acttgtagttgccagatttgcaagctgcataaacttgctttctgctttttagaatagtta

SEQ ID NO: 34077 - DNA, 60 bp, Artificial
  Synthetic oligonucleotide
cggaaagtttgtatcatacaatgaagactctgaaggcaatgtttatgtgctaaacaaaac

SEQ ID NO: 34078 - DNA, 65 bp, Artificial
  Synthetic oligonucleotide
cacggtatcaaattcattacaacaaacaatcagactaaaacaagaaatactatttcaggcatggc

SEQ ID NO: 34079 - DNA, 65 bp, Artificial
  Synthetic oligonucleotide
cgaggtatcaaattcattacaacaaacaatcagactaaaacaagaaatactatttcaggcatggc

SEQ ID NO: 34080 - DNA, 60 bp, Artificial
  Synthetic oligonucleotide
agagcaatcgaggtatcaaattcattacaacaaacaatcagactaaaacaagaaatacta

SEQ ID NO: 34081 - DNA, 60 bp, Artificial
  Synthetic oligonucleotide
gaagaagctttactcttagaagagctctcacccattccatcaactacaagagaggatttg

SEQ ID NO: 34082 - DNA, 59 bp, Artificial
  Synthetic oligonucleotide
ggttcaaaggataaaaaagctgtaaatgattgttatgctgtattcaatggtgaaggcac

SEQ ID NO: 34083 - DNA, 60 bp, Artificial
  Synthetic oligonucleotide
gcatagcaattctggagttaagtcagcatttagcataaatgagctgggaagaaatgaaga

SEQ ID NO: 34084 - DNA, 60 bp, Artificial
  Synthetic oligonucleotide
ggccaaaggcaggacaacagggcagagcgaatgcagactagcaagcaaagacagaggtcc

SEQ ID NO: 34085 - DNA, 60 bp, Artificial
  Synthetic oligonucleotide
cagttcttttaaatgtccaatcattaggaccaacattatccccagatgcaactatctttt

SEQ ID NO: 34086 - DNA, 60 bp, Artificial
  Synthetic oligonucleotide
gttaagatagacggaaagtttgtatcatacaatgaagactctgaaggcaatgtttatgtg

SEQ ID NO: 34087 - DNA, 60 bp, Artificial
  Synthetic oligonucleotide
gcttagcaacggtagacatggtgtttacttaggaaacgtgtactttgacttgctgatgtt

SEQ ID NO: 34088 - DNA, 60 bp, Artificial
  Synthetic oligonucleotide
gtgattgtgtacaagctgtatgataaagaaacagaactgaagaaggctaagatagacgga

SEQ ID NO: 34089 - DNA, 56 bp, Artificial
  Synthetic oligonucleotide
gattcctctgtttctatttcaacttccgacttgccaccactaagaagttcttggat

SEQ ID NO: 34090 - DNA, 60 bp, Artificial
  Synthetic oligonucleotide
caaaaaacctgtgattgtgtacaagctgtatgataaagaaacagaactgaagaaggctaa

SEQ ID NO: 34091 - DNA, 60 bp, Artificial
  Synthetic oligonucleotide
gcattaaaagtattggtgaaaggcttggacttgttgatttcgttgtgagcgagcctaatt

SEQ ID NO: 34092 - DNA, 60 bp, Artificial
  Synthetic oligonucleotide
agcaacggtagacatggtgtttacttaggaaacgtgtactctgacttgctgatgttgaat

SEQ ID NO: 34093 - DNA, 60 bp, Artificial
  Synthetic oligonucleotide
agcacaaaaattgcattaaaagtattggtgaaaggcttggacttgttgatttcgttgtga

SEQ ID NO: 34094 - DNA, 60 bp, Artificial
  Synthetic oligonucleotide
ctcacccattccatcaactacaagagaagatttgaaagcctgttccatgaattgcacctg

SEQ ID NO: 34095 - DNA, 60 bp, Artificial
  Synthetic oligonucleotide
ggatttgaaagcctgttccatgaattgcacctgttcattataaatcttcagggatatgcc

SEQ ID NO: 34096 - DNA, 60 bp, Artificial
  Synthetic oligonucleotide
agtcagccaagattttcacacaacttttgaaaagttcatcaaattctttcttgaaggtca

SEQ ID NO: 34097 - DNA, 60 bp, Artificial
  Synthetic oligonucleotide
tcaaattctttcttgaaggtcatattgctagcagacataacgcgagcaattttgcagatc

SEQ ID NO: 34098 - DNA, 60 bp, Artificial
  Synthetic oligonucleotide
ggtcatattgctagcagacataacgcgagcaattttgcagatctgctcatatgtagagaa

SEQ ID NO: 34099 - DNA, 60 bp, Artificial
  Synthetic oligonucleotide
gcagatctgctcatatgtagagaaattctttattcctaattgctctttcttgacattctg

SEQ ID NO: 34100 - DNA, 60 bp, Artificial
  Synthetic oligonucleotide
gcagattaatctaaataaaagtcctctaggaggcaaataatgacctagatactctggatc

SEQ ID NO: 34101 - DNA, 60 bp, Artificial
  Synthetic oligonucleotide
agaaggctaagatagacggaaagtttgtatcatacaatgaagactctgaaggaaatgttt

SEQ ID NO: 34102 - DNA, 60 bp, Artificial
  Synthetic oligonucleotide
ctggtgagaaattggtgactgtaaaaccaaaatgtatcaatgttcctaccgctcttccca

SEQ ID NO: 34103 - DNA, 60 bp, Artificial
  Synthetic oligonucleotide
actccaacagacaaaggtttatctctctctgaagaagaattcttcaaagcaactaaaatc

SEQ ID NO: 34104 - DNA, 60 bp, Artificial
  Synthetic oligonucleotide
catgttttgaatgtcattgtgaggaaacacgatgtcagcaacattggatgcaagttctct

SEQ ID NO: 34105 - DNA, 60 bp, Artificial
  Synthetic oligonucleotide
gtgaggaaacacgatgtcagcaacattggatgcaaattctctcagcataatctgatcttc

SEQ ID NO: 34106 - DNA, 60 bp, Artificial
  Synthetic oligonucleotide
gtcattgtgaggaaacacgatgtcagcaacattggatgcaagttctctcagcataatctg

SEQ ID NO: 34107 - DNA, 60 bp, Artificial
  Synthetic oligonucleotide
gagttaagtcagcatttagcataaatgagctgggaagaaatgaagatatgaagattcagg

SEQ ID NO: 34108 - DNA, 60 bp, Artificial
  Synthetic oligonucleotide
ggaagttaaatccttcggttgattcctctgtttctatttcaacttccgacttcccaccac

SEQ ID NO: 34109 - DNA, 60 bp, Artificial
  Synthetic oligonucleotide
gaaatgaagatatgaagattcaggaagctgaaacattgactacattgcatgatcagaaat

SEQ ID NO: 34110 - DNA, 52 bp, Artificial
  Synthetic oligonucleotide
aacagaccaccttgatcttaaaaacttccaccaagacaatcgaatcaaattt

SEQ ID NO: 34111 - DNA, 60 bp, Artificial
  Synthetic oligonucleotide
ccaagagcacaaaaattgcattaaaagtattggtgaaaggcttggacttgttgatttcat

SEQ ID NO: 34112 - DNA, 57 bp, Artificial
  Synthetic oligonucleotide
agtcacaatatagggtgactttccctggtgttcttgaagatctagcttattcaagat

SEQ ID NO: 34113 - DNA, 50 bp, Artificial
  Synthetic oligonucleotide
ggtgttcttgaagatctagcttattcaagatcttacctggtcccttttgg

SEQ ID NO: 34114 - DNA, 60 bp, Artificial
  Synthetic oligonucleotide
gatttgattctagaacaataagtgatagagaaaatgagcagaccaccttgatcttaaaaa

SEQ ID NO: 34115 - DNA, 60 bp, Artificial
  Synthetic oligonucleotide
ggtgactgtaaaaccaaaatgtatcaatgttcctaccgctcttcccaacagattgttacc

SEQ ID NO: 34116 - DNA, 60 bp, Artificial
  Synthetic oligonucleotide
gtcagtctttgagccaggatctgaagtcacaatatagggtgactttccctggtgttcttg

SEQ ID NO: 34117 - DNA, 61 bp, Artificial
  Synthetic oligonucleotide
gtgttaatactgaaatgtggaaaagcatgtttaatctccatgagcatattcttctcttagg

SEQ ID NO: 34118 - DNA, 60 bp, Artificial
  Synthetic oligonucleotide
atcatttccatcttggtgatgatatggaccctgaactaaggcagctagctcaatccctga

SEQ ID NO: 34119 - DNA, 60 bp, Artificial
  Synthetic oligonucleotide
atcatttccatcttggtgatgatatggaccctgaactaaggcagctagctcaatccctaa

SEQ ID NO: 34120 - DNA, 60 bp, Artificial
  Synthetic oligonucleotide
gcttctgctttcgcattgctaacctacaacaagactacctcacccactacccctccccta

SEQ ID NO: 34121 - DNA, 60 bp, Artificial
  Synthetic oligonucleotide
ttcattcctggcttgcttctgctttcgcattgctaacctacaacaagactacctcaccca

SEQ ID NO: 34122 - DNA, 60 bp, Artificial
  Synthetic oligonucleotide
tttcattcctggcttgcttctgctttcgcattgctaacctacaacaagactacctcaccc

SEQ ID NO: 34123 - DNA, 60 bp, Artificial
  Synthetic oligonucleotide
ttgcaacaccccattcagtctgggtgtttgcatgtgcacctgaccggtgccctccgactg

SEQ ID NO: 34124 - DNA, 60 bp, Artificial
  Synthetic oligonucleotide
ggacagactgctgattggaaggctataggagcatatatcttagggtttgcaattccgatc

SEQ ID NO: 34125 - DNA, 60 bp, Artificial
  Synthetic oligonucleotide
cgagtggacagactgctgattggaaggctataggagcatacatcttagggtttgcaattc

SEQ ID NO: 34126 - DNA, 60 bp, Artificial
  Synthetic oligonucleotide
gggagtaattggatttggcttctttgtaaaggactggatggatcggatagaggaattcct

SEQ ID NO: 34127 - DNA, 60 bp, Artificial
  Synthetic oligonucleotide
ggacagactgctgattggaaggctataggagcatacatcttagggtttgcaattccgatc

SEQ ID NO: 34128 - DNA, 60 bp, Artificial
  Synthetic oligonucleotide
ccttgtttacagaaattgcaacaccccattcagtctgggtgtttgcatgtgcacctgacc

SEQ ID NO: 34129 - DNA, 60 bp, Artificial
  Synthetic oligonucleotide
gaaccgagtggacagactgctgattggaaggctataggagcatatatcttagggtttgca

SEQ ID NO: 34130 - DNA, 60 bp, Artificial
  Synthetic oligonucleotide
caacaagatgtattttctgaatagacaaagacaagtcaatgaatctaaggttcaagacat

SEQ ID NO: 34131 - DNA, 60 bp, Artificial
  Synthetic oligonucleotide
tgtgaatcacttccatcttggtgatgatatggaccctgaactcaggcagctagcacaatc

SEQ ID NO: 34132 - DNA, 60 bp, Artificial
  Synthetic oligonucleotide
tattatgtcattggatgtaaatttcgttcttggcttgcttctgctttcgcattgctaacc

SEQ ID NO: 34133 - DNA, 60 bp, Artificial
  Synthetic oligonucleotide
gtcattggatgtaaatttcgttcttggcttgcttctgctttcgcattgctaacctacaac

SEQ ID NO: 34134 - DNA, 60 bp, Artificial
  Synthetic oligonucleotide
ggatgtaaatttcgttcttggcttgcttctgctttcgcattgctaacctacaacacaact

SEQ ID NO: 34135 - DNA, 60 bp, Artificial
  Synthetic oligonucleotide
gggaatgtcctggatgttaattcaattgatttggaagaaccgagtggacagactgctgat

SEQ ID NO: 34136 - DNA, 60 bp, Artificial
  Synthetic oligonucleotide
cctggatgttaactcaatcgatttggaagaaccgagtggacagactgctgattggaaggc

SEQ ID NO: 34137 - DNA, 60 bp, Artificial
  Synthetic oligonucleotide
tatgggaatgtcctggatgttaactcaattgatttggaagaaccgagtggacagactgct

SEQ ID NO: 34138 - DNA, 60 bp, Artificial
  Synthetic oligonucleotide
caatccctgattgacaccaaggtgaaggagatctccaaccaagagccacttaagttgtaa

SEQ ID NO: 34139 - DNA, 60 bp, Artificial
  Synthetic oligonucleotide
ccctgattgacaccaaggtgaaggagatctccaaccaagagccacttaagttgtaagtgc

SEQ ID NO: 34140 - DNA, 60 bp, Artificial
  Synthetic oligonucleotide
ggaagaaccgagtggacagactgctgattggaaggctataggagcatatatcttagggtt

SEQ ID NO: 34141 - DNA, 60 bp, Artificial
  Synthetic oligonucleotide
aagactttccgggcttgtgccacatattaatcatctcaggacctatccttaatgtgatta

SEQ ID NO: 34142 - DNA, 60 bp, Artificial
  Synthetic oligonucleotide
gactttccgggcttgtgccacatattaatcatctcaggacctatccttaatgtgattaat

SEQ ID NO: 34143 - DNA, 60 bp, Artificial
  Synthetic oligonucleotide
cgggcttgtgccacatattaatcatctcaggacctatccttaatgtgattaatagggttt

SEQ ID NO: 34144 - DNA, 60 bp, Artificial
  Synthetic oligonucleotide
atattatgtcattggatgtaaatttcgttcttggcttgcttctgctttcgcattgctaac

SEQ ID NO: 34145 - DNA, 60 bp, Artificial
  Synthetic oligonucleotide
cctacaacacaactacctcatccacaaaccctcccctattctacctcaacacatactacc

SEQ ID NO: 34146 - DNA, 60 bp, Artificial
  Synthetic oligonucleotide
cctacaacataactacctcatccacaaaccctcccctattctacctcaacacatactacc

SEQ ID NO: 34147 - DNA, 60 bp, Artificial
  Synthetic oligonucleotide
gaaagactttccgggcttgtgccacatattaatcatctcaggacctatccttaatgtgat

SEQ ID NO: 34148 - DNA, 60 bp, Artificial
  Synthetic oligonucleotide
aatcagctgtgaagctattgagtgagagcaaccctggaacagccagctctatctcactca

SEQ ID NO: 34149 - DNA, 60 bp, Artificial
  Synthetic oligonucleotide
catggataaggctttcagtgctaatctgtctgtggatgattatggtgaacattcaaagaa

SEQ ID NO: 34150 - DNA, 51 bp, Artificial
  Synthetic oligonucleotide
ttttgtccagcattaaaggccttgcaccgatcatcttcccattggcttatt

SEQ ID NO: 34151 - DNA, 53 bp, Artificial
  Synthetic oligonucleotide
ttctcaaatagattaaagtttgttttaaagtacatatatctatttcctatcaa

SEQ ID NO: 34152 - DNA, 60 bp, Artificial
  Synthetic oligonucleotide
cagtgctaatctgtctgtggatgattatggtgaacattcaaagaaaagctccaaacctag

SEQ ID NO: 34153 - DNA, 60 bp, Artificial
  Synthetic oligonucleotide
gaatgaagctgctaggcaggaaatgtatgcaaaggtgatggaattaccactagtagctgc

SEQ ID NO: 34154 - DNA, 60 bp, Artificial
  Synthetic oligonucleotide
atggaattaccactagtagctgcttatgggttgaatgtgcctacttcatatgattcttgt

SEQ ID NO: 34155 - DNA, 60 bp, Artificial
  Synthetic oligonucleotide
cagctgctgaggttggtccagacgattggactttcaagaggacagaagccctgataagag

SEQ ID NO: 34156 - DNA, 60 bp, Artificial
  Synthetic oligonucleotide
tagagaaaagcaagaatgaagctgctaggcaggaaatgtatgcaaaggtgatggaattac

SEQ ID NO: 34157 - DNA, 60 bp, Artificial
  Synthetic oligonucleotide
catgaggaaggtcttacgccagaggtatggacagctgactgcagaggaatggatgacatc

SEQ ID NO: 34158 - DNA, 60 bp, Artificial
  Synthetic oligonucleotide
gcacacaatcaatggggatacaactggaccagaggataattgttatgtttatggttgcct

SEQ ID NO: 34159 - DNA, 60 bp, Artificial
  Synthetic oligonucleotide
gatccaacagggcttgagcctgatgaccatctgaaggagaagtcttccttacggtatggc

SEQ ID NO: 34160 - DNA, 59 bp, Artificial
  Synthetic oligonucleotide
cccggaaaaagatggatactaagcctgctgacccgactgggattgagcctgatgaccac

SEQ ID NO: 34161 - DNA, 60 bp, Artificial
  Synthetic oligonucleotide
ttaatgccgcaaaagccaaagctgctctcgctcgtaagccggagaggaaggctagtccta

SEQ ID NO: 34162 - DNA, 60 bp, Artificial
  Synthetic oligonucleotide
ggttgaggtaaagggctgtacttggaatgatggtgacgcaatgtacctggggtttgctgc

SEQ ID NO: 34163 - DNA, 60 bp, Artificial
  Synthetic oligonucleotide
ggctgaggtaaagggctgtacttggaatgatggtgatgcaatgtacctggggtttgctgc

SEQ ID NO: 34164 - DNA, 60 bp, Artificial
  Synthetic oligonucleotide
ggctgaggtaaagggctgtacttggaatgatggtgacgcaatgtacctggggtttgctgc

SEQ ID NO: 34165 - DNA, 60 bp, Artificial
  Synthetic oligonucleotide
ggctgtacttggaatgatggtgacgcaatgtacctggggtttgctgctggtgctgagatg

SEQ ID NO: 34166 - DNA, 60 bp, Artificial
  Synthetic oligonucleotide
gcagtacttttgacccagaggtcgcatatgctaactttaagcgtatccacaccaatgggc

SEQ ID NO: 34167 - DNA, 60 bp, Artificial
  Synthetic oligonucleotide
tctatcaatcatacctcaggcgcacacaatcaatgggaatacaactggaccagaggataa

SEQ ID NO: 34168 - DNA, 60 bp, Artificial
  Synthetic oligonucleotide
gcactacagcttggtcattgaccacttaggtaatctgctgctctgtatgtttattgttag

SEQ ID NO: 34169 - DNA, 60 bp, Artificial
  Synthetic oligonucleotide
tcaattggaatccgctattgttcgagtcttctacatcaatgctgcgaaggtcaaagctta

SEQ ID NO: 34170 - DNA, 60 bp, Artificial
  Synthetic oligonucleotide
agtcctccgccaacgctatggaacaatgactgctgaagaatggatgactcagaaaatacc

SEQ ID NO: 34171 - DNA, 60 bp, Artificial
  Synthetic oligonucleotide
ggctagtgtcctcaaactagctgaagctagtgctcaaattgtcatgccccttgctgaggt

SEQ ID NO: 34172 - DNA, 60 bp, Artificial
  Synthetic oligonucleotide
gcaaggctagtgtcctcaaactagctgaagctagtgctcaaattgtcatgccccttgctg

SEQ ID NO: 34173 - DNA, 60 bp, Artificial
  Synthetic oligonucleotide
cacaggatgtcaggatatctagcacgctggattgctgatacatgcaaggctagtgtcctc

SEQ ID NO: 34174 - DNA, 60 bp, Artificial
  Synthetic oligonucleotide
taaaggctgctttcaattctgttggacaacttgcctgggctaaatctggattctctcctg

SEQ ID NO: 34175 - DNA, 60 bp, Artificial
  Synthetic oligonucleotide
agaaaataccagaaataaaggctgctttcaattctgttggacaacttgcctgggctaaat

SEQ ID NO: 34176 - DNA, 60 bp, Artificial
  Synthetic oligonucleotide
cctccgccaacgctatggaacaatgactgctgaagaatggatgactcagaaaataccaga

SEQ ID NO: 34177 - DNA, 60 bp, Artificial
  Synthetic oligonucleotide
tacacttcacaggatgtcaggatatctagcacgctggattgctgatacatgcaaggctag

SEQ ID NO: 34178 - DNA, 60 bp, Artificial
  Synthetic oligonucleotide
tttgcatcctgatatatagccaagacaacactgatcatctcaaagctatcaactgaagca

SEQ ID NO: 34179 - DNA, 60 bp, Artificial
  Synthetic oligonucleotide
ttgcatcctgatatatagccaagacaacactgatcatctcaaagctatcaactgaagcaa

SEQ ID NO: 34180 - DNA, 60 bp, Artificial
  Synthetic oligonucleotide
ccttcgatatggaaatgtccttgatgtgaatgctattgacatcgatgagccaagtggaca

SEQ ID NO: 34181 - DNA, 60 bp, Artificial
  Synthetic oligonucleotide
gcacacttcaaagcagatgggcagctgtgtcagcattggaggacaaactggcagatttca

SEQ ID NO: 34182 - DNA, 60 bp, Artificial
  Synthetic oligonucleotide
tgttgtcagctagcacagtgtgtaagttgcagagttgcacacacggtgtgccaggtgatc

SEQ ID NO: 34183 - DNA, 60 bp, Artificial
  Synthetic oligonucleotide
tgcatgtacaaaaagtgttgtcagctagcacagtgtgtaagttgcagagttgcacacacg

SEQ ID NO: 34184 - DNA, 60 bp, Artificial
  Synthetic oligonucleotide
tgcatgtacaaaaagtgctatcggcaagcacagtgtgtaagttgcagagttgcacacatg

SEQ ID NO: 34185 - DNA, 60 bp, Artificial
  Synthetic oligonucleotide
gatgcatgtacaaaaagtgttgtcagctagcacagtgtgtaagttgcagagttgcacaca

SEQ ID NO: 34186 - DNA, 60 bp, Artificial
  Synthetic oligonucleotide
atagaagattttctagcctctgagtgcccttttttacctaaacccaagaatccttcagag

SEQ ID NO: 34187 - DNA, 60 bp, Artificial
  Synthetic oligonucleotide
ccaagtggccagacagcagactggaaggcaattggggcttacatcttgggttttgcaatc

SEQ ID NO: 34188 - DNA, 60 bp, Artificial
  Synthetic oligonucleotide
gggaatgtgctggatgtcaaccctatcgatcttgaagagccaagtggccagacagcagac

SEQ ID NO: 34189 - DNA, 60 bp, Artificial
  Synthetic oligonucleotide
gccaatcccatgcccacccccgagcctctattttttcactcccagggttatatctcacac

SEQ ID NO: 34190 - DNA, 60 bp, Artificial
  Synthetic oligonucleotide
cttaaagctgtgaacagctattgggtgatcccacccacgtagcccccgcggccaatccca

SEQ ID NO: 34191 - DNA, 60 bp, Artificial
  Synthetic oligonucleotide
agactacctcacccacaacccttccctttttctacctcaacacatactacctcaaattga

SEQ ID NO: 34192 - DNA, 60 bp, Artificial
  Synthetic oligonucleotide
acatgctgtcctggggtaaagaggctgtgaaccatttccatctgggtgatgatatggatc

SEQ ID NO: 34193 - DNA, 60 bp, Artificial
  Synthetic oligonucleotide
cataattttgtacatgctgtcctggggtaaagaggctgtgaaccatttccatctgggtga

SEQ ID NO: 34194 - DNA, 60 bp, Artificial
  Synthetic oligonucleotide
gataccaaggttaaggagatttcaaaccaaggacccttaaagctgtgaacagctattggg

SEQ ID NO: 34195 - DNA, 60 bp, Artificial
  Synthetic oligonucleotide
gctcagtcattgattgataccaaggttaaggagatttcaaaccaaggacccttaaagctg

SEQ ID NO: 34196 - DNA, 60 bp, Artificial
  Synthetic oligonucleotide
cactgagatatgggaatgtgctggatgtcaaccctatcgatcttgaagagccaagtggcc

SEQ ID NO: 34197 - DNA, 60 bp, Artificial
  Synthetic oligonucleotide
agttgatccaacagggattgagcctgatgaccatctaaaggaaaaatcgtcactgagata

SEQ ID NO: 34198 - DNA, 53 bp, Artificial
  Synthetic oligonucleotide
acaggtgcccaccaactgcattatatgtagctgggttacctgaattgggtgcc

SEQ ID NO: 34199 - DNA, 60 bp, Artificial
  Synthetic oligonucleotide
tgctgaagctgagtcagcaaccttattcaaagagattgccagtccacattctgtatgggt

SEQ ID NO: 34200 - DNA, 60 bp, Artificial
  Synthetic oligonucleotide
ggcatttatggcaactaacaaagcttacttcctcaacagacaaaagcaagttgatgagtc

SEQ ID NO: 34201 - DNA, 60 bp, Artificial
  Synthetic oligonucleotide
aaaagcaagttgatgagtctcaagttcccgatatagtagatttaattgaccatgctgaag

SEQ ID NO: 34202 - DNA, 60 bp, Artificial
  Synthetic oligonucleotide
ggaatgagcaacctccaagaattacaggaaaacatcaccgcacacgaacaacagctcgtg

SEQ ID NO: 34203 - DNA, 60 bp, Artificial
  Synthetic oligonucleotide
tccttcagaggcatttatggcaactaacaaagcttacttcctcaacagacaaaagcaagt

SEQ ID NO: 34204 - DNA, 60 bp, Artificial
  Synthetic oligonucleotide
agcagttgatgtggacccagatgaagttaacaagagcacattacaaggtagacgggcggc

SEQ ID NO: 34205 - DNA, 60 bp, Artificial
  Synthetic oligonucleotide
aagtgaaagcccggaatatcattagtccagtcatgggggtgattggttttggcttctttg

SEQ ID NO: 34206 - DNA, 60 bp, Artificial
  Synthetic oligonucleotide
catgctgaagctgagtcagcaaccttattcaaagagattgccagtccacattctgtatgg

SEQ ID NO: 34207 - DNA, 60 bp, Artificial
  Synthetic oligonucleotide
gagtctcaagttcccgatatagtagatttaattgaccatgctgaagctgagtcagcaacc

SEQ ID NO: 34208 - DNA, 54 bp, Artificial
  Synthetic oligonucleotide
tataataactcccagggtccactgcccctcgccccctggtcatatcgcacactc

SEQ ID NO: 34209 - DNA, 60 bp, Artificial
  Synthetic oligonucleotide
ttcatccccatattgtagtttatgtttaaatagtttaactccgtttacgtgctcacggtt

SEQ ID NO: 34210 - DNA, 60 bp, Artificial
  Synthetic oligonucleotide
tagtttatgtttaaatagtttaactccgtttacgtgctcacggttccgcctcagcctgcc

SEQ ID NO: 34211 - DNA, 60 bp, Artificial
  Synthetic oligonucleotide
gctcacggttccgcctcagcctgccatgaatccccatgattggatcgcaccagactcagg

SEQ ID NO: 34212 - DNA, 60 bp, Artificial
  Synthetic oligonucleotide
ctcacggttccgcctcagcctgccatgaatccccatgattggatcgcaccagactcaggt

SEQ ID NO: 34213 - DNA, 60 bp, Artificial
  Synthetic oligonucleotide
cagactcaggtaatatcactcattatgctgttgcaattttagaaaagtatacctgccata

SEQ ID NO: 34214 - DNA, 60 bp, Artificial
  Synthetic oligonucleotide
tcactcattatgctgttgcaattttagaaaagtatacctgccatatgtccagatctacta

SEQ ID NO: 34215 - DNA, 60 bp, Artificial
  Synthetic oligonucleotide
acctgccatatgtccagatctactaaaccatgatattatcatgactcggatgtaaatttc

SEQ ID NO: 34216 - DNA, 60 bp, Artificial
  Synthetic oligonucleotide
tgtaaatttcatccctgctttgcagctttgcattgtactaatcttcaacaagactacctc

SEQ ID NO: 34217 - DNA, 60 bp, Artificial
  Synthetic oligonucleotide
ccctgctttgcagctttgcattgtactaatcttcaacaagactacctcacccacaaccct

SEQ ID NO: 34218 - DNA, 60 bp, Artificial
  Synthetic oligonucleotide
cacctggaaggttcaggactattgcatgtgggttattccctgcacaagtgaaagcccgga

SEQ ID NO: 34219 - DNA, 60 bp, Artificial
  Synthetic oligonucleotide
aaaaagcagttgatgtggacccagatgaagttaacaagagcacattacaaggtagacggg

SEQ ID NO: 34220 - DNA, 59 bp, Artificial
  Synthetic oligonucleotide
gaaggcagacagtgaaagacaacaagggcactaggataaggttcaaggatgattcatcc

SEQ ID NO: 34221 - DNA, 60 bp, Artificial
  Synthetic oligonucleotide
gataacacctggaaggttcaggactattgcatgtgggttattccctgcacaagtgaaagc

SEQ ID NO: 34222 - DNA, 60 bp, Artificial
  Synthetic oligonucleotide
gtggccagacagcagactggaaggcaattggggcttacatcttgggttttgcaatcccta

SEQ ID NO: 34223 - DNA, 60 bp, Artificial
  Synthetic oligonucleotide
gcaatccctattatactaaaggccttatatatgctgtcaacccgtggaaggcagacagtg

SEQ ID NO: 34224 - DNA, 60 bp, Artificial
  Synthetic oligonucleotide
ctagttgcagtgagctccttgtgcattttactgctagctagtgttctgagggctctcaaa

SEQ ID NO: 34225 - DNA, 60 bp, Artificial
  Synthetic oligonucleotide
ttggtggatcctttccctgttgtgcagaacttgctccaaaagactgaacaaacgggcaga

SEQ ID NO: 34226 - DNA, 60 bp, Artificial
  Synthetic oligonucleotide
acactctgcttgaaagttaaaaaatcgtgaagtccccctattccccatccccctctaccc

SEQ ID NO: 34227 - DNA, 60 bp, Artificial
  Synthetic oligonucleotide
gactgaacaaacgggcagagcgactaaaggagagcatccactccctggaagaaggactga

SEQ ID NO: 34228 - DNA, 60 bp, Artificial
  Synthetic oligonucleotide
catctctgtaacagcctccagtcagaggtgctctactagctcagatggagtgaactcctg

SEQ ID NO: 34229 - DNA, 60 bp, Artificial
  Synthetic oligonucleotide
gatggagtgaactcctgttttgtcagcactagctctctgcttcaggtcagtcctaagggg

SEQ ID NO: 34230 - DNA, 60 bp, Artificial
  Synthetic oligonucleotide
ggcctgagtccgaagtcagggtctggatgggatccttttggttggttcaaagcctcctgg

SEQ ID NO: 34231 - DNA, 60 bp, Artificial
  Synthetic oligonucleotide
cggtgccctaactctgagagtcagctaactataagaggagaactgatctatcttttcaat

SEQ ID NO: 34232 - DNA, 60 bp, Artificial
  Synthetic oligonucleotide
ggctacacaacatattatgaggtgaagaacacgcttgaaaagtccataaggacaatgcat

SEQ ID NO: 34233 - DNA, 60 bp, Artificial
  Synthetic oligonucleotide
gggactgtgtctctgataattggagtggtgatcatatacatggtgttcacactctgcttg

SEQ ID NO: 34234 - DNA, 60 bp, Artificial
  Synthetic oligonucleotide
ggttcaaagcctcctggttgagagcaatttgggccatcctgggtgggactgtgtctctga

SEQ ID NO: 34235 - DNA, 60 bp, Artificial
  Synthetic oligonucleotide
tctatcccaggatgctttcaacatctatgaatgctcagaatggtcataccggataaatgt

SEQ ID NO: 34236 - DNA, 60 bp, Artificial
  Synthetic oligonucleotide
acattaaagcttggtgtcccagactctatccctcatggtctgattagcttgtctagcgtg

SEQ ID NO: 34237 - DNA, 60 bp, Artificial
  Synthetic oligonucleotide
cagagtgctttggggaggatctacacggcacaaagttccacacagtctgcaacagaagga

SEQ ID NO: 34238 - DNA, 60 bp, Artificial
  Synthetic oligonucleotide
gcttgtctagcgtgtcccaaccgccagccatagcatactcagagtgctttggggaggatc

SEQ ID NO: 34239 - DNA, 60 bp, Artificial
  Synthetic oligonucleotide
catgctggttttgtagagcaaattgggccaacattcactgcttttctaaagagcaggttc

SEQ ID NO: 34240 - DNA, 60 bp, Artificial
  Synthetic oligonucleotide
tacactctaggcagaataggggagatacagtgccccaccaaagctgatgccctggcagtc

SEQ ID NO: 34241 - DNA, 60 bp, Artificial
  Synthetic oligonucleotide
gagcaaaggacaaggaattcaagatcccatttaagatggcagacaggctctcagattcac

SEQ ID NO: 34242 - DNA, 60 bp, Artificial
  Synthetic oligonucleotide
ctgcaaagtagaccacattttggtgatagtcaggcacttctacccagaccattaccaggc

SEQ ID NO: 34243 - DNA, 60 bp, Artificial
  Synthetic oligonucleotide
agactccagcaacgcaacctggcagagagaccagcctgacacgcaccgattgtcaaggct

SEQ ID NO: 34244 - DNA, 60 bp, Artificial
  Synthetic oligonucleotide
accgattgtcaaggctggatgctcatgtcatgtcaatgttaggggttggttcacacattg

SEQ ID NO: 34245 - DNA, 59 bp, Artificial
  Synthetic oligonucleotide
acagaattcacatgctcatatgcaaaggctgactgcaactgcaagagaaaccaggtttc

SEQ ID NO: 34246 - DNA, 60 bp, Artificial
  Synthetic oligonucleotide
acacaaagacggctaacatggtaaggacatatctcttgcttttgctcctgtgcgggccag

SEQ ID NO: 34247 - DNA, 60 bp, Artificial
  Synthetic oligonucleotide
tgacgacgccatttgccaatctgattacagcagtcctgaggcaatgccagaccatgagac

SEQ ID NO: 34248 - DNA, 60 bp, Artificial
  Synthetic oligonucleotide
gggccagcaacgcctttcttcaatcacctgatggatgtgacccgtcgcttactagactcc

SEQ ID NO: 34249 - DNA, 60 bp, Artificial
  Synthetic oligonucleotide
agagatcagtaacagtgcagcaaccttgcatggattgcgaaagtgactgcaaagtagacc

SEQ ID NO: 34250 - DNA, 60 bp, Artificial
  Synthetic oligonucleotide
ggtttctggggtggcagtagtgcataccaagcacggctccttcatgccagagtgtatggg

SEQ ID NO: 34251 - DNA, 60 bp, Artificial
  Synthetic oligonucleotide
gagctactgtgttgagcagtgtggcggagccctttgtcaatgcttcaacatgaggccctc

SEQ ID NO: 34252 - DNA, 60 bp, Artificial
  Synthetic oligonucleotide
ctccggagtggggtcatgaagaggagttgatggctcagctaggctggagctactgtgttg

SEQ ID NO: 34253 - DNA, 60 bp, Artificial
  Synthetic oligonucleotide
ggagcctgcaagggagaggcctgctctgagtttaagataaacgattattctccggagtgg

SEQ ID NO: 34254 - DNA, 60 bp, Artificial
  Synthetic oligonucleotide
attgggtccccagggtaacccataggtgcatagggaccaggcgatgccatctcatgggag

SEQ ID NO: 34255 - DNA, 60 bp, Artificial
  Synthetic oligonucleotide
caagaccactgacatcaagctggagtgtgtcaggcgagatctgtattgggtccccagggt

SEQ ID NO: 34256 - DNA, 60 bp, Artificial
  Synthetic oligonucleotide
ggaattcaagatcccatttaagatggcagacaggctctcagattcacacttcgagatacg

SEQ ID NO: 34257 - DNA, 60 bp, Artificial
  Synthetic oligonucleotide
tgcttcaacatgaggccctcttgcttctacttgaggaaaacattttctcatctatcccag

SEQ ID NO: 34258 - DNA, 60 bp, Artificial
  Synthetic oligonucleotide
attgccatccactgtaggttcagtcactttctggccaacagaaaccagtgttgaggcagc

SEQ ID NO: 34259 - DNA, 60 bp, Artificial
  Synthetic oligonucleotide
gccctggcagtctctaagagatgcattagcagcgactccataattttctccaaggtccac

SEQ ID NO: 34260 - DNA, 60 bp, Artificial
  Synthetic oligonucleotide
ctgaggcaatgccagaccatgagacacatctttgcaggatcgggccattgcacatccagc

SEQ ID NO: 34261 - DNA, 60 bp, Artificial
  Synthetic oligonucleotide
cctctgccgcacgacgccgctggagcattcattactaagtggtgttatccagggtggtcc

SEQ ID NO: 34262 - DNA, 60 bp, Artificial
  Synthetic oligonucleotide
ggtggtccttagcagtgcccgtgaataccatatttgttgttccatgtagccgtgtctttg

SEQ ID NO: 34263 - DNA, 60 bp, Artificial
  Synthetic oligonucleotide
cagtgttgaggcagccatccctgacttggcatctgccaccatgttaatcaggttagatgg

SEQ ID NO: 34264 - DNA, 60 bp, Artificial
  Synthetic oligonucleotide
aagtgtagcccaagattcttatcattatcaggctgttacaactgtgaggctggagcaaag

SEQ ID NO: 34265 - DNA, 60 bp, Artificial
  Synthetic oligonucleotide
ccctctacccctttcccttatccccccctcatcctctaagagggtgagggcctctgccgc

SEQ ID NO: 34266 - DNA, 60 bp, Artificial
  Synthetic oligonucleotide
cacacattgatgaagtcagtgtcaatcacagccagcacctccacaactttaggtcctaca

SEQ ID NO: 34267 - DNA, 60 bp, Artificial
  Synthetic oligonucleotide
tcaagcgcctgaaatgtaatgaaaaccagactctgtccaaggattgtgcctcttgcatag

SEQ ID NO: 34268 - DNA, 60 bp, Artificial
  Synthetic oligonucleotide
gtgaagagggaaggaggactttaaccatgatggatcccaaatcaggaaagttcaagcgcc

SEQ ID NO: 34269 - DNA, 60 bp, Artificial
  Synthetic oligonucleotide
cagaccattaccaggcatgtctgggctccacatgtctcactggtcgagcaaaggacaagg

SEQ ID NO: 34270 - DNA, 60 bp, Artificial
  Synthetic oligonucleotide
tgagcatctggtctatgacgacgccatttgccaatctgattacagcagtcctgaggcaat

SEQ ID NO: 34271 - DNA, 60 bp, Artificial
  Synthetic oligonucleotide
ccaaggattgtgcctcttgcatagaaaagaagtcctccatcatgaagagtgagcatctgg

SEQ ID NO: 34272 - DNA, 60 bp, Artificial
  Synthetic oligonucleotide
tcagattcacacttcgagatacgtatctgggataaggagaggtccaacgaatatttctta

SEQ ID NO: 34273 - DNA, 60 bp, Artificial
  Synthetic oligonucleotide
gaatctaggtgtgagtcagttgatgcctgtgctgccattacatgctggttttgtagagca

SEQ ID NO: 34274 - DNA, 60 bp, Artificial
  Synthetic oligonucleotide
ctctccttgcacaatgatctgatccaacaccatttcaggccactaagtaacatgccacat

SEQ ID NO: 34275 - DNA, 60 bp, Artificial
  Synthetic oligonucleotide
cctggttaaatccattggttatcacaagttggcagcaaatagagaagttatcgagtcaag

SEQ ID NO: 34276 - DNA, 52 bp, Artificial
  Synthetic oligonucleotide
gtgaaattgtactttttgggtttgacctcattcaaggaccgcatctaatgaa

SEQ ID NO: 34277 - DNA, 60 bp, Artificial
  Synthetic oligonucleotide
aaagtataggtgctagaattggattggtagatgtggttagaggtgatcccaactacaact

SEQ ID NO: 34278 - DNA, 60 bp, Artificial
  Synthetic oligonucleotide
agagcatctctccagcctgttggaaagaatcaatctctatgcaacatttttatgttgggg

SEQ ID NO: 34279 - DNA, 60 bp, Artificial
  Synthetic oligonucleotide
ggagatattgcctaagtctctgtcaacactgacatacttgaagagcatctctccagcctg

SEQ ID NO: 34280 - DNA, 60 bp, Artificial
  Synthetic oligonucleotide
caagaccttggagatattgcctaagtctctgtcaacactgacatacttgaagagcatctc

SEQ ID NO: 34281 - DNA, 60 bp, Artificial
  Synthetic oligonucleotide
cctctaagaggcacaaatggcataaattgttttgttgggattgctggtgtgaaattgtac

SEQ ID NO: 34282 - DNA, 60 bp, Artificial
  Synthetic oligonucleotide
gcctaaaattggtcgataattgtgctaaattaacttcatatctatttagtgtgtgagtgt

SEQ ID NO: 34283 - DNA, 51 bp, Artificial
  Synthetic oligonucleotide
tatgttggggaacaagagggagaaagttcttcaggttcagatctggctgaa

SEQ ID NO: 34284 - DNA, 60 bp, Artificial
  Synthetic oligonucleotide
ggtgccaaaccgggaagactagataacaatggcaaaggtcctccaatgcaaagcattagt

SEQ ID NO: 34285 - DNA, 60 bp, Artificial
  Synthetic oligonucleotide
cttaacattttggaagtaagctaaaggaaagcaaactggtgccaaaccgggaagactaga

SEQ ID NO: 34286 - DNA, 60 bp, Artificial
  Synthetic oligonucleotide
caagctgttctttcttaacattttggaagtaagctaaaggaaagcaaactggtgccaaac

SEQ ID NO: 34287 - DNA, 58 bp, Artificial
  Synthetic oligonucleotide
gtcagcaaactccacacttgcagcagaaagcactttagccactttgcatatctgctca

SEQ ID NO: 34288 - DNA, 53 bp, Artificial
  Synthetic oligonucleotide
atggctccagctgttccagggctactgtctccaagcaattttacggtgctatc

SEQ ID NO: 34289 - DNA, 60 bp, Artificial
  Synthetic oligonucleotide
ccatctgcttcaactggctgttgtacttgtggagagaaatggctccagctgttccagggc

SEQ ID NO: 34290 - DNA, 60 bp, Artificial
  Synthetic oligonucleotide
tgaatgcagcttccatctgcttcaactggctgttgtacttgtggagagaaatggctccag

SEQ ID NO: 34291 - DNA, 60 bp, Artificial
  Synthetic oligonucleotide
gagttttgtccaaaatcatctacattcaacttggcattgaatgcagcttccatctgcttc

SEQ ID NO: 34292 - DNA, 60 bp, Artificial
  Synthetic oligonucleotide
aagcattagtctaagtgctgcataatggaattcagctggcacattcagaccatatgctac

SEQ ID NO: 34293 - DNA, 60 bp, Artificial
  Synthetic oligonucleotide
gcgttccaaatgtgtctgctctgactaacagaatccttcctctacctacagtaaaagcta

SEQ ID NO: 34294 - DNA, 60 bp, Artificial
  Synthetic oligonucleotide
ttggagggagaaccttccaagagagaagatcatttctgtaaaacagaaatgcgttccaaa

SEQ ID NO: 34295 - DNA, 60 bp, Artificial
  Synthetic oligonucleotide
gttctagcttctcgtcagaggttggatatagatgtaaaatcacaatacagagtttcattc

SEQ ID NO: 34296 - DNA, 60 bp, Artificial
  Synthetic oligonucleotide
gtgtctgctctgactaacagaatccttcctctacctacagtaaaagctatccagatagct

SEQ ID NO: 34297 - DNA, 60 bp, Artificial
  Synthetic oligonucleotide
ggtatgtcgatgagtgcaagaaacatgatttctatatctcaaacagtggagatataagct

SEQ ID NO: 34298 - DNA, 60 bp, Artificial
  Synthetic oligonucleotide
tacgggtttccagtcatgggaaagacgacgtcttattggagggagaaccttccaagagag

SEQ ID NO: 34299 - DNA, 60 bp, Artificial
  Synthetic oligonucleotide
gatataagcttggattacgggtttccagtcatgggaaagacgacgtcttattggagggag

SEQ ID NO: 34300 - DNA, 60 bp, Artificial
  Synthetic oligonucleotide
agtttcattccctggaattcaagatgaaggtgcatttaccagaactttctgcatccccat

SEQ ID NO: 34301 - DNA, 60 bp, Artificial
  Synthetic oligonucleotide
gcttctcgtcagaggttggatatagatgtaaaatcacaatacagagtttcattccctgga

SEQ ID NO: 34302 - DNA, 60 bp, Artificial
  Synthetic oligonucleotide
caaaacctatgggactaaggacagtcggtctgtaaatgactgctattcagtctattctgg

SEQ ID NO: 34303 - DNA, 60 bp, Artificial
  Synthetic oligonucleotide
aactacaacttgatgatagctcgagagatggtatctgttcatactaactttgctcttaag

SEQ ID NO: 34304 - DNA, 60 bp, Artificial
  Synthetic oligonucleotide
tgctgcataatggaattcagctggcacattcagaccatatgctacaaccaatggaagttc

SEQ ID NO: 34305 - DNA, 60 bp, Artificial
  Synthetic oligonucleotide
gatagctcgagagatggtatctgttcatactaactttgctcttaagctgtcagagtctct

SEQ ID NO: 34306 - DNA, 60 bp, Artificial
  Synthetic oligonucleotide
tgagctttgctctaataaatgcttcagtcctcttaaatgtccagtctgtcgctgacactt

SEQ ID NO: 34307 - DNA, 60 bp, Artificial
  Synthetic oligonucleotide
taaatgcttcagtcctcttaaatgtccagtctgtcgctgacacttcatcggtggtagcaa

SEQ ID NO: 34308 - DNA, 60 bp, Artificial
  Synthetic oligonucleotide
cccagagtctgttcttctgaatctatctccacatctgcttttcctccagcaagcagatct

SEQ ID NO: 34309 - DNA, 60 bp, Artificial
  Synthetic oligonucleotide
gcatccccatggataacacagctcgaattatttgcttctatgcaaaaacatctgttgatt

SEQ ID NO: 34310 - DNA, 60 bp, Artificial
  Synthetic oligonucleotide
ctttgatcttttgttgtgttaaacctctgacgttagacatggtgtcaattaggaagctga

SEQ ID NO: 34311 - DNA, 60 bp, Artificial
  Synthetic oligonucleotide
gaattggattggtagatgtggttagaggtgatcccaactacaacttgatgatagctcgag

SEQ ID NO: 34312 - DNA, 60 bp, Artificial
  Synthetic oligonucleotide
agatcactaagctaccagaaagattcttcaggtaacatctattttctctccaagaccttg

SEQ ID NO: 34313 - DNA, 60 bp, Artificial
  Synthetic oligonucleotide
gaagctgaagtcatcaactctcttcattcatacaactactttgagaaattcggtctcgac

SEQ ID NO: 34314 - DNA, 60 bp, Artificial
  Synthetic oligonucleotide
cccaatgaggacactttagcaaaaactccgggagttatttctgaagaagacttttatgag

SEQ ID NO: 34315 - DNA, 60 bp, Artificial
  Synthetic oligonucleotide
gcctttagtgtcaatgatctggcgagaaatgaagacgtcaaaatccatgaagctgaagtc

SEQ ID NO: 34316 - DNA, 60 bp, Artificial
  Synthetic oligonucleotide
cgtcaaaatccatgaagctgaagtcatcaactctcttcattcatacaactactttgagaa

SEQ ID NO: 34317 - DNA, 60 bp, Artificial
  Synthetic oligonucleotide
ggaactggaatcaacttcctcaatttgttcatgcataccaatacaggtataaaatcagcc

SEQ ID NO: 34318 - DNA, 60 bp, Artificial
  Synthetic oligonucleotide
acaggtataaaatcagcctttagtgtcaatgatctggcgagaaatgaagacgtcaaaatc

SEQ ID NO: 34319 - DNA, 60 bp, Artificial
  Synthetic oligonucleotide
gggactaaggacagtcggtctgtaaatgactgctattcagtctattctggaactggaatc

SEQ ID NO: 34320 - DNA, 60 bp, Artificial
  Synthetic oligonucleotide
catatgctacaaccaatggaagttccattgccttagtatacatcagtttttttgtagctt

SEQ ID NO: 34321 - DNA, 60 bp, Artificial
  Synthetic oligonucleotide
tctattctggaactggaatcaacttcctcaatttgttcatgcataccaatacaggtataa

SEQ ID NO: 34322 - DNA, 60 bp, Artificial
  Synthetic oligonucleotide
tcaagatgtatgacaaagagctcaactttgaaacatatgatctatctggaagatcactaa

SEQ ID NO: 34323 - DNA, 60 bp, Artificial
  Synthetic oligonucleotide
gagatctctaagatcaagctgaaagggttgacaccttttggatggtatgtcgatgagtgc

SEQ ID NO: 34324 - DNA, 60 bp, Artificial
  Synthetic oligonucleotide
ccctggaattcaagatgaaggtgcatttaccagaactttctgcatccccatggataacac

SEQ ID NO: 34325 - DNA, 60 bp, Artificial
  Synthetic oligonucleotide
aagcagatctttgatcttttgttgtgttaaacctctgacgttagacatggtgtcaattag

SEQ ID NO: 34326 - DNA, 60 bp, Artificial
  Synthetic oligonucleotide
cagcaatcaaatatccatttacaacttctgccaattgaaaagtaaccagtatgtctgtcc

SEQ ID NO: 34327 - DNA, 60 bp, Artificial
  Synthetic oligonucleotide
gcagcaatcaaatatccatttacaacttctgccaagtgaaaagtaaccagtatgtctcgc

SEQ ID NO: 34328 - DNA, 60 bp, Artificial
  Synthetic oligonucleotide
agagcaatcagtgcagcaatcaaatatccatttacaacttctgccaattgaaaagtaacc

SEQ ID NO: 34329 - DNA, 60 bp, Artificial
  Synthetic oligonucleotide
agagcaatcggtgcagcaatcaaatatccatttacaacttctgccaagtgaaaagtaacc

SEQ ID NO: 34330 - DNA, 60 bp, Artificial
  Synthetic oligonucleotide
ttgattcaggctacttttctgctaggtgctatccgagagcatcaaactcaggattgcagc

SEQ ID NO: 34331 - DNA, 60 bp, Artificial
  Synthetic oligonucleotide
ccatccacagagcatactcattgagcacaaaggaacaataattggcaagcaaaatgacac

SEQ ID NO: 34332 - DNA, 60 bp, Artificial
  Synthetic oligonucleotide
accaggcaaagctctagctgcagcagcacctgccctatcaacgctgtcacatggtttgct

SEQ ID NO: 34333 - DNA, 60 bp, Artificial
  Synthetic oligonucleotide
ggcttctgttttgtctcaaatgttgcagaagaactagaggactgttgaaatacaagcacc

SEQ ID NO: 34334 - DNA, 60 bp, Artificial
  Synthetic oligonucleotide
gacctgctctgggtgttatgcctgcagctctggcatctcctgcaaagttagaatccatgt

SEQ ID NO: 34335 - DNA, 60 bp, Artificial
  Synthetic oligonucleotide
ggtaacctgctgaggggagacaaggttaatggacactcaattcacaagatagaaccacat

SEQ ID NO: 34336 - DNA, 60 bp, Artificial
  Synthetic oligonucleotide
gcaagcacagtttgcaagctacagagctgcacacacggtgtgccgggcgattttcaggtc

SEQ ID NO: 34337 - DNA, 60 bp, Artificial
  Synthetic oligonucleotide
accaggagtgtcaagtgacagaaactgaatgcctctgcccgtatgaggccatggtactca

SEQ ID NO: 34338 - DNA, 60 bp, Artificial
  Synthetic oligonucleotide
gtctgtgaatctgtccctgttaatgcaatagatgctgaaatgcatgagcttaattgcagt

SEQ ID NO: 34339 - DNA, 53 bp, Artificial
  Synthetic oligonucleotide
tctgcagaatgtcaaaccacccaaaaactaccatggcatttctgttctggttc

SEQ ID NO: 34340 - DNA, 60 bp, Artificial
  Synthetic oligonucleotide
attaacacaagaagaagattctgaaggtctgcttgagtggtgcacacgggtgctggaaca

SEQ ID NO: 34341 - DNA, 60 bp, Artificial
  Synthetic oligonucleotide
aattgttctagatgtctgtgattccagctgtgagctgatgatacccaagggcactggaga

SEQ ID NO: 34342 - DNA, 60 bp, Artificial
  Synthetic oligonucleotide
gccactcttcctggatagcacagccaagggaatgaaaagcctgttgaactccacgagctt

SEQ ID NO: 34343 - DNA, 60 bp, Artificial
  Synthetic oligonucleotide
gttcaggttacatgacgcacttagcaacaccgagcctgcccagaccacttcacctacagc

SEQ ID NO: 34344 - DNA, 60 bp, Artificial
  Synthetic oligonucleotide
cctacaagctatgcgagaacagtgcctcagggaaaagctgtgaaatagatagcatcccag

SEQ ID NO: 34345 - DNA, 60 bp, Artificial
  Synthetic oligonucleotide
gcgagaccggcatatggtgctggcgaggtcactgttctagtggaggttgcagacttggag

SEQ ID NO: 34346 - DNA, 60 bp, Artificial
  Synthetic oligonucleotide
catgctggctgtctgtaaacgtatgtgctttagagcaaccattgaggcaagcaataaggc

SEQ ID NO: 34347 - DNA, 58 bp, Artificial
  Synthetic oligonucleotide
cggtggggtcgaaacaaactccagctcaacacaagccatccagacgccaccagtcacc

SEQ ID NO: 34348 - DNA, 60 bp, Artificial
  Synthetic oligonucleotide
gtgactgtccagagagatgcggctgcacttcgtcaacctgcttacataaagagtggccac

SEQ ID NO: 34349 - DNA, 60 bp, Artificial
  Synthetic oligonucleotide
actatttctgcaatatgggggactggccttcatgcacatacactggagtgacacagcata

SEQ ID NO: 34350 - DNA, 60 bp, Artificial
  Synthetic oligonucleotide
gctggtaaaatggaaagtggaatatataaagacagaagctatagtgtgtgtcgagctgac

SEQ ID NO: 34351 - DNA, 60 bp, Artificial
  Synthetic oligonucleotide
gagggtcacggcacatggagatactccccagctagacctaaaagcgagaccggcatatgg

SEQ ID NO: 34352 - DNA, 60 bp, Artificial
  Synthetic oligonucleotide
ggtagatcagagtcaatcatgaaattagaagaaagaacaggagtcagctggaatctgggt

SEQ ID NO: 34353 - DNA, 60 bp, Artificial
  Synthetic oligonucleotide
aacactccaggtccaaaattatctaatctcaagaccattaactgcataaacctgaaagtg

SEQ ID NO: 34354 - DNA, 60 bp, Artificial
  Synthetic oligonucleotide
ttggtttcgatatcaccagtccaatctgcaccggtaggcaaagagagggcaatcgagacc

SEQ ID NO: 34355 - DNA, 60 bp, Artificial
  Synthetic oligonucleotide
gtccgaaaagggcagtcggctttgaggcagtataaaacagaaataaggattgggcagaca

SEQ ID NO: 34356 - DNA, 60 bp, Artificial
  Synthetic oligonucleotide
ggaaagaataccttggctggtgagaaagctccttcaagtatcagagtcaacaggaatggc

SEQ ID NO: 34357 - DNA, 60 bp, Artificial
  Synthetic oligonucleotide
tgcagaaattcatgaggacagttacggtgggcctggtgagaaaataacaatctgcaatgg

SEQ ID NO: 34358 - DNA, 60 bp, Artificial
  Synthetic oligonucleotide
gtcaccactgcccaaacgacagagacgaaaaagcacacaaccctggaccccagcacctcg

SEQ ID NO: 34359 - DNA, 60 bp, Artificial
  Synthetic oligonucleotide
aatagcatcagcagcgaccgcagccaaagagattacaaccaaaaatagcccgccaacagc

SEQ ID NO: 34360 - DNA, 60 bp, Artificial
  Synthetic oligonucleotide
ccaaccccacagccccagaggcttcccccaagattcaaacaacacaaaaccaacagaccg

SEQ ID NO: 34361 - DNA, 60 bp, Artificial
  Synthetic oligonucleotide
gatggcatcggcaacagcttctcccctggactttctgtctgcaagacatgctccattggt

SEQ ID NO: 34362 - DNA, 60 bp, Artificial
  Synthetic oligonucleotide
tgaatttcctgggagttttcggaagaagtgcaactttgcaactaccccagtatgtgagta

SEQ ID NO: 34363 - DNA, 60 bp, Artificial
  Synthetic oligonucleotide
cccgaatttcctgggagttttcggaagaagtgcaactttgcaactaccccagtatgtgag

SEQ ID NO: 34364 - DNA, 60 bp, Artificial
  Synthetic oligonucleotide
cctgggagttttcggaagaagtgcaactttgcaactaccccagtatgtgagtatgatgga

SEQ ID NO: 34365 - DNA, 60 bp, Artificial
  Synthetic oligonucleotide
tcctgggagttttcggaagaagtgcaactttgcaactaccccagtatgtgagtatgatgg

SEQ ID NO: 34366 - DNA, 60 bp, Artificial
  Synthetic oligonucleotide
gcaactaccccagtatgtgagtatgatggaaacatggtctcagggtataagaaggtcatg

SEQ ID NO: 34367 - DNA, 60 bp, Artificial
  Synthetic oligonucleotide
aagaagtgcaactttgcaactaccccagtatgtgagtatgatggaaacatggtctcaggg

SEQ ID NO: 34368 - DNA, 60 bp, Artificial
  Synthetic oligonucleotide
tatgtgagtatgatggaaacatggtctcagggtataagaaggtcatggctacaattgact

SEQ ID NO: 34369 - DNA, 60 bp, Artificial
  Synthetic oligonucleotide
cagtatgtgagtatgatggaaacatggtctcagggtataagaaggtcatggctacaattg

SEQ ID NO: 34370 - DNA, 60 bp, Artificial
  Synthetic oligonucleotide
gatggaaacatggtctcagggtataagaaggtcatggctacaattgactcatttcaatca

SEQ ID NO: 34371 - DNA, 60 bp, Artificial
  Synthetic oligonucleotide
gtgagtatgatggaaacatggtctcagggtataagaaggtcatggctacaattgactcat

SEQ ID NO: 34372 - DNA, 60 bp, Artificial
  Synthetic oligonucleotide
aggatattgactttgacaaccttggtgacaatccttgtaaagttgggttacaaacatcag

SEQ ID NO: 34373 - DNA, 60 bp, Artificial
  Synthetic oligonucleotide
tgacaatccctgtaaagttgggttacaaacatcagctatagagggtgcttggggctctgg

SEQ ID NO: 34374 - DNA, 51 bp, Artificial
  Synthetic oligonucleotide
ggtctcagggtataagaaggtcatggctacaattgactcatttcaatcatt

SEQ ID NO: 34375 - DNA, 60 bp, Artificial
  Synthetic oligonucleotide
cctagttacaaaggatattgactttgacaaccttggtgacaatccctgtaaagttgggtt

SEQ ID NO: 34376 - DNA, 60 bp, Artificial
  Synthetic oligonucleotide
gcttcctgtgccccgaatttcctgggagttttcggaagaagtgcaactttgcaactaccc

SEQ ID NO: 34377 - DNA, 60 bp, Artificial
  Synthetic oligonucleotide
ccccgaatttcctgggagttttcggaagaagtgcaactttgcaactaccccagtatgtga

SEQ ID NO: 34378 - DNA, 60 bp, Artificial
  Synthetic oligonucleotide
ccctgtaaagttgggttacaaacatcagctatagagggtgcttggggctctggtgttggt

SEQ ID NO: 34379 - DNA, 60 bp, Artificial
  Synthetic oligonucleotide
tgtaaagttgggttacaaacatcagctatagagggagcttggggctctggtgttggtttc

SEQ ID NO: 34380 - DNA, 60 bp, Artificial
  Synthetic oligonucleotide
agggtggtggcttaatatttaagcactggtgtacatctacatgtcagtttggggatcctg

SEQ ID NO: 34381 - DNA, 60 bp, Artificial
  Synthetic oligonucleotide
gggtggtggcttaatatttaagcactggtgtacatctacatgtcagtttggggatcctgg

SEQ ID NO: 34382 - DNA, 60 bp, Artificial
  Synthetic oligonucleotide
agtccaagagatagaggcttcctgtgccccgaatttcctgggagttttcggaagaagtgc

SEQ ID NO: 34383 - DNA, 60 bp, Artificial
  Synthetic oligonucleotide
gtccaagagataaaggcttcctgtgccccgaatttcctgggagttttcggaagaagtgca

SEQ ID NO: 34384 - DNA, 60 bp, Artificial
  Synthetic oligonucleotide
gcctgagagctcttgtagcatggataaccaccagtccctaaacacaatcacgaagtacac

SEQ ID NO: 34385 - DNA, 60 bp, Artificial
  Synthetic oligonucleotide
ccgcttaaatcttaaaacctcctttcactgctatggtgcatgtacaaaatacgaataccc

SEQ ID NO: 34386 - DNA, 60 bp, Artificial
  Synthetic oligonucleotide
tagagggtggtggcttaatatttaagcactggtgtacatctacatgtcagtttggggatc

SEQ ID NO: 34387 - DNA, 60 bp, Artificial
  Synthetic oligonucleotide
gggttacaaacatcagctatagagggagcttggggctctggtgttggtttcacattgact

SEQ ID NO: 34388 - DNA, 54 bp, Artificial
  Synthetic oligonucleotide
ttctgacatcaattaaagcatgtgacaaagcaatctgttatggcgcagagagca

SEQ ID NO: 34389 - DNA, 60 bp, Artificial
  Synthetic oligonucleotide
ctcacatcacaacaaataaacttgaatggattgacccagatgggaacacaagagaccatg

SEQ ID NO: 34390 - DNA, 60 bp, Artificial
  Synthetic oligonucleotide
cacatattacaacaaataaacttgaatggattgaccctgatggtaacacacgcgatcatg

SEQ ID NO: 34391 - DNA, 60 bp, Artificial
  Synthetic oligonucleotide
gcctctgagcacctgctgcaccagtctcttgttggcaagcaatctccattccagaacgcc

SEQ ID NO: 34392 - DNA, 60 bp, Artificial
  Synthetic oligonucleotide
catagtggcctctgagcacctgctgcaccagtctcttgttggcaagcaatctccattcca

SEQ ID NO: 34393 - DNA, 52 bp, Artificial
  Synthetic oligonucleotide
ctttgaatgatcaccataatcatccacagaaaggttagcactgaagatcctg

SEQ ID NO: 34394 - DNA, 60 bp, Artificial
  Synthetic oligonucleotide
ctttgaacttttctttgaatgatcaccataatcatccacagaaaggttagcactgaagat

SEQ ID NO: 34395 - DNA, 60 bp, Artificial
  Synthetic oligonucleotide
gtggatgtcacagaaggttgcagcaattgctaagagcctgaaggatgtagagcagcttaa

SEQ ID NO: 34396 - DNA, 60 bp, Artificial
  Synthetic oligonucleotide
actgttttttacctaaggggaaattatcaagagtgtgatgtcggatttggtgttttatga

SEQ ID NO: 34397 - DNA, 60 bp, Artificial
  Synthetic oligonucleotide
ctctctcgcgtaagccagagaggaaggctaaccctaaatttggagagtggcaggtggagg

SEQ ID NO: 34398 - DNA, 60 bp, Artificial
  Synthetic oligonucleotide
caacgatcttaccatccacagattatctgggtatttagccagatgggtccttgatcagta

SEQ ID NO: 34399 - DNA, 60 bp, Artificial
  Synthetic oligonucleotide
tctcacagcagataagtggatgtcacagaaggttgcagcaattgctaagagcctgaagga

SEQ ID NO: 34400 - DNA, 60 bp, Artificial
  Synthetic oligonucleotide
ccgctgaccattggaattcacagagtcaagcaaggcatgatggaccctcaatacctgaag

SEQ ID NO: 34401 - DNA, 60 bp, Artificial
  Synthetic oligonucleotide
ctttcaaattctacccgctgaccattggaattcacagagtcaagcaaggcatgatggacc

SEQ ID NO: 34402 - DNA, 60 bp, Artificial
  Synthetic oligonucleotide
gatgggtccttgatcagtataacgagaatgatgacgagtcccagcacgagttgatcagaa

SEQ ID NO: 34403 - DNA, 60 bp, Artificial
  Synthetic oligonucleotide
caatctgtctgccgttaggatcttcttccttaatgcagcaaaagccaaagctgctctcgc

SEQ ID NO: 34404 - DNA, 60 bp, Artificial
  Synthetic oligonucleotide
caatttggcagccgttaggatcttcttccttaatgcagcaaaagccaaagctgctctcgc

SEQ ID NO: 34405 - DNA, 60 bp, Artificial
  Synthetic oligonucleotide
ccataaacatagcagcataatgggtgggtggtaggggacagcaacttaatagatctcagg

SEQ ID NO: 34406 - DNA, 60 bp, Artificial
  Synthetic oligonucleotide
ccataaacatagcagcacaatgggtgggtggtaggggacagcaacttaatagatctcagg

SEQ ID NO: 34407 - DNA, 60 bp, Artificial
  Synthetic oligonucleotide
gatccagatgcagggtttgtggcatttatggctgaccacggagagtctatcaatctgtct

SEQ ID NO: 34408 - DNA, 57 bp, Artificial
  Synthetic oligonucleotide
tatagaaggaatacttggttgatatgggagatttggttttctatgatgtcgcatcca

SEQ ID NO: 34409 - DNA, 60 bp, Artificial
  Synthetic oligonucleotide
gatccagatgcagggtttgtggcatttatggctgaccatggagaatctatcaatttggca

SEQ ID NO: 34410 - DNA, 60 bp, Artificial
  Synthetic oligonucleotide
gatccagatgcagggtttgtggcatttatggctgaccatggagaatctattaatttggca

SEQ ID NO: 34411 - DNA, 60 bp, Artificial
  Synthetic oligonucleotide
gatccagatgcagggtttgtggcatttatggctgaccatggagaatctatcaatctgtca

SEQ ID NO: 34412 - DNA, 60 bp, Artificial
  Synthetic oligonucleotide
gatccagatgcagggtttgtggcatttatggctgaccacggagagtctatcaatctgtca

SEQ ID NO: 34413 - DNA, 60 bp, Artificial
  Synthetic oligonucleotide
catagcagcataatgggtgggtggtaggggacagcaacttaatagatctcaggtcattga

SEQ ID NO: 34414 - DNA, 60 bp, Artificial
  Synthetic oligonucleotide
ccacaaacatagcagcataatgggtgggtggtaggggacagcaacttaatagatctcagg

SEQ ID NO: 34415 - DNA, 60 bp, Artificial
  Synthetic oligonucleotide
taatttggcagccgttaggatcttcttccttaatgcagcaaaagccaaagctgctctcgc

SEQ ID NO: 34416 - DNA, 60 bp, Artificial
  Synthetic oligonucleotide
taggatcttcttccttaatgcagcaaaagccaaagctgctctcgctcgtaaaccggagcg

SEQ ID NO: 34417 - DNA, 55 bp, Artificial
  Synthetic oligonucleotide
tttggtatgcttgcagggcttagtaggcttgtctgtcctaatgagttggggaaaa

SEQ ID NO: 34418 - DNA, 60 bp, Artificial
  Synthetic oligonucleotide
tttggtatgcttgcagggcttagtaggcttgtctgtcctaatgagttggggaaaaagttt

SEQ ID NO: 34419 - DNA, 55 bp, Artificial
  Synthetic oligonucleotide
tttggtatgcttgcagggcttagtaggcttgtctgtcctaatgagttagggaaaa

SEQ ID NO: 34420 - DNA, 55 bp, Artificial
  Synthetic oligonucleotide
tttggtatgcttgcagggcttagtaggcttgtctgtcccaatgagttggggaaaa

SEQ ID NO: 34421 - DNA, 60 bp, Artificial
  Synthetic oligonucleotide
tttggtatgcttgcagggcttagtaggcttgtctgtcccaatgagttggggaaaaagttt

SEQ ID NO: 34422 - DNA, 60 bp, Artificial
  Synthetic oligonucleotide
ccatctgaattggtctttcaataaagataggaatgtgccaaaaagatgtatgcagcttaa

SEQ ID NO: 34423 - DNA, 60 bp, Artificial
  Synthetic oligonucleotide
gcaaacagggaacacttgaaaacccattatgttttgttttccatctgaattggtctttca

SEQ ID NO: 34424 - DNA, 60 bp, Artificial
  Synthetic oligonucleotide
ggagctgattcctgcagttaaaaccattggcatggacaacaaacttgctttaggaagaaa

SEQ ID NO: 34425 - DNA, 60 bp, Artificial
  Synthetic oligonucleotide
aggagctgattcctgcagttaaaaccattggcatggacaacaaacttgctttaggaagaa

SEQ ID NO: 34426 - DNA, 61 bp, Artificial
  Synthetic oligonucleotide
gtaacaaagaaagatgtagatgctgctataagaaacaaagcatcaacattcaatggaaacc

SEQ ID NO: 34427 - DNA, 60 bp, Artificial
  Synthetic oligonucleotide
ttaggaagaaaagtaacaaagaaagatgtagatgctgctataagaaacaaagcatcaaca

SEQ ID NO: 34428 - DNA, 60 bp, Artificial
  Synthetic oligonucleotide
ctgtccaggttaatagtggagaaaagcactcatttaagcaattggaaagatgattccctt

SEQ ID NO: 34429 - DNA, 60 bp, Artificial
  Synthetic oligonucleotide
catactgtccaggttaatagtggagaaaagcactcatttaagcaattggaaagatgattc

SEQ ID NO: 34430 - DNA, 60 bp, Artificial
  Synthetic oligonucleotide
atcatcataagcaaacagggaacacttgaaaacccattatgttttgttttccatctgaat

SEQ ID NO: 34431 - DNA, 52 bp, Artificial
  Synthetic oligonucleotide
aataccgactcttaaaggatttgtcaaagcaactatcattgaccaaaataag

SEQ ID NO: 34432 - DNA, 50 bp, Artificial
  Synthetic oligonucleotide
cagggaaagccataaggaaccaaatcacatctgtacaaaaacttgctgag

SEQ ID NO: 34433 - DNA, 60 bp, Artificial
  Synthetic oligonucleotide
cagctgcattcattgaagcctgcaaactcatgattcctaaaggaaccacagggaaagcca

SEQ ID NO: 34434 - DNA, 60 bp, Artificial
  Synthetic oligonucleotide
atcagctgcattcattgaagcctgcaaactcatgattcctaaaggaaccacagggaaagc

SEQ ID NO: 34435 - DNA, 60 bp, Artificial
  Synthetic oligonucleotide
gaatttctgtgatacagctatagcatctgatagcaacacgtgcgatgtagtacctatcaa

SEQ ID NO: 34436 - DNA, 60 bp, Artificial
  Synthetic oligonucleotide
gttaagaatttctgtgatacagctatagcatctgatagcaacacgtgcgatgtagtacct

SEQ ID NO: 34437 - DNA, 53 bp, Artificial
  Synthetic oligonucleotide
tgcagcttaatttgactagcaatgaaaaatatgccaaaggagcttcttttgca

SEQ ID NO: 34438 - DNA, 60 bp, Artificial
  Synthetic oligonucleotide
gactacaagagaagaatggcagatgctgtgtcccggaaaaaaatggatactaaacctact

SEQ ID NO: 34439 - DNA, 60 bp, Artificial
  Synthetic oligonucleotide
tcccgtactgcgataagacaaagtctaaacaagctgcctcaacaatgcaatcatcattgg

SEQ ID NO: 34440 - DNA, 60 bp, Artificial
  Synthetic oligonucleotide
cccgtactgcgataagacaaagtctaaacaagctgcctcaacaatgcaatcatcattggt

SEQ ID NO: 34441 - DNA, 60 bp, Artificial
  Synthetic oligonucleotide
atttcctaggttttatgttgctgctaggatgggtggatttgatccttctagaagattttg

SEQ ID NO: 34442 - DNA, 60 bp, Artificial
  Synthetic oligonucleotide
tcatcattggttttcttgaaaccaaaatcctcaaaggataaaaatcggacatttcctagg

SEQ ID NO: 34443 - DNA, 60 bp, Artificial
  Synthetic oligonucleotide
tgagtctattaacagcctgaagaggcacaaggttgactttctcctatctgccctacgttg

SEQ ID NO: 34444 - DNA, 60 bp, Artificial
  Synthetic oligonucleotide
gaattcccagcttttattggatatgactcaataacaagccagagaactaagttatatgat

SEQ ID NO: 34445 - DNA, 60 bp, Artificial
  Synthetic oligonucleotide
ccctacgttggccgacaggtgttccttctcttgaattcattgagtattatcttgatgatc

SEQ ID NO: 34446 - DNA, 60 bp, Artificial
  Synthetic oligonucleotide
cctgaagaggcacaaggttgactttctcctatctgccctacgttggccgacaggtgttcc

SEQ ID NO: 34447 - DNA, 52 bp, Artificial
  Synthetic oligonucleotide
gtctctaccaggattcccttctctaagctgatacacagagattagctgggca

SEQ ID NO: 34448 - DNA, 60 bp, Artificial
  Synthetic oligonucleotide
ccaaggaacaaatgcagctgagactctagacaatgtaatggtgtctctaccaggattccc

SEQ ID NO: 34449 - DNA, 60 bp, Artificial
  Synthetic oligonucleotide
tgaatagtccaaggaacaaatgcagctgagactctagacaatgtaatggtgtctctacca

SEQ ID NO: 34450 - DNA, 60 bp, Artificial
  Synthetic oligonucleotide
gtatggactcacaaaggaagacttgcctgggaatgaccttataggtgagttatgtgtggt

SEQ ID NO: 34451 - DNA, 60 bp, Artificial
  Synthetic oligonucleotide
ccattgtcgtccctgtgacagggagagagtcagagagcaccttcagggcctgaatagtcc

SEQ ID NO: 34452 - DNA, 60 bp, Artificial
  Synthetic oligonucleotide
atcatggctcttgggtacaccacaccagcaatagcatccattgtcgtccctgtgacaggg

SEQ ID NO: 34453 - DNA, 60 bp, Artificial
  Synthetic oligonucleotide
aaagctaggatgcatcatggctcttgggtacaccacaccagcaatagcatccattgtcgt

SEQ ID NO: 34454 - DNA, 60 bp, Artificial
  Synthetic oligonucleotide
aactccaacatgaataaaccatgtgcatcagcaatggcctcaccagccctgtttggaaga

SEQ ID NO: 34455 - DNA, 60 bp, Artificial
  Synthetic oligonucleotide
ttaatggtcttagaaaactccaacatgaataaaccatgtgcatcagcaatggcctcacca

SEQ ID NO: 34456 - DNA, 58 bp, Artificial
  Synthetic oligonucleotide
ttcacccacacccttccctccccactgtggcagctcacttgcccactttggagcgata

SEQ ID NO: 34457 - DNA, 60 bp, Artificial
  Synthetic oligonucleotide
ttcctctccgatgagcccaactcaattatgaataggtacctaaaacttctaattaaggca

SEQ ID NO: 34458 - DNA, 60 bp, Artificial
  Synthetic oligonucleotide
cttgatgatcatattttcctctccgatgagcccaactcaattatgaataggtacctaaaa

SEQ ID NO: 34459 - DNA, 60 bp, Artificial
  Synthetic oligonucleotide
ggaagacttgcctgggaatgaccttataggtgagttatgtgtggttcaagctgccagggt

SEQ ID NO: 34460 - DNA, 60 bp, Artificial
  Synthetic oligonucleotide
ccctgtgacagggagagagtcagagagcaccttcagggcctgaatagtccaaggaacaaa

SEQ ID NO: 34461 - DNA, 60 bp, Artificial
  Synthetic oligonucleotide
ctttcagggaggatgctctctccacagtgtggacaaaagactggccaaccctaaaggagc

SEQ ID NO: 34462 - DNA, 57 bp, Artificial
  Synthetic oligonucleotide
aagactggccaaccctaaaggagcagtctgccaaaaataagtcctctagaggcttgc

SEQ ID NO: 34463 - DNA, 60 bp, Artificial
  Synthetic oligonucleotide
agtcgaactgcacctagccaagagatcacggaagactgatgtaaccagaggcttggctag

SEQ ID NO: 34464 - DNA, 60 bp, Artificial
  Synthetic oligonucleotide
gtcgaactgcacctagccaagagatcacggaagactgatgtaaccagaggcttggctaga

SEQ ID NO: 34465 - DNA, 60 bp, Artificial
  Synthetic oligonucleotide
catcgacgaattaatgatttgcggttccacatctacttctctgtctgtccagtcgaactg

SEQ ID NO: 34466 - DNA, 60 bp, Artificial
  Synthetic oligonucleotide
gatttgcggttccacatctacttctctgtctgtccagtcgaactgcacctagccaagaga

SEQ ID NO: 34467 - DNA, 60 bp, Artificial
  Synthetic oligonucleotide
tatgtgtggttcaagctgccagggtagcaagttccgtggccaaatctgctcatcgacgaa

SEQ ID NO: 34468 - DNA, 60 bp, Artificial
  Synthetic oligonucleotide
gctgccagggtagcaagttccgtggccaaatctgctcatcgacgaattaatgatttgcgg

SEQ ID NO: 34469 - DNA, 60 bp, Artificial
  Synthetic oligonucleotide
cccccagtattccccccaatttaaaacccacccaaattattagccaattattcacccaca

SEQ ID NO: 34470 - DNA, 60 bp, Artificial
  Synthetic oligonucleotide
ccccaatttaaaacccacccaaattattagccaattattcacccacacccttccctcccc

SEQ ID NO: 34471 - DNA, 60 bp, Artificial
  Synthetic oligonucleotide
ctttcttccagtccctccccttagcagtccctctctcttttactagctggactattcttt

SEQ ID NO: 34472 - DNA, 60 bp, Artificial
  Synthetic oligonucleotide
tcattcacccaagcggtgatagtgcctgagtctgcagcttcatcaagaaaagccaaggca

SEQ ID NO: 34473 - DNA, 60 bp, Artificial
  Synthetic oligonucleotide
agccaaggcaatctcacggtaattctcctctgacatgttgttttgtctagttaaataacg

SEQ ID NO: 34474 - DNA, 60 bp, Artificial
  Synthetic oligonucleotide
ccaaggcaatctcacggtaattctcctctgacatgttgttttgtctagttaaataacggg

SEQ ID NO: 34475 - DNA, 60 bp, Artificial
  Synthetic oligonucleotide
caaagtggccaaagtactttctgcttcacagattgaatttaaaaatgaactagaggtaat

SEQ ID NO: 34476 - DNA, 60 bp, Artificial
  Synthetic oligonucleotide
gttcatttttaaattcaatctgtgaagcagaaagtactttggctactttgcaaacctgtt

SEQ ID NO: 34477 - DNA, 60 bp, Artificial
  Synthetic oligonucleotide
caaagtagccaaagtactttctgcttcacagattgaatttaaaaatgaactagaggaaat

SEQ ID NO: 34478 - DNA, 60 bp, Artificial
  Synthetic oligonucleotide
ttcacagccgcagtacaaagatgctgtcaaatgaaagatagtgccaaaaccttagtgagc

SEQ ID NO: 34479 - DNA, 60 bp, Artificial
  Synthetic oligonucleotide
actggaccagcgcatcattgtgctttttatggttgactggggaaaagaggcagttgatag

SEQ ID NO: 34480 - DNA, 60 bp, Artificial
  Synthetic oligonucleotide
tggggttctgatattgtcaaccatttccatctgggtgatgatatggaccctgagctcaga

SEQ ID NO: 34481 - DNA, 60 bp, Artificial
  Synthetic oligonucleotide
cactccataggatgtcagggtatctagccagatgggttgctgagctctgccgaggaaacc

SEQ ID NO: 34482 - DNA, 60 bp, Artificial
  Synthetic oligonucleotide
agaggagtggatgacaactaagatagaagcagtcagggctgcattcaactctgttgctca

SEQ ID NO: 34483 - DNA, 60 bp, Artificial
  Synthetic oligonucleotide
gacaactaagatagaagcagtcagggctgcattcaactctgttgctcagatctcttgggc

SEQ ID NO: 34484 - DNA, 60 bp, Artificial
  Synthetic oligonucleotide
ggtcaagggttgcacctggaacgatgggtacacaatgtacctaggatttgccccaggtgc

SEQ ID NO: 34485 - DNA, 60 bp, Artificial
  Synthetic oligonucleotide
atgccattagcagaggtcaagggttgcacctggaacgatgggtacacaatgtacctagga

SEQ ID NO: 34486 - DNA, 60 bp, Artificial
  Synthetic oligonucleotide
gtatcatgtctatgtgagacacgccaattctgctgcttgtgagatctaagcacagtgggg

SEQ ID NO: 34487 - DNA, 60 bp, Artificial
  Synthetic oligonucleotide
ctttttctttgtgtatcatgtctatgtgagacacgccaattctgctgcttgtgagatcta

SEQ ID NO: 34488 - DNA, 60 bp, Artificial
  Synthetic oligonucleotide
gtcaacttcatgcggaaagtactccgccagcgttatgggacactgactgcagaggagtgg

SEQ ID NO: 34489 - DNA, 60 bp, Artificial
  Synthetic oligonucleotide
catgcggaaagtactccgccagcgttatgggacactgactgcagaggagtggatgacaac

SEQ ID NO: 34490 - DNA, 60 bp, Artificial
  Synthetic oligonucleotide
tttacccgcttgttattgatatgcacagagttttgaaggatgggatggatgtcaacttca

SEQ ID NO: 34491 - DNA, 60 bp, Artificial
  Synthetic oligonucleotide
ccgcttgttattgatatgcacagagttttgaaggatgggatggatgtcaacttcatgcgg

SEQ ID NO: 34492 - DNA, 60 bp, Artificial
  Synthetic oligonucleotide
gtacctaggatttgccccaggtgcagaaatgttcttagagacattcgaattttacccgct

SEQ ID NO: 34493 - DNA, 60 bp, Artificial
  Synthetic oligonucleotide
cctaggatttgccccaggtgcagaaatgttcttagagacattcgaattttacccgcttgt

SEQ ID NO: 34494 - DNA, 60 bp, Artificial
  Synthetic oligonucleotide
ccccaatacattgcaaatcctgtgccagacactgcccttacactccataggatgtcaggg

SEQ ID NO: 34495 - DNA, 60 bp, Artificial
  Synthetic oligonucleotide
gttaataaccattttccccaatacattgcaaatcctgtgccagacactgcccttacactc

SEQ ID NO: 34496 - DNA, 56 bp, Artificial
  Synthetic oligonucleotide
gcaacatctcaacttcactgttgctcgagtcttcttcctcaaccaaaaaaaggcca

SEQ ID NO: 34497 - DNA, 60 bp, Artificial
  Synthetic oligonucleotide
ccttacactccataggatgtcagggtatctagccagatgggttgctgagctctgccgagg

SEQ ID NO: 34498 - DNA, 60 bp, Artificial
  Synthetic oligonucleotide
ccaaattaaactagcggaggcagcaacattgattgtcatgccattagcagaggtcaaggg

SEQ ID NO: 34499 - DNA, 60 bp, Artificial
  Synthetic oligonucleotide
tctgccgaggaaaccaaattaaactagcggaggcagcaacattgattgtcatgccattag

SEQ ID NO: 34500 - DNA, 51 bp, Artificial
  Synthetic oligonucleotide
ctgttgctcagatctcttgggctaagactggattctctcctgctgcaagag

SEQ ID NO: 34501 - DNA, 60 bp, Artificial
  Synthetic oligonucleotide
ggaatccaaatctaaaaaatataccagtttcaaagttcccttttacctttctttttcttt

SEQ ID NO: 34502 - DNA, 50 bp, Artificial
  Synthetic oligonucleotide
cgttttggcatgcttgcagggcttagtaggcttgtttgccctaatgagct

SEQ ID NO: 34503 - DNA, 60 bp, Artificial
  Synthetic oligonucleotide
gatgcttcgttttggcatgcttgcagggcttagtaggcttgtttgtcctaatgagctagg

SEQ ID NO: 34504 - DNA, 60 bp, Artificial
  Synthetic oligonucleotide
ctcaaaaagaagtgaatgggaagttacgcttaaccttgggggctggaaggtacctgtact

SEQ ID NO: 34505 - DNA, 60 bp, Artificial
  Synthetic oligonucleotide
tagtagtagactccttgaaaagctactacgagaaaaactggaatgagtgatctgacagat

SEQ ID NO: 34506 - DNA, 60 bp, Artificial
  Synthetic oligonucleotide
ggccatccatggtagtcccagtgacaggaagccactcactcaagacgaccaaagcctggc

SEQ ID NO: 34507 - DNA, 60 bp, Artificial
  Synthetic oligonucleotide
gccgtccatggtagtcccagtgacaggaagccactcactcaagacgaccaaagcctggca

SEQ ID NO: 34508 - DNA, 60 bp, Artificial
  Synthetic oligonucleotide
actggctgatcttattgcagctcagaaattggcttcaaaacctgttgatccaacagggat

SEQ ID NO: 34509 - DNA, 60 bp, Artificial
  Synthetic oligonucleotide
ctggctgatcttattgcagctcagaaattggcttcaaaacctgttgatccaacagggatt

SEQ ID NO: 34510 - DNA, 60 bp, Artificial
  Synthetic oligonucleotide
ttggctgatcttattgcagctcagaaattggcttcaaaacctgttgatccaacagggatt

SEQ ID NO: 34511 - DNA, 60 bp, Artificial
  Synthetic oligonucleotide
agctgttgtagattcttactggattcatgaacttggcactggttcttcactagttcaaac

SEQ ID NO: 34512 - DNA, 60 bp, Artificial
  Synthetic oligonucleotide
agctgttgtagattcttactggattcatgaacttggtactggttctccactagttcaaac

SEQ ID NO: 34513 - DNA, 60 bp, Artificial
  Synthetic oligonucleotide
agctgttgtagattcttactggattcatgaacttggtactggttctctactagttcaaac

SEQ ID NO: 34514 - DNA, 55 bp, Artificial
  Synthetic oligonucleotide
gatttaatgaataatcatattaaataattaggtaagttaactatctagttagtta

SEQ ID NO: 34515 - DNA, 60 bp, Artificial
  Synthetic oligonucleotide
ccaacagtatcgactgcaaacatagcactcagttggagctcagtggagcacaggggcaac

SEQ ID NO: 34516 - DNA, 60 bp, Artificial
  Synthetic oligonucleotide
cagatctggttgcagctcagaaactggctacaaaaccagttgatccaacagggcttgagc

SEQ ID NO: 34517 - DNA, 60 bp, Artificial
  Synthetic oligonucleotide
aacttgcagatttggtggcagctcaaaaactggctacaaaaccagttgatccaacagggc

SEQ ID NO: 34518 - DNA, 60 bp, Artificial
  Synthetic oligonucleotide
cgtaagggccagtctgcattaagacaatacaagacagaaatcaggattggcaaggcatct

SEQ ID NO: 34519 - DNA, 60 bp, Artificial
  Synthetic oligonucleotide
actgtatatcaagaactcaactattgaggacagagactgcagagatccacggcgataact

SEQ ID NO: 34520 - DNA, 60 bp, Artificial
  Synthetic oligonucleotide
gggctagatgtaaaagacctctttacagattacatgtttgtcaagtggaaagttgaatac

SEQ ID NO: 34521 - DNA, 60 bp, Artificial
  Synthetic oligonucleotide
ggactagatgtaaaagacctctttacagattacatgtttgtcaagtggaaagttgaatac

SEQ ID NO: 34522 - DNA, 60 bp, Artificial
  Synthetic oligonucleotide
tgtgggctagatgtaaaagacctctttacagattacatgtttgtcaagtggaaagttgaa

SEQ ID NO: 34523 - DNA, 60 bp, Artificial
  Synthetic oligonucleotide
tgtggactagatgtaaaagacctctttacagattacatgtttgtcaagtggaaagttgaa

SEQ ID NO: 34524 - DNA, 60 bp, Artificial
  Synthetic oligonucleotide
atgcataattacaattcacatatacactgattgggttgggtgggtcaaatcaaacacata

SEQ ID NO: 34525 - DNA, 60 bp, Artificial
  Synthetic oligonucleotide
actgtttctcttacctcctacctcagtgtacttatatatatgcaagtagcatatatataa

SEQ ID NO: 34526 - DNA, 51 bp, Artificial
  Synthetic oligonucleotide
cactgtctctcttaccttctacctcagtgtacttatatatatgcaagtagc

SEQ ID NO: 34527 - DNA, 60 bp, Artificial
  Synthetic oligonucleotide
tattcaccactttatctctacatttctacctcagtgtacttatatatatgcaagtagcat

SEQ ID NO: 34528 - DNA, 60 bp, Artificial
  Synthetic oligonucleotide
cactgtctctcttaccttctacctcagtgtacttatatatatgcaagtagcatatatata

SEQ ID NO: 34529 - DNA, 60 bp, Artificial
  Synthetic oligonucleotide
tcaccactgtctctttcactcttctacctcagtgtacttatatatatgcaagtagcatat

SEQ ID NO: 34530 - DNA, 60 bp, Artificial
  Synthetic oligonucleotide
aactggtattgagcctgatgaccatcttaaagagagatcaagcctcaggtatggaaatgt

SEQ ID NO: 34531 - DNA, 60 bp, Artificial
  Synthetic oligonucleotide
gcactacagcttggtcattgaccactcaggtaatctgctgctctgtatgtttatcgttag

SEQ ID NO: 34532 - DNA, 60 bp, Artificial
  Synthetic oligonucleotide
agtgtcagacactgcctttacgctccatcgcatctcaggctatttagctcgctggattgc

SEQ ID NO: 34533 - DNA, 50 bp, Artificial
  Synthetic oligonucleotide
aaatttggtgtaaagttgccataaacaaaaatagcaatggcatttcagta

SEQ ID NO: 34534 - DNA, 60 bp, Artificial
  Synthetic oligonucleotide
ctagccagatgggttcttgagcattttaactcagatgatgacgagtctcagagagaactc

SEQ ID NO: 34535 - DNA, 60 bp, Artificial
  Synthetic oligonucleotide
ttcaagttctacccgttaaccatcgggatttacagagtcaaacatggtatgatggatccc

SEQ ID NO: 34536 - DNA, 60 bp, Artificial
  Synthetic oligonucleotide
agtcaaacatggtatgatggatccccagtacttgaagaaggctctcaggcaacgctatgg

SEQ ID NO: 34537 - DNA, 60 bp, Artificial
  Synthetic oligonucleotide
atgttcctagaaattttcaagttctacccgttaaccatcgggatttacagagtcaaacat

SEQ ID NO: 34538 - DNA, 60 bp, Artificial
  Synthetic oligonucleotide
ggaacaatggcccagaaatttatctttcgttcttcccagggaccgaaatgttcctagaaa

SEQ ID NO: 34539 - DNA, 60 bp, Artificial
  Synthetic oligonucleotide
caatcactacatctgcttcaccaccagcaagaagcttctcaatgttctctttgctcactc

SEQ ID NO: 34540 - DNA, 60 bp, Artificial
  Synthetic oligonucleotide
cttcaccaccagcaagaagcttctcaatgttctctttgctcactcgtgcggtagccatgg

SEQ ID NO: 34541 - DNA, 60 bp, Artificial
  Synthetic oligonucleotide
cagttgcactaggaacaataataggattgccttggaatttaaactggcctgctttcacca

SEQ ID NO: 34542 - DNA, 60 bp, Artificial
  Synthetic oligonucleotide
tgccttggaatttaaattggcctgctttcaccattttgtaaatacctgctctgttcctta

SEQ ID NO: 34543 - DNA, 60 bp, Artificial
  Synthetic oligonucleotide
gttgctcgcttgcattctccacagcaatcagttccatgaacattttggctcttataaagc

SEQ ID NO: 34544 - DNA, 60 bp, Artificial
  Synthetic oligonucleotide
cgcttgcattctccacagcaatcagttccatgaacattttggctcttataaagccttcca

SEQ ID NO: 34545 - DNA, 60 bp, Artificial
  Synthetic oligonucleotide
aaagtttttcatacattttctgttgctcgcttgcattctccacagcaatcagttccatga

SEQ ID NO: 34546 - DNA, 60 bp, Artificial
  Synthetic oligonucleotide
cattttctgttgctcgcttgcattctccacagcaatcagttccatgaacattttggctct

SEQ ID NO: 34547 - DNA, 60 bp, Artificial
  Synthetic oligonucleotide
cttcaccaccagcaagaagcttctcaatgttctctttgctcactcgtgcggtagacatgg

SEQ ID NO: 34548 - DNA, 60 bp, Artificial
  Synthetic oligonucleotide
tggaaaccccagtgaaagtgaattctttagttgccataactcgggcaatcttgcacaact

SEQ ID NO: 34549 - DNA, 60 bp, Artificial
  Synthetic oligonucleotide
ataactcgggcaatcttgcacaactgttcataagttgaaaatttgcttattcccaaagct

SEQ ID NO: 34550 - DNA, 60 bp, Artificial
  Synthetic oligonucleotide
ataactcgggcaatcttgcccagctggtcataagttgaaaatttgcttattcccaaagct

SEQ ID NO: 34551 - DNA, 60 bp, Artificial
  Synthetic oligonucleotide
aactcgggcaatcttgcccagctggtcataagttgaaaatttgcttattcccaaagcttc

SEQ ID NO: 34552 - DNA, 60 bp, Artificial
  Synthetic oligonucleotide
atcagtaaaagcactcattaaaatgcatcattctttttggaagatggtttaggttttgaa

SEQ ID NO: 34553 - DNA, 60 bp, Artificial
  Synthetic oligonucleotide
cttcaaaaatgtctttggagaccccagtgaaagtgaattctttagttgccataactcggg

SEQ ID NO: 34554 - DNA, 60 bp, Artificial
  Synthetic oligonucleotide
cttcaaaaatgtctttggaaaccccagtgaaagtgaattctttagttgccataactcggg

SEQ ID NO: 34555 - DNA, 60 bp, Artificial
  Synthetic oligonucleotide
tggagaccccagtgaaagtgaattctttagttgccataactcgggcaatcttgcccagct

SEQ ID NO: 34556 - DNA, 60 bp, Artificial
  Synthetic oligonucleotide
ctcgggcaatcttgcacaactgttcataagttgaaaatttgcttattcccaaagcttcct

SEQ ID NO: 34557 - DNA, 60 bp, Artificial
  Synthetic oligonucleotide
aataagccaatgggaacgcagttgcagcaaacttatcaagacttgccatcaaggggagag

SEQ ID NO: 34558 - DNA, 60 bp, Artificial
  Synthetic oligonucleotide
ttgcagcaaacttatcaagacttgccatcaaggggagagggcctcctagtgttaacatga

SEQ ID NO: 34559 - DNA, 60 bp, Artificial
  Synthetic oligonucleotide
ggaacgcagttgcagcaaacttatcaagacttgccatcaaggggagagggcctcctagtg

SEQ ID NO: 34560 - DNA, 60 bp, Artificial
  Synthetic oligonucleotide
aaggggagagggcctcctagtgttagcataactctagctgtagttgcatcaaatttaggg

SEQ ID NO: 34561 - DNA, 60 bp, Artificial
  Synthetic oligonucleotide
caagacttgccatcaaggggagagggcctcctagtgttaacatgactctagctgtagttg

SEQ ID NO: 34562 - DNA, 60 bp, Artificial
  Synthetic oligonucleotide
gttaacatgactctagctgtagttgcatcaaatttagggctaggttttaaaccatatgcg

SEQ ID NO: 34563 - DNA, 60 bp, Artificial
  Synthetic oligonucleotide
ggggagagggcctcctagtgttagcataactctagctgtagttgcatcaaatttagggct

SEQ ID NO: 34564 - DNA, 60 bp, Artificial
  Synthetic oligonucleotide
aaatttagggctaggttttaaaccatatgcgtttaccattggaagctcacaaagtttttc

SEQ ID NO: 34565 - DNA, 60 bp, Artificial
  Synthetic oligonucleotide
gctgtagttgcatcaaatttagggctaggttttaaaccatatgcgtttaccattggaagc

SEQ ID NO: 34566 - DNA, 60 bp, Artificial
  Synthetic oligonucleotide
accatatgcgtttaccattggaagcccacaaagtttttcatacattttctgttgctcgct

SEQ ID NO: 34567 - DNA, 51 bp, Artificial
  Synthetic oligonucleotide
gggctaggttttaaaccatatgcgtttaccattggaagctcacaaagtttt

SEQ ID NO: 34568 - DNA, 60 bp, Artificial
  Synthetic oligonucleotide
cactggactgataaacagctctgtaacctctcctcagagtttgatgcaagcatgccaagt

SEQ ID NO: 34569 - DNA, 60 bp, Artificial
  Synthetic oligonucleotide
gcagaacaggatctacatgcaccctgctgtgctgacagctggcagaattagtgagatggg

SEQ ID NO: 34570 - DNA, 60 bp, Artificial
  Synthetic oligonucleotide
gcagaacaggatctacatgcaccctgctgtgctgacagccggcagaattagtgagatggg

SEQ ID NO: 34571 - DNA, 60 bp, Artificial
  Synthetic oligonucleotide
ggcactggagacatcctagttgactgttcaggtggacagcaacatttcttaaaagataac

SEQ ID NO: 34572 - DNA, 60 bp, Artificial
  Synthetic oligonucleotide
ggcaccggagacatcctagttgactgttcaggtggacagcaacatttcttaaaagataac

SEQ ID NO: 34573 - DNA, 60 bp, Artificial
  Synthetic oligonucleotide
gaatgataatgcacatggtgttggtgttgtcccaatgcacaccgatttggaattggattt

SEQ ID NO: 34574 - DNA, 54 bp, Artificial
  Synthetic oligonucleotide
aatgcacatggtgttggtgttgtcccaatgcatactgacctggaactagatttt

SEQ ID NO: 34575 - DNA, 60 bp, Artificial
  Synthetic oligonucleotide
gagccacacttcaacacttcttggatgtcctgggatggctgtgacctagattactactgt

SEQ ID NO: 34576 - DNA, 60 bp, Artificial
  Synthetic oligonucleotide
agagctactagaacaacgatggcaactatggaggaattgcagagggaaatcaatgcccac

SEQ ID NO: 34577 - DNA, 60 bp, Artificial
  Synthetic oligonucleotide
tatagtagtgtcagaatgatgtatgttctcatcatgtgcacttttatcatcaaaatgtat

SEQ ID NO: 34578 - DNA, 60 bp, Artificial
  Synthetic oligonucleotide
ctggatatagaggtgtctgaatgatgtatgttctcatcatgtgcacttttatcatcaaag

SEQ ID NO: 34579 - DNA, 60 bp, Artificial
  Synthetic oligonucleotide
tgaagctgtaggcactctggcctgggccagaactggattctccccagcaggaagagactt

SEQ ID NO: 34580 - DNA, 60 bp, Artificial
  Synthetic oligonucleotide
agaagtgaatgggaggttacacttaaccttgggggctggaagattactgtatataatacg

SEQ ID NO: 34581 - DNA, 60 bp, Artificial
  Synthetic oligonucleotide
cataatggtaatgttgaagtctctaagccatggtcttcttctgatgaaaagcttgctttg

SEQ ID NO: 34582 - DNA, 60 bp, Artificial
  Synthetic oligonucleotide
cctaggttcaacatttctgattattttgagattgtgcggcagcctggtgatgggaactgc

SEQ ID NO: 34583 - DNA, 60 bp, Artificial
  Synthetic oligonucleotide
gctgtacaaagatgttgtcaaatgaaagatagtgccaaaaccttagtgagcgactgtttt

SEQ ID NO: 34584 - DNA, 60 bp, Artificial
  Synthetic oligonucleotide
agcagcttgctgcacaagtacctcaaatcaggaggtgtcagacagcggaacactgaagta

SEQ ID NO: 34585 - DNA, 60 bp, Artificial
  Synthetic oligonucleotide
gatcctacaggggtagagccgggtgatcatctcaaagagagatcagcactaagctatggg

SEQ ID NO: 34586 - DNA, 60 bp, Artificial
  Synthetic oligonucleotide
gaccacttgaaggtggtggtctaatatttaaacactggcgcacatccacatgtcaatttg

SEQ ID NO: 34587 - DNA, 60 bp, Artificial
  Synthetic oligonucleotide
tttttggaccgcttgaaggtggtggtctaatatttaaacactggtgtacatccacatgtc

SEQ ID NO: 34588 - DNA, 60 bp, Artificial
  Synthetic oligonucleotide
ggtgatacactcctattctttggaccacttgaaggtggtggtctaatatttaaacattgg

SEQ ID NO: 34589 - DNA, 60 bp, Artificial
  Synthetic oligonucleotide
gaccacttgaaggtggtggtctaatatttaaacactggtgcacatccacatgtcaatttg

SEQ ID NO: 34590 - DNA, 60 bp, Artificial
  Synthetic oligonucleotide
gactaggtagtgaactggggtgttacactatcaatagagtgaagtcattcaagctgtgca

SEQ ID NO: 34591 - DNA, 60 bp, Artificial
  Synthetic oligonucleotide
tgcatacgttaactttaagcgtatccacaccactgggcttagttatgaccacattcgaat

SEQ ID NO: 34592 - DNA, 60 bp, Artificial
  Synthetic oligonucleotide
aagcgtatccacaccactgggcttagttatgaccacattcgagtcctctacattaaagga

SEQ ID NO: 34593 - DNA, 60 bp, Artificial
  Synthetic oligonucleotide
ggtcaggtcttgaggttttcaatgatcctttcaatgattatcagcaagcaataacagaca

SEQ ID NO: 34594 - DNA, 60 bp, Artificial
  Synthetic oligonucleotide
gatcgggtcttgaggttttcaatgatcctttcaatgattatcagcaagcaataacagaca

SEQ ID NO: 34595 - DNA, 60 bp, Artificial
  Synthetic oligonucleotide
ccccaatacttaaagaaagccctcagacaacgctacggcaccttgacggctgaaaaatgg

SEQ ID NO: 34596 - DNA, 60 bp, Artificial
  Synthetic oligonucleotide
ctgctctcgctcgtaaaccggagcggaaggctaatcctaaatttggagagtggcaggtgg

SEQ ID NO: 34597 - DNA, 60 bp, Artificial
  Synthetic oligonucleotide
ccaagagcctaaaggatgtggagcagcttaaatggggaagaggaggtctcagtgatgctg

SEQ ID NO: 34598 - DNA, 60 bp, Artificial
  Synthetic oligonucleotide
aaaaggtctaatgaccacaaacatagcagcataatgggtgggtggtaggggacagcaact

SEQ ID NO: 34599 - DNA, 60 bp, Artificial
  Synthetic oligonucleotide
gattcaacatacaggacatggatattgtagcctctgagcacctgctgcaccagtctcttg

SEQ ID NO: 34600 - DNA, 60 bp, Artificial
  Synthetic oligonucleotide
tgcctctgagcacctgctgcaccagtctcttgttggcaagcaatccccgttccaaaatgc

SEQ ID NO: 34601 - DNA, 60 bp, Artificial
  Synthetic oligonucleotide
gcctctgagcacctgctgcaccagtctcttgttggcaagcaatccccgttccaaaatgct

SEQ ID NO: 34602 - DNA, 60 bp, Artificial
  Synthetic oligonucleotide
gcaccctccaagaattacaagaaaacatcacagcacacgaacaacagctcgtgactgctc

SEQ ID NO: 34603 - DNA, 60 bp, Artificial
  Synthetic oligonucleotide
atggtattacctggagtgacggggtgggaatgtaccttgccttcttgccgggtgctgaga

SEQ ID NO: 34604 - DNA, 60 bp, Artificial
  Synthetic oligonucleotide
ggtattacctggagtgacggggtgggaatgtaccttgccttcttgccgggtgctgagatg

SEQ ID NO: 34605 - DNA, 60 bp, Artificial
  Synthetic oligonucleotide
cgatcaccaattaagcaagctgagtttagagctactgtagtagtgcctttggctgaggta

SEQ ID NO: 34606 - DNA, 60 bp, Artificial
  Synthetic oligonucleotide
ctacctcaactaaactacctcatttgattgctccttgattgtctttttagggagcatact

SEQ ID NO: 34607 - DNA, 60 bp, Artificial
  Synthetic oligonucleotide
gaacagaatctatatgcaccccgctgtgttaacagccggcagaatcagtgagatgggtgt

SEQ ID NO: 34608 - DNA, 60 bp, Artificial
  Synthetic oligonucleotide
cttcgatatggaaatgtccttgatgtgaatgccatcgacattgaggaaccaagtggtcag

SEQ ID NO: 34609 - DNA, 60 bp, Artificial
  Synthetic oligonucleotide
gacacagcagcagttagcctccttggtggtcctgctaccaacagggactacctacggcag

SEQ ID NO: 34610 - DNA, 60 bp, Artificial
  Synthetic oligonucleotide
agggcacaggagacatcctagtagactgttcaggtgggcaacaacatttcttaaaagata

SEQ ID NO: 34611 - DNA, 59 bp, Artificial
  Synthetic oligonucleotide
aatcaatttgctaattctgcttaatacaggggggctgtgcggcaacgatctctttgaga

SEQ ID NO: 34612 - DNA, 60 bp, Artificial
  Synthetic oligonucleotide
aggtagatttaagtgtatcttctatcgatagggcctggggttcaggggtaggctttaatc

SEQ ID NO: 34613 - DNA, 60 bp, Artificial
  Synthetic oligonucleotide
tcaggatatcaaagaatgattgcaacaaaagactcctttcaatcattcaatattacagaa

SEQ ID NO: 34614 - DNA, 60 bp, Artificial
  Synthetic oligonucleotide
tcaggatatcaaagaatgatcgcaacgaaagactcctttcaatcattcaatattacagaa

SEQ ID NO: 34615 - DNA, 60 bp, Artificial
  Synthetic oligonucleotide
ctggtgagtggttattggggatattaagtgggaattggatggttgttgctgtcttgattg

SEQ ID NO: 34616 - DNA, 60 bp, Artificial
  Synthetic oligonucleotide
gcttgtgattctgcaatgtgttatggttcaagcacagctaatttagtacgagggcaaaac

SEQ ID NO: 34617 - DNA, 60 bp, Artificial
  Synthetic oligonucleotide
ggcttgtgattctgcaatgtgttacggttctagcacagctaatttagtacgagggcaaaa

SEQ ID NO: 34618 - DNA, 60 bp, Artificial
  Synthetic oligonucleotide
cttctattgatggggcctggggttcaggggtaggctttaatctagtttgttcagttagtc

SEQ ID NO: 34619 - DNA, 60 bp, Artificial
  Synthetic oligonucleotide
gtgtatcttctatcgatagggcctggggttcaggggtaggctttaatctagtttgttcag

SEQ ID NO: 34620 - DNA, 60 bp, Artificial
  Synthetic oligonucleotide
agacttaagtgtatcttctattgatggggcctggggttcaggggtaggctttaatctagt

SEQ ID NO: 34621 - DNA, 60 bp, Artificial
  Synthetic oligonucleotide
ggtgagtggttattggggatattaagtgggaattggatggttgttgctgtcttgattgcc

SEQ ID NO: 34622 - DNA, 60 bp, Artificial
  Synthetic oligonucleotide
ttggggatattaagtgggaattggatggttgttgcagtcttgattgctctgtttgtattc

SEQ ID NO: 34623 - DNA, 60 bp, Artificial
  Synthetic oligonucleotide
ggggatattaagtgggaattggatggttgttgcagtcttgattgctctgtttgtattctc

SEQ ID NO: 34624 - DNA, 50 bp, Artificial
  Synthetic oligonucleotide
ataaattttacactagtcccaaaaaaaactattacttcactactattcta

SEQ ID NO: 34625 - DNA, 60 bp, Artificial
  Synthetic oligonucleotide
tgcaagcctgacttgcacaggctgttatgcttgtagctctggcatttcctgcaaagttag

SEQ ID NO: 34626 - DNA, 60 bp, Artificial
  Synthetic oligonucleotide
cggcacgtcagtacgtaagtgttaactttgagtgtgcattaagggcaacttgtaggcaac

SEQ ID NO: 34627 - DNA, 60 bp, Artificial
  Synthetic oligonucleotide
acactactcctgccaaacttcatttagacttaaccttgactgcgtgccgccactatatct

SEQ ID NO: 34628 - DNA, 60 bp, Artificial
  Synthetic oligonucleotide
ctcctgccaaacttcatttagacttaaccttgactgcgtgccgccactatatctttgaga

SEQ ID NO: 34629 - DNA, 52 bp, Artificial
  Synthetic oligonucleotide
ggcccaactcaatttcgataccgttagagtcttcttcctcaatcagaagaag

SEQ ID NO: 34630 - DNA, 60 bp, Artificial
  Synthetic oligonucleotide
taagacggcacaaccgagtgttgatcttacatttggtggcatcaaatttacactggttaa

SEQ ID NO: 34631 - DNA, 60 bp, Artificial
  Synthetic oligonucleotide
taagacggcacaaccgagtgttgatcttacatttggtggcatcaaatttacattggttaa

SEQ ID NO: 34632 - DNA, 60 bp, Artificial
  Synthetic oligonucleotide
ctggagagaaagtatctctagggagaagattttgtctgttaagcagaagtgtttgcctga

SEQ ID NO: 34633 - DNA, 60 bp, Artificial
  Synthetic oligonucleotide
ctggagagaaagtatctctagggagaagattttgtctgttaagcaaaagtgtttacctga

SEQ ID NO: 34634 - DNA, 60 bp, Artificial
  Synthetic oligonucleotide
ttggattagacataatattctgtgagcatgaaatgagcctggttgtgaggaaaccaggtg

SEQ ID NO: 34635 - DNA, 60 bp, Artificial
  Synthetic oligonucleotide
gaagctgaagttattgattcatgccatgattatcattactttgagaagtttgggttagac

SEQ ID NO: 34636 - DNA, 60 bp, Artificial
  Synthetic oligonucleotide
agctaggatctgaactagccccagacaccacagtgatactatcacttaagcaaaatctga

SEQ ID NO: 34637 - DNA, 60 bp, Artificial
  Synthetic oligonucleotide
gcagaagtgtttacctgataacactgtccctaccaacaggctcctatctacatcaactgt

SEQ ID NO: 34638 - DNA, 60 bp, Artificial
  Synthetic oligonucleotide
ttaagcaaaagtgtttacctgatagtactgtccctaccaacaggctcctatctacatcaa

SEQ ID NO: 34639 - DNA, 60 bp, Artificial
  Synthetic oligonucleotide
ttaagcagaagtgtttacctgataacactgtccctaccaacaggctcctatctacatcaa

SEQ ID NO: 34640 - DNA, 58 bp, Artificial
  Synthetic oligonucleotide
ttaagcagaagtgtttgcctgataacactgtccctaccaacaggctcctatctacatc

SEQ ID NO: 34641 - DNA, 60 bp, Artificial
  Synthetic oligonucleotide
ggagagaaagtatctctagggagaagattttgtctgttaagcagaagtgtttacctgata

SEQ ID NO: 34642 - DNA, 60 bp, Artificial
  Synthetic oligonucleotide
attcgtcaaaagctatggcacaagagacaacagagcaatcaatgattgctattctgtctt

SEQ ID NO: 34643 - DNA, 60 bp, Artificial
  Synthetic oligonucleotide
gtcaaaagctatggcacaagtgacaacagagcaatcaatgattgctattctgtcttctct

SEQ ID NO: 34644 - DNA, 60 bp, Artificial
  Synthetic oligonucleotide
gtcaaaagctatggcacaagagacaacagagcaatcaatgattgctattctgtcttctct

SEQ ID NO: 34645 - DNA, 60 bp, Artificial
  Synthetic oligonucleotide
ctgcattcagcatcaacgatttgggcaggaatgaggatatcaaaatccatgaagctgaag

SEQ ID NO: 34646 - DNA, 60 bp, Artificial
  Synthetic oligonucleotide
tctgcattcagcatcaacgatttgggcaggaatgaggatatcaaaatccatgaagctgaa

SEQ ID NO: 34647 - DNA, 60 bp, Artificial
  Synthetic oligonucleotide
gaaagtgatcctaactataatcagatgattgttaaagagttgttgggtgtttatactcaa

SEQ ID NO: 34648 - DNA, 60 bp, Artificial
  Synthetic oligonucleotide
caaaatctgaacgttgacttaaaatctcaataccgcatttcgtttcatggcatccaagag

SEQ ID NO: 34649 - DNA, 60 bp, Artificial
  Synthetic oligonucleotide
tgaagctgaagttattgattcatgccatgattatcattactttgagaagtttgggttaga

SEQ ID NO: 34650 - DNA, 60 bp, Artificial
  Synthetic oligonucleotide
tgaagctgaagttattgattcatgccatgattatcattactttgagaagtttggattaga

SEQ ID NO: 34651 - DNA, 60 bp, Artificial
  Synthetic oligonucleotide
aggaaatgcctatttcctttcaaaaacccttgaagttcttcctaaatcactttccactct

SEQ ID NO: 34652 - DNA, 50 bp, Artificial
  Synthetic oligonucleotide
aaaacccttgaagttcttcccaaatcactttccactctgagttacttagg

SEQ ID NO: 34653 - DNA, 60 bp, Artificial
  Synthetic oligonucleotide
aagttcttcctaaatcactttccactctgagttacttaggaagcattgcaccaattcaat

SEQ ID NO: 34654 - DNA, 60 bp, Artificial
  Synthetic oligonucleotide
gttcttcctaaatcactttccactctgagttacttaggaagcattgcaccaattcaatgg

SEQ ID NO: 34655 - DNA, 60 bp, Artificial
  Synthetic oligonucleotide
gaacaacaatcatatagatgtttatggcaggatcctgaattaccagacagatgcagaggg

SEQ ID NO: 34656 - DNA, 60 bp, Artificial
  Synthetic oligonucleotide
cgtttatggaaggatcctgaattaccagacagatgcagagggaaatgcctatttcctttc

SEQ ID NO: 34657 - DNA, 60 bp, Artificial
  Synthetic oligonucleotide
ttaccagacagatgcagagggaaatgcctatttcctttcaaaaacccttgaagttcttcc

SEQ ID NO: 34658 - DNA, 60 bp, Artificial
  Synthetic oligonucleotide
agagggaaatgcctatttcctttcaaaaacccttgaagttcttcccaaatcactttccac

SEQ ID NO: 34659 - DNA, 60 bp, Artificial
  Synthetic oligonucleotide
gacaacatcctactggagagaaagtatctctagggagaagattttgtctgttaagcaaaa

SEQ ID NO: 34660 - DNA, 60 bp, Artificial
  Synthetic oligonucleotide
gacaacatcctattggagagaaagtatctctagggagaagattttgtctgttaagcagaa

SEQ ID NO: 34661 - DNA, 60 bp, Artificial
  Synthetic oligonucleotide
gagatttgactcttgactacgggttttctgttatgggaaagacaacatcctactggagag

SEQ ID NO: 34662 - DNA, 60 bp, Artificial
  Synthetic oligonucleotide
gacaacatcctactggagagaaagtatctctagggagaagattttgtctgttaagcagaa

SEQ ID NO: 34663 - DNA, 60 bp, Artificial
  Synthetic oligonucleotide
gctacaaatggagatttgactctcgactatgggttttctgttatgggaaagacaacatcc

SEQ ID NO: 34664 - DNA, 60 bp, Artificial
  Synthetic oligonucleotide
gctacaaatggagatttgactcttgactacgggttttctgttatgggaaagacaacatcc

SEQ ID NO: 34665 - DNA, 60 bp, Artificial
  Synthetic oligonucleotide
ttgggttagacataatattctgtgagcatgaaatgagcctagttgtgaggaaaccaggtg

SEQ ID NO: 34666 - DNA, 60 bp, Artificial
  Synthetic oligonucleotide
ttgggttagacataatattctgtgagcatgaaatgagcctggttgtggggaaaccaggtg

SEQ ID NO: 34667 - DNA, 60 bp, Artificial
  Synthetic oligonucleotide
atcacttaagcaaaatctgaacgttgacttaaaatctcaataccgcgtttcgtttcatgg

SEQ ID NO: 34668 - DNA, 60 bp, Artificial
  Synthetic oligonucleotide
caccacagtgatactatcacttaagcaaaatctgaacgttgacttaaaatctcaataccg

SEQ ID NO: 34669 - DNA, 60 bp, Artificial
  Synthetic oligonucleotide
ttttacaaactgtttgaatattttgaagtgcaggaagcagatctttgctgcttgcaaaag

SEQ ID NO: 34670 - DNA, 60 bp, Artificial
  Synthetic oligonucleotide
cacaaactgtttgaatattttgaagtgcaggaagcagatctttgctgcttgcaaaagtgg

SEQ ID NO: 34671 - DNA, 60 bp, Artificial
  Synthetic oligonucleotide
gtttgaatattttgaagtgcaggaagcagatctttgctgcttgcaaaagtggtaagtatg

SEQ ID NO: 34672 - DNA, 54 bp, Artificial
  Synthetic oligonucleotide
tccaaagcagacgggcagctgtgtcagcattggaggacaaattggcagaattca

SEQ ID NO: 34673 - DNA, 60 bp, Artificial
  Synthetic oligonucleotide
gtccacatgcaatgatactaagaataaggtacagggatattacatctgcattgtaggggg

SEQ ID NO: 34674 - DNA, 60 bp, Artificial
  Synthetic oligonucleotide
ccatggcatacagcaaagtgtcactatgagcgggattatcagtatgaaacaagttggggc

SEQ ID NO: 34675 - DNA, 60 bp, Artificial
  Synthetic oligonucleotide
cagcaggcaataacagacatttgtcaattttctgagtacacaccaaacaaagaaagcatt

SEQ ID NO: 34676 - DNA, 60 bp, Artificial
  Synthetic oligonucleotide
gaaggggccatgtgaaattatccaggggctcagaggttgttttggatgcatgcgattcaa

SEQ ID NO: 34677 - DNA, 60 bp, Artificial
  Synthetic oligonucleotide
cctcaatcagaagaaggccaagatggtactcagtaagacggcacaaccaagtgttgatct

SEQ ID NO: 34678 - DNA, 60 bp, Artificial
  Synthetic oligonucleotide
agacggcacaaccaagtgttgatcttacatttggtggcatcaagtttacactggttaata

SEQ ID NO: 34679 - DNA, 60 bp, Artificial
  Synthetic oligonucleotide
gccgaggccatggaaaaaattgtcatgccacttgctgaagtaaaaggttgtacctggact

SEQ ID NO: 34680 - DNA, 60 bp, Artificial
  Synthetic oligonucleotide
gatccaacagggcttgagcctgatgaccatttgaaggagaagtcttccttacggtatggc

SEQ ID NO: 34681 - DNA, 56 bp, Artificial
  Synthetic oligonucleotide
gtagtagactccttgaaaagctactactaaaaccgctggtatgagccaactcaaag

SEQ ID NO: 34682 - DNA, 52 bp, Artificial
  Synthetic oligonucleotide
gtagtagactccttgaaaagctactactaaaaccgctgggatgacggaactc

SEQ ID NO: 34683 - DNA, 54 bp, Artificial
  Synthetic oligonucleotide
tagtagtagactccttgaaaagctactactaaaaccgctgggatgacggaactc

SEQ ID NO: 34684 - DNA, 55 bp, Artificial
  Synthetic oligonucleotide
tagtagtagactccttgaaaagctactactaaaaccgctggtatgagccaactca

SEQ ID NO: 34685 - DNA, 53 bp, Artificial
  Synthetic oligonucleotide
gtagtagactccttgaaaagctactactaaaaccgctggtatgagccaactca

SEQ ID NO: 34686 - DNA, 58 bp, Artificial
  Synthetic oligonucleotide
tagtagtagactccttgaaaagctactactaaaaccgctggtatgagccaactcaaag

SEQ ID NO: 34687 - DNA, 60 bp, Artificial
  Synthetic oligonucleotide
tcaacccgccttggggggacatcaacaagtcaggccgatcaggaatagcacttgttgcaa

SEQ ID NO: 34688 - DNA, 50 bp, Artificial
  Synthetic oligonucleotide
tagtagtagacttcgtaaagagctactactacaagtgctgggatgagcca

SEQ ID NO: 34689 - DNA, 60 bp, Artificial
  Synthetic oligonucleotide
gattatcaatatgagacaagttggggttgtaacccacctgattgcccaggggtagggaca

SEQ ID NO: 34690 - DNA, 60 bp, Artificial
  Synthetic oligonucleotide
gagttgggctgcaaacagcatctatagagggtgcatggggctctggagttggatttactc

SEQ ID NO: 34691 - DNA, 60 bp, Artificial
  Synthetic oligonucleotide
tttggaacctatgaatctgattctatcacagaatcagagggttatgatctttctgctaga

SEQ ID NO: 34692 - DNA, 60 bp, Artificial
  Synthetic oligonucleotide
tggaacctatgaatctgattctatcacagaatcagagggttatgatctttctgcaagaat

SEQ ID NO: 34693 - DNA, 60 bp, Artificial
  Synthetic oligonucleotide
gccctggttgatcccaacatgccatctgaaaagcaagtcattctgaagggtcaggggaca

SEQ ID NO: 34694 - DNA, 60 bp, Artificial
  Synthetic oligonucleotide
tgaataatactccagaaaactgctgtcagctgcatttgatgtgcagccaagaatacaaga

SEQ ID NO: 34695 - DNA, 56 bp, Artificial
  Synthetic oligonucleotide
ctccagaaaactgctgtcagctgcatttgatgtgcagccaagaatacaagaagggg

SEQ ID NO: 34696 - DNA, 60 bp, Artificial
  Synthetic oligonucleotide
aacactccagaaaactgctgtcagctgcatttgatgtgcagccaagaatacaagaagggg

SEQ ID NO: 34697 - DNA, 60 bp, Artificial
  Synthetic oligonucleotide
gtcagctgcatttgatgtgcagccaagaatacaagaagggggtttcttttggtagtgtca

SEQ ID NO: 34698 - DNA, 60 bp, Artificial
  Synthetic oligonucleotide
aatactccagaaaactgctgtcagctgcatttgatgtgcagccaagaatacaagaagggg

SEQ ID NO: 34699 - DNA, 60 bp, Artificial
  Synthetic oligonucleotide
ctccagaaaactgctgtcagctgcatttgatgtgcagccaagaatacaagaagggggttt

SEQ ID NO: 34700 - DNA, 60 bp, Artificial
  Synthetic oligonucleotide
cactgcctgactacggacttaccatacaccggttgtcaggttacctggccagatgggcac

SEQ ID NO: 34701 - DNA, 60 bp, Artificial
  Synthetic oligonucleotide
acgcattgctggtaaggtaactggtaaagcgccatccacagaagcatctgacacaataca

SEQ ID NO: 34702 - DNA, 60 bp, Artificial
  Synthetic oligonucleotide
ttgacctgcacactagcacagcaacccagcaatcattcacaaggtggacatgggaaatga

SEQ ID NO: 34703 - DNA, 60 bp, Artificial
  Synthetic oligonucleotide
gtctcaggtcagttggttgaaggagtatgtttcaatcctgtacacacaatggctctctcc

SEQ ID NO: 34704 - DNA, 60 bp, Artificial
  Synthetic oligonucleotide
tctacttgtttccattgtgctgcccccggagacccacctacacaaaagagcataagcctt

SEQ ID NO: 34705 - DNA, 60 bp, Artificial
  Synthetic oligonucleotide
ctaccacgactaacctaatgagagggcagaacacagtccatattgttgggaagggaggtc

SEQ ID NO: 34706 - DNA, 60 bp, Artificial
  Synthetic oligonucleotide
gacgggaacacaatatcaggatacaaacggatgattgctactaaagattctttccagtcc

SEQ ID NO: 34707 - DNA, 60 bp, Artificial
  Synthetic oligonucleotide
gaatttgagactggttggggctgtaatccccctgaatgtcctggtgtagggacaggctgc

SEQ ID NO: 34708 - DNA, 60 bp, Artificial
  Synthetic oligonucleotide
taaactcaggttggacagatactgcacatggttcaggtgttattcccatgagaactgact

SEQ ID NO: 34709 - DNA, 60 bp, Artificial
  Synthetic oligonucleotide
gaaaccgcaaaagaattagaatcccatcgaaaaagctgtcctattggctcctgcccttat

SEQ ID NO: 34710 - DNA, 60 bp, Artificial
  Synthetic oligonucleotide
tccctgggattgcacattcacttgctgtagaattatgcgtgccaggccttcatggctggg

SEQ ID NO: 34711 - DNA, 59 bp, Artificial
  Synthetic oligonucleotide
catggactgggttcataccattacctggggagattgaaaagacatcgcagtgcacagtc

SEQ ID NO: 34712 - DNA, 60 bp, Artificial
  Synthetic oligonucleotide
ttgctcaaaatgcaacaagtacgtttaacccggagctccaatatgctacatttaaacgta

SEQ ID NO: 34713 - DNA, 60 bp, Artificial
  Synthetic oligonucleotide
caagtacgtttaacccggagctccaatatgctacatttaaacgtacaaacacaacagggc

SEQ ID NO: 34714 - DNA, 60 bp, Artificial
  Synthetic oligonucleotide
cacaacagggcttaattacgacaatattagaatcttctatctcaatgggaagagatccaa

SEQ ID NO: 34715 - DNA, 60 bp, Artificial
  Synthetic oligonucleotide
ctatctcaatgggaagagatccaaagatactctctctaagagaagtgaacaatcggttgt

SEQ ID NO: 34716 - DNA, 60 bp, Artificial
  Synthetic oligonucleotide
tttaaacgtacaaacacaacagggcttaattacgacaatattagaatcttctatctcaat

SEQ ID NO: 34717 - DNA, 60 bp, Artificial
  Synthetic oligonucleotide
actttggaggctggagaattcctgtggttaatacacattttcctggaaaccggaacagtc

SEQ ID NO: 34718 - DNA, 60 bp, Artificial
  Synthetic oligonucleotide
aatcggttgttcttaactttggaggctggagaattcctgtggttaatacacattttcctg

SEQ ID NO: 34719 - DNA, 54 bp, Artificial
  Synthetic oligonucleotide
tctcatcactaggttggaagaaagccaatgttagctctgctgctagagaatttt

SEQ ID NO: 34720 - DNA, 60 bp, Artificial
  Synthetic oligonucleotide
tctcatcactaggttggaagaaagccaatgttagctctgctgctagagaatttttggcta

SEQ ID NO: 34721 - DNA, 60 bp, Artificial
  Synthetic oligonucleotide
gagatccaaagatactctctctaagagaagtgaacaatcggttgttcttaactttggagg

SEQ ID NO: 34722 - DNA, 60 bp, Artificial
  Synthetic oligonucleotide
cagcacctgagcaagcaatcatcaggtcaaaaatcataaaccctatagctgcatcaaacg

SEQ ID NO: 34723 - DNA, 60 bp, Artificial
  Synthetic oligonucleotide
gtactgaaatgttcctggagactttcaaattctacccccttgcaattggaatatacaaag

SEQ ID NO: 34724 - DNA, 60 bp, Artificial
  Synthetic oligonucleotide
cattttcctggaaaccggaacagtccagtcctcgatgattcattcacacttcatagagta

SEQ ID NO: 34725 - DNA, 60 bp, Artificial
  Synthetic oligonucleotide
ccggaacagtccagtcctcgatgattcattcacacttcatagagtaagtggttacctggc

SEQ ID NO: 34726 - DNA, 51 bp, Artificial
  Synthetic oligonucleotide
tatgagacagaaatatgctgggttagatgcatctcaatggacgcaacaaaa

SEQ ID NO: 34727 - DNA, 60 bp, Artificial
  Synthetic oligonucleotide
tatgagacagaaatatgctgggttagatgcatctcaatggacgcaacaaaaatataatga

SEQ ID NO: 34728 - DNA, 60 bp, Artificial
  Synthetic oligonucleotide
atatacaaagttcagaaaaagatgatggaggctaaatacttggagaaaactatgagacag

SEQ ID NO: 34729 - DNA, 59 bp, Artificial
  Synthetic oligonucleotide
aaaagatgatggaggctaaatacttggagaaaactatgagacagaaatatgctgggtta

SEQ ID NO: 34730 - DNA, 60 bp, Artificial
  Synthetic oligonucleotide
cattgctgtactaacatcacaacaacactacctcatccacaacccctccccttaactacc

SEQ ID NO: 34731 - DNA, 60 bp, Artificial
  Synthetic oligonucleotide
cacaacaacactacctcatccacaacccctccccttaactacctcaacaatactacctca

SEQ ID NO: 34732 - DNA, 60 bp, Artificial
  Synthetic oligonucleotide
gtgcacctgatagatgcccaccgacagcattgtatgtagcaggagttccagagctaggtg

SEQ ID NO: 34733 - DNA, 60 bp, Artificial
  Synthetic oligonucleotide
tgccaactgcacagtcaacaatgaaggctgaagagataacacctgggcgattccggacaa

SEQ ID NO: 34734 - DNA, 60 bp, Artificial
  Synthetic oligonucleotide
gcaacaccgcattctgtatgggtatttgcatgtgcacctgatagatgcccgccgacagca

SEQ ID NO: 34735 - DNA, 60 bp, Artificial
  Synthetic oligonucleotide
acgggcagctgtgtctacattggagactaaactcggggaactcaagcggcaactggcaga

SEQ ID NO: 34736 - DNA, 60 bp, Artificial
  Synthetic oligonucleotide
ttaatctgggtttatgggccactactgttcttatttgcactaaagggttaaggtggggag

SEQ ID NO: 34737 - DNA, 60 bp, Artificial
  Synthetic oligonucleotide
ggcttgagcctgatgaccatctgaaggagaagtcttccttacggtatggcaatgtcatcg

SEQ ID NO: 34738 - DNA, 60 bp, Artificial
  Synthetic oligonucleotide
actgcaaaagctggaatgagcaacctccaagacatccaagacagcatcacagtacacgaa

SEQ ID NO: 34739 - DNA, 60 bp, Artificial
  Synthetic oligonucleotide
ggaatgagcaacctccaagacatccaggacagcatcacagtacacgaacaacagctcgtg

SEQ ID NO: 34740 - DNA, 61 bp, Artificial
  Synthetic oligonucleotide
ggttactaacaaatcatactactcaaacagatgtaaatttcgttcaatgccttgctattgc

SEQ ID NO: 34741 - DNA, 60 bp, Artificial
  Synthetic oligonucleotide
atacttcaggacatgcgcaacaccatcatggcttcaaagtcagttggcactgctgaggag

SEQ ID NO: 34742 - DNA, 60 bp, Artificial
  Synthetic oligonucleotide
gtttcgggcttgagccaatcagttactcatctcaggatctttccttaatgtgactactaa

SEQ ID NO: 34743 - DNA, 60 bp, Artificial
  Synthetic oligonucleotide
ggtgcccgccgacagcattgtatgtagcaggagttccagagctaggtgcattctttgcca

SEQ ID NO: 34744 - DNA, 60 bp, Artificial
  Synthetic oligonucleotide
agaaattgaatctgcaacactgtttactgacattgcaacaccacattctgtatgggtatt

SEQ ID NO: 34745 - DNA, 60 bp, Artificial
  Synthetic oligonucleotide
aggaccagtaacaatcaccttgtctgagccaaggaacattcagcagaagcttcctcctga

SEQ ID NO: 34746 - DNA, 60 bp, Artificial
  Synthetic oligonucleotide
gccagatgagctcacagtgcatgtgaaaagcagcgacccagacattgtggcagccagctc

SEQ ID NO: 34747 - DNA, 60 bp, Artificial
  Synthetic oligonucleotide
cggaatgataaggctaccacaagtcacccatgaaggcacctttataccgggaacctataa

SEQ ID NO: 34748 - DNA, 60 bp, Artificial
  Synthetic oligonucleotide
tcagcttcaaccatgggtacactcaccacgagtctggaggacactgcgctgatgactctg

SEQ ID NO: 34749 - DNA, 60 bp, Artificial
  Synthetic oligonucleotide
gctatccgaaagcatcaaactccgggctccagctaattaacattacccagcactcaatta

SEQ ID NO: 34750 - DNA, 60 bp, Artificial
  Synthetic oligonucleotide
accaacagcagtcacagcggaccagacagaagcctccaccagcccacaagtcaccactga

SEQ ID NO: 34751 - DNA, 60 bp, Artificial
  Synthetic oligonucleotide
tgcttcttcctcaggttgcagttaacatttcaaactgtcatgtccttatcaagtcccatg

SEQ ID NO: 34752 - DNA, 60 bp, Artificial
  Synthetic oligonucleotide
ggacactgcgctgatgactctgaccggcagaagtatcctaacatcacaatcccaaacagg

SEQ ID NO: 34753 - DNA, 60 bp, Artificial
  Synthetic oligonucleotide
acctcaactgcagctacaacatatgcccttattgtgcctccagactcacctcagaggggc

SEQ ID NO: 34754 - DNA, 60 bp, Artificial
  Synthetic oligonucleotide
tgaacagccacagagcatcctcatcgaacatacaggtacaatcattggcaagcagaacga

SEQ ID NO: 34755 - DNA, 60 bp, Artificial
  Synthetic oligonucleotide
agtccaccacactccccgctgtgacccctactccagctgaaacaactacacatgccaatc

SEQ ID NO: 34756 - DNA, 60 bp, Artificial
  Synthetic oligonucleotide
gtcaacctgcctttacaaggagtggccacattcgagaaactggagatgcaaccccacctg

SEQ ID NO: 34757 - DNA, 60 bp, Artificial
  Synthetic oligonucleotide
ggcacaggtgacatcttagtagactgctcaggagggcagcagcattttctacagagcaac

SEQ ID NO: 34758 - DNA, 60 bp, Artificial
  Synthetic oligonucleotide
cctgagaaagctcctctccgcagtaagcaccgaagcagcaccccaaacctcaccaacagc

SEQ ID NO: 34759 - DNA, 60 bp, Artificial
  Synthetic oligonucleotide
catttgacagaaccagtaagccccaaacaccacgaagcacaaaccaacccctgagaaagc

SEQ ID NO: 34760 - DNA, 60 bp, Artificial
  Synthetic oligonucleotide
agagtgacggcccatggagacacaccacagctggacttgaaggcaaggcctaggtatggt

SEQ ID NO: 34761 - DNA, 60 bp, Artificial
  Synthetic oligonucleotide
ccaactgcatcaagtgctaatattgctctaacatggagctcagtggaacacaggggcaac

SEQ ID NO: 34762 - DNA, 60 bp, Artificial
  Synthetic oligonucleotide
ggggactggccctcctgcacatacaccggggtgacacaacacaatcatgccgcatttgca

SEQ ID NO: 34763 - DNA, 60 bp, Artificial
  Synthetic oligonucleotide
aatggccaaaggcaacctgcactggcaactgcccggagagatgcggctgcacatcgtcaa

SEQ ID NO: 34764 - DNA, 60 bp, Artificial
  Synthetic oligonucleotide
tctgtaagcgtatgtgtttcaaggcaattatcgaagccagcaacaaggtcctattcatca

SEQ ID NO: 34765 - DNA, 58 bp, Artificial
  Synthetic oligonucleotide
tagagatggaaaacctaccggcaggaacctgggaacgagaagaagagctcacaaactt

SEQ ID NO: 34766 - DNA, 60 bp, Artificial
  Synthetic oligonucleotide
agcaccccaaacctcaccaacagcagtcacagcggaccagacagaagcctccaccagccc

SEQ ID NO: 34767 - DNA, 60 bp, Artificial
  Synthetic oligonucleotide
gcaagaactgtgagatagacagtgcaccagtacaatgcaggcaaggttattgcttgaaaa

SEQ ID NO: 34768 - DNA, 60 bp, Artificial
  Synthetic oligonucleotide
atagcatcatctccctctgacacactaacttaacaaaataccgcactgcacgatgctgcc

SEQ ID NO: 34769 - DNA, 60 bp, Artificial
  Synthetic oligonucleotide
cttgcttcaactgtcacaaaggtacacggtaaacagacagccaatgtgcaacgctgccaa

SEQ ID NO: 34770 - DNA, 60 bp, Artificial
  Synthetic oligonucleotide
accatccatataaaacaacagctctaccaatcccccatccccaaaccctgtaaatcttgc

SEQ ID NO: 34771 - DNA, 60 bp, Artificial
  Synthetic oligonucleotide
cttgacggcgagagacttgcagataggaagatcgctgaacttttctcaactaagacacac

SEQ ID NO: 34772 - DNA, 60 bp, Artificial
  Synthetic oligonucleotide
gttcgagtaacacatcaaaccactccaagacaacaccccagctaacatcctcaggctcag

SEQ ID NO: 34773 - DNA, 60 bp, Artificial
  Synthetic oligonucleotide
ctgcacgatgctgcctcagcttccacttactcgtagataacttcaactgcgtgccgccac

SEQ ID NO: 34774 - DNA, 55 bp, Artificial
  Synthetic oligonucleotide
ccaccagcccacaagtcaccactgacacctccccatccactccaacccaggtcac

SEQ ID NO: 34775 - DNA, 60 bp, Artificial
  Synthetic oligonucleotide
accgggtcacctctcgcaagcccccccacagctgagcccttcaagtctttttatgctaaa

SEQ ID NO: 34776 - DNA, 60 bp, Artificial
  Synthetic oligonucleotide
agtgctactattcaggtcaccaagtcaactgggcaccaccgggtcacctctcgcaagccc

SEQ ID NO: 34777 - DNA, 60 bp, Artificial
  Synthetic oligonucleotide
caaagcgttctcctctatgcctaaagattctctgtgcttttatattgtcgaaagagacta

SEQ ID NO: 34778 - DNA, 60 bp, Artificial
  Synthetic oligonucleotide
gctgctgcacctcactttagaagaggattctgaaggcttactggagtggtgcactagaac

SEQ ID NO: 34779 - DNA, 60 bp, Artificial
  Synthetic oligonucleotide
agccctggtcaccccaaccgcacacatcagcccgacaaatagatccaaaaggaactctga

SEQ ID NO: 34780 - DNA, 60 bp, Artificial
  Synthetic oligonucleotide
tcaacaaacccagcccaccaccatgccaaacaccacagccctggtcaccccaaccgcaca

SEQ ID NO: 34781 - DNA, 60 bp, Artificial
  Synthetic oligonucleotide
gggcatttgccttgtcataatggggagtgttcttctggcagtctccttgctggttagggg

SEQ ID NO: 34782 - DNA, 60 bp, Artificial
  Synthetic oligonucleotide
gaccaccaactgtgtgatcaaaggaaaagaagttcggaagggacagtcaacccttaggca

SEQ ID NO: 34783 - DNA, 60 bp, Artificial
  Synthetic oligonucleotide
gtgcacggagacgattacggtggacctggcgagaaaattaccatctgcaatggttcaacc

SEQ ID NO: 34784 - DNA, 60 bp, Artificial
  Synthetic oligonucleotide
cctacaggtatctgagtcaacaggtgtggccttaaaaagaagcagctggatgatcgtgct

SEQ ID NO: 34785 - DNA, 60 bp, Artificial
  Synthetic oligonucleotide
cataagtgctactgtggcctactgtgctgtccttactgtagggcttgctcaactgaccag

SEQ ID NO: 34786 - DNA, 60 bp, Artificial
  Synthetic oligonucleotide
agcacaacaactatggctcggccaagcacagtgactcagatcactacagcacaagccatg

SEQ ID NO: 34787 - DNA, 60 bp, Artificial
  Synthetic oligonucleotide
cggcacgtcagttcgtaagtatcagtcttgagagtgtgcgtgaaacgtcctgcatgcaat

SEQ ID NO: 34788 - DNA, 60 bp, Artificial
  Synthetic oligonucleotide
caggtgctagcacagccttcaacccagtgcacaatgcaaccaccgatggtcaaaagcagt

SEQ ID NO: 34789 - DNA, 60 bp, Artificial
  Synthetic oligonucleotide
gtacatcaagacagaggccatagtgtgtgttgagcttaccagtcaagaaaggcagtgcag

SEQ ID NO: 34790 - DNA, 60 bp, Artificial
  Synthetic oligonucleotide
gttgaagggggacagagtgaatgggcacctgatccacaaggttgagccacacctgaacac

SEQ ID NO: 34791 - DNA, 60 bp, Artificial
  Synthetic oligonucleotide
cagctatgacattacaatcacctctgcagcttagattccgtatgcaggcaaaacaacacc

SEQ ID NO: 34792 - DNA, 60 bp, Artificial
  Synthetic oligonucleotide
cggaaaggtgtgcctcttgtagatcctgaaatacaatgtgctgggctaatgatgtatgat

SEQ ID NO: 34793 - DNA, 59 bp, Artificial
  Synthetic oligonucleotide
aaacagctagctgctctaaggctgtgtatagaaatatggaggtggggtaaatataacag

SEQ ID NO: 34794 - DNA, 55 bp, Artificial
  Synthetic oligonucleotide
aaccggttcttcgagttttaatgcaagaagtgtctactgaattgcaacggtgtgg

SEQ ID NO: 34795 - DNA, 60 bp, Artificial
  Synthetic oligonucleotide
catgagcgattaggggagttctctttcttgggtaaagtccaatggaaagtattcatacca

SEQ ID NO: 34796 - DNA, 60 bp, Artificial
  Synthetic oligonucleotide
taagagatatgacatgtttgcagatgcatgcaaataggagagcatattctgggaagcaat

SEQ ID NO: 34797 - DNA, 60 bp, Artificial
  Synthetic oligonucleotide
gacttgctagtttatcttgtcaggaagttaaatgatccaagcattgttacagctatgaca

SEQ ID NO: 34798 - DNA, 50 bp, Artificial
  Synthetic oligonucleotide
cactgcggaccttgtaattgatactgaggcgactgaatcaaagcgagtgc

SEQ ID NO: 34799 - DNA, 60 bp, Artificial
  Synthetic oligonucleotide
gtaccattagctcagcttgacccgtataatttaaccgaacttgagagcattgttagagga

SEQ ID NO: 34800 - DNA, 66 bp, Artificial
  Synthetic oligonucleotide
gacctcttcaatactttagtgtcatgtacattttcaaaagaatttgcatggaaagactttatcagc

SEQ ID NO: 34801 - DNA, 60 bp, Artificial
  Synthetic oligonucleotide
gatctaattgatgagatgataaagcatgattggtctgataacaaggacaaggaaacacct

SEQ ID NO: 34802 - DNA, 60 bp, Artificial
  Synthetic oligonucleotide
gagggcaatattatcaagttcatagaggtgacagtgactgtcgatgtagacaaaggtata

SEQ ID NO: 34803 - DNA, 60 bp, Artificial
  Synthetic oligonucleotide
cacctatatctgatgtgttgatctatgcaggtattcctctagatctgattacaggtatgg

SEQ ID NO: 34804 - DNA, 60 bp, Artificial
  Synthetic oligonucleotide
gggggtgtaggggcaattgaatgcattgatctcctagactctttatatgctataaggcat

SEQ ID NO: 34805 - DNA, 54 bp, Artificial
  Synthetic oligonucleotide
agatgcagagatattatgagattagagataggatacacggccttgagccagggg

SEQ ID NO: 34806 - DNA, 60 bp, Artificial
  Synthetic oligonucleotide
gcgttggtgcaactggaatatatccttctttagtttgtcacacggtataccggcattaca

SEQ ID NO: 34807 - DNA, 60 bp, Artificial
  Synthetic oligonucleotide
gtggcctagtacacgatcaccaggggttgttcaacatatgagaatggtgcaagctgaaat

SEQ ID NO: 34808 - DNA, 60 bp, Artificial
  Synthetic oligonucleotide
ataacttgcgtgatataaggtatcaggcacttgaaacagtaaatacagtaaactttactg

SEQ ID NO: 34809 - DNA, 60 bp, Artificial
  Synthetic oligonucleotide
gttggcatctagggcacttagtgagggatgtgactgagagcatgatcgcccatgcaggtt

SEQ ID NO: 34810 - DNA, 60 bp, Artificial
  Synthetic oligonucleotide
gtggtattggctcttcctccatattggaacttgcaactgcaggaattgggatgtctgata

SEQ ID NO: 34811 - DNA, 60 bp, Artificial
  Synthetic oligonucleotide
aaaagtatcatagagcaaactaaaggttcccaggataaaggaagctctgaaatagagtca

SEQ ID NO: 34812 - DNA, 66 bp, Artificial
  Synthetic oligonucleotide
cgaaattaataattactatagtccagctcatttatttgacaaaactagaaatgtcccagaaccagg

SEQ ID NO: 34813 - DNA, 60 bp, Artificial
  Synthetic oligonucleotide
cctatgactatatctatggcacaggttgacacaaaattggctgctagtatcatcatcagt

SEQ ID NO: 34814 - DNA, 54 bp, Artificial
  Synthetic oligonucleotide
atttcatacacatgttgagcgggagttcaagtatgtcctgccggagtacccaga

SEQ ID NO: 34815 - DNA, 57 bp, Artificial
  Synthetic oligonucleotide
aaaagtgcccttgaatccatgtttaaccttaaatttcatacacatgttgagcgggag

SEQ ID NO: 34816 - DNA, 60 bp, Artificial
  Synthetic oligonucleotide
gtttgcccatcactctgatgatgctttgtttatttatggttatttggagcctgaaggtga

SEQ ID NO: 34817 - DNA, 65 bp, Artificial
  Synthetic oligonucleotide
gagctactgattagccttgctcaaaacaataaattcaggtattactcaaaagtaagaatgttagg

SEQ ID NO: 34818 - DNA, 60 bp, Artificial
  Synthetic oligonucleotide
ccaaggttgagcgattgtatggtactgcaccaggtatggcaaacaatccttgtaactata

SEQ ID NO: 34819 - DNA, 57 bp, Artificial
  Synthetic oligonucleotide
cacagtctcgttgtgtaaaagctctagacatgggagcatcacctcaggttgcccagt

SEQ ID NO: 34820 - DNA, 60 bp, Artificial
  Synthetic oligonucleotide
ttgataatcttaggtaccttataccaccatgcacggctagttattccggtgctgctagcc

SEQ ID NO: 34821 - DNA, 60 bp, Artificial
  Synthetic oligonucleotide
gagcaaaggttgcaagggtatttactgtcaaggaacgagatcaaattatccaaaatccaa

SEQ ID NO: 34822 - DNA, 60 bp, Artificial
  Synthetic oligonucleotide
gcatgaatatctactactgttgggctctgtaaaggtctctcctaagaaaactactgtttc

SEQ ID NO: 34823 - DNA, 60 bp, Artificial
  Synthetic oligonucleotide
ccaatttctgtggtaattgcttataagtttgctgttggcacaaatgagataaaggacgtt

SEQ ID NO: 34824 - DNA, 60 bp, Artificial
  Synthetic oligonucleotide
cacaaatgagataaaggacgttttggataaggctaaattccctgattctttaagtagtga

SEQ ID NO: 34825 - DNA, 60 bp, Artificial
  Synthetic oligonucleotide
gggaactggggctggacataaatgatccatctgtaatgaaacgagtagcacctatgttgt

SEQ ID NO: 34826 - DNA, 60 bp, Artificial
  Synthetic oligonucleotide
ctcttatgttaagcaaataaagattatcccgcatgcagaagtccttaaagctgtctcaat

SEQ ID NO: 34827 - DNA, 60 bp, Artificial
  Synthetic oligonucleotide
gaatggcaatgtcgaaggaacagcagagagtatctgcacctactggttaagatcaatctc

SEQ ID NO: 34828 - DNA, 60 bp, Artificial
  Synthetic oligonucleotide
gatcctgacaatattgattcaaggaagtccatccatggtgtgattggggtatactcaaaa

SEQ ID NO: 34829 - DNA, 60 bp, Artificial
  Synthetic oligonucleotide
gttagaggatggggagaattagtttgtgatcagttttatgagttagaccagcaagctcat

SEQ ID NO: 34830 - DNA, 60 bp, Artificial
  Synthetic oligonucleotide
gcaacactgagtgtgaagttatcatgtcaaggaaaattcatagagcaaaggttgcaaggg

SEQ ID NO: 34831 - DNA, 60 bp, Artificial
  Synthetic oligonucleotide
ctgaggatcaaggtatgtttcctttacagtcctcaatcaagagtgtctttgcttataagc

SEQ ID NO: 34832 - DNA, 60 bp, Artificial
  Synthetic oligonucleotide
aggtaatgttctgttaattatgatgccgtcaaaatcactagaagtctctaatgctcatgt

SEQ ID NO: 34833 - DNA, 60 bp, Artificial
  Synthetic oligonucleotide
atgctcatgtaagattcattctagttcacaaagagggttttggctgtgtagatcctgaca

SEQ ID NO: 34834 - DNA, 60 bp, Artificial
  Synthetic oligonucleotide
catgcaggtttaaaaaggtcaaagttttggtcactctcaggttttcatcaaggtaatgtt

SEQ ID NO: 34835 - DNA, 60 bp, Artificial
  Synthetic oligonucleotide
tcacatatccatgatggtttaaaggatagacgattaaagcattgtgtcattgatgcactg

SEQ ID NO: 34836 - DNA, 60 bp, Artificial
  Synthetic oligonucleotide
ggtagatcaggtctcgtgaggggtaactggttgcagggaaacttaaataagtgctcttca

SEQ ID NO: 34837 - DNA, 60 bp, Artificial
  Synthetic oligonucleotide
cttgccctaaatatttgctttgagaaggcattcttagcaactgcagtttggtttcagtat

SEQ ID NO: 34838 - DNA, 60 bp, Artificial
  Synthetic oligonucleotide
atgtaagtgcagatgcaacgaaatggtcacctggagataattcagcaaaattccgactat

SEQ ID NO: 34839 - DNA, 60 bp, Artificial
  Synthetic oligonucleotide
gttcaggaggagtatatttcttatggaggtgagaagaaaatccttcagattcagggttct

SEQ ID NO: 34840 - DNA, 60 bp, Artificial
  Synthetic oligonucleotide
taccggcattacaagtcacttatctcagaaataactacttgctttttcttgtttgaaaaa

SEQ ID NO: 34841 - DNA, 50 bp, Artificial
  Synthetic oligonucleotide
tagaggttggtttccagactgacattgatgggaaaataagaacagaccac

SEQ ID NO: 34842 - DNA, 60 bp, Artificial
  Synthetic oligonucleotide
ctgctgcttgtagaggtcgggtttcaaactgacattgatgggaaaataagaacagaccac

SEQ ID NO: 34843 - DNA, 60 bp, Artificial
  Synthetic oligonucleotide
tctctctgcttactaacaacaacattctacctcatcacaaaactacctcaacctaactac

SEQ ID NO: 34844 - DNA, 60 bp, Artificial
  Synthetic oligonucleotide
cctcctgctttctctgcttactaacaacaacattctacctcaacacaaaactacctcaac

SEQ ID NO: 34845 - DNA, 60 bp, Artificial
  Synthetic oligonucleotide
ctctgcttactaacaacaacattctacctcatcacaaaactacctcaacctaactacctc

SEQ ID NO: 34846 - DNA, 51 bp, Artificial
  Synthetic oligonucleotide
aatatacactgtgaatttactatacatactacagttgaggcaagttgtcct

SEQ ID NO: 34847 - DNA, 60 bp, Artificial
  Synthetic oligonucleotide
agcatacttcttcaaaaaatatcaacataaattcttagattattatgcaatgtactgtga

SEQ ID NO: 34848 - DNA, 51 bp, Artificial
  Synthetic oligonucleotide
aatatacactgtgaatttactatacatactacagttgaagcaagttgtcct

SEQ ID NO: 34849 - DNA, 60 bp, Artificial
  Synthetic oligonucleotide
tgtccttgatgtaaatgcaattgacattgaagaaccaagtggccaaacagcagattggta

SEQ ID NO: 34850 - DNA, 60 bp, Artificial
  Synthetic oligonucleotide
ccaaaggaaagatactgttgaacacagagggaacatcttcctttggaacctatgaatctg

SEQ ID NO: 34851 - DNA, 60 bp, Artificial
  Synthetic oligonucleotide
tacacttggaggtgttaaccttgctgtacttaacacgcatttccctggaacccagtccat

SEQ ID NO: 34852 - DNA, 60 bp, Artificial
  Synthetic oligonucleotide
tccctgacaaggctgttgtcagtgcattgaagagaggcatgtatgccatagcaagcatag

SEQ ID NO: 34853 - DNA, 60 bp, Artificial
  Synthetic oligonucleotide
tccatcatactcatcaactagtatattggctgcttcagaagatggtcgtttcatatttag

SEQ ID NO: 34854 - DNA, 60 bp, Artificial
  Synthetic oligonucleotide
ccaaggtcgtatggcgaaaaaaagcaaatcaggaatcagcaaaccagaattcatttgaag

SEQ ID NO: 34855 - DNA, 51 bp, Artificial
  Synthetic oligonucleotide
gctgtacaaagatgttgtcaaatgaaagatagtgccaaaaccttagtgagc

SEQ ID NO: 34856 - DNA, 60 bp, Artificial
  Synthetic oligonucleotide
ttcacagccgcagtacaaagatgttgtcaaatgaaagatagtgccaaaaccttagtgagc

SEQ ID NO: 34857 - DNA, 60 bp, Artificial
  Synthetic oligonucleotide
atagcattacttatactatccatcttcttatttgcattatgttgtccacgcaggcccagt

SEQ ID NO: 34858 - DNA, 60 bp, Artificial
  Synthetic oligonucleotide
gattgtgtctttaagatatacaaggaaagtatgcattcagttgggtaccgggcaaacctg

SEQ ID NO: 34859 - DNA, 60 bp, Artificial
  Synthetic oligonucleotide
aagtgtgcttgataggtaccatttcaaagttccaaccttctgataccctcttattcctcg

SEQ ID NO: 34860 - DNA, 60 bp, Artificial
  Synthetic oligonucleotide
gtaccatttcaaagttccaaccttctgataccctcttattcctcggtcctctccaacaag

SEQ ID NO: 34861 - DNA, 61 bp, Artificial
  Synthetic oligonucleotide
gctatattcgatttactagtgcagtcaccatatgactacctatatgccattatttcatatc

SEQ ID NO: 34862 - DNA, 57 bp, Artificial
  Synthetic oligonucleotide
cccctgattgtcctggtgtagggacaggctgcactgcttgcggtgtatatctggata

SEQ ID NO: 34863 - DNA, 60 bp, Artificial
  Synthetic oligonucleotide
caggcccagttataagaaagatcataaaccttaaataatagttactaatctttatgctat

SEQ ID NO: 34864 - DNA, 60 bp, Artificial
  Synthetic oligonucleotide
gcttgcggtgtatatctggataagttaaaatcagttggaaaggtatttaagattgtgtct

SEQ ID NO: 34865 - DNA, 60 bp, Artificial
  Synthetic oligonucleotide
ttattcctcggtcctctccaacaaggtggtttaatttttaagcaatggtgtactactaca

SEQ ID NO: 34866 - DNA, 60 bp, Artificial
  Synthetic oligonucleotide
tttgcaacaacacctgtatgtcagtttgatgggaatacaatttcaggttataaacggatg

SEQ ID NO: 34867 - DNA, 60 bp, Artificial
  Synthetic oligonucleotide
tttatgtgttgtcatgacacaaagtgctctagtacagggttagttgcagctgcaccacac

SEQ ID NO: 34868 - DNA, 51 bp, Artificial
  Synthetic oligonucleotide
atggttcatgtgaaaaatatgcctacccctggcaaacagcaggatgtttcg

SEQ ID NO: 34869 - DNA, 55 bp, Artificial
  Synthetic oligonucleotide
tcaacgaatccaggtaaattatgagagaacatactgtgtttcagggcagcttgtt

SEQ ID NO: 34870 - DNA, 60 bp, Artificial
  Synthetic oligonucleotide
ctatccatcttcttatttgcattatgttgtccacgcaggcccagttataagaaagatcat

SEQ ID NO: 34871 - DNA, 60 bp, Artificial
  Synthetic oligonucleotide
ttgggagtagctcagagccattgtatgttcccacgctggatgattatcggtcagctgagg

SEQ ID NO: 34872 - DNA, 53 bp, Artificial
  Synthetic oligonucleotide
tcagctgaggttctgtcacgaatggcttttgcaccacatggcgaagatcatga

SEQ ID NO: 34873 - DNA, 60 bp, Artificial
  Synthetic oligonucleotide
ctcagagccattgtatgttcccacgctggatgattatcggtcagctgaggttctgtcacg

SEQ ID NO: 34874 - DNA, 60 bp, Artificial
  Synthetic oligonucleotide
ggcagaatacaattcatgttgttggtaaaggtggacattctggttcaaagtttatgtgtt

SEQ ID NO: 34875 - DNA, 55 bp, Artificial
  Synthetic oligonucleotide
cccaatacacacaatggccctctctcagccaagccatacttatgatatagtgacc

SEQ ID NO: 34876 - DNA, 60 bp, Artificial
  Synthetic oligonucleotide
gataagtaaacaggtgattcatgctgaaattcaacatctaggccactggatggatgctac

SEQ ID NO: 34877 - DNA, 60 bp, Artificial
  Synthetic oligonucleotide
caaacatgcttaacaaccaaaagttgtcttctgggtttaggagatcaacgaatccaggta

SEQ ID NO: 34878 - DNA, 60 bp, Artificial
  Synthetic oligonucleotide
acttcgggatcacatcaatgtgattgtaagccgtgatttgtcctttcaggatttaagtga

SEQ ID NO: 34879 - DNA, 60 bp, Artificial
  Synthetic oligonucleotide
ccacacatctctacaagtgcattggagtggattgacctagatagttcacttcgggatcac

SEQ ID NO: 34880 - DNA, 56 bp, Artificial
  Synthetic oligonucleotide
ctcattaccttcatctgctagctatacttaccgaagacaattacaaaacccggcaa

SEQ ID NO: 34881 - DNA, 60 bp, Artificial
  Synthetic oligonucleotide
tttgtaggtttagtgtggtgtatgttgcttgttttagagctaattgtatgggctgctagt

SEQ ID NO: 34882 - DNA, 60 bp, Artificial
  Synthetic oligonucleotide
atgtcatgctgctatgtgttatggttctactacaacgaatttagttcgagggcagaatac

SEQ ID NO: 34883 - DNA, 60 bp, Artificial
  Synthetic oligonucleotide
ttaacattttgctttggctgggttctgataccaactattacaatgatcttgttaaaaata

SEQ ID NO: 34884 - DNA, 60 bp, Artificial
  Synthetic oligonucleotide
gcatggggttcaggagttggttttaacctggtatgtactgttagtttaacagaatgctct

SEQ ID NO: 34885 - DNA, 50 bp, Artificial
  Synthetic oligonucleotide
ccatgggctcaatggtttgtgaggtatgtcagtatgagtgtgaaactgct

SEQ ID NO: 34886 - DNA, 60 bp, Artificial
  Synthetic oligonucleotide
gtgcatttatacttttacaagtatcttttccatgattccaggaattgcacattctcttgc

SEQ ID NO: 34887 - DNA, 60 bp, Artificial
  Synthetic oligonucleotide
agttttcagacaaaaagtagtgaggtcaatttaagaggtctgtgcttgatccctacccta

SEQ ID NO: 34888 - DNA, 60 bp, Artificial
  Synthetic oligonucleotide
taccgcagtagattttttgtaggtttagtgtggtgtatgttgcttgttttagagctaatt

SEQ ID NO: 34889 - DNA, 60 bp, Artificial
  Synthetic oligonucleotide
gatatcactgtatattgtaatggagtaaaaaaagtcatccttactaaaaccttagttatt

SEQ ID NO: 34890 - DNA, 60 bp, Artificial
  Synthetic oligonucleotide
tgagtgccttacgcattgctgggaaggttacaggtaaagcaccatccactgaatcatcag

SEQ ID NO: 34891 - DNA, 60 bp, Artificial
  Synthetic oligonucleotide
cacagacaaatatgggaaaatcgagtccagtttgtctgtatctgattcttcagggtctat

SEQ ID NO: 34892 - DNA, 60 bp, Artificial
  Synthetic oligonucleotide
gaacttaaaatggagtgtccgcacactattgggctaggtcaaggccttgttgtaggttca

SEQ ID NO: 34893 - DNA, 60 bp, Artificial
  Synthetic oligonucleotide
caatgtatgagccaatgcagggttgttatcgaacattatctctatttaggtaccgcagta

SEQ ID NO: 34894 - DNA, 60 bp, Artificial
  Synthetic oligonucleotide
caaggccttgttgtaggttcagtagaactaccacctgtcccaatacagcaaattgaatcc

SEQ ID NO: 34895 - DNA, 57 bp, Artificial
  Synthetic oligonucleotide
ttccaggaattgcacattctcttgctgttgagctatgtgtgccaggtcttcatggtt

SEQ ID NO: 34896 - DNA, 60 bp, Artificial
  Synthetic oligonucleotide
agtagtgaggtcaatttaagaggtctgtgcttgatccctaccctagtggttgaaacagca

SEQ ID NO: 34897 - DNA, 60 bp, Artificial
  Synthetic oligonucleotide
ccctaccctagtggttgaaacagcagcaaggatgcggaagacaatagcatgttatgactt

SEQ ID NO: 34898 - DNA, 60 bp, Artificial
  Synthetic oligonucleotide
tccgtggtgctgaacagcaaataaaatttgtttgtcaaagagtagacatggatatcactg

SEQ ID NO: 34899 - DNA, 60 bp, Artificial
  Synthetic oligonucleotide
actgccgttaacatggacagggttcatcccattacctggggagattgaaaagacaacaca

SEQ ID NO: 34900 - DNA, 53 bp, Artificial
  Synthetic oligonucleotide
gaatcatcagatacagtacaaggtattgcattttcaggcagcccactctatac

SEQ ID NO: 34901 - DNA, 60 bp, Artificial
  Synthetic oligonucleotide
cagcaaaggatgatcctgtatatgtctgggccccaggaattattatggagggaaaccact

SEQ ID NO: 34902 - DNA, 60 bp, Artificial
  Synthetic oligonucleotide
gcatcccaacagtttacttaattgctcccatacatacatgtgtgacaacaaagagctgtt

SEQ ID NO: 34903 - DNA, 60 bp, Artificial
  Synthetic oligonucleotide
aaattgcgctctgttggcaaggtattcaaagtgatatccctaaagttcacaagacgggtt

SEQ ID NO: 34904 - DNA, 60 bp, Artificial
  Synthetic oligonucleotide
catgtaagaccattgattcgaatgactgtttgatgacaacatctgtgaaggtttgcatga

SEQ ID NO: 34905 - DNA, 60 bp, Artificial
  Synthetic oligonucleotide
ccctaaagttcacaagacgggtttgtatacaattaggcagtgaacaatcatgtaagacca

SEQ ID NO: 34906 - DNA, 60 bp, Artificial
  Synthetic oligonucleotide
gctgtaatcctggtgattgcccaggtgtaggcactggatgtactgcttgtggagtttatt

SEQ ID NO: 34907 - DNA, 60 bp, Artificial
  Synthetic oligonucleotide
gttacggtgcttgtgaaaagtatgcttatccgtggcaaactgcaaaatgtttcttagaga

SEQ ID NO: 34908 - DNA, 60 bp, Artificial
  Synthetic oligonucleotide
gtggatttaaaccctgtccctgttgagtctgtgagcacattaaagttagaaagctcttgt

SEQ ID NO: 34909 - DNA, 60 bp, Artificial
  Synthetic oligonucleotide
gtaactttgatgtgcatacaagctcagccacacagcaggctgttacaaagtggacatggg

SEQ ID NO: 34910 - DNA, 60 bp, Artificial
  Synthetic oligonucleotide
gtttgcatgattgggacagtttcaaaatttcagcccggtgatacccttttatttttaggc

SEQ ID NO: 34911 - DNA, 60 bp, Artificial
  Synthetic oligonucleotide
ggacatgggaaaagaaagctgacacagcagaaacagcaaaggcagcttcaacaacatttc

SEQ ID NO: 34912 - DNA, 60 bp, Artificial
  Synthetic oligonucleotide
aagctccgtaagactgtcacatgttatgatctttcatgtaatcagacagcatgcatccca

SEQ ID NO: 34913 - DNA, 60 bp, Artificial
  Synthetic oligonucleotide
ggggcttatgtgttattccaactttggtccttgagactgctaataagctccgtaagactg

SEQ ID NO: 34914 - DNA, 60 bp, Artificial
  Synthetic oligonucleotide
gtatttgatgacggctctcctgagtgtggtgtacactgctggtttaaaaagtctggggaa

SEQ ID NO: 34915 - DNA, 60 bp, Artificial
  Synthetic oligonucleotide
gtgctagcctcaaaggaagatccagtttacatttggtcacctggaataatcccggaacgg

SEQ ID NO: 34916 - DNA, 60 bp, Artificial
  Synthetic oligonucleotide
tatacgtccctttccgtgctagcctcaaaggaagatccagtttacatttggtcacctgga

SEQ ID NO: 34917 - DNA, 60 bp, Artificial
  Synthetic oligonucleotide
ccaacatgtgagtatgatggaaacactctttctggttaccagcggatgcttgcaacaagg

SEQ ID NO: 34918 - DNA, 60 bp, Artificial
  Synthetic oligonucleotide
caacattacagaaccacatattaccagcaattcacttgaatgggtagatccagatagttc

SEQ ID NO: 34919 - DNA, 60 bp, Artificial
  Synthetic oligonucleotide
agaggaaggtggtattatatttaagcaatggtgtactactacctgtcactttggagaccc

SEQ ID NO: 34920 - DNA, 60 bp, Artificial
  Synthetic oligonucleotide
gcccagagcatacaggtgcctttagaaagaaatgtgcatttgctacaatgccaacatgtg

SEQ ID NO: 34921 - DNA, 60 bp, Artificial
  Synthetic oligonucleotide
caaagagctgtttactgggattaggaactcaacggattcaagtgacttatgaaaagacat

SEQ ID NO: 34922 - DNA, 60 bp, Artificial
  Synthetic oligonucleotide
cacaatggcattatctcaaccaagccatacatatgatattgtcactataccagtcaggtg

SEQ ID NO: 34923 - DNA, 60 bp, Artificial
  Synthetic oligonucleotide
gatatggcaatttctcctcacggggaagatcacgacagtgctctatcatctgtgagtacc

SEQ ID NO: 34924 - DNA, 60 bp, Artificial
  Synthetic oligonucleotide
cctcacggggaagatcacgacagtgctctatcatctgtgagtacctttagaattgcaggg

SEQ ID NO: 34925 - DNA, 60 bp, Artificial
  Synthetic oligonucleotide
tgtgagtacctttagaattgcagggaaattaagcggaaaggcaccatccactgagtcatc

SEQ ID NO: 34926 - DNA, 60 bp, Artificial
  Synthetic oligonucleotide
aattgcagggaaattaagcggaaaggcaccatccactgagtcatctgatactgtccaagg

SEQ ID NO: 34927 - DNA, 60 bp, Artificial
  Synthetic oligonucleotide
ctgagtcatctgatactgtccaaggtgtagcattttcaggacatccattgtatacgtccc

SEQ ID NO: 34928 - DNA, 60 bp, Artificial
  Synthetic oligonucleotide
ctgtccaaggtgtagcattttcaggacatccattgtatacgtccctttccgtgctagcct

SEQ ID NO: 34929 - DNA, 50 bp, Artificial
  Synthetic oligonucleotide
tcttcaaaacccagcaaatgagcaagaaagaatcccttttcacttccagc

SEQ ID NO: 34930 - DNA, 60 bp, Artificial
  Synthetic oligonucleotide
tgcagagattcaaaatttaggccactggatggatggaacatttaatctgaaaacatcatt

SEQ ID NO: 34931 - DNA, 56 bp, Artificial
  Synthetic oligonucleotide
cttgtttggtgcatcctacttgtattagaacttgtcatatgggctgcaagtgcgga

SEQ ID NO: 34932 - DNA, 60 bp, Artificial
  Synthetic oligonucleotide
actgacactgcacatggagctggggtaataccactcaaatcagatttagagcttgatttt

SEQ ID NO: 34933 - DNA, 60 bp, Artificial
  Synthetic oligonucleotide
ccaggagaaccttcgcaagtcactaaatccatatgagcctaaacgaggttgctataggac

SEQ ID NO: 34934 - DNA, 60 bp, Artificial
  Synthetic oligonucleotide
ggacactctctgtgtttagatatcggagtaggtgctttgtgggccttgtttggtgcatcc

SEQ ID NO: 34935 - DNA, 60 bp, Artificial
  Synthetic oligonucleotide
ggtatgtgcccttactgcatgaaccctacagagtctactgagtctgccctgcaagctcat

SEQ ID NO: 34936 - DNA, 58 bp, Artificial
  Synthetic oligonucleotide
aaaatgagtaaattttgtctgtgtttgagtcttttgggagtactactactgcaggtct

SEQ ID NO: 34937 - DNA, 60 bp, Artificial
  Synthetic oligonucleotide
aaacatcattccattgttacggtgcttgtgaaaagtatgcttatccgtggcaaactgcaa

SEQ ID NO: 34938 - DNA, 60 bp, Artificial
  Synthetic oligonucleotide
ttgaatgtcctcatactgtaggtttaggtcaaggccttgtaatagggactgtggatttaa

SEQ ID NO: 34939 - DNA, 60 bp, Artificial
  Synthetic oligonucleotide
aactttggtatactaaccctatatatcagctttacctggacttttgttcctgcggagtct

SEQ ID NO: 34940 - DNA, 60 bp, Artificial
  Synthetic oligonucleotide
ctgaatgttcatcaacaggcttgacagctgctgcaccacatcttgatagagtcactggct

SEQ ID NO: 34941 - DNA, 60 bp, Artificial
  Synthetic oligonucleotide
cagatagttcattaaaggatcatattaatttggtagttaatcgcgatgtatcatttcagg

SEQ ID NO: 34942 - DNA, 60 bp, Artificial
  Synthetic oligonucleotide
aggcatgtgacgctgcaatgtgttacggtgcaacaacagctaatctagtgagagggcaaa

SEQ ID NO: 34943 - DNA, 60 bp, Artificial
  Synthetic oligonucleotide
cttagatccataatcatttactcacaatgtgtcatgttgttaaccctagaattacactta

SEQ ID NO: 34944 - DNA, 60 bp, Artificial
  Synthetic oligonucleotide
ctggggaatggttaatggggattttgagtggtaattggatggtagtggcagttttagtcg

SEQ ID NO: 34945 - DNA, 59 bp, Artificial
  Synthetic oligonucleotide
tggggctcaggtgtgggttttaatctggtatgtagtgtgagtttgacagaatgtgctag

SEQ ID NO: 34946 - DNA, 60 bp, Artificial
  Synthetic oligonucleotide
ggaatgtgaaatggcaaaagaattggagtctcacaagaaaagttgtcctaatggtatgtg

SEQ ID NO: 34947 - DNA, 60 bp, Artificial
  Synthetic oligonucleotide
cgaaattccggttacttatagaaaaggttaagcaggaatatcagaaaactatgggttcta

SEQ ID NO: 34948 - DNA, 60 bp, Artificial
  Synthetic oligonucleotide
cgggtggtcaacaattgctttacttgcaacattctgttttggctggctccttatccctat

SEQ ID NO: 34949 - DNA, 60 bp, Artificial
  Synthetic oligonucleotide
aagaccacacagtgcaccatattttgtactcttgctgggcccggtgcagattgtgaagca

SEQ ID NO: 34950 - DNA, 60 bp, Artificial
  Synthetic oligonucleotide
gacatggacaggttatttgccattgcctggagggatcgaaaagaccacacagtgcaccat

SEQ ID NO: 34951 - DNA, 60 bp, Artificial
  Synthetic oligonucleotide
gtcacctggaataatcccggaacggaatcacactgtatgtgacaagaagacactaccatt

SEQ ID NO: 34952 - DNA, 60 bp, Artificial
  Synthetic oligonucleotide
tccattccagaatgcctacaacgtcaagggcaatgccaccagtgccaacatcatctgaag

SEQ ID NO: 34953 - DNA, 60 bp, Artificial
  Synthetic oligonucleotide
atccaaacatgccagtagaaaagcaaataatactgaaagagcaagggacaataactgatc

SEQ ID NO: 34954 - DNA, 60 bp, Artificial
  Synthetic oligonucleotide
ggtccattcctaaagtaaacaacacgcctgaaacttgctgccagcttcaaatgatctgca

SEQ ID NO: 34955 - DNA, 60 bp, Artificial
  Synthetic oligonucleotide
cccaaccatacccaaccctacaggaaagatcatggtcgctttggtagatccaaacatgcc

SEQ ID NO: 34956 - DNA, 60 bp, Artificial
  Synthetic oligonucleotide
tagatccaaacatgccagtagaaaagcaaataatactgaaagagcaagggacaataactg

SEQ ID NO: 34957 - DNA, 53 bp, Artificial
  Synthetic oligonucleotide
caggaatacaaacagggtgtttccttgctagtgttatgtattcctggacaaaa

SEQ ID NO: 34958 - DNA, 60 bp, Artificial
  Synthetic oligonucleotide
tattcctggacaaaaagaattctgtgactctcctagagcagatctagagaaaagctgcac

SEQ ID NO: 34959 - DNA, 60 bp, Artificial
  Synthetic oligonucleotide
cctaaagtaaacaacacgcctgaaacttgctgccagcttcaaatgatctgcagccaggaa

SEQ ID NO: 34960 - DNA, 60 bp, Artificial
  Synthetic oligonucleotide
atgatctgcagccaggaatacaaacagggtgtttccttgctagtgttatgtattcctgga

SEQ ID NO: 34961 - DNA, 60 bp, Artificial
  Synthetic oligonucleotide
agaattctgtgactctcctagagcagatctagagaaaagctgcacaatgtttcctctaaa

SEQ ID NO: 34962 - DNA, 60 bp, Artificial
  Synthetic oligonucleotide
aaagctgcacaatgtttcctctaaacagagctattagagctagatcgcaagcctttattg

SEQ ID NO: 34963 - DNA, 60 bp, Artificial
  Synthetic oligonucleotide
ctctagtgtcagtaattaaatctacttgaggtacgatgatgacacttttccgtaacaagc

SEQ ID NO: 34964 - DNA, 60 bp, Artificial
  Synthetic oligonucleotide
agagacaactggcagatctaagcacaaatctagagaaatctgttgaagaagaggggaaag

SEQ ID NO: 34965 - DNA, 60 bp, Artificial
  Synthetic oligonucleotide
cacaatgtttcctctaaacagagctattagagctagatcgcaagcctttattgaagcctg

SEQ ID NO: 34966 - DNA, 60 bp, Artificial
  Synthetic oligonucleotide
gaggggaaaggagttactgataacatggtcaagatttggtttgttgacgagatctaaata

SEQ ID NO: 34967 - DNA, 60 bp, Artificial
  Synthetic oligonucleotide
gacaactggcagatctaagcacaaatctagagaaatctgttgaagaagaggggaaaggag

SEQ ID NO: 34968 - DNA, 60 bp, Artificial
  Synthetic oligonucleotide
gatctgcccaaccatacccaaccctacaggaaagatcatggtcgctttggtagatccaaa

SEQ ID NO: 34969 - DNA, 53 bp, Artificial
  Synthetic oligonucleotide
aagtggtcaaaatctgcccaacttgggacagcagaaagcagtacatgatggtt

SEQ ID NO: 34970 - DNA, 60 bp, Artificial
  Synthetic oligonucleotide
agttcatgatctagctgcaagaatgattgtggatactaaccaccacctttcgagctggaa

SEQ ID NO: 34971 - DNA, 50 bp, Artificial
  Synthetic oligonucleotide
agttcatgatctagctgcaagaatgattgtggatactaaccaccaccttt

SEQ ID NO: 34972 - DNA, 60 bp, Artificial
  Synthetic oligonucleotide
gctggggacatatgatgcagtcgatatcacagaatctgaagttcatgatctagctgcaag

SEQ ID NO: 34973 - DNA, 60 bp, Artificial
  Synthetic oligonucleotide
aatctgtcttcgctggggacatatgatgcagtcgatatcacagaatctgaagttcatgat

SEQ ID NO: 34974 - DNA, 60 bp, Artificial
  Synthetic oligonucleotide
catggacaattccaaggggaaaataattggaaatagtgagaatctgtcttcgctggggac

SEQ ID NO: 34975 - DNA, 60 bp, Artificial
  Synthetic oligonucleotide
tacagaaaagcatggacaattccaaggggaaaataattggaaatagtgagaatctgtctt

SEQ ID NO: 34976 - DNA, 60 bp, Artificial
  Synthetic oligonucleotide
gaagtggctaaatcatggaaaccatctgacgagagagctgctttacagaaaagcatggac

SEQ ID NO: 34977 - DNA, 60 bp, Artificial
  Synthetic oligonucleotide
gagcattgaagtggctaaatcatggaaaccatctgacgagagagctgctttacagaaaag

SEQ ID NO: 34978 - DNA, 60 bp, Artificial
  Synthetic oligonucleotide
ttaaatctacttgaggtacgatgatgacacttttccgtaacaagctctctgctaagtctg

SEQ ID NO: 34979 - DNA, 54 bp, Artificial
  Synthetic oligonucleotide
cgtaacaagctctctgctaagtctgcaaagaaggaggaagaccctatgtctgct

SEQ ID NO: 34980 - DNA, 60 bp, Artificial
  Synthetic oligonucleotide
acgagtgtgcatgggttagctccactggcattgtgaagaagggacttgaatggttcgaaa

SEQ ID NO: 34981 - DNA, 60 bp, Artificial
  Synthetic oligonucleotide
cgagtgtgcatgggttagctccactggcattgtgaagaagggacttgaatggttcgaaaa

SEQ ID NO: 34982 - DNA, 60 bp, Artificial
  Synthetic oligonucleotide
ctacatgcaccctgctgtgctgacagctggcagaatcagtgaaatgggtgtctgctttgg

SEQ ID NO: 34983 - DNA, 60 bp, Artificial
  Synthetic oligonucleotide
cccggttacacccataataacagatcttttcgaagtccaattcaaaacagtagagtcata

SEQ ID NO: 34984 - DNA, 60 bp, Artificial
  Synthetic oligonucleotide
ggacaagctcatggggttgtgaagagttcggatgtctagcaataagtgatgggtgcgtat

SEQ ID NO: 34985 - DNA, 60 bp, Artificial
  Synthetic oligonucleotide
ctatgtattgccaagagtgtgatatgtaccatgaaagatctggcctgaagtggaatggag

SEQ ID NO: 34986 - DNA, 60 bp, Artificial
  Synthetic oligonucleotide
gcacagagactgcagaaggggttgaaaatgctttcatagaatcagaaataccagcattag

SEQ ID NO: 34987 - DNA, 60 bp, Artificial
  Synthetic oligonucleotide
gcccaagatgcaatatggttaggttccctataagcgagaaaaacattttagcatgcgatt

SEQ ID NO: 34988 - DNA, 60 bp, Artificial
  Synthetic oligonucleotide
gcaccaaaaagattatgacaaggatcaagatataggccatttttgcttgagcccaagatg

SEQ ID NO: 34989 - DNA, 55 bp, Artificial
  Synthetic oligonucleotide
aaaagtgtcagctatgcggcctagtgtatcatccatttactgagtgcggcaccca

SEQ ID NO: 34990 - DNA, 60 bp, Artificial
  Synthetic oligonucleotide
gccttgatagcagtctacatagtcatgcccatttgctttaaggtaaaagatatattaaag

SEQ ID NO: 34991 - DNA, 60 bp, Artificial
  Synthetic oligonucleotide
gggttaacaataggggatagtaaggaagttttaaaccctgatgagctcccagatgacatg

SEQ ID NO: 34992 - DNA, 60 bp, Artificial
  Synthetic oligonucleotide
cgaggtgatggtaggccaaatcaatgatctaggggtttattcaaaaggctgtggcaatgt

SEQ ID NO: 34993 - DNA, 60 bp, Artificial
  Synthetic oligonucleotide
tgactcgaaacctatagttgagttagcaccagtggatcagactgcatatattagggaaaa

SEQ ID NO: 34994 - DNA, 60 bp, Artificial
  Synthetic oligonucleotide
caaacaacatggagaatgtatctaagatcacatgactttggagcatgcattttataccca

SEQ ID NO: 34995 - DNA, 60 bp, Artificial
  Synthetic oligonucleotide
catgcgcaacttaccgctgaatatgcaatgttgactagatactgtgactaccataaacta

SEQ ID NO: 34996 - DNA, 60 bp, Artificial
  Synthetic oligonucleotide
tgtgttaagcatggagaaaaatgcagcagttcaagctgggactttgccagtgagatgaag

SEQ ID NO: 34997 - DNA, 60 bp, Artificial
  Synthetic oligonucleotide
tgagatgaagaattattactccgggaaacagggaaaatttaacaaagacttaaacttggc

SEQ ID NO: 34998 - DNA, 60 bp, Artificial
  Synthetic oligonucleotide
cttggccttacagtctatccatcatgcattcaggggcacctcatcatcttacatagcaac

SEQ ID NO: 34999 - DNA, 60 bp, Artificial
  Synthetic oligonucleotide
ctgaaatgacaaactttaaacatgacgaattttgggatgaatttgtccatctgcctgcac

SEQ ID NO: 35000 - DNA, 60 bp, Artificial
  Synthetic oligonucleotide
gtactcttttccatgacagaatcttaatagggccagataatcacaagtatgcaatgaaag

SEQ ID NO: 35001 - DNA, 60 bp, Artificial
  Synthetic oligonucleotide
catcaaacctatccataatcactgcagtcctcactttgacatttgtgacacctataaatg

SEQ ID NO: 35002 - DNA, 60 bp, Artificial
  Synthetic oligonucleotide
agtagtgtactaccaagtatagataacgtctggaaaacaaagtcattagaaagtgtcgaa

SEQ ID NO: 35003 - DNA, 60 bp, Artificial
  Synthetic oligonucleotide
gaaaggtttgcaagcaatatctgtccttgatatcccattaattgcaagaatacctgagga

SEQ ID NO: 35004 - DNA, 60 bp, Artificial
  Synthetic oligonucleotide
cctatgccatctagccagccggaaagaagttataatcaggaagtgttttgacaatgacta

SEQ ID NO: 35005 - DNA, 60 bp, Artificial
  Synthetic oligonucleotide
atgactatcaagcttgtaagttcctacagagcccatccagttacagactagaggaggatg

SEQ ID NO: 35006 - DNA, 60 bp, Artificial
  Synthetic oligonucleotide
gggagatgttaggtacaagacattttcagagtctatagacatttctgcagaggggacatg

SEQ ID NO: 35007 - DNA, 60 bp, Artificial
  Synthetic oligonucleotide
atacattgcgaatttaccatacattcaacagtagaagccagctgtcctgttgttagtaca

SEQ ID NO: 35008 - DNA, 60 bp, Artificial
  Synthetic oligonucleotide
cagaccagtctatgtattgtattgcagatacccactgcttgcaagattactccccagttg

SEQ ID NO: 35009 - DNA, 60 bp, Artificial
  Synthetic oligonucleotide
ggagacttcacaaataagtgcagacagtgcacatgtggtgagtatgaagatgcagctggt

SEQ ID NO: 35010 - DNA, 60 bp, Artificial
  Synthetic oligonucleotide
cctagatccggtgcttcctacgaaggcattgtagcttgtggagaaccttcagccccacaa

SEQ ID NO: 35011 - DNA, 60 bp, Artificial
  Synthetic oligonucleotide
gatgaatttgtccatctgcctgcaccaacaaaagccccatctatgaggagatctggaaat

SEQ ID NO: 35012 - DNA, 60 bp, Artificial
  Synthetic oligonucleotide
tgctacttactaatgcctatatttatcccaatagcacacttatacggattaatttacaat

SEQ ID NO: 35013 - DNA, 60 bp, Artificial
  Synthetic oligonucleotide
gttgccttgatcattctgaaagactcaacattgatagtacaagcagcgggcactgatttc

SEQ ID NO: 35014 - DNA, 60 bp, Artificial
  Synthetic oligonucleotide
agccccacaaattttcaaaatgccctctgaatctatctatcataacaatgcagaccagtc

SEQ ID NO: 35015 - DNA, 60 bp, Artificial
  Synthetic oligonucleotide
gcagtgccatttaaacaaagtgatggaatacgaagctgtagaatgagagattctgggaat

SEQ ID NO: 35016 - DNA, 60 bp, Artificial
  Synthetic oligonucleotide
gagattctgggaattgtaatgtgacaacaaacctatggcctgtaatgcagtgtgacgatg

SEQ ID NO: 35017 - DNA, 60 bp, Artificial
  Synthetic oligonucleotide
ctggcggattgagatatatcgaatctatcagaactcatcatgcgcaacttaccgctgaat

SEQ ID NO: 35018 - DNA, 60 bp, Artificial
  Synthetic oligonucleotide
aatccatacagttccatgcatgctttaatcagcatatgtcttgtgtcaggttcctgcata

SEQ ID NO: 35019 - DNA, 65 bp, Artificial
  Synthetic oligonucleotide
ggaaatgctttactcagagctgtgctagatttcataacatatatgaagtctttaactgaaatgac

SEQ ID NO: 35020 - DNA, 57 bp, Artificial
  Synthetic oligonucleotide
aacaatgtggctttacgaaaatggctcgtgtcggattggcatgactgcaaaccaaaa

SEQ ID NO: 35021 - DNA, 60 bp, Artificial
  Synthetic oligonucleotide
cagaggctagatatgtcaggaattcaagtggagtcttctcaaacaatgtggctttacgaa

SEQ ID NO: 35022 - DNA, 60 bp, Artificial
  Synthetic oligonucleotide
gtggagggcatattaatgttatcgaggttggtaacgatttaactttacacacagaatcgt

SEQ ID NO: 35023 - DNA, 60 bp, Artificial
  Synthetic oligonucleotide
actgtaaaatctgggtggttcaaaagcactacgtatattacattagaccaaacttgcgag

SEQ ID NO: 35024 - DNA, 60 bp, Artificial
  Synthetic oligonucleotide
caaacttgcgagcacttgaaagtatcttgcggtcccaaatccatacagttccatgcatgc

SEQ ID NO: 35025 - DNA, 60 bp, Artificial
  Synthetic oligonucleotide
gcgtgtccacaccactgggcttagttacgaccacatacgaatcttctacattaaagggag

SEQ ID NO: 35026 - DNA, 60 bp, Artificial
  Synthetic oligonucleotide
cgctaactttaagcgtgtccacaccactgggcttagttacgaccacatacgaatcttcta

SEQ ID NO: 35027 - DNA, 60 bp, Artificial
  Synthetic oligonucleotide
ctgttttcaccactatcatctttctttctacctcagtgtacttatatatatgcaagtagc

SEQ ID NO: 35028 - DNA, 60 bp, Artificial
  Synthetic oligonucleotide
tctcaaagaaacacgtgccgcttacgcccacagtgttctcttgagtgctagcaaaatgga

SEQ ID NO: 35029 - DNA, 60 bp, Artificial
  Synthetic oligonucleotide
tgtccctgcagctttcgatgcatgtgctttgaggatgatgctctgcattggaggtcctct

SEQ ID NO: 35030 - DNA, 60 bp, Artificial
  Synthetic oligonucleotide
acgggcagctgtgtctacattggagaccaagctcggggaactcaagagacaacttgcaga

SEQ ID NO: 35031 - DNA, 60 bp, Artificial
  Synthetic oligonucleotide
gacattaacaaatcaggtcgttcgggaatagcacttgttgcaacaggccttgccaagctt

SEQ ID NO: 35032 - DNA, 60 bp, Artificial
  Synthetic oligonucleotide
gatccagaagctgcttatgtcagatttaagcctgcctacggctccgaattggagtcggct

SEQ ID NO: 35033 - DNA, 60 bp, Artificial
  Synthetic oligonucleotide
ttggagtcttctattgttcgagtcttctacatcaatgcagcgaaggtcaaagcttacctt

SEQ ID NO: 35034 - DNA, 60 bp, Artificial
  Synthetic oligonucleotide
tggagtcttctattgttcgagtcttctacatcaatgcagcgaaggtcaaagcttaccttc

SEQ ID NO: 35035 - DNA, 60 bp, Artificial
  Synthetic oligonucleotide
cctgcctacggctccgaattggagtcggctattgttcgagtcttctacatcaatgcagcg

SEQ ID NO: 35036 - DNA, 60 bp, Artificial
  Synthetic oligonucleotide
cctgcctatggctcagaattggagtcatctattgttcgagtcttctacatcaatgcagcg

SEQ ID NO: 35037 - DNA, 60 bp, Artificial
  Synthetic oligonucleotide
tgatccagaagctgcttatgtcagatttaagcctgcctatggctctgaattggagtcttc

SEQ ID NO: 35038 - DNA, 60 bp, Artificial
  Synthetic oligonucleotide
ttcgagtcttctacatcaatgcagcgaaggtcaaagcttacctacgaaggtcatcggagc

SEQ ID NO: 35039 - DNA, 60 bp, Artificial
  Synthetic oligonucleotide
ttgatccagaagctgcttatgtcagatttaagcctgcctatggctctgaattggagtctt

SEQ ID NO: 35040 - DNA, 60 bp, Artificial
  Synthetic oligonucleotide
tgatccagaagctgcttatgtcagatttaagcctgcctacggctccgaattggagtcggc

SEQ ID NO: 35041 - DNA, 60 bp, Artificial
  Synthetic oligonucleotide
tctttcacagacaatacatttgatccagaagctgcttatgtcagatttaagcctgcctac

SEQ ID NO: 35042 - DNA, 60 bp, Artificial
  Synthetic oligonucleotide
acatttgatccagaagctgcttatgtcagatttaagcctgcctacggctccgaattggag

SEQ ID NO: 35043 - DNA, 60 bp, Artificial
  Synthetic oligonucleotide
ttcgagtcttctacatcaatgcagcgaaggtcaaagcttacctacgaaggtcatccgagc

SEQ ID NO: 35044 - DNA, 60 bp, Artificial
  Synthetic oligonucleotide
tctacatcaatgcagcgaaggtcaaagcttaccttcggaggtcatcagagcttttggttt

SEQ ID NO: 35045 - DNA, 60 bp, Artificial
  Synthetic oligonucleotide
gttcgagtcttctacatcaatgcagcgaaggtcaaagcttaccttcggaggtcatctgag

SEQ ID NO: 35046 - DNA, 60 bp, Artificial
  Synthetic oligonucleotide
gcctctttcacagacaatacatttgatccagaagctgcttatgtcagatttaagcctgcc

SEQ ID NO: 35047 - DNA, 60 bp, Artificial
  Synthetic oligonucleotide
gtcgcctctttcacagacaatacatttgatccagaagctgcttatgtcagatttaagcct

SEQ ID NO: 35048 - DNA, 60 bp, Artificial
  Synthetic oligonucleotide
ttcgagtcttctacatcaatgcagcgaaggtcaaagcttaccttcggaggtcatctgagc

SEQ ID NO: 35049 - DNA, 60 bp, Artificial
  Synthetic oligonucleotide
ttattgagagcccaggcaaagggtatgcaattgttgatgagccattctcagaaattcctc

SEQ ID NO: 35050 - DNA, 60 bp, Artificial
  Synthetic oligonucleotide
agagcccaggcaaagggtatgcaattgttgatgagccattctcagaaattcctcggcaag

SEQ ID NO: 35051 - DNA, 60 bp, Artificial
  Synthetic oligonucleotide
gccatcattgctgctgatggcttgaacaacatcacctgccatggtaaggatcctgaggac

SEQ ID NO: 35052 - DNA, 60 bp, Artificial
  Synthetic oligonucleotide
gccatcattgctgctgatggcttgaacaacatcacctgccatggtaaggaccctgaggac

SEQ ID NO: 35053 - DNA, 60 bp, Artificial
  Synthetic oligonucleotide
aaaagccatcattgctgctgatggcttgaacaacatcacctgccatggtaagaatcctga

SEQ ID NO: 35054 - DNA, 60 bp, Artificial
  Synthetic oligonucleotide
gccatcattgctgctgatggcttgaacaacatcacctgccatggtaagaatcctgaggac

SEQ ID NO: 35055 - DNA, 57 bp, Artificial
  Synthetic oligonucleotide
cattgctgctgatggcttgaacaacatcacctgccatggtaaggatcctgaggacaa

SEQ ID NO: 35056 - DNA, 60 bp, Artificial
  Synthetic oligonucleotide
caacaatgacgggaaaatggcttcagtcaagtgccctcctaagtatgagctcactgaaga

SEQ ID NO: 35057 - DNA, 60 bp, Artificial
  Synthetic oligonucleotide
gccatcattgctgctgatggcttgaacaacatcacctgccatggtaagaatcctgagaac

SEQ ID NO: 35058 - DNA, 60 bp, Artificial
  Synthetic oligonucleotide
gccatcattgctgctgatggcttgaacaacatcacctgccatggtaaggatcctgaggat

SEQ ID NO: 35059 - DNA, 60 bp, Artificial
  Synthetic oligonucleotide
caacaatgacgggaaaatggcttcagtcaagtgccctcctaagtatgagctcactgagga

SEQ ID NO: 35060 - DNA, 60 bp, Artificial
  Synthetic oligonucleotide
caacgacgggaaaatggcttcagtcaagtgccctcctaagtatgagctcactgaggactg

SEQ ID NO: 35061 - DNA, 60 bp, Artificial
  Synthetic oligonucleotide
gcttgggattcactcagagaggaggagatgccagaggagctctcctgttctatatcaggc

SEQ ID NO: 35062 - DNA, 60 bp, Artificial
  Synthetic oligonucleotide
tagggcattaaaagccatcattgctgctgatggcttgaacaacatcacctgccatggtaa

SEQ ID NO: 35063 - DNA, 60 bp, Artificial
  Synthetic oligonucleotide
tgaaggagcttgggattcactcagagaggaggagatgccagaggagctctcctgttctat

SEQ ID NO: 35064 - DNA, 60 bp, Artificial
  Synthetic oligonucleotide
gggagcatcatctagccgtttcacaaactggggttcagttagcctctcactggatgcaga

SEQ ID NO: 35065 - DNA, 60 bp, Artificial
  Synthetic oligonucleotide
gcatcatctagccgtttcacaaactggggttcagttagcctctcactggatgcagagggc

SEQ ID NO: 35066 - DNA, 60 bp, Artificial
  Synthetic oligonucleotide
aggagcatcatctagccgtttcacaaactggggttcagttagcctctcactggacgcaga

SEQ ID NO: 35067 - DNA, 60 bp, Artificial
  Synthetic oligonucleotide
gggagcatcatctagccgtttcacaaactggggttcagttagcctctcactggacgcaga

SEQ ID NO: 35068 - DNA, 60 bp, Artificial
  Synthetic oligonucleotide
gggagcatcatctagccgtttcacaaactggggctcagttagcctctcactggatgcaga

SEQ ID NO: 35069 - DNA, 60 bp, Artificial
  Synthetic oligonucleotide
cattaaaagccatcattgctgctgatggcttgaacaacatcacctgccatggtaaggatc

SEQ ID NO: 35070 - DNA, 60 bp, Artificial
  Synthetic oligonucleotide
tcagttagctccaaaatagtagctcactgccccccccaggacccgtgcctagtgcatggc

SEQ ID NO: 35071 - DNA, 60 bp, Artificial
  Synthetic oligonucleotide
gatcagtcagttagctccaaaatagtagctcactgccccccccaggacccgtgcctagtg

SEQ ID NO: 35072 - DNA, 60 bp, Artificial
  Synthetic oligonucleotide
caatgacgggaaaatggcttcagtcaagtgccctcctaagtatgagctcactgaggactg

SEQ ID NO: 35073 - DNA, 60 bp, Artificial
  Synthetic oligonucleotide
cagggcattaaaagccatcattgctgctgatggcttgaacaacatcacctgccatggtaa

SEQ ID NO: 35074 - DNA, 60 bp, Artificial
  Synthetic oligonucleotide
cagagcattaaaagccatcattgctgctgatggcttgaacaacatcacctgccatggtaa

SEQ ID NO: 35075 - DNA, 60 bp, Artificial
  Synthetic oligonucleotide
tacagggcattaaaagccatcattgctgctgatggcttgaacaacatcacctgccatggt

SEQ ID NO: 35076 - DNA, 60 bp, Artificial
  Synthetic oligonucleotide
cagggcattaaaagccaccattgctgctgatggcttgaacaacatcacctgccatggtaa

SEQ ID NO: 35077 - DNA, 60 bp, Artificial
  Synthetic oligonucleotide
attgagagcccaggcaaagggtatgcaattgttgatgagccattctcagaaattcctcgg

SEQ ID NO: 35078 - DNA, 60 bp, Artificial
  Synthetic oligonucleotide
cattgagagcccaggcaaagggtatgcaattgttgatgagccattctcagaaatttctcg

SEQ ID NO: 35079 - DNA, 60 bp, Artificial
  Synthetic oligonucleotide
gcccaggcaaagggtatgcaattgttgatgagccattctcagaaattcctcggcaagggt

SEQ ID NO: 35080 - DNA, 60 bp, Artificial
  Synthetic oligonucleotide
gcccaagcaaagggtatgcaattgttgatgagccattctcagaaattcctcggcaagggt

SEQ ID NO: 35081 - DNA, 60 bp, Artificial
  Synthetic oligonucleotide
gcccaggcaaagggtatgcaattgttgatgagccattctcagaaatttctcggcaagggt

SEQ ID NO: 35082 - DNA, 60 bp, Artificial
  Synthetic oligonucleotide
agagcccaagcaaagggtatgcaattgttgatgagccattctcagaaattcctcggcaag

SEQ ID NO: 35083 - DNA, 60 bp, Artificial
  Synthetic oligonucleotide
cattgagagcccaggcaaagggtatgcaattgttgatgagccattctcagaaattcctcg

SEQ ID NO: 35084 - DNA, 60 bp, Artificial
  Synthetic oligonucleotide
gggttgtgtcaaggattcaaatcactcagagtcgccagatcactatgcaaatctaagggc

SEQ ID NO: 35085 - DNA, 60 bp, Artificial
  Synthetic oligonucleotide
taattttgatgcaaaatgcaactatgcttgtagttgctggtgagaactgctggacaaata

SEQ ID NO: 35086 - DNA, 60 bp, Artificial
  Synthetic oligonucleotide
ggcaggacaacccgaaacaacctacagatgaatatgctatccctaagaggagctgccaga

SEQ ID NO: 35087 - DNA, 60 bp, Artificial
  Synthetic oligonucleotide
agatgcactagagagacgtgatccagctagcatagtgggttccaatcactgcttctcaga

SEQ ID NO: 35088 - DNA, 60 bp, Artificial
  Synthetic oligonucleotide
catttgaaatgatggggaaaatcgctaataaatatccaaacaataagctattggttgtta

SEQ ID NO: 35089 - DNA, 60 bp, Artificial
  Synthetic oligonucleotide
aagaatgggttgccaaatcactgagcttaactagagcacagagaactggcctaaaaatgt

SEQ ID NO: 35090 - DNA, 60 bp, Artificial
  Synthetic oligonucleotide
tgccacatatacgagcaaggtagaattctttaaccatgacttcacacttttcctggacat

SEQ ID NO: 35091 - DNA, 60 bp, Artificial
  Synthetic oligonucleotide
gtatggtgtttaaatgatatgcattgtctaaccccttacacaccagcaaatgcagaaata

SEQ ID NO: 35092 - DNA, 60 bp, Artificial
  Synthetic oligonucleotide
ccccaaagttccaagtagaagtcaataatctcatgagctgtggtgcatcaccaaatttca

SEQ ID NO: 35093 - DNA, 60 bp, Artificial
  Synthetic oligonucleotide
catgataggaattctgtatggtgtttaaatgatatgcattgtctaaccccttacacacca

SEQ ID NO: 35094 - DNA, 61 bp, Artificial
  Synthetic oligonucleotide
gcacaatattttgtaaagaatgcaacttaatacacgacaagaaatcaatgacatacagggg

SEQ ID NO: 35095 - DNA, 60 bp, Artificial
  Synthetic oligonucleotide
ggggctgcgaggaatttggctgcctggctataaatactggatgtgtttatgggtcatgtc

SEQ ID NO: 35096 - DNA, 51 bp, Artificial
  Synthetic oligonucleotide
gactcatgtaggcttttaaatcaagagagtgatctcttattcgacgacaat

SEQ ID NO: 35097 - DNA, 56 bp, Artificial
  Synthetic oligonucleotide
atataataacaagaggctgaatggagaattagctctcaagttattgcttggagata

SEQ ID NO: 35098 - DNA, 55 bp, Artificial
  Synthetic oligonucleotide
ctagacgaaactgcgctatatctggtccctgtgagccactttcatgataggattc

SEQ ID NO: 35099 - DNA, 60 bp, Artificial
  Synthetic oligonucleotide
gaaaatatcgtgcactagagacccaggagataaagcatcattcagagtgtgtgggaagag

SEQ ID NO: 35100 - DNA, 60 bp, Artificial
  Synthetic oligonucleotide
cattcagagtgtgtgggaagagttatgactttaattttcatacagtaccaaagaatgaca

SEQ ID NO: 35101 - DNA, 60 bp, Artificial
  Synthetic oligonucleotide
ggtgtgggagatggttatgtagagttcgagatgagggattgagtgttatatttgaaccat

SEQ ID NO: 35102 - DNA, 60 bp, Artificial
  Synthetic oligonucleotide
gcggttctaggtttgaaacatctgatagaatgcgactacatagggaatcggggttgtgtc

SEQ ID NO: 35103 - DNA, 60 bp, Artificial
  Synthetic oligonucleotide
acactgctccaccaatctcaaaatgcttccaagatgggattctgatagcagaactaaaga

SEQ ID NO: 35104 - DNA, 60 bp, Artificial
  Synthetic oligonucleotide
taatattgtcatttataacaccactcgaagcaatgaccacgaactaccctgatgataaaa

SEQ ID NO: 35105 - DNA, 66 bp, Artificial
  Synthetic oligonucleotide
ctaagggctcttctcttgttatttctatactgacagctatgttaatattgtcatttataacaccac

SEQ ID NO: 35106 - DNA, 60 bp, Artificial
  Synthetic oligonucleotide
cttcggcttaactgtactcttggagattgtactagagctaattgcaaagaggagcacaat

SEQ ID NO: 35107 - DNA, 60 bp, Artificial
  Synthetic oligonucleotide
tgcaatagcaaatagtttcgatatatgtactaatacaccaacaccaaacttttgtaaatg

SEQ ID NO: 35108 - DNA, 52 bp, Artificial
  Synthetic oligonucleotide
aattaaataagcagcttagaaatttctatgaattacagctgctgtgttgtta

SEQ ID NO: 35109 - DNA, 60 bp, Artificial
  Synthetic oligonucleotide
gaactaaagagctcatctggaatatcagaattttgtataaaggatgatatatctatcctg

SEQ ID NO: 35110 - DNA, 60 bp, Artificial
  Synthetic oligonucleotide
gaacctgccacacataaaaccaacgtataagtatatcacagcacaaggaacatatacagc

SEQ ID NO: 35111 - DNA, 60 bp, Artificial
  Synthetic oligonucleotide
aattgcaaagaggagcacaatattttgtaaagaatgcaacttaatacacgacaagaaatc

SEQ ID NO: 35112 - DNA, 60 bp, Artificial
  Synthetic oligonucleotide
acaacttcgatacctgccttgagcggcactagtgtaggattcaaaataaatgctaaggat

SEQ ID NO: 35113 - DNA, 60 bp, Artificial
  Synthetic oligonucleotide
catatacagcagatggtatagagggtgctagtatcacaacttcgatacctgccttgagcg

SEQ ID NO: 35114 - DNA, 60 bp, Artificial
  Synthetic oligonucleotide
ttgtggaaaaaagagcctacaatttcatgcatgcttcaaacaacatatgtcttgtgttcg

SEQ ID NO: 35115 - DNA, 60 bp, Artificial
  Synthetic oligonucleotide
cctacaatttcatgcatgcttcaaacaacatatgtcttgtgttcgcttcttgcataggag

SEQ ID NO: 35116 - DNA, 60 bp, Artificial
  Synthetic oligonucleotide
tcacagcacaaggaacatatacagcagatggtatagagggtgctagtatcacaacttcga

SEQ ID NO: 35117 - DNA, 60 bp, Artificial
  Synthetic oligonucleotide
atctatcctgaaatcagaaatcacttactcaaaaaatgacacaggcatattcatgcatag

SEQ ID NO: 35118 - DNA, 60 bp, Artificial
  Synthetic oligonucleotide
gcgaaaaactatatgtgcacaaggccatgtgtcataacaattgataaggagaatgctcaa

SEQ ID NO: 35119 - DNA, 60 bp, Artificial
  Synthetic oligonucleotide
tcatactactatttctggccctctatatactgatgcccatgtgtgctagattgagggatg

SEQ ID NO: 35120 - DNA, 60 bp, Artificial
  Synthetic oligonucleotide
gcttctcagaaaaatgccaaatagagaggtacccaatcaacccaactagcttaacaaact

SEQ ID NO: 35121 - DNA, 60 bp, Artificial
  Synthetic oligonucleotide
tgccccattattagagaacctgccacacataaaaccaacgtataagtatatcacagcaca

SEQ ID NO: 35122 - DNA, 60 bp, Artificial
  Synthetic oligonucleotide
cttgtgttcgcttcttgcataggagtgttttacctgggtacatggcaagttccatatgtc

SEQ ID NO: 35123 - DNA, 60 bp, Artificial
  Synthetic oligonucleotide
gcattattacaagaacatatatttgttacttgatgctccccttatttgcccccattgcat

SEQ ID NO: 35124 - DNA, 60 bp, Artificial
  Synthetic oligonucleotide
gtgggcttgcttatcacccattcacaaattgtggctcatattgtgtctgcggttctaggt

SEQ ID NO: 35125 - DNA, 60 bp, Artificial
  Synthetic oligonucleotide
gtgtctgcggttctaggtttgaaacatctgatagaatgcgactacatagggaatcggggt

SEQ ID NO: 35126 - DNA, 60 bp, Artificial
  Synthetic oligonucleotide
agagattaaagctgactgtgttgggcctttgatagggccatcagcatgcacaaacaaagg

SEQ ID NO: 35127 - DNA, 58 bp, Artificial
  Synthetic oligonucleotide
gcttcagttgtcaaaagtatttacaaccatatatatgacacaggtccaacaatcaata

SEQ ID NO: 35128 - DNA, 60 bp, Artificial
  Synthetic oligonucleotide
ctgccttgagcggcactagtgtaggattcaaaataaatgctaaggatggaactgaccttc

SEQ ID NO: 35129 - DNA, 60 bp, Artificial
  Synthetic oligonucleotide
acaagaaatcaatgacatacaggggcgattttactaataaatgcggtttttgcccatgtg

SEQ ID NO: 35130 - DNA, 60 bp, Artificial
  Synthetic oligonucleotide
gccaaatagagaggtacccaatcaacccaactagcttaacaaactgcgagtggttgtaca

SEQ ID NO: 35131 - DNA, 60 bp, Artificial
  Synthetic oligonucleotide
caatgcacctattagagacaatgttcttgatgaagcattgtgattactacaaagtgtatg

SEQ ID NO: 35132 - DNA, 60 bp, Artificial
  Synthetic oligonucleotide
aaagtgtatgaacacaatagtggctactcacaaacaaagtggagactaattgcaatagca

SEQ ID NO: 35133 - DNA, 60 bp, Artificial
  Synthetic oligonucleotide
gaatcggggttgtgtcaaggattcaaatcactcagagtcgccagatcactatgcaaatct

SEQ ID NO: 35134 - DNA, 60 bp, Artificial
  Synthetic oligonucleotide
ctgatttaacatttctacctctgtacacttatatatatgcacgtagcatatatataagtg

SEQ ID NO: 35135 - DNA, 60 bp, Artificial
  Synthetic oligonucleotide
aaagaccttgctgcattgcgattgtgcatagaagtttggcgctggtgtaaagcaaataat

SEQ ID NO: 35136 - DNA, 60 bp, Artificial
  Synthetic oligonucleotide
gaccttcgagtcacattcaattttggactagactgtgcccgccttgaaatattctgggac

SEQ ID NO: 35137 - DNA, 60 bp, Artificial
  Synthetic oligonucleotide
ggggtgcagtgtgatgttattcctacgaagcagatccagagggcaaaagtggccagaaca

SEQ ID NO: 35138 - DNA, 60 bp, Artificial
  Synthetic oligonucleotide
atgaaatgtcagatgttttggattctgcaaagttccctgactctctagctgtagatctga

SEQ ID NO: 35139 - DNA, 60 bp, Artificial
  Synthetic oligonucleotide
gggaacttgggttggatatctcacaggctgaagtaatgaagaaggttgcacctatgctat

SEQ ID NO: 35140 - DNA, 60 bp, Artificial
  Synthetic oligonucleotide
gagagaaaaggctcaagtatgaggcagggctaaagtacattgaacaagaactgcataatc

SEQ ID NO: 35141 - DNA, 60 bp, Artificial
  Synthetic oligonucleotide
aattgatgcattaaggaatgtttacaaaactgacttctatatgtccaggaaattaagggc

SEQ ID NO: 35142 - DNA, 60 bp, Artificial
  Synthetic oligonucleotide
tcaactgttggagcaagtggaatctacccgtcattcatgtcccgtgtcatttacaagcac

SEQ ID NO: 35143 - DNA, 60 bp, Artificial
  Synthetic oligonucleotide
gtctaatgtgaaacacctagttttgttcaagacagaggcaggttttgagtggggaaagcc

SEQ ID NO: 35144 - DNA, 60 bp, Artificial
  Synthetic oligonucleotide
caggttgttgccaatagcattcttaataaatattgggaggttccgtattttagtcagact

SEQ ID NO: 35145 - DNA, 60 bp, Artificial
  Synthetic oligonucleotide
tgtggagtgggccctaaaatttaggcaaaaagaagaccaatatggagaatccatggttga

SEQ ID NO: 35146 - DNA, 60 bp, Artificial
  Synthetic oligonucleotide
gaccttgagctcaacataagtgaacccacaagtcatggctcctttacaactaaacataca

SEQ ID NO: 35147 - DNA, 60 bp, Artificial
  Synthetic oligonucleotide
ggacatcttgctgcatctgttacaatcatagaggcaatacgttatctctcatcttcacag

SEQ ID NO: 35148 - DNA, 60 bp, Artificial
  Synthetic oligonucleotide
gtagccatgagcctggtgaaaagaaaggtgccctaattgagagtttaaacctaagcagcc

SEQ ID NO: 35149 - DNA, 60 bp, Artificial
  Synthetic oligonucleotide
ctcgatgaggcctgagtcaaaggcaatgttagacatgttgggtagccatgagcctggtga

SEQ ID NO: 35150 - DNA, 60 bp, Artificial
  Synthetic oligonucleotide
ctgagtggcttgatagattcatccgtgtcggtgtccctccagtggacccagagatccagt

SEQ ID NO: 35151 - DNA, 60 bp, Artificial
  Synthetic oligonucleotide
gtgctcactactgtcatcctacaacccagctacaatcctttctgatcaggtcgacagcag

SEQ ID NO: 35152 - DNA, 60 bp, Artificial
  Synthetic oligonucleotide
gccataaattttcatttcatgagggaaaggtccctgctgtgtttgactgttttaatgaga

SEQ ID NO: 35153 - DNA, 60 bp, Artificial
  Synthetic oligonucleotide
gtacaggcaaatagaagagcttattcaggtaaacaatatgatgcctattgtgttcagaca

SEQ ID NO: 35154 - DNA, 60 bp, Artificial
  Synthetic oligonucleotide
gttcgagagcacttgatacggcaggaggaaagggctgctctagaagcaatgttcaatcta

SEQ ID NO: 35155 - DNA, 60 bp, Artificial
  Synthetic oligonucleotide
ggatgatgactgggttacatttagggagatcttagctgcagcaaatagttttgcacaatt

SEQ ID NO: 35156 - DNA, 60 bp, Artificial
  Synthetic oligonucleotide
aaagatacattccagcatgaaagattgggtgagttttcattcatagggaaagtgcaatgg

SEQ ID NO: 35157 - DNA, 60 bp, Artificial
  Synthetic oligonucleotide
gtctcaacagatccaagcaggtcatttacactggtttagtgtgaacacagaaatgtggaa

SEQ ID NO: 35158 - DNA, 60 bp, Artificial
  Synthetic oligonucleotide
tgttcatctctttttggtgtaggaatgtcgttgctatttaagcaactttggaatgaatta

SEQ ID NO: 35159 - DNA, 60 bp, Artificial
  Synthetic oligonucleotide
ggtggaagtggtgccatgtcaataatggagctagcaactgctggtattggtatgtctgat

SEQ ID NO: 35160 - DNA, 60 bp, Artificial
  Synthetic oligonucleotide
agattatatgggacagctgttggtatgataaaacatccatcaacatatcttcaagtcaag

SEQ ID NO: 35161 - DNA, 59 bp, Artificial
  Synthetic oligonucleotide
ccccaagaagacaacactatcaccaactaatgcggaattcctctctacgttctttgaaa

SEQ ID NO: 35162 - DNA, 60 bp, Artificial
  Synthetic oligonucleotide
ttagaaaaagcacttagatgggcttctggagagagctttattgaacttagcaacggaaag

SEQ ID NO: 35163 - DNA, 60 bp, Artificial
  Synthetic oligonucleotide
aaggatgaaaagaaaattgatgtatgtgagtgctgatgcaacgaaatggtctcctggaga

SEQ ID NO: 35164 - DNA, 60 bp, Artificial
  Synthetic oligonucleotide
caggttgtctccgttagaacagatggttctaatatctctacacaatggcctagccggagg

SEQ ID NO: 35165 - DNA, 59 bp, Artificial
  Synthetic oligonucleotide
cactcccaacacgatgtaggttagaaataattgaagattattacgatgccatctcaaaa

SEQ ID NO: 35166 - DNA, 60 bp, Artificial
  Synthetic oligonucleotide
gaacaatccaagtgttctacaactttatgaagagactagaaaagtgaaagctcaagcacg

SEQ ID NO: 35167 - DNA, 60 bp, Artificial
  Synthetic oligonucleotide
agggtcttacataaggtttgtgacagtttttcgaatgggtccagggctagtcgataaaga

SEQ ID NO: 35168 - DNA, 60 bp, Artificial
  Synthetic oligonucleotide
cagagaaattcatagggatctacaatcctttccagttgggtcactgacagcagtagagtg

SEQ ID NO: 35169 - DNA, 57 bp, Artificial
  Synthetic oligonucleotide
ggggtttcaaaggttatgagtattgatttgaacaggttactagcgctcaatattgca

SEQ ID NO: 35170 - DNA, 60 bp, Artificial
  Synthetic oligonucleotide
tgctacagccacatggtttcaatactatacagaggatcaaggccagttccccctacaaca

SEQ ID NO: 35171 - DNA, 60 bp, Artificial
  Synthetic oligonucleotide
ggcatattgggcatctcattcgggatataacagaaagcttaattgctcattcaggtctca

SEQ ID NO: 35172 - DNA, 60 bp, Artificial
  Synthetic oligonucleotide
gtcagataacaaggattcagaggaatctataggaaaggttttgctgtttgctggggtgcc

SEQ ID NO: 35173 - DNA, 60 bp, Artificial
  Synthetic oligonucleotide
ccttttagacccatatgacttgactgagtttgaaagcattgttaaaggttggggagaatg

SEQ ID NO: 35174 - DNA, 59 bp, Artificial
  Synthetic oligonucleotide
taccaggcagtagatgctgtaagtaatgtgtggtttatccataaggggataaaactatt

SEQ ID NO: 35175 - DNA, 60 bp, Artificial
  Synthetic oligonucleotide
gtttaagagcaaaccaaactgttaaccacaaattcatgatatcaattaaggataacggcc

SEQ ID NO: 35176 - DNA, 60 bp, Artificial
  Synthetic oligonucleotide
ggctcatcaacccatcaaatacgcttgacctatccggtttgcagccaactgaagatgggt

SEQ ID NO: 35177 - DNA, 60 bp, Artificial
  Synthetic oligonucleotide
tataagtttaaaggggatgtcaggccaagttcaagaagatggacatcttgctgcatctgt

SEQ ID NO: 35178 - DNA, 60 bp, Artificial
  Synthetic oligonucleotide
gacacagcttttggtatctcagaaaggcatctgcccagaggatgtggtacctgattccct

SEQ ID NO: 35179 - DNA, 60 bp, Artificial
  Synthetic oligonucleotide
ttggcgctggtgtaaagcaaataatgcaccctatcaagaatggtttcatgctctgtggtt

SEQ ID NO: 35180 - DNA, 60 bp, Artificial
  Synthetic oligonucleotide
tcaacctaactacctcatttgcttgctccttgattgtctttttagggagcatactactac

SEQ ID NO: 35181 - DNA, 58 bp, Artificial
  Synthetic oligonucleotide
cctaactacctcattagcttgctccttgattgtctttttagggagcatactactacta

SEQ ID NO: 35182 - DNA, 60 bp, Artificial
  Synthetic oligonucleotide
tgcaaccccacttggtgttggggagtcggcactggatgcacctgctgtggactagatgtg

SEQ ID NO: 35183 - DNA, 60 bp, Artificial
  Synthetic oligonucleotide
ggtgaagggttgcacctggagtgatgggtatgcaatgtacctgggatttgcccctggtgc

SEQ ID NO: 35184 - DNA, 60 bp, Artificial
  Synthetic oligonucleotide
agtgaatgggaagttacaattaaccttgggggctggaagattgctgtatataatacgaat

SEQ ID NO: 35185 - DNA, 60 bp, Artificial
  Synthetic oligonucleotide
cttcatgagaaaggtcttacgccagaggtatgggcagctgactgcagaagaatggatgac

SEQ ID NO: 35186 - DNA, 60 bp, Artificial
  Synthetic oligonucleotide
cttacgccagaggtatgggcagctgactgcagaagaatggatgacatctaagttggacgc

SEQ ID NO: 35187 - DNA, 60 bp, Artificial
  Synthetic oligonucleotide
gtccttgcccaatgcacaatctagcatgaaggcagaagagataacacctggaagatacag

SEQ ID NO: 35188 - DNA, 60 bp, Artificial
  Synthetic oligonucleotide
tctcggacccactgttcaatttcattgcggtccactgcttgagcagcaaactggatcgca

SEQ ID NO: 35189 - DNA, 60 bp, Artificial
  Synthetic oligonucleotide
tctcattgcggtccactgcttgagcagcaaactggatcgcaagttcttgatagttgtcca

SEQ ID NO: 35190 - DNA, 60 bp, Artificial
  Synthetic oligonucleotide
cggacccactgttcaatttcattgcggtccactgcttgagcagcaaactggatcgcaagc

SEQ ID NO: 35191 - DNA, 60 bp, Artificial
  Synthetic oligonucleotide
tctcattgcggtccactgcttgagcagcaaactggactcgaagctcttgatagttgtcca

SEQ ID NO: 35192 - DNA, 60 bp, Artificial
  Synthetic oligonucleotide
gggctggttgacagtgtcagtgacagcttcttccccggcctgtctgtctgtaagacatgc

SEQ ID NO: 35193 - DNA, 60 bp, Artificial
  Synthetic oligonucleotide
ctaagcacactaagccccacggagccgtctcatgccaggctaccaacagcagaacccttc

SEQ ID NO: 35194 - DNA, 60 bp, Artificial
  Synthetic oligonucleotide
ggccgacctacggtgcaggagagatcactgtgctggttgaggttgctgacatggagttgc

SEQ ID NO: 35195 - DNA, 60 bp, Artificial
  Synthetic oligonucleotide
ccttcccctaatcagaaccctcccccaccctgattatcaccccaaaatccacaacccctc

SEQ ID NO: 35196 - DNA, 60 bp, Artificial
  Synthetic oligonucleotide
gagaattttgtaagaaaggacctcctctgtgcattgtcaatgaaagagctgttgatggcg

SEQ ID NO: 35197 - DNA, 56 bp, Artificial
  Synthetic oligonucleotide
agagctagctctggagctagaagtcacaattgagaattttgtaagaaaggacctcc

SEQ ID NO: 35198 - DNA, 60 bp, Artificial
  Synthetic oligonucleotide
caactacaagagaggactagataccaagaaccaacttatgtcttacattttgagaatggc

SEQ ID NO: 35199 - DNA, 51 bp, Artificial
  Synthetic oligonucleotide
tctctcaaggtttgatatgcagtccttctcggtgccaggattacagaacat

SEQ ID NO: 35200 - DNA, 60 bp, Artificial
  Synthetic oligonucleotide
cctatgaaagctcagattcagaattttgagattgatgctgcccaagccccccttccccta

SEQ ID NO: 35201 - DNA, 60 bp, Artificial
  Synthetic oligonucleotide
ctagaggattcgggagacgaggcagtctctcagacttctatctctacaaggagctaccag

SEQ ID NO: 35202 - DNA, 60 bp, Artificial
  Synthetic oligonucleotide
ctttagaaaagtactctagaggattcgggagacgaggcagtctctcagacttctatctct

SEQ ID NO: 35203 - DNA, 50 bp, Artificial
  Synthetic oligonucleotide
cctatgaaagctcagattcagaattttgagattgatgctgcccaagcccc

SEQ ID NO: 35204 - DNA, 60 bp, Artificial
  Synthetic oligonucleotide
ggctctggttactgggagccagtgaatggacccgaggaagacacctatgaaagctcagat

SEQ ID NO: 35205 - DNA, 60 bp, Artificial
  Synthetic oligonucleotide
cagcaatcttctttactacagagctagctctggagctagaagtcacaattgagaattttg

SEQ ID NO: 35206 - DNA, 60 bp, Artificial
  Synthetic oligonucleotide
ttagactctagggtccacagggctttgtctactgtcaattacatggctttcaacaaattc

SEQ ID NO: 35207 - DNA, 60 bp, Artificial
  Synthetic oligonucleotide
ctgtgacatctcaacatacgagcactgtgagtttcctttagaaaagtactctagaggatt

SEQ ID NO: 35208 - DNA, 60 bp, Artificial
  Synthetic oligonucleotide
caacaaattctattactgtgacatctcaacatacgagcactgtgagtttcctttagaaaa

SEQ ID NO: 35209 - DNA, 60 bp, Artificial
  Synthetic oligonucleotide
ttctatctctacaaggagctaccagcctcctggggtcccgcatgcacaattagctctgtc

SEQ ID NO: 35210 - DNA, 60 bp, Artificial
  Synthetic oligonucleotide
gggtccacagggctttgtctactgtcaattacatggctttcaacaaattctattactgtg

SEQ ID NO: 35211 - DNA, 60 bp, Artificial
  Synthetic oligonucleotide
caaggagctaccagcctcctggggtcccgcatgcacaattagctctgtcagacctatggt

SEQ ID NO: 35212 - DNA, 60 bp, Artificial
  Synthetic oligonucleotide
tcatcaatgcagaaccacatgactcaacatctagtggctctgggctagagatcaagtgta

SEQ ID NO: 35213 - DNA, 60 bp, Artificial
  Synthetic oligonucleotide
caacccctccctttgatggcagcagctcactcaagcttcctgtacacctcagcaatcttc

SEQ ID NO: 35214 - DNA, 54 bp, Artificial
  Synthetic oligonucleotide
atgcatcatctgtctcgggtaggtctgaccactgattctatccatcgcagaccc

SEQ ID NO: 35215 - DNA, 60 bp, Artificial
  Synthetic oligonucleotide
tttccacgacctcaattgcctgaacagtccagcctgctagagcagcagccacacgggtga

SEQ ID NO: 35216 - DNA, 60 bp, Artificial
  Synthetic oligonucleotide
ttaaaatcttccgggtccaaagaggggtcaataaggccagcaaagctaggatgcatcatc

SEQ ID NO: 35217 - DNA, 60 bp, Artificial
  Synthetic oligonucleotide
ccgggtccaaagaggggtcaataaggccagcaaagctaggatgcatcatctgtctcgggt

SEQ ID NO: 35218 - DNA, 60 bp, Artificial
  Synthetic oligonucleotide
tagtcttggaaaacatataaagaaagagcttgtgagcatcaacaatggcattaaaatctt

SEQ ID NO: 35219 - DNA, 60 bp, Artificial
  Synthetic oligonucleotide
acaacccctccctttgatggcagcagctcactcaagcttcctgtacacctcagcaatctt

SEQ ID NO: 35220 - DNA, 60 bp, Artificial
  Synthetic oligonucleotide
gaatgactcctctatatccctctttgatgctcctctgagtccaacattgatagtcttgga

SEQ ID NO: 35221 - DNA, 60 bp, Artificial
  Synthetic oligonucleotide
gactcctctatatccctctttgatgctcctctgagtccaacattgatagtcttggaaaac

SEQ ID NO: 35222 - DNA, 53 bp, Artificial
  Synthetic oligonucleotide
ccccaccctgattatcaccccaaaatccacaacccctccctttgatggcagca

SEQ ID NO: 35223 - DNA, 60 bp, Artificial
  Synthetic oligonucleotide
ttgcctgaacagtccagcctgctagagcagcagccacacgggtgagtgtcagcccatttc

SEQ ID NO: 35224 - DNA, 60 bp, Artificial
  Synthetic oligonucleotide
tataaagaaagagcttgtgagcatcaacaatggcattaaaatcttccgggtccaaagagg

SEQ ID NO: 35225 - DNA, 60 bp, Artificial
  Synthetic oligonucleotide
ggctgactcaaaattcttggatgagtgtatggttcaggctcacaagaagataatatcaga

SEQ ID NO: 35226 - DNA, 60 bp, Artificial
  Synthetic oligonucleotide
catcaatgcagaaccacatgactcaacatctagtggctctgggctagagatcaagtgtat

SEQ ID NO: 35227 - DNA, 60 bp, Artificial
  Synthetic oligonucleotide
ggtttatggctctggttactgggagccagtgaatggacccgaggaagacacctatgaaag

SEQ ID NO: 35228 - DNA, 60 bp, Artificial
  Synthetic oligonucleotide
caagagaggactagataccaagaaccaacttatgtcttacattttgagaatggctgactc

SEQ ID NO: 35229 - DNA, 60 bp, Artificial
  Synthetic oligonucleotide
tgagaatggctgactcaaaattcttggatgagtgtatggttcaggctcacaagaagataa

SEQ ID NO: 35230 - DNA, 60 bp, Artificial
  Synthetic oligonucleotide
attaatagcacatgaatagccaatacttgtttgactatcctgttgtgaagttagactcta

SEQ ID NO: 35231 - DNA, 60 bp, Artificial
  Synthetic oligonucleotide
gaatagccaatacttgtttgactatcctgttgtgaagttagactctagggtccacagggc

SEQ ID NO: 35232 - DNA, 60 bp, Artificial
  Synthetic oligonucleotide
gaatgcaggtcactagggctgcaggatgagcacttcaacggatatgacctgtttagagag

SEQ ID NO: 35233 - DNA, 60 bp, Artificial
  Synthetic oligonucleotide
caacggatatgacctgtttagagagatctctactcttgtttgcacccgcctcatcaatgc

SEQ ID NO: 35234 - DNA, 60 bp, Artificial
  Synthetic oligonucleotide
gtttagagagatctctactcttgtttgcacccgcctcatcaatgcagaaccacatgactc

SEQ ID NO: 35235 - DNA, 60 bp, Artificial
  Synthetic oligonucleotide
aagaagataatatcagaatgcaggtcactagggctgcaggatgagcacttcaacggatat

SEQ ID NO: 35236 - DNA, 60 bp, Artificial
  Synthetic oligonucleotide
gtacttagcaactaatgctttgacctccttggctccttccggagacattctctcctgcat

SEQ ID NO: 35237 - DNA, 60 bp, Artificial
  Synthetic oligonucleotide
cgggtgagtgtcagcccatttcgtcctggttttccctcaaccagcttgtacttagcaact

SEQ ID NO: 35238 - DNA, 60 bp, Artificial
  Synthetic oligonucleotide
cttagcaactaatgctttgacctccttggctccttccggagacattctctcctgcatctt

SEQ ID NO: 35239 - DNA, 60 bp, Artificial
  Synthetic oligonucleotide
acacgggtgagtgtcagcccatttcgtcctggttttccctcaaccagcttgtacttagca

SEQ ID NO: 35240 - DNA, 60 bp, Artificial
  Synthetic oligonucleotide
gtgtctgctttgggacaattcctgtagccaacccagatgatgcagcccagggatctggac

SEQ ID NO: 35241 - DNA, 60 bp, Artificial
  Synthetic oligonucleotide
gctttgggacaattcctgtagccaacccagatgatgcagcccagggatctggacacacca

SEQ ID NO: 35242 - DNA, 59 bp, Artificial
  Synthetic oligonucleotide
tggtttgaggagttcaagaaaggaaatgggcttgtggacaccttcacaaactcatattc

SEQ ID NO: 35243 - DNA, 60 bp, Artificial
  Synthetic oligonucleotide
gaacttggacagatttgtgtatcagatggccagtgcaaccgatgatgcacagaaggactc

SEQ ID NO: 35244 - DNA, 60 bp, Artificial
  Synthetic oligonucleotide
ggctcaggaactctacaagaactcatctgcacttcgtgctcagggtgcacaaattgacac

SEQ ID NO: 35245 - DNA, 60 bp, Artificial
  Synthetic oligonucleotide
cacaaattgacactcctttcagctcgttctactggctctacaaggcaggggtcactccag

SEQ ID NO: 35246 - DNA, 60 bp, Artificial
  Synthetic oligonucleotide
tctcaaagaaacacgtgccgctcacgcccacagtgttatcttgagtgtaagcaaaatgga

SEQ ID NO: 35247 - DNA, 60 bp, Artificial
  Synthetic oligonucleotide
gtgccgctcacgcccacagtgttatcttgagtgtaagcaaaatggagaacaaaatcgagg

SEQ ID NO: 35248 - DNA, 60 bp, Artificial
  Synthetic oligonucleotide
gcaaaatggagaacaaaatcgaggtgaacagcaaagacgatctgaacaagtggtttgagg

SEQ ID NO: 35249 - DNA, 60 bp, Artificial
  Synthetic oligonucleotide
caaaatcgaggtgaacagcaaagacgatctgaacaagtggtttgaggagttcaagaaagg

SEQ ID NO: 35250 - DNA, 60 bp, Artificial
  Synthetic oligonucleotide
acatcgtggcctctgagcatctgctgcaccaatccctggttgggaagcagtcgcccttcc

SEQ ID NO: 35251 - DNA, 60 bp, Artificial
  Synthetic oligonucleotide
cctctgagcatctgctgcaccaatccctggttgggaagcagtcgcccttccagaatgcct

SEQ ID NO: 35252 - DNA, 60 bp, Artificial
  Synthetic oligonucleotide
aacacgagcactatcaaatcctgggacgagagctacactgagctgaaggttgacattccc

SEQ ID NO: 35253 - DNA, 60 bp, Artificial
  Synthetic oligonucleotide
cactgagctgaaggttgacattcccaaaatagagcagctctctagttatcagcaggcagc

SEQ ID NO: 35254 - DNA, 60 bp, Artificial
  Synthetic oligonucleotide
gcactcaaggactaccttgacaaacacagagatgaagtcgacaagacaagtgctgacaac

SEQ ID NO: 35255 - DNA, 54 bp, Artificial
  Synthetic oligonucleotide
cagtgctttcggctgcaactagtaatcatgcttgcttcaaatactgcttcactc

SEQ ID NO: 35256 - DNA, 60 bp, Artificial
  Synthetic oligonucleotide
cccaggtgctctgcatcccacccacccaactccaagtcagtgctttcggctgcaactagt

SEQ ID NO: 35257 - DNA, 60 bp, Artificial
  Synthetic oligonucleotide
caaggctcaggaactctacaagaactcatctgcacttcgtgctcagggtgcacaaattga

SEQ ID NO: 35258 - DNA, 60 bp, Artificial
  Synthetic oligonucleotide
gctgacaacatggtgacaagccttttgaaacatattgccaaggctcaggaactctacaag

SEQ ID NO: 35259 - DNA, 60 bp, Artificial
  Synthetic oligonucleotide
agactgtggaagcactcaaggactaccttgacaaacacagagatgaagtcgacaagacaa

SEQ ID NO: 35260 - DNA, 50 bp, Artificial
  Synthetic oligonucleotide
atcaacaaatcaggtcgctccgggattgcacttgtcgcaaccggtcttgc

SEQ ID NO: 35261 - DNA, 60 bp, Artificial
  Synthetic oligonucleotide
gacaagacaagtgctgacaacatggtgacaagccttttgaaacatattgccaaggctcag

SEQ ID NO: 35262 - DNA, 60 bp, Artificial
  Synthetic oligonucleotide
gcctacaatgtcaagggcaatgccaccagtgccaacatcatctagctgcccaggtgctct

SEQ ID NO: 35263 - DNA, 60 bp, Artificial
  Synthetic oligonucleotide
agcaggcagccctcaagtggagaaaggacataggtttccgcatcaatgctaacacaacag

SEQ ID NO: 35264 - DNA, 60 bp, Artificial
  Synthetic oligonucleotide
ggttgacattcccaaaatagagcagctctctagttatcagcaggcagccctcaagtggag

SEQ ID NO: 35265 - DNA, 60 bp, Artificial
  Synthetic oligonucleotide
ccacgaggcccagtaagtcatgagcacattgagtggtgcagggagttcatcaagggaaag

SEQ ID NO: 35266 - DNA, 60 bp, Artificial
  Synthetic oligonucleotide
caggcagccctcaagtggagaaaggacataggtttccgcatcaatgctaacacaacagcg

SEQ ID NO: 35267 - DNA, 60 bp, Artificial
  Synthetic oligonucleotide
cactcctttcagctcgttctactggctctacaaggcaggggtcactccagagacgttccc

SEQ ID NO: 35268 - DNA, 60 bp, Artificial
  Synthetic oligonucleotide
catgcaccctgctgtgctgacagctggtaggatcagcgaaatgggtgtctgctttgggac

SEQ ID NO: 35269 - DNA, 57 bp, Artificial
  Synthetic oligonucleotide
aagcaaccaagtactgtgcaccaatatatgagtgtgcctgggtcagctctacaggca

SEQ ID NO: 35270 - DNA, 60 bp, Artificial
  Synthetic oligonucleotide
catcatctagctgcccaggtgctctgcatcccacccacccaactccaagtcagtgctttc

SEQ ID NO: 35271 - DNA, 60 bp, Artificial
  Synthetic oligonucleotide
gagtggtttgaaaagaacacgagcactatcaaatcctgggacgagagctacactgagctg

SEQ ID NO: 35272 - DNA, 60 bp, Artificial
  Synthetic oligonucleotide
tgtcaagcttttcgaaattcagaagacgggctttgacataaaggacatggacatcgtggc

SEQ ID NO: 35273 - DNA, 60 bp, Artificial
  Synthetic oligonucleotide
aattcagaagacgggctttgacataaaggacatggacatcgtggcctctgagcatctgct

SEQ ID NO: 35274 - DNA, 60 bp, Artificial
  Synthetic oligonucleotide
caaagcatcatgaaagttgtgaaccaaagtgattttacttttggcaaggtcacgataaag

SEQ ID NO: 35275 - DNA, 60 bp, Artificial
  Synthetic oligonucleotide
gacaagttattgctaacatacttgccagtgaattgagttctgtgaaacgagattctgaac

SEQ ID NO: 35276 - DNA, 60 bp, Artificial
  Synthetic oligonucleotide
gttttaccacaaaaaacatacttaccactcttgcaagcagcaaagatctgcttcctgcac

SEQ ID NO: 35277 - DNA, 60 bp, Artificial
  Synthetic oligonucleotide
ctaattaattcacttcataccgattatgcctggacttttgttcctgcggaggatactact

SEQ ID NO: 35278 - DNA, 60 bp, Artificial
  Synthetic oligonucleotide
ctaattaaattattccataccgattatgcctggacttttgttcctgcggagcatactact

SEQ ID NO: 35279 - DNA, 60 bp, Artificial
  Synthetic oligonucleotide
tgaccgcattgagcaatggttaagtgaaccctgtaagcttcttccagacacagcagcagt

SEQ ID NO: 35280 - DNA, 60 bp, Artificial
  Synthetic oligonucleotide
ctacgccagaggtatggacagctgactgcagaagagtggatgacatctaagttagacgca

SEQ ID NO: 35281 - DNA, 60 bp, Artificial
  Synthetic oligonucleotide
ggaatgagcaccctccaagaattgcaggaaaacatcacagcacacgaacaacagctcgtg

SEQ ID NO: 35282 - DNA, 60 bp, Artificial
  Synthetic oligonucleotide
agttcttgcagtatggacaaccaccagtcattgaatacaataacaaaatatacccaagta

SEQ ID NO: 35283 - DNA, 60 bp, Artificial
  Synthetic oligonucleotide
gagattgtgcggcagcctggtgatgggaactgcttctatcacagcatagccgagttaacc

SEQ ID NO: 35284 - DNA, 60 bp, Artificial
  Synthetic oligonucleotide
gagattgtgcggcagcctggtgatgggaactgcttctaccatagcatagctgagttaacc

SEQ ID NO: 35285 - DNA, 60 bp, Artificial
  Synthetic oligonucleotide
gagattgtgcggcagcctggtgatgggaactgcttctaccacagcatagctgagttaacc

SEQ ID NO: 35286 - DNA, 60 bp, Artificial
  Synthetic oligonucleotide
cgattacttcgagattgtgcggcagcctggtgatgggaactgcttctaccacagcatagc

SEQ ID NO: 35287 - DNA, 60 bp, Artificial
  Synthetic oligonucleotide
attattttgagattgtgcggcagcctggtgatgggaactgcttctatcacagcatagctg

SEQ ID NO: 35288 - DNA, 60 bp, Artificial
  Synthetic oligonucleotide
gagattgtgcggcagcctggtgatgggaactgcttttatcacagtatagctgagttgacc

SEQ ID NO: 35289 - DNA, 60 bp, Artificial
  Synthetic oligonucleotide
cacgataaagaaaaatttcgagagagttggagctaaagacatgactttcagaaggcttga

SEQ ID NO: 35290 - DNA, 52 bp, Artificial
  Synthetic oligonucleotide
gaggtagtatccctcttattgcttctgttgacagcttcgaaatgatcagtgt

SEQ ID NO: 35291 - DNA, 60 bp, Artificial
  Synthetic oligonucleotide
tgcacagataaacaaagggaaagaatatgctaagatactcagttcttgcaatcccaatgc

SEQ ID NO: 35292 - DNA, 60 bp, Artificial
  Synthetic oligonucleotide
tctatcacagaatcagagggttatgatctttctgcaagaatgatagtagatacaaaccat

SEQ ID NO: 35293 - DNA, 60 bp, Artificial
  Synthetic oligonucleotide
tatgaatctgattctatcacagaatcagagggttatgatctttctgcaagaatgatagta

SEQ ID NO: 35294 - DNA, 60 bp, Artificial
  Synthetic oligonucleotide
gtcacccacagatttagggatgatttaaagaagacagtaacgccccagaactttacacca

SEQ ID NO: 35295 - DNA, 60 bp, Artificial
  Synthetic oligonucleotide
ccacagatttagggatgatttaaagaagacagtaacgccccagaactttacaccaggctg

SEQ ID NO: 35296 - DNA, 60 bp, Artificial
  Synthetic oligonucleotide
gaagttctctacttatgaacaggtttgcaaggtagccaaagtactttctgcttcacagat

SEQ ID NO: 35297 - DNA, 60 bp, Artificial
  Synthetic oligonucleotide
gatatggacccagagcttcgaggcctggcacaggcattgattgaccagaaagtgaaggag

SEQ ID NO: 35298 - DNA, 60 bp, Artificial
  Synthetic oligonucleotide
ggggtctggcacaggcattgattgaccagaaagtgaaggagatatccaatcaagagccgc

SEQ ID NO: 35299 - DNA, 60 bp, Artificial
  Synthetic oligonucleotide
gctgaactagatgaaatgtttaaatcagctgtaaagctattgagtgaaagcaaccctgga

SEQ ID NO: 35300 - DNA, 60 bp, Artificial
  Synthetic oligonucleotide
tcaacagattcactagcaaactggattgcaatttcttcataagacatgtttgtaacttgt

SEQ ID NO: 35301 - DNA, 65 bp, Artificial
  Synthetic oligonucleotide
cactagcaaactggattgcaatttcttcataagacatgtttgtaacttgtttgaaattttcaggg

SEQ ID NO: 35302 - DNA, 60 bp, Artificial
  Synthetic oligonucleotide
catcttgtttagcatcttagatggcttattccctcttgttaatgaaaggacaatcatctt

SEQ ID NO: 35303 - DNA, 60 bp, Artificial
  Synthetic oligonucleotide
atcaagtcattcacaattttctgaccactctctgacatcttgtttagcatcttagatggc

SEQ ID NO: 35304 - DNA, 60 bp, Artificial
  Synthetic oligonucleotide
caatcatcttcttcacatcctccttccagtcatctcctcccctctgcttgaccaggttga

SEQ ID NO: 35305 - DNA, 60 bp, Artificial
  Synthetic oligonucleotide
cacatcctccttccagtcatctcctcccctctgcttgaccaggttgatcacttgtcttgc

SEQ ID NO: 35306 - DNA, 60 bp, Artificial
  Synthetic oligonucleotide
agcttgtacttgctgatcaagtcattcacaattttctgaccactctctgacatcttgttt

SEQ ID NO: 35307 - DNA, 60 bp, Artificial
  Synthetic oligonucleotide
cttagatggcttattccctcttgttaatgaaaggacaatcatcttcttcacatcctcctt

SEQ ID NO: 35308 - DNA, 60 bp, Artificial
  Synthetic oligonucleotide
gaccccacacgctgcttgggtttttgcatgtgcccctgatcggtgccctccaacatgcat

SEQ ID NO: 35309 - DNA, 60 bp, Artificial
  Synthetic oligonucleotide
gaccccacatgctgcttgggtttttgcatgtgcccctgatcggtgccctccaacatgcat

SEQ ID NO: 35310 - DNA, 59 bp, Artificial
  Synthetic oligonucleotide
ttgagtagtaatagagcataccttctcaacaggcagtctgtcctggatgagtcacatct

SEQ ID NO: 35311 - DNA, 60 bp, Artificial
  Synthetic oligonucleotide
tatcctcaaggcattgtatatgctatctacaagagggcgacaaacagttaaggagaataa

SEQ ID NO: 35312 - DNA, 60 bp, Artificial
  Synthetic oligonucleotide
catcctcaaggcattgtatatgctatctacaagagggcgacaaacagttaaggagaataa

SEQ ID NO: 35313 - DNA, 60 bp, Artificial
  Synthetic oligonucleotide
gagacaactggcagatgctatatcgcgccagaagatggatgataagcctgctgaccctac

SEQ ID NO: 35314 - DNA, 60 bp, Artificial
  Synthetic oligonucleotide
ggcagatgctatatcgcgccagaagatggatgataagcctgctgaccctactgggctgga

SEQ ID NO: 35315 - DNA, 60 bp, Artificial
  Synthetic oligonucleotide
agtccacaatgaaggcagatgaactcactcctggtaggttccggaccattgtctgcggtc

SEQ ID NO: 35316 - DNA, 60 bp, Artificial
  Synthetic oligonucleotide
agtccacaatgaaggcagatgaactcactccaggtaggttccggaccattgtttgtggcc

SEQ ID NO: 35317 - DNA, 60 bp, Artificial
  Synthetic oligonucleotide
gtatatgctatctacaagagggcgacaaacagttaaggagaataaggggacaaggattcg

SEQ ID NO: 35318 - DNA, 60 bp, Artificial
  Synthetic oligonucleotide
gtcgcccaaaacacttatatgtcccaatgccaactgcacagtccacaatgaaggcagatg

SEQ ID NO: 35319 - DNA, 60 bp, Artificial
  Synthetic oligonucleotide
atcctacaagatatgagaaacactatcatggcatctaaaaccgtagggacagctgacgaa

SEQ ID NO: 35320 - DNA, 60 bp, Artificial
  Synthetic oligonucleotide
agtccacaatgaaggcagatgaactcactcctggtaggttccggaccattgtctgtggtc

SEQ ID NO: 35321 - DNA, 60 bp, Artificial
  Synthetic oligonucleotide
gaaagactgggaggataaaattcaagaattcctcaggaagcaatgtccattcttgaaatc

SEQ ID NO: 35322 - DNA, 60 bp, Artificial
  Synthetic oligonucleotide
tagtttataaccttactaactactaactcgggtatcattacaagtgtatgactaatgtag

SEQ ID NO: 35323 - DNA, 60 bp, Artificial
  Synthetic oligonucleotide
ttttccatttcatctctttacacacctacctcagtatacctatatatatgcacatagcat

SEQ ID NO: 35324 - DNA, 60 bp, Artificial
  Synthetic oligonucleotide
caacatgcatttatgtcgcaggaatggcagagttaggtgcctttttctcaatcctacaag

SEQ ID NO: 35325 - DNA, 60 bp, Artificial
  Synthetic oligonucleotide
caacatgcatttatgtcgcaggaatggcagagttaggtgcctttttttcaatcctacaag

SEQ ID NO: 35326 - DNA, 54 bp, Artificial
  Synthetic oligonucleotide
ttttgcatgtgcccctgatcggtgccctccaacatgcatttatgtcgcaggaat

SEQ ID NO: 35327 - DNA, 60 bp, Artificial
  Synthetic oligonucleotide
gctcaggcattgattgatgctaaggtgaaagagatttctaatcaggaaccactgaaggtt

SEQ ID NO: 35328 - DNA, 60 bp, Artificial
  Synthetic oligonucleotide
ggcattgattgatgctaaggtgaaagagatttctaatcaggaaccactgaagatttgagg

SEQ ID NO: 35329 - DNA, 60 bp, Artificial
  Synthetic oligonucleotide
taagtttatagattacacatttatatgtaaccaatcatattagtttataaccttactaac

SEQ ID NO: 35330 - DNA, 60 bp, Artificial
  Synthetic oligonucleotide
agctgacgaaaagctgaaaaagaagtctgctttttatcagtcatacctccggagaactca

SEQ ID NO: 35331 - DNA, 60 bp, Artificial
  Synthetic oligonucleotide
agctgacgaaaagctgaaaaagaagtctgctttttatcagtcatacctccggagaaccca

SEQ ID NO: 35332 - DNA, 60 bp, Artificial
  Synthetic oligonucleotide
tttatatgtaaccaatcatattagtttataaccttactaactactaactcgggtattatt

SEQ ID NO: 35333 - DNA, 60 bp, Artificial
  Synthetic oligonucleotide
acgtagcatatatataggtatacactcatactacctcaaacagttgctttcttgattgct

SEQ ID NO: 35334 - DNA, 60 bp, Artificial
  Synthetic oligonucleotide
cacgtagcatatatataggtatacactcatactacctcaaacagttgctttcttgattgc

SEQ ID NO: 35335 - DNA, 60 bp, Artificial
  Synthetic oligonucleotide
aggtatacactcatactacctcaaacagttgctttcttgattgcttttcaaggagtatac

SEQ ID NO: 35336 - DNA, 60 bp, Artificial
  Synthetic oligonucleotide
gactgggaggataaaattcaagaattcctcaggaagcaatgtccattcttgaaatctgaa

SEQ ID NO: 35337 - DNA, 60 bp, Artificial
  Synthetic oligonucleotide
ttttccatttcatctcttttacacacctacctcagtatacctatatatatgcacgtagca

SEQ ID NO: 35338 - DNA, 60 bp, Artificial
  Synthetic oligonucleotide
ttttccatttcatcttttacacacctacctcagtatacctatatatatgcacgtagcata

SEQ ID NO: 35339 - DNA, 60 bp, Artificial
  Synthetic oligonucleotide
cacatagcatatatataggtatacactcatactacctcaaacagttgctttcttgattgc

SEQ ID NO: 35340 - DNA, 60 bp, Artificial
  Synthetic oligonucleotide
gcacgtagcatatatataggtatacactcatactacctcaaacagttgctttcttgattg

SEQ ID NO: 35341 - DNA, 60 bp, Artificial
  Synthetic oligonucleotide
acatgattgaatggggaactgatattgttaatcactttcacttgggtgatgatatggacc

SEQ ID NO: 35342 - DNA, 60 bp, Artificial
  Synthetic oligonucleotide
ggaggtggacccggatgatgtcaacaagagtacactccaaagcagacgggcggcagtgtc

SEQ ID NO: 35343 - DNA, 60 bp, Artificial
  Synthetic oligonucleotide
aaaaaacagtggaggtggacccggatgatgtcaacaagagtacactccaaagcagacggg

SEQ ID NO: 35344 - DNA, 60 bp, Artificial
  Synthetic oligonucleotide
gacgggcggcagtgtcaacattggaggataaacttgccgactttaagagacaactggcag

SEQ ID NO: 35345 - DNA, 60 bp, Artificial
  Synthetic oligonucleotide
agcagacgggcggcagtgtcaacattggaggataaacttgccgactttaagagacaactg

SEQ ID NO: 35346 - DNA, 60 bp, Artificial
  Synthetic oligonucleotide
gctcaggcattgattgatgctaaggtgaaagagatttctaatcaggaaccactgaagatt

SEQ ID NO: 35347 - DNA, 60 bp, Artificial
  Synthetic oligonucleotide
tacatgattgaatggggaactgatattgttaatcactttcacttgggtgatgatatggac

SEQ ID NO: 35348 - DNA, 60 bp, Artificial
  Synthetic oligonucleotide
caagatatgagaaacactatcatggcatctaaaaccgtagggacagctgacgaaaagctg

SEQ ID NO: 35349 - DNA, 60 bp, Artificial
  Synthetic oligonucleotide
taggtatacactcatactacctcaaacagttgctttcttgattgcttttcaaggagtata

SEQ ID NO: 35350 - DNA, 60 bp, Artificial
  Synthetic oligonucleotide
tgtatctatatttcccgtctacaacagaatcaaagatcaatgattgtctaggcagaatgt

SEQ ID NO: 35351 - DNA, 60 bp, Artificial
  Synthetic oligonucleotide
tctatcatgtatctatatttcccgtctacaacagaatcaaagatcaatgattgtctaggc

SEQ ID NO: 35352 - DNA, 60 bp, Artificial
  Synthetic oligonucleotide
tcagcaaactaaagctcagcttagtgttcactattagatggaaccattccatgctagtcc

SEQ ID NO: 35353 - DNA, 60 bp, Artificial
  Synthetic oligonucleotide
ctatcatgtatctatatttcccgtctacaacagaatcaaagatcaatgattgtctaggca

SEQ ID NO: 35354 - DNA, 60 bp, Artificial
  Synthetic oligonucleotide
gcaagcagcaaagatctgcttcctgcactttaggatattcaagcagttcgtgaaggtcat

SEQ ID NO: 35355 - DNA, 60 bp, Artificial
  Synthetic oligonucleotide
gcaagcagcaaagatctgcttcctgcactttaggatattcaagcagtttgtgaaggtcat

SEQ ID NO: 35356 - DNA, 60 bp, Artificial
  Synthetic oligonucleotide
cctgaacttaatggttcatttaggaagaaatgtgcatttgcaacaacaccagtatgtcag

SEQ ID NO: 35357 - DNA, 60 bp, Artificial
  Synthetic oligonucleotide
gatattcgatgatggtgcaccaggatgtggcatgtcttgttggtttaaaaaatcaggtga

SEQ ID NO: 35358 - DNA, 60 bp, Artificial
  Synthetic oligonucleotide
accacatttagaccgggtaacagggtttaatcaagccgacagtgacaagatttttgatga

SEQ ID NO: 35359 - DNA, 54 bp, Artificial
  Synthetic oligonucleotide
accacatttagaccgggtaacagggtttaatcaagccgacagtgacaagatttt

SEQ ID NO: 35360 - DNA, 60 bp, Artificial
  Synthetic oligonucleotide
gcaccacatttagaccgggtaacagggtttaatcaagcagatagtgataagatattcgat

SEQ ID NO: 35361 - DNA, 60 bp, Artificial
  Synthetic oligonucleotide
ccagatagttctcttagagatcatattaatgttgttgtgagtcgtgatctttctttccag

SEQ ID NO: 35362 - DNA, 60 bp, Artificial
  Synthetic oligonucleotide
tgaatttaagagggttgtgtttaattccccctttagtggttgaaacagcatcacggaccc

SEQ ID NO: 35363 - DNA, 60 bp, Artificial
  Synthetic oligonucleotide
tgaatttaagagggttgtgtttaattccccccttagtggttgaaacagcatcacggaccc

SEQ ID NO: 35364 - DNA, 60 bp, Artificial
  Synthetic oligonucleotide
ggaatagaggaagtgccagaaacctaaatgaacttaaaatggaatgtccacacactattg

SEQ ID NO: 35365 - DNA, 60 bp, Artificial
  Synthetic oligonucleotide
ggagtagaggaagtgccagaaacctaaatgaacttaaaatggaatgtccacacactattg

SEQ ID NO: 35366 - DNA, 60 bp, Artificial
  Synthetic oligonucleotide
gcctaacccctgctcacaactcacattgggtcccgaggggtcttgataagagtgaggtcg

SEQ ID NO: 35367 - DNA, 60 bp, Artificial
  Synthetic oligonucleotide
ctttgtcaccaaatggaccactgagtatgtaagaacagatgtgctggtctgtgttgagct

SEQ ID NO: 35368 - DNA, 60 bp, Artificial
  Synthetic oligonucleotide
caggtgacatgcagatcctccatacagacaacctcatacagcacagtcatgatggtggtt

SEQ ID NO: 35369 - DNA, 60 bp, Artificial
  Synthetic oligonucleotide
cccagcaacgaagcactcaatggtgtttgccagagcatacactccaatggctgcaatgct

SEQ ID NO: 35370 - DNA, 60 bp, Artificial
  Synthetic oligonucleotide
tgtctccgccaagaacgcatgcaaactgcagagctgcacgcacggcagcccaggtgacat

SEQ ID NO: 35371 - DNA, 60 bp, Artificial
  Synthetic oligonucleotide
caagaaacgagtggccctgccaaacaaagcctcagatctctacactgtgtgaatctagtc

SEQ ID NO: 35372 - DNA, 60 bp, Artificial
  Synthetic oligonucleotide
ggaaatcaggttgtggatataatgcatgccacctccattgtctccgccaagaacgcatgc

SEQ ID NO: 35373 - DNA, 60 bp, Artificial
  Synthetic oligonucleotide
ggcagcatcactctcggtatagttttaacactcctaccagtggctgtggtcctcctcttc

SEQ ID NO: 35374 - DNA, 60 bp, Artificial
  Synthetic oligonucleotide
gtggctgtggtcctcctcttcttctgttacggagacaagttatttaagctttgcagttgc

SEQ ID NO: 35375 - DNA, 60 bp, Artificial
  Synthetic oligonucleotide
ggccgagctgcacctacactggcataaactcagaaaatacagagagctttgacaacctct

SEQ ID NO: 35376 - DNA, 60 bp, Artificial
  Synthetic oligonucleotide
gacaacctcttaaacactgaatccaacctatgtgagcggttccactttcactcaaaaaga

SEQ ID NO: 35377 - DNA, 60 bp, Artificial
  Synthetic oligonucleotide
cttgccgaccttaacccacttgtgaactcaacctggatgtcctgggaaggatgtgatcta

SEQ ID NO: 35378 - DNA, 60 bp, Artificial
  Synthetic oligonucleotide
atctagtctggtcacacagccacaaaggagagaaggaggttgttcatgtcctgcagtcag

SEQ ID NO: 35379 - DNA, 60 bp, Artificial
  Synthetic oligonucleotide
ctgtcttgctctggctgctatgcgtgcagctctggcttatcctgcactgtggaggtgagg

SEQ ID NO: 35380 - DNA, 60 bp, Artificial
  Synthetic oligonucleotide
ggttctgtggtcaccaagatcaggcttggacaagaacacgggtgctacactgtcagaagg

SEQ ID NO: 35381 - DNA, 60 bp, Artificial
  Synthetic oligonucleotide
ccgggaggaggcttctctcaagcagcaatgcacgccaggaatgcagctcgggcacatttt

SEQ ID NO: 35382 - DNA, 60 bp, Artificial
  Synthetic oligonucleotide
ctcgggcacatttttgggagaggggggcagtgctcaagtggttggcccaaaaaatgacgg

SEQ ID NO: 35383 - DNA, 60 bp, Artificial
  Synthetic oligonucleotide
tccacagcctcagaggatttaaaaccacactagtcatacatgggaaaagaaacaccggga

SEQ ID NO: 35384 - DNA, 60 bp, Artificial
  Synthetic oligonucleotide
ggagcctacaccatgaccgttgaggttgacaaacatgctgatgggccgtgtgaaatctcg

SEQ ID NO: 35385 - DNA, 60 bp, Artificial
  Synthetic oligonucleotide
ctcgacaacatgcatcacagaaggcagcgaaataaaacccggagtccacagcctcagagg

SEQ ID NO: 35386 - DNA, 60 bp, Artificial
  Synthetic oligonucleotide
ccggttgtggtaccaagctaccagcataacggggaaaagtgggtgacaggagcctacacc

SEQ ID NO: 35387 - DNA, 60 bp, Artificial
  Synthetic oligonucleotide
ggtcctgtaaacaaggtgggtgcggccggacacagtgccagaaggacaaacagcccaaaa

SEQ ID NO: 35388 - DNA, 57 bp, Artificial
  Synthetic oligonucleotide
agtgcacgctattgcctcctcctgtgtttctcatcttttccgcagttctcatgtcca

SEQ ID NO: 35389 - DNA, 60 bp, Artificial
  Synthetic oligonucleotide
aggacaggtcaccaccagcccagtactcccgagcaatcagagcaccgagtgcacgctatt

SEQ ID NO: 35390 - DNA, 60 bp, Artificial
  Synthetic oligonucleotide
cttcctctgcttgttccttactgctatcgcgcctgtgcaaggacaggtcaccaccagccc

SEQ ID NO: 35391 - DNA, 60 bp, Artificial
  Synthetic oligonucleotide
actttgctctcagcacagcagtgaagctgggcactttgcttaagaggttgagctgggtta

SEQ ID NO: 35392 - DNA, 60 bp, Artificial
  Synthetic oligonucleotide
ccctacacgatgaaagttgctcctataacatctgcccttattgtggtaacaggcttccag

SEQ ID NO: 35393 - DNA, 60 bp, Artificial
  Synthetic oligonucleotide
ggcccaacagtggaggtggtgagctatctgtcttagtagatgtgaagggtcttgagttgc

SEQ ID NO: 35394 - DNA, 60 bp, Artificial
  Synthetic oligonucleotide
ctgcatcaggctcaactcttcagatggaccttaagggaaggcccaacagtggaggtggtg

SEQ ID NO: 35395 - DNA, 60 bp, Artificial
  Synthetic oligonucleotide
tgtggaggcaggcagtcaatttgtcattgggcctgtgagggtggtagtctctgaccccca

SEQ ID NO: 35396 - DNA, 53 bp, Artificial
  Synthetic oligonucleotide
gccctattggcctggggagcaaacggagagagcaccagcccggctgagacctc

SEQ ID NO: 35397 - DNA, 60 bp, Artificial
  Synthetic oligonucleotide
ggaggtgaggattgagagaccggatgagttcaccgtccaccttagaagtgtcagtccaga

SEQ ID NO: 35398 - DNA, 60 bp, Artificial
  Synthetic oligonucleotide
ggtgtccatactggattacacacaagtatattcgagcacgtttcagtacatcaccgggga

SEQ ID NO: 35399 - DNA, 60 bp, Artificial
  Synthetic oligonucleotide
ctttacaagtcctggccacacagccgtaactggagatgcaacccaacatggtgctggggg

SEQ ID NO: 35400 - DNA, 60 bp, Artificial
  Synthetic oligonucleotide
accggggatagaaccgtctctgagtggccaaaagccacctgtactggagactgccctgac

SEQ ID NO: 35401 - DNA, 60 bp, Artificial
  Synthetic oligonucleotide
aaccccgccagactgcaaccccacagggcaaggccacagtcaactctatagcttcgcccg

SEQ ID NO: 35402 - DNA, 60 bp, Artificial
  Synthetic oligonucleotide
atagcggtggcggaaggcagcattatcgcaagaaggatgacaggtggtccactcagcagg

SEQ ID NO: 35403 - DNA, 60 bp, Artificial
  Synthetic oligonucleotide
gcttcgcccgccgctcttcccctgcctccatgctgaccatagccagctagagcatgtcta

SEQ ID NO: 35404 - DNA, 60 bp, Artificial
  Synthetic oligonucleotide
ctgacccccagaatgttcagactaagcttccatcagagatcctgaccatccaaaaacttg

SEQ ID NO: 35405 - DNA, 60 bp, Artificial
  Synthetic oligonucleotide
tgcggcacacacaaaaggaaactccagtggtctcgcattgacttgtctgaagatggaagg

SEQ ID NO: 35406 - DNA, 60 bp, Artificial
  Synthetic oligonucleotide
gtgcattgaggtggagctccaaccaccaaaggacattctcctcgagcataagggtacaat

SEQ ID NO: 35407 - DNA, 60 bp, Artificial
  Synthetic oligonucleotide
tcccatgtacaacaggctcggtggtctgatgctatatttctgtaggatgtctcacagacc

SEQ ID NO: 35408 - DNA, 60 bp, Artificial
  Synthetic oligonucleotide
ctttaagcatgttgaccaggtgtctcaagcgcaaatacatggtaaagggagacttctgcc

SEQ ID NO: 35409 - DNA, 60 bp, Artificial
  Synthetic oligonucleotide
aagtgtcaaaggcctagtcaaaacgagcagggggagcaacgttcaagtgcactcctgtga

SEQ ID NO: 35410 - DNA, 60 bp, Artificial
  Synthetic oligonucleotide
cgatgttgtagaggactatcaaggggcaaagtcaggaaggaactcgacgaagatgagctg

SEQ ID NO: 35411 - DNA, 60 bp, Artificial
  Synthetic oligonucleotide
cttacaagccgagactcgcctcctccaacatacagcttgcctggaattctatcgaagagc

SEQ ID NO: 35412 - DNA, 60 bp, Artificial
  Synthetic oligonucleotide
cagggaagtctacttctatcatcaagctagaagaaaaaacgggcatgcagtggtctctag

SEQ ID NO: 35413 - DNA, 60 bp, Artificial
  Synthetic oligonucleotide
gtacaagagcaaacagattgccaacaccaaaagtggccccagagagccacgccggcgcgt

SEQ ID NO: 35414 - DNA, 60 bp, Artificial
  Synthetic oligonucleotide
aaggagcatgggaggaagagatgcagctagttcaaggatgcaaccaagagtgctcgctag

SEQ ID NO: 35415 - DNA, 60 bp, Artificial
  Synthetic oligonucleotide
tgctcgctagaagaagatgaatgctcctgtcctgatggccagtcaatgacacggaagtta

SEQ ID NO: 35416 - DNA, 60 bp, Artificial
  Synthetic oligonucleotide
catatgctgcattaaatgcttatgtaatctcacatatgctgcattaaatgcttgaactgg

SEQ ID NO: 35417 - DNA, 60 bp, Artificial
  Synthetic oligonucleotide
ccagcagtacttttgacccagaggtcgcatacgctaactttaagcgtatccacaccaatg

SEQ ID NO: 35418 - DNA, 60 bp, Artificial
  Synthetic oligonucleotide
aacaccagcagtacttttgacccagaggtcgcatacgctaactttaagcgtatccacacc

SEQ ID NO: 35419 - DNA, 60 bp, Artificial
  Synthetic oligonucleotide
cacagtttcattgtcaccggttcaatcagcacccgttggtcatggtaagacaatcgaaac

SEQ ID NO: 35420 - DNA, 60 bp, Artificial
  Synthetic oligonucleotide
gcaagtttgacttgcacaggttgctatgcttgtagctctggcatctcctgtaaagtcagg

SEQ ID NO: 35421 - DNA, 60 bp, Artificial
  Synthetic oligonucleotide
tacacttggaggtgttaaccttgccgtacttaacacgcatttccctggaacccagtccat

SEQ ID NO: 35422 - DNA, 60 bp, Artificial
  Synthetic oligonucleotide
tacacttggaggtgttaaccttgcggtacttaacacgcatttccctggaacccagtccat

SEQ ID NO: 35423 - DNA, 60 bp, Artificial
  Synthetic oligonucleotide
acagccttcactagttcagctagagagtttgtgagcagattcggcatccgattagcctaa

SEQ ID NO: 35424 - DNA, 60 bp, Artificial
  Synthetic oligonucleotide
gactcggtttgaagacgtcgagaaactggattgggcaaagacagccttcactagttcagc

SEQ ID NO: 35425 - DNA, 60 bp, Artificial
  Synthetic oligonucleotide
ggaggtgttaaccttgcggtacttaacacgcatttccctggaacccagtccattccactg

SEQ ID NO: 35426 - DNA, 60 bp, Artificial
  Synthetic oligonucleotide
gggctggttcggtctactttcatcgtaccacttgccgaagagaatggtattacctggagt

SEQ ID NO: 35427 - DNA, 54 bp, Artificial
  Synthetic oligonucleotide
gactggaccttcaaaaggacagaagctttcatcaggaccaaaatggctagtatg

SEQ ID NO: 35428 - DNA, 60 bp, Artificial
  Synthetic oligonucleotide
tagtagtagacaccgcaaaagaaagcagtcaagtagcaacatgggggtatggaagtggct

SEQ ID NO: 35429 - DNA, 60 bp, Artificial
  Synthetic oligonucleotide
attttccaagatgttcctcaacggaatctcgctacgtttaacccggaggtcgggtatgtg

SEQ ID NO: 35430 - DNA, 60 bp, Artificial
  Synthetic oligonucleotide
ttttccaagatgttcctcaacggaatctcgctacgtttaacccggaggtcgggtatgtgg

SEQ ID NO: 35431 - DNA, 60 bp, Artificial
  Synthetic oligonucleotide
aatggcaaaccaattcattttccaagatgttcctcaacggaatctcgctacgtttaaccc

SEQ ID NO: 35432 - DNA, 60 bp, Artificial
  Synthetic oligonucleotide
atggcaaaccaattcattttccaagatgttcctcaacggaatctcgctacgtttaacccg

SEQ ID NO: 35433 - DNA, 60 bp, Artificial
  Synthetic oligonucleotide
tttttcaagatgttcctcaacggaatctcgctacgtttaacccggaggtcgggtatgtgg

SEQ ID NO: 35434 - DNA, 60 bp, Artificial
  Synthetic oligonucleotide
cagtaggacctcttagtcgacagtcagttcaatatgtgccctttaataaacaatacgatt

SEQ ID NO: 35435 - DNA, 60 bp, Artificial
  Synthetic oligonucleotide
cttagtcgacagtcagttcaatatgtgccctttaataaacaatacgattgtcctgtgtcc

SEQ ID NO: 35436 - DNA, 60 bp, Artificial
  Synthetic oligonucleotide
caatacgattgtcctgtgtccatttataaaggactggagatccctgtccaccacctaaaa

SEQ ID NO: 35437 - DNA, 60 bp, Artificial
  Synthetic oligonucleotide
cggcaatccttgagagagtgagatcattgcggcctgggtttccagatttgagcttgtact

SEQ ID NO: 35438 - DNA, 57 bp, Artificial
  Synthetic oligonucleotide
cattgccctgccagtgactggtaaatagtcctgaacaacttctgctgcttggcaagt

SEQ ID NO: 35439 - DNA, 54 bp, Artificial
  Synthetic oligonucleotide
tcatgaataagcagtgagcatgcactatgtcctcaaccacaccttctggtagtg

SEQ ID NO: 35440 - DNA, 60 bp, Artificial
  Synthetic oligonucleotide
gtcctgtgtccatttataaaggactggagatccctgtccaccacctaaaacaatcacttg

SEQ ID NO: 35441 - DNA, 60 bp, Artificial
  Synthetic oligonucleotide
ccacctaaaacaatcacttgaatctaagaggaaactgtcgtatttcttcaaggactatca

SEQ ID NO: 35442 - DNA, 60 bp, Artificial
  Synthetic oligonucleotide
cacctaaaacaatcacttgaatctaagaggaaactgtcgtatttcttcaaggactatcag

SEQ ID NO: 35443 - DNA, 60 bp, Artificial
  Synthetic oligonucleotide
atctcaagtcactcagaagtctccagagttctttgatactactatagatagaatatcaga

SEQ ID NO: 35444 - DNA, 60 bp, Artificial
  Synthetic oligonucleotide
ggactgtttatagcagcctgcattggtcggtcgaagctagacacaacctcgctctttgag

SEQ ID NO: 35445 - DNA, 60 bp, Artificial
  Synthetic oligonucleotide
cagcctgcattggtcggtcgaagctagacacaacctcgctctttgaggatgatctcaggg

SEQ ID NO: 35446 - DNA, 60 bp, Artificial
  Synthetic oligonucleotide
tcagaccaagagacatgagaatatctctcctgttcccagcagtgaggaagggactgttta

SEQ ID NO: 35447 - DNA, 60 bp, Artificial
  Synthetic oligonucleotide
gacatgagaatatctctcctgttcccagcagtgaggaagggactgtttatagcagcctgc

SEQ ID NO: 35448 - DNA, 60 bp, Artificial
  Synthetic oligonucleotide
ggggacataatctgggattggattgggagaggttgattgaatcacaatttcctgtaaacc

SEQ ID NO: 35449 - DNA, 60 bp, Artificial
  Synthetic oligonucleotide
ctgggattggattgggagaggttgattgaatcacaatttcctgtaaaccttggcagctgc

SEQ ID NO: 35450 - DNA, 60 bp, Artificial
  Synthetic oligonucleotide
aggaccaggcacacatgctgcctagaggggttagggaattgggaaggatgtagattgttg

SEQ ID NO: 35451 - DNA, 60 bp, Artificial
  Synthetic oligonucleotide
gaccaggcacacatgctgcctagaggggttagggaattgggaaggatgtagattgttgac

SEQ ID NO: 35452 - DNA, 60 bp, Artificial
  Synthetic oligonucleotide
gaatatcagagttagacatcaaaacttgtctgcgatggtgtgaacctaatataaagaaag

SEQ ID NO: 35453 - DNA, 60 bp, Artificial
  Synthetic oligonucleotide
acatcaaaacttgtctgcgatggtgtgaacctaatataaagaaagccttaagctggcctc

SEQ ID NO: 35454 - DNA, 60 bp, Artificial
  Synthetic oligonucleotide
gctctttgaggatgatctcagggatggattgattgttttggaaaactgaatcatgaataa

SEQ ID NO: 35455 - DNA, 60 bp, Artificial
  Synthetic oligonucleotide
tctcagggatggattgattgttttggaaaactgaatcatgaataagcagtgagcatgcac

SEQ ID NO: 35456 - DNA, 58 bp, Artificial
  Synthetic oligonucleotide
atgcaacatcctactgttacagaagtctgtcatatcagaacagatcttaggaaacaag

SEQ ID NO: 35457 - DNA, 60 bp, Artificial
  Synthetic oligonucleotide
gccctagagtttgatctatctgatgactgttgtcagtcaccactatgcaacatcctactg

SEQ ID NO: 35458 - DNA, 53 bp, Artificial
  Synthetic oligonucleotide
ttatcactcgcacattgattcttacagcttcagctggagtaagaaatgtgatt

SEQ ID NO: 35459 - DNA, 60 bp, Artificial
  Synthetic oligonucleotide
ataaagaaagccttaagctggcctctcggatacccctctctaaagtttttttatcactcg

SEQ ID NO: 35460 - DNA, 60 bp, Artificial
  Synthetic oligonucleotide
gaggaggattagggttagatgactctctactcttttcttactccaagatcataggtgaat

SEQ ID NO: 35461 - DNA, 60 bp, Artificial
  Synthetic oligonucleotide
aggatgggaggaggattagggttagatgactctctactcttttcttactccaagatcata

SEQ ID NO: 35462 - DNA, 60 bp, Artificial
  Synthetic oligonucleotide
cataggtgaattatctatcaggcaggttccacatgaagtgttaactggtcataacatctc

SEQ ID NO: 35463 - DNA, 60 bp, Artificial
  Synthetic oligonucleotide
caagatcataggtgaattatctatcaggcaggttccacatgaagtgttaactggtcataa

SEQ ID NO: 35464 - DNA, 60 bp, Artificial
  Synthetic oligonucleotide
ttgactgccctagagtttgatctatctgatgactgttgtcagtcaccactatgcaacatc

SEQ ID NO: 35465 - DNA, 60 bp, Artificial
  Synthetic oligonucleotide
ctggtcataacatctctaaagaaatagcctatgttcagatcatcagaatgttgactgccc

SEQ ID NO: 35466 - DNA, 53 bp, Artificial
  Synthetic oligonucleotide
atgtcttcaagtgtttatgagtcgatcattcagacaagagcttcagtctgggg

SEQ ID NO: 35467 - DNA, 54 bp, Artificial
  Synthetic oligonucleotide
gatgtcttcaagtgtttatgagtcgatcattcagacaagagcttcagtctgggg

SEQ ID NO: 35468 - DNA, 60 bp, Artificial
  Synthetic oligonucleotide
gtgctcttcatggttgactggggaaaagaggcagttgatagttttcatcttggtgatgat

SEQ ID NO: 35469 - DNA, 58 bp, Artificial
  Synthetic oligonucleotide
cagttgatagttttcatctcggtgacgatatggatcctgagctccggggcctggcaca

SEQ ID NO: 35470 - DNA, 60 bp, Artificial
  Synthetic oligonucleotide
gacaaactactaaagacaataagggaatgagaattcgatttaaggatgacagctcttttg

SEQ ID NO: 35471 - DNA, 60 bp, Artificial
  Synthetic oligonucleotide
taggggttgggttgggtgggccatttatccgttatgtaatctcagggtggtttaggacgt

SEQ ID NO: 35472 - DNA, 60 bp, Artificial
  Synthetic oligonucleotide
ggctctttacatgcttaccaccagagggagacaaactactaaagacaataaggggatgag

SEQ ID NO: 35473 - DNA, 60 bp, Artificial
  Synthetic oligonucleotide
aaaggcccatccaccaatcgtgactacttgaatcaaagacaaggagcgcttgcaaaaatg

SEQ ID NO: 35474 - DNA, 60 bp, Artificial
  Synthetic oligonucleotide
tctatggggatacaactggaccagcgcatcatcgttctcttcatggttgactggggaaaa

SEQ ID NO: 35475 - DNA, 60 bp, Artificial
  Synthetic oligonucleotide
gacaataaggggatgagaattcgatttaaggatgacagctcttttgaagatgtgaatggg

SEQ ID NO: 35476 - DNA, 60 bp, Artificial
  Synthetic oligonucleotide
tagtagtaggctccctaaaaagcactacactaaagatggcaacattagaggaactccaaa

SEQ ID NO: 35477 - DNA, 60 bp, Artificial
  Synthetic oligonucleotide
tccaatactgttgaaggctctttacatgcttaccaccagagggagacaaactactaaaga

SEQ ID NO: 35478 - DNA, 60 bp, Artificial
  Synthetic oligonucleotide
gcaacctcattgaccatatagactcaccatcatcaatctgggtctttgcaggagcacctg

SEQ ID NO: 35479 - DNA, 60 bp, Artificial
  Synthetic oligonucleotide
gagagggacccaactgggctggaccctggagatcacctcaaagagaagtcaatgctcagt

SEQ ID NO: 35480 - DNA, 60 bp, Artificial
  Synthetic oligonucleotide
tcatctttttaccaatcttacctacggaggacacaatctatggggatacaactggaccag

SEQ ID NO: 35481 - DNA, 60 bp, Artificial
  Synthetic oligonucleotide
acttacggaggacacaatctatggggatacaactggaccagcgcatcatcgtgctcttta

SEQ ID NO: 35482 - DNA, 60 bp, Artificial
  Synthetic oligonucleotide
ggaccccgacgacctgaataaaagggcattgagtgaccgggaaagcattgcacaatcaat

SEQ ID NO: 35483 - DNA, 60 bp, Artificial
  Synthetic oligonucleotide
agcactacactaaagatggcaacattagaggaactccaaaaagaaatcaacaaccacgag

SEQ ID NO: 35484 - DNA, 55 bp, Artificial
  Synthetic oligonucleotide
cattaaagcaaccttaatgatagaggtggaatttcatgatgtcgctgataagagc

SEQ ID NO: 35485 - DNA, 60 bp, Artificial
  Synthetic oligonucleotide
gcaaaaacccaggaaccgacgatggtccaacccccaaccgcctcaggaaaacccttccca

SEQ ID NO: 35486 - DNA, 60 bp, Artificial
  Synthetic oligonucleotide
caaccaaggggctgaaaagaatgggatcaatgggaaagatggagaggaaataaataactc

SEQ ID NO: 35487 - DNA, 60 bp, Artificial
  Synthetic oligonucleotide
taagcaaccaaggggctgaaaagaatgggatcaatgggaaagatggagaggaaataaata

SEQ ID NO: 35488 - DNA, 60 bp, Artificial
  Synthetic oligonucleotide
ttcatcccaggaacagagatgttcttaggaactttcagagtctaccccttagcaatcgga

SEQ ID NO: 35489 - DNA, 60 bp, Artificial
  Synthetic oligonucleotide
gaaataaataactctttcatcccaggaacagagatgttcttaggaactttcagagtctac

SEQ ID NO: 35490 - DNA, 60 bp, Artificial
  Synthetic oligonucleotide
cagttgtctctagcttaggctggaagaaaaccaacgttagtgcagctgccagggacttcc

SEQ ID NO: 35491 - DNA, 60 bp, Artificial
  Synthetic oligonucleotide
cagagtctaccccttagcaatcggaatctacaaagttaagagcaaagaaagggaaccaaa

SEQ ID NO: 35492 - DNA, 60 bp, Artificial
  Synthetic oligonucleotide
ccgggctaaatcaacagtaaaccgtcaatggtatgtcaagttgaaggtggagcacactac

SEQ ID NO: 35493 - DNA, 60 bp, Artificial
  Synthetic oligonucleotide
caccgggctaaatcaacagtaaaccgtcaatggtatgtcaagttgaaggtggagcacact

SEQ ID NO: 35494 - DNA, 60 bp, Artificial
  Synthetic oligonucleotide
tagtaaatccaaaagaaactcattaaagcaaccttaatgatagaggtggaatttcatgat

SEQ ID NO: 35495 - DNA, 60 bp, Artificial
  Synthetic oligonucleotide
gggtggtttaagagtacaacatatataacccttgaccagacatgtgagcatctaaaagtc

SEQ ID NO: 35496 - DNA, 60 bp, Artificial
  Synthetic oligonucleotide
cggcttcagacggacacaactaaccatttcgagatagcagggaccatagttaaatctggg

SEQ ID NO: 35497 - DNA, 60 bp, Artificial
  Synthetic oligonucleotide
tctcttgtgggcctaagtcgattcagttccatgcatgcttcaatcagcatatgtcctgtg

SEQ ID NO: 35498 - DNA, 60 bp, Artificial
  Synthetic oligonucleotide
gacgttagcatgatcaaaacggaggccagatacataaagaatgcaactggggttttctcc

SEQ ID NO: 35499 - DNA, 58 bp, Artificial
  Synthetic oligonucleotide
ctatcattgcacacagaatcgtatgtatgcagtgctgattgtaccataggagttgaca

SEQ ID NO: 35500 - DNA, 60 bp, Artificial
  Synthetic oligonucleotide
ggggttttctccaataatgttgcaattcgaaaatggctggtgtctgattggcatgattgc

SEQ ID NO: 35501 - DNA, 60 bp, Artificial
  Synthetic oligonucleotide
ggaaccctacgcaaacatagccactcagctaaaaggtttgcaagcaatttcagtgctcga

SEQ ID NO: 35502 - DNA, 59 bp, Artificial
  Synthetic oligonucleotide
gcaacaggactaatgacccataggaaaacctataattgcttggtacggtataaggcgaa

SEQ ID NO: 35503 - DNA, 60 bp, Artificial
  Synthetic oligonucleotide
cagaatatgccatgctatctagatactgcgactattacgcccagttttcagataactccg

SEQ ID NO: 35504 - DNA, 60 bp, Artificial
  Synthetic oligonucleotide
tcagtgctcgatatgcccatgatagcaagcatcccagaggatatagcaggggcactaaga

SEQ ID NO: 35505 - DNA, 60 bp, Artificial
  Synthetic oligonucleotide
gcctcacatcaaaccaatttacaaatacataaccatagagggaactgaaactgcagaggg

SEQ ID NO: 35506 - DNA, 60 bp, Artificial
  Synthetic oligonucleotide
ccggatacagtcagacgacatggagagtttatctaaggtcccatgactttgatgcttgca

SEQ ID NO: 35507 - DNA, 60 bp, Artificial
  Synthetic oligonucleotide
tatacgaagctttacacaacaggcccaacatcgggaataaacacaaaacatgatgagtta

SEQ ID NO: 35508 - DNA, 60 bp, Artificial
  Synthetic oligonucleotide
gccaagaagagctggacgcaataaagaaatccaaatgttgggaagcagaatatccagatg

SEQ ID NO: 35509 - DNA, 60 bp, Artificial
  Synthetic oligonucleotide
gcctaagtcctggatgctctacagttcgcttcccgatcaacccaaagcatatttcaaact

SEQ ID NO: 35510 - DNA, 51 bp, Artificial
  Synthetic oligonucleotide
cagagtgagggatgaagggttacaggttatattagagccgtttaagaacct

SEQ ID NO: 35511 - DNA, 60 bp, Artificial
  Synthetic oligonucleotide
ttcattagctcttgttgatgctaaacctatactagagttggcaccagtagatcaaactgc

SEQ ID NO: 35512 - DNA, 60 bp, Artificial
  Synthetic oligonucleotide
aagggtcttgtactggatgcataaattgctttgaaaatatccattgcgaattgacgctcc

SEQ ID NO: 35513 - DNA, 60 bp, Artificial
  Synthetic oligonucleotide
cgctccacacaaccattgaagctagctgcccaatagtaagcacatgtacggtattccatg

SEQ ID NO: 35514 - DNA, 60 bp, Artificial
  Synthetic oligonucleotide
gcatacaagagagagatgaagattaggtaagagggtgcagggggctagatttaagccttt

SEQ ID NO: 35515 - DNA, 60 bp, Artificial
  Synthetic oligonucleotide
cgtaaggtggggggtggggaactaacaacagcgtgaatttattttacaaacattattcta

SEQ ID NO: 35516 - DNA, 60 bp, Artificial
  Synthetic oligonucleotide
ctgcgaagagtgtgacatgtatcatgatagatctgggctgaaaaggaatggggacttcac

SEQ ID NO: 35517 - DNA, 60 bp, Artificial
  Synthetic oligonucleotide
acaagagcttgagggctgccagagttatgtgcaaatcaaagggtcctgcttcaatactat

SEQ ID NO: 35518 - DNA, 60 bp, Artificial
  Synthetic oligonucleotide
gtgaagcaaaacccatctaaggaagctgttactgaagtatgcctaaaggatgacgttagc

SEQ ID NO: 35519 - DNA, 60 bp, Artificial
  Synthetic oligonucleotide
gaagttacatagggcctctgggctatgtcctggttacaagagcttgagggctgccagagt

SEQ ID NO: 35520 - DNA, 60 bp, Artificial
  Synthetic oligonucleotide
ccagatgacatgctggatatggcactaaggattaatttctattactttgtctgcatcatg

SEQ ID NO: 35521 - DNA, 60 bp, Artificial
  Synthetic oligonucleotide
ggtagtgggagagagtaaagaagtcttcgagctggaacaacttccagatgacatgctgga

SEQ ID NO: 35522 - DNA, 60 bp, Artificial
  Synthetic oligonucleotide
aatttcaagttagtggtctcatcaagatcaataaaaagttgcaaaaatgttaaaagcgtt

SEQ ID NO: 35523 - DNA, 60 bp, Artificial
  Synthetic oligonucleotide
aagattaaagaaaagttcccagggaatgcgctactcaaggccattgtggattatatagcg

SEQ ID NO: 35524 - DNA, 60 bp, Artificial
  Synthetic oligonucleotide
ccttaatggcattacatcatgcattccggggcacatcgtctgcatatattgcaacaatgc

SEQ ID NO: 35525 - DNA, 60 bp, Artificial
  Synthetic oligonucleotide
ctttgatgcttgcatactctatccaaatcagcatttctgtagatgtgtaaagcgtggaga

SEQ ID NO: 35526 - DNA, 60 bp, Artificial
  Synthetic oligonucleotide
cccagctagctacagactagaagaagacagcggaactgttactgtgattgattacaagaa

SEQ ID NO: 35527 - DNA, 60 bp, Artificial
  Synthetic oligonucleotide
gggacagtatatggcaatggggttcccaaattcgattatttgtgtcacctagctagtaga

SEQ ID NO: 35528 - DNA, 60 bp, Artificial
  Synthetic oligonucleotide
ctactctaagggatgcggaaatgtccaaaaggtaaatgggacagtatatggcaatggggt

SEQ ID NO: 35529 - DNA, 60 bp, Artificial
  Synthetic oligonucleotide
gcatgtggtgatcctaatggcccaagtgtatataggaaaccctcagacggtgtatttcaa

SEQ ID NO: 35530 - DNA, 60 bp, Artificial
  Synthetic oligonucleotide
cgaaagagaggacgagttcatggggctgcgaggagttcgggtgcttagccataagtgacg

SEQ ID NO: 35531 - DNA, 60 bp, Artificial
  Synthetic oligonucleotide
gcagagggaatagaaagtgcctatattgagtctgaaatacctgcactagctggaacttcc

SEQ ID NO: 35532 - DNA, 60 bp, Artificial
  Synthetic oligonucleotide
gcgtgtccacaccactgggcttagttacgaccacattcgaatcttctacattaaaggacg

SEQ ID NO: 35533 - DNA, 60 bp, Artificial
  Synthetic oligonucleotide
cacagatcaatatgggagaacttagtccagtttgtctgtatctgcttctccagggtctat

SEQ ID NO: 35534 - DNA, 60 bp, Artificial
  Synthetic oligonucleotide
gagcttaaaatggaatgtccacatactattggattagggcagggtcttgttgtgggttca

SEQ ID NO: 35535 - DNA, 60 bp, Artificial
  Synthetic oligonucleotide
ggtgcactacaacatgtcagtttggcgatcccggggacataatgagcacacctacaggca

SEQ ID NO: 35536 - DNA, 60 bp, Artificial
  Synthetic oligonucleotide
cacttcagttaaagtgtgcttgatagggaccatatcaaaattccaaccatctgacacttt

SEQ ID NO: 35537 - DNA, 60 bp, Artificial
  Synthetic oligonucleotide
gcttgtggggtataccttgataaattaaaatcagttggaaaggttttcaaaattgtgtcc

SEQ ID NO: 35538 - DNA, 60 bp, Artificial
  Synthetic oligonucleotide
cggactttatccctctttagatataggagtcggttctttgtgggtctagtctggtgcgtg

SEQ ID NO: 35539 - DNA, 60 bp, Artificial
  Synthetic oligonucleotide
cttccaagggtattatatctgtcttatagggagtagttcagagcccttatatgttccagc

SEQ ID NO: 35540 - DNA, 60 bp, Artificial
  Synthetic oligonucleotide
atggttcgctgtttcttggtaataaagaaagtgacttctggtgacagtatgaagattgaa

SEQ ID NO: 35541 - DNA, 60 bp, Artificial
  Synthetic oligonucleotide
gaagattgaaaagaactttgagactcttgttcaaaaaaatggctgcacagctaataactt

SEQ ID NO: 35542 - DNA, 60 bp, Artificial
  Synthetic oligonucleotide
gacatggatatcactgtttactgtaatgggatgaagaaagtcattctcaccaagacccta

SEQ ID NO: 35543 - DNA, 60 bp, Artificial
  Synthetic oligonucleotide
acagcaggacaacaatcattcacaaaatggacatgggaaattaaaggtgatcttgcagag

SEQ ID NO: 35544 - DNA, 60 bp, Artificial
  Synthetic oligonucleotide
gtccacatactgttagattagggcagggtcttgttgtgggttcagtagaattgccatctc

SEQ ID NO: 35545 - DNA, 60 bp, Artificial
  Synthetic oligonucleotide
tagattagggcagggtcttgttgtgggttcagtagaattgccatctcttccaatacagca

SEQ ID NO: 35546 - DNA, 58 bp, Artificial
  Synthetic oligonucleotide
tgtgggttcagtagaattgccatctcttccaatacagcaggtcgagacactaaagctg

SEQ ID NO: 35547 - DNA, 57 bp, Artificial
  Synthetic oligonucleotide
atctactggtgtcttgacatcaaaagatgatcctgtctacatttgggctcctggaat

SEQ ID NO: 35548 - DNA, 60 bp, Artificial
  Synthetic oligonucleotide
tgcaggttggacagacacagcacatggatctggaattatacctatgaaaactgatctgga

SEQ ID NO: 35549 - DNA, 60 bp, Artificial
  Synthetic oligonucleotide
ggcatcttcaacataagttcacctacttgctcaataaatcgtgtccagagattccgtggt

SEQ ID NO: 35550 - DNA, 60 bp, Artificial
  Synthetic oligonucleotide
aggagaatttaagaaagtcattaacggtatatgagcctatgcaagggtgctaccggactt

SEQ ID NO: 35551 - DNA, 60 bp, Artificial
  Synthetic oligonucleotide
ctatgtaatacaggggctgccagaaaccttaatgagcttaaaatggaatgtccacatact

SEQ ID NO: 35552 - DNA, 60 bp, Artificial
  Synthetic oligonucleotide
gacttctctcttccgtcatcagcaagctatacatataggagacagctacaaaacccagca

SEQ ID NO: 35553 - DNA, 60 bp, Artificial
  Synthetic oligonucleotide
gaatgttctgcatttctgacatcaatcaaggcctgtgatgctgcaatgtgttatgggtcc

SEQ ID NO: 35554 - DNA, 60 bp, Artificial
  Synthetic oligonucleotide
ctctatagatggagcatggggttcaggagttggttttaatctggtttgtactgttagttt

SEQ ID NO: 35555 - DNA, 60 bp, Artificial
  Synthetic oligonucleotide
tataagaggatgattgccacaaaggattcatttcaatctttcaatgtgacagaaccccat

SEQ ID NO: 35556 - DNA, 60 bp, Artificial
  Synthetic oligonucleotide
catttgcaacaactccagtttgccagtttgatggaaatacaatttcaggctataagagga

SEQ ID NO: 35557 - DNA, 60 bp, Artificial
  Synthetic oligonucleotide
caggctgatagtgacaaaatctttgatgatggggcaccagaatgtggtatgtcatgttgg

SEQ ID NO: 35558 - DNA, 60 bp, Artificial
  Synthetic oligonucleotide
cgtcggtaagggtgggcattctggttcaaaatttatgtgttgtcatgacacaaaatgttc

SEQ ID NO: 35559 - DNA, 60 bp, Artificial
  Synthetic oligonucleotide
gcaccggtctagttgcagctgcaccacacttagatcgtgtgacaccatacaatcaggctg

SEQ ID NO: 35560 - DNA, 60 bp, Artificial
  Synthetic oligonucleotide
aaggcaccatcaacagaatcatcagatacagtacaggggattgcattttcaggtagtcct

SEQ ID NO: 35561 - DNA, 60 bp, Artificial
  Synthetic oligonucleotide
ccttaagatacacaaggaaagtatgcattcagttgggcacagaacaaacatgtaagactg

SEQ ID NO: 35562 - DNA, 60 bp, Artificial
  Synthetic oligonucleotide
gatcttgtccatactcttattcacattatgttgtcctcgtagacctagttacaggaaaga

SEQ ID NO: 35563 - DNA, 60 bp, Artificial
  Synthetic oligonucleotide
tatagggagtagttcagagcccttatatgttccagcattagatgattatcgttcagctga

SEQ ID NO: 35564 - DNA, 60 bp, Artificial
  Synthetic oligonucleotide
tgttgaaggtatctgttttaatccaatacatacaatggcactctctcaacctagtcatac

SEQ ID NO: 35565 - DNA, 60 bp, Artificial
  Synthetic oligonucleotide
aggagacagctacaaaacccagcaaacgaacaagagaaaatcccatttcacctgcagtta

SEQ ID NO: 35566 - DNA, 60 bp, Artificial
  Synthetic oligonucleotide
aatgggacctatccagacttgtataacaactaaaagttgtctcttgagtttaggtgatca

SEQ ID NO: 35567 - DNA, 60 bp, Artificial
  Synthetic oligonucleotide
aaactgcatttcactgctatggctcatgtgagaagtatgcttatccttggcagacagcag

SEQ ID NO: 35568 - DNA, 60 bp, Artificial
  Synthetic oligonucleotide
tgttatgacctgtcatgcaatcaaacagtgtgtcagcctactgtctatttaatgggacct

SEQ ID NO: 35569 - DNA, 60 bp, Artificial
  Synthetic oligonucleotide
tgggttcaatggtttgtgaagtgtgtcagtatgaatgtgagactgcaaaagaactggagt

SEQ ID NO: 35570 - DNA, 60 bp, Artificial
  Synthetic oligonucleotide
atgatcctgctaaagatattgattgcattcgcatacttatgttctaaatataacacagat

SEQ ID NO: 35571 - DNA, 60 bp, Artificial
  Synthetic oligonucleotide
atctgcccttcaggctcattttaaagtgtgtaagctcagatcacggtttcaggagaattt

SEQ ID NO: 35572 - DNA, 60 bp, Artificial
  Synthetic oligonucleotide
atacaatggcactctctcaacctagtcatacatatgatataatgaccatgatggttcgct

SEQ ID NO: 35573 - DNA, 60 bp, Artificial
  Synthetic oligonucleotide
actggttggggttgtaatccacctgattgcccaggggtagggacaggctgtactgcttgt

SEQ ID NO: 35574 - DNA, 60 bp, Artificial
  Synthetic oligonucleotide
attataagtagatatcccttttatctcacattttaatgaggaagcattcaagcagttgtt

SEQ ID NO: 35575 - DNA, 60 bp, Artificial
  Synthetic oligonucleotide
cattcctcaatctcttagcctcatacagaccaaccgatgttaaccctaaagagcttcctg

SEQ ID NO: 35576 - DNA, 60 bp, Artificial
  Synthetic oligonucleotide
ataccattcctcaatctcttagcctcatacagaccaaccgatgttaaccctaaagagctt

SEQ ID NO: 35577 - DNA, 60 bp, Artificial
  Synthetic oligonucleotide
tactagaataacgatggcaactatggaggaattgcagagggaaatcaatgcccacgaggg

SEQ ID NO: 35578 - DNA, 50 bp, Artificial
  Synthetic oligonucleotide
gaataatcatattaaataattaggtaagttaactattagttagttaagtt

SEQ ID NO: 35579 - DNA, 58 bp, Artificial
  Synthetic oligonucleotide
gattggctgagagatggtaagagaagagggaatctggaactagcaaataggattcagt

SEQ ID NO: 35580 - DNA, 60 bp, Artificial
  Synthetic oligonucleotide
ttgcgattggctaagagatggtaagagaagagggaatctggaactagcaaataggattca

SEQ ID NO: 35581 - DNA, 60 bp, Artificial
  Synthetic oligonucleotide
gctctttacatgttgacaactagagggaggcaaactactaaagacaataagggaatgagg

SEQ ID NO: 35582 - DNA, 60 bp, Artificial
  Synthetic oligonucleotide
gggagacaaactactaaagacaataagggaatgaggattcgatttaaggatgacagctct

SEQ ID NO: 35583 - DNA, 60 bp, Artificial
  Synthetic oligonucleotide
ttaatccctgcagttacccttgtcatattaacaattttaaagtttattgcaaacatcttt

SEQ ID NO: 35584 - DNA, 60 bp, Artificial
  Synthetic oligonucleotide
actaactatcagctaaaaaaaacaaacccttaacacctatataatcccatttgcttatta

SEQ ID NO: 35585 - DNA, 60 bp, Artificial
  Synthetic oligonucleotide
cagctaaaaaaaacaaacccttaacacctatataatcccatttgcttattacgaggcttt

SEQ ID NO: 35586 - DNA, 60 bp, Artificial
  Synthetic oligonucleotide
gccttaaaatcactcaggaaggaaggggccatgtgaagttatctagaggctcagaagttg

SEQ ID NO: 35587 - DNA, 57 bp, Artificial
  Synthetic oligonucleotide
aaaatcactcaggaaggaaggggccatgtgaaattatccaggggctcagaggttgtc

SEQ ID NO: 35588 - DNA, 60 bp, Artificial
  Synthetic oligonucleotide
aagcagggttattgcctaaaaatcactcaggaaggaaggggccatgtgaagttatctaga

SEQ ID NO: 35589 - DNA, 59 bp, Artificial
  Synthetic oligonucleotide
aaaatcactcaggaaggaaggggccatgtgaaattatccaggggctcagaggttgtctt

SEQ ID NO: 35590 - DNA, 57 bp, Artificial
  Synthetic oligonucleotide
aaaatcactcaggaaggaaggggccatgtgaagttatctagaggctcagaagttgtc

SEQ ID NO: 35591 - DNA, 57 bp, Artificial
  Synthetic oligonucleotide
aaaatcactcaggaaggaaggggccatgtgaaattatccaggggctcagaggttatc

SEQ ID NO: 35592 - DNA, 60 bp, Artificial
  Synthetic oligonucleotide
caacctgtttcagttgcaaaatctttgttaaagcttgatttaagcgggatcaaaaagaaa

SEQ ID NO: 35593 - DNA, 60 bp, Artificial
  Synthetic oligonucleotide
caacctgtttcagttgcaaaatctttgttaaagcttgatttaagcaggatcgaaaagaaa

SEQ ID NO: 35594 - DNA, 61 bp, Artificial
  Synthetic oligonucleotide
caacctgtttcagttgcaaaatctttgttaaagcttgatttaagcaggatcgaaaagaaag

SEQ ID NO: 35595 - DNA, 60 bp, Artificial
  Synthetic oligonucleotide
caacctgtttcagttgcaaaatctttgttaaagcttgatttaagcgggatcgaaaagaaa

SEQ ID NO: 35596 - DNA, 56 bp, Artificial
  Synthetic oligonucleotide
caacctgtttcagttgcaaaatctttgttaaagcttgatttaagcgggatcaaaaa

SEQ ID NO: 35597 - DNA, 60 bp, Artificial
  Synthetic oligonucleotide
caacctgtttcagttgcaaaatctttgttaaagcttgatttaagcgggatcaaaaagaat

SEQ ID NO: 35598 - DNA, 60 bp, Artificial
  Synthetic oligonucleotide
catttccttaggcatgtctataaccattttaagtttacctaccaggaaatcctttcccat

SEQ ID NO: 35599 - DNA, 60 bp, Artificial
  Synthetic oligonucleotide
agcatatcattttagcctccgagataataggttttgtagggatttttttgaacatttcct

SEQ ID NO: 35600 - DNA, 60 bp, Artificial
  Synthetic oligonucleotide
atcccggcttatagtctgggttgtcccaaccatcccagattctaagaacagtgttaaagc

SEQ ID NO: 35601 - DNA, 60 bp, Artificial
  Synthetic oligonucleotide
tgatgatcctgcaaaatctcctagatcagctatattcccagtaagaattttctgctgctt

SEQ ID NO: 35602 - DNA, 60 bp, Artificial
  Synthetic oligonucleotide
tctaacgtgttggaatctttccgtccttcaaacagctcaaaaaaagagctagtccctgca

SEQ ID NO: 35603 - DNA, 60 bp, Artificial
  Synthetic oligonucleotide
ccacattgtctgatgttaaccttcttttctcctacagcactgcaactccaagtgaagtct

SEQ ID NO: 35604 - DNA, 60 bp, Artificial
  Synthetic oligonucleotide
tctgctgcttatctactgcaaacaatttgtctgtgctcatgtaatcgttgtgcaaatcaa

SEQ ID NO: 35605 - DNA, 60 bp, Artificial
  Synthetic oligonucleotide
ctgcaaacaatttgtctgtgctcatgtaatcgttgtgcaaatcaactgacatgtcaagct

SEQ ID NO: 35606 - DNA, 60 bp, Artificial
  Synthetic oligonucleotide
ctgggttgtcccaaccatcccagattctaagaacagtgttaaagccactttaattgatca

SEQ ID NO: 35607 - DNA, 60 bp, Artificial
  Synthetic oligonucleotide
aatgccaacctggaatagtgggcggaggtttatgcatatatcccggcttatagtctgggt

SEQ ID NO: 35608 - DNA, 60 bp, Artificial
  Synthetic oligonucleotide
tgtatacaatccacattgtctgatgttaaccttcttttctcctacagcactgcaactcca

SEQ ID NO: 35609 - DNA, 60 bp, Artificial
  Synthetic oligonucleotide
agtccctgcagtgaaaatggagaacaatagaggtcttctggctaggaatgtttctcagaa

SEQ ID NO: 35610 - DNA, 60 bp, Artificial
  Synthetic oligonucleotide
ctggtaaggagatgccatcgatacttgactaattttacagtcacctgataacctaacaga

SEQ ID NO: 35611 - DNA, 60 bp, Artificial
  Synthetic oligonucleotide
tctcagtttaatctggtaaggagatgccatcgatacttgactaattttacagtcacctga

SEQ ID NO: 35612 - DNA, 60 bp, Artificial
  Synthetic oligonucleotide
tcttgatcttcagggattagcttcaaagatttgtctgcaatctcttcggagcaataagct

SEQ ID NO: 35613 - DNA, 60 bp, Artificial
  Synthetic oligonucleotide
cgaagaaagaggcaacccaattgaaaggtgctttcacccaatcccaaaaactggatatag

SEQ ID NO: 35614 - DNA, 60 bp, Artificial
  Synthetic oligonucleotide
cttaggctcgtttgagtactttgaaacgcaattacgtaccggtatgtctactttagcaat

SEQ ID NO: 35615 - DNA, 60 bp, Artificial
  Synthetic oligonucleotide
aaggggaaatatggccacaaccagttaataatccataaaatagggtatgttaaaatgcca

SEQ ID NO: 35616 - DNA, 57 bp, Artificial
  Synthetic oligonucleotide
aaaacgagaaacaaccacaaattctacacttcaaggggaaatatggccacaaccagt

SEQ ID NO: 35617 - DNA, 60 bp, Artificial
  Synthetic oligonucleotide
tgagaaatatgccaagggagttagctttgcatcagtgatgtactcatgggtaaaaaactt

SEQ ID NO: 35618 - DNA, 60 bp, Artificial
  Synthetic oligonucleotide
cctaagtactgcatgcaactcaatttaacaagtgatgagaaatatgccaagggagttagc

SEQ ID NO: 35619 - DNA, 60 bp, Artificial
  Synthetic oligonucleotide
cttcatttataactttcttattatatatactaaatacttaatgggacaatctgaagagct

SEQ ID NO: 35620 - DNA, 60 bp, Artificial
  Synthetic oligonucleotide
tgagatttcttaataactaccagcaacatgtgtgtttaagtaaattgaatttaagtagta

SEQ ID NO: 35621 - DNA, 60 bp, Artificial
  Synthetic oligonucleotide
tttgtgacactcctattgcctctgaaagcaacacatgtgatgttgttccaataaacagag

SEQ ID NO: 35622 - DNA, 60 bp, Artificial
  Synthetic oligonucleotide
ctgtctctgttataacattccctatagaacattgacatgtttcatacccattatctgaca

SEQ ID NO: 35623 - DNA, 64 bp, Artificial
  Synthetic oligonucleotide
gtgacatgactttcaataacctgatatatgttgaccaagcttgatagatcataaatattggtgc

SEQ ID NO: 35624 - DNA, 60 bp, Artificial
  Synthetic oligonucleotide
aatgcccgcaaattcctccttcatttattgctaaacagccaagctcttcacaaccccacc

SEQ ID NO: 35625 - DNA, 60 bp, Artificial
  Synthetic oligonucleotide
cataaatattggtgcaatgcccgcaaattcctccttcatttattgctaaacagccaagct

SEQ ID NO: 35626 - DNA, 53 bp, Artificial
  Synthetic oligonucleotide
taacattcctaccttaggtttttgtttaatgcaatcagtgcaggcacctgtgc

SEQ ID NO: 35627 - DNA, 60 bp, Artificial
  Synthetic oligonucleotide
cagccaagctcttcacaaccccaccaagaagtcagtgtaacacaaaaatctaacattcct

SEQ ID NO: 35628 - DNA, 60 bp, Artificial
  Synthetic oligonucleotide
gttgtatctacttttgctgtagaatacttgtatcttacatcatactctacacctacactc

SEQ ID NO: 35629 - DNA, 60 bp, Artificial
  Synthetic oligonucleotide
aatttaacgtctggtattgtttttatagatgcaagagaattacaaccattcctgcatgca

SEQ ID NO: 35630 - DNA, 60 bp, Artificial
  Synthetic oligonucleotide
ttaaactggttagattacctttgaaagattgtcctctgtacaacttattaaatttaacgt

SEQ ID NO: 35631 - DNA, 55 bp, Artificial
  Synthetic oligonucleotide
gtgttaaagccactttaattgatcagaacaagatgaccaaagctgacaaaatagt

SEQ ID NO: 35632 - DNA, 60 bp, Artificial
  Synthetic oligonucleotide
cctgcatgcaaacaaattttgagcctggttgctgctagtcatgcacatatctgaaccaat

SEQ ID NO: 35633 - DNA, 60 bp, Artificial
  Synthetic oligonucleotide
gcaaacaaattttgagcctggttgctgctagtcatgcacatatctgaaccaatcacacag

SEQ ID NO: 35634 - DNA, 60 bp, Artificial
  Synthetic oligonucleotide
ctgaaccaatcacacagtcattaagagacgtagccctggacatcgggactccagatctgt

SEQ ID NO: 35635 - DNA, 60 bp, Artificial
  Synthetic oligonucleotide
cacagtcattaagagacgtagccctggacatcgggactccagatctgtatactgtctctg

SEQ ID NO: 35636 - DNA, 60 bp, Artificial
  Synthetic oligonucleotide
gtcacctgataacctaacagaaagtcttgcaacagttggggattttaaatttacttttgg

SEQ ID NO: 35637 - DNA, 60 bp, Artificial
  Synthetic oligonucleotide
gtagtaacatttttctacacataaattctgttgtttagatgctatacttgatggtatata

SEQ ID NO: 35638 - DNA, 60 bp, Artificial
  Synthetic oligonucleotide
ctcttcagcatggtctttagatgcctcattttggttgcaaacacacttgtctgtacaaga

SEQ ID NO: 35639 - DNA, 60 bp, Artificial
  Synthetic oligonucleotide
ccacttgattcaagaggtagacttcagacacgaggaagagcgaaagtaagcctaggcagt

SEQ ID NO: 35640 - DNA, 60 bp, Artificial
  Synthetic oligonucleotide
ctgtacaagagtgggtcaaaaacgagaaacaaccacaaattctacacttcaaggggaaat

SEQ ID NO: 35641 - DNA, 60 bp, Artificial
  Synthetic oligonucleotide
ttggatgctagtatccacttgattcaagaggtagacttcagacacgaggaagagcgaaag

SEQ ID NO: 35642 - DNA, 60 bp, Artificial
  Synthetic oligonucleotide
ctcaaagctatcacaatttaaactcaatgatggttgatctgttgcactttcatcgttccg

SEQ ID NO: 35643 - DNA, 60 bp, Artificial
  Synthetic oligonucleotide
aggtgcctcagttatcacaggctcttctttatcaataaggtcttcaggatcatctacttt

SEQ ID NO: 35644 - DNA, 60 bp, Artificial
  Synthetic oligonucleotide
gctgcttatgcacgaaattatttctttaccactatcaatctggtaatgagcattgaaatc

SEQ ID NO: 35645 - DNA, 60 bp, Artificial
  Synthetic oligonucleotide
gactattacttcgaggagctcctgttcttgtcagagtttgacccggggtctatccagaga

SEQ ID NO: 35646 - DNA, 60 bp, Artificial
  Synthetic oligonucleotide
ctctagagtttatagactattacttcgaggagctcctgttcttgtcagagtttgacccgg

SEQ ID NO: 35647 - DNA, 60 bp, Artificial
  Synthetic oligonucleotide
caacaagaaataccttttgtctgctctcaggtggcccacagggattcctactctagagtt

SEQ ID NO: 35648 - DNA, 60 bp, Artificial
  Synthetic oligonucleotide
tgccagggttcccttctttcaactggtagactgaaatcaggttggccacaatagaagcac

SEQ ID NO: 35649 - DNA, 60 bp, Artificial
  Synthetic oligonucleotide
ccagggttcccttctttcaactggtagactgaaatcaggttggccacaatagaagcaccc

SEQ ID NO: 35650 - DNA, 60 bp, Artificial
  Synthetic oligonucleotide
ccctggcagctcacttgccaaccttggcgcgatacttctcagcactcctcactactgcag

SEQ ID NO: 35651 - DNA, 60 bp, Artificial
  Synthetic oligonucleotide
aatgatccccactgctatgagcagcttcttcttatcttctctggtgaagaatcgtccact

SEQ ID NO: 35652 - DNA, 60 bp, Artificial
  Synthetic oligonucleotide
ctacatagactgtgatttggacacctttgattttgagaaggattgctctctgattgagaa

SEQ ID NO: 35653 - DNA, 60 bp, Artificial
  Synthetic oligonucleotide
ctgtgatttggacacctttgattttgagaaggattgctctctgattgagaatgagttccc

SEQ ID NO: 35654 - DNA, 60 bp, Artificial
  Synthetic oligonucleotide
aatgacatccttggagacatctgtgtggtccaagcagcacgggtgacaagactggttgct

SEQ ID NO: 35655 - DNA, 60 bp, Artificial
  Synthetic oligonucleotide
tatgactattttatgagaactgacttgggattcagagagactgctctttccaccttttgg

SEQ ID NO: 35656 - DNA, 51 bp, Artificial
  Synthetic oligonucleotide
aaaagcacggattgactgcttttgatctcccaggaaatgacatccttggag

SEQ ID NO: 35657 - DNA, 60 bp, Artificial
  Synthetic oligonucleotide
ggaaatgacatccttggagacatctgtgtggtccaagcagcacgggtgacaagactggtt

SEQ ID NO: 35658 - DNA, 60 bp, Artificial
  Synthetic oligonucleotide
ttatgatcccacccctcagatttccccaatccccatcccaatcctaattcccctaacccc

SEQ ID NO: 35659 - DNA, 60 bp, Artificial
  Synthetic oligonucleotide
attcccctaaccccctggcagctcacttgccaaccttggcgcgatacttctcagcactcc

SEQ ID NO: 35660 - DNA, 60 bp, Artificial
  Synthetic oligonucleotide
gagaactgacttgggattcagagagactgctctttccaccttttgggctaaggactggcc

SEQ ID NO: 35661 - DNA, 60 bp, Artificial
  Synthetic oligonucleotide
acccttatgatcccacccctcagatttccccaatccccatcccaatcctaattcccctaa

SEQ ID NO: 35662 - DNA, 60 bp, Artificial
  Synthetic oligonucleotide
cagcacaatcatcatcttcacatctttcttccagtccctgccctttgccgttcctctctc

SEQ ID NO: 35663 - DNA, 60 bp, Artificial
  Synthetic oligonucleotide
aatcatgaacagcccatgagcatcagcaatagtggctccagctccattcggaaggtccag

SEQ ID NO: 35664 - DNA, 60 bp, Artificial
  Synthetic oligonucleotide
gttctcagagatggatttatggtctttgagaactcaatcatgaacagcccatgagcatca

SEQ ID NO: 35665 - DNA, 60 bp, Artificial
  Synthetic oligonucleotide
gaaggtccagatcaatgatcccagcaaagctagggtgcatcatggctcttgggtaggtta

SEQ ID NO: 35666 - DNA, 60 bp, Artificial
  Synthetic oligonucleotide
cccatgagcatcagcaatagtggctccagctccattcggaaggtccagatcaatgatccc

SEQ ID NO: 35667 - DNA, 60 bp, Artificial
  Synthetic oligonucleotide
atcgtccactcatggcggccatattgggcttttcaaatgtggcagccacttcattagcct

SEQ ID NO: 35668 - DNA, 60 bp, Artificial
  Synthetic oligonucleotide
ctgctatgagcagcttcttcttatcttctctggtgaagaatcgtccactcatggcggcca

SEQ ID NO: 35669 - DNA, 60 bp, Artificial
  Synthetic oligonucleotide
tcattagcctgttttgttctcagagatggatttatggtctttgagaactcaatcatgaac

SEQ ID NO: 35670 - DNA, 60 bp, Artificial
  Synthetic oligonucleotide
cgtccactcatggcggccatattgggcttttcaaatgtggcagccacttcattagcctgt

SEQ ID NO: 35671 - DNA, 60 bp, Artificial
  Synthetic oligonucleotide
tgggctttacaactccactaatgaggagcagatagtggagattcacagacgagtgctcat

SEQ ID NO: 35672 - DNA, 60 bp, Artificial
  Synthetic oligonucleotide
ccggggtctatccagagatacctgaaattactggttaaggcctctgggctttacaactcc

SEQ ID NO: 35673 - DNA, 60 bp, Artificial
  Synthetic oligonucleotide
tttgacccggggtctatccagagatacctgaaattactggttaaggcctctgggctttac

SEQ ID NO: 35674 - DNA, 60 bp, Artificial
  Synthetic oligonucleotide
caactccactaatgaggagcagatagtggagattcacagacgagtgctcatagaaggcaa

SEQ ID NO: 35675 - DNA, 59 bp, Artificial
  Synthetic oligonucleotide
attctgacaggacacgtagtgcctgaacagtccacggaacaaatgcggctgacaccctt

SEQ ID NO: 35676 - DNA, 60 bp, Artificial
  Synthetic oligonucleotide
aggtccagatcaatgatcccagcaaagctagggtgcatcatggctcttgggtaggttaca

SEQ ID NO: 35677 - DNA, 60 bp, Artificial
  Synthetic oligonucleotide
gggcctggtatgatcagtgcagttcgaaccagactttacgagccaactatgagagagctc

SEQ ID NO: 35678 - DNA, 60 bp, Artificial
  Synthetic oligonucleotide
ctgtgctggggcctggtatgatcagtgcagttcgaaccagactttacgagccaactatga

SEQ ID NO: 35679 - DNA, 60 bp, Artificial
  Synthetic oligonucleotide
gagtgctcatagaaggcaaaaagcacggattgactgcttttgatctcccaggaaatgaca

SEQ ID NO: 35680 - DNA, 53 bp, Artificial
  Synthetic oligonucleotide
tctgatctaaatgcatgtaaacaaactttacttagggacaagtttaaccaagg

SEQ ID NO: 35681 - DNA, 53 bp, Artificial
  Synthetic oligonucleotide
ccttggttaaacttgtccctaagtaaagtttgtttacatgcatttagatcaga

SEQ ID NO: 35682 - DNA, 50 bp, Artificial
  Synthetic oligonucleotide
tggttaaacttgtccctaagtaaagtttgtttacatgcatttagatcaga

SEQ ID NO: 35683 - DNA, 60 bp, Artificial
  Synthetic oligonucleotide
ctggtggaagttgctgacatggagttacacacaaagaaaattgagatatcaggtttgaag

SEQ ID NO: 35684 - DNA, 60 bp, Artificial
  Synthetic oligonucleotide
ctgtattggtggaagttgctgacatggagttacacacaaagaagattgaaatatcaggct

SEQ ID NO: 35685 - DNA, 60 bp, Artificial
  Synthetic oligonucleotide
cactgtattggtggaagttgctgacatggagttacacacaaagaagattgaaatatcagg

SEQ ID NO: 35686 - DNA, 60 bp, Artificial
  Synthetic oligonucleotide
ccgtgctggtggaagttgctgacatggagttacacacaaagaagattgaaatatcaggct

SEQ ID NO: 35687 - DNA, 60 bp, Artificial
  Synthetic oligonucleotide
ggtgcaggtgaggtcactgtgctggtggaagttgctgacatggagttacacacaaagaaa

SEQ ID NO: 35688 - DNA, 60 bp, Artificial
  Synthetic oligonucleotide
gtcggcacttacagacaggtgatggaccatcgtgacaactttgaagacttctacagagtt

SEQ ID NO: 35689 - DNA, 60 bp, Artificial
  Synthetic oligonucleotide
cacagatcttcaatttccgtgcaatatgtctatgtattgcacaccattatactgcaaggc

SEQ ID NO: 35690 - DNA, 60 bp, Artificial
  Synthetic oligonucleotide
gatcttcaattccgtgcaatatgtctatgtattgcacaccattatactgcaaggcttctg

SEQ ID NO: 35691 - DNA, 60 bp, Artificial
  Synthetic oligonucleotide
gggacatcaacaagtcaggccgttcaggaatagcacttgtcgcaacaggccttgccaagc

SEQ ID NO: 35692 - DNA, 60 bp, Artificial
  Synthetic oligonucleotide
gggatatcaacaagtcaggccgttcaggaatagcacttgtcgcaacaggccttgccaagc

SEQ ID NO: 35693 - DNA, 60 bp, Artificial
  Synthetic oligonucleotide
acaaaactacctcactttacctacctcatttgctttttccttgattgtctttttagggag

SEQ ID NO: 35694 - DNA, 60 bp, Artificial
  Synthetic oligonucleotide
caaaactacctccctttaactacctcatttgctttttccttgattgtctttttagggagc

SEQ ID NO: 35695 - DNA, 60 bp, Artificial
  Synthetic oligonucleotide
ctcagagggtgggtcagttaatccgttgtgggtgggtttagttcctggctgccttaagta

SEQ ID NO: 35696 - DNA, 60 bp, Artificial
  Synthetic oligonucleotide
ttcttgttgttatcctgttgatctctatagtcctatttagtttcttgtgtcccataagat

SEQ ID NO: 35697 - DNA, 58 bp, Artificial
  Synthetic oligonucleotide
caacccacctgattgtcctggggtgggtacaggttgcactgcatgtgggatctatcta

SEQ ID NO: 35698 - DNA, 60 bp, Artificial
  Synthetic oligonucleotide
gggctgccagtgctgacacacccctagtagaagtaggttggtctgatacagctcatggcg

SEQ ID NO: 35699 - DNA, 60 bp, Artificial
  Synthetic oligonucleotide
cattccactgttacggtgagtgtaaaaggtactcatatccatggcaaacaactaagtgtt

SEQ ID NO: 35700 - DNA, 60 bp, Artificial
  Synthetic oligonucleotide
taatagagggtttatgttttaatcctgtcccggctcttgcactgacacaacctgggcata

SEQ ID NO: 35701 - DNA, 60 bp, Artificial
  Synthetic oligonucleotide
gagaaagactaccaatatgaaacaagttgggcatgcaacccacctgattgtcctggggtg

SEQ ID NO: 35702 - DNA, 60 bp, Artificial
  Synthetic oligonucleotide
gcatgtctgtcaggaattgtatgatcagcttgctaactaacaggatccaggtagtgtatg

SEQ ID NO: 35703 - DNA, 60 bp, Artificial
  Synthetic oligonucleotide
atggtgcacctccttgttcaataaagtgttggttttcaaaatctggagaatggctccttg

SEQ ID NO: 35704 - DNA, 60 bp, Artificial
  Synthetic oligonucleotide
tacacttgtgttcttgggtcctttagaagaaggcgggttaatcttgaagcagtggtgtac

SEQ ID NO: 35705 - DNA, 64 bp, Artificial
  Synthetic oligonucleotide
ggaacagagcagacttgtaagaatattgatgtaaatgattgtttagtgacttcttcagttaagg

SEQ ID NO: 35706 - DNA, 60 bp, Artificial
  Synthetic oligonucleotide
gtcatgataaggactgtgcaggtacaggtttgtcggcatctgcacctcatttagagaggg

SEQ ID NO: 35707 - DNA, 60 bp, Artificial
  Synthetic oligonucleotide
gagcttgaaaagttgacaacgaaaactggctgcactgaggatgcactccaggcctattat

SEQ ID NO: 35708 - DNA, 60 bp, Artificial
  Synthetic oligonucleotide
tcaaggttgtaggtaaaggaggccactcagggtcattgtttaagtgttgtcatgataagg

SEQ ID NO: 35709 - DNA, 60 bp, Artificial
  Synthetic oligonucleotide
tttactgcttcctaatgctttaaactgaaatagttaatactaatttcactaaaaaaaact

SEQ ID NO: 35710 - DNA, 60 bp, Artificial
  Synthetic oligonucleotide
gacaaaaagaaactgagagcaatatgggcaggttttgtctgatggtgcttggagtcttac

SEQ ID NO: 35711 - DNA, 60 bp, Artificial
  Synthetic oligonucleotide
tgacctgctttctcattgcaaaaaaaggtgtaagcctaaaaattgctgtagagcttgaaa

SEQ ID NO: 35712 - DNA, 60 bp, Artificial
  Synthetic oligonucleotide
tcttgttcccactattcaacagaatccaagtttaaaattatcctagagaaagtaaaggtt

SEQ ID NO: 35713 - DNA, 50 bp, Artificial
  Synthetic oligonucleotide
aaggctgaccctgagtatattttttctccaggaatcattgcagactcaaa

SEQ ID NO: 35714 - DNA, 60 bp, Artificial
  Synthetic oligonucleotide
aaagacgctgcccctgacgtggagaggctttctatcaatgtctggtgaaatagagaaaat

SEQ ID NO: 35715 - DNA, 60 bp, Artificial
  Synthetic oligonucleotide
agagagggttactggattcaatcaggttgactcagataaagtctatgatgatggtgcacc

SEQ ID NO: 35716 - DNA, 60 bp, Artificial
  Synthetic oligonucleotide
ttttataggtcaacattcagagcctttagtggtgcctgctttggaagacttccgttcagc

SEQ ID NO: 35717 - DNA, 60 bp, Artificial
  Synthetic oligonucleotide
gacaacgaaaactggctgcactgaggatgcactccaggcctattatgtctgttttatagg

SEQ ID NO: 35718 - DNA, 60 bp, Artificial
  Synthetic oligonucleotide
ggcctattatgtctgttttataggtcaacattcagagcctttagtggtgcctgctttgga

SEQ ID NO: 35719 - DNA, 60 bp, Artificial
  Synthetic oligonucleotide
gaccatgatatggatcaatcatcccagggagcactgcggatagtaggcccgataaagggg

SEQ ID NO: 35720 - DNA, 60 bp, Artificial
  Synthetic oligonucleotide
ggcccgataaaggggaaagtcccacacactgaaacaacagagactgtactcgggattgcc

SEQ ID NO: 35721 - DNA, 60 bp, Artificial
  Synthetic oligonucleotide
cttccgttcagcagaaatctttacaaggatgttaatgaacccaaaaggtgaagaccatga

SEQ ID NO: 35722 - DNA, 60 bp, Artificial
  Synthetic oligonucleotide
ctcttgttaccacattttgctttgggtggcttttaatcccagctgtcaccatggtgattc

SEQ ID NO: 35723 - DNA, 60 bp, Artificial
  Synthetic oligonucleotide
tcccagctgtcaccatggtgattctaaaaactttaaggttactaacatactcttgttccc

SEQ ID NO: 35724 - DNA, 60 bp, Artificial
  Synthetic oligonucleotide
ggatagacaatgatgtagtggtatattgtaatggtcaaaagaaagtcattttgacaaaaa

SEQ ID NO: 35725 - DNA, 60 bp, Artificial
  Synthetic oligonucleotide
cacactctttagctgtggagctttgtgtccccggcgtccatgggtgggcaactattgctc

SEQ ID NO: 35726 - DNA, 60 bp, Artificial
  Synthetic oligonucleotide
ggttgtaatgtcttttgtactttagcaggccctggggcaagttgtgaggcttattcagag

SEQ ID NO: 35727 - DNA, 60 bp, Artificial
  Synthetic oligonucleotide
agcatgtgacatggccatgtgttatggtgctacagtggtcaatttagttagaggttctaa

SEQ ID NO: 35728 - DNA, 60 bp, Artificial
  Synthetic oligonucleotide
ctggatttaagcggctaatggcaactaaagactcatttcaatcatttaatgtctctgagg

SEQ ID NO: 35729 - DNA, 60 bp, Artificial
  Synthetic oligonucleotide
gctttactaccatataactcatttacttcaagcctgggcttttgttcctgcggagcatac

SEQ ID NO: 35730 - DNA, 60 bp, Artificial
  Synthetic oligonucleotide
ccatgtaaggtggacctgtcaacacaatcgattgatggtgcatggggctcgggtgttggt

SEQ ID NO: 35731 - DNA, 60 bp, Artificial
  Synthetic oligonucleotide
tggtgcatggggctcgggtgttggtttcacattgacatgtgtagttggcctgacagaatg

SEQ ID NO: 35732 - DNA, 60 bp, Artificial
  Synthetic oligonucleotide
gggtcctttagaagaaggcgggttaatcttgaagcagtggtgtacaacaacatgtgcctt

SEQ ID NO: 35733 - DNA, 60 bp, Artificial
  Synthetic oligonucleotide
ggtttgctacaacaccaacctgtgagtatcaagggaatactgtctctggatttaagcggc

SEQ ID NO: 35734 - DNA, 60 bp, Artificial
  Synthetic oligonucleotide
caagagtaggtgttatgtcggtctagtctggtcatttttactgacacttgaattaatagt

SEQ ID NO: 35735 - DNA, 60 bp, Artificial
  Synthetic oligonucleotide
gttcagtcgaggtcaatttagtgacacttgatcaaataactgagctgaaaattgagagct

SEQ ID NO: 35736 - DNA, 60 bp, Artificial
  Synthetic oligonucleotide
caggatccaggtagtgtatgaaaagacatactgtgtttcagggcagctaatagagggttt

SEQ ID NO: 35737 - DNA, 60 bp, Artificial
  Synthetic oligonucleotide
attgagagctcttgcaattttgatcatcatgcccctcctacaacagcacagacattcacg

SEQ ID NO: 35738 - DNA, 60 bp, Artificial
  Synthetic oligonucleotide
caattttgatcatcatgcccctcctacaacagcacagacattcacgcagctaagctggtc

SEQ ID NO: 35739 - DNA, 60 bp, Artificial
  Synthetic oligonucleotide
agagcaatatgggcaggttttgtctgatggtgcttggagtcttactaactgctgtagctg

SEQ ID NO: 35740 - DNA, 60 bp, Artificial
  Synthetic oligonucleotide
ctgctgtagctggatttcctcggagtgttcatgagcttaagattgaatgtccacacacag

SEQ ID NO: 35741 - DNA, 60 bp, Artificial
  Synthetic oligonucleotide
taagattgaatgtccacacacagtagtgctagggcaaggttatgttgcaggttcagtcga

SEQ ID NO: 35742 - DNA, 60 bp, Artificial
  Synthetic oligonucleotide
ccacacacagtagtgctagggcaaggttatgttgcaggttcagtcgaggtcaatttagtg

SEQ ID NO: 35743 - DNA, 60 bp, Artificial
  Synthetic oligonucleotide
gacattcacgcagctaagctggtcaaaaactgcgagcacaacagatacaacaaatgctgg

SEQ ID NO: 35744 - DNA, 60 bp, Artificial
  Synthetic oligonucleotide
tggtctgatacagctcatggcgtgggggatatccctatgaagactgacttagaactggat

SEQ ID NO: 35745 - DNA, 60 bp, Artificial
  Synthetic oligonucleotide
gcctgtaaccaaacccactgccagccaacagtgcatctacttgctcctatacagacatgc

SEQ ID NO: 35746 - DNA, 60 bp, Artificial
  Synthetic oligonucleotide
ctacctcagtgtacttatatatatgcaagtagcatatatataagtacacaacatactacc

SEQ ID NO: 35747 - DNA, 60 bp, Artificial
  Synthetic oligonucleotide
ggcacatttatgggtgggaatcattactcagagggtgggtcagttaatccgttgtgggtg

SEQ ID NO: 35748 - DNA, 56 bp, Artificial
  Synthetic oligonucleotide
aaaatacactgcaagcaaggcaacagacagtgtcagcattggaggacaaactcgca

SEQ ID NO: 35749 - DNA, 60 bp, Artificial
  Synthetic oligonucleotide
agaaagcagtggaggtggacccagatgacgttaacaagagcacattacaaagcagacggg

SEQ ID NO: 35750 - DNA, 60 bp, Artificial
  Synthetic oligonucleotide
aaaaagcagtggaggtggacccagatgacgttaacaagagcacattacaaagcagacggg

SEQ ID NO: 35751 - DNA, 60 bp, Artificial
  Synthetic oligonucleotide
gccgcagtacaaagatgctgtcaaatgaaagatagtgccaaaaccttggtgagcgactgc

SEQ ID NO: 35752 - DNA, 60 bp, Artificial
  Synthetic oligonucleotide
ccttgctgcagttaggatcttcttcctcaatgccgcaaaggccaaggctgctctctcgcg

SEQ ID NO: 35753 - DNA, 60 bp, Artificial
  Synthetic oligonucleotide
ggtcctctttgacgacataagaaactctccaacgcacagcacagcctggaaacatgccct

SEQ ID NO: 35754 - DNA, 60 bp, Artificial
  Synthetic oligonucleotide
gggaatcattactcagagggtgggtcagttaatccgttgtgggtgggtttagttcctggc

SEQ ID NO: 35755 - DNA, 60 bp, Artificial
  Synthetic oligonucleotide
ttctccgcaatctatttcagttgcaaaatctttgttaaagcttgatttaagcaggatcaa

SEQ ID NO: 35756 - DNA, 60 bp, Artificial
  Synthetic oligonucleotide
ttctccacaatctatttcagttgcaaaatctttgttaaagcttgatttaagcgggatcaa

SEQ ID NO: 35757 - DNA, 60 bp, Artificial
  Synthetic oligonucleotide
cctcaacggtctacatccacgtttgacccggaggcagcatatgtggcatttgaagctcag

SEQ ID NO: 35758 - DNA, 60 bp, Artificial
  Synthetic oligonucleotide
agcacacgaacagcagctcgtgactgctcggcaaaagcttaaagatgccgaaaagacggt

SEQ ID NO: 35759 - DNA, 60 bp, Artificial
  Synthetic oligonucleotide
caggattagtcagctcagcagttgctttggaagatgctgaagtcattgctagagcagctc

SEQ ID NO: 35760 - DNA, 60 bp, Artificial
  Synthetic oligonucleotide
tcttgtaacatggataatcaccaatcgttgaatacaataacaaaatatacccaagtaagt

SEQ ID NO: 35761 - DNA, 60 bp, Artificial
  Synthetic oligonucleotide
tcttgtagcatggataatcaccaatcgttgaatacaataacaaaatatacccaagtaagt

SEQ ID NO: 35762 - DNA, 60 bp, Artificial
  Synthetic oligonucleotide
tctgatctaaatgcatgtaaacaaactttacttagggacaagtttaaccaaggttaattt

SEQ ID NO: 35763 - DNA, 60 bp, Artificial
  Synthetic oligonucleotide
aaaagaaaactcactaacccagttaacacagaacaaggagttcaattacatatagagatt

SEQ ID NO: 35764 - DNA, 54 bp, Artificial
  Synthetic oligonucleotide
ttggatcagtcccaatgcatactgacttagaacttgatttttccttaccttcaa

SEQ ID NO: 35765 - DNA, 60 bp, Artificial
  Synthetic oligonucleotide
ggggtttactagttattgctgttttagttggcccaggttttgcaataaagaatgtatatg

SEQ ID NO: 35766 - DNA, 60 bp, Artificial
  Synthetic oligonucleotide
atagttgggcctgtaacccagctgattgccctggtgtgggtactgggtgtaccgcttgcg

SEQ ID NO: 35767 - DNA, 60 bp, Artificial
  Synthetic oligonucleotide
gaagagcaaggaattggtgcagatgtccatcacctaggccattggtttgatgcccggctt

SEQ ID NO: 35768 - DNA, 60 bp, Artificial
  Synthetic oligonucleotide
gtgttacttttaatatccttaatccttcttggtatcttctgtcctgtccgtaagcataaa

SEQ ID NO: 35769 - DNA, 60 bp, Artificial
  Synthetic oligonucleotide
gggtgaagggcatctttagtggtaattggatcgtcttgattgtcttatgtgtgttacttt

SEQ ID NO: 35770 - DNA, 56 bp, Artificial
  Synthetic oligonucleotide
gtctaaatttatacaaggggatacattacttttcctaggcccacttgaaggtggtg

SEQ ID NO: 35771 - DNA, 60 bp, Artificial
  Synthetic oligonucleotide
aacatttctttacttataacttttaacaacctaaaaaaaatactatcttctctctctgtc

SEQ ID NO: 35772 - DNA, 60 bp, Artificial
  Synthetic oligonucleotide
caagcaacggcttgcaagcaaacccaccccatcttgacagggttgcaggagtcagcgagt

SEQ ID NO: 35773 - DNA, 60 bp, Artificial
  Synthetic oligonucleotide
ggggcaccccaatgtggaatcgcttgctggttcataaagtctggagaatgggtgaagggc

SEQ ID NO: 35774 - DNA, 60 bp, Artificial
  Synthetic oligonucleotide
cccagaaagttcctgcaacatggataaccaccaatctcttgccactatcaacactctgac

SEQ ID NO: 35775 - DNA, 60 bp, Artificial
  Synthetic oligonucleotide
ccttccaggtgaggaattttcaacatatcagattgcaggtcctactgaagcaaaagtccc

SEQ ID NO: 35776 - DNA, 60 bp, Artificial
  Synthetic oligonucleotide
ggtcaagtcgaattgccagcacttccaatcacagaggcagaacagcttgtcccagaaagt

SEQ ID NO: 35777 - DNA, 60 bp, Artificial
  Synthetic oligonucleotide
tcacaggatggaagatatgtatttagtccaggacttttccctaacttaaaccagacacag

SEQ ID NO: 35778 - DNA, 60 bp, Artificial
  Synthetic oligonucleotide
gggatgattgacctttctgggtactatgaggctatccacccgtgtaatatcttctgtgtc

SEQ ID NO: 35779 - DNA, 60 bp, Artificial
  Synthetic oligonucleotide
aacaagcctattttcactcttgcctggtgttgcacactcaattgctatcgaattatgtgt

SEQ ID NO: 35780 - DNA, 60 bp, Artificial
  Synthetic oligonucleotide
tagtagtagacaccgcaagaaaaagcagttaaataacagcaagaaaatgtggggtttact

SEQ ID NO: 35781 - DNA, 60 bp, Artificial
  Synthetic oligonucleotide
gtacctggatttcatggctgggcaactgcagcactattgattaccttttgctttggctgg

SEQ ID NO: 35782 - DNA, 60 bp, Artificial
  Synthetic oligonucleotide
actcttgcctggtgttgcacactcaattgctatcgaattatgtgtacctggatttcatgg

SEQ ID NO: 35783 - DNA, 60 bp, Artificial
  Synthetic oligonucleotide
cttgccactatcaacactctgacaaaggttagttggaggaaaaaggctgatcaggtctca

SEQ ID NO: 35784 - DNA, 60 bp, Artificial
  Synthetic oligonucleotide
ggtagtccttaaattcattgcaaatattctccacacaaattcccaagaaaataggtttaa

SEQ ID NO: 35785 - DNA, 51 bp, Artificial
  Synthetic oligonucleotide
cgagcagcagaacaacaaataaactttgtgtgtcagcgtgttgacatggat

SEQ ID NO: 35786 - DNA, 60 bp, Artificial
  Synthetic oligonucleotide
gtgcagaaagtgtcactcttgttagaggacaaaatacagtaaaaatcagtgggaaaggtg

SEQ ID NO: 35787 - DNA, 60 bp, Artificial
  Synthetic oligonucleotide
tcctaaagaaagtgaaggaggaattcgaaaagacaaaagggtctatggtttgtgaagtct

SEQ ID NO: 35788 - DNA, 60 bp, Artificial
  Synthetic oligonucleotide
tcaaagcacataacctatcatgcccacaatctaaatgcccttactgtttcacacattgtg

SEQ ID NO: 35789 - DNA, 60 bp, Artificial
  Synthetic oligonucleotide
cctatcatgcccacaatctaaatgcccttactgtttcacacattgtgagcccacagaagc

SEQ ID NO: 35790 - DNA, 60 bp, Artificial
  Synthetic oligonucleotide
gtgtccaatttggagaagaacatttatgcaagacaattgacatgaatgattgtttcgtaa

SEQ ID NO: 35791 - DNA, 60 bp, Artificial
  Synthetic oligonucleotide
accttttgctttggctggatactcatcccaacgataactttggctgtattggtagtcctt

SEQ ID NO: 35792 - DNA, 60 bp, Artificial
  Synthetic oligonucleotide
gggaaaggtggacacagtggttcatcatttaagtgttgccatggagttgattgttcaagc

SEQ ID NO: 35793 - DNA, 60 bp, Artificial
  Synthetic oligonucleotide
gcatggggttctggagttggattcacattaacttgccaagtatctttgactgagtgtcct

SEQ ID NO: 35794 - DNA, 60 bp, Artificial
  Synthetic oligonucleotide
gaattcccaggtcagttccggaaaaagtgtaattttgcaacaaccccagtatgtgaatat

SEQ ID NO: 35795 - DNA, 60 bp, Artificial
  Synthetic oligonucleotide
ctgtgcgggataggacttcaagtttcagcaattaaaggagcatggggttctggagttgga

SEQ ID NO: 35796 - DNA, 60 bp, Artificial
  Synthetic oligonucleotide
ccacagaagcaacatttaaggcacattacaaagtatgtcaagcaacacatcgattccggg

SEQ ID NO: 35797 - DNA, 60 bp, Artificial
  Synthetic oligonucleotide
tcaagcaacacatcgattccgggaagatttaaaaaagacagtaacacctcaaactgttgg

SEQ ID NO: 35798 - DNA, 60 bp, Artificial
  Synthetic oligonucleotide
acacattgtgagcccacagaagcaacatttaaggcacattacaaagtatgtcaagcaaca

SEQ ID NO: 35799 - DNA, 60 bp, Artificial
  Synthetic oligonucleotide
ccaggggatattatgagtccaaaagataaacctttcctctgcccagaattcccaggtcag

SEQ ID NO: 35800 - DNA, 60 bp, Artificial
  Synthetic oligonucleotide
aacagtttatatggttgtccccgtgcatgcttgcaacatgatgaaaagctgtcttgtcgg

SEQ ID NO: 35801 - DNA, 60 bp, Artificial
  Synthetic oligonucleotide
ttggctgagaatctgtgcgggataggacttcaagtttcagcaattaaaggagcatggggt

SEQ ID NO: 35802 - DNA, 60 bp, Artificial
  Synthetic oligonucleotide
caggtctcagctagtcaaaactcctttgaagtgatcgaagcagagactagttttaaagga

SEQ ID NO: 35803 - DNA, 60 bp, Artificial
  Synthetic oligonucleotide
gagaggacctattgtactgttgggatactgacagaagggaaatgttttattccagataag

SEQ ID NO: 35804 - DNA, 60 bp, Artificial
  Synthetic oligonucleotide
gtcactagtgtgcaagtgctttgtttttttattgtccagaaaggtcatagttataaaata

SEQ ID NO: 35805 - DNA, 60 bp, Artificial
  Synthetic oligonucleotide
gtcttgtcggtttgggaccatacagagttcaagttgtttatgagaggacctattgtactg

SEQ ID NO: 35806 - DNA, 60 bp, Artificial
  Synthetic oligonucleotide
gttcaaggctattacatctgtatattaggcgggaactcagcaccagtctatgtgccatct

SEQ ID NO: 35807 - DNA, 60 bp, Artificial
  Synthetic oligonucleotide
cagaacagcttgtcccagaaagttcctgcaacatggataaccaccaatctcttgccacta

SEQ ID NO: 35808 - DNA, 60 bp, Artificial
  Synthetic oligonucleotide
tttccctaacttaaaccagacacagtgtgaaaaaaatgcattaccaatggtatggagagg

SEQ ID NO: 35809 - DNA, 60 bp, Artificial
  Synthetic oligonucleotide
aaccagtgttacaggtcaagtcgaattgccagcacttccaatcacagaggcagaacagct

SEQ ID NO: 35810 - DNA, 60 bp, Artificial
  Synthetic oligonucleotide
aataggaactgcttataaacttgttgctatcaggtatagtagaaaagcatgtgtccaatt

SEQ ID NO: 35811 - DNA, 60 bp, Artificial
  Synthetic oligonucleotide
gaagatagagtgtccacattcagttaacttcggagaaaccagtgttacaggtcaagtcga

SEQ ID NO: 35812 - DNA, 60 bp, Artificial
  Synthetic oligonucleotide
acatgatgaaaagctgtcttgtcggtttgggaccatacagagttcaagttgtttatgaga

SEQ ID NO: 35813 - DNA, 60 bp, Artificial
  Synthetic oligonucleotide
catggggaagcaattaatctccattccgttaggatcttcttccttaatgccgcaaaagcc

SEQ ID NO: 35814 - DNA, 58 bp, Artificial
  Synthetic oligonucleotide
cgatcaccaattaagcaagctgagttcagagctactgtagtagtgcctttggctgagg

SEQ ID NO: 35815 - DNA, 60 bp, Artificial
  Synthetic oligonucleotide
gatggatactaagcctgttgacccgactgggattgaacctgatgaccacctcaaggagcg

SEQ ID NO: 35816 - DNA, 60 bp, Artificial
  Synthetic oligonucleotide
agttttacaattgcaagcaaacagaagagcatattcaggtaagcaatatgatgcatactg

SEQ ID NO: 35817 - DNA, 60 bp, Artificial
  Synthetic oligonucleotide
gtacactacagagcagacgggcagctgtgtcagcattggaggacaaattggcagacttca

SEQ ID NO: 35818 - DNA, 59 bp, Artificial
  Synthetic oligonucleotide
tacactccaaagcagacgggcagctgtgtcagcattggaggacaaattggcagaattca

SEQ ID NO: 35819 - DNA, 60 bp, Artificial
  Synthetic oligonucleotide
gaagctgaggttattgatacatgccatgattatagttactttgaggagtttggcctagat

SEQ ID NO: 35820 - DNA, 60 bp, Artificial
  Synthetic oligonucleotide
catgaagctgaggttattgatacatgccatgattatagttactttgaggagtttggccta

SEQ ID NO: 35821 - DNA, 60 bp, Artificial
  Synthetic oligonucleotide
gccaagatggtgctcagtaagacggcacaaccaagtgttgatcttacatttggtggcatc

SEQ ID NO: 35822 - DNA, 60 bp, Artificial
  Synthetic oligonucleotide
aggccaagatggtgctcagtaagacggcacaaccaagtgttgatcttacatttggtggca

SEQ ID NO: 35823 - DNA, 60 bp, Artificial
  Synthetic oligonucleotide
cgttagattcttcttcctcaatcagaagaaggccaagatggtactcagtaagacggcaca

SEQ ID NO: 35824 - DNA, 60 bp, Artificial
  Synthetic oligonucleotide
cgttagagtcttcttcctcaatcagaagaaggccaagatggtactcagtaagacggcaca

SEQ ID NO: 35825 - DNA, 60 bp, Artificial
  Synthetic oligonucleotide
tgataccgttagagtcttcttcctcaatcagaagaaggccaagatggtgctcagtaagac

SEQ ID NO: 35826 - DNA, 60 bp, Artificial
  Synthetic oligonucleotide
cgataccgttagagtcttcttcctcaatcagaagaaggccaagatggtgctcagtaagac

SEQ ID NO: 35827 - DNA, 60 bp, Artificial
  Synthetic oligonucleotide
gccccagctcaatttcgataccgttagagtcttcttcctcaatcagaagaaggccaagat

SEQ ID NO: 35828 - DNA, 60 bp, Artificial
  Synthetic oligonucleotide
tatatatatgcacgtagcatatatataagtgtacgattctactacctcagacagttgctt

SEQ ID NO: 35829 - DNA, 60 bp, Artificial
  Synthetic oligonucleotide
ccttgcggtacttaacacgcatttccctggaacccagtccattccactgcctgactacgg

SEQ ID NO: 35830 - DNA, 60 bp, Artificial
  Synthetic oligonucleotide
tctcaaagaaacacgtgccgcttacgcccacagtgttatcttgagtgctgacaaaatgga

SEQ ID NO: 35831 - DNA, 60 bp, Artificial
  Synthetic oligonucleotide
tcttggggtaaggaggctgtgaaccatttccatcttggtgatgatatggatcctgaattg

SEQ ID NO: 35832 - DNA, 60 bp, Artificial
  Synthetic oligonucleotide
gactggctacaaatcggcagctatattataagctttgcactacccatcatcctcaaggca

SEQ ID NO: 35833 - DNA, 60 bp, Artificial
  Synthetic oligonucleotide
tccatttcatctcttttacacacctacctcagtatacctatatatatgcacgtagcatat

SEQ ID NO: 35834 - DNA, 60 bp, Artificial
  Synthetic oligonucleotide
gcagactggctacaaatcggcagctatattataagctttgcactacccatcatcctcaag

SEQ ID NO: 35835 - DNA, 60 bp, Artificial
  Synthetic oligonucleotide
accaactgtatcaactgcaaacatagcacttagttggagttcagttgaacacagaggtaa

SEQ ID NO: 35836 - DNA, 60 bp, Artificial
  Synthetic oligonucleotide
ccaactgtatcaactgcaaacatagcacttagttggagttcagttgaacacagaggtaat

SEQ ID NO: 35837 - DNA, 60 bp, Artificial
  Synthetic oligonucleotide
accaactgtgtcaactgcaaacatagcacttagttggagttcagttgaacacagaggtaa

SEQ ID NO: 35838 - DNA, 60 bp, Artificial
  Synthetic oligonucleotide
atttttgtcaatgcctaatgcccagtctagcatgaaagcagatgagattacacccggtcg

SEQ ID NO: 35839 - DNA, 60 bp, Artificial
  Synthetic oligonucleotide
cttcatgtagtcccacatatgctgcattaatcgcttgaattggaatcattatactactga

SEQ ID NO: 35840 - DNA, 60 bp, Artificial
  Synthetic oligonucleotide
ggactgcagtctgtggattatacccggcacaggttaaagcaagaaatctggtcagccccg

SEQ ID NO: 35841 - DNA, 60 bp, Artificial
  Synthetic oligonucleotide
gcacaggcattgattgaccagaaagtgaaagagatatctaatcaagagccgcttaagctt

SEQ ID NO: 35842 - DNA, 60 bp, Artificial
  Synthetic oligonucleotide
ggaccctgatgacctcaacaaaagagcattgagtgaccgagaaagcgttgcacagtcaat

SEQ ID NO: 35843 - DNA, 60 bp, Artificial
  Synthetic oligonucleotide
gatgatagctcatttgaagatgtgaatgggatccggaagccaaaacatctatttttgtca

SEQ ID NO: 35844 - DNA, 60 bp, Artificial
  Synthetic oligonucleotide
aaaggtccatccacgaaccgtgattatttgaatcaaagacaaggggcccttgcaaagatg

SEQ ID NO: 35845 - DNA, 60 bp, Artificial
  Synthetic oligonucleotide
gtctttgctggggcacctgataggtgcccccctacttgcttgttcattgcaggcatggca

SEQ ID NO: 35846 - DNA, 60 bp, Artificial
  Synthetic oligonucleotide
agttgacagcttccatctaggtgatgatatggatccagagcttcggggcctagcacaggc

SEQ ID NO: 35847 - DNA, 60 bp, Artificial
  Synthetic oligonucleotide
aaagcgttgcacagtcaattcagggcaaaattgatgagttaaggagacagctggctgatc

SEQ ID NO: 35848 - DNA, 60 bp, Artificial
  Synthetic oligonucleotide
cacccggtcggttcaggactgcagtctgtggattatacccggcacaggttaaagcaagaa

SEQ ID NO: 35849 - DNA, 60 bp, Artificial
  Synthetic oligonucleotide
gcctaatgcccagtctagcatgaaagcagatgagattacacccggtcggttcaggactgc

SEQ ID NO: 35850 - DNA, 60 bp, Artificial
  Synthetic oligonucleotide
tatgaggaatacaatcatggcatccaagactattggaacatcggaggagaagctgagaaa

SEQ ID NO: 35851 - DNA, 60 bp, Artificial
  Synthetic oligonucleotide
catggcatccaagactattggaacatcggaggagaagctgagaaagaagtcctcattcta

SEQ ID NO: 35852 - DNA, 60 bp, Artificial
  Synthetic oligonucleotide
ctggaccaacgcattatcgtgcttttcatggtggactgggggaaagaagcagttgacagc

SEQ ID NO: 35853 - DNA, 60 bp, Artificial
  Synthetic oligonucleotide
aaagcaagaaatctggtcagccccgttatgagtgtgattggttttttagcccttgcaaag

SEQ ID NO: 35854 - DNA, 60 bp, Artificial
  Synthetic oligonucleotide
actggttaagcattgttgtctatttgacatcttttgtggtcccaatactcctgaaggctc

SEQ ID NO: 35855 - DNA, 60 bp, Artificial
  Synthetic oligonucleotide
ctggctgatcgtgtggctgcaggaaaaaatattggcaaggaaagggatccaactggacta

SEQ ID NO: 35856 - DNA, 60 bp, Artificial
  Synthetic oligonucleotide
tcattgaccacattgactcaccatcatcaatctgggtctttgctggggcacctgataggt

SEQ ID NO: 35857 - DNA, 60 bp, Artificial
  Synthetic oligonucleotide
acatttcatagaacttgttaagagtttcactgtaatgttccatagcaatacttcctttag

SEQ ID NO: 35858 - DNA, 60 bp, Artificial
  Synthetic oligonucleotide
aaacatttcatagaacttgttaagagtttcactgtaatgttccatagcaatacttccttt

SEQ ID NO: 35859 - DNA, 60 bp, Artificial
  Synthetic oligonucleotide
tccgggagtggagtcctctgtttcaatttcaacatctgctgtaccaccagccaaaagttc

SEQ ID NO: 35860 - DNA, 60 bp, Artificial
  Synthetic oligonucleotide
catggtgtttacaaaggaaacgtctgatatgttgtttgaactgatattattagcgcctcg

SEQ ID NO: 35861 - DNA, 60 bp, Artificial
  Synthetic oligonucleotide
cttgagcgaaatagagctagctgttccagggttactttcactgagtattttgacagcctg

SEQ ID NO: 35862 - DNA, 60 bp, Artificial
  Synthetic oligonucleotide
agctttgaagctaaatccgggagtggagtcctctgtttcaatttcaacatctgctgtacc

SEQ ID NO: 35863 - DNA, 60 bp, Artificial
  Synthetic oligonucleotide
ctttgaatgatcaccatagtcatccacagaaaggttagcactgaagaccctgtccatgta

SEQ ID NO: 35864 - DNA, 60 bp, Artificial
  Synthetic oligonucleotide
cttatggacactttcacaaactcctactccttttgtgagaatgtaccaaatctggataag

SEQ ID NO: 35865 - DNA, 60 bp, Artificial
  Synthetic oligonucleotide
ccaaaggaaagatactgttgaacacagaaggaacatcttcctttggaacctatgaatctg

SEQ ID NO: 35866 - DNA, 60 bp, Artificial
  Synthetic oligonucleotide
ccagtatttcaacggtgtttccaagatggagctatagtgaagcaaaacccatctaaggaa

SEQ ID NO: 35867 - DNA, 60 bp, Artificial
  Synthetic oligonucleotide
cattgtcaaaggcatgaagaacttgctaaattcaacaagcttagaaacaagcttatcaat

SEQ ID NO: 35868 - DNA, 60 bp, Artificial
  Synthetic oligonucleotide
acatggggtctcatgcccacaatcccaatgcccttattgtttcacccactgtgagcccac

SEQ ID NO: 35869 - DNA, 60 bp, Artificial
  Synthetic oligonucleotide
gctcacagataggactccatgctgctgcacctcatcttgacaaggttaacgggatttcag

SEQ ID NO: 35870 - DNA, 60 bp, Artificial
  Synthetic oligonucleotide
aggcatgttaaagtctgtataatcggcacagtttctaaattttctcaaggtgatacactc

SEQ ID NO: 35871 - DNA, 60 bp, Artificial
  Synthetic oligonucleotide
gctggtttgttaaatcaggggaatggatttctgggattttcagcggtaattggattgtac

SEQ ID NO: 35872 - DNA, 60 bp, Artificial
  Synthetic oligonucleotide
gtgcttacaaaatcattacaatacgatatagcagaagagtttgtgttcaatttggagagg

SEQ ID NO: 35873 - DNA, 60 bp, Artificial
  Synthetic oligonucleotide
cctcacccgtatatgtaccaacactggatgattttaggtcaatggaagcattctcaggaa

SEQ ID NO: 35874 - DNA, 60 bp, Artificial
  Synthetic oligonucleotide
aaagttcattgcaaatatcttccacacaagcaatcaggagaataggctaaagtcagtact

SEQ ID NO: 35875 - DNA, 60 bp, Artificial
  Synthetic oligonucleotide
ctatgcatttcactgatgagaggatagaatggaaagaccctgatgggatgttaagggacc

SEQ ID NO: 35876 - DNA, 60 bp, Artificial
  Synthetic oligonucleotide
gcagaatcgttttagactaacagaacaacaggtgaattttgtatgccagagggttgatgt

SEQ ID NO: 35877 - DNA, 60 bp, Artificial
  Synthetic oligonucleotide
ccgcagtcggaagtcaataacttgttatgatctgtcctgcaacagcacctattgcaaacc

SEQ ID NO: 35878 - DNA, 60 bp, Artificial
  Synthetic oligonucleotide
gaagagcaaacaattggtgtagatgtgcatgcattgggtcattggtttgatggccgcctt

SEQ ID NO: 35879 - DNA, 60 bp, Artificial
  Synthetic oligonucleotide
ggaacgacaatgcccatggggttgggtccatacccatgcacacagatttagagctagact

SEQ ID NO: 35880 - DNA, 60 bp, Artificial
  Synthetic oligonucleotide
gaggttgcatcatattctattgttggacctgctaatgctaaggtgccccatagtgccagc

SEQ ID NO: 35881 - DNA, 60 bp, Artificial
  Synthetic oligonucleotide
ggggcatgggggtctggtgtaggctttacacttacatgtttgatatcactgacagaatgc

SEQ ID NO: 35882 - DNA, 60 bp, Artificial
  Synthetic oligonucleotide
ttcctgggttccatgggtgggccacagctgcattacttgttacattttgctttggttggg

SEQ ID NO: 35883 - DNA, 60 bp, Artificial
  Synthetic oligonucleotide
gggatgatttaaagaagacagttactccccagaacttcacacctggttgctatcgaacat

SEQ ID NO: 35884 - DNA, 60 bp, Artificial
  Synthetic oligonucleotide
cctattgcatgacaggggttttaattgaagggaaatgctttgttcctgaccagagtgtag

SEQ ID NO: 35885 - DNA, 56 bp, Artificial
  Synthetic oligonucleotide
aggatatgttgaactgcctcctatgccactggctgacacaacgcaaatggtgccgg

SEQ ID NO: 35886 - DNA, 60 bp, Artificial
  Synthetic oligonucleotide
aacattggtgcacatcaacatgccagtttggggacccaggagatattatgagtccaagag

SEQ ID NO: 35887 - DNA, 60 bp, Artificial
  Synthetic oligonucleotide
ttattcttctctcagcatcctcacaagctcaacagaagcaaagcatgtgttcagccctgg

SEQ ID NO: 35888 - DNA, 60 bp, Artificial
  Synthetic oligonucleotide
aaagtgtcaggaaagggcggacatagcggctcatccttcaaatgctgtcatggggaagaa

SEQ ID NO: 35889 - DNA, 60 bp, Artificial
  Synthetic oligonucleotide
atggacactctagaaagcctaggaattttcttttatgtcaaattagcttgcagtcaccat

SEQ ID NO: 35890 - DNA, 60 bp, Artificial
  Synthetic oligonucleotide
gagctacatgcatctaagtatggacactcaagaaagcctaggaattttcttttatgtcaa

SEQ ID NO: 35891 - DNA, 60 bp, Artificial
  Synthetic oligonucleotide
ctatggaggaattgcaaaaggagatcaatgcccatgagggtcaacttgtgatagcaaggc

SEQ ID NO: 35892 - DNA, 60 bp, Artificial
  Synthetic oligonucleotide
caactatggaggaattgcaaaaggagatcaatgcccatgagggtcaacttgtgatagcaa

SEQ ID NO: 35893 - DNA, 60 bp, Artificial
  Synthetic oligonucleotide
caataagggaatgaggattcgatttaaggatgacagttcttttgaggatgtgaatggaat

SEQ ID NO: 35894 - DNA, 60 bp, Artificial
  Synthetic oligonucleotide
caataagggaatgaggattcgatttaaggatgatagttcttttgaggatgtgaatggaat

SEQ ID NO: 35895 - DNA, 60 bp, Artificial
  Synthetic oligonucleotide
ggaggtcttatagctcaagcaagagtagaatccgtagcattttcggaaggtataactctc

SEQ ID NO: 35896 - DNA, 60 bp, Artificial
  Synthetic oligonucleotide
ctttctatttccaaaatgagtgcagtaagagagatggtcctagatgctcctttgcagcac

SEQ ID NO: 35897 - DNA, 60 bp, Artificial
  Synthetic oligonucleotide
gctctacagataggaagaagcttttaccccagtcagtgttttctgactccaaagtcgttc

SEQ ID NO: 35898 - DNA, 60 bp, Artificial
  Synthetic oligonucleotide
cctgaatttagagagaattccctgggttgtaagaaagctattgcaggtgtcagagtccac

SEQ ID NO: 35899 - DNA, 60 bp, Artificial
  Synthetic oligonucleotide
gaactccaaaaagagatcaatagccatgagggccaactggtgatagccaggcagaaggtg

SEQ ID NO: 35900 - DNA, 60 bp, Artificial
  Synthetic oligonucleotide
gcacatcactcagatgatgccctctttatttatggttatttagagccagaagatgatgga

SEQ ID NO: 35901 - DNA, 60 bp, Artificial
  Synthetic oligonucleotide
aaggctggggtgaaactgttaatgacagatttctagaggttgacaatgatgcacaacggt

SEQ ID NO: 35902 - DNA, 60 bp, Artificial
  Synthetic oligonucleotide
gaagttgaggtaaaaaggataaggggtgtaacgcgcgtgcttgaaccagttaagctaatt

SEQ ID NO: 35903 - DNA, 60 bp, Artificial
  Synthetic oligonucleotide
ggggcatccccacagttggcacaattagctgttgttatttgcactagtaaagttgagaga

SEQ ID NO: 35904 - DNA, 60 bp, Artificial
  Synthetic oligonucleotide
tggcatgctgttaaccaagagatgtggaagagcatgtttaatttgcatgagcatttactg

SEQ ID NO: 35905 - DNA, 60 bp, Artificial
  Synthetic oligonucleotide
gctatgacaatgcaatctccattacaacttagattcaggatgcaggcaaagcagcacatg

SEQ ID NO: 35906 - DNA, 60 bp, Artificial
  Synthetic oligonucleotide
gatgtgttaggttataagagtgtattgcagatgcaggcaaataggcgagcatattcaggg

SEQ ID NO: 35907 - DNA, 60 bp, Artificial
  Synthetic oligonucleotide
tacaagcatacaagacgtgatggggataggtatgttttgggtcttttcaagttcttaatg

SEQ ID NO: 35908 - DNA, 60 bp, Artificial
  Synthetic oligonucleotide
tagaagtctggagatggtgcaaagctaatgatcagaatgtaaatgactggttaaatgcac

SEQ ID NO: 35909 - DNA, 60 bp, Artificial
  Synthetic oligonucleotide
gttggtgaggtaacaatgagtctagctaatcctcgtaaaactacaggtgtagatgagttg

SEQ ID NO: 35910 - DNA, 60 bp, Artificial
  Synthetic oligonucleotide
caatagctcttgatgatatagactttgagcagatcaatcttgatgaggacatccaacatt

SEQ ID NO: 35911 - DNA, 60 bp, Artificial
  Synthetic oligonucleotide
atgatcatggtggggtaatattgttcatccttccttcaaagtctttagaggttgtcggat

SEQ ID NO: 35912 - DNA, 60 bp, Artificial
  Synthetic oligonucleotide
gcctagcacaaaataataaggtacgattctactctaaagtgcgtcttcttggcctcactg

SEQ ID NO: 35913 - DNA, 56 bp, Artificial
  Synthetic oligonucleotide
ccacttggtttcaatattacacagaagaccaagggcattttccattacaacatgca

SEQ ID NO: 35914 - DNA, 60 bp, Artificial
  Synthetic oligonucleotide
agtgcgtcttcttggcctcactgtcgatcactcaactgtaggtgcaagtggagtttatcc

SEQ ID NO: 35915 - DNA, 60 bp, Artificial
  Synthetic oligonucleotide
gttcttcattgtttggggctgcagtgtcactgctgtttaggcgtatttgggcagagttat

SEQ ID NO: 35916 - DNA, 60 bp, Artificial
  Synthetic oligonucleotide
cctacacggaaatctaaatgaggaggctaaaatacatcttgagactgtagagtgggcaag

SEQ ID NO: 35917 - DNA, 60 bp, Artificial
  Synthetic oligonucleotide
ggtaacgaaggcccatgtacccatacctttaggaggtgatggctcaatgtctattatgga

SEQ ID NO: 35918 - DNA, 60 bp, Artificial
  Synthetic oligonucleotide
gatcacatttgatgttgtggctgtaaagacggatggttcaaacatatcaactcaatggcc

SEQ ID NO: 35919 - DNA, 60 bp, Artificial
  Synthetic oligonucleotide
ggtgtgggatgagatttaagacagagcaagtaagtcatacgaggagtttggttttattca

SEQ ID NO: 35920 - DNA, 60 bp, Artificial
  Synthetic oligonucleotide
gtgccgtgtatagtcttcaagcattgtgctttgcgtacaggtttaaggactaagcaagct

SEQ ID NO: 35921 - DNA, 60 bp, Artificial
  Synthetic oligonucleotide
ggctttagttaacccaagaaatgttctcaatttggacggaatagaagagacttcagaagg

SEQ ID NO: 35922 - DNA, 60 bp, Artificial
  Synthetic oligonucleotide
tgttatagtggaaggcaacgtagagggcacagcagaatcaatttgtagctattggcttcg

SEQ ID NO: 35923 - DNA, 60 bp, Artificial
  Synthetic oligonucleotide
gcgtgagaaggatcaagctattcagaatccaattactgctgttatagggtataaatatgc

SEQ ID NO: 35924 - DNA, 60 bp, Artificial
  Synthetic oligonucleotide
tgaaggaaggtgtgtatagagagctgggtttagatataggtcttcctgaggtgttgaagc

SEQ ID NO: 35925 - DNA, 60 bp, Artificial
  Synthetic oligonucleotide
atggaaagatttcttgaacgaagttaggtgtgaagtggtacctacaaaacatgtccatcg

SEQ ID NO: 35926 - DNA, 60 bp, Artificial
  Synthetic oligonucleotide
tagctgcagcagacagttttgcaactaagtacaatcccacagaaaaggacttagatctgt

SEQ ID NO: 35927 - DNA, 60 bp, Artificial
  Synthetic oligonucleotide
gtcaacctgagattacgaatttaattcaatattgcaagcactggctcacagaagatcatg

SEQ ID NO: 35928 - DNA, 60 bp, Artificial
  Synthetic oligonucleotide
tcacagactaatccaaacgttattgacatgtatgaacagacaaagcagcacaaagctcaa

SEQ ID NO: 35929 - DNA, 60 bp, Artificial
  Synthetic oligonucleotide
gactgcattagagaaggcattacgatgggcttcaggatcatcagaggtcataacaagcac

SEQ ID NO: 35930 - DNA, 60 bp, Artificial
  Synthetic oligonucleotide
ggtcaccaggagataattcggcaaagtttaagagattcacacaggcattatatgatggct

SEQ ID NO: 35931 - DNA, 60 bp, Artificial
  Synthetic oligonucleotide
gtcaagaggttgtggagttaagtgcagaagaactcaacaagtatttacaagcaaaaagtc

SEQ ID NO: 35932 - DNA, 60 bp, Artificial
  Synthetic oligonucleotide
cttatttaccatcaactattagctctgaccagtgtgacacaagaattggctgtttggagg

SEQ ID NO: 35933 - DNA, 60 bp, Artificial
  Synthetic oligonucleotide
gtcagtgaaggaaccaggtacattcaaattaggactttctcaactaaatccgatgtctaa

SEQ ID NO: 35934 - DNA, 60 bp, Artificial
  Synthetic oligonucleotide
gaaacagagttctttatgtccagaaaacttcatcgctatatagattctatggatgagcat

SEQ ID NO: 35935 - DNA, 60 bp, Artificial
  Synthetic oligonucleotide
gggcttctgcattagaatgtttagatttgcttgaccgtctttatgcagtcagacatgatg

SEQ ID NO: 35936 - DNA, 60 bp, Artificial
  Synthetic oligonucleotide
tcacaggtgccttaattgagtttatcgaggtaacagtgactgcagatgttgctaaaggta

SEQ ID NO: 35937 - DNA, 60 bp, Artificial
  Synthetic oligonucleotide
gaaaattccaagttgtgtttaatcctccttggggagatataaacaagtgtggcaaatcag

SEQ ID NO: 35938 - DNA, 60 bp, Artificial
  Synthetic oligonucleotide
aaattccaagttgtgtttaatcctccttggggagatataaacaagtgtggcaaatcaggc

SEQ ID NO: 35939 - DNA, 60 bp, Artificial
  Synthetic oligonucleotide
caaacgacagctggcagaccttattgcagctcagaaattggcttcaaaacctattgatcc

SEQ ID NO: 35940 - DNA, 60 bp, Artificial
  Synthetic oligonucleotide
cagtctcttggctggtgaaggccctgattgatagcatcggcaatagtttcttcccggggc

SEQ ID NO: 35941 - DNA, 60 bp, Artificial
  Synthetic oligonucleotide
tgcataaggagtggccgcactcgaggaactggcgctgtaaccccacttggtgttgggggg

SEQ ID NO: 35942 - DNA, 60 bp, Artificial
  Synthetic oligonucleotide
gtcaggtgaccgacaggtggaggagtggccaaaagcaacctgcacaggtgactgtccaga

SEQ ID NO: 35943 - DNA, 60 bp, Artificial
  Synthetic oligonucleotide
ttgctacatactcttgctaaccaaacatgctccaactattgcaccttcagctacctttta

SEQ ID NO: 35944 - DNA, 60 bp, Artificial
  Synthetic oligonucleotide
ttctgttttggttcagttttggctatgtcatcacatgtgtagtgtgcaaggtgctcttct

SEQ ID NO: 35945 - DNA, 60 bp, Artificial
  Synthetic oligonucleotide
tgttggggggtgggaactggctgcacctgctgtgggctagatgtaaaggatctcttcaca

SEQ ID NO: 35946 - DNA, 60 bp, Artificial
  Synthetic oligonucleotide
cttgggatgcccaaatattccattgctaggtcaaacggctatatatgtctgtagaatgtc

SEQ ID NO: 35947 - DNA, 60 bp, Artificial
  Synthetic oligonucleotide
agctgtgaactgatgatacccaaaggcactggggatatattggtggactgctcaggaggg

SEQ ID NO: 35948 - DNA, 60 bp, Artificial
  Synthetic oligonucleotide
tccagaaagatgtggctgcacttcatcaacctgcctgcataaggagtggccgcactcgag

SEQ ID NO: 35949 - DNA, 60 bp, Artificial
  Synthetic oligonucleotide
gagtcacacaaatgctactgcagtctattttgctgtccttactgtagggcctgctcatcg

SEQ ID NO: 35950 - DNA, 60 bp, Artificial
  Synthetic oligonucleotide
actgcaactacaacatatgcccttactgtgcatccagactgacctcagatggcctcgtca

SEQ ID NO: 35951 - DNA, 60 bp, Artificial
  Synthetic oligonucleotide
cacaggggtgacacaacacaaccgtgctgcattcatcaacatgcttaacattgagactga

SEQ ID NO: 35952 - DNA, 58 bp, Artificial
  Synthetic oligonucleotide
ttcattcaaaaagggtcacagcacacggagacacccctcagttggacctaaaagcgag

SEQ ID NO: 35953 - DNA, 60 bp, Artificial
  Synthetic oligonucleotide
gccgagcacgaccatcaatacaccggacacacaggtcaccacagacagtggttctggtga

SEQ ID NO: 35954 - DNA, 60 bp, Artificial
  Synthetic oligonucleotide
gcagctctggcatctcctgcaaagttaggattcatgtaaatgaaccggatgaattcacag

SEQ ID NO: 35955 - DNA, 60 bp, Artificial
  Synthetic oligonucleotide
ggttctggtgaatccagcacagacccccagaccaccaacggagaagtaccttccacttct

SEQ ID NO: 35956 - DNA, 60 bp, Artificial
  Synthetic oligonucleotide
gagcatactcattgaacacaaaggaacgattattggcaagcagaatgacacctgtccaac

SEQ ID NO: 35957 - DNA, 60 bp, Artificial
  Synthetic oligonucleotide
ctgctcatcaccatcctggcttaacttctcttagacctaaccttgactgcgtgccgccac

SEQ ID NO: 35958 - DNA, 60 bp, Artificial
  Synthetic oligonucleotide
gtaacagccataccaacccaaggcatcaccaccagcaacacttcgaaacagactgacact

SEQ ID NO: 35959 - DNA, 60 bp, Artificial
  Synthetic oligonucleotide
gtcaactgacaaggatcatagcaagcttgagatcaacgtgcttctaccacaagttgctgt

SEQ ID NO: 35960 - DNA, 60 bp, Artificial
  Synthetic oligonucleotide
cctggtgatctgtgtggttagtacctctgctgtcgacatggaaaatttaccggcaggcat

SEQ ID NO: 35961 - DNA, 60 bp, Artificial
  Synthetic oligonucleotide
gactcaggctatttctctgctaaatgttatccaagggcatcgaactcaggattgcagcta

SEQ ID NO: 35962 - DNA, 60 bp, Artificial
  Synthetic oligonucleotide
ggattgcagctaattaatgtcacacaacattcagtgaaaatagctaacacaccaggcccc

SEQ ID NO: 35963 - DNA, 60 bp, Artificial
  Synthetic oligonucleotide
gcactattcaccaactgcgttatcaaaggaagagaggtccgaagagggcagtcagctctg

SEQ ID NO: 35964 - DNA, 60 bp, Artificial
  Synthetic oligonucleotide
gctgcatcagtgatgaccacaaccagagagacaacaaccatgagcagtccaacaacagtc

SEQ ID NO: 35965 - DNA, 60 bp, Artificial
  Synthetic oligonucleotide
agaagttgcagatttagaactgcacacgaagaaaattgaagtgtcgggtctgaaattcgc

SEQ ID NO: 35966 - DNA, 60 bp, Artificial
  Synthetic oligonucleotide
ggtctcgtcaggcacgtaactcaatgtcccaaacggaaagagaaggtcgaagaaactgaa

SEQ ID NO: 35967 - DNA, 60 bp, Artificial
  Synthetic oligonucleotide
gggcactcaatccacaagatagaatcgcacctcaacacctcatggatgtcatgggatggg

SEQ ID NO: 35968 - DNA, 60 bp, Artificial
  Synthetic oligonucleotide
ccttggttggtaagaaagctcctacaagtgtcggagtcaacaggagtggctctgaagaga

SEQ ID NO: 35969 - DNA, 60 bp, Artificial
  Synthetic oligonucleotide
gctgactgtttcaatgtcaccagttcagtccgcaccggtaggccacaaaagggcagttga

SEQ ID NO: 35970 - DNA, 60 bp, Artificial
  Synthetic oligonucleotide
aaacactcaccgtttctgttatggatctgtctcaaatgtattctcctgttttcgagtacc

SEQ ID NO: 35971 - DNA, 60 bp, Artificial
  Synthetic oligonucleotide
gaaaagcttgttgaactccacaagtttagaaacgagcttgtcaattgaagctccatgggg

SEQ ID NO: 35972 - DNA, 60 bp, Artificial
  Synthetic oligonucleotide
aactcctacacctgacgcaagaagaagattctgaaggtctacttgaatggtgtacgcggg

SEQ ID NO: 35973 - DNA, 60 bp, Artificial
  Synthetic oligonucleotide
catgctgagtgggatcttcggtaatgttttcttaggcatgctcctgtttcttgctccttt

SEQ ID NO: 35974 - DNA, 60 bp, Artificial
  Synthetic oligonucleotide
gcacaaggtttaacctaggccctgtgacaataactctatcagaaccaaggaacgtacagc

SEQ ID NO: 35975 - DNA, 60 bp, Artificial
  Synthetic oligonucleotide
acagaaggtaatgtctgcaagcacggtttgtaagctgcaaagctgtactcatggtgtgcc

SEQ ID NO: 35976 - DNA, 60 bp, Artificial
  Synthetic oligonucleotide
ctgtagaaggactagaaagctgctaaagtataagcaccttagggacgaagaagagagtgg

SEQ ID NO: 35977 - DNA, 60 bp, Artificial
  Synthetic oligonucleotide
ggcttgcagacagaaagattgccgaactcttttcaactaaaactcatataggttgacgaa

SEQ ID NO: 35978 - DNA, 60 bp, Artificial
  Synthetic oligonucleotide
cccacagccaagcctttcaggtcatactatgccaaagggtctctaacctttgactcaggc

SEQ ID NO: 35979 - DNA, 60 bp, Artificial
  Synthetic oligonucleotide
gaatcgggcaaacatttacaggctcgagaagattgcttgcagagggggggagcaatgatt

SEQ ID NO: 35980 - DNA, 60 bp, Artificial
  Synthetic oligonucleotide
agtgttccagttaaatgcaaacaggggttctgcctcaaaataactcaggaaggtaggggc

SEQ ID NO: 35981 - DNA, 60 bp, Artificial
  Synthetic oligonucleotide
tcaatgccgcaaaggccaaggctgctctctcgcgtaagccagagaggaaagctaatccta

SEQ ID NO: 35982 - DNA, 60 bp, Artificial
  Synthetic oligonucleotide
tcaatgccgcaaaagccaaggctgctctctcgcgtaagccagagaggaaagctaatccta

SEQ ID NO: 35983 - DNA, 60 bp, Artificial
  Synthetic oligonucleotide
gttaggatcttcttcctcaatgccgcaaaggccaaggctgctctctcgcgtaagccagag

SEQ ID NO: 35984 - DNA, 60 bp, Artificial
  Synthetic oligonucleotide
ccttgctgcagttaggatcttcttcctcaatgctgcaaaggccaaggctgctctctcgcg

SEQ ID NO: 35985 - DNA, 60 bp, Artificial
  Synthetic oligonucleotide
caaccttgctgcagttaggatcttcttcctcaatgctgcaaaggccaaggctgctctctc

SEQ ID NO: 35986 - DNA, 60 bp, Artificial
  Synthetic oligonucleotide
caaccttgctgcagttaggatcttcttcctcaatgccgcaaaggccaaggctgctctctc

SEQ ID NO: 35987 - DNA, 60 bp, Artificial
  Synthetic oligonucleotide
caatcttgctgcagttaggatcttcttcctcaatgccgcaaaggccaaggctgctctctc

SEQ ID NO: 35988 - DNA, 60 bp, Artificial
  Synthetic oligonucleotide
atcaattaaccttgctgcagttaggatcttcttcctcaatgccgcaaaggccaaggctgc

SEQ ID NO: 35989 - DNA, 60 bp, Artificial
  Synthetic oligonucleotide
tagtagtagactccctaaagagcactacactaaagatggcaacattagaggaactccaaa

SEQ ID NO: 35990 - DNA, 60 bp, Artificial
  Synthetic oligonucleotide
agtagtaggctccctaaagagcactacactaaagatggcaacattagaggaactccaaaa

SEQ ID NO: 35991 - DNA, 60 bp, Artificial
  Synthetic oligonucleotide
tagtagtaggctccctaaagagcactacactaaagatggcaacattagaggaactccaaa

SEQ ID NO: 35992 - DNA, 60 bp, Artificial
  Synthetic oligonucleotide
gactccctaaagagcactacactaaagatggcaacattagaggaactccaaaaggaaatc

SEQ ID NO: 35993 - DNA, 60 bp, Artificial
  Synthetic oligonucleotide
tttaggacgtcaccttaagtgacttttttctgtatatatggatgtagatttcatttgatc

SEQ ID NO: 35994 - DNA, 60 bp, Artificial
  Synthetic oligonucleotide
gatgtcaccttaagtgacttttttctgtatatatggatgtagatttcatctgatctgtac

SEQ ID NO: 35995 - DNA, 60 bp, Artificial
  Synthetic oligonucleotide
tgtcaccttaagtgacttttttctgtatatatggatgtagatttcatttgatctgtacta

SEQ ID NO: 35996 - DNA, 60 bp, Artificial
  Synthetic oligonucleotide
tttcctgggaacaggaacagtccagttccagacgatggtcttaccctccacagactcagt

SEQ ID NO: 35997 - DNA, 60 bp, Artificial
  Synthetic oligonucleotide
cctggcaaccggaacagtccagttccagacgatggtcttaccctccacagactcagtgga

SEQ ID NO: 35998 - DNA, 60 bp, Artificial
  Synthetic oligonucleotide
ttaatacaaattttcctggcaaccggaacagtccagttccagacgatggtcttaccctcc

SEQ ID NO: 35999 - DNA, 60 bp, Artificial
  Synthetic oligonucleotide
attttcctggcaaccggaacagtccagttccagacgatggtcttaccctccacagactca

SEQ ID NO: 36000 - DNA, 60 bp, Artificial
  Synthetic oligonucleotide
ttttcctggcaacaggaacagtccagttccagacgatggtcttaccctccacagactcag

SEQ ID NO: 36001 - DNA, 60 bp, Artificial
  Synthetic oligonucleotide
gtccagttccagacgatggtcttaccctccacagactcagtggattccttgccaggtact

SEQ ID NO: 36002 - DNA, 60 bp, Artificial
  Synthetic oligonucleotide
ggaacaggaacagtccagttccagacgatggtcttaccctccacagactcagtggattcc

SEQ ID NO: 36003 - DNA, 60 bp, Artificial
  Synthetic oligonucleotide
cctggcaacaggaacagtccagttccagacgatggtcttaccctccacagactcagtgga

SEQ ID NO: 36004 - DNA, 60 bp, Artificial
  Synthetic oligonucleotide
cctgggaacaggaacagtccagttccagacgatggtcttaccctccacagactcagtgga

SEQ ID NO: 36005 - DNA, 54 bp, Artificial
  Synthetic oligonucleotide
tttactacctcaacatactgatttcttgattgcttttcaaggagtctactacta

SEQ ID NO: 36006 - DNA, 60 bp, Artificial
  Synthetic oligonucleotide
gtacacaaaattctacctcaataagctgatttcttgattgcttttcaaggagtctactac

SEQ ID NO: 36007 - DNA, 55 bp, Artificial
  Synthetic oligonucleotide
aaattctacctcaataagctgatttcttgattgcttttcaaggagtctactacta

SEQ ID NO: 36008 - DNA, 60 bp, Artificial
  Synthetic oligonucleotide
tagtagtagactccttgaaaagctactacgagaacgactggaatgagtgacttaaaggaa

SEQ ID NO: 36009 - DNA, 60 bp, Artificial
  Synthetic oligonucleotide
cttgacagatatccaagaggatataacccgccatgaacagcagcttgttgttgccagaca

SEQ ID NO: 36010 - DNA, 60 bp, Artificial
  Synthetic oligonucleotide
gcattttcctggaacccagtccattccactgcctgactacggacttaccatacataggtt

SEQ ID NO: 36011 - DNA, 60 bp, Artificial
  Synthetic oligonucleotide
aaacagagcaggtatgttcaatccataagctgccaatagtggtaattccatcacctttgc

SEQ ID NO: 36012 - DNA, 60 bp, Artificial
  Synthetic oligonucleotide
ggtagaggaccaccaatacatagcatcatcctaagagcacatgaatcaaacagagcaggt

SEQ ID NO: 36013 - DNA, 60 bp, Artificial
  Synthetic oligonucleotide
aataagctaatgggaaaataattggtgcaaggcctttaatgctggataagagtggtagag

SEQ ID NO: 36014 - DNA, 51 bp, Artificial
  Synthetic oligonucleotide
gagaagcagaaagaactttagctactttgcaaacctgttcataagtggaga

SEQ ID NO: 36015 - DNA, 60 bp, Artificial
  Synthetic oligonucleotide
agtggtagaggaccaccaatacatagcatcatcctaagagcacatgaatcaaacagagca

SEQ ID NO: 36016 - DNA, 60 bp, Artificial
  Synthetic oligonucleotide
ggaaaataattggtgcaaggcctttaatgctggataagagtggtagaggaccaccaatac

SEQ ID NO: 36017 - DNA, 60 bp, Artificial
  Synthetic oligonucleotide
caatttgacagcttgtttaaacaatgtgttcagatcctccttaaactctatttgagaagc

SEQ ID NO: 36018 - DNA, 60 bp, Artificial
  Synthetic oligonucleotide
cttaagtgagatagaactagcagtaccaggattgctttcactgagcaatttgacagcttg

SEQ ID NO: 36019 - DNA, 56 bp, Artificial
  Synthetic oligonucleotide
tttgagaagcagaaagaactttagctactttgcaaacctgttcataagtggagaaa

SEQ ID NO: 36020 - DNA, 60 bp, Artificial
  Synthetic oligonucleotide
gcttgtttaaacaatgtgttcagatcctccttaaactctatttgagaagcagaaagaact

SEQ ID NO: 36021 - DNA, 60 bp, Artificial
  Synthetic oligonucleotide
gcagtcccaccagccaagagttctctaattttcttctcggtaagttgcctgacgttagac

SEQ ID NO: 36022 - DNA, 60 bp, Artificial
  Synthetic oligonucleotide
tttcaacatctgcagtcccaccagccaagagttctctaattttcttctcggtaagttgcc

SEQ ID NO: 36023 - DNA, 58 bp, Artificial
  Synthetic oligonucleotide
aactgaatccgggagttgaatcctcagtttcaatttcaacatctgcagtcccaccagc

SEQ ID NO: 36024 - DNA, 60 bp, Artificial
  Synthetic oligonucleotide
ctcatagaatgtcttgaaactgaatccgggagttgaatcctcagtttcaatttcaacatc

SEQ ID NO: 36025 - DNA, 60 bp, Artificial
  Synthetic oligonucleotide
gtaagttgcctgacgttagacatggtgtttactatggaaacgtctgatatgatgacttta

SEQ ID NO: 36026 - DNA, 60 bp, Artificial
  Synthetic oligonucleotide
cactaaaggctttgtccatgtacttgacttgctcatcatatttcttaagtgagatagaac

SEQ ID NO: 36027 - DNA, 60 bp, Artificial
  Synthetic oligonucleotide
tatttcttaagtgagatagaactagcagtaccaggattgctttcactgagcaatttgaca

SEQ ID NO: 36028 - DNA, 60 bp, Artificial
  Synthetic oligonucleotide
cagacaaattagcactaaaggctttgtccatgtacttgacttgctcatcatatttcttaa

SEQ ID NO: 36029 - DNA, 60 bp, Artificial
  Synthetic oligonucleotide
ttcagaatattaagacagtttgtgaaagtcatttcaacgcttttgttgttctcatagaat

SEQ ID NO: 36030 - DNA, 60 bp, Artificial
  Synthetic oligonucleotide
gacagtttgtgaaagtcatttcaacgcttttgttgttctcatagaatgtcttgaaactga

SEQ ID NO: 36031 - DNA, 60 bp, Artificial
  Synthetic oligonucleotide
cttaactcttatcaaagcttctgtcctcttaaaagtccagtcctctggaccaacattagc

SEQ ID NO: 36032 - DNA, 52 bp, Artificial
  Synthetic oligonucleotide
ccagtcctctggaccaacattagcatctgtagaaacaatagttttctcacag

SEQ ID NO: 36033 - DNA, 60 bp, Artificial
  Synthetic oligonucleotide
ccagtcctctggaccaacattagcatctgtagaaacaatagttttctcacagaacttata

SEQ ID NO: 36034 - DNA, 60 bp, Artificial
  Synthetic oligonucleotide
agaacttatactttccacttttgcaagcggcaaaaatctgctttctacacttcagaatat

SEQ ID NO: 36035 - DNA, 60 bp, Artificial
  Synthetic oligonucleotide
gttcaatccataagctgccaatagtggtaattccatcacctttgcatacatctcttgcct

SEQ ID NO: 36036 - DNA, 60 bp, Artificial
  Synthetic oligonucleotide
tcacctttgcatacatctcttgcctggcaacttcattcttgctcttttctaccatattga

SEQ ID NO: 36037 - DNA, 60 bp, Artificial
  Synthetic oligonucleotide
cctttgcatacatctcttgcctggcaacttcattcttgctcttttctaccatattgatca

SEQ ID NO: 36038 - DNA, 60 bp, Artificial
  Synthetic oligonucleotide
accatattgatcatcttaactcttatcaaagcttctgtcctcttaaaagtccagtcctct

SEQ ID NO: 36039 - DNA, 60 bp, Artificial
  Synthetic oligonucleotide
gtcttcattttttccataaggtaataagggttttcagagtggtcttcaaaaaattcatac

SEQ ID NO: 36040 - DNA, 60 bp, Artificial
  Synthetic oligonucleotide
tcttattttattgtcaccactaatggatatggcctctgaagggtcactttgggcaacatg

SEQ ID NO: 36041 - DNA, 60 bp, Artificial
  Synthetic oligonucleotide
atcctatccataaccttaatcaagtgatgatcatataaagattcccacaaacccttagta

SEQ ID NO: 36042 - DNA, 60 bp, Artificial
  Synthetic oligonucleotide
gtaagggactcctgaccctcctgtgtttagcccatctcctttaaaagccaaaactagcat

SEQ ID NO: 36043 - DNA, 60 bp, Artificial
  Synthetic oligonucleotide
ctatttgctctttcagttgtatggctacttatgctagatgctcatgtaaaaatatttttg

SEQ ID NO: 36044 - DNA, 60 bp, Artificial
  Synthetic oligonucleotide
gttgagtagatcttcaaagaaggaacactagtgcttactttccctaatctgcttccggca

SEQ ID NO: 36045 - DNA, 60 bp, Artificial
  Synthetic oligonucleotide
ggcctgggtttaggaaaactgtttggctctgtttggatcgtatcacattacctttgtcaa

SEQ ID NO: 36046 - DNA, 60 bp, Artificial
  Synthetic oligonucleotide
tcaaatctagttatgtctgggaaaatagcttgcatcttatcagaaatgtacacagcagtg

SEQ ID NO: 36047 - DNA, 63 bp, Artificial
  Synthetic oligonucleotide
ccatgatgtatctgttgatatcttcaaatgtcattctaccgtataatgttttgtctgtcaagc

SEQ ID NO: 36048 - DNA, 60 bp, Artificial
  Synthetic oligonucleotide
tgcacatttgacataaaatgaaatgattcttctttactgtaaatgcttgacattaatgcc

SEQ ID NO: 36049 - DNA, 60 bp, Artificial
  Synthetic oligonucleotide
caagcaacctattttgggctgttatcatgtaattgcaagctttcactgctctctggcatc

SEQ ID NO: 36050 - DNA, 60 bp, Artificial
  Synthetic oligonucleotide
cttaggttctacattcagattcacacaagaggatctatacccattaaatctatcagcaat

SEQ ID NO: 36051 - DNA, 60 bp, Artificial
  Synthetic oligonucleotide
ggtaggaatcctgcatatctcatgaagtcaaagattcccatcctgctaagctttgtgact

SEQ ID NO: 36052 - DNA, 60 bp, Artificial
  Synthetic oligonucleotide
agagttctaagcaaacctttcaagattgccaaattttttggactcaaatcttccagtgat

SEQ ID NO: 36053 - DNA, 60 bp, Artificial
  Synthetic oligonucleotide
ttatcatgtctgataagcttctttgcgtgggtgaatgaagataaatccaaactcacataa

SEQ ID NO: 36054 - DNA, 60 bp, Artificial
  Synthetic oligonucleotide
aatcctggtgaaccttctacaactggtatccatttttctgtttgaaaccagcggaaattg

SEQ ID NO: 36055 - DNA, 60 bp, Artificial
  Synthetic oligonucleotide
ccttctagacctttccctaaattcattatagattccatgtctatgtccatgatgttatgg

SEQ ID NO: 36056 - DNA, 60 bp, Artificial
  Synthetic oligonucleotide
gttataatcttggtttcctagttccaccatatcagtgcaaggtgaccaagtgacagaaaa

SEQ ID NO: 36057 - DNA, 60 bp, Artificial
  Synthetic oligonucleotide
gacctttggtgagcaacccaatggctgtttcattagtcccaaatttctcttgtgaattcc

SEQ ID NO: 36058 - DNA, 60 bp, Artificial
  Synthetic oligonucleotide
gttcaggacaccgtttatagaaaataactcgttgtcttggaacatcttttgttttggata

SEQ ID NO: 36059 - DNA, 60 bp, Artificial
  Synthetic oligonucleotide
cctgtctaatgccaatttctcagtagattgacttgacaattgattcctctttgcagggct

SEQ ID NO: 36060 - DNA, 57 bp, Artificial
  Synthetic oligonucleotide
ctttatcattatttcatgcacctcctccatctcatttgcgggagctattttctcata

SEQ ID NO: 36061 - DNA, 60 bp, Artificial
  Synthetic oligonucleotide
taacagaattttctattaataatcttgctttgtaattgttcattctgaataaattgttgt

SEQ ID NO: 36062 - DNA, 60 bp, Artificial
  Synthetic oligonucleotide
ccagctcaccgaacatatcatgtctagctaattcagtttcaagatatttctgctcaagga

SEQ ID NO: 36063 - DNA, 60 bp, Artificial
  Synthetic oligonucleotide
gggtgtctgcataaaattctctaacaacagtaggagttgtgccaattatccggcctatgt

SEQ ID NO: 36064 - DNA, 60 bp, Artificial
  Synthetic oligonucleotide
atttgtccaatgactaaaaaatatgtctttagagccgaactcttcacccagtatgctcct

SEQ ID NO: 36065 - DNA, 60 bp, Artificial
  Synthetic oligonucleotide
ttgtcatcggaatggacaatccatcttgtttggaactcacactttttgtaactttcaagc

SEQ ID NO: 36066 - DNA, 60 bp, Artificial
  Synthetic oligonucleotide
tgtttccactgttaaaggatggttattccgaatgaacttagatgtttttgatttacctgt

SEQ ID NO: 36067 - DNA, 60 bp, Artificial
  Synthetic oligonucleotide
cttaatccattcttgtgatttgctagttctttccacttttataccacctgtgcttatgtc

SEQ ID NO: 36068 - DNA, 60 bp, Artificial
  Synthetic oligonucleotide
ttctcaagctcactagattcaatatagaatcactattatggcaagactcgcaagctttga

SEQ ID NO: 36069 - DNA, 50 bp, Artificial
  Synthetic oligonucleotide
gtgcaccagtagctctgtaacttttgaagccagaagcatcattcactaga

SEQ ID NO: 36070 - DNA, 60 bp, Artificial
  Synthetic oligonucleotide
gttctcatcagcccaacattttcaacagtcgatgcgtagtaatcagaaagagattttaag

SEQ ID NO: 36071 - DNA, 65 bp, Artificial
  Synthetic oligonucleotide
ctctgtcatttaatggtgctattaaaatagtttcagggttctttatcattatttcatgcacctcc

SEQ ID NO: 36072 - DNA, 60 bp, Artificial
  Synthetic oligonucleotide
cattggcaactttcagcaatttaggagtcggatttacttttgcaataagcttaccatcag

SEQ ID NO: 36073 - DNA, 60 bp, Artificial
  Synthetic oligonucleotide
gcttaccatcagttgttgttcttagacaagcttggcctgggtttaggaaaactgtttggc

SEQ ID NO: 36074 - DNA, 60 bp, Artificial
  Synthetic oligonucleotide
tccagattcacacctgctttcttgcatatcctcatggtatcattaatttcacctggtaac

SEQ ID NO: 36075 - DNA, 60 bp, Artificial
  Synthetic oligonucleotide
ctaatgtcttaagagtagcacctgtgattgggcattttatgttcaaatttgtgattcccc

SEQ ID NO: 36076 - DNA, 60 bp, Artificial
  Synthetic oligonucleotide
catcataagtcatttttgtatcagaatctgggtttatgaaggttctagcttttgatctta

SEQ ID NO: 36077 - DNA, 60 bp, Artificial
  Synthetic oligonucleotide
ctgtttgaaaccagcggaaattgtagttatctcttctcctggcttcacatggataaatgt

SEQ ID NO: 36078 - DNA, 60 bp, Artificial
  Synthetic oligonucleotide
atgatggacctaatagtgacaatgattccacatttgcagttaaccatccacctagatttg

SEQ ID NO: 36079 - DNA, 60 bp, Artificial
  Synthetic oligonucleotide
tatagtcagaaccatatattgaatacatcacaactaatcctggtgaaccttctacaactg

SEQ ID NO: 36080 - DNA, 60 bp, Artificial
  Synthetic oligonucleotide
cccctatcacatcattctcatgatcaataaccacaggttttgcacttgtacttaaattta

SEQ ID NO: 36081 - DNA, 60 bp, Artificial
  Synthetic oligonucleotide
aaaatgtctgttggaatgcacacctttttcaatttcacatacatcatcagacaatcaacc

SEQ ID NO: 36082 - DNA, 60 bp, Artificial
  Synthetic oligonucleotide
caatttcacatacatcatcagacaatcaaccattaatgtgcactcacctgatgtcaatat

SEQ ID NO: 36083 - DNA, 60 bp, Artificial
  Synthetic oligonucleotide
aattttctctgatgtccgagttatggagaacaaataatccatcttggatctgtgagcacc

SEQ ID NO: 36084 - DNA, 60 bp, Artificial
  Synthetic oligonucleotide
gtgacgattcagtgcagcaattggctaaatgtctgcaatataggggtataatagctccat

SEQ ID NO: 36085 - DNA, 60 bp, Artificial
  Synthetic oligonucleotide
caattgattcctctttgcagggcttgtgtacagaaataattggcttaacaaaaaatctct

SEQ ID NO: 36086 - DNA, 60 bp, Artificial
  Synthetic oligonucleotide
gaggcaacctaattatttgagtcatcattgtctgaaatttcatccctatatttaaaacat

SEQ ID NO: 36087 - DNA, 60 bp, Artificial
  Synthetic oligonucleotide
gagtccattccacttgtatcacagcttagagttgttagacaggacctgacaagttcagtc

SEQ ID NO: 36088 - DNA, 60 bp, Artificial
  Synthetic oligonucleotide
cttggttcagcctttgcggcctcataatatatacaacatgactaccaaatgagaaatgac

SEQ ID NO: 36089 - DNA, 53 bp, Artificial
  Synthetic oligonucleotide
ttttatctaaactggtctatcccaaaagcgaacaacacacctgaaaactgctg

SEQ ID NO: 36090 - DNA, 60 bp, Artificial
  Synthetic oligonucleotide
aacagatccaatatgctttgttttttatctaaactggtctatcccaaaagcgaacaacac

SEQ ID NO: 36091 - DNA, 60 bp, Artificial
  Synthetic oligonucleotide
cctaacatgccttctgacaagcaggtgattctaaagggtcagggaacaataacagatcca

SEQ ID NO: 36092 - DNA, 60 bp, Artificial
  Synthetic oligonucleotide
accctacaggcaagctcttaatagcattaattgatcctaacatgccttctgacaagcagg

SEQ ID NO: 36093 - DNA, 60 bp, Artificial
  Synthetic oligonucleotide
gtccaaccataccagaccctacaggcaagctcttaatagcattaattgatcctaacatgc

SEQ ID NO: 36094 - DNA, 60 bp, Artificial
  Synthetic oligonucleotide
ggaacctatgagtcagactccatcacagaatcagagggttatgatctagctgcaagaatg

SEQ ID NO: 36095 - DNA, 60 bp, Artificial
  Synthetic oligonucleotide
agctgataaagataagtgttgcactgtcatacccttgaatagagctatccgggctagatc

SEQ ID NO: 36096 - DNA, 60 bp, Artificial
  Synthetic oligonucleotide
agctgataaagataagtgttgcactgttatacccttgaatagagctatccgggctagatc

SEQ ID NO: 36097 - DNA, 60 bp, Artificial
  Synthetic oligonucleotide
gtgttgcactgttatacccttgaatagagctatccgggctagatcccaagcctttattga

SEQ ID NO: 36098 - DNA, 60 bp, Artificial
  Synthetic oligonucleotide
aggaacctatgagtcagactccatcacagaatcagagggttatgatctagctgcaagaat

SEQ ID NO: 36099 - DNA, 60 bp, Artificial
  Synthetic oligonucleotide
ttcattgaccaaacgcaatcccaatgttgaagtctctagatcatggtctcaatctaatga

SEQ ID NO: 36100 - DNA, 60 bp, Artificial
  Synthetic oligonucleotide
gtgttgcactgtcatacccttgaatagagctatccgggctagatcccaagcctttattga

SEQ ID NO: 36101 - DNA, 60 bp, Artificial
  Synthetic oligonucleotide
aatcatcattttatcagtcttatctcaggaggacacaatcaatgggaatacaactggacc

SEQ ID NO: 36102 - DNA, 56 bp, Artificial
  Synthetic oligonucleotide
aaagcaatccgccagcatgcagaaacagcaggctgtagcatgatagaagacattga

SEQ ID NO: 36103 - DNA, 56 bp, Artificial
  Synthetic oligonucleotide
aaagcaatccgtcagcatgcagaaacagcaggctgtagcatgatagaagacattga

SEQ ID NO: 36104 - DNA, 60 bp, Artificial
  Synthetic oligonucleotide
tggatccatacgatttaactgagtttgaaagtattgttaaaggttggggagaatgtgtta

SEQ ID NO: 36105 - DNA, 60 bp, Artificial
  Synthetic oligonucleotide
ccatagacaagatatataaccctgttaatattattctcatgacccgatacatgtccaaac

SEQ ID NO: 36106 - DNA, 60 bp, Artificial
  Synthetic oligonucleotide
ggatgtaaggtatcaggcattacaggcagtcggaaatgtgtggtttaaaatgactcaaca

SEQ ID NO: 36107 - DNA, 60 bp, Artificial
  Synthetic oligonucleotide
aggacaggattgagagtacgacagcctacaaacaaagcattctcaattactatccaggct

SEQ ID NO: 36108 - DNA, 60 bp, Artificial
  Synthetic oligonucleotide
tcgagcatttcctacaggatgaatcagcatatactggagatctcttaattcaaactgagg

SEQ ID NO: 36109 - DNA, 60 bp, Artificial
  Synthetic oligonucleotide
tggtcaccaggcgataattcagcaaaatttagaagatttactcaatctttatatgatggt

SEQ ID NO: 36110 - DNA, 60 bp, Artificial
  Synthetic oligonucleotide
gtcccagaagaatacatatcttatggaggagaaagaaagatactgaacattcaacaggct

SEQ ID NO: 36111 - DNA, 60 bp, Artificial
  Synthetic oligonucleotide
gatgtcaggagcattacaagaagatggtcatctggctgcaagtgttaccctcattgaggc

SEQ ID NO: 36112 - DNA, 60 bp, Artificial
  Synthetic oligonucleotide
gagaaaggactacatggtaatctcacagaagaggctaaaattcaccttgaaacagtggaa

SEQ ID NO: 36113 - DNA, 60 bp, Artificial
  Synthetic oligonucleotide
attggggcaagtggagtttatccctcattaatgtcacgggttgtatataagcattaccgt

SEQ ID NO: 36114 - DNA, 60 bp, Artificial
  Synthetic oligonucleotide
ccgaccaacatcacaggatatggagctctttcaaacacttgttaattgcacattttctaa

SEQ ID NO: 36115 - DNA, 60 bp, Artificial
  Synthetic oligonucleotide
tctccaagcaccatatttaccatcaaccatagcctctgatcaatatgatacaaggttagc

SEQ ID NO: 36116 - DNA, 60 bp, Artificial
  Synthetic oligonucleotide
cacggctgtaattggctacaagtatgctagtaaagtagatgaaatcagtgatgttttgga

SEQ ID NO: 36117 - DNA, 60 bp, Artificial
  Synthetic oligonucleotide
gcatgatcgtttgggagaatttagttttgtaggtaaagttcagtggaaagttttcacccc

SEQ ID NO: 36118 - DNA, 60 bp, Artificial
  Synthetic oligonucleotide
gcaggcaaagcaacacatgaaagtatgtaagttagatggtgaatgggtaacatttaggga

SEQ ID NO: 36119 - DNA, 60 bp, Artificial
  Synthetic oligonucleotide
gcaagtcaattcttcacgtagtgtagtattgtttaagacagaaagtggttttgaatgggg

SEQ ID NO: 36120 - DNA, 60 bp, Artificial
  Synthetic oligonucleotide
gaggtgcacttgaagcaatgttcaacttaaaatttcatgttacaggccctaaagtgagaa

SEQ ID NO: 36121 - DNA, 60 bp, Artificial
  Synthetic oligonucleotide
ggctataagaactgatggatcaaatatctcaacacagtggcctagcaggaggaatgaagg

SEQ ID NO: 36122 - DNA, 60 bp, Artificial
  Synthetic oligonucleotide
gcttatgagggagggtgtctacagagaattgggtcttgatatcagtcagccgaatgtgct

SEQ ID NO: 36123 - DNA, 60 bp, Artificial
  Synthetic oligonucleotide
agagagagtgctaccagaagatgtacttccagactccctcttttcatttagacatgctga

SEQ ID NO: 36124 - DNA, 60 bp, Artificial
  Synthetic oligonucleotide
cggtaccttattccagcagttacatctacatattctggctttgaaccattaattaggaag

SEQ ID NO: 36125 - DNA, 60 bp, Artificial
  Synthetic oligonucleotide
gcaaatacaagctaataggagagcatattcagggaagcagtatgatgcctattgtgtgca

SEQ ID NO: 36126 - DNA, 60 bp, Artificial
  Synthetic oligonucleotide
ataacgggaaatctaatagagtttattgaggtaacagtgactgctgatgtggcgagaggt

SEQ ID NO: 36127 - DNA, 60 bp, Artificial
  Synthetic oligonucleotide
gccgaatgtgctaaagaaagttgcaccattgttgtataagtctgggaagtcaagaattgt

SEQ ID NO: 36128 - DNA, 60 bp, Artificial
  Synthetic oligonucleotide
gtgcaagggaatgtagagggtacagctgaatcaatttgtagttattggttgaagactatg

SEQ ID NO: 36129 - DNA, 60 bp, Artificial
  Synthetic oligonucleotide
ggaacaatggatagattcattctgttcaagaggagtgttacctgtggatcctgaaatcca

SEQ ID NO: 36130 - DNA, 60 bp, Artificial
  Synthetic oligonucleotide
gggacgttcaagttaaatttgtccagtatggatcctaagtcaaaggcattgatcgatgtc

SEQ ID NO: 36131 - DNA, 60 bp, Artificial
  Synthetic oligonucleotide
ctgaatctcttattgcacatgcagggcttaaaaggtctaaatattggtctgctcacggct

SEQ ID NO: 36132 - DNA, 60 bp, Artificial
  Synthetic oligonucleotide
ggccttattgatgtagataatcttgattctaaagtagagattgatggtgtttcatggtgt

SEQ ID NO: 36133 - DNA, 60 bp, Artificial
  Synthetic oligonucleotide
gggcacttccctctccagcatgcgttgcgatctgtctttgcattccattttcttctctcc

SEQ ID NO: 36134 - DNA, 60 bp, Artificial
  Synthetic oligonucleotide
ctccatgagcatattttattgatgggttctataaaaatatcacccaagaagacaacagta

SEQ ID NO: 36135 - DNA, 60 bp, Artificial
  Synthetic oligonucleotide
gcgcagtctctattccctttataaagattttgttgggttcactctctgatctgcctggct

SEQ ID NO: 36136 - DNA, 60 bp, Artificial
  Synthetic oligonucleotide
cagaatggtttcagtatgtgactcaacaaatacaagcagggaactttcattggcatgctg

SEQ ID NO: 36137 - DNA, 60 bp, Artificial
  Synthetic oligonucleotide
gcttcaataaaaggtaactggctgcaaggtaatttaaacaagtgttcttcattattcggg

SEQ ID NO: 36138 - DNA, 60 bp, Artificial
  Synthetic oligonucleotide
ggagaaatacagagagatccatgagagagtgaaggaggcagtcccaggggagacatccgc

SEQ ID NO: 36139 - DNA, 60 bp, Artificial
  Synthetic oligonucleotide
gcagtcccaggggagacatccgcagtagagtgtttagacttattagatcggctgtatgca

SEQ ID NO: 36140 - DNA, 60 bp, Artificial
  Synthetic oligonucleotide
tatggcactgctcctggcatggtcaataatcctactgcatacttaaaggtagacagaagt

SEQ ID NO: 36141 - DNA, 60 bp, Artificial
  Synthetic oligonucleotide
gggacttgagggtaacatttaattttggtatagactgtgcaagactagaaatcttttggg

SEQ ID NO: 36142 - DNA, 60 bp, Artificial
  Synthetic oligonucleotide
attggctaactaaaagggttcctaggggcccacaaccatagcagctaaatgggtgggtgg

SEQ ID NO: 36143 - DNA, 50 bp, Artificial
  Synthetic oligonucleotide
tctctcgcgtaagccagagaggaaagctaatcctaaatttggcgagtggc

SEQ ID NO: 36144 - DNA, 60 bp, Artificial
  Synthetic oligonucleotide
ggctaactaaaagggttcttaggggcccacaaccatagcagctaaatgggtgggtggtag

SEQ ID NO: 36145 - DNA, 60 bp, Artificial
  Synthetic oligonucleotide
cttaaattacacttcgatagatgtactaagctttgagctcttcttcgagtgctcaccata

SEQ ID NO: 36146 - DNA, 60 bp, Artificial
  Synthetic oligonucleotide
aaattacacttcgatagatgtactaagctttgagctcttcttcgagtgctcaccataatc

SEQ ID NO: 36147 - DNA, 60 bp, Artificial
  Synthetic oligonucleotide
ttagctccaggctaccttaagtagcctttttttgtatatatggatgtagatttcatttga

SEQ ID NO: 36148 - DNA, 60 bp, Artificial
  Synthetic oligonucleotide
agtcaacctttaaaccaacagtatcgactgcaaacatagcactcagttggagctcagtgg

SEQ ID NO: 36149 - DNA, 60 bp, Artificial
  Synthetic oligonucleotide
attccactgcctgactacggactcacgttgcatcgcatatccggttacttggcgagatgg

SEQ ID NO: 36150 - DNA, 60 bp, Artificial
  Synthetic oligonucleotide
attccactgcctgactacggactcacgttgcatcgcatatcaggttacttggccagatgg

SEQ ID NO: 36151 - DNA, 60 bp, Artificial
  Synthetic oligonucleotide
agatggccagtgccaccgatgatgcacaaaaggattccatctacgcatcagctctagtgg

SEQ ID NO: 36152 - DNA, 60 bp, Artificial
  Synthetic oligonucleotide
aaatgcatgacctcaactgcagttacaatatatgtccttattgcgcatctagattaacct

SEQ ID NO: 36153 - DNA, 60 bp, Artificial
  Synthetic oligonucleotide
acttaaacaattctgactgacagcaatcatctcttttatcatgctctaatgctgtcatga

SEQ ID NO: 36154 - DNA, 60 bp, Artificial
  Synthetic oligonucleotide
ctgatcagactcatgacagcattagagcatgataaaagagatgattgctgtcagtcagaa

SEQ ID NO: 36155 - DNA, 60 bp, Artificial
  Synthetic oligonucleotide
agtagtgtactaccaagtatagataacgtttaaatactaaagttcttaattgaagccaaa

SEQ ID NO: 36156 - DNA, 60 bp, Artificial
  Synthetic oligonucleotide
tgcttcaatcagcatatgtcctgtgtcagatttttacataggacaatattgcctggttct

SEQ ID NO: 36157 - DNA, 60 bp, Artificial
  Synthetic oligonucleotide
gatgggcagctgtgtcagcattggaggacaaactggcagatttcaagagacaacttgcag

SEQ ID NO: 36158 - DNA, 60 bp, Artificial
  Synthetic oligonucleotide
aggcgaacacaatcaatgggaatacaactggaccagaggattattgtgctctttatggtt

SEQ ID NO: 36159 - DNA, 60 bp, Artificial
  Synthetic oligonucleotide
tagtagtagactccttgaaaagctactacgaaaaaaactgggatgagtgacttgacagac

SEQ ID NO: 36160 - DNA, 60 bp, Artificial
  Synthetic oligonucleotide
caatcatatttgcactattattatcaggggaatcagtatatcagggcatgggaacattta

SEQ ID NO: 36161 - DNA, 60 bp, Artificial
  Synthetic oligonucleotide
caatcatatttgcactattattatcaggggaatcagtatatcagggtaagggcacattta

SEQ ID NO: 36162 - DNA, 60 bp, Artificial
  Synthetic oligonucleotide
tactagtcaggaaagacagtgtagcttgattgaagcgggcacaaggttcaacttgggtcc

SEQ ID NO: 36163 - DNA, 60 bp, Artificial
  Synthetic oligonucleotide
aaaaacagggttcaacatacaggacatggacattgtggcctctgagcacctactgcacca

SEQ ID NO: 36164 - DNA, 60 bp, Artificial
  Synthetic oligonucleotide
gaaaacagggttcaacatacaggacatggacattgtggcctctgagcacctactgcacca

SEQ ID NO: 36165 - DNA, 60 bp, Artificial
  Synthetic oligonucleotide
cagggttcaacatacaggacatggacattgtggcctctgagcacctactgcaccaatccc

SEQ ID NO: 36166 - DNA, 52 bp, Artificial
  Synthetic oligonucleotide
cagagggaacatcttcctttggaacctatgaatctgattctatcacagaatc

SEQ ID NO: 36167 - DNA, 60 bp, Artificial
  Synthetic oligonucleotide
gctcgtgactgccaggcagaagcttaaagatgccgagaaagcagtggaggtggacccaga

SEQ ID NO: 36168 - DNA, 60 bp, Artificial
  Synthetic oligonucleotide
acttccttgcctactaacaacaacaccctacctcaacacaaaactacctcaatttaacta

SEQ ID NO: 36169 - DNA, 60 bp, Artificial
  Synthetic oligonucleotide
ccaaatggccagtgccaccgatgatgcacaaaaggattccatctacgcgtctgctctagt

SEQ ID NO: 36170 - DNA, 60 bp, Artificial
  Synthetic oligonucleotide
tggccagtgccaccgatgatgcacaaaaggattccatctacgcgtctgctctagtggagg

SEQ ID NO: 36171 - DNA, 60 bp, Artificial
  Synthetic oligonucleotide
ccaaatggccagtgccaccgatgatgcacaaaaggattccatctacgcgtctgctctggt

SEQ ID NO: 36172 - DNA, 60 bp, Artificial
  Synthetic oligonucleotide
tggccagtgccaccgatgatgcacaaaaggattccatctacgcgtctgctctggtggagg

SEQ ID NO: 36173 - DNA, 60 bp, Artificial
  Synthetic oligonucleotide
acagagcagacgggcagctgtgtctgcattggagaccaaactcggagaacttaaacggga

SEQ ID NO: 36174 - DNA, 60 bp, Artificial
  Synthetic oligonucleotide
agcagacgggcagctgtgtctgcattggagactaaactcggagagctcaagagacagctg

SEQ ID NO: 36175 - DNA, 60 bp, Artificial
  Synthetic oligonucleotide
aacccaccatggggggacatcaacaagtcaggccgttcaggaatagcacttgtcgcaaca

SEQ ID NO: 36176 - DNA, 60 bp, Artificial
  Synthetic oligonucleotide
ctacttggtgctggggtgtagggactggctgcacctgttgtggtttagatgtgaaagacc

SEQ ID NO: 36177 - DNA, 60 bp, Artificial
  Synthetic oligonucleotide
ggagatgtaatcctacttggtgctggggtgtagggactggctgcacctgttgtggtttag

SEQ ID NO: 36178 - DNA, 60 bp, Artificial
  Synthetic oligonucleotide
gtgagatgggtgtctgctttggaacaatccctgtggccaatcccgatgatgctgcccagg

SEQ ID NO: 36179 - DNA, 60 bp, Artificial
  Synthetic oligonucleotide
gagatgggtgtctgctttggaacaatccctgtggccaatcctgatgatgccgcccaggga

SEQ ID NO: 36180 - DNA, 60 bp, Artificial
  Synthetic oligonucleotide
gtgtctgctttggaacaatccctgtggccaatcctgatgatgctgccttaggatctgggc

SEQ ID NO: 36181 - DNA, 58 bp, Artificial
  Synthetic oligonucleotide
tctgctttggaacaatccctgtggccaatcctgatgatgctgccttaggatctgggca

SEQ ID NO: 36182 - DNA, 60 bp, Artificial
  Synthetic oligonucleotide
tctgctttggaacaatccctgtggccaatcctgatgatgctgccttaggatctgggcaca

SEQ ID NO: 36183 - DNA, 60 bp, Artificial
  Synthetic oligonucleotide
gggctggaagattgctgtatataatacgaattttcctggcaaccggaacaacccaattcc

SEQ ID NO: 36184 - DNA, 55 bp, Artificial
  Synthetic oligonucleotide
ggggctggaagattgctgtatataatacgaattttcctggcaaccggaacaaccc

SEQ ID NO: 36185 - DNA, 60 bp, Artificial
  Synthetic oligonucleotide
acacttaaccttgggggctggaagattgctgtatataatacgaattttcctggcaaccgg

SEQ ID NO: 36186 - DNA, 60 bp, Artificial
  Synthetic oligonucleotide
ctgcaagcgcatgtgctttagagcaaccatagaagcaagcagaagagccctgctcatccg

SEQ ID NO: 36187 - DNA, 60 bp, Artificial
  Synthetic oligonucleotide
gaaggactcagtcaatgggaattcaactggaccagaagatcatcatattatacatgctct

SEQ ID NO: 36188 - DNA, 60 bp, Artificial
  Synthetic oligonucleotide
ttaagacgtactcagtcaatgggaattcaactggaccagaagataatcatcttatacatg

SEQ ID NO: 36189 - DNA, 60 bp, Artificial
  Synthetic oligonucleotide
ccaatcatatttaagaaggactcagtcaatgggaattcaactggaccagaagatcatcat

SEQ ID NO: 36190 - DNA, 60 bp, Artificial
  Synthetic oligonucleotide
cgggcagctgtgtctgcattggagaccaaactcggagaactcaaacgagagctggctgat

SEQ ID NO: 36191 - DNA, 60 bp, Artificial
  Synthetic oligonucleotide
cgggcagctgtgtctgcattggagaccaaactcggagaacttaagcgggaactggctgat

SEQ ID NO: 36192 - DNA, 60 bp, Artificial
  Synthetic oligonucleotide
ctctgtaaagtccagattatattcatatctgtatatatggatgtaaatttcgttccgtta

SEQ ID NO: 36193 - DNA, 60 bp, Artificial
  Synthetic oligonucleotide
ctctgtaaagtccagattatattcacatctgtatatatggatgtaaatttcgttccgtta

SEQ ID NO: 36194 - DNA, 60 bp, Artificial
  Synthetic oligonucleotide
gggcagctgtgtctgcattggagaccaaactcggagaactcaaacgagagctggctgatc

SEQ ID NO: 36195 - DNA, 60 bp, Artificial
  Synthetic oligonucleotide
gggcagctgtgtctgcattggagaccaaactcggagaacttaagcgggaactggctgatc

SEQ ID NO: 36196 - DNA, 60 bp, Artificial
  Synthetic oligonucleotide
gtggggaaaagagatggtagatcactttcatcttggggatgatatggatcctgagcttag

SEQ ID NO: 36197 - DNA, 60 bp, Artificial
  Synthetic oligonucleotide
gtctcaggtatggaaatgtccttgatgtaaatgcaattgacattgaagaacctagtggcc

SEQ ID NO: 36198 - DNA, 60 bp, Artificial
  Synthetic oligonucleotide
ccttaggtatggaaatgtccttgatgtaaatgcaattgacattgaagaaccaagtggcca

SEQ ID NO: 36199 - DNA, 60 bp, Artificial
  Synthetic oligonucleotide
gctgcccagggatctggacacaccaagtccattctcaaccttcggacaaacaccgagacc

SEQ ID NO: 36200 - DNA, 60 bp, Artificial
  Synthetic oligonucleotide
ggattgagcaatggttaagtgaaccctgtaagcttcttcctgacacatcagcagttagcc

SEQ ID NO: 36201 - DNA, 60 bp, Artificial
  Synthetic oligonucleotide
tttcaatgctggacattaaagatgcactgaagtggtgtgaaccaaacattaagagggctc

SEQ ID NO: 36202 - DNA, 60 bp, Artificial
  Synthetic oligonucleotide
tttcaatgttggacattaaagatgcactgaagtggtgtgaaccaaacattaagagggctc

SEQ ID NO: 36203 - DNA, 60 bp, Artificial
  Synthetic oligonucleotide
tttcaatgttggacgttaaagatgcactaaagtggtgtgaaccaaacattaagagggctc

SEQ ID NO: 36204 - DNA, 60 bp, Artificial
  Synthetic oligonucleotide
ggccaggacagagccctcttaatgtttggttcacaccactttagtgcatctttaacgtcc

SEQ ID NO: 36205 - DNA, 60 bp, Artificial
  Synthetic oligonucleotide
gaggccaggacagagccctcttaatgtttggttcacaccactttagtgcatctttaacgt

SEQ ID NO: 36206 - DNA, 60 bp, Artificial
  Synthetic oligonucleotide
gctaatcagactcatgacagcattagagcatgataaaagagatgattgctgccagtcaga

SEQ ID NO: 36207 - DNA, 60 bp, Artificial
  Synthetic oligonucleotide
ctaattgaagcaattagatttttaaatagatcacagactaatccaaatgttattgatatg

SEQ ID NO: 36208 - DNA, 60 bp, Artificial
  Synthetic oligonucleotide
acggtagacatggtgtttactctggaaacgtctaatgtgatgactttgtttggattttat

SEQ ID NO: 36209 - DNA, 60 bp, Artificial
  Synthetic oligonucleotide
cttaaggcattcttcaagatgacacctgataattataagattagtgggacaaccattgag

SEQ ID NO: 36210 - DNA, 60 bp, Artificial
  Synthetic oligonucleotide
cttaaggcattcttcaagatgacacctgataattataagattcgtgggacaaccattgag

SEQ ID NO: 36211 - DNA, 60 bp, Artificial
  Synthetic oligonucleotide
agcatatatataagtgtacgattctactacctcagacagttgctttcttgattgcttttc

SEQ ID NO: 36212 - DNA, 60 bp, Artificial
  Synthetic oligonucleotide
tcatctctatttaaacatttctacctccgtacacttatatatatgcacgtagcatatata

SEQ ID NO: 36213 - DNA, 60 bp, Artificial
  Synthetic oligonucleotide
cgcagactacaagagaaggatggcagatgctgtgtccaggaaaaaaatggatactaaacc

SEQ ID NO: 36214 - DNA, 60 bp, Artificial
  Synthetic oligonucleotide
tctcaagcattcattgaggcttgcaagctgataattcctaaaggaaacagtgagaagcag

SEQ ID NO: 36215 - DNA, 60 bp, Artificial
  Synthetic oligonucleotide
ctcaggcattcattgaggcttgcaagctgataattcctaaaggaaacagtgagaagcaga

SEQ ID NO: 36216 - DNA, 60 bp, Artificial
  Synthetic oligonucleotide
tctcaggcattcattgaggcttgcaagctgataattcctaaaggaaacagtgagaagcag

SEQ ID NO: 36217 - DNA, 60 bp, Artificial
  Synthetic oligonucleotide
ctcaagcattcattgaggcttgcaagctgataattcctaaaggaaacagtgagaagcaga

SEQ ID NO: 36218 - DNA, 60 bp, Artificial
  Synthetic oligonucleotide
aacaccagcagtacttttgacccagaggttgcatacgctaactttaagcgtatccacacc

SEQ ID NO: 36219 - DNA, 60 bp, Artificial
  Synthetic oligonucleotide
caagtatgaaggcagaagagattacacctggtagatataggacagcaatctgtggacttt

SEQ ID NO: 36220 - DNA, 60 bp, Artificial
  Synthetic oligonucleotide
gatgatgctctgcattggaggtcctctgcctctcttgtctagcatgacaggtctggcacc

SEQ ID NO: 36221 - DNA, 60 bp, Artificial
  Synthetic oligonucleotide
aggatgatgctctgcattggaggtcctctgcctctcttgtctagcatgacaggtctggca

SEQ ID NO: 36222 - DNA, 56 bp, Artificial
  Synthetic oligonucleotide
aagtgttcacattgtttgtttctttgtggcagttaagggaaacacatataaactgt

SEQ ID NO: 36223 - DNA, 60 bp, Artificial
  Synthetic oligonucleotide
gaaacgagattctgaacgcgaaggtctaactgatctccttgattatctaaactcaccaac

SEQ ID NO: 36224 - DNA, 60 bp, Artificial
  Synthetic oligonucleotide
aaacttaaaagcatcagtctttaaagagcatagagagatcgaaatcaatgtgcttctccc

SEQ ID NO: 36225 - DNA, 60 bp, Artificial
  Synthetic oligonucleotide
gcatgcgactcaagctgtgaagtaatgatacctaagggcacaggtgacatcctagtggac

SEQ ID NO: 36226 - DNA, 60 bp, Artificial
  Synthetic oligonucleotide
attgcataaacttaaaggcatcagtctttaaagagcatagagagattgaaatcaatgttc

SEQ ID NO: 36227 - DNA, 60 bp, Artificial
  Synthetic oligonucleotide
cagtttgtgttgtcagcacctccgcagtggagatggaaagcctgccagctggcacttggg

SEQ ID NO: 36228 - DNA, 60 bp, Artificial
  Synthetic oligonucleotide
ttcaacacttcctggatgtcttgggacggctgtgacctacactactactgtaatatgggg

SEQ ID NO: 36229 - DNA, 60 bp, Artificial
  Synthetic oligonucleotide
ggcatcagtctttaaagagcatagagagattgaaatcaatgttcttctccctcaagtcgc

SEQ ID NO: 36230 - DNA, 60 bp, Artificial
  Synthetic oligonucleotide
gtgaagacccagacatagttgctgctagctcaagtctcatggctagaaagcttgaatttg

SEQ ID NO: 36231 - DNA, 60 bp, Artificial
  Synthetic oligonucleotide
cccagacatagttgctgctagctcaagtctcatggctagaaagcttgaatttgggacaga

SEQ ID NO: 36232 - DNA, 52 bp, Artificial
  Synthetic oligonucleotide
aagatggctatctacatttgtagaatgtcaaatcatcctaaaacgactatgg

SEQ ID NO: 36233 - DNA, 60 bp, Artificial
  Synthetic oligonucleotide
gtacatgtgaagagtgaagacccagacatagttgctgctagctcaagtctcatggctaga

SEQ ID NO: 36234 - DNA, 60 bp, Artificial
  Synthetic oligonucleotide
tatctacttaaatcacacttctatagatgagctaggtttggagctcttctttgaatgttc

SEQ ID NO: 36235 - DNA, 60 bp, Artificial
  Synthetic oligonucleotide
ccctagactatggattctctgtgatgggtaaaacaacctcctattggagagagaacatct

SEQ ID NO: 36236 - DNA, 66 bp, Artificial
  Synthetic oligonucleotide
gagaactttctatatctatatttacgcatattgaacaaacaagcacgaagtataagcagatgactg

SEQ ID NO: 36237 - DNA, 60 bp, Artificial
  Synthetic oligonucleotide
atagtgcgctcggattgccgtccatctgagggtgaaaagttatgattaactcaacctgag

SEQ ID NO: 36238 - DNA, 60 bp, Artificial
  Synthetic oligonucleotide
aacccccaaaatcaatgacacaagcgcacaacctgtccttcaatatatgaatagtgcgct

SEQ ID NO: 36239 - DNA, 60 bp, Artificial
  Synthetic oligonucleotide
gtgaaagaattacttggtgtccacactcagtttgcaatgaatctatctggtgccctgaag

SEQ ID NO: 36240 - DNA, 60 bp, Artificial
  Synthetic oligonucleotide
gtttggcctagatataacattttgcgagcacgagatgagactagttgtgaagaaacctgg

SEQ ID NO: 36241 - DNA, 60 bp, Artificial
  Synthetic oligonucleotide
taccttatccattgtcccaacgacaattcaagaggaagtctttcatgagaagagtaagat

SEQ ID NO: 36242 - DNA, 60 bp, Artificial
  Synthetic oligonucleotide
ggaagtttcaggaagagtcttgaactaccaagtagatgcagacgggaacatttacttcct

SEQ ID NO: 36243 - DNA, 60 bp, Artificial
  Synthetic oligonucleotide
gattctcacttgatgatacccatcagaaaccatatcaattgcagcaggttggttggagct

SEQ ID NO: 36244 - DNA, 60 bp, Artificial
  Synthetic oligonucleotide
ggttggagctagaataggtttagttgatttctgtgatgctgatccaaattacaatcagat

SEQ ID NO: 36245 - DNA, 60 bp, Artificial
  Synthetic oligonucleotide
agagtaagataagatctaatgaccttctcccctccgattggtgcttagatgagttctgga

SEQ ID NO: 36246 - DNA, 60 bp, Artificial
  Synthetic oligonucleotide
gaacaacctgtctagatcttccttaaattctacttgagaagcagaaagaactttagccac

SEQ ID NO: 36247 - DNA, 60 bp, Artificial
  Synthetic oligonucleotide
actcttatcagagcctctgttctcttaaaagtccaatcttctggaccaacctcagcagct

SEQ ID NO: 36248 - DNA, 60 bp, Artificial
  Synthetic oligonucleotide
ccaacgggaagatgactggtgcaaggcctctaatgctggacaaaagaggtaggggtcccc

SEQ ID NO: 36249 - DNA, 60 bp, Artificial
  Synthetic oligonucleotide
ataactgttgttttaagcaaactccgtgaacgttataaactggtcccatgaacccccaaa

SEQ ID NO: 36250 - DNA, 60 bp, Artificial
  Synthetic oligonucleotide
cttagcctcgcccgcctcaaaccaacttggtccatctgaatactcaattgataactgttg

SEQ ID NO: 36251 - DNA, 60 bp, Artificial
  Synthetic oligonucleotide
gactgcgccgtatgaagccgctcctgaatcactttcaccttgtccaaagcatcctgtacc

SEQ ID NO: 36252 - DNA, 60 bp, Artificial
  Synthetic oligonucleotide
ccaaggggtcaattctcccttcttcccagatctcataacactgaacgttctcctcaccat

SEQ ID NO: 36253 - DNA, 60 bp, Artificial
  Synthetic oligonucleotide
ggagagagaacatctcaagagagaagatcctatctttcaaacacaaaagccttcctgaca

SEQ ID NO: 36254 - DNA, 60 bp, Artificial
  Synthetic oligonucleotide
catcaattgttaaaggtattcagctaggctctgagttagcacctgaaactacagtaatac

SEQ ID NO: 36255 - DNA, 60 bp, Artificial
  Synthetic oligonucleotide
ggaacaagagacaatagagctatcaatgactgctattctgttttctctggagaaggtgtc

SEQ ID NO: 36256 - DNA, 60 bp, Artificial
  Synthetic oligonucleotide
cgcatttcatttcatggtattcaagaagaaggtgccttcacaagaactttctgcattcca

SEQ ID NO: 36257 - DNA, 60 bp, Artificial
  Synthetic oligonucleotide
ccaattgcagtgatgataagaactttgactcattccgctcatctatatccatttcaccag

SEQ ID NO: 36258 - DNA, 60 bp, Artificial
  Synthetic oligonucleotide
cgctcatctatatccatttcaccagcagttgtgtagttaagtccatccaatatctcagaa

SEQ ID NO: 36259 - DNA, 60 bp, Artificial
  Synthetic oligonucleotide
catgtaggattgatatagatgtttcagttagcggcagtttctttaagcccagattgacca

SEQ ID NO: 36260 - DNA, 60 bp, Artificial
  Synthetic oligonucleotide
gctcttttcacctcattgatttctgatttcattttcctgattaagtctaccccattgaag

SEQ ID NO: 36261 - DNA, 60 bp, Artificial
  Synthetic oligonucleotide
gaataaaatgggaagttcttcctagagaagcaagtgttgatggataagagtttgttctgt

SEQ ID NO: 36262 - DNA, 60 bp, Artificial
  Synthetic oligonucleotide
ggggagatcaaatatgcttcagggtgagttgccatgtgcttacttaactcatccaattgc

SEQ ID NO: 36263 - DNA, 60 bp, Artificial
  Synthetic oligonucleotide
gaaccttctatgacactggggactttctctgttataaaccatctaaaattatagttggct

SEQ ID NO: 36264 - DNA, 60 bp, Artificial
  Synthetic oligonucleotide
gtagtaaattaattgatcatttgacgacggacccagtatagacatcaattcaacaggtgc

SEQ ID NO: 36265 - DNA, 60 bp, Artificial
  Synthetic oligonucleotide
ggctctggtactgtgtttaataggttgtaacattctttgctgcgttccacttaaacatca

SEQ ID NO: 36266 - DNA, 60 bp, Artificial
  Synthetic oligonucleotide
gcattggcaacaaggctgtggtattttgattcatctatactattttctattgtgccagtc

SEQ ID NO: 36267 - DNA, 58 bp, Artificial
  Synthetic oligonucleotide
tatggtgtttaagctccatatctccgtatcaactttgactagatcctgcttctgcata

SEQ ID NO: 36268 - DNA, 60 bp, Artificial
  Synthetic oligonucleotide
tagttgagttagaatataggcatttctctgttaagaaatccacatctgatgtcatgcagt

SEQ ID NO: 36269 - DNA, 60 bp, Artificial
  Synthetic oligonucleotide
ttagcatccttctcatttagagctttacgcactaagaggtctgctttaaacggctccaca

SEQ ID NO: 36270 - DNA, 60 bp, Artificial
  Synthetic oligonucleotide
cttttagagatgtcatattcccctccttcagcttctttagtgagcttaagctgctgcaac

SEQ ID NO: 36271 - DNA, 60 bp, Artificial
  Synthetic oligonucleotide
cattattcagtattaaatagaaatcaaaatggactgtgtgggatctgaatctcctgtggc

SEQ ID NO: 36272 - DNA, 60 bp, Artificial
  Synthetic oligonucleotide
tttgtgaaacacccaggatattccctcgcataatcttcagcattcatattgaaagcatct

SEQ ID NO: 36273 - DNA, 57 bp, Artificial
  Synthetic oligonucleotide
tttccctttattgtacttgggtcttttccatagacatctttcaaagcagttgctatc

SEQ ID NO: 36274 - DNA, 60 bp, Artificial
  Synthetic oligonucleotide
atgcacactcgtttgagcttaatgtacattaaaatgcattcgcacatcaaatttatctct

SEQ ID NO: 36275 - DNA, 60 bp, Artificial
  Synthetic oligonucleotide
ccacttagactggtctgcagaaagaaatgccatcttacattccaaattcttctggagtga

SEQ ID NO: 36276 - DNA, 60 bp, Artificial
  Synthetic oligonucleotide
ggcctcttccaagcttttctaaggactctagatctacctccatgattttgttgaattctt

SEQ ID NO: 36277 - DNA, 60 bp, Artificial
  Synthetic oligonucleotide
tgtaaccatctctttcaaatcaggatcgagaaaagtcttggctttagatcttaaaatcct

SEQ ID NO: 36278 - DNA, 60 bp, Artificial
  Synthetic oligonucleotide
tttgtcttcgatgtttgatcgacaactagcaacattgtctatattctttctgtagtagtc

SEQ ID NO: 36279 - DNA, 60 bp, Artificial
  Synthetic oligonucleotide
tcccaagaaaaaatcagatgtgtaaaggtagttgacactgcctttgacttcattctctct

SEQ ID NO: 36280 - DNA, 60 bp, Artificial
  Synthetic oligonucleotide
cctgtatgcttccatcttttacatcaaccacatcctctaatgtgattttgtcttggcccg

SEQ ID NO: 36281 - DNA, 60 bp, Artificial
  Synthetic oligonucleotide
cgacttcctgaaggagtcaatgatagcattgttgtagttcatctcctccattattagatc

SEQ ID NO: 36282 - DNA, 60 bp, Artificial
  Synthetic oligonucleotide
ttcttgaaagtttgagtttctgcgtaaaatcgactgaagcactctgaagcatgtcctgtt

SEQ ID NO: 36283 - DNA, 60 bp, Artificial
  Synthetic oligonucleotide
ccaaacatttcacaatggcttttatatccctcaaatctgtctttagcatggagatcactc

SEQ ID NO: 36284 - DNA, 60 bp, Artificial
  Synthetic oligonucleotide
catcttttgacatttgattatttgatagattggttttcttgtactcatgagaccagtggc

SEQ ID NO: 36285 - DNA, 60 bp, Artificial
  Synthetic oligonucleotide
taaacatcatgtctgtacttaggggcaaaatgaagcctggtacttgccagaactccaaaa

SEQ ID NO: 36286 - DNA, 60 bp, Artificial
  Synthetic oligonucleotide
catttcttctatcttgtccaagatatggctcattgacattattgagtttaatcctgcttc

SEQ ID NO: 36287 - DNA, 60 bp, Artificial
  Synthetic oligonucleotide
aatcatcaagcaggccttttcaccattagtctccttatatattgtataattgtctggagt

SEQ ID NO: 36288 - DNA, 60 bp, Artificial
  Synthetic oligonucleotide
cacttctccaggtaacatagagtaaatgctgagcgattgaacctggattgctgaatatgc

SEQ ID NO: 36289 - DNA, 57 bp, Artificial
  Synthetic oligonucleotide
tttgctcaacagaattctttatcaaatcaatgctttcctcgtcatcaatcccatcca

SEQ ID NO: 36290 - DNA, 60 bp, Artificial
  Synthetic oligonucleotide
gacccagtagctttatacgttctaattcctttagagtcgttaaccatagagaatttcaac

SEQ ID NO: 36291 - DNA, 60 bp, Artificial
  Synthetic oligonucleotide
caagcttcacacgcttttatcagcttcaacatttcgaacaggtcatagccatctgacgtc

SEQ ID NO: 36292 - DNA, 60 bp, Artificial
  Synthetic oligonucleotide
ctatgctcaagctgtcgcaatcttcagacatcaaactagtcttaaacaagttcaccatgc

SEQ ID NO: 36293 - DNA, 60 bp, Artificial
  Synthetic oligonucleotide
cctattttgtatgaatggcctgaaacatagtatccccgggcatcttgctcatcagtcttg

SEQ ID NO: 36294 - DNA, 60 bp, Artificial
  Synthetic oligonucleotide
gtgtcctgttagagctttcgtggatacagaattcattgggcaatagatcgcctctcatgc

SEQ ID NO: 36295 - DNA, 60 bp, Artificial
  Synthetic oligonucleotide
gccatgctgcatgacgactcatagcaatcatttgaggtctaaaagatagtgtgacatggc

SEQ ID NO: 36296 - DNA, 60 bp, Artificial
  Synthetic oligonucleotide
tcctgcaagtcattattgcatcttgtatgctcagtaacctattttccctgaagggcctca

SEQ ID NO: 36297 - DNA, 60 bp, Artificial
  Synthetic oligonucleotide
catggccttctcataacctagcatagcacaggaatggtaaactgatgacaaataattcag

SEQ ID NO: 36298 - DNA, 60 bp, Artificial
  Synthetic oligonucleotide
caatagctcttaaaatgggactgtattgttctaaatagtagctctgacatactgccacat

SEQ ID NO: 36299 - DNA, 60 bp, Artificial
  Synthetic oligonucleotide
tcagcaaccatgacgcccttagcaatctgcatcatgtcttcactgtaagaataaaccgac

SEQ ID NO: 36300 - DNA, 60 bp, Artificial
  Synthetic oligonucleotide
accttgcttggtgctttgaagaggcttaatagtctaacttgatttaatctctgaggtctc

SEQ ID NO: 36301 - DNA, 60 bp, Artificial
  Synthetic oligonucleotide
gccatgatttaatttcactgcttaaaagagagtactgagaaaatagaataggaaccttgc

SEQ ID NO: 36302 - DNA, 57 bp, Artificial
  Synthetic oligonucleotide
acccagcatacctcatgaaatcaaagatacccatgcgactcaattttgtgactgtgc

SEQ ID NO: 36303 - DNA, 60 bp, Artificial
  Synthetic oligonucleotide
ttgtcttgagggtggagcctgttatagggcaagttatattcaagtcatttatacctcctg

SEQ ID NO: 36304 - DNA, 60 bp, Artificial
  Synthetic oligonucleotide
catttatcttgaatcccattctttctctgaactttatttcccactctgcaggcacactca

SEQ ID NO: 36305 - DNA, 52 bp, Artificial
  Synthetic oligonucleotide
tcctctggattcttacagtattcattgtagacagagctgattttcccttcat

SEQ ID NO: 36306 - DNA, 60 bp, Artificial
  Synthetic oligonucleotide
gagtcagtcccttgaagaataatttcttcgctgtgctagatgttgactgagagattgaga

SEQ ID NO: 36307 - DNA, 60 bp, Artificial
  Synthetic oligonucleotide
aaaaacttccactttcactctaagagagttactgcacatggagacacaccacaattagat

SEQ ID NO: 36308 - DNA, 60 bp, Artificial
  Synthetic oligonucleotide
aaaatcttccactttcactctaagagagttactgcacatggagacacaccacaattagat

SEQ ID NO: 36309 - DNA, 60 bp, Artificial
  Synthetic oligonucleotide
ctgtctaaccatataacttagatttctcctctgtatgatgtcttcacatcttgcggagtc

SEQ ID NO: 36310 - DNA, 60 bp, Artificial
  Synthetic oligonucleotide
gaggaacagacaatcggtgttgatgtacatgctctagggcattggtttgatggtcgtctc

SEQ ID NO: 36311 - DNA, 60 bp, Artificial
  Synthetic oligonucleotide
cagttggtgccagaaagctcttgcagtatggacaatcaccagtcattaaataccataaca

SEQ ID NO: 36312 - DNA, 60 bp, Artificial
  Synthetic oligonucleotide
ttccaggcttccatgggtgggcaacagctgcactgcttgtcacattctgctttgggtggg

SEQ ID NO: 36313 - DNA, 60 bp, Artificial
  Synthetic oligonucleotide
catgcgcagttgatagctgtggaaaacatagaagaattgaagcgtttgacacaagatagg

SEQ ID NO: 36314 - DNA, 60 bp, Artificial
  Synthetic oligonucleotide
tgctggagaaaagctatatacattggatgagctcccagaggcatacactacagaaattaa

SEQ ID NO: 36315 - DNA, 51 bp, Artificial
  Synthetic oligonucleotide
ctgtagatgtatggcgacaggagaaaagtgcaattctgctaattgggactt

SEQ ID NO: 36316 - DNA, 66 bp, Artificial
  Synthetic oligonucleotide
cagccaatcatggatctaattatacatataactctagcttcaacaaaggcagattatcttagaatc

SEQ ID NO: 36317 - DNA, 60 bp, Artificial
  Synthetic oligonucleotide
acaaaattggctgaccttctcaaaagaacgaacaagccaatggggatgtgaagagtttgg

SEQ ID NO: 36318 - DNA, 60 bp, Artificial
  Synthetic oligonucleotide
ggagatttctgtaacaagtgtggtttttgcatgtgtggtgtattagaggatgtagaaggt

SEQ ID NO: 36319 - DNA, 60 bp, Artificial
  Synthetic oligonucleotide
attgttatgaatgcaacatgtatcatacaaagagaaatattaggtataatggagatttct

SEQ ID NO: 36320 - DNA, 60 bp, Artificial
  Synthetic oligonucleotide
tcagttagtgcatccttagcaagttgtgatgcagaagaacctaacataaattgcataggt

SEQ ID NO: 36321 - DNA, 60 bp, Artificial
  Synthetic oligonucleotide
gatgtcaatgaaatttgcctgaatactggctgcaaagatggacgttacccattaaatcca

SEQ ID NO: 36322 - DNA, 60 bp, Artificial
  Synthetic oligonucleotide
atgtgggtactataaagacttagaaagtaataatgagatcaagcagataccctggagaac

SEQ ID NO: 36323 - DNA, 66 bp, Artificial
  Synthetic oligonucleotide
gcagagcaattaagttcggaatatgtacaaacatattaaatcaacagtcaagaagcattgaatgtg

SEQ ID NO: 36324 - DNA, 57 bp, Artificial
  Synthetic oligonucleotide
taagaaatacattagtttacaagggatagattcgagcgatgggattgatagttctta

SEQ ID NO: 36325 - DNA, 60 bp, Artificial
  Synthetic oligonucleotide
cagcaaggacaaatgaggcacttgggatacaggtccgtgctcctgataatcagccaatca

SEQ ID NO: 36326 - DNA, 61 bp, Artificial
  Synthetic oligonucleotide
catcatgtaaaatcgagagtccctgttcaatgtttatagagaatttgattatcaaagcagg

SEQ ID NO: 36327 - DNA, 60 bp, Artificial
  Synthetic oligonucleotide
aaaattcattgcaaaacaattgacagcaaggtaattgaattcaagatatgcaataatatt

SEQ ID NO: 36328 - DNA, 60 bp, Artificial
  Synthetic oligonucleotide
taaagaagaaggaataggcctgttgcttgagccattaaaggcaatatttgggacttatat

SEQ ID NO: 36329 - DNA, 60 bp, Artificial
  Synthetic oligonucleotide
aggcctgttgcttgagccattaaaggcaatatttgggacttatattacatggttttgggt

SEQ ID NO: 36330 - DNA, 60 bp, Artificial
  Synthetic oligonucleotide
ggacttatattacatggttttgggttattctagggattattgtgttcttatttatagggg

SEQ ID NO: 36331 - DNA, 60 bp, Artificial
  Synthetic oligonucleotide
caactcctgctatacattagtggcaggaaaagaatacagcatttatctccactattttta

SEQ ID NO: 36332 - DNA, 54 bp, Artificial
  Synthetic oligonucleotide
aatgtctgaaatttgtcttaaagatgatatctccatgatcaaaacatctattga

SEQ ID NO: 36333 - DNA, 60 bp, Artificial
  Synthetic oligonucleotide
aagtgtttcaccggtgggtctctggttttctcaaaaaagtcagacacaggaatgtctgaa

SEQ ID NO: 36334 - DNA, 60 bp, Artificial
  Synthetic oligonucleotide
gatgatttctaattttattgttgtcaatatatgtaaattgttttactttcattgttatga

SEQ ID NO: 36335 - DNA, 60 bp, Artificial
  Synthetic oligonucleotide
tgcaattggatagtatcacaacaaagaacctaccagaattaattctaattaaagatcaca

SEQ ID NO: 36336 - DNA, 60 bp, Artificial
  Synthetic oligonucleotide
aaagatcacaaggtttatactgggcaaattaatgatctgggagcggtatcatcaggatgc

SEQ ID NO: 36337 - DNA, 60 bp, Artificial
  Synthetic oligonucleotide
taagcttgtctggaactactccggtggtgtttaacaagtgtttcaccggtgggtctctgg

SEQ ID NO: 36338 - DNA, 60 bp, Artificial
  Synthetic oligonucleotide
tagtgctctacttgataagcttgtctggaactactccggtggtgtttaacaagtgtttca

SEQ ID NO: 36339 - DNA, 60 bp, Artificial
  Synthetic oligonucleotide
caggatggatatttcaaagcacatgcaaatgttggtagtgctctacttgataagcttgtc

SEQ ID NO: 36340 - DNA, 60 bp, Artificial
  Synthetic oligonucleotide
aaatatagtgtcttgcaggatggatatttcaaagcacatgcaaatgttggtagtgctcta

SEQ ID NO: 36341 - DNA, 60 bp, Artificial
  Synthetic oligonucleotide
agaaataataaggattcattgtattatatagaccataaagtatatacatcttttcaacac

SEQ ID NO: 36342 - DNA, 60 bp, Artificial
  Synthetic oligonucleotide
gagcccaaagctggatgttgtcatccctgcattattaaaatgccatagaaataataagga

SEQ ID NO: 36343 - DNA, 60 bp, Artificial
  Synthetic oligonucleotide
gtagagaagcacatagttcggctttgtattatccatgcaaacgaagataagtgtactgat

SEQ ID NO: 36344 - DNA, 60 bp, Artificial
  Synthetic oligonucleotide
tgtataataaaagctgtaagatatgcattaattgtggcttagcttatcacccattcacca

SEQ ID NO: 36345 - DNA, 60 bp, Artificial
  Synthetic oligonucleotide
ttacctatttcttcctctgtacatgattccagcttacatttacgggtgtgtgtataataa

SEQ ID NO: 36346 - DNA, 60 bp, Artificial
  Synthetic oligonucleotide
tggcaacatctatttgtcagaatatagaagtgatcctcttgaccgtatttacgcttataa

SEQ ID NO: 36347 - DNA, 60 bp, Artificial
  Synthetic oligonucleotide
gtcagaatatagaagtgatcctcttgaccgtatttacgcttataatctttggagtacttt

SEQ ID NO: 36348 - DNA, 60 bp, Artificial
  Synthetic oligonucleotide
ataatagaagtaacagcagatctaatgtttaaaagtgtaagttacacatgcacaacagat

SEQ ID NO: 36349 - DNA, 60 bp, Artificial
  Synthetic oligonucleotide
ccatatgtcatgcattagatttttgcacagaacaattctaccgggatatatggcaacatc

SEQ ID NO: 36350 - DNA, 60 bp, Artificial
  Synthetic oligonucleotide
tatactgggcaaattaatgatctgggagcggtatcatcaggatgcggtgatgtccaggtg

SEQ ID NO: 36351 - DNA, 60 bp, Artificial
  Synthetic oligonucleotide
gctgtaagatatgcattaattgtggcttagcttatcacccattcaccaattgtgggtctc

SEQ ID NO: 36352 - DNA, 60 bp, Artificial
  Synthetic oligonucleotide
gcctaagagcagccaggtctatgtgtaaaagcaagacttgctccctcattttctcaatag

SEQ ID NO: 36353 - DNA, 60 bp, Artificial
  Synthetic oligonucleotide
gtgtactgatttagacccagaggaaccgttaataacagaaagcttagaattgcaattgga

SEQ ID NO: 36354 - DNA, 60 bp, Artificial
  Synthetic oligonucleotide
gttcggctttgtattatccatgcaaacgaagataagtgtactgatttagacccagaggaa

SEQ ID NO: 36355 - DNA, 60 bp, Artificial
  Synthetic oligonucleotide
cccgcaatcatggtgttttgctgacaaacattgtctaatacactttagaccagtaccagg

SEQ ID NO: 36356 - DNA, 60 bp, Artificial
  Synthetic oligonucleotide
gctgaccttctcaaaagaacgaacaagccaatggggatgtgaagagtttggatgcttagc

SEQ ID NO: 36357 - DNA, 60 bp, Artificial
  Synthetic oligonucleotide
cggatgggtgcagaatctagaagtaaagtggaaacatctggttatcaagtaggacagccg

SEQ ID NO: 36358 - DNA, 53 bp, Artificial
  Synthetic oligonucleotide
ccccggaagcacttatagatacttatacagcatactaaaaaataaggacattg

SEQ ID NO: 36359 - DNA, 60 bp, Artificial
  Synthetic oligonucleotide
gacagccgatactctcatgtaataatcctttaataatacgatgcatgagcccaaagctgg

SEQ ID NO: 36360 - DNA, 60 bp, Artificial
  Synthetic oligonucleotide
gacccagaggaaccgttaataacagaaagcttagaattgcaattggatagtatcacaaca

SEQ ID NO: 36361 - DNA, 51 bp, Artificial
  Synthetic oligonucleotide
cgagtcatcagctgtgagtttagagcataataactatataatcggatcttt

SEQ ID NO: 36362 - DNA, 60 bp, Artificial
  Synthetic oligonucleotide
cagtagtcaagtgacagaggaccaggatcagtataatactaaacaagccttttgcagagc

SEQ ID NO: 36363 - DNA, 60 bp, Artificial
  Synthetic oligonucleotide
cagccctcatgcagcatgggttttctcatgtgcccctgaccgttgcccaccgactgcact

SEQ ID NO: 36364 - DNA, 60 bp, Artificial
  Synthetic oligonucleotide
cagcggcagctgagggtgccacactatttgatgagatatccagccctcatgcagcatggg

SEQ ID NO: 36365 - DNA, 60 bp, Artificial
  Synthetic oligonucleotide
aaccacaacttctacctcatccattacccttccccttttatctacctcttacatactacc

SEQ ID NO: 36366 - DNA, 60 bp, Artificial
  Synthetic oligonucleotide
gcagacgaaataacacctggccgttttaggacaattgtttgtggattattcccggcacag

SEQ ID NO: 36367 - DNA, 60 bp, Artificial
  Synthetic oligonucleotide
ctttaagtttaatcgtcagcaaagagtcctagttagatgtttattgtttcaatggagtat

SEQ ID NO: 36368 - DNA, 60 bp, Artificial
  Synthetic oligonucleotide
aactaatcaatactaaccacaacttctacctcatccattacccttccccttttatctacc

SEQ ID NO: 36369 - DNA, 60 bp, Artificial
  Synthetic oligonucleotide
ctgattgacacagcggcagctgagggtgccacactatttgatgagatatccagccctcat

SEQ ID NO: 36370 - DNA, 60 bp, Artificial
  Synthetic oligonucleotide
gaactgatgtcttaaatgtgagattgcctttcaggctggtgccaattattaatcatctca

SEQ ID NO: 36371 - DNA, 60 bp, Artificial
  Synthetic oligonucleotide
ctatcaaaacctaagggacaaaccggtcagcctacttccacgaatggggtgtacttcatg

SEQ ID NO: 36372 - DNA, 60 bp, Artificial
  Synthetic oligonucleotide
aatcatctcagggctttctatcttaatacgggtgggtcaatatactccaatattatcctt

SEQ ID NO: 36373 - DNA, 60 bp, Artificial
  Synthetic oligonucleotide
agacatgagaaatactattatggcatcaaagtctgtgggcactgctgaagaaaagctgaa

SEQ ID NO: 36374 - DNA, 55 bp, Artificial
  Synthetic oligonucleotide
ttccacgaatggggtgtacttcatgaataggcaagcacaagttgatgaatcaaag

SEQ ID NO: 36375 - DNA, 60 bp, Artificial
  Synthetic oligonucleotide
aattcattgccactagatgtaaatttcgttcctgcagttcgcgcttggctaactaatcaa

SEQ ID NO: 36376 - DNA, 60 bp, Artificial
  Synthetic oligonucleotide
caatctacaatgaaggcagacgaaataacacctggccgttttaggacaattgtttgtgga

SEQ ID NO: 36377 - DNA, 60 bp, Artificial
  Synthetic oligonucleotide
ctattatggcatcaaagtctgtgggcactgctgaagaaaagctgaagaagaagtccgctt

SEQ ID NO: 36378 - DNA, 60 bp, Artificial
  Synthetic oligonucleotide
aggcagacagtcaaagagaacaaagggacaagaatcaggtttaaagatgattcatcattt

SEQ ID NO: 36379 - DNA, 60 bp, Artificial
  Synthetic oligonucleotide
ctaaagatctagtctgactactttaatcaatatgaactgacatgtgatttgaactgatgt

SEQ ID NO: 36380 - DNA, 60 bp, Artificial
  Synthetic oligonucleotide
tgatatggatccagaactaagacaacttgcacagactttggtggacacaaaggttaaaga

SEQ ID NO: 36381 - DNA, 60 bp, Artificial
  Synthetic oligonucleotide
gctgaagaagaagtccgctttctaccaatcttacttgcgtaggacacagtcaatgggaat

SEQ ID NO: 36382 - DNA, 60 bp, Artificial
  Synthetic oligonucleotide
tacatgcttcagtggggaaaggatgccgtcaaccactttcaccttggtgatgatatggat

SEQ ID NO: 36383 - DNA, 60 bp, Artificial
  Synthetic oligonucleotide
gctggtggcagctaaacaaaagctcaaagatgccgaacgaacaatggaagtggaccccga

SEQ ID NO: 36384 - DNA, 60 bp, Artificial
  Synthetic oligonucleotide
gacgggcagctgtgtctgcactggagaccaaacttggtgaactcaagagacaactggcag

SEQ ID NO: 36385 - DNA, 60 bp, Artificial
  Synthetic oligonucleotide
ttgagatatggtaatgtgcttgatgttaattctatagatttggaagaaccaagtgggcaa

SEQ ID NO: 36386 - DNA, 60 bp, Artificial
  Synthetic oligonucleotide
gtgcttgatgttaattctatagatttggaagaaccaagtgggcaaactgcagactggaag

SEQ ID NO: 36387 - DNA, 60 bp, Artificial
  Synthetic oligonucleotide
aagtgggcaaactgcagactggaaggctataggggtttatgtcctcagctttgtactccc

SEQ ID NO: 36388 - DNA, 60 bp, Artificial
  Synthetic oligonucleotide
ttgtactccctattgtcttaaaggctctttacatgctgtcaactagaggaaggcagacag

SEQ ID NO: 36389 - DNA, 60 bp, Artificial
  Synthetic oligonucleotide
gaagaatgtccatttctatcaaaacctaagggacaaaccggtcagcctacttccacgaat

SEQ ID NO: 36390 - DNA, 60 bp, Artificial
  Synthetic oligonucleotide
agttcatgagcagcagctggtggcagctaaacaaaagctcaaagatgccgaacgaacaat

SEQ ID NO: 36391 - DNA, 60 bp, Artificial
  Synthetic oligonucleotide
atgagcaacctcaaagaagtacaagagaacataacagttcatgagcagcagctggtggca

SEQ ID NO: 36392 - DNA, 60 bp, Artificial
  Synthetic oligonucleotide
cccagttcctgacgatggtcttaccctccaccgcctcagtggattccttgccaggtacct

SEQ ID NO: 36393 - DNA, 60 bp, Artificial
  Synthetic oligonucleotide
ctcttcgaagttcaaaaaacaggattcaacatacaggacatggatattgttgcctctgag

SEQ ID NO: 36394 - DNA, 60 bp, Artificial
  Synthetic oligonucleotide
aaaacaggattcaacatacaggacatggatattgttgcctctgagcacctgctgcaccag

SEQ ID NO: 36395 - DNA, 60 bp, Artificial
  Synthetic oligonucleotide
gaggaaaggacaggagtcagctgggatctaggggtagaagatgcctctgaatccaaatta

SEQ ID NO: 36396 - DNA, 55 bp, Artificial
  Synthetic oligonucleotide
atagtgtttgtgataaaaagacagtgcccctaacatggactgggtttctagcagt

SEQ ID NO: 36397 - DNA, 60 bp, Artificial
  Synthetic oligonucleotide
caaagggttgatcaagatgttgtggtttactgtaatggacagaagaaagtcattctcacc

SEQ ID NO: 36398 - DNA, 60 bp, Artificial
  Synthetic oligonucleotide
tctgttttcactgatccctggagttgctcattcccttgctgtggagttgtgtgttccagg

SEQ ID NO: 36399 - DNA, 60 bp, Artificial
  Synthetic oligonucleotide
gtatgaaacaagctggggctgtaacccaccagattgcccaggagtagggacaggttgtac

SEQ ID NO: 36400 - DNA, 59 bp, Artificial
  Synthetic oligonucleotide
acagaacctggggcattggatggatggcacattcaacataaagactgcttttcattgct

SEQ ID NO: 36401 - DNA, 60 bp, Artificial
  Synthetic oligonucleotide
tacagcctgtggggtatacttagacaagctccgttcagttgggaaagcctataaaattgt

SEQ ID NO: 36402 - DNA, 60 bp, Artificial
  Synthetic oligonucleotide
cagagtgtgcaaatttcataacttcaattaaggcgtgtgattctgctatgtgttatgggg

SEQ ID NO: 36403 - DNA, 60 bp, Artificial
  Synthetic oligonucleotide
atcatgtgtatttggagaccctggtgatatcatgtcaacaacaagtgggatgagatgccc

SEQ ID NO: 36404 - DNA, 60 bp, Artificial
  Synthetic oligonucleotide
ggtccttactactgcaactgctggattgacacggaatctctatgaattaaagatagaatg

SEQ ID NO: 36405 - DNA, 60 bp, Artificial
  Synthetic oligonucleotide
cctcaagatcgagagttcttgcaattttgacttgcatgtcccagccactactactcagaa

SEQ ID NO: 36406 - DNA, 60 bp, Artificial
  Synthetic oligonucleotide
catggttttgaatagagatgtttccttccaagatctaagtgataatccatgtaaggttga

SEQ ID NO: 36407 - DNA, 60 bp, Artificial
  Synthetic oligonucleotide
tcacaaggtcaggtgagtggttgctaggaattcttaatggcaattgggtagtagttgctg

SEQ ID NO: 36408 - DNA, 52 bp, Artificial
  Synthetic oligonucleotide
tagaaagagtcaaggtggagtatcaaaagacaatgggctcaatggtgtgtga

SEQ ID NO: 36409 - DNA, 60 bp, Artificial
  Synthetic oligonucleotide
acgggtcagttaatagaagggctatgtttcattccaacacatacaattgcacttacacag

SEQ ID NO: 36410 - DNA, 60 bp, Artificial
  Synthetic oligonucleotide
gtgttccaggtcttcatggctgggctacaacagcactgcttattactttctgctttggct

SEQ ID NO: 36411 - DNA, 60 bp, Artificial
  Synthetic oligonucleotide
atagctggacctgttactgccaaggtaccatccacagaaacaactgaaacaatgcaagga

SEQ ID NO: 36412 - DNA, 60 bp, Artificial
  Synthetic oligonucleotide
cccctctaatggagtctggttggtcagatacagcacatggtgtaggtatagtccctatga

SEQ ID NO: 36413 - DNA, 60 bp, Artificial
  Synthetic oligonucleotide
gcttgtaaaccctgccaatcaagaggagacactcccttttcatttccagttagataagca

SEQ ID NO: 36414 - DNA, 60 bp, Artificial
  Synthetic oligonucleotide
ggcctgtaatcaaacacattgtcttcctacagtccatctgattgctcctgttcaaacatg

SEQ ID NO: 36415 - DNA, 60 bp, Artificial
  Synthetic oligonucleotide
gtttaagtgctgccatgatactgattgtactgaagaaggtttagcagcatcaccacctca

SEQ ID NO: 36416 - DNA, 60 bp, Artificial
  Synthetic oligonucleotide
tgcccatactgcatgacaataactgagtccactgagagtgcattacaagctcatttttca

SEQ ID NO: 36417 - DNA, 60 bp, Artificial
  Synthetic oligonucleotide
gtattccgctacaagagcaggtgctatgttggcttagtatgggggatcctcttgacgaca

SEQ ID NO: 36418 - DNA, 60 bp, Artificial
  Synthetic oligonucleotide
atgtcttcaagtgtttatgagtcgatcattcagacaagagcttcagtctggggatcaact

SEQ ID NO: 36419 - DNA, 60 bp, Artificial
  Synthetic oligonucleotide
gtgggcacagctgatgaaaagcttcgaaagaaatcatcattctaccaatcatacctcaga

SEQ ID NO: 36420 - DNA, 60 bp, Artificial
  Synthetic oligonucleotide
cactattataatcaggggaatcattatatcagggtaggggtacatttatgggtgggaatc

SEQ ID NO: 36421 - DNA, 59 bp, Artificial
  Synthetic oligonucleotide
cagagtgctaaaagatgggatggatgtcaacttcatgcgaaaggttcttcgccaacgct

SEQ ID NO: 36422 - DNA, 60 bp, Artificial
  Synthetic oligonucleotide
ttgatatgcacagagtgctaaaagatgggatggatgtcaacttcatgagaaaagtcctcc

SEQ ID NO: 36423 - DNA, 60 bp, Artificial
  Synthetic oligonucleotide
tctaccctctagttattgatatgcacagagtgctaaaagatgggatggatgtcaacttca

SEQ ID NO: 36424 - DNA, 60 bp, Artificial
  Synthetic oligonucleotide
tagttcaaacccagctgtattctgattcaagaagcaaaagtagctttgactatactgcaa

SEQ ID NO: 36425 - DNA, 60 bp, Artificial
  Synthetic oligonucleotide
tagttcagacccagctgtattctgattcaagaagcaaaagtagctttagctatactgcaa

SEQ ID NO: 36426 - DNA, 60 bp, Artificial
  Synthetic oligonucleotide
ggaggtagagagcaaaagtagcttgctacacaagtacctcaaatcaggaggtgtcaggca

SEQ ID NO: 36427 - DNA, 60 bp, Artificial
  Synthetic oligonucleotide
ccctgctgtgttgacagccggtagaatcagtgaaatgggtgtctgctttggaacaatccc

SEQ ID NO: 36428 - DNA, 60 bp, Artificial
  Synthetic oligonucleotide
ctatcaatagagtgaggtcattcaagctatgcgaaaacagtgccacagggaagagctgtg

SEQ ID NO: 36429 - DNA, 60 bp, Artificial
  Synthetic oligonucleotide
gacgatgctctgcattggaggtcctctgcctctcttgtctagcatgacaggtctggcacc

SEQ ID NO: 36430 - DNA, 60 bp, Artificial
  Synthetic oligonucleotide
gctgcagtacaaagatgttgtcaaatgaaagatagtgccaagactttagtgagcgactgt

SEQ ID NO: 36431 - DNA, 58 bp, Artificial
  Synthetic oligonucleotide
cgttttggcatgcttgcagggcttagtaggcttgtttgccctaatgagctagggaaaa

SEQ ID NO: 36432 - DNA, 60 bp, Artificial
  Synthetic oligonucleotide
gaacttctccacttatgaacaggtttgcaaggtagccaaagtactttctgcttcacagat

SEQ ID NO: 36433 - DNA, 58 bp, Artificial
  Synthetic oligonucleotide
ccataatgtcttcaagtgtttatgagtcgatcattcagacaagagcttcagtctgggg

SEQ ID NO: 36434 - DNA, 60 bp, Artificial
  Synthetic oligonucleotide
gatgttccctctacctgagactccactaagtgaggtgcattcaatagagcgcatcatgga

SEQ ID NO: 36435 - DNA, 60 bp, Artificial
  Synthetic oligonucleotide
ctgctctctctcgtaaaccggagaggaaagctactcctaaatttggagactggcaggtgg

SEQ ID NO: 36436 - DNA, 60 bp, Artificial
  Synthetic oligonucleotide
tagtgatgctgctagaacattccttcagaagttcggtgttagacttccataaattgatgg

SEQ ID NO: 36437 - DNA, 60 bp, Artificial
  Synthetic oligonucleotide
gcagggtatctggcatttacaattgcgcatggggaagctatcaatttgtcagccgttagg

SEQ ID NO: 36438 - DNA, 60 bp, Artificial
  Synthetic oligonucleotide
gatccagatgcagggtatctggcatttacaattgcgcatggggaagctatcaatttgtca

SEQ ID NO: 36439 - DNA, 54 bp, Artificial
  Synthetic oligonucleotide
ataaggccaattacattgtgatgggagatttgatcttttatgatgtcgcatcaa

SEQ ID NO: 36440 - DNA, 60 bp, Artificial
  Synthetic oligonucleotide
gctgctagaacattccttcagaagttcggtgttagacttccataaattgatggtcctcta

SEQ ID NO: 36441 - DNA, 60 bp, Artificial
  Synthetic oligonucleotide
catttttcccagggactgaaatgtttctggaagccttcagattttatcctctaacaattg

SEQ ID NO: 36442 - DNA, 60 bp, Artificial
  Synthetic oligonucleotide
ccagggactgaaatgtttctggaagccttcagattttatcctctaacaattggaatctac

SEQ ID NO: 36443 - DNA, 60 bp, Artificial
  Synthetic oligonucleotide
aattggtaacaacgatcttaccatccatcggctttcaggatatcttgccagatgggtgct

SEQ ID NO: 36444 - DNA, 60 bp, Artificial
  Synthetic oligonucleotide
aacaacgatcttaccatccatcggctttcaggatatcttgccagatgggtgctagatctg

SEQ ID NO: 36445 - DNA, 59 bp, Artificial
  Synthetic oligonucleotide
tctaaagaaggctctacgacagcgctatggcaccttgactgcagacaaatggatggcac

SEQ ID NO: 36446 - DNA, 60 bp, Artificial
  Synthetic oligonucleotide
gctaaaagcctgaaggatgtagagcagctgaagtggggtaaggggggtcttagtgatgct

SEQ ID NO: 36447 - DNA, 60 bp, Artificial
  Synthetic oligonucleotide
ctaacaattggaatctacagagtcaaacacgggctgatggaccctcagtatctaaagaag

SEQ ID NO: 36448 - DNA, 60 bp, Artificial
  Synthetic oligonucleotide
tacagagtcaaacacgggctgatggaccctcagtatctaaagaaggctctacgacagcgc

SEQ ID NO: 36449 - DNA, 60 bp, Artificial
  Synthetic oligonucleotide
cttaaaggcatcagtctttaaagagcatagagagattgaaatcaatgttcttctccctca

SEQ ID NO: 36450 - DNA, 60 bp, Artificial
  Synthetic oligonucleotide
ccagaacttggtgcattcttttccattcttcaggacatgcgcaataccatcatggcatcc

SEQ ID NO: 36451 - DNA, 60 bp, Artificial
  Synthetic oligonucleotide
gatctacatgcaccctgctgtgctgacagctggcagaatcagtgaaatgggtgtctgctt

SEQ ID NO: 36452 - DNA, 60 bp, Artificial
  Synthetic oligonucleotide
aactcaacaagcttggaaacaagcttatcaattgaggcaccatggggagcaataaatgtc

SEQ ID NO: 36453 - DNA, 60 bp, Artificial
  Synthetic oligonucleotide
ggctttacacttcctattatcctgaaggctttatatatgttgtcaacacgtgggagacaa

SEQ ID NO: 36454 - DNA, 60 bp, Artificial
  Synthetic oligonucleotide
tcagagggtgggtcagttaatccgttgtgggtgggtttagttttgagctaccttaagtag

SEQ ID NO: 36455 - DNA, 60 bp, Artificial
  Synthetic oligonucleotide
ctctcctcttctcatggcttataaagttgctattcactgctgcattcattggctgcgtga

SEQ ID NO: 36456 - DNA, 60 bp, Artificial
  Synthetic oligonucleotide
ttctctcctcttctcatggcttataaagttgctattcactgctgcattcattggctgcgt

SEQ ID NO: 36457 - DNA, 60 bp, Artificial
  Synthetic oligonucleotide
cctcttctcatggcttataaagttgctattcactgctgcattcattggctgcgtgaacgt

SEQ ID NO: 36458 - DNA, 60 bp, Artificial
  Synthetic oligonucleotide
tatcatgggggaaagaagcagtgaaccactttcatcttggtgatgatatggatcctgagc

SEQ ID NO: 36459 - DNA, 60 bp, Artificial
  Synthetic oligonucleotide
agggtgaagtcattcaagctatgcgaaaacagtgccacagggaaaacctgtgagatagac

SEQ ID NO: 36460 - DNA, 60 bp, Artificial
  Synthetic oligonucleotide
gtgcaaaagaatgtgaagtcctctttgacgacataagaaactctccaacgcacagcacag

SEQ ID NO: 36461 - DNA, 60 bp, Artificial
  Synthetic oligonucleotide
tctcaaagaaacacgtgccgcttacgcccacagtgttatcttgagtgctaacaaaatgga

SEQ ID NO: 36462 - DNA, 60 bp, Artificial
  Synthetic oligonucleotide
caggatatggacctgtttcaaacattaacaagctgtacattttctaaagagtatgcatgg

SEQ ID NO: 36463 - DNA, 60 bp, Artificial
  Synthetic oligonucleotide
ctcaggggtgggtcagttaatccgttgtgggtgggtttaggtgtaggctgccttaagtag

SEQ ID NO: 36464 - DNA, 60 bp, Artificial
  Synthetic oligonucleotide
cgggtatctggacaagcacaaggacgaagttgacaaagcaagtgctgacagcatgataac

SEQ ID NO: 36465 - DNA, 60 bp, Artificial
  Synthetic oligonucleotide
gtatgagaaagaccctgatgaccttaacaaaagggcattgagtgaccgggaaagcgttgc

SEQ ID NO: 36466 - DNA, 60 bp, Artificial
  Synthetic oligonucleotide
cctgatgaccttaacaaaagggcattgagtgaccgggaaagcgttgcacagtcaatccag

SEQ ID NO: 36467 - DNA, 60 bp, Artificial
  Synthetic oligonucleotide
agcttatcaattgaggcaccatggggagctataaatgtccaatcaaccttcaaacctact

SEQ ID NO: 36468 - DNA, 60 bp, Artificial
  Synthetic oligonucleotide
gcttatcaattgaggcaccatggggagctataaatgtccaatcaaccttcaaacctactg

SEQ ID NO: 36469 - DNA, 60 bp, Artificial
  Synthetic oligonucleotide
ccacttggtgctggggtgtagggactggctgcacctgttgtggattagatgtgaaagacc

SEQ ID NO: 36470 - DNA, 51 bp, Artificial
  Synthetic oligonucleotide
ctgacctaacatgtctacctccgtacacttatatatatgcacgtagcatat

SEQ ID NO: 36471 - DNA, 60 bp, Artificial
  Synthetic oligonucleotide
gcctggggtaaagaggctgtggataatttccaccttggagatgatatggatcctgagcta

SEQ ID NO: 36472 - DNA, 60 bp, Artificial
  Synthetic oligonucleotide
gcctggggtaaagaagctgtggataatttccaccttggagatgatatggatcctgagcta

SEQ ID NO: 36473 - DNA, 60 bp, Artificial
  Synthetic oligonucleotide
agctgttgtagattcttactggattcatgaacttggcactggttctccactagttcaaac

SEQ ID NO: 36474 - DNA, 59 bp, Artificial
  Synthetic oligonucleotide
aaaactcagggatgcagagaaggcagtggaggtggacccagatgacgttaacaagaaca

SEQ ID NO: 36475 - DNA, 58 bp, Artificial
  Synthetic oligonucleotide
caatctatttcagttgcaaaatctttgttaaagcttgatttaagcgggatcaaaaaga

SEQ ID NO: 36476 - DNA, 60 bp, Artificial
  Synthetic oligonucleotide
tggaccagaggataattgttatgtttatggttgcctggggaaaggaagcagtggacaact

SEQ ID NO: 36477 - DNA, 60 bp, Artificial
  Synthetic oligonucleotide
cttcccaacaattgcttgaatgcttcttcattaaaatgtgagataaaagggatatccact

SEQ ID NO: 36478 - DNA, 60 bp, Artificial
  Synthetic oligonucleotide
aagaagctttatgagctctttgccgatgactctttccagcaaaacaggatctacatgcac

SEQ ID NO: 36479 - DNA, 60 bp, Artificial
  Synthetic oligonucleotide
atgctggttgtaacatcattgaccacattgactcaccatcatcaatctgggtctttgctg

SEQ ID NO: 36480 - DNA, 60 bp, Artificial
  Synthetic oligonucleotide
aaccagttgatccaacagggcttgagcctgatgaccatctaaaggaaaaatctgccttga

SEQ ID NO: 36481 - DNA, 60 bp, Artificial
  Synthetic oligonucleotide
ttgatccaacagggcttgagcctgatgaccatttgaaggagaagtcttccttacggtatg

SEQ ID NO: 36482 - DNA, 60 bp, Artificial
  Synthetic oligonucleotide
ttgatccaacagggcttgagcctgatgaccatctgaaggagaagtcttccttacggtatg

SEQ ID NO: 36483 - DNA, 60 bp, Artificial
  Synthetic oligonucleotide
ttcctggcaaccggaacaacccagttcctgacgatggtcttaccctccaccgcctcagtg

SEQ ID NO: 36484 - DNA, 60 bp, Artificial
  Synthetic oligonucleotide
tttcctggcaaccggaacaacccagttcctgacgatggtcttaccctccaccgcctcagt

SEQ ID NO: 36485 - DNA, 60 bp, Artificial
  Synthetic oligonucleotide
agggcacaagcaagaattgttaggaaatatcaaagaactgaggctgatagaggttttttt

SEQ ID NO: 36486 - DNA, 57 bp, Artificial
  Synthetic oligonucleotide
agggcacaagcaagaattgttaggaaatatcaaagaactgaggctgatagaggtttt

SEQ ID NO: 36487 - DNA, 60 bp, Artificial
  Synthetic oligonucleotide
aggtctattagaccacaaaaatagcagcaaaatgggtgggtggtaggggacagcaaactt

SEQ ID NO: 36488 - DNA, 60 bp, Artificial
  Synthetic oligonucleotide
gccctgagtttccaggtagtttcaggaagaaatgcaactttgctactacccctatttgtg

SEQ ID NO: 36489 - DNA, 60 bp, Artificial
  Synthetic oligonucleotide
gccctgagtttccaggtagtttcaggaagaaatgcaactttgctcctacccctatttgtg

SEQ ID NO: 36490 - DNA, 57 bp, Artificial
  Synthetic oligonucleotide
aatttaactacctcatttgctttttccttgattgtctttttagggagcatactacta

SEQ ID NO: 36491 - DNA, 60 bp, Artificial
  Synthetic oligonucleotide
ggggtaaggaggctgtgaaccatttccatcttggtgatgatatggatcctgaattgagac

SEQ ID NO: 36492 - DNA, 60 bp, Artificial
  Synthetic oligonucleotide
gatatggaccctgaactcagaacacttgcacaaagtctcattgaccaaaaggtcaaggag

SEQ ID NO: 36493 - DNA, 60 bp, Artificial
  Synthetic oligonucleotide
ggaattattatactactgattggtgaatgtatttgcactaggggttgggttgggtgggcc

SEQ ID NO: 36494 - DNA, 60 bp, Artificial
  Synthetic oligonucleotide
aagacacaaaaaaatgtgttaacacaaaacttgagcaaccacaaagcattttgatcgaac

SEQ ID NO: 36495 - DNA, 60 bp, Artificial
  Synthetic oligonucleotide
ggagaggagagtatttgagatcccttaaatgattgagttggaatttaatgatgtcgctgt

SEQ ID NO: 36496 - DNA, 60 bp, Artificial
  Synthetic oligonucleotide
aaaaggagaggagagtatttgagatcccttaaatgattgagttggaatttaatgatgtcg

SEQ ID NO: 36497 - DNA, 53 bp, Artificial
  Synthetic oligonucleotide
aaaataggatcacctggaatgatggtgaagaggtttacctgtctttcttccct

SEQ ID NO: 36498 - DNA, 60 bp, Artificial
  Synthetic oligonucleotide
agcatcaagctggacagtgagcaaattaactgatgttcaatcagcacttacagttgtttc

SEQ ID NO: 36499 - DNA, 60 bp, Artificial
  Synthetic oligonucleotide
cagtgagcaaattaactgatgttcaatcagcacttacagttgtttctggcttaggctgga

SEQ ID NO: 36500 - DNA, 60 bp, Artificial
  Synthetic oligonucleotide
cagttgtttctggcttaggctggaagaaaaccaacgtgagcgctgcagccagagacttcc

SEQ ID NO: 36501 - DNA, 60 bp, Artificial
  Synthetic oligonucleotide
gtttctggcttaggctggaagaaaaccaacgtgagcgctgcagccagagacttcctggct

SEQ ID NO: 36502 - DNA, 60 bp, Artificial
  Synthetic oligonucleotide
cccactggctgaaaaaaataggatcacctggaatgatggtgaagaggtttacctgtcttt

SEQ ID NO: 36503 - DNA, 60 bp, Artificial
  Synthetic oligonucleotide
gcatcttgggtgggtggttgcggaccaaaaaaccattggaagttcattcaacattctgat

SEQ ID NO: 36504 - DNA, 60 bp, Artificial
  Synthetic oligonucleotide
ttttaaaatttaatcaggctaaatgtgggttttaaacccacaaaataacagcatcttggg

SEQ ID NO: 36505 - DNA, 51 bp, Artificial
  Synthetic oligonucleotide
gtagtgtactccacactacaaacttgccattgatgaggaatattgagcaaa

SEQ ID NO: 36506 - DNA, 60 bp, Artificial
  Synthetic oligonucleotide
agtagtgtactccacactacaaacttgccattgatgaggaatattgagcaaaaaggagag

SEQ ID NO: 36507 - DNA, 60 bp, Artificial
  Synthetic oligonucleotide
gaatcttctacattaaagggagagagattaaagttagtctctcaaaaagaagtgaatggg

SEQ ID NO: 36508 - DNA, 60 bp, Artificial
  Synthetic oligonucleotide
gacgggcagctgtgtcaacattggaggacaaattggcagaattcaaaagacaacttgccg

SEQ ID NO: 36509 - DNA, 57 bp, Artificial
  Synthetic oligonucleotide
atgagcaccctcaaagaaatacaggaagagatcacccgccatgagcagcagattgtc

SEQ ID NO: 36510 - DNA, 60 bp, Artificial
  Synthetic oligonucleotide
gccaagtgggcagacagcagactggttttctatcggtcagtacataatgggatttgcact

SEQ ID NO: 36511 - DNA, 60 bp, Artificial
  Synthetic oligonucleotide
acataatgggatttgcacttgcaatcgtgcttaaggcgttgtacatgttgtcgacacgcg

SEQ ID NO: 36512 - DNA, 60 bp, Artificial
  Synthetic oligonucleotide
agacaacttgccgatctggtgtcaagtcaaaagatgggtgagaaacctgttgatccgact

SEQ ID NO: 36513 - DNA, 60 bp, Artificial
  Synthetic oligonucleotide
cattgatgagccaagtgggcagacagcagactggttttctatcggtcagtacataatggg

SEQ ID NO: 36514 - DNA, 60 bp, Artificial
  Synthetic oligonucleotide
tgagttgattgatcttgcagactcaggggacccaacaccgcctgactccatcaagtcccc

SEQ ID NO: 36515 - DNA, 60 bp, Artificial
  Synthetic oligonucleotide
caccgcctgactccatcaagtccccacaggcaccatgggtatttgcatgtgcaccagata

SEQ ID NO: 36516 - DNA, 60 bp, Artificial
  Synthetic oligonucleotide
gactccatcaagtccccacaggcaccatgggtatttgcatgtgcaccagatagatgcccc

SEQ ID NO: 36517 - DNA, 60 bp, Artificial
  Synthetic oligonucleotide
gatgacagttcaattgaggagattaacgggataagacgtccaaaacacctgtatgtctca

SEQ ID NO: 36518 - DNA, 59 bp, Artificial
  Synthetic oligonucleotide
cccctacatgtatttatattgctgggatggctgaacttggggcattcttttctatactc

SEQ ID NO: 36519 - DNA, 60 bp, Artificial
  Synthetic oligonucleotide
gcacttgcaatcgtgcttaaggcgttgtacatgttgtcgacacgcgggagacaaaccatc

SEQ ID NO: 36520 - DNA, 50 bp, Artificial
  Synthetic oligonucleotide
gaatttatattgggcccgttaatgtgaaactgagctatcattgtttcctt

SEQ ID NO: 36521 - DNA, 60 bp, Artificial
  Synthetic oligonucleotide
gcaccagatagatgcccccctacatgtatttatattgctgggatggctgaacttggggca

SEQ ID NO: 36522 - DNA, 60 bp, Artificial
  Synthetic oligonucleotide
gctggggtaggtaagtttactaattgtaaggtagctactaaattgattattgcactaaag

SEQ ID NO: 36523 - DNA, 60 bp, Artificial
  Synthetic oligonucleotide
cctggctgaaattgatgagttgattgatcttgcagactcaggggacccaacaccgcctga

SEQ ID NO: 36524 - DNA, 60 bp, Artificial
  Synthetic oligonucleotide
agcaatgatgcatacatgctcgggagggaaaaagcattacgggaatcacacctggctgaa

SEQ ID NO: 36525 - DNA, 60 bp, Artificial
  Synthetic oligonucleotide
catcatcagtccagtaatgggtgtaataggattctctttctttgtcaaagattggccaga

SEQ ID NO: 36526 - DNA, 60 bp, Artificial
  Synthetic oligonucleotide
aacaaggttccaccaaagaagaagaatttcttgtgagcaatgatgcatacatgctcggga

SEQ ID NO: 36527 - DNA, 60 bp, Artificial
  Synthetic oligonucleotide
gtcaaagattggccagataagattgaggagttccttattaaaccatgtcccttcttgaaa

SEQ ID NO: 36528 - DNA, 60 bp, Artificial
  Synthetic oligonucleotide
caccaggaagatttaggacaattgtctgtggcctcttccctgcccaaataatgcatagaa

SEQ ID NO: 36529 - DNA, 60 bp, Artificial
  Synthetic oligonucleotide
gaggagattaacgggataagacgtccaaaacacctgtatgtctcaatgccaactgcacag

SEQ ID NO: 36530 - DNA, 60 bp, Artificial
  Synthetic oligonucleotide
ggacaattgtctgtggcctcttccctgcccaaataatgcatagaaacatcatcagtccag

SEQ ID NO: 36531 - DNA, 60 bp, Artificial
  Synthetic oligonucleotide
catgagcacacccttagggatgaagtgcccagaacatgcaggttcctttagaaagaagtg

SEQ ID NO: 36532 - DNA, 60 bp, Artificial
  Synthetic oligonucleotide
agtatgtgtttatatcaaactgaactatatagcccttatactacttccaaaaaaaactac

SEQ ID NO: 36533 - DNA, 60 bp, Artificial
  Synthetic oligonucleotide
agtatgtgtttatatcaagctgaactatatagcccttatactacttccaaaaaaaactac

SEQ ID NO: 36534 - DNA, 50 bp, Artificial
  Synthetic oligonucleotide
tctgtcagccttacagaatgtgcatcatttctcacgtcaatcaaagcatg

SEQ ID NO: 36535 - DNA, 60 bp, Artificial
  Synthetic oligonucleotide
aggtgtggggtttaatttagtctgttctgtcagccttacagaatgtgcatcatttctcac

SEQ ID NO: 36536 - DNA, 60 bp, Artificial
  Synthetic oligonucleotide
tcaaagcatgtgattctgccatgtgttatggttcaagcacagctaatctagtaaggggtc

SEQ ID NO: 36537 - DNA, 60 bp, Artificial
  Synthetic oligonucleotide
catttctcacgtcaatcaaagcatgtgattctgccatgtgttatggttcaagcacagcta

SEQ ID NO: 36538 - DNA, 60 bp, Artificial
  Synthetic oligonucleotide
ctgatagtaaaccgggatctatcttttcaagatttagctgaaaatccatgtcaggttgat

SEQ ID NO: 36539 - DNA, 60 bp, Artificial
  Synthetic oligonucleotide
tcaatctgatagtaaaccgggatctatcttttcaagatttagctgaaaatccatgtcagg

SEQ ID NO: 36540 - DNA, 54 bp, Artificial
  Synthetic oligonucleotide
gtatcatcaattgatggtgcatggggctcaggtgtggggtttaatttagtctgt

SEQ ID NO: 36541 - DNA, 60 bp, Artificial
  Synthetic oligonucleotide
ccatgtcaggttgatttaagtgtatcatcaattgatggtgcatggggctcaggtgtgggg

SEQ ID NO: 36542 - DNA, 60 bp, Artificial
  Synthetic oligonucleotide
tcatgatggagtggggttctgatattgtcaaccactttcatctgggtgatgatatggacc

SEQ ID NO: 36543 - DNA, 60 bp, Artificial
  Synthetic oligonucleotide
gctaatcctaaatttggcgagtggcaggtggaggttgtcaataatcattttccagcaaac

SEQ ID NO: 36544 - DNA, 60 bp, Artificial
  Synthetic oligonucleotide
ggcaggtggaggttgtcaataatcattttcctggaaacaggaacaatccaattaacagcg

SEQ ID NO: 36545 - DNA, 60 bp, Artificial
  Synthetic oligonucleotide
ggcgagtggcaggtggaggttgtcaataatcattttccagcaaacaggaacaatccaatt

SEQ ID NO: 36546 - DNA, 60 bp, Artificial
  Synthetic oligonucleotide
tggcaggtggaggttgtcaataatcattttcctggaaacaggaacaatccaattaacagc

SEQ ID NO: 36547 - DNA, 51 bp, Artificial
  Synthetic oligonucleotide
tttatgatgtcgcatcaaccggtgcaaatggatttgatccagatgcagggt

SEQ ID NO: 36548 - DNA, 54 bp, Artificial
  Synthetic oligonucleotide
tttatgatgtcgcatcaaccggtgcaaatggatttgatccagatgcagggtttg

SEQ ID NO: 36549 - DNA, 50 bp, Artificial
  Synthetic oligonucleotide
ggtgggtggttggggacagtaattgactacagcattattctagtatttaa

SEQ ID NO: 36550 - DNA, 60 bp, Artificial
  Synthetic oligonucleotide
ttttaccccaaacaatctaagcagcattgtaaatgggtgggtggttggggacagtaattg

SEQ ID NO: 36551 - DNA, 59 bp, Artificial
  Synthetic oligonucleotide
gtaactacctgccaggggttacgcttgaccaaattcgcatcttctacattaaaggacgc

SEQ ID NO: 36552 - DNA, 60 bp, Artificial
  Synthetic oligonucleotide
gactacggtcttaccttccaccgtatcagtggataccttgcccggtacctacttggaaag

SEQ ID NO: 36553 - DNA, 60 bp, Artificial
  Synthetic oligonucleotide
cttccaccgtatcagtggataccttgcccggtacctacttggaaagtaccttgcagagac

SEQ ID NO: 36554 - DNA, 60 bp, Artificial
  Synthetic oligonucleotide
tacctgtactcaatacgaatttccctggaaacaggaacaatgcagtgcctgactacggtc

SEQ ID NO: 36555 - DNA, 60 bp, Artificial
  Synthetic oligonucleotide
cgaatttccctggaaacaggaacaatgcagtgcctgactacggtcttaccttccaccgta

SEQ ID NO: 36556 - DNA, 60 bp, Artificial
  Synthetic oligonucleotide
actaactttcagcgtaactacctgccaggggttacgcttgaccaaattcgcatcttctac

SEQ ID NO: 36557 - DNA, 60 bp, Artificial
  Synthetic oligonucleotide
caaaaattgtgaaccctcttgctgagaagaatggcatcacatgggagagcgggccagaag

SEQ ID NO: 36558 - DNA, 60 bp, Artificial
  Synthetic oligonucleotide
aagatgtccctaataacatcgggagtacttttgacccagagtcaggatacactaactttc

SEQ ID NO: 36559 - DNA, 60 bp, Artificial
  Synthetic oligonucleotide
acatcgggagtacttttgacccagagtcaggatacactaactttcagcgtaactacctgc

SEQ ID NO: 36560 - DNA, 60 bp, Artificial
  Synthetic oligonucleotide
gactaaacaaggggtttttaccccaaacaatctaagcagcattgtaaatgggtgggtggt

SEQ ID NO: 36561 - DNA, 56 bp, Artificial
  Synthetic oligonucleotide
agattctacccacttgccattgggatctacaaagtgcagaggaaagaaatggaccc

SEQ ID NO: 36562 - DNA, 60 bp, Artificial
  Synthetic oligonucleotide
acttggaaagtaccttgcagagacagaaccagaaaagctcataatgagaacaaaaattgt

SEQ ID NO: 36563 - DNA, 60 bp, Artificial
  Synthetic oligonucleotide
gtctcagggctcggatggaagaagacaaatgtcagcagtgctgcaagggagttcctatcc

SEQ ID NO: 36564 - DNA, 55 bp, Artificial
  Synthetic oligonucleotide
acttggaaagtaccttgcagagacagaaccagaaaagctcataatgagaacaaaa

SEQ ID NO: 36565 - DNA, 60 bp, Artificial
  Synthetic oligonucleotide
gttcctatccaaattcggcatcaggatgtgaacacccagagaagtgcattaatcgggcta

SEQ ID NO: 36566 - DNA, 60 bp, Artificial
  Synthetic oligonucleotide
cctcttgctgagaagaatggcatcacatgggagagcgggccagaagtctacctgtccttc

SEQ ID NO: 36567 - DNA, 60 bp, Artificial
  Synthetic oligonucleotide
ccagccagaatagcagacacacctggacccaagatcactaatctgaagaccatcaattgt

SEQ ID NO: 36568 - DNA, 60 bp, Artificial
  Synthetic oligonucleotide
catccagccagaatagcagacacacctggacccaagatcactaatctgaagaccatcaat

SEQ ID NO: 36569 - DNA, 60 bp, Artificial
  Synthetic oligonucleotide
atttcctaggttttatgttgctgcgagaatgggtgaatttgacccttctagaaggttttg

SEQ ID NO: 36570 - DNA, 60 bp, Artificial
  Synthetic oligonucleotide
tatctcattttctgtcaaaaaaagaattccctgctttcattggatatgattcaataacat

SEQ ID NO: 36571 - DNA, 60 bp, Artificial
  Synthetic oligonucleotide
gcctgggaatgacctcataggtgagctatgcgtggttcaagcagctagagtagcaagttc

SEQ ID NO: 36572 - DNA, 55 bp, Artificial
  Synthetic oligonucleotide
ccacatctacttctctgtcagcccagtcgaactgcacctagccaagaaatcacgg

SEQ ID NO: 36573 - DNA, 60 bp, Artificial
  Synthetic oligonucleotide
caattgaagaccagatagtagagattcacaggaagactctcttggaaggaatgaagcttg

SEQ ID NO: 36574 - DNA, 60 bp, Artificial
  Synthetic oligonucleotide
ttgcctgggaatgacctcataggtgagctatgcgtggttcaagcagctagagtagcaagt

SEQ ID NO: 36575 - DNA, 60 bp, Artificial
  Synthetic oligonucleotide
gagtaggtacttaaagcttctggttaaggcatctgggctattcaacacctcaattgaaga

SEQ ID NO: 36576 - DNA, 60 bp, Artificial
  Synthetic oligonucleotide
gcttctggttaaggcatctgggctattcaacacctcaattgaagaccagatagtagagat

SEQ ID NO: 36577 - DNA, 60 bp, Artificial
  Synthetic oligonucleotide
tactatcttgacgatcatatttttctctctgatgaacctaactcaatcatgagtaggtac

SEQ ID NO: 36578 - DNA, 51 bp, Artificial
  Synthetic oligonucleotide
ctctctgatgaacctaactcaatcatgagtaggtacttaaagcttctggtt

SEQ ID NO: 36579 - DNA, 60 bp, Artificial
  Synthetic oligonucleotide
ccaaggaacaaaggcagctgagactctagataatgtgatggtatctctaccaggattccc

SEQ ID NO: 36580 - DNA, 60 bp, Artificial
  Synthetic oligonucleotide
ctccgacatcttcttcatcatagcctcaggtttgttgccccttactaggttaaggactat

SEQ ID NO: 36581 - DNA, 60 bp, Artificial
  Synthetic oligonucleotide
ccgacatcttcttcatcatagcctcaggtttgttgccccttactaggttaaggactatca

SEQ ID NO: 36582 - DNA, 60 bp, Artificial
  Synthetic oligonucleotide
taaggactatcatcatcttaacatctttcttccagtcccttcctttggcagttcccctct

SEQ ID NO: 36583 - DNA, 60 bp, Artificial
  Synthetic oligonucleotide
tcttaacatctttcttccagtcccttcctttggcagttcccctctcttttactagctgga

SEQ ID NO: 36584 - DNA, 51 bp, Artificial
  Synthetic oligonucleotide
ataagcaaactcattcacccaggcagtgatggtacctgagtctgcagcttc

SEQ ID NO: 36585 - DNA, 60 bp, Artificial
  Synthetic oligonucleotide
gcttggccaaaatgagttgtaacgactcatttaagttctttttgtacaatgatgagtctt

SEQ ID NO: 36586 - DNA, 60 bp, Artificial
  Synthetic oligonucleotide
ggaggatgctctctccactgtgtggactaaagactggccaaccccgaaggagcagctctc

SEQ ID NO: 36587 - DNA, 60 bp, Artificial
  Synthetic oligonucleotide
ctgctctgcgctggccaacaggtgttccttctcttgagtttatcgagtactatcttgacg

SEQ ID NO: 36588 - DNA, 60 bp, Artificial
  Synthetic oligonucleotide
tatctgctctgcgctggccaacaggtgttccttctcttgagtttatcgagtactatcttg

SEQ ID NO: 36589 - DNA, 60 bp, Artificial
  Synthetic oligonucleotide
tcatctttagtttttttgaaaccaaaatcctcaaaggacaaaaaacggacatttcctagg

SEQ ID NO: 36590 - DNA, 60 bp, Artificial
  Synthetic oligonucleotide
ccctgtattgcgataagacaaagtctaaacaaactgccttaacaatgcaatcatctttag

SEQ ID NO: 36591 - DNA, 60 bp, Artificial
  Synthetic oligonucleotide
tggtccaaggaacaaaggcagctgagactctagataatgtgatggtatctctaccaggat

SEQ ID NO: 36592 - DNA, 60 bp, Artificial
  Synthetic oligonucleotide
cagggagggaatcagagagcactttcagagcctgaatggtccaaggaacaaaggcagctg

SEQ ID NO: 36593 - DNA, 61 bp, Artificial
  Synthetic oligonucleotide
ctcagagaactaagttgtatgatccaattattcaggaactctttagtgagtctattaacag

SEQ ID NO: 36594 - DNA, 60 bp, Artificial
  Synthetic oligonucleotide
tcaataacatctcagagaactaagttgtatgatccaattattcaggaactctttagtgag

SEQ ID NO: 36595 - DNA, 50 bp, Artificial
  Synthetic oligonucleotide
aaaagacacaaggttgactacctcctatctgctctgcgctggccaacagg

SEQ ID NO: 36596 - DNA, 60 bp, Artificial
  Synthetic oligonucleotide
ctttagtgagtctattaacagtttaaaaagacacaaggttgactacctcctatctgctct

SEQ ID NO: 36597 - DNA, 60 bp, Artificial
  Synthetic oligonucleotide
tagagaactccaacatgaatagaccatgtgcatcagcaatggcttcaccagccctgtttg

SEQ ID NO: 36598 - DNA, 59 bp, Artificial
  Synthetic oligonucleotide
atccaccttcacccttccctccccactttggcagcttacttgcccactttagagcgata

SEQ ID NO: 36599 - DNA, 60 bp, Artificial
  Synthetic oligonucleotide
cccaatttagaaacccacccaaattagtaaccaattatccaccttcacccttccctcccc

SEQ ID NO: 36600 - DNA, 60 bp, Artificial
  Synthetic oligonucleotide
ccccccaaatttcccccaatttagaaacccacccaaattagtaaccaattatccaccttc

SEQ ID NO: 36601 - DNA, 60 bp, Artificial
  Synthetic oligonucleotide
tgttgtccctgtgacagggagggaatcagagagcactttcagagcctgaatggtccaagg

SEQ ID NO: 36602 - DNA, 60 bp, Artificial
  Synthetic oligonucleotide
gccctgtttggaagatccaaatcaatgatgcctgcaaagctaggatgcatcatagcccgt

SEQ ID NO: 36603 - DNA, 55 bp, Artificial
  Synthetic oligonucleotide
gccctgtttggaagatccaaatcaatgatgcctgcaaagctaggatgcatcatag

SEQ ID NO: 36604 - DNA, 60 bp, Artificial
  Synthetic oligonucleotide
ccaacatgaatagaccatgtgcatcagcaatggcttcaccagccctgtttggaagatcca

SEQ ID NO: 36605 - DNA, 60 bp, Artificial
  Synthetic oligonucleotide
gcgtcttagaagaaacagcagaaagacatatgctttgggaacttgatctgatgaactcac

SEQ ID NO: 36606 - DNA, 60 bp, Artificial
  Synthetic oligonucleotide
gcgtcttagaagaaacagcagaaagacatatgctttgggaactcgacctgatgaactcac

SEQ ID NO: 36607 - DNA, 60 bp, Artificial
  Synthetic oligonucleotide
gaggggttaaccttgccgtacttaacacgcatttcccaggaacccagtccattccactgc

SEQ ID NO: 36608 - DNA, 60 bp, Artificial
  Synthetic oligonucleotide
gtggagttaaccttgccgtacttaacacgcatttcccaggaacccagtccattccactgc

SEQ ID NO: 36609 - DNA, 60 bp, Artificial
  Synthetic oligonucleotide
cagctgctaacatagcacttagctggagttcagttgaacacaggggcaacaaaattttag

SEQ ID NO: 36610 - DNA, 60 bp, Artificial
  Synthetic oligonucleotide
cagctgccaatatagcacttagctggagttcagttgaacacaggggcaacaaaatcctag

SEQ ID NO: 36611 - DNA, 60 bp, Artificial
  Synthetic oligonucleotide
gcaagcccagtgttacaaaggtgtttccaagatggggctatagtgaagcaaaacccatcc

SEQ ID NO: 36612 - DNA, 60 bp, Artificial
  Synthetic oligonucleotide
gaagcgatagttttcaatgatgtacctcaacggactcaatctacgtttgatccggaggca

SEQ ID NO: 36613 - DNA, 53 bp, Artificial
  Synthetic oligonucleotide
gaggaaggttctgcgccaacgttatggagctctgactgcagaacaatggatga

SEQ ID NO: 36614 - DNA, 60 bp, Artificial
  Synthetic oligonucleotide
atcagggctgcatttgatgctgtcggtgcattgccttgggctaagagtgggttctttcct

SEQ ID NO: 36615 - DNA, 60 bp, Artificial
  Synthetic oligonucleotide
cattttatgctcaaagcccagtcaaccaggctgctgtgcgtgaggcagttgtgatacctc

SEQ ID NO: 36616 - DNA, 60 bp, Artificial
  Synthetic oligonucleotide
atggctgaagcgatagttttcaatgatgtacctcaacggactcaatctacgtttgatccg

SEQ ID NO: 36617 - DNA, 60 bp, Artificial
  Synthetic oligonucleotide
cggttgatgattcagcccttaccctgcaccgcctctccggctaccttgcgagatgggtaa

SEQ ID NO: 36618 - DNA, 60 bp, Artificial
  Synthetic oligonucleotide
gagatgggtaatgacattttatgctcaaagcccagtcaaccaggctgctgtgcgtgaggc

SEQ ID NO: 36619 - DNA, 52 bp, Artificial
  Synthetic oligonucleotide
gtcaatcttacttttggacagtgcacatttccagtggttaataaccattatc

SEQ ID NO: 36620 - DNA, 60 bp, Artificial
  Synthetic oligonucleotide
ccggttgatgattcagcccttaccctgcaccgcctctccggctaccttgcgagatgggta

SEQ ID NO: 36621 - DNA, 60 bp, Artificial
  Synthetic oligonucleotide
caggtgcagaaatgtttctgcaaaccttcacctttttccctctggtgattgagatgcacc

SEQ ID NO: 36622 - DNA, 60 bp, Artificial
  Synthetic oligonucleotide
gatgctgtcggtgcattgccttgggctaagagtgggttctttccttttgctagggagttc

SEQ ID NO: 36623 - DNA, 60 bp, Artificial
  Synthetic oligonucleotide
gccttaagtagcctttttttgtatatatagatgtagatttcatttgatccttaaactaat

SEQ ID NO: 36624 - DNA, 60 bp, Artificial
  Synthetic oligonucleotide
tatgctaagatactcagttcttgcaatcccaatgctaagggaagcattgctatggactat

SEQ ID NO: 36625 - DNA, 60 bp, Artificial
  Synthetic oligonucleotide
caaaatctgtgagacttgctataatgcttggaggtagtatccctctcattgcttctgttg

SEQ ID NO: 36626 - DNA, 60 bp, Artificial
  Synthetic oligonucleotide
caacagaagcaatgagagggatactacctccaagcattatagcaagtctcacagattttg

SEQ ID NO: 36627 - DNA, 60 bp, Artificial
  Synthetic oligonucleotide
gatgcaaaatctgtgagacttgctataatgcttggaggtagtatccctctcattgcttct

SEQ ID NO: 36628 - DNA, 60 bp, Artificial
  Synthetic oligonucleotide
cagttcttgcaatcccaatgctaagggaagcattgctatggactattacagtgacaatct

SEQ ID NO: 36629 - DNA, 60 bp, Artificial
  Synthetic oligonucleotide
aagattctcattgtttgcagtctcttctatgagcttcactcttatcatgctatcaagcct

SEQ ID NO: 36630 - DNA, 61 bp, Artificial
  Synthetic oligonucleotide
ctgtcaggaaaatcttgacctgattaagaaaatgagtatcacttcatgtttgactttcttg

SEQ ID NO: 36631 - DNA, 58 bp, Artificial
  Synthetic oligonucleotide
actttctgtcaggaaaatcttgacctgattaagaaaatgagtatcacttcatgtttga

SEQ ID NO: 36632 - DNA, 60 bp, Artificial
  Synthetic oligonucleotide
actttctgtcaggaaaatcttgacctgattaagaaaatgagtatcacttcatgtttgact

SEQ ID NO: 36633 - DNA, 60 bp, Artificial
  Synthetic oligonucleotide
ttttcttaatcaggtcaagattttcctgacagaaagtcttaaagttgaatgcgacctggt

SEQ ID NO: 36634 - DNA, 60 bp, Artificial
  Synthetic oligonucleotide
tgcattcaactttaagactttttgtcaggaaaatcttgacctgattaagaaaatgagtat

SEQ ID NO: 36635 - DNA, 60 bp, Artificial
  Synthetic oligonucleotide
cccactataggaatcaatgtaatgcatgatgaacattgcacagggcaatgcccaacagac

SEQ ID NO: 36636 - DNA, 50 bp, Artificial
  Synthetic oligonucleotide
cccactataggaattaatgtaatgcatgatgaacattgcacagggcaatg

SEQ ID NO: 36637 - DNA, 60 bp, Artificial
  Synthetic oligonucleotide
cacaccaatagaggggacattaactaactacccagaatcaaggaagtatgatctggagga

SEQ ID NO: 36638 - DNA, 60 bp, Artificial
  Synthetic oligonucleotide
tacccagaatcaaggaagtatgatctggaggaaattgctgatgtcctagaaggattcatt

SEQ ID NO: 36639 - DNA, 60 bp, Artificial
  Synthetic oligonucleotide
gctgtatcagaattttgcctgaaagatgatgtctctactattaagtcagaaataacatat

SEQ ID NO: 36640 - DNA, 66 bp, Artificial
  Synthetic oligonucleotide
gctgtatcagaattttgcctgaaagatgatgtctctactattaagtcagaaataacatatgagaag

SEQ ID NO: 36641 - DNA, 60 bp, Artificial
  Synthetic oligonucleotide
atttctaaaatactagaggttacagaccagcaccatcggtctatatctggaaggcaagaa

SEQ ID NO: 36642 - DNA, 60 bp, Artificial
  Synthetic oligonucleotide
gtcacaccaatagaggggacattaactaactacccagaatcaaggaagtatgatctggag

SEQ ID NO: 36643 - DNA, 60 bp, Artificial
  Synthetic oligonucleotide
aatcacaactataattgcaagatgttgctacttcttgtcttattaatcccctgctatgta

SEQ ID NO: 36644 - DNA, 60 bp, Artificial
  Synthetic oligonucleotide
tgcaagatgttgctacttcttgtcttattaatcccctgctatgtatcagcctctcctgta

SEQ ID NO: 36645 - DNA, 60 bp, Artificial
  Synthetic oligonucleotide
atcccctgctatgtatcagcctctcctgtagtaacaagatgcttccatggagggcaattg

SEQ ID NO: 36646 - DNA, 60 bp, Artificial
  Synthetic oligonucleotide
gctatgtatcagcctctcctgtagtaacaagatgcttccatggagggcaattgatagcag

SEQ ID NO: 36647 - DNA, 60 bp, Artificial
  Synthetic oligonucleotide
tttggaaatagaggcaaagtgtgttggatgcccatcatgttttactagttactcctgcag

SEQ ID NO: 36648 - DNA, 60 bp, Artificial
  Synthetic oligonucleotide
gataaccatgaaactattgacgtagctaatgtcagacatctccttggagatctgcagttt

SEQ ID NO: 36649 - DNA, 56 bp, Artificial
  Synthetic oligonucleotide
tcgcagataaccatgaaactattgacgtagctaatgtcagacatctccttggagat

SEQ ID NO: 36650 - DNA, 60 bp, Artificial
  Synthetic oligonucleotide
tcgcagataaccatgaaactattgacgtagctaatgtcagacatctccttggagatctgc

SEQ ID NO: 36651 - DNA, 60 bp, Artificial
  Synthetic oligonucleotide
gtggacaaattaatgatttgggatcattttctcaaggctgtggcaacatacagagaacca

SEQ ID NO: 36652 - DNA, 60 bp, Artificial
  Synthetic oligonucleotide
tttgggtgccttgctgtaaatacaggctgtgtctttggttcttgtcaggatataataagg

SEQ ID NO: 36653 - DNA, 60 bp, Artificial
  Synthetic oligonucleotide
cccactataggaattaatgtaatgcatgatgaacattgcacagggcaatgtccaacagat

SEQ ID NO: 36654 - DNA, 56 bp, Artificial
  Synthetic oligonucleotide
cccactataggaatcaatgtaatgcatgatgaacattgcacagggcaatgcccaac

SEQ ID NO: 36655 - DNA, 60 bp, Artificial
  Synthetic oligonucleotide
tagaggcaaagtgtgttgggtgcccatcatgttttactagttactcctgcagcttcaaga

SEQ ID NO: 36656 - DNA, 60 bp, Artificial
  Synthetic oligonucleotide
ttggaaatagaggcaaagtgtgttggatgcccatcatgttttactagttactcctgcagc

SEQ ID NO: 36657 - DNA, 60 bp, Artificial
  Synthetic oligonucleotide
aaggcaagaatcattggctagtgctacccctgggagtaagtccaaggaatgtggtcatgc

SEQ ID NO: 36658 - DNA, 60 bp, Artificial
  Synthetic oligonucleotide
aggcaagagtcattggctagtgctacccctgggagtaagtccaaggagtgtggtcatgca

SEQ ID NO: 36659 - DNA, 60 bp, Artificial
  Synthetic oligonucleotide
gttcatctctcgtaatctcaatattattatctatgttgatactaagctttgtcacaccaa

SEQ ID NO: 36660 - DNA, 60 bp, Artificial
  Synthetic oligonucleotide
attcctgggaaagcattgtgattactataaaactttcgaacataatagtggctactcaca

SEQ ID NO: 36661 - DNA, 60 bp, Artificial
  Synthetic oligonucleotide
gcagagaacatattcaaccatgcatctccttgaatcagtattcctgggaaagcattgtga

SEQ ID NO: 36662 - DNA, 60 bp, Artificial
  Synthetic oligonucleotide
ttgctaaaatattggaggttacagatcagcaccatcggtctatatctggaaggcaagagt

SEQ ID NO: 36663 - DNA, 51 bp, Artificial
  Synthetic oligonucleotide
caaataaatgtggcttttgcacatgtggagagttggaagatcaagaaggtt

SEQ ID NO: 36664 - DNA, 60 bp, Artificial
  Synthetic oligonucleotide
gagagatgggcaggatacaggcaatgatttcggagagtattgtttgtcccatagctgcag

SEQ ID NO: 36665 - DNA, 60 bp, Artificial
  Synthetic oligonucleotide
gatacaaatcacaactataattgcaagatgttgctacttcttgtcttattaatcccctgc

SEQ ID NO: 36666 - DNA, 60 bp, Artificial
  Synthetic oligonucleotide
gtgtctactgattgctcaaaacaccatcctaatagtcgcagcatcggatgattgctggac

SEQ ID NO: 36667 - DNA, 60 bp, Artificial
  Synthetic oligonucleotide
ggaatgtataggccctttacagcaagtggatacatgcgacgataaagcaagcagatctta

SEQ ID NO: 36668 - DNA, 60 bp, Artificial
  Synthetic oligonucleotide
ggaatgtataggccctttacagcaagtggatacatgcgatgataaatcaagcaggtctta

SEQ ID NO: 36669 - DNA, 60 bp, Artificial
  Synthetic oligonucleotide
gcagagaacatatccaaccatgcatctccttgaatcagtattcctgggaaagcattgtga

SEQ ID NO: 36670 - DNA, 60 bp, Artificial
  Synthetic oligonucleotide
agcataagaaagcagagaacatattcaaccatgcatctccttgaatcagtattcctggga

SEQ ID NO: 36671 - DNA, 60 bp, Artificial
  Synthetic oligonucleotide
caggcaatgatttcggagagtattgtttgtcccatagctgcagaatagagaggttcccca

SEQ ID NO: 36672 - DNA, 60 bp, Artificial
  Synthetic oligonucleotide
ggcaagagtcattggctagtgctacccctgggagtaagtccaaggagtgtggtcatgcaa

SEQ ID NO: 36673 - DNA, 60 bp, Artificial
  Synthetic oligonucleotide
ggcaagaatcattggctagtgctacccctgggagtaagtccaaggaatgtggtcatgcaa

SEQ ID NO: 36674 - DNA, 60 bp, Artificial
  Synthetic oligonucleotide
atttttgagccaataagggctttctttggaagctactttagtatagctttttatgtagtg

SEQ ID NO: 36675 - DNA, 60 bp, Artificial
  Synthetic oligonucleotide
atttttgaaccaataagggctttctttggaagctactttagtatagctttttatgtagtg

SEQ ID NO: 36676 - DNA, 60 bp, Artificial
  Synthetic oligonucleotide
ttatgtagtggtcagtattattgtcctatttctagcaatctacatcttcttacctatggt

SEQ ID NO: 36677 - DNA, 60 bp, Artificial
  Synthetic oligonucleotide
gtagtggtcagtattattgtcctatttctagcaatctacatcttcttacctatggtgttc

SEQ ID NO: 36678 - DNA, 60 bp, Artificial
  Synthetic oligonucleotide
gtagtgatcagtattattgtcctatttctagcaatctacatcttcttgcctatggtgttc

SEQ ID NO: 36679 - DNA, 60 bp, Artificial
  Synthetic oligonucleotide
tacaaataaatgtggcttttgcacatgtggagagttggaagatcaagaaggtttaaaaat

SEQ ID NO: 36680 - DNA, 60 bp, Artificial
  Synthetic oligonucleotide
tgtttactgattgctcaaaacaccatcctaatagtcgcagcatcagatgattgctggaca

SEQ ID NO: 36681 - DNA, 60 bp, Artificial
  Synthetic oligonucleotide
ttttcatggatagtcaagctggcattctggacatctagaaaactgaaaataagtactgag

SEQ ID NO: 36682 - DNA, 60 bp, Artificial
  Synthetic oligonucleotide
aagtactgagagaacaatagccaggatcaatgaagaaattgggtggagaccagagggagc

SEQ ID NO: 36683 - DNA, 60 bp, Artificial
  Synthetic oligonucleotide
tcaaaattgttgttggtagtttagtttgtcattagggaaaacatgcaccggtctttgtgt

SEQ ID NO: 36684 - DNA, 60 bp, Artificial
  Synthetic oligonucleotide
aaagcaggccctattggctctgaaacttgtgtcaccttgaaaggacctgactcagctgac

SEQ ID NO: 36685 - DNA, 60 bp, Artificial
  Synthetic oligonucleotide
ctagtggttgggaatctcaaacttgagtccaaaatggggaacagtcttacatcaacttgt

SEQ ID NO: 36686 - DNA, 60 bp, Artificial
  Synthetic oligonucleotide
ggaggcatgaagagacaaattctgttgttgtcaaccctaaaactggcaggtgggacctct

SEQ ID NO: 36687 - DNA, 60 bp, Artificial
  Synthetic oligonucleotide
ctaaaactggcaggtgggacctctccagttgggcatctggtttagtggactggcttgggg

SEQ ID NO: 36688 - DNA, 59 bp, Artificial
  Synthetic oligonucleotide
gctggtactgtgtgtgccaaagttggtgggaatgattagagctgccctgctcaagaaaa

SEQ ID NO: 36689 - DNA, 61 bp, Artificial
  Synthetic oligonucleotide
gctataaacaactttatatccagagtgataggacatttgtcatgcgatagaaaaccaaaac

SEQ ID NO: 36690 - DNA, 60 bp, Artificial
  Synthetic oligonucleotide
gccattaagaagggccaagagcatgagtcaatgaaactcagggttgaagagtctgatgct

SEQ ID NO: 36691 - DNA, 60 bp, Artificial
  Synthetic oligonucleotide
gggtgagcagcgggatagtctgattggcattgccaagcgcagtgcccaatgtctttaaat

SEQ ID NO: 36692 - DNA, 58 bp, Artificial
  Synthetic oligonucleotide
ggagcatgtgcttcactaacgatagtgccttcaactgagataatgatcccttatcctg

SEQ ID NO: 36693 - DNA, 60 bp, Artificial
  Synthetic oligonucleotide
cagggttgaagagtctgatgctagggtgaagggtctaaaggaagagctgaagcagttgac

SEQ ID NO: 36694 - DNA, 60 bp, Artificial
  Synthetic oligonucleotide
gaggaggtgagagctgttctagattccaggaaccaaattgcacaccatgaaatccagcag

SEQ ID NO: 36695 - DNA, 60 bp, Artificial
  Synthetic oligonucleotide
gcttgttcagatcacaccattgctagctcaaagatagttaaatgtgttgctaagggttcc

SEQ ID NO: 36696 - DNA, 60 bp, Artificial
  Synthetic oligonucleotide
cacttgtgacagttgctactctgagtgcttagatagtcacatacttgtcaggtctaccgg

SEQ ID NO: 36697 - DNA, 60 bp, Artificial
  Synthetic oligonucleotide
gaagcagttgacttacaagatctttgaccaccaagcgacaaaagatgagctccaacatgc

SEQ ID NO: 36698 - DNA, 60 bp, Artificial
  Synthetic oligonucleotide
gtgttgtcactattagggtcctcaatggctgcctctcctgaagcaggaatgaatgcagcc

SEQ ID NO: 36699 - DNA, 60 bp, Artificial
  Synthetic oligonucleotide
gagaacttcatttgttatggagcaaaggagaatgcagatgctgactcctcaaaccatggg

SEQ ID NO: 36700 - DNA, 60 bp, Artificial
  Synthetic oligonucleotide
gagaatgctatgaagcagatcaagattgtcacaacagctccagacaccatgaagttctcc

SEQ ID NO: 36701 - DNA, 60 bp, Artificial
  Synthetic oligonucleotide
gaggggttggctgtgcttgcttcaatgtttatgcctcatgtctatttgtccatgccagac

SEQ ID NO: 36702 - DNA, 60 bp, Artificial
  Synthetic oligonucleotide
ctggacaggtaccccttcttcaattcgcactatcatcacagggcactgttagaggcgcac

SEQ ID NO: 36703 - DNA, 60 bp, Artificial
  Synthetic oligonucleotide
ggctatggtgttaagagagatgccacctccagtcgaaacttctgaagacacttgtgacag

SEQ ID NO: 36704 - DNA, 60 bp, Artificial
  Synthetic oligonucleotide
cactgtgagcctaaagatccatgtgttgctcactcctgtgtcatctgtgctgaggggatc

SEQ ID NO: 36705 - DNA, 60 bp, Artificial
  Synthetic oligonucleotide
ccggcacaaactcatacagctttctcaggtcttcctcaggaaccttctccttggttgatg

SEQ ID NO: 36706 - DNA, 60 bp, Artificial
  Synthetic oligonucleotide
acggaggagtctggatacagcccatgtgcttagggtatgaaagggctatggtgttaagag

SEQ ID NO: 36707 - DNA, 60 bp, Artificial
  Synthetic oligonucleotide
acatgatggggcctgctattatttactgtgacaccaatgacttcattaggaatataacta

SEQ ID NO: 36708 - DNA, 60 bp, Artificial
  Synthetic oligonucleotide
gaaatcacagatttcaatgggaaaaaggagaaggtctcaatgacaggcatgacaacacag

SEQ ID NO: 36709 - DNA, 60 bp, Artificial
  Synthetic oligonucleotide
cgggaaaacatttagtagctccatagataaaaagactatacaagcattcacctctggcat

SEQ ID NO: 36710 - DNA, 60 bp, Artificial
  Synthetic oligonucleotide
atccatcacaaaacaagatctgctctggtgataacactttttgttccaagtttgcatgtc

SEQ ID NO: 36711 - DNA, 60 bp, Artificial
  Synthetic oligonucleotide
cagtcatttctgaaaatagatgcatcgaacagtgcggaggggttggctgtgcttgcttca

SEQ ID NO: 36712 - DNA, 60 bp, Artificial
  Synthetic oligonucleotide
cagagggagctagggctgcacatagaatgagagacagagacaggaggcccatacctaggt

SEQ ID NO: 36713 - DNA, 60 bp, Artificial
  Synthetic oligonucleotide
tcttacatcaacttgtttctctcagaccactgggccagggataattgagaggtactgggg

SEQ ID NO: 36714 - DNA, 58 bp, Artificial
  Synthetic oligonucleotide
gaatgcagccacacacataaataatagaccaggtcttggaaagtttgccctgctaaca

SEQ ID NO: 36715 - DNA, 60 bp, Artificial
  Synthetic oligonucleotide
agaggcagctgctctcacagctcacaaaagctgtgttgtagcacctgacatcatccgtta

SEQ ID NO: 36716 - DNA, 60 bp, Artificial
  Synthetic oligonucleotide
agccatgtctatagctggaaccttagtggcaatgaacccttttgatgacaggaggcatga

SEQ ID NO: 36717 - DNA, 60 bp, Artificial
  Synthetic oligonucleotide
gatgttcttagtcctaagtccactgactgcagagttgtccacctttctacacctcaagtc

SEQ ID NO: 36718 - DNA, 60 bp, Artificial
  Synthetic oligonucleotide
ttgctaagggttccaaaagtgtttgcaccatctcaggactgattaatgtgaaagcaggcc

SEQ ID NO: 36719 - DNA, 60 bp, Artificial
  Synthetic oligonucleotide
attgagaggtactgggggtttgaaatggccaaaatgccaggctttgacttgcattgccgc

SEQ ID NO: 36720 - DNA, 60 bp, Artificial
  Synthetic oligonucleotide
tcgagaagatgccgtggggtcgccgagtgcaaaggtgatgcttgccagagatggaacagc

SEQ ID NO: 36721 - DNA, 60 bp, Artificial
  Synthetic oligonucleotide
gtgaattgatttgctcagaaggccagtcttactggacaagtcagtatggagttgagtgtc

SEQ ID NO: 36722 - DNA, 55 bp, Artificial
  Synthetic oligonucleotide
tgagcatttcgccagcatggaggaagttgtcccttttgcgatattcaagaacaaa

SEQ ID NO: 36723 - DNA, 60 bp, Artificial
  Synthetic oligonucleotide
gcagtattcctgcgaggggctttaccacagaccaggaacgggaaaacatttagtagctcc

SEQ ID NO: 36724 - DNA, 60 bp, Artificial
  Synthetic oligonucleotide
caggtgagcagtccccaagagttgattatgagaagctaaagaagaatgcagaagagaagg

SEQ ID NO: 36725 - DNA, 60 bp, Artificial
  Synthetic oligonucleotide
cctgtttggccagctttgttaacatcacaggctgctattcttgcaatgagggtgccagag

SEQ ID NO: 36726 - DNA, 60 bp, Artificial
  Synthetic oligonucleotide
tgcaagacatggtgtgccagccaaactcgactgattacactggccccaaacaagttctaa

SEQ ID NO: 36727 - DNA, 60 bp, Artificial
  Synthetic oligonucleotide
gggtgccagagtatgcatacaggcagcagcaaacaagaacacaacactccacgtacacac

SEQ ID NO: 36728 - DNA, 60 bp, Artificial
  Synthetic oligonucleotide
caaggaaatcaggaagttggcttacaagtgcccgagaggagtttcaggggtaatatatgc

SEQ ID NO: 36729 - DNA, 60 bp, Artificial
  Synthetic oligonucleotide
ctcctgtaatgagacaaaattcaagaatgctgagtgctccaaggaaatcaggaagttggc

SEQ ID NO: 36730 - DNA, 60 bp, Artificial
  Synthetic oligonucleotide
cgattatggcgtcacctgcagtaggtttgaccatctgaagtctctggacaggtacccctt

SEQ ID NO: 36731 - DNA, 60 bp, Artificial
  Synthetic oligonucleotide
gctactaacggaaattttgctttggattatggattctctgtgatgggtaaaacaacttct

SEQ ID NO: 36732 - DNA, 60 bp, Artificial
  Synthetic oligonucleotide
caagggaaaagatcttatccttcaaacataaaagtctccctgataacactgttccaacca

SEQ ID NO: 36733 - DNA, 60 bp, Artificial
  Synthetic oligonucleotide
cccaacgagctccttccttcagactggtgcttagatgaatgctggaagaacaatttctac

SEQ ID NO: 36734 - DNA, 60 bp, Artificial
  Synthetic oligonucleotide
caatttctacatagctactaacggaaattttgctttggattatggattctctgtgatggg

SEQ ID NO: 36735 - DNA, 60 bp, Artificial
  Synthetic oligonucleotide
tcaatgcacaatcagatcttcaatccaaattctggtaccttgtctattgctccaagaatg

SEQ ID NO: 36736 - DNA, 60 bp, Artificial
  Synthetic oligonucleotide
atcttcaatccaaattctggtaccttgtctattgctccaagaatggtcctagaggaaggc

SEQ ID NO: 36737 - DNA, 55 bp, Artificial
  Synthetic oligonucleotide
agaaggtgttaactttcccaatttgttcatgcataacaatgcaggtactaaatct

SEQ ID NO: 36738 - DNA, 60 bp, Artificial
  Synthetic oligonucleotide
attactttgagaagtttggtttagacataacattttgtgagcatgagatgagtctggttg

SEQ ID NO: 36739 - DNA, 60 bp, Artificial
  Synthetic oligonucleotide
ggaacaagggataatagagccatcaatgactgctattctgtattcaatggagaaggtgtt

SEQ ID NO: 36740 - DNA, 60 bp, Artificial
  Synthetic oligonucleotide
cagtatcgcatttcattccatggtatccaagaggaaggtgcttttgctagaactttctgc

SEQ ID NO: 36741 - DNA, 60 bp, Artificial
  Synthetic oligonucleotide
attgtattcaagatgtatgataaggaactaataaatgggcatgtggaggtttcagggagg

SEQ ID NO: 36742 - DNA, 60 bp, Artificial
  Synthetic oligonucleotide
gggtgttcatacccagtttgcactcaacctatctaggacattgaagaagccgatcattgt

SEQ ID NO: 36743 - DNA, 60 bp, Artificial
  Synthetic oligonucleotide
tatccttcaaacataaaagtctccctgataacactgttccaaccaataggtcgtcatcca

SEQ ID NO: 36744 - DNA, 60 bp, Artificial
  Synthetic oligonucleotide
gttccaaccaataggtcgtcatccacatctattgttaagggcattcagttgggttctgag

SEQ ID NO: 36745 - DNA, 60 bp, Artificial
  Synthetic oligonucleotide
ggtgcttttgctagaactttctgcattccttttgaaaacaaatctaggatgatttgcttt

SEQ ID NO: 36746 - DNA, 60 bp, Artificial
  Synthetic oligonucleotide
agcttttgggtgttcatacccagtttgcactcaacctatctaggacattgaagaagccga

SEQ ID NO: 36747 - DNA, 60 bp, Artificial
  Synthetic oligonucleotide
aagaagccgatcattgtattcaagatgtatgataaggaactaataaatgggcatgtggag

SEQ ID NO: 36748 - DNA, 60 bp, Artificial
  Synthetic oligonucleotide
ttgatctaaaatctcagtatcgcatttcattccatggtatccaagaggaaggtgcttttg

SEQ ID NO: 36749 - DNA, 52 bp, Artificial
  Synthetic oligonucleotide
gatttgcttttatgcaaaaacagttgctgacaacagcaatgaaagaacaacc

SEQ ID NO: 36750 - DNA, 50 bp, Artificial
  Synthetic oligonucleotide
atttgtaggagcaagaattgggttagttgattttggtgattctgatccaa

SEQ ID NO: 36751 - DNA, 60 bp, Artificial
  Synthetic oligonucleotide
gtcgtcatccacatctattgttaagggcattcagttgggttctgagctagctcctgaaac

SEQ ID NO: 36752 - DNA, 60 bp, Artificial
  Synthetic oligonucleotide
gtgcattcctcggtccgtatgaagatacggcaagcaggttatctgctactcaaactgcaa

SEQ ID NO: 36753 - DNA, 60 bp, Artificial
  Synthetic oligonucleotide
cttcttgtgtaattacatggataaggtgctagttattcctgatgatgtgatgacgtcgat

SEQ ID NO: 36754 - DNA, 60 bp, Artificial
  Synthetic oligonucleotide
ctgctaacacattaaagtccatgaaagacaaggcattgcaagaatttagtaaatttgcag

SEQ ID NO: 36755 - DNA, 60 bp, Artificial
  Synthetic oligonucleotide
gcctgtcctttggaaaccaagctaacatgaagaagacctatgtcacaaatttcatcaaag

SEQ ID NO: 36756 - DNA, 60 bp, Artificial
  Synthetic oligonucleotide
tcaatggttcactcagatgataaccacacttcaataacaatgattcaagacaaattccca

SEQ ID NO: 36757 - DNA, 60 bp, Artificial
  Synthetic oligonucleotide
acattatcaagaatgtagctacgctcctagaaggcgatgttttagtgaattcaatggttc

SEQ ID NO: 36758 - DNA, 60 bp, Artificial
  Synthetic oligonucleotide
gatttttaaatgagttgatggagatcagtacgattttattgacaaagtatgtttagaata

SEQ ID NO: 36759 - DNA, 60 bp, Artificial
  Synthetic oligonucleotide
tggatctttgtagaatattctcatgcaggggctattcaaatgatcaagatgcatttgagt

SEQ ID NO: 36760 - DNA, 60 bp, Artificial
  Synthetic oligonucleotide
gctttagtacgtgaatgcgatcgatttgaagagatatttgatctttcagatgatggtttc

SEQ ID NO: 36761 - DNA, 60 bp, Artificial
  Synthetic oligonucleotide
ggagtgtatccacatgtgcttatacagaaatgaaatggatcatatataccacaacttcca

SEQ ID NO: 36762 - DNA, 60 bp, Artificial
  Synthetic oligonucleotide
cctagaaatgatcctttctcacgattttaagtctgaaccctggatatcgataatgaatca

SEQ ID NO: 36763 - DNA, 60 bp, Artificial
  Synthetic oligonucleotide
tcatgatcataaagacaacattatgcaccatggggctttacatgcaacatttaaaagtga

SEQ ID NO: 36764 - DNA, 60 bp, Artificial
  Synthetic oligonucleotide
agaacaggtactatttgcaaacaagcccatgattgattataccagcatacatgacagact

SEQ ID NO: 36765 - DNA, 60 bp, Artificial
  Synthetic oligonucleotide
atttttactaacaacactattgatgtacaataacaacccgacgattaagattgaggatgt

SEQ ID NO: 36766 - DNA, 60 bp, Artificial
  Synthetic oligonucleotide
ggaccaggggcaaatagacgacttattcgaattctttattagaatgccacaattgctggt

SEQ ID NO: 36767 - DNA, 60 bp, Artificial
  Synthetic oligonucleotide
gccacaattgctggttactaaaggggaaacaactgaagaatttatgaaatcaatcttgtt

SEQ ID NO: 36768 - DNA, 60 bp, Artificial
  Synthetic oligonucleotide
aacatgttggcagtgtcacagtacaataggcacaacacattccgggtagtgacttgtgca

SEQ ID NO: 36769 - DNA, 60 bp, Artificial
  Synthetic oligonucleotide
gccaaatatgctagacaagatgggatgttatcttgaagagtatggcccacaaatttgtgc

SEQ ID NO: 36770 - DNA, 60 bp, Artificial
  Synthetic oligonucleotide
tctataagaattgtaggggaagatacacgactgactgcagctgaattacaaatcaaccgc

SEQ ID NO: 36771 - DNA, 60 bp, Artificial
  Synthetic oligonucleotide
cgagcttctcagtaattatggctaatttgattaaaaagggctgttacaacgcatataagc

SEQ ID NO: 36772 - DNA, 60 bp, Artificial
  Synthetic oligonucleotide
gaggatgttgcaaattttgcttttcatacatctctatctattacgaaggccatgttatct

SEQ ID NO: 36773 - DNA, 60 bp, Artificial
  Synthetic oligonucleotide
ataaaatctctaaaagtaatataccactccccggctctggtgctacgagcatatgtacaa

SEQ ID NO: 36774 - DNA, 60 bp, Artificial
  Synthetic oligonucleotide
acctggacaaaacaatgatccactgaatgttttaacttcgcaaaatagatttgatatacc

SEQ ID NO: 36775 - DNA, 60 bp, Artificial
  Synthetic oligonucleotide
cccagatagcaacatcgttagacttagagatacaaatagcctacgagtcattgcgattaa

SEQ ID NO: 36776 - DNA, 60 bp, Artificial
  Synthetic oligonucleotide
tcaaaaccatttatgcattttgtctaatgaatgatcctatattggtagcctgtgccaaca

SEQ ID NO: 36777 - DNA, 60 bp, Artificial
  Synthetic oligonucleotide
aggttggtgattttgcagacttcaaatcaagagaatcaagagttgtcaatgctaaacttg

SEQ ID NO: 36778 - DNA, 60 bp, Artificial
  Synthetic oligonucleotide
gctaaacttgagaaggatatcaggaagtacacaatagccaacccagaatttgttgaagat

SEQ ID NO: 36779 - DNA, 60 bp, Artificial
  Synthetic oligonucleotide
gatgacagtacgatgataatagggaagaagacctttgttgagacgtatcgacagatacaa

SEQ ID NO: 36780 - DNA, 60 bp, Artificial
  Synthetic oligonucleotide
tcagaagggtgttaataataatcgagatttgtcatcaatctggtttgagggcaaagtgtc

SEQ ID NO: 36781 - DNA, 60 bp, Artificial
  Synthetic oligonucleotide
ggattgcacgaaaagcaccatgttatgattgatcttgcaaaaacagtactagaaatagag

SEQ ID NO: 36782 - DNA, 56 bp, Artificial
  Synthetic oligonucleotide
atagagaactcaaataacttaaagcgatctatcactactatcagcacttttactag

SEQ ID NO: 36783 - DNA, 60 bp, Artificial
  Synthetic oligonucleotide
gttaactagcctacaagtagctgttagcgatactgcaatggttaagaaagcagcacttgc

SEQ ID NO: 36784 - DNA, 60 bp, Artificial
  Synthetic oligonucleotide
aatcaaccgcatgagaaatgatatagtatcaaggcatggacagtctctgttgaacaagcc

SEQ ID NO: 36785 - DNA, 60 bp, Artificial
  Synthetic oligonucleotide
agcatggtgaaataacagacaaaccagctgtcgagcatatactccaagtcatgaaaaatc

SEQ ID NO: 36786 - DNA, 60 bp, Artificial
  Synthetic oligonucleotide
atgtagacaggtatgatgctgaaaaggcagaagagcagataacatggaacaattggcagg

SEQ ID NO: 36787 - DNA, 60 bp, Artificial
  Synthetic oligonucleotide
gcaattaaacatggtgctcagccatctgttgcttgggtggcaatcgcccttactcagtgg

SEQ ID NO: 36788 - DNA, 60 bp, Artificial
  Synthetic oligonucleotide
ccaaagtccagctactacgtgaaagtattcaatctcaatatacagacatagagtcttggg

SEQ ID NO: 36789 - DNA, 60 bp, Artificial
  Synthetic oligonucleotide
gcgatagcaggtttagaatcaggcaatctgacttatttggttaatttgtccagaaggatg

SEQ ID NO: 36790 - DNA, 50 bp, Artificial
  Synthetic oligonucleotide
cttcttagaaatagctagccaaggtgaatttacaatgactgggccgtggc

SEQ ID NO: 36791 - DNA, 60 bp, Artificial
  Synthetic oligonucleotide
ggagattacccgaaacccagcaattctgaaattacacaaggttggcaactaatgacagag

SEQ ID NO: 36792 - DNA, 60 bp, Artificial
  Synthetic oligonucleotide
ggatttcttgccaccggggactgatttcaaggctagatactgtacaccagacaattacat

SEQ ID NO: 36793 - DNA, 60 bp, Artificial
  Synthetic oligonucleotide
tattcggcgatgttttggtgccattgggcctggattatgagatagtcattgttagggctg

SEQ ID NO: 36794 - DNA, 60 bp, Artificial
  Synthetic oligonucleotide
cccctaaatacaacatacaacatggacaattacaagatcaatcaatatcgtgctaggatc

SEQ ID NO: 36795 - DNA, 60 bp, Artificial
  Synthetic oligonucleotide
ctattaatggatcgacataactactttggcagagaactctgttactatcttgatattgag

SEQ ID NO: 36796 - DNA, 60 bp, Artificial
  Synthetic oligonucleotide
gcgacgacggtatgggagggactagtgatatgcgttctcggtctctgttaacaccacgga

SEQ ID NO: 36797 - DNA, 60 bp, Artificial
  Synthetic oligonucleotide
gttactgaggttcatgacgttagattcagctatgagtagcgacgacggtatgggagggac

SEQ ID NO: 36798 - DNA, 60 bp, Artificial
  Synthetic oligonucleotide
gttattacggctatctaaaatgctccaaaagctagatggcaccagcacatatttggacgc

SEQ ID NO: 36799 - DNA, 60 bp, Artificial
  Synthetic oligonucleotide
ctgtaatgtgggaacagcaatttgtctttgacacaaacatcatagatcaccaatcgaagg

SEQ ID NO: 36800 - DNA, 60 bp, Artificial
  Synthetic oligonucleotide
ggttggcaactaatgacagagagaataaccagcgaaagagaactaactaatgacataaac

SEQ ID NO: 36801 - DNA, 60 bp, Artificial
  Synthetic oligonucleotide
gaggacattgatatctcacagcctactatattagacttcaataacaaaaacataattgac

SEQ ID NO: 36802 - DNA, 60 bp, Artificial
  Synthetic oligonucleotide
caggtatgggaatgtccttgatgtcaactccattgaccttgaagaaccaagtggccagac

SEQ ID NO: 36803 - DNA, 60 bp, Artificial
  Synthetic oligonucleotide
ccttgaagaaccaagtggccagacagcagactggaaggcaatcggagtctacattctcag

SEQ ID NO: 36804 - DNA, 60 bp, Artificial
  Synthetic oligonucleotide
acattctcagttttgtccttccaatcgttctgaaggctctgtacatgctgtcaactagag

SEQ ID NO: 36805 - DNA, 60 bp, Artificial
  Synthetic oligonucleotide
gtccttccaatcgttctgaaggctctgtacatgctgtcaactagagggagacagacagta

SEQ ID NO: 36806 - DNA, 60 bp, Artificial
  Synthetic oligonucleotide
tcaactagagggagacagacagtaaaggaaaataagggcacacgaataaggtttaaggat

SEQ ID NO: 36807 - DNA, 57 bp, Artificial
  Synthetic oligonucleotide
gtttaaggatgactcatcctacgatgatgtcaatggtatccggaagccgaggcattt

SEQ ID NO: 36808 - DNA, 60 bp, Artificial
  Synthetic oligonucleotide
taacagggcactatggtatacactatatgattgcactcaattatgttaaccgtatagtct

SEQ ID NO: 36809 - DNA, 60 bp, Artificial
  Synthetic oligonucleotide
tgaaggcagatgaaatcacaccaggtcgttttaggacaattgtgtgtggactcttcccag

SEQ ID NO: 36810 - DNA, 60 bp, Artificial
  Synthetic oligonucleotide
atggtggtatttcgggctggtgccaattattaatcatctcaggtctatctatctttaatt

SEQ ID NO: 36811 - DNA, 60 bp, Artificial
  Synthetic oligonucleotide
ttatacatgttgcactggggaaaagaggcagttaatcatttccatcttggagatgatatg

SEQ ID NO: 36812 - DNA, 60 bp, Artificial
  Synthetic oligonucleotide
agatgatatggacccagaattaagacagcttgcacagagcctagtggatgtgaaggtaaa

SEQ ID NO: 36813 - DNA, 60 bp, Artificial
  Synthetic oligonucleotide
caatgggaatccaactggaccagaaaattataatcttatacatgttgcactggggaaaag

SEQ ID NO: 36814 - DNA, 60 bp, Artificial
  Synthetic oligonucleotide
aactgctgaagaaaaactaaagaaaaaatctgccttttaccagtcctatctccgcagaac

SEQ ID NO: 36815 - DNA, 60 bp, Artificial
  Synthetic oligonucleotide
gggctggtgccaattattaatcatctcaggtctatctatctttaattacgggtgggttag

SEQ ID NO: 36816 - DNA, 60 bp, Artificial
  Synthetic oligonucleotide
ctgcacagtcaacaatgaaggcagatgaaatcacaccaggtcgttttaggacaattgtgt

SEQ ID NO: 36817 - DNA, 60 bp, Artificial
  Synthetic oligonucleotide
gacccagaattaagacagcttgcacagagcctagtggatgtgaaggtaaaggagatctcc

SEQ ID NO: 36818 - DNA, 60 bp, Artificial
  Synthetic oligonucleotide
acaattgtgtgtggactcttcccagcccaaatcaaggcaaggaacataataagcccggtc

SEQ ID NO: 36819 - DNA, 60 bp, Artificial
  Synthetic oligonucleotide
caccaactgcactttatgttgcaggtgtacctgagctgggtgcattctttgctatccttc

SEQ ID NO: 36820 - DNA, 60 bp, Artificial
  Synthetic oligonucleotide
cgcaagtccccattcggcttgggtattttcatgtgcacctgatcgctgcccaccaactgc

SEQ ID NO: 36821 - DNA, 60 bp, Artificial
  Synthetic oligonucleotide
ggcaagctcaggtagaggaatcaaaagttcctgacatagtggacttgattgacacagcag

SEQ ID NO: 36822 - DNA, 60 bp, Artificial
  Synthetic oligonucleotide
tacttcctaaatcggcaagctcaggtagaggaatcaaaagttcctgacatagtggacttg

SEQ ID NO: 36823 - DNA, 60 bp, Artificial
  Synthetic oligonucleotide
gacaaacagaaccttttctttcaactaatggtgcttacttcctaaatcggcaagctcagg

SEQ ID NO: 36824 - DNA, 60 bp, Artificial
  Synthetic oligonucleotide
tcccaaagcctaaaggacaaacagaaccttttctttcaactaatggtgcttacttcctaa

SEQ ID NO: 36825 - DNA, 60 bp, Artificial
  Synthetic oligonucleotide
ggactgggttgataagattgaggactttctaaaggctgagtgccctttcctcccaaagcc

SEQ ID NO: 36826 - DNA, 60 bp, Artificial
  Synthetic oligonucleotide
gtgtgtggactcttcccagcccaaatcaaggcaaggaacataataagcccggtcatgggg

SEQ ID NO: 36827 - DNA, 50 bp, Artificial
  Synthetic oligonucleotide
acctcatccctataccctatccctttaatctacctctcatagcctacctc

SEQ ID NO: 36828 - DNA, 66 bp, Artificial
  Synthetic oligonucleotide
cactattcatactaatctcataattacatataaatggatgtaaatttcattcctgctgctctgcgc

SEQ ID NO: 36829 - DNA, 60 bp, Artificial
  Synthetic oligonucleotide
atcaggaactgtgatatagatacttgccaaatggactggaatatccctatagttgcacta

SEQ ID NO: 36830 - DNA, 60 bp, Artificial
  Synthetic oligonucleotide
gtgttgaattagcattatattagtgtaaggttagtgttaagttgatttagtttattatca

SEQ ID NO: 36831 - DNA, 60 bp, Artificial
  Synthetic oligonucleotide
gctatccttcaggatatgagaaatactatcatggcatcaaagtctgtaggaactgctgaa

SEQ ID NO: 36832 - DNA, 60 bp, Artificial
  Synthetic oligonucleotide
actgaagaagctgtaatgagcaccctcaaagaagttcaagaaaatattacagttcatgaa

SEQ ID NO: 36833 - DNA, 60 bp, Artificial
  Synthetic oligonucleotide
gcagctagtaactgccagacagaagttgaaggatgctgagcgaacggtggaagtggaccc

SEQ ID NO: 36834 - DNA, 60 bp, Artificial
  Synthetic oligonucleotide
agttcatgaacagcagctagtaactgccagacagaagttgaaggatgctgagcgaacggt

SEQ ID NO: 36835 - DNA, 60 bp, Artificial
  Synthetic oligonucleotide
gacgggcagctgtgtctgcattggagactaaactcggagagctcaagagacagctggcag

SEQ ID NO: 36836 - DNA, 60 bp, Artificial
  Synthetic oligonucleotide
gatgcagacaatattgattctaaggccgaaattgatggtgttacttggtgttattccaaa

SEQ ID NO: 36837 - DNA, 60 bp, Artificial
  Synthetic oligonucleotide
ccggtatgaaggtgaatgggtcacattcagggaggtacttgctgcagctgatagttttgc

SEQ ID NO: 36838 - DNA, 60 bp, Artificial
  Synthetic oligonucleotide
ggtcacattcagggaggtacttgctgcagctgatagttttgccacaagttaccagcctac

SEQ ID NO: 36839 - DNA, 60 bp, Artificial
  Synthetic oligonucleotide
ggtgaggtcatagatagcataaatgtggcaagtcaaatacagatcaatgcatgtgcaaaa

SEQ ID NO: 36840 - DNA, 60 bp, Artificial
  Synthetic oligonucleotide
agtaccacttggtggtgatggctcaatgtctattatggagcttgcaacagctggttttgg

SEQ ID NO: 36841 - DNA, 60 bp, Artificial
  Synthetic oligonucleotide
cttggtggtgatggctcaatgtctattatggagcttgcaacagctggttttgggatggca

SEQ ID NO: 36842 - DNA, 60 bp, Artificial
  Synthetic oligonucleotide
ggacacgtcaacatcctgtgtatgactatattattcctagaaatagagataatttgcttg

SEQ ID NO: 36843 - DNA, 60 bp, Artificial
  Synthetic oligonucleotide
caaaacagccaattaataaagagttcatgataaatgtacaaagtgatgggttccgtgcaa

SEQ ID NO: 36844 - DNA, 60 bp, Artificial
  Synthetic oligonucleotide
gtatcacagcagatacaggcaggaaactttcattggcatgctataaatcaagagatgtgg

SEQ ID NO: 36845 - DNA, 60 bp, Artificial
  Synthetic oligonucleotide
cacctactaatgcagaatttctttctactttttttgaaggttgtgctgtgtcaatccctt

SEQ ID NO: 36846 - DNA, 60 bp, Artificial
  Synthetic oligonucleotide
cacaagcaaagttgagagattgtatggtactgctgatggaatggtaaactctccaacagc

SEQ ID NO: 36847 - DNA, 60 bp, Artificial
  Synthetic oligonucleotide
cacaagcaaagttgagaggttgtatggtactgctgatggaatggtaaactctccaacagc

SEQ ID NO: 36848 - DNA, 60 bp, Artificial
  Synthetic oligonucleotide
ggcatatctgccatcaacaatcagttctgaccagtgcaatactaggattgggtgtccaga

SEQ ID NO: 36849 - DNA, 58 bp, Artificial
  Synthetic oligonucleotide
aaacatctgaaggttatagtactgtgacatcaatgtctagcaagcagtggtctgaaga

SEQ ID NO: 36850 - DNA, 60 bp, Artificial
  Synthetic oligonucleotide
caacactttctgcaggatgaatcagcatatgttggtgatttattgattcagacagaagac

SEQ ID NO: 36851 - DNA, 60 bp, Artificial
  Synthetic oligonucleotide
gggcttcgtacgaaacagccaattaataaagagttcatgataaatgtacaaagtgatggt

SEQ ID NO: 36852 - DNA, 60 bp, Artificial
  Synthetic oligonucleotide
caagaattaattagatgtggaatgagattcaaaacagagcaagtcaatcaaactcggagc

SEQ ID NO: 36853 - DNA, 60 bp, Artificial
  Synthetic oligonucleotide
ttgatggaagaagtgtcacaagaattgattagatgtggaatgagattcaaaacagaacaa

SEQ ID NO: 36854 - DNA, 60 bp, Artificial
  Synthetic oligonucleotide
gcatatctaccatcaacaatcagttctgaccagtgcaatactaggattgggtgtctagaa

SEQ ID NO: 36855 - DNA, 60 bp, Artificial
  Synthetic oligonucleotide
aaagttgaatgatcctagcatcattacagctatgactatgcagtcaccattacaactccg

SEQ ID NO: 36856 - DNA, 60 bp, Artificial
  Synthetic oligonucleotide
gtccaggaaattacaccgatatattgatagtatggaaaatcattcagatgcggttgaaga

SEQ ID NO: 36857 - DNA, 57 bp, Artificial
  Synthetic oligonucleotide
aaaagttctaaatattcagaatgcactagagaaagcacttagatgggcatctggagt

SEQ ID NO: 36858 - DNA, 60 bp, Artificial
  Synthetic oligonucleotide
cacggctacatggttccaatattatactgaagaccaaggccattttccccttcaacatgc

SEQ ID NO: 36859 - DNA, 60 bp, Artificial
  Synthetic oligonucleotide
gccacggctacatggttccaatattatactgaagaccaaggccattttccccttcaacat

SEQ ID NO: 36860 - DNA, 60 bp, Artificial
  Synthetic oligonucleotide
aatgaagtaaggtgtgaggtcttaacaacaagacatgtacataggcctaaaattgctagg

SEQ ID NO: 36861 - DNA, 60 bp, Artificial
  Synthetic oligonucleotide
aatacacttgtaagttgtacattctctaaagagtatgcttggaaagactttttaaatgaa

SEQ ID NO: 36862 - DNA, 60 bp, Artificial
  Synthetic oligonucleotide
ggggacagctgagtcaatctgtagttattggcttaagacaatgtcattgattaaaacaat

SEQ ID NO: 36863 - DNA, 60 bp, Artificial
  Synthetic oligonucleotide
caattgtttccagaattagagtgtttttttgaatttgcacatcattcagatgatgcattg

SEQ ID NO: 36864 - DNA, 64 bp, Artificial
  Synthetic oligonucleotide
cctaagaaggaggtactgaaagctatgtctttatatagtgttaaagaaaatattggattgcagg

SEQ ID NO: 36865 - DNA, 58 bp, Artificial
  Synthetic oligonucleotide
ggggacagctgagtcaatctgtagttattggcttaagacaatgtcattgattaaaaca

SEQ ID NO: 36866 - DNA, 60 bp, Artificial
  Synthetic oligonucleotide
ctgtgtgcaaacatataacgaggaaacaaaactatatgaaggtgacctccgtgtcacttt

SEQ ID NO: 36867 - DNA, 60 bp, Artificial
  Synthetic oligonucleotide
atactgtgtgcaaacatataacgaggaaacaaaactatatgaaggtgacctccgtgtcac

SEQ ID NO: 36868 - DNA, 60 bp, Artificial
  Synthetic oligonucleotide
aatgaagtaaggtgtgaggttttaacaacaagacatgtacataggcctaaaattgctagg

SEQ ID NO: 36869 - DNA, 60 bp, Artificial
  Synthetic oligonucleotide
tgtatgtatctcagcagatacaggcaggaaactttcattggcatgctataaatcaaggga

SEQ ID NO: 36870 - DNA, 60 bp, Artificial
  Synthetic oligonucleotide
gagagttagggatcttgcacctggaacggtatcagcattagaatgcatagatctactgga

SEQ ID NO: 36871 - DNA, 60 bp, Artificial
  Synthetic oligonucleotide
caaggcatggagaagaagattataccaaatagcccttctggacaagtattgaaaagcttt

SEQ ID NO: 36872 - DNA, 60 bp, Artificial
  Synthetic oligonucleotide
gagagttagggaccttgcacctggaacggtatcagcattagaatgcatagatctactgga

SEQ ID NO: 36873 - DNA, 51 bp, Artificial
  Synthetic oligonucleotide
catccctgattatagaccacagcagctatgtgaaccgcggattgataactt

SEQ ID NO: 36874 - DNA, 60 bp, Artificial
  Synthetic oligonucleotide
caaggcatggagaagaagattataccaaatagcccttctggacaagtgctgaagagcttt

SEQ ID NO: 36875 - DNA, 60 bp, Artificial
  Synthetic oligonucleotide
gatatgggtctgccccactataccaaaccctacaggaaaacctgtggttgccctggttga

SEQ ID NO: 36876 - DNA, 60 bp, Artificial
  Synthetic oligonucleotide
gatatgggtctgccccactataccaaaccctacaggaaaacttgtggttgccctagtcga

SEQ ID NO: 36877 - DNA, 60 bp, Artificial
  Synthetic oligonucleotide
gatatgggtctgccccactataccaaaccctacaggaaaacttgtggttgccttggttga

SEQ ID NO: 36878 - DNA, 60 bp, Artificial
  Synthetic oligonucleotide
gatatgggtctgccccactataccaaaccctacaggaaaacttgtggttgctctggtcga

SEQ ID NO: 36879 - DNA, 60 bp, Artificial
  Synthetic oligonucleotide
gggatcaattaaagcaaccacaagttttcctgtagggtttggtatagtggggcagaccca

SEQ ID NO: 36880 - DNA, 60 bp, Artificial
  Synthetic oligonucleotide
atgcagagaaccaaaacagacagagaaatatacttgatgagcatgaaagtgaaaatgatg

SEQ ID NO: 36881 - DNA, 60 bp, Artificial
  Synthetic oligonucleotide
ggctgtcctaatgaagttataccttttgcttatggggctgtgcaggtacaagcgttaagc

SEQ ID NO: 36882 - DNA, 60 bp, Artificial
  Synthetic oligonucleotide
ggaaaagagataactacaatttcaggtggttgcagactgagaaatggatacctgttgttg

SEQ ID NO: 36883 - DNA, 60 bp, Artificial
  Synthetic oligonucleotide
ggcaaagacagcttcgaaacagaggctttcagcaattctaatgaatgtcaaagattggtg

SEQ ID NO: 36884 - DNA, 58 bp, Artificial
  Synthetic oligonucleotide
atcagaactgtggtaagtgctcagcaagatatgaacttagagaaaatactggacactg

SEQ ID NO: 36885 - DNA, 60 bp, Artificial
  Synthetic oligonucleotide
caaagaagtcaagattggctttcctatctgctgatcagtcgaaatggtcggcatcagatc

SEQ ID NO: 36886 - DNA, 60 bp, Artificial
  Synthetic oligonucleotide
ccggaggatcgggagttccttacatagcattgcatatagtggatgaagacatgtcagatc

SEQ ID NO: 36887 - DNA, 60 bp, Artificial
  Synthetic oligonucleotide
gcaggacatatgccacatttgggaggagaataagattggatcatgatctggacttgcaaa

SEQ ID NO: 36888 - DNA, 60 bp, Artificial
  Synthetic oligonucleotide
ctaaccacgatctagctttggatttacataagagaaatagtgatgagatcccagaagatg

SEQ ID NO: 36889 - DNA, 60 bp, Artificial
  Synthetic oligonucleotide
cctaaatcactgcacaatcatgttcacaatctaacaagcttattaaatctccctgctgag

SEQ ID NO: 36890 - DNA, 60 bp, Artificial
  Synthetic oligonucleotide
ggatttctaaaggcctggaatatgacacctctgaaaggcaggctgacccaaatgatgatt

SEQ ID NO: 36891 - DNA, 60 bp, Artificial
  Synthetic oligonucleotide
tgttgggcaaatagttggaaccacacccacagtggtgagaaactattatgcaaacactca

SEQ ID NO: 36892 - DNA, 60 bp, Artificial
  Synthetic oligonucleotide
gggaaccagctttgatatagagacattgttacggaacagttttagaccagacatattttc

SEQ ID NO: 36893 - DNA, 60 bp, Artificial
  Synthetic oligonucleotide
cgggaaattatgtctctggaactatgtacaaaatagggatcatgacaagaagctgctatg

SEQ ID NO: 36894 - DNA, 60 bp, Artificial
  Synthetic oligonucleotide
cacagttgcactaggaacaataataggattgccttggaatttaaactggcctgctttcac

SEQ ID NO: 36895 - DNA, 60 bp, Artificial
  Synthetic oligonucleotide
gccttccaaccttctgaatgtccaatcatcttgaccagcactcacagttgcactaggaac

SEQ ID NO: 36896 - DNA, 52 bp, Artificial
  Synthetic oligonucleotide
ttgctcactcgtgcggtagacatggtgtttacttaggaagcagcttactttg

SEQ ID NO: 36897 - DNA, 60 bp, Artificial
  Synthetic oligonucleotide
tcccaaagcttcctttttcacattctggaaataagccaatggaaatgcagttgcagcaaa

SEQ ID NO: 36898 - DNA, 60 bp, Artificial
  Synthetic oligonucleotide
agcagcaccagcagttcctggagtacagtcattgagaatttttatggtttcttcaaaaat

SEQ ID NO: 36899 - DNA, 60 bp, Artificial
  Synthetic oligonucleotide
cttataaagccttccaaccttctgaatgtccaatcatcttgaccagcactcacagttgca

SEQ ID NO: 36900 - DNA, 60 bp, Artificial
  Synthetic oligonucleotide
tttcacattctggaaataagccaatggaaatgcagttgcagcaaacttatcaagacttgc

SEQ ID NO: 36901 - DNA, 60 bp, Artificial
  Synthetic oligonucleotide
ccttgaatacatttgaacacacaattaaatgtaataaacaactaaaactcaaacacactg

SEQ ID NO: 36902 - DNA, 60 bp, Artificial
  Synthetic oligonucleotide
gacaggcatggcaatactacaacaattagcttttgcacaggcactaaattatgaacaccg

SEQ ID NO: 36903 - DNA, 60 bp, Artificial
  Synthetic oligonucleotide
gcggcaactggcagatctggttgcagctcagaaactggctacaaaaccagttgatccaac

SEQ ID NO: 36904 - DNA, 60 bp, Artificial
  Synthetic oligonucleotide
agatggccagtgccacagacgatgcacaaaaggactccatctatgcatctgctctagtag

SEQ ID NO: 36905 - DNA, 60 bp, Artificial
  Synthetic oligonucleotide
ggcaaaagatagggaagaatatccttgttcgtgcaaacaatgagctaggtgatgtgtcac

SEQ ID NO: 36906 - DNA, 60 bp, Artificial
  Synthetic oligonucleotide
acatgtcaatttggtgatcccggggatataatgagtactctgacagggatgaaatgtcct

SEQ ID NO: 36907 - DNA, 60 bp, Artificial
  Synthetic oligonucleotide
cggacccggaagacaattgcttgttttgacatatcatgtaatcaaacagtatgtcaacct

SEQ ID NO: 36908 - DNA, 60 bp, Artificial
  Synthetic oligonucleotide
taggaagtagctcagagccattatatgttccgacattagacgattatcggtctgctgagg

SEQ ID NO: 36909 - DNA, 60 bp, Artificial
  Synthetic oligonucleotide
aatcaggtgaatggattcttggtgtgttaaacggaaattggttagttgtggctgtcctaa

SEQ ID NO: 36910 - DNA, 60 bp, Artificial
  Synthetic oligonucleotide
gaaggagtgtgttttaaccctgtacacacaagggctctttcccaacctagccatacttat

SEQ ID NO: 36911 - DNA, 60 bp, Artificial
  Synthetic oligonucleotide
ctaccacaaccaacctagtgagaggacagaacacagtccatatcgttgggaagggaggtc

SEQ ID NO: 36912 - DNA, 60 bp, Artificial
  Synthetic oligonucleotide
gcatggggttcaggtgttggctttaatttagtttgtactgttagtttaacagaatgccca

SEQ ID NO: 36913 - DNA, 60 bp, Artificial
  Synthetic oligonucleotide
aaggtaactggcaaagcaccttctacagaagcatctgacacagtacaaggcatagctttt

SEQ ID NO: 36914 - DNA, 60 bp, Artificial
  Synthetic oligonucleotide
cccttttccgttatcgaagtcgtttctttgtaggattcatctggtgtatactgctggttt

SEQ ID NO: 36915 - DNA, 60 bp, Artificial
  Synthetic oligonucleotide
gatcatattaatgttgttgtcagccgtgatctctcatttcaggatttgagtgagacacca

SEQ ID NO: 36916 - DNA, 60 bp, Artificial
  Synthetic oligonucleotide
agccttaactgtcatgtattgatttccacaccatattgcactcattaacaaatccccata

SEQ ID NO: 36917 - DNA, 60 bp, Artificial
  Synthetic oligonucleotide
agtattttctcgctaatccctgggattgcacattcacttgcagtagaactatgtgttcca

SEQ ID NO: 36918 - DNA, 60 bp, Artificial
  Synthetic oligonucleotide
cttgtattcaactcggcactgaacagacctgcaagagtgttgatagtaatgattgcctgg

SEQ ID NO: 36919 - DNA, 60 bp, Artificial
  Synthetic oligonucleotide
cagcaaaagaattagaatctcatcggaaaagctgtccaattggttcctgcccatactgtc

SEQ ID NO: 36920 - DNA, 60 bp, Artificial
  Synthetic oligonucleotide
gaatttgaaagtggctggggttgtaatcccccagattgcccaggtattggaacaggttgc

SEQ ID NO: 36921 - DNA, 60 bp, Artificial
  Synthetic oligonucleotide
tgccgattgtgaagcttactctgaaaccgggattttcaatataagctcacctacttgttt

SEQ ID NO: 36922 - DNA, 60 bp, Artificial
  Synthetic oligonucleotide
taattttgacttacacaccagcacagcaacccagcaatcattcacaaagtggacatggga

SEQ ID NO: 36923 - DNA, 60 bp, Artificial
  Synthetic oligonucleotide
accctttcacctacaaataagcaaacaagtaatacatgctgaaatacaacatttaggcca

SEQ ID NO: 36924 - DNA, 60 bp, Artificial
  Synthetic oligonucleotide
gtatcccatgctttgtgcaattccacatatgctgcattaagtgctttgtgtaatcccaca

SEQ ID NO: 36925 - DNA, 58 bp, Artificial
  Synthetic oligonucleotide
acctatataatcccatttgcttattacgaggcttttgttcctgcggagcatactacta

SEQ ID NO: 36926 - DNA, 60 bp, Artificial
  Synthetic oligonucleotide
ctgtgcccttaggacaagccttaggactacgcaagcaattaatcataaattcatgatcac

SEQ ID NO: 36927 - DNA, 60 bp, Artificial
  Synthetic oligonucleotide
ataaatttatgattacaataaaggatgatgggcttcgtgctattgcacaacatgatgaag

SEQ ID NO: 36928 - DNA, 60 bp, Artificial
  Synthetic oligonucleotide
atgatcacaataaaggatgatgggcttcgtgctattgcacaacatgatggcgacagcccg

SEQ ID NO: 36929 - DNA, 60 bp, Artificial
  Synthetic oligonucleotide
caataaaggatgatgggcttcgtgctattgcacaacatgatgaagatagcccaagattcc

SEQ ID NO: 36930 - DNA, 60 bp, Artificial
  Synthetic oligonucleotide
tctgagatatgggaatgtcctggatgttaattcaattgatttggaagaaccgagtggaca

SEQ ID NO: 36931 - DNA, 60 bp, Artificial
  Synthetic oligonucleotide
tgtgatgggagtaattggatttggcttctttgtaaaggattggatggatcggatagaaga

SEQ ID NO: 36932 - DNA, 60 bp, Artificial
  Synthetic oligonucleotide
gggagtaattggatttggcttctttgtaaaggattggatggatcggatagaagagtttct

SEQ ID NO: 36933 - DNA, 60 bp, Artificial
  Synthetic oligonucleotide
acagagacaagtcaatgaatctaaggttcaagatattatcgatttgatagaccatgctga

SEQ ID NO: 36934 - DNA, 60 bp, Artificial
  Synthetic oligonucleotide
cactcagtctgggtgtttgcatgtgcacctgaccggtgccctccaactgcattgtatgtt

SEQ ID NO: 36935 - DNA, 60 bp, Artificial
  Synthetic oligonucleotide
gtctgggtgtttgcatgtgcacctgaccggtgccctccaactgcattgtatgttgcaggg

SEQ ID NO: 36936 - DNA, 60 bp, Artificial
  Synthetic oligonucleotide
gggtgtttgcatgtgcacctgaccggtgccctccaactgcattgtatgttgcaggagtac

SEQ ID NO: 36937 - DNA, 59 bp, Artificial
  Synthetic oligonucleotide
gatgtcatgaaaaggattgcaccaatgctgtacaagtcgtcaaaatctagagtagttat

SEQ ID NO: 36938 - DNA, 60 bp, Artificial
  Synthetic oligonucleotide
ttctttatgtcaagaaaactaagaaattatattgatagcatggaaaatcatgaccctcac

SEQ ID NO: 36939 - DNA, 60 bp, Artificial
  Synthetic oligonucleotide
ggtcaatgtctctggtaaagaccatccgagtcaagccccataaagaagttctccaggcag

SEQ ID NO: 36940 - DNA, 60 bp, Artificial
  Synthetic oligonucleotide
ggaggtggtgcaaagcaaataatgcaccatacagggattggtttcatgctttatggtttg

SEQ ID NO: 36941 - DNA, 60 bp, Artificial
  Synthetic oligonucleotide
gatgaaatgtctgacgttttagacacagcaaaattcccagattcactttctgttgatctc

SEQ ID NO: 36942 - DNA, 60 bp, Artificial
  Synthetic oligonucleotide
gtccccggtttctattagcacatgcttttcatacaattagggacataagatatcaggcag

SEQ ID NO: 36943 - DNA, 60 bp, Artificial
  Synthetic oligonucleotide
cttggcagcagcgcaaagtaggtgtgtaaaggcacttgatttgggcgcttcacctcaggt

SEQ ID NO: 36944 - DNA, 60 bp, Artificial
  Synthetic oligonucleotide
cggtctccgtgctatcgcacagcacgatgaggatagtccccggtttctattagcacatgc

SEQ ID NO: 36945 - DNA, 60 bp, Artificial
  Synthetic oligonucleotide
gacattgaggcagatattgagcattttctccaggatgaaagctcttacactggggatttg

SEQ ID NO: 36946 - DNA, 60 bp, Artificial
  Synthetic oligonucleotide
tgtttaatgatttattgaagctcataaaccctagcaacaccttagacttatctggtcttg

SEQ ID NO: 36947 - DNA, 59 bp, Artificial
  Synthetic oligonucleotide
aaaacctccctgcagctatcccacctgctgcatattcgttaataatgaaccgtgcaaaa

SEQ ID NO: 36948 - DNA, 60 bp, Artificial
  Synthetic oligonucleotide
cagcagatgtggacaaggggataagagagaaaaggattaagtatgaagcaggattagcct

SEQ ID NO: 36949 - DNA, 55 bp, Artificial
  Synthetic oligonucleotide
agggttaactgtagatcagtcaactgtaggtgcaagtgggatttatccctcgttc

SEQ ID NO: 36950 - DNA, 60 bp, Artificial
  Synthetic oligonucleotide
cacgagggttatcaatcgaaaaggtatacagtccagtcaacatcatcttgatgtctaggt

SEQ ID NO: 36951 - DNA, 60 bp, Artificial
  Synthetic oligonucleotide
tagtagtagactccggaaatgacaagagctaaaaaagatggacaaatatagagaaattca

SEQ ID NO: 36952 - DNA, 58 bp, Artificial
  Synthetic oligonucleotide
agcatgactggtctgacaacaaagattcagaagaaccaatagggaaagttctactttt

SEQ ID NO: 36953 - DNA, 60 bp, Artificial
  Synthetic oligonucleotide
taccgggacgactatagaatttgtggaggtgacagttacagcagatgtggacaaggggat

SEQ ID NO: 36954 - DNA, 60 bp, Artificial
  Synthetic oligonucleotide
ctgacttggagttaaatatcactgagccttcaactcaggagttcctgacaaccaaacaca

SEQ ID NO: 36955 - DNA, 60 bp, Artificial
  Synthetic oligonucleotide
tttggtcccaattatttccggaacttgactgcttttttgagtttgcacatcattcagatg

SEQ ID NO: 36956 - DNA, 60 bp, Artificial
  Synthetic oligonucleotide
caggcaggtcatttgcattggtttagtgtaaacacagagatgtggaaaagtatgttcaac

SEQ ID NO: 36957 - DNA, 60 bp, Artificial
  Synthetic oligonucleotide
cgtttaagttgacatcaagtatgctgagggcagagtcaaaggctatgctagatctcctca

SEQ ID NO: 36958 - DNA, 60 bp, Artificial
  Synthetic oligonucleotide
gcagatgcaacaaagtggtctcctggggataattcagcaaagtttcggagatttactgct

SEQ ID NO: 36959 - DNA, 60 bp, Artificial
  Synthetic oligonucleotide
gctgcatatctccaagtaaaacatagtgatacaccgatcccgttaggaggtaatggggct

SEQ ID NO: 36960 - DNA, 60 bp, Artificial
  Synthetic oligonucleotide
ggtaatggggctatgtcaataatggaactggctacagctgggatagggatgtcagataaa

SEQ ID NO: 36961 - DNA, 60 bp, Artificial
  Synthetic oligonucleotide
ccagggggcactagaaaaggctctgaggtgggcatctggtgaaagttttatagaactgag

SEQ ID NO: 36962 - DNA, 60 bp, Artificial
  Synthetic oligonucleotide
gatgagacttttcaacatgagaggttgggtcagttctcattcattggtaaggtacagtgg

SEQ ID NO: 36963 - DNA, 60 bp, Artificial
  Synthetic oligonucleotide
ataggttttctagggtgggtgtcccacctgttgatccagaaatccagtgtgcagccttaa

SEQ ID NO: 36964 - DNA, 60 bp, Artificial
  Synthetic oligonucleotide
tgaaaaaggactccatggtaatatgaacgaagaggcaaaaatccatttagagacagtaga

SEQ ID NO: 36965 - DNA, 56 bp, Artificial
  Synthetic oligonucleotide
gatgtcatacctacaaaacaagttcagagagcaaaagtggccagaacttttacggt

SEQ ID NO: 36966 - DNA, 60 bp, Artificial
  Synthetic oligonucleotide
gagggtgactgggtgacatttagggaagttcttgctgctgcaaatagctttgcagaaggc

SEQ ID NO: 36967 - DNA, 60 bp, Artificial
  Synthetic oligonucleotide
atgacccaagcattgtaactgccatgactatgcagtcacccttgcaactcagatttagaa

SEQ ID NO: 36968 - DNA, 60 bp, Artificial
  Synthetic oligonucleotide
gctgacatgtatacaccgaaattcttagaactatggagcaatcaacatgtgacatatgac

SEQ ID NO: 36969 - DNA, 60 bp, Artificial
  Synthetic oligonucleotide
aactatatgaaggggatttaagggttacatttaattttggccttgattgtgctaggttgg

SEQ ID NO: 36970 - DNA, 60 bp, Artificial
  Synthetic oligonucleotide
aagatcatgatggatgaggtgtcaaaagagcttttaaggtgcgggatgagatttaatacc

SEQ ID NO: 36971 - DNA, 60 bp, Artificial
  Synthetic oligonucleotide
cctaggaattttctcttaatacagtgttctctgattacatcgtataagcctgccaccaca

SEQ ID NO: 36972 - DNA, 50 bp, Artificial
  Synthetic oligonucleotide
tttccgacacacaatggtgttgttacgccgtttatttccacaggattcta

SEQ ID NO: 36973 - DNA, 60 bp, Artificial
  Synthetic oligonucleotide
cctcaataatcataagagtggagagaaatatggccaacaaattgagagtctaaatatagc

SEQ ID NO: 36974 - DNA, 60 bp, Artificial
  Synthetic oligonucleotide
gtccggttttgaatgggggaagccaaatattccctgtatagtctataaaaactgtgtgct

SEQ ID NO: 36975 - DNA, 60 bp, Artificial
  Synthetic oligonucleotide
tttaattcaaatgaagcaagtcactgccaaaagtacccaatgtctcgcaaacctaggaat

SEQ ID NO: 36976 - DNA, 60 bp, Artificial
  Synthetic oligonucleotide
aggttgaaagattgtatgggacagcacccgggatggtcaaccacccagctgcatatctcc

SEQ ID NO: 36977 - DNA, 60 bp, Artificial
  Synthetic oligonucleotide
gccaccacattatcagatcaaattaatagcaggagggcctgtgcatatatccttaatctc

SEQ ID NO: 36978 - DNA, 60 bp, Artificial
  Synthetic oligonucleotide
ggatgggtccaggtttagttgataaagagaatttggatactatcttgcttgatggtgagt

SEQ ID NO: 36979 - DNA, 60 bp, Artificial
  Synthetic oligonucleotide
gagaatggttacatgatgtgggaactcatagaaaatcctgacttggcagaacaacagctg

SEQ ID NO: 36980 - DNA, 60 bp, Artificial
  Synthetic oligonucleotide
ccaggctgagataagttatgttcgagagcacttgatcaaaccagatgaaagggcagctct

SEQ ID NO: 36981 - DNA, 60 bp, Artificial
  Synthetic oligonucleotide
ttagccaaaccaggaatattagtttaaagggcatgtcagggcaggtacaagaggatgggc

SEQ ID NO: 36982 - DNA, 60 bp, Artificial
  Synthetic oligonucleotide
cattctttgaaggttgtgctgtttcgatcccgtttgttaaaatactgcttggttcattat

SEQ ID NO: 36983 - DNA, 60 bp, Artificial
  Synthetic oligonucleotide
tgcaccaaggattcagtttaaacagacacaaaatatacgggaacctggcacgtttaagtt

SEQ ID NO: 36984 - DNA, 60 bp, Artificial
  Synthetic oligonucleotide
gggcgcttcacctcaggtagcacaattagccgtagccttgtgcacaagtaaggttgaaag

SEQ ID NO: 36985 - DNA, 60 bp, Artificial
  Synthetic oligonucleotide
ggcaaaagtctatgttatatatactggggctatttaaattcctgatgaaactctccgatg

SEQ ID NO: 36986 - DNA, 60 bp, Artificial
  Synthetic oligonucleotide
gggctcttaaattcagagaaaaggaggaaaagtatggtgaatcactagtggagaatggtt

SEQ ID NO: 36987 - DNA, 60 bp, Artificial
  Synthetic oligonucleotide
tgacagagtgccctacctttttaacatcaattaaggcttgcgataaagccatctgctatg

SEQ ID NO: 36988 - DNA, 60 bp, Artificial
  Synthetic oligonucleotide
gggggcatggggctctggtgttggcttcaccctcacatgtttagtatcattgacagagtg

SEQ ID NO: 36989 - DNA, 60 bp, Artificial
  Synthetic oligonucleotide
tactatgcacttcactgatgagagaatagaatggaaagaccctgatggaatgttacgaga

SEQ ID NO: 36990 - DNA, 60 bp, Artificial
  Synthetic oligonucleotide
gcaacttcgctactacccctctctgtgaatatgatggaaatatggtatcagggtacaaaa

SEQ ID NO: 36991 - DNA, 60 bp, Artificial
  Synthetic oligonucleotide
attgctgttgagttatgcgtccctgggtttcatgggtgggctacagctgctttgcttgtt

SEQ ID NO: 36992 - DNA, 60 bp, Artificial
  Synthetic oligonucleotide
tgaatgcccccatactgtaagttttggtgagaacagtgtgatagggtatgtggagttacc

SEQ ID NO: 36993 - DNA, 60 bp, Artificial
  Synthetic oligonucleotide
gggccgctagtgcatcggaaatacccttaaaccctgtatggaatgacaacgcccatggag

SEQ ID NO: 36994 - DNA, 57 bp, Artificial
  Synthetic oligonucleotide
ttttacaatgtgggtcttcctcctggttttggagtccatactttgggccgctagtgc

SEQ ID NO: 36995 - DNA, 60 bp, Artificial
  Synthetic oligonucleotide
cagacaattggagttgatgtgcatgctttaggccattggtttgatggtcgtctcaatctt

SEQ ID NO: 36996 - DNA, 60 bp, Artificial
  Synthetic oligonucleotide
tccaagtatacataccgtaggaaactaacaaatccgctagaagaatcacaggcaattaac

SEQ ID NO: 36997 - DNA, 60 bp, Artificial
  Synthetic oligonucleotide
aagttggggctgtaatccatctgactgccctggggtaggtacgggctgtacagcatgcgg

SEQ ID NO: 36998 - DNA, 60 bp, Artificial
  Synthetic oligonucleotide
gcaagcctaccctgtatatgattgtgccaatccatgcatgcaatatgatgaaaagttgtt

SEQ ID NO: 36999 - DNA, 60 bp, Artificial
  Synthetic oligonucleotide
catggtatctttgacattgcaagtgtccacattgtttgcttctttgtggcagttaaagga

SEQ ID NO: 37000 - DNA, 55 bp, Artificial
  Synthetic oligonucleotide
cagaagctaagcatgtatttagtcctggattcttcccacagcttaatcatacaaa

SEQ ID NO: 37001 - DNA, 52 bp, Artificial
  Synthetic oligonucleotide
cagtgtgggataaagtgctggtttgtaaaatctggagaatggatttcaggga

SEQ ID NO: 37002 - DNA, 56 bp, Artificial
  Synthetic oligonucleotide
caaagtgtcagggaagggtggttatagtggctcaacttttaaatgctgtcatgggg

SEQ ID NO: 37003 - DNA, 60 bp, Artificial
  Synthetic oligonucleotide
gcagaaagtgtaacattaacaagaggccagaatacagtcaaagtgtcagggaagggtggt

SEQ ID NO: 37004 - DNA, 60 bp, Artificial
  Synthetic oligonucleotide
gacctcaaaggaacttgtgttttaaagcataaaatgttagaagagtcataccgcagcaga

SEQ ID NO: 37005 - DNA, 60 bp, Artificial
  Synthetic oligonucleotide
caacacaaatggtaccggaaagttcttgcagtatggacaaccaccagtcattgaatacag

SEQ ID NO: 37006 - DNA, 60 bp, Artificial
  Synthetic oligonucleotide
tacccaagtaagttggagaggtaaggctgatcacgcacaggccagccagaactcatttga

SEQ ID NO: 37007 - DNA, 56 bp, Artificial
  Synthetic oligonucleotide
acatggggtttcatgtccccaatctcaatgcccatattgcttcactcattgtgaac

SEQ ID NO: 37008 - DNA, 60 bp, Artificial
  Synthetic oligonucleotide
gggtgacacgctattattctttggacctctcgagggtggcggcttaatattcaaacactg

SEQ ID NO: 37009 - DNA, 60 bp, Artificial
  Synthetic oligonucleotide
gtttgttctcactgttacctggggtagcacattctattgctgttgagttatgcgtccctg

SEQ ID NO: 37010 - DNA, 60 bp, Artificial
  Synthetic oligonucleotide
cactggtgtacatctacctgccaatttggggaccctggagatatcatgagtccaagggac

SEQ ID NO: 37011 - DNA, 60 bp, Artificial
  Synthetic oligonucleotide
caatttggggaagaaaatctatgtaagatcatagacatgaatgactgttttgtatccaga

SEQ ID NO: 37012 - DNA, 60 bp, Artificial
  Synthetic oligonucleotide
tgcgtccctgggtttcatgggtgggctacagctgctttgcttgttacattttgctttggc

SEQ ID NO: 37013 - DNA, 60 bp, Artificial
  Synthetic oligonucleotide
tgaggccatacatccttgtacagtcttctgtgttttatcaggcccaggggcatcatgtga

SEQ ID NO: 37014 - DNA, 60 bp, Artificial
  Synthetic oligonucleotide
cgctccatcatgagtcaattgtgggtgaccaaacattttcacaggatcattcaagtttgc

SEQ ID NO: 37015 - DNA, 60 bp, Artificial
  Synthetic oligonucleotide
aagatcataccagagaaagaggggtttggttgtcttgtttactaaccaccggatagggaa

SEQ ID NO: 37016 - DNA, 60 bp, Artificial
  Synthetic oligonucleotide
aatctattataccattcctcaatctcttagcctcatacagaccaaccgatgttaacccta

SEQ ID NO: 37017 - DNA, 60 bp, Artificial
  Synthetic oligonucleotide
gtcattgtgcaaatctgcttgtatatcagcttgaaacaaggcattttcataaggaacctc

SEQ ID NO: 37018 - DNA, 56 bp, Artificial
  Synthetic oligonucleotide
tggagaatctctttggcagatttaaagaattgtcacatttttctaaaccttccgct

SEQ ID NO: 37019 - DNA, 60 bp, Artificial
  Synthetic oligonucleotide
gagattgttctatcatgtatctatatttcccgtccacaacagaatcgaagatcaatgatt

SEQ ID NO: 37020 - DNA, 60 bp, Artificial
  Synthetic oligonucleotide
tgctagacaagagaggcagaggacctccaatgcagagcatcatccttaaagcacatgtat

SEQ ID NO: 37021 - DNA, 60 bp, Artificial
  Synthetic oligonucleotide
gggacatcaacaagtcaggccggtcaggaatagcacttgttgcaacaggccttgccaagc

SEQ ID NO: 37022 - DNA, 60 bp, Artificial
  Synthetic oligonucleotide
ggtcgttcgggaatagcacttgttgcaacaggccttgccaagcttgcagagaccgagggg

SEQ ID NO: 37023 - DNA, 60 bp, Artificial
  Synthetic oligonucleotide
ggttgcagatcaatgcaaaacaaaccaaatcaaattggcagaggccatggaaaaaatagt

SEQ ID NO: 37024 - DNA, 60 bp, Artificial
  Synthetic oligonucleotide
gaaatgttcctggagacatttgagttctaccctctggtcattgacatgcacagagtgcta

SEQ ID NO: 37025 - DNA, 60 bp, Artificial
  Synthetic oligonucleotide
ctggagacatttgagttctaccctctggtcattgacatgcacagagtgctaaaagatggg

SEQ ID NO: 37026 - DNA, 54 bp, Artificial
  Synthetic oligonucleotide
ggttgcagatcaatgcaaaacaaaccaaatcaaattggcagaggccatggaaaa

SEQ ID NO: 37027 - DNA, 60 bp, Artificial
  Synthetic oligonucleotide
cctggactgaggggttgactatgtatctgggatttgcaccaggtgctgaaatgttcctgg

SEQ ID NO: 37028 - DNA, 60 bp, Artificial
  Synthetic oligonucleotide
tgctgttgggcaagtaaactgggccaaaatcaggattttaccagctgctagaactttcct

SEQ ID NO: 37029 - DNA, 60 bp, Artificial
  Synthetic oligonucleotide
gggcaagtaaactgggccaaaatcaggattttaccagctgctagaactttccttgcccaa

SEQ ID NO: 37030 - DNA, 60 bp, Artificial
  Synthetic oligonucleotide
gtacctggactgaggggttgactatgtatctgggatttgcaccaggtgctgaaatgttcc

SEQ ID NO: 37031 - DNA, 60 bp, Artificial
  Synthetic oligonucleotide
ctaacaaatttctgtcatcaggaatgccaggtcacggagactgagtgcctctgcccttat

SEQ ID NO: 37032 - DNA, 60 bp, Artificial
  Synthetic oligonucleotide
caatgattgagttggaatttaatgatgtcgctgctaacaccagcagtacttttgacccag

SEQ ID NO: 37033 - DNA, 60 bp, Artificial
  Synthetic oligonucleotide
ccctggaaaccagtccattccactgcctgactacggacttaccatacacagagtctccgg

SEQ ID NO: 37034 - DNA, 60 bp, Artificial
  Synthetic oligonucleotide
atggcaaatcaatttattttcaacgatgttccacaacggaatgcagctacatttaacccg

SEQ ID NO: 37035 - DNA, 60 bp, Artificial
  Synthetic oligonucleotide
ggttgaccagatgataaaacatgactggtctgataataaagatgtagaaagacctatagg

SEQ ID NO: 37036 - DNA, 60 bp, Artificial
  Synthetic oligonucleotide
aggatttaacatacaggacatggacattgtagcctctgagcacctgctgcaccaatccct

SEQ ID NO: 37037 - DNA, 60 bp, Artificial
  Synthetic oligonucleotide
gtatgaaaaggaccctgatgacctcaacaaaagggcattgagtgaccgggaaagcgttgc

SEQ ID NO: 37038 - DNA, 60 bp, Artificial
  Synthetic oligonucleotide
tagtagtagactccttgaaaagctactacgaaaaagactggaatgagtgacttgaaagat

SEQ ID NO: 37039 - DNA, 54 bp, Artificial
  Synthetic oligonucleotide
tagtagtagactccttgaaaagctactacgaaaaagactggaatgagtgacttg

SEQ ID NO: 37040 - DNA, 60 bp, Artificial
  Synthetic oligonucleotide
tagtagtagactccttgaaaagctactacgaaaaagactggaatgagtgacttaaaagat

SEQ ID NO: 37041 - DNA, 52 bp, Artificial
  Synthetic oligonucleotide
tagtagtagactccttgaaaagctactacgaaaaagacgggaatgagtgact

SEQ ID NO: 37042 - DNA, 60 bp, Artificial
  Synthetic oligonucleotide
gcctgcctacggctccgaattggagtcggctattgttcgagtcttctacatcaatgcagc

SEQ ID NO: 37043 - DNA, 60 bp, Artificial
  Synthetic oligonucleotide
caacaaacagtgtcagcattggaggataaactcgcagactacaagagaagaatggcagat

SEQ ID NO: 37044 - DNA, 57 bp, Artificial
  Synthetic oligonucleotide
atgactaaagctggaatgagcaccctcaaagaagtgcaggaaaatatcaccctacat

SEQ ID NO: 37045 - DNA, 60 bp, Artificial
  Synthetic oligonucleotide
cttacgtcagaggtatgggcagctgactgcagaagagtggatgacatctaagttggacgc

SEQ ID NO: 37046 - DNA, 60 bp, Artificial
  Synthetic oligonucleotide
gttagacgcagtcaaggctgcatttggctcagttgcccagatatcttgggccaagtctgg

SEQ ID NO: 37047 - DNA, 60 bp, Artificial
  Synthetic oligonucleotide
gtgatgagctgcaagactatgaagatcttgctttagcacttacaagtgtggaagaaccgt

SEQ ID NO: 37048 - DNA, 64 bp, Artificial
  Synthetic oligonucleotide
gtctcttttcttcatctctatttaaacatttctacctccgtacacttatatatatgcacgtagc

SEQ ID NO: 37049 - DNA, 60 bp, Artificial
  Synthetic oligonucleotide
ccaaatgagcacaaatatgctctaaaactaatatgtgaagacaagccaggaagtgcactg

SEQ ID NO: 37050 - DNA, 57 bp, Artificial
  Synthetic oligonucleotide
gctttgacaatgattatcaagcatgcaaattcctgcagacaccatcaagctacagat

SEQ ID NO: 37051 - DNA, 60 bp, Artificial
  Synthetic oligonucleotide
ccaaagtttgactatttatgtcatcttgccagccgaaaagaagtgattgtcagaaagtgc

SEQ ID NO: 37052 - DNA, 60 bp, Artificial
  Synthetic oligonucleotide
gtgcacaggtaattgcccagcaagattagaacataaagtaggctggctcacctttgctaa

SEQ ID NO: 37053 - DNA, 60 bp, Artificial
  Synthetic oligonucleotide
cagccattgatataaatgctgaaggggtttgtgcaggatgtattaattgcttcgaaaata

SEQ ID NO: 37054 - DNA, 60 bp, Artificial
  Synthetic oligonucleotide
atatacactgtgaatttacaatacatactacaattgaagcaagttgccctattgagagcg

SEQ ID NO: 37055 - DNA, 60 bp, Artificial
  Synthetic oligonucleotide
ggaacaatcagtagaatagagacccattcattagctgatatagagcaatataagaaagca

SEQ ID NO: 37056 - DNA, 60 bp, Artificial
  Synthetic oligonucleotide
gccctattgagagcgactgtgtatcttttcacgatagaatgctagtcacaccaaatgagc

SEQ ID NO: 37057 - DNA, 60 bp, Artificial
  Synthetic oligonucleotide
cccaataagcccaagacacatcactaattgcaagtgggaaaaccctgctggaacaatcag

SEQ ID NO: 37058 - DNA, 60 bp, Artificial
  Synthetic oligonucleotide
gcggtgaacatgagcatccatcagtgtatatggttccaaacactactatataccagtcca

SEQ ID NO: 37059 - DNA, 60 bp, Artificial
  Synthetic oligonucleotide
ggaccaaccattggtattaatacaaaacatgatgaaaagtgcacaggtaattgcccagca

SEQ ID NO: 37060 - DNA, 60 bp, Artificial
  Synthetic oligonucleotide
ccatagaaggtacagaaactgttgaaggtgtggaaaatgcattcatagaggcagagattc

SEQ ID NO: 37061 - DNA, 60 bp, Artificial
  Synthetic oligonucleotide
gcttatctccaagatccaaagctacagttgaggacattattgcatgcggtgaacatgagc

SEQ ID NO: 37062 - DNA, 60 bp, Artificial
  Synthetic oligonucleotide
gccttgttgaaagctattctagatttcataatgtacttgcaacccctaaatgaggctaca

SEQ ID NO: 37063 - DNA, 60 bp, Artificial
  Synthetic oligonucleotide
gcaatgcagaaagcacaaataaggtaaaagtttgcaagaacatacaacgtgtaatgtgct

SEQ ID NO: 37064 - DNA, 60 bp, Artificial
  Synthetic oligonucleotide
ggcattaatgcctcgtgccaggagctctggtgattacaattttagcaatgcagaaagcac

SEQ ID NO: 37065 - DNA, 60 bp, Artificial
  Synthetic oligonucleotide
catttagaggaacatccacatattacatgtcagacatattagcagagacaaaagcgaact

SEQ ID NO: 37066 - DNA, 60 bp, Artificial
  Synthetic oligonucleotide
gacaaagatctaaatttagcacttactacactacataccgcatttagaggaacatccaca

SEQ ID NO: 37067 - DNA, 60 bp, Artificial
  Synthetic oligonucleotide
gcgaactcattgagagactacgcattagcactcaagagtaagtaccctggaaatgccttg

SEQ ID NO: 37068 - DNA, 60 bp, Artificial
  Synthetic oligonucleotide
gaagttgcatagagcttcaggattatgtcctggttataaaagcttaagagcagcaagagt

SEQ ID NO: 37069 - DNA, 60 bp, Artificial
  Synthetic oligonucleotide
ctgcagtgttaatactaacatttattacacctatgaatgctatggtgcttggctcatcag

SEQ ID NO: 37070 - DNA, 60 bp, Artificial
  Synthetic oligonucleotide
tcatgtgttagatttttacatcgtactatattactaggatcgattgctaattctatttgt

SEQ ID NO: 37071 - DNA, 60 bp, Artificial
  Synthetic oligonucleotide
ccattcacagaatgtgggacacactgtgtctgtggagcaagatatgagacttcagatagg

SEQ ID NO: 37072 - DNA, 60 bp, Artificial
  Synthetic oligonucleotide
gaccagacttgtgagcgcctgaaagtctcttgcggacctaaatctattcaattccatgca

SEQ ID NO: 37073 - DNA, 53 bp, Artificial
  Synthetic oligonucleotide
ttggcatgattgtaggccacaaaaaagagctggcggacacataaatgttattg

SEQ ID NO: 37074 - DNA, 57 bp, Artificial
  Synthetic oligonucleotide
ttgcgtaattagtgttgataaagaaacagcacaaataaggttacagacagacaccac

SEQ ID NO: 37075 - DNA, 60 bp, Artificial
  Synthetic oligonucleotide
agtagtgtactaccaagtataaataacgttcaaagagtaaagtgaataaacatcatacat

SEQ ID NO: 37076 - DNA, 60 bp, Artificial
  Synthetic oligonucleotide
accggaacattttcaaacaatgttgcaatgagaaaatggctagttgctgattggcatgat

SEQ ID NO: 37077 - DNA, 60 bp, Artificial
  Synthetic oligonucleotide
ggggtaattagggttggggtgggttaagaagagcagctttagaaatttgtagaatcatta

SEQ ID NO: 37078 - DNA, 60 bp, Artificial
  Synthetic oligonucleotide
acaagccaggaagtgcactgaagttcaaaatatgcaacacaaagattgatgctgctatga

SEQ ID NO: 37079 - DNA, 60 bp, Artificial
  Synthetic oligonucleotide
gtagggtgcgagatgagggcatcaaggttttactagaaccatttaagaatttatttggtt

SEQ ID NO: 37080 - DNA, 60 bp, Artificial
  Synthetic oligonucleotide
gtggaaatgttcaaagggtgaatggcacaaattatggtagtggtcaaccaaagtttgact

SEQ ID NO: 37081 - DNA, 60 bp, Artificial
  Synthetic oligonucleotide
gtgtctaacatttgcagataaaacgtactgcacaagtttaaatgctattaccccaatcat

SEQ ID NO: 37082 - DNA, 60 bp, Artificial
  Synthetic oligonucleotide
cctttgctaaagaaagaacaagcacatggggctgtgaggaatttggctgtctagctgtaa

SEQ ID NO: 37083 - DNA, 60 bp, Artificial
  Synthetic oligonucleotide
gaacaagcacatggggctgtgaggaatttggctgtctagctgtaagtgatggttgtgtct

SEQ ID NO: 37084 - DNA, 60 bp, Artificial
  Synthetic oligonucleotide
gatggttgtgtctttggttcatgtcaagacatcataaaagaggaactatctgtttacagg

SEQ ID NO: 37085 - DNA, 60 bp, Artificial
  Synthetic oligonucleotide
agaggaactatctgtttacaggaaagatacagaagaagtgactaatgttgaattgtgtct

SEQ ID NO: 37086 - DNA, 60 bp, Artificial
  Synthetic oligonucleotide
ccggatatagccaaaccagctggagaacatatttacggtctcatgattttgaggtatgca

SEQ ID NO: 37087 - DNA, 60 bp, Artificial
  Synthetic oligonucleotide
ggtcatgtctgtttaagccctagatgcaactcaattagatacccaataagcccaagacac

SEQ ID NO: 37088 - DNA, 60 bp, Artificial
  Synthetic oligonucleotide
atgctggactggagagttagaaaatgttataccacataaacaaagtgatgggatccggag

SEQ ID NO: 37089 - DNA, 60 bp, Artificial
  Synthetic oligonucleotide
gggatccggagctgcaggacgaagaacacagggagatgcaatgttaaaggtgaagattgg

SEQ ID NO: 37090 - DNA, 60 bp, Artificial
  Synthetic oligonucleotide
aggtttgatagtccatcaaaaatcatataactgcttgattaactataaggcaaaatggtt

SEQ ID NO: 37091 - DNA, 60 bp, Artificial
  Synthetic oligonucleotide
gtactcctgaaagactctgtgttgatggctgctgctgaaagaccagatttcaatacatgt

SEQ ID NO: 37092 - DNA, 60 bp, Artificial
  Synthetic oligonucleotide
ccaacattgagaggagccattactgtatagctgactcacattgcctagaagaatatgagc

SEQ ID NO: 37093 - DNA, 60 bp, Artificial
  Synthetic oligonucleotide
tgtattgagcagagaagcatttcattaaattgtactgggccatttataaatttgggagga

SEQ ID NO: 37094 - DNA, 60 bp, Artificial
  Synthetic oligonucleotide
tgggccatttataaatttgggaggatgtaaaaaacctcaaaagagggcgagctatcaatc

SEQ ID NO: 37095 - DNA, 60 bp, Artificial
  Synthetic oligonucleotide
atccggagctttaagacatattgaaaatctcaaaacataccatgaacaactaacagcaga

SEQ ID NO: 37096 - DNA, 60 bp, Artificial
  Synthetic oligonucleotide
gctcatcagaagaggtgtataaattagaggatctacctgatgatatgctgaacatggcgg

SEQ ID NO: 37097 - DNA, 60 bp, Artificial
  Synthetic oligonucleotide
ctaggtactataaaaatgaaagcaattttaggtgatgtcagatacaagaattatgcttca

SEQ ID NO: 37098 - DNA, 60 bp, Artificial
  Synthetic oligonucleotide
tgctgaacatggcggagaagatagatatttactatttatctatcgtattgaattatagta

SEQ ID NO: 37099 - DNA, 60 bp, Artificial
  Synthetic oligonucleotide
catacaggacatggacattgtagcctctgagcacctgctgcaccagtctcttgttggcaa

SEQ ID NO: 37100 - DNA, 60 bp, Artificial
  Synthetic oligonucleotide
aatgtatatgacatgaagattgaatgcccccatacagtcaattttggggaaaacagtgtg

SEQ ID NO: 37101 - DNA, 60 bp, Artificial
  Synthetic oligonucleotide
gaagcattttcagaaggggggatctttaatataacttctcccatgtgtttagtctcaaag

SEQ ID NO: 37102 - DNA, 60 bp, Artificial
  Synthetic oligonucleotide
ctctaccttaggctgttgaactcaaaatgttgactcttttcggtaacaagaggccttcta

SEQ ID NO: 37103 - DNA, 60 bp, Artificial
  Synthetic oligonucleotide
tttgaggatgatgctctgcattggaggtcctctacctctcttgtctagcatgacaggtct

SEQ ID NO: 37104 - DNA, 60 bp, Artificial
  Synthetic oligonucleotide
gatgtaccctattcaccgactgtgtgataaaaggaagggaggttcgtaaaggccagtcag

SEQ ID NO: 37105 - DNA, 60 bp, Artificial
  Synthetic oligonucleotide
cctgatgaccttaacaaaagggcattgagtgaccgggaaagtgtcgcacagtcaatccag

SEQ ID NO: 37106 - DNA, 60 bp, Artificial
  Synthetic oligonucleotide
gatctttcttttcaggacttagctggaaatccctgccaggtagacttaagtgtatcttct

SEQ ID NO: 37107 - DNA, 60 bp, Artificial
  Synthetic oligonucleotide
gtaaatagagatctttcttttcaggacttagctggaaatccctgccaggtagacttaagt

SEQ ID NO: 37108 - DNA, 60 bp, Artificial
  Synthetic oligonucleotide
ggcgaccctggcgatatcatgagtacgccgcaagggatgaaatgtccagagcatgctggt

SEQ ID NO: 37109 - DNA, 60 bp, Artificial
  Synthetic oligonucleotide
ctgtcagtttggcgaccctggcgatatcatgagtacgccgcaagggatgaaatgtccaga

SEQ ID NO: 37110 - DNA, 60 bp, Artificial
  Synthetic oligonucleotide
cagttagtctaacagagtgtgcaacatttctcacttcagtaaaggcttgtgattctgcaa

SEQ ID NO: 37111 - DNA, 60 bp, Artificial
  Synthetic oligonucleotide
ttaatctagtttgttcagttagtctaacagagtgtgcaacatttctcacttcagtaaagg

SEQ ID NO: 37112 - DNA, 60 bp, Artificial
  Synthetic oligonucleotide
cgagggcaaaatacagtacatgttgttggaaagggtggacactccggatcaaaatttatg

SEQ ID NO: 37113 - DNA, 60 bp, Artificial
  Synthetic oligonucleotide
ccggatcaaaatttatgtgttgtcatgataaaaaatgctctgctacaggcttggtggcag

SEQ ID NO: 37114 - DNA, 60 bp, Artificial
  Synthetic oligonucleotide
tcagtaaaggcttgtgattctgcaatgtgttacggttctagcacagctaatttagtacga

SEQ ID NO: 37115 - DNA, 60 bp, Artificial
  Synthetic oligonucleotide
tttagtacgagggcaaaatacagtacatgttgttggaaagggtggacactccggatcaaa

SEQ ID NO: 37116 - DNA, 60 bp, Artificial
  Synthetic oligonucleotide
ccccacagtgtggtgttcattgttggtttaagaagtctggtgagtggttattggggatat

SEQ ID NO: 37117 - DNA, 51 bp, Artificial
  Synthetic oligonucleotide
accacaatagtcatatctgtttagactatacatatatattgcttgcactgc

SEQ ID NO: 37118 - DNA, 60 bp, Artificial
  Synthetic oligonucleotide
tatgaagctagaagaaaggacaggaatcagctgggatctgggcgtagaagatgcctctga

SEQ ID NO: 37119 - DNA, 60 bp, Artificial
  Synthetic oligonucleotide
aagacacacagaaatgtgttaacacaaagcttgagcaaccacaaagcattttaattgagc

SEQ ID NO: 37120 - DNA, 60 bp, Artificial
  Synthetic oligonucleotide
gacacacagaaatgtgttaacacaaagcttgagcaaccacaaagcattttaattgagcac

SEQ ID NO: 37121 - DNA, 60 bp, Artificial
  Synthetic oligonucleotide
gaggcaccgtggggagcaatcaatgttcagtcaacctacaaaccaactgtctcaactgca

SEQ ID NO: 37122 - DNA, 60 bp, Artificial
  Synthetic oligonucleotide
gaggccccgtggggagcaatcaatgttcagtcaacttttaaaccaacagtttcagctgcc

SEQ ID NO: 37123 - DNA, 60 bp, Artificial
  Synthetic oligonucleotide
cactacagcttggtcattgaccactcaggtaatctgctgctctgtatgtttattgttagc

SEQ ID NO: 37124 - DNA, 60 bp, Artificial
  Synthetic oligonucleotide
gcactacagcttggtcattgaccactcaggtaatctgctgctctgtatgtttattgttag

SEQ ID NO: 37125 - DNA, 60 bp, Artificial
  Synthetic oligonucleotide
tgcactacagcttggtcattgaccactcaggtaatctgctgctctgtatgtttattgtta

SEQ ID NO: 37126 - DNA, 60 bp, Artificial
  Synthetic oligonucleotide
cgttactatcaaatcacatgtctgtgactattctttagacgttgatgggacagtgaggct

SEQ ID NO: 37127 - DNA, 60 bp, Artificial
  Synthetic oligonucleotide
ccctgcatctttcgatacatgtgctttaaggatgatgctctgcattggaggtcctctgcc

SEQ ID NO: 37128 - DNA, 60 bp, Artificial
  Synthetic oligonucleotide
atgtttaaatcagctgtaaagctattgagtgaaagcaaccctggaacagccagctctatt

SEQ ID NO: 37129 - DNA, 60 bp, Artificial
  Synthetic oligonucleotide
tagatgaaatgtttaaatcagctgtaaagctattgagtgaaagcaaccctggaacagcca

SEQ ID NO: 37130 - DNA, 60 bp, Artificial
  Synthetic oligonucleotide
gaaatgtttaaatcagctgtaaagctattgagtgaaagcaaccctggaacagccagctct

SEQ ID NO: 37131 - DNA, 60 bp, Artificial
  Synthetic oligonucleotide
catcttggtgatgatatggatcctgagctcagacaactggctcaagctttgattgacaca

SEQ ID NO: 37132 - DNA, 60 bp, Artificial
  Synthetic oligonucleotide
ctttctaaccacaaaacttagattcttcttctgtatgatgtcttaacatcttgcggagtc

SEQ ID NO: 37133 - DNA, 60 bp, Artificial
  Synthetic oligonucleotide
gcatcatctttgtcttcatgctcatgagataaatctctctatccatctttgtcctctgca

SEQ ID NO: 37134 - DNA, 60 bp, Artificial
  Synthetic oligonucleotide
ctcaggggtgggtcagttaatccgttgtgggtgggtttagctccaggctaccttaagtag

SEQ ID NO: 37135 - DNA, 60 bp, Artificial
  Synthetic oligonucleotide
attggaacaatggcccagaaatttatctttcgttcttcccagggaccgaaatgttcctag

SEQ ID NO: 37136 - DNA, 60 bp, Artificial
  Synthetic oligonucleotide
tttaaggatgatgctctgcattggaggtcctctgcctctcttgtccagcatgacaggcct

SEQ ID NO: 37137 - DNA, 60 bp, Artificial
  Synthetic oligonucleotide
tttaaggatgatgctctgcattggaggtcctctgcctctcttgtctagcatgacaggtct

SEQ ID NO: 37138 - DNA, 60 bp, Artificial
  Synthetic oligonucleotide
gtgctttaaggatgatgctctgcattggaggtcctctgcctctcttgtctagcatgacag

SEQ ID NO: 37139 - DNA, 60 bp, Artificial
  Synthetic oligonucleotide
tttaaggatgatgctctgcattggaggtcctctgcctctcttgtccagcatgacaggtct

SEQ ID NO: 37140 - DNA, 60 bp, Artificial
  Synthetic oligonucleotide
tttaaggatgatgctctgcattggaggtcctctgcctctcttatctagcatgacaggtct

SEQ ID NO: 37141 - DNA, 60 bp, Artificial
  Synthetic oligonucleotide
gtgttaacacaaaacttgagcaaccacagagcattttgatcgaacataagggaactataa

SEQ ID NO: 37142 - DNA, 60 bp, Artificial
  Synthetic oligonucleotide
cggcacgtcagtacgtaagtgttaactttgaggaagtggattgagcatcttgattgcagc

SEQ ID NO: 37143 - DNA, 60 bp, Artificial
  Synthetic oligonucleotide
tagtagtagactccttgaaaagctactacgaaaaagactggaatgagtgacttggcagat

SEQ ID NO: 37144 - DNA, 60 bp, Artificial
  Synthetic oligonucleotide
tagtagtagactccttgaaaagctactacgaaaaagactggaatgagtgacttgacagat

SEQ ID NO: 37145 - DNA, 60 bp, Artificial
  Synthetic oligonucleotide
aactagtcaaggtaaggcactgtgacattaacctatcagtcaaactgccatcgaacaaaa

SEQ ID NO: 37146 - DNA, 60 bp, Artificial
  Synthetic oligonucleotide
ggggttaaactagtcaaggtaaggcactgtgacattaacctatcagtcaaactgccatcg

SEQ ID NO: 37147 - DNA, 60 bp, Artificial
  Synthetic oligonucleotide
tggagttaccagtgcagatgaaatcaattccaacacaacacagaccagcctgggacttcc

SEQ ID NO: 37148 - DNA, 60 bp, Artificial
  Synthetic oligonucleotide
cggcacatggtgacacccctcaactggatctgaaggcaaggcctacatatggtgcaggcg

SEQ ID NO: 37149 - DNA, 60 bp, Artificial
  Synthetic oligonucleotide
ggtactatctgcaagtacagtctgcaaactacagagctgcacacacggtgtccctggcga

SEQ ID NO: 37150 - DNA, 60 bp, Artificial
  Synthetic oligonucleotide
tagactacttctgcaacatgggtgactggccctcatgtacatacactggagtgacacagc

SEQ ID NO: 37151 - DNA, 60 bp, Artificial
  Synthetic oligonucleotide
gtgatatgcgtactgatcctggttatctgtgtggtaagcacatctgctgttgacatggag

SEQ ID NO: 37152 - DNA, 60 bp, Artificial
  Synthetic oligonucleotide
ggaaagcgggtagcaatgttatgctggctgtctgtaagcgtatgtgctttaaggcaactg

SEQ ID NO: 37153 - DNA, 60 bp, Artificial
  Synthetic oligonucleotide
tgatacccaaaggcactggggacatattggtggactgctcaggaggacagcagcactttt

SEQ ID NO: 37154 - DNA, 60 bp, Artificial
  Synthetic oligonucleotide
gctccagttggtcaggggaaagcagtcgaagtctaccgggtgagagaaagctacacaagc

SEQ ID NO: 37155 - DNA, 60 bp, Artificial
  Synthetic oligonucleotide
ctttgtgagaatagtgctacagagaagggttgtgagatcgatagtgtcccagtcaaatgc

SEQ ID NO: 37156 - DNA, 60 bp, Artificial
  Synthetic oligonucleotide
cggctgaagtggccttggccccaggcggctcatctacagctgagagcaacacaatatcca

SEQ ID NO: 37157 - DNA, 60 bp, Artificial
  Synthetic oligonucleotide
cacacctgccaccgccatctctgcacccacaagcccaacgaacagatccaaaagggagtc

SEQ ID NO: 37158 - DNA, 60 bp, Artificial
  Synthetic oligonucleotide
gagaagttcgaaaggggcagtcaactttgagacagtataaaacagaaataagaattgggc

SEQ ID NO: 37159 - DNA, 60 bp, Artificial
  Synthetic oligonucleotide
ccttaattctcagaaagcctctttacctagacagcatagccaaggggatgaaaagtctgc

SEQ ID NO: 37160 - DNA, 60 bp, Artificial
  Synthetic oligonucleotide
gcaatacgtctcccgaaagtcgcacacaacggggtttttatgccaggaacttacaaaatt

SEQ ID NO: 37161 - DNA, 60 bp, Artificial
  Synthetic oligonucleotide
gctctattggcagcataaatgggttcgagatagagtctcacaaatgctattgtagtctgt

SEQ ID NO: 37162 - DNA, 60 bp, Artificial
  Synthetic oligonucleotide
aacctaggccctgtgacaataaccctgtcagagccaagaaacatccagcaaaggctccct

SEQ ID NO: 37163 - DNA, 60 bp, Artificial
  Synthetic oligonucleotide
catgcattgtctgtgaatcaacccctgttaatgcaatagatgctgaaatgcacgagctca

SEQ ID NO: 37164 - DNA, 60 bp, Artificial
  Synthetic oligonucleotide
gacgaagaagaagccgggtacaagaaaatcatcgagaggctaaatgacaaaaaaggcaaa

SEQ ID NO: 37165 - DNA, 57 bp, Artificial
  Synthetic oligonucleotide
gtggcatcttcggtaatgtcttcttaggcatcttcctgttccttgctccttttgcac

SEQ ID NO: 37166 - DNA, 60 bp, Artificial
  Synthetic oligonucleotide
ggcaaacaaaacgacacctgttcgaccaaaacaagctgttggctagaatcagtcaagagt

SEQ ID NO: 37167 - DNA, 60 bp, Artificial
  Synthetic oligonucleotide
gatgttgtggcagcaggatcaagtttgatggcaaggaaaatagagtttggggctgacagc

SEQ ID NO: 37168 - DNA, 60 bp, Artificial
  Synthetic oligonucleotide
gcaagtctgacctgctccggttgttacgcctgcagctccggtatctcctgcaaagttaga

SEQ ID NO: 37169 - DNA, 60 bp, Artificial
  Synthetic oligonucleotide
ggctgcacttcttcaacctgcttgcataaagaatggccacactcgagaaactggcgatgc

SEQ ID NO: 37170 - DNA, 60 bp, Artificial
  Synthetic oligonucleotide
cccagctacagcgagacacctacactgccgaacacacatcatctctccagaagtcttctt

SEQ ID NO: 37171 - DNA, 60 bp, Artificial
  Synthetic oligonucleotide
ggaggctactacaagtgtcagagtcaacggggatggctctaaagagaagttgctggatga

SEQ ID NO: 37172 - DNA, 60 bp, Artificial
  Synthetic oligonucleotide
gtacttcagtttaagttgcacgacactcccgctaccaccgttccagccctggccgcctca

SEQ ID NO: 37173 - DNA, 60 bp, Artificial
  Synthetic oligonucleotide
ggaatgcagctaatcaatgtcacacaacacccaatgaagatagccaacactccaggccca

SEQ ID NO: 37174 - DNA, 60 bp, Artificial
  Synthetic oligonucleotide
gcaggaaacaaaaacacacatgactcagaacccaggaaccacagtagatccagacaccac

SEQ ID NO: 37175 - DNA, 60 bp, Artificial
  Synthetic oligonucleotide
caactgacaaggaacatagtgagcttgagatcaatgtgcttatacctcaggttgctgtca

SEQ ID NO: 37176 - DNA, 60 bp, Artificial
  Synthetic oligonucleotide
ggaatctccccagaggcccagacaatgcagagccaacaggccgttgcaccagtgaccaca

SEQ ID NO: 37177 - DNA, 60 bp, Artificial
  Synthetic oligonucleotide
gcaccaggaccatcaatagatgctaccatggaggcagtaccaggcacgaccaacagtgtg

SEQ ID NO: 37178 - DNA, 60 bp, Artificial
  Synthetic oligonucleotide
gtacacaacatactacctcaacagactgatttcttgattgcttttcaaggagtctactac

SEQ ID NO: 37179 - DNA, 60 bp, Artificial
  Synthetic oligonucleotide
ctctcctcttctcatggcttatgaagttgctattcactgctgcattcattggctgcgtga

SEQ ID NO: 37180 - DNA, 60 bp, Artificial
  Synthetic oligonucleotide
cgcgtaagccagagaggaaggcaaatcctaaatttggagagtggcaggtggaggttgtca

SEQ ID NO: 37181 - DNA, 60 bp, Artificial
  Synthetic oligonucleotide
ctgctctctcgcgtaagccagagaggaaggcaaatcctaaatttggagagtggcaggtgg

SEQ ID NO: 37182 - DNA, 60 bp, Artificial
  Synthetic oligonucleotide
ctgctctctcgcgtaagccagagaggaaggctaaccctaaatttggagagtggcaggtgg

SEQ ID NO: 37183 - DNA, 59 bp, Artificial
  Synthetic oligonucleotide
tgattgggttgggtgggtcaaatcaaacacatataagctggggtaggtaagtttactaa

SEQ ID NO: 37184 - DNA, 60 bp, Artificial
  Synthetic oligonucleotide
cacatacactgattgggttgggtgggtcaaatcaaacacatataagctggggtaggtaag

SEQ ID NO: 37185 - DNA, 51 bp, Artificial
  Synthetic oligonucleotide
aagcctttttcataaatgtggcaggtggtgttgttaattggactaagctgc

SEQ ID NO: 37186 - DNA, 60 bp, Artificial
  Synthetic oligonucleotide
agaggatgcgcatccgcaaatgagcaatcatcgaagatccagctgagaaatatatatctt

SEQ ID NO: 37187 - DNA, 66 bp, Artificial
  Synthetic oligonucleotide
ggatttcacaatttctgaggagatagaatctatgccattatttacaataaggtatcagaaaagagg

SEQ ID NO: 37188 - DNA, 60 bp, Artificial
  Synthetic oligonucleotide
cctattatcatgcagtatgcttcagaaataaaagaggcatctaaagacacatttgatgcg

SEQ ID NO: 37189 - DNA, 61 bp, Artificial
  Synthetic oligonucleotide
gataagcctaaaatcttagatttcaataatactatagtcctgatggctgcaagaacaatgg

SEQ ID NO: 37190 - DNA, 60 bp, Artificial
  Synthetic oligonucleotide
caatccagaggccctaggtataacaaaatggttcctgtctgtccagttgttttaagtgtc

SEQ ID NO: 37191 - DNA, 60 bp, Artificial
  Synthetic oligonucleotide
ggaaagcataagagttttaaagataagacatctagcgacattgaaacggataagcctaaa

SEQ ID NO: 37192 - DNA, 60 bp, Artificial
  Synthetic oligonucleotide
gaaagagtttcatggaataactggcagacaaaccgttccttaaattcaggtctgattgat

SEQ ID NO: 37193 - DNA, 60 bp, Artificial
  Synthetic oligonucleotide
ttcgctgactgagccatctagatatatgataatgaattcgcttgccatttcaagccacgt

SEQ ID NO: 37194 - DNA, 61 bp, Artificial
  Synthetic oligonucleotide
cccaagagcttttaacattgaattatgataatctatgcaaatctagcattgtcccgttttg

SEQ ID NO: 37195 - DNA, 60 bp, Artificial
  Synthetic oligonucleotide
gcaattagattagataaagagaggtgccaaaggattgtatcatcacctgggcttttcata

SEQ ID NO: 37196 - DNA, 60 bp, Artificial
  Synthetic oligonucleotide
ggtgccattggataaacagaaagaaactatacaaagccaatgtttacacttatgcaattc

SEQ ID NO: 37197 - DNA, 60 bp, Artificial
  Synthetic oligonucleotide
gtgatatgcgaagtagatcactcttaacgcctcgcaaatttacaacattgggatccttaa

SEQ ID NO: 37198 - DNA, 60 bp, Artificial
  Synthetic oligonucleotide
gggatccttaaataaactagtttcctataatgactttagatcttctttagacgaccagag

SEQ ID NO: 37199 - DNA, 65 bp, Artificial
  Synthetic oligonucleotide
gtctctgatcaaatagtaattcaatatgcagcaaacacatttgagtctgtttgtttgacatttgg

SEQ ID NO: 37200 - DNA, 60 bp, Artificial
  Synthetic oligonucleotide
gcaaagaatttgtctcacttttcaatttacatggagaaccactatctgtctttggcagat

SEQ ID NO: 37201 - DNA, 59 bp, Artificial
  Synthetic oligonucleotide
ttttcacttacaacatgctggatgatcaaattaatgcaccacagcagcatttgccattc

SEQ ID NO: 37202 - DNA, 60 bp, Artificial
  Synthetic oligonucleotide
gcaccacagcagcatttgccattcaataatcggaaggaaataccagttgagttaaatggg

SEQ ID NO: 37203 - DNA, 60 bp, Artificial
  Synthetic oligonucleotide
cgaagttgctactgtaaagaaagctcatatgtccaaaatgatgttcttttccgggccaac

SEQ ID NO: 37204 - DNA, 66 bp, Artificial
  Synthetic oligonucleotide
cgaccagagatttactgataatttgaacttcatgcttaataacccagaattgttagttactaaagg

SEQ ID NO: 37205 - DNA, 60 bp, Artificial
  Synthetic oligonucleotide
aactccttatttaacactctattagccagcactacaaggttagactttattcctctatta

SEQ ID NO: 37206 - DNA, 60 bp, Artificial
  Synthetic oligonucleotide
caatgtatagtagatgtttcaacaataatgaggaatatattagctgtgtcacaatataat

SEQ ID NO: 37207 - DNA, 59 bp, Artificial
  Synthetic oligonucleotide
aatgttattagagtctatggatcgagaattccatatgttcacattacccgaagcctttt

SEQ ID NO: 37208 - DNA, 51 bp, Artificial
  Synthetic oligonucleotide
tcttagatgagttagaatttagttcaggaaagtctctatttacctttttct

SEQ ID NO: 37209 - DNA, 60 bp, Artificial
  Synthetic oligonucleotide
cctttccatccaaaacccagcacaattatttattgagcagatactgttttcccataaacc

SEQ ID NO: 37210 - DNA, 60 bp, Artificial
  Synthetic oligonucleotide
tggaagagttacatttcctcaggcataccagatgataaatagagatattggccaactacc

SEQ ID NO: 37211 - DNA, 60 bp, Artificial
  Synthetic oligonucleotide
gttaaaggaacaccacaagatagaactggcctcagtgcaagtcaaatgcctgaatttaga

SEQ ID NO: 37212 - DNA, 60 bp, Artificial
  Synthetic oligonucleotide
ccctgctctagttcttaaggcgtttagcaaagggacatcagatattcctggggctgatcc

SEQ ID NO: 37213 - DNA, 66 bp, Artificial
  Synthetic oligonucleotide
gcatttaatagggaatgaaatcctaatttatagaatcagagagatgaccaaactctatcaggtttg

SEQ ID NO: 37214 - DNA, 60 bp, Artificial
  Synthetic oligonucleotide
gacttttgcacattgattcagggcaacactatctctgataataaatggtacacaatgcat

SEQ ID NO: 37215 - DNA, 60 bp, Artificial
  Synthetic oligonucleotide
ttaaaacagattgctagcggatctatcaaagggaatatagtaacaactagtacaagcgag

SEQ ID NO: 37216 - DNA, 60 bp, Artificial
  Synthetic oligonucleotide
gtaacaactagtacaagcgagcaaataatagcaaatgagtgttttagagtgctctgccac

SEQ ID NO: 37217 - DNA, 60 bp, Artificial
  Synthetic oligonucleotide
ggcacataagattttcatgctagaaggagactatatgagaccaacacaagctgaaatcga

SEQ ID NO: 37218 - DNA, 60 bp, Artificial
  Synthetic oligonucleotide
gaaatacaccagtttgattctcccagtgatgtctgaattgggtatagatacagaaatagc

SEQ ID NO: 37219 - DNA, 60 bp, Artificial
  Synthetic oligonucleotide
cctatctaatagtttacaaagtatcactgaacagtcaacttggacagatgcactaaaagc

SEQ ID NO: 37220 - DNA, 57 bp, Artificial
  Synthetic oligonucleotide
caagcagctagaacagctacagttgctaaagacatcagtgctgatatccttgaggca

SEQ ID NO: 37221 - DNA, 60 bp, Artificial
  Synthetic oligonucleotide
ggaggaccaagcttatgatcaatacctgcacagaatccaagcagctagaacagctacagt

SEQ ID NO: 37222 - DNA, 60 bp, Artificial
  Synthetic oligonucleotide
ctagagacaaatgagtggtccacaattctatacaattccttccatatagcaatgttatta

SEQ ID NO: 37223 - DNA, 52 bp, Artificial
  Synthetic oligonucleotide
gccaggtgttaacttgttaaactataacatacccaatgtgacaccagacaac

SEQ ID NO: 37224 - DNA, 60 bp, Artificial
  Synthetic oligonucleotide
atgggaacaacaattcatcttagcaaacgacttatttaaaaatcaagaaaggcagaagtt

SEQ ID NO: 37225 - DNA, 60 bp, Artificial
  Synthetic oligonucleotide
ttggaagcggttaagattggcaatgcacttgtgttatgggaacaacaattcatcttagca

SEQ ID NO: 37226 - DNA, 60 bp, Artificial
  Synthetic oligonucleotide
ctggctccagggcaatttcaattacatttctagttatgtgcatagttgtgcaatgcttgt

SEQ ID NO: 37227 - DNA, 60 bp, Artificial
  Synthetic oligonucleotide
gagacccatcaaaagcattgaaactggaaataaatgcagacatgtcaaaatggagtgctc

SEQ ID NO: 37228 - DNA, 60 bp, Artificial
  Synthetic oligonucleotide
ctttcacattctttaataagggccaaaagacagctaaagatagagagatattcgttggag

SEQ ID NO: 37229 - DNA, 60 bp, Artificial
  Synthetic oligonucleotide
aaatcaactgagaaatttgataaaaagttcagactttcaaatccattattcttagaagat

SEQ ID NO: 37230 - DNA, 60 bp, Artificial
  Synthetic oligonucleotide
cttgcgaaaccgtgtagaaagtagaaataattttagaagaagcatcacaacaataagcac

SEQ ID NO: 37231 - DNA, 60 bp, Artificial
  Synthetic oligonucleotide
gattgacttagcaaagactgttctggaaatagagatgaaccaaagaagtgataatttagg

SEQ ID NO: 37232 - DNA, 60 bp, Artificial
  Synthetic oligonucleotide
aatgcaaaaggccttcatgagaaacatcacgtaatgattgacttagcaaagactgttctg

SEQ ID NO: 37233 - DNA, 60 bp, Artificial
  Synthetic oligonucleotide
ggtgcattcagatgacaatcaaacatcgttagcaattatccaaaataaagtctctgatca

SEQ ID NO: 37234 - DNA, 61 bp, Artificial
  Synthetic oligonucleotide
gcatagttgtgcaatgcttgtttacaaagatatcctcaaagaatgtatgaagttactagac

SEQ ID NO: 37235 - DNA, 60 bp, Artificial
  Synthetic oligonucleotide
tagtagtagacaccgcaaaagaaagcagtcaatcagcaacatgggaatatggaagtggct

SEQ ID NO: 37236 - DNA, 60 bp, Artificial
  Synthetic oligonucleotide
tagtagtagacaccgcaaaagaaagcagtcaatcagcaacatggggatatggaagtggct

SEQ ID NO: 37237 - DNA, 60 bp, Artificial
  Synthetic oligonucleotide
ctgtcttaccaatatgcgaaaccttgacggaaagcccataagtgaaggtagcaacttggt

SEQ ID NO: 37238 - DNA, 51 bp, Artificial
  Synthetic oligonucleotide
ggggcactggaaaaggccctgagatgggcatcaggtgagagttttattgaa

SEQ ID NO: 37239 - DNA, 58 bp, Artificial
  Synthetic oligonucleotide
cacctgacaattataaaattaatgggacaactattgaatttgttgaggtaactgtcac

SEQ ID NO: 37240 - DNA, 60 bp, Artificial
  Synthetic oligonucleotide
taaagggtgaaataccacagccgtataagataacattcactgttgttgcagttcggacag

SEQ ID NO: 37241 - DNA, 60 bp, Artificial
  Synthetic oligonucleotide
ggcatataggtatataaaccttacacgagaggacatgatcaattattatgcacctcgaat

SEQ ID NO: 37242 - DNA, 52 bp, Artificial
  Synthetic oligonucleotide
ggcaaatcattgtcagaaatatccaatgtcacgaaagccaagaaatttttta

SEQ ID NO: 37243 - DNA, 60 bp, Artificial
  Synthetic oligonucleotide
gaaaatgagaggcatagtgaaaatacttgaacctatcagactaattaaaagctgggtatc

SEQ ID NO: 37244 - DNA, 60 bp, Artificial
  Synthetic oligonucleotide
tggcacaactagccgtagctctgtgcaccagtaaggttgaaagactatatggaacagcac

SEQ ID NO: 37245 - DNA, 60 bp, Artificial
  Synthetic oligonucleotide
gatgatgccttatttatctatggttacctggaacctgttgatgatggaactgactggttc

SEQ ID NO: 37246 - DNA, 60 bp, Artificial
  Synthetic oligonucleotide
gatgatgggcttcgagctattgcacaacatgatgaagacagccccagattcctactagcc

SEQ ID NO: 37247 - DNA, 60 bp, Artificial
  Synthetic oligonucleotide
atattccctgcattgtatacaagaactgtgtcctcagaacaagccttaggacaacgcaag

SEQ ID NO: 37248 - DNA, 60 bp, Artificial
  Synthetic oligonucleotide
ggtcctcttcaaaacggaatctgggttcgaatggggaaaaccaaatattccctgcattgt

SEQ ID NO: 37249 - DNA, 60 bp, Artificial
  Synthetic oligonucleotide
ggaatgagattcaatacagagcaggttcaaggagtaagacatatggtcctcttcaaaacg

SEQ ID NO: 37250 - DNA, 60 bp, Artificial
  Synthetic oligonucleotide
gctgtacattctccaaagaatatgcatggaaggatttcttaaacgggattcactgtgatg

SEQ ID NO: 37251 - DNA, 60 bp, Artificial
  Synthetic oligonucleotide
tgcaagacttgaaatattctgggataaaaaggcatatatattggagacatcaatcaccca

SEQ ID NO: 37252 - DNA, 61 bp, Artificial
  Synthetic oligonucleotide
gtcaggatgctatagaattggcagcaatagaattaaataaagtattatcgacaaagtccag

SEQ ID NO: 37253 - DNA, 60 bp, Artificial
  Synthetic oligonucleotide
ggttagggcaattctcctttatcggaaaggtacagtggaagatcttcactcctaagtctg

SEQ ID NO: 37254 - DNA, 60 bp, Artificial
  Synthetic oligonucleotide
ctacctagtccggaaattaaatgatccaagtattgtaacagctatgactatgcagtcacc

SEQ ID NO: 37255 - DNA, 60 bp, Artificial
  Synthetic oligonucleotide
agaaaaggaagaacggtatggagaatcattagtagaaaacggttacatgatgtgggaact

SEQ ID NO: 37256 - DNA, 60 bp, Artificial
  Synthetic oligonucleotide
caagacacaaccctagcctcttgaaactttatgaagaaacaagagatcagaaggctatgg

SEQ ID NO: 37257 - DNA, 60 bp, Artificial
  Synthetic oligonucleotide
gccccagattcctactagcccatgccttccatacaataagggatattagataccaagcgg

SEQ ID NO: 37258 - DNA, 60 bp, Artificial
  Synthetic oligonucleotide
cagctgggatagggatgtcagataagaacttattaaaacgagcactcatagggtattcac

SEQ ID NO: 37259 - DNA, 52 bp, Artificial
  Synthetic oligonucleotide
ttgagacaacaggggatggttttaccactgtcagttcgatgtcaagcagact

SEQ ID NO: 37260 - DNA, 60 bp, Artificial
  Synthetic oligonucleotide
atgaaagatggggtctatcgtgaactaggactggacatatcccttcctgatgtcatgaag

SEQ ID NO: 37261 - DNA, 60 bp, Artificial
  Synthetic oligonucleotide
caaggaaatgttgaaggcactgctgaggccatttgtgcttaccggttaaaatcaatgtcc

SEQ ID NO: 37262 - DNA, 60 bp, Artificial
  Synthetic oligonucleotide
gtgcagcactgatgatagctgatataaaaggggactattcggtcctccaattgcaagcca

SEQ ID NO: 37263 - DNA, 60 bp, Artificial
  Synthetic oligonucleotide
cacaatattgattgatggtgaatctcagtggggagtttctaaagtgatgagcattgatct

SEQ ID NO: 37264 - DNA, 51 bp, Artificial
  Synthetic oligonucleotide
tctgtgcaatctttgacaacttgcgttacctcattcctgcagttacatcac

SEQ ID NO: 37265 - DNA, 60 bp, Artificial
  Synthetic oligonucleotide
tcactgagccctcaacccaggagtattcaaccactaagcacacttatgttgatacagtgt

SEQ ID NO: 37266 - DNA, 60 bp, Artificial
  Synthetic oligonucleotide
attcttccatcaaagtccttagaagtagctgggtctttcattaggtttattacggtgttc

SEQ ID NO: 37267 - DNA, 60 bp, Artificial
  Synthetic oligonucleotide
tttgaaggttgtgctgtctcaataccctttgttaaaatactactgggttcactatctgat

SEQ ID NO: 37268 - DNA, 60 bp, Artificial
  Synthetic oligonucleotide
ggtttctctattggacccttatgatttgacagaattagagagtattgtccgtggttgggg

SEQ ID NO: 37269 - DNA, 59 bp, Artificial
  Synthetic oligonucleotide
ttataagtttgctgtgactgtggatgagatgtcagatgtgctagatacagccaagtttc

SEQ ID NO: 37270 - DNA, 60 bp, Artificial
  Synthetic oligonucleotide
cttgaatcccattatatcatctggcttattagagaattttagaagaacccctcctgctgc

SEQ ID NO: 37271 - DNA, 60 bp, Artificial
  Synthetic oligonucleotide
ctccatacagagattggtttcaagctctctggtttgaggataagaccttctcagaatggc

SEQ ID NO: 37272 - DNA, 60 bp, Artificial
  Synthetic oligonucleotide
gaagaacccctcctgctgctatcccacctgctgcttattcactgattatgaatcgtgcaa

SEQ ID NO: 37273 - DNA, 60 bp, Artificial
  Synthetic oligonucleotide
cataaagaggttttgcaagcagtttcaattttcaatcgcaaagaagatattggccagcaa

SEQ ID NO: 37274 - DNA, 60 bp, Artificial
  Synthetic oligonucleotide
ggtcaccaggagacaactcagctaaatttcgtagattcacttccatgctgcataatggtt

SEQ ID NO: 37275 - DNA, 60 bp, Artificial
  Synthetic oligonucleotide
ggtcaccatggggaagtgaaagggaattggttacagggtaacttaaataagtgctcatca

SEQ ID NO: 37276 - DNA, 60 bp, Artificial
  Synthetic oligonucleotide
aaaattgggaggaaccatactttagtcaaacaaggaatataagcttaaaaggtatgtcag

SEQ ID NO: 37277 - DNA, 60 bp, Artificial
  Synthetic oligonucleotide
tggtgttgcaatgtccttgttattcaagcaagtttggcatagtctgtttccagagcttga

SEQ ID NO: 37278 - DNA, 60 bp, Artificial
  Synthetic oligonucleotide
gagaaattcacagcaaactgaaggagtttcctcctggtacattaactgcggtagagtgta

SEQ ID NO: 37279 - DNA, 60 bp, Artificial
  Synthetic oligonucleotide
ctgactggttcttatttgtgtcccaacagatccaagcaggacatttacactggtttagtg

SEQ ID NO: 37280 - DNA, 60 bp, Artificial
  Synthetic oligonucleotide
tacattaaaggacgcgagattaaaactagtctcgcaaaaagaagtgaatgggaggttaca

SEQ ID NO: 37281 - DNA, 60 bp, Artificial
  Synthetic oligonucleotide
cattaaaggacgcgagattaaaactagtctcgcaaaaagaagtgaatgggaggttacgct

SEQ ID NO: 37282 - DNA, 60 bp, Artificial
  Synthetic oligonucleotide
cattaaaggacgcgagattaaaactagtctcgcaaaaagaagtgaatgggaagttacact

SEQ ID NO: 37283 - DNA, 60 bp, Artificial
  Synthetic oligonucleotide
atgtttaaatcagctgtaaagctattgagtgagagcaaccctggaacagccagctctatc

SEQ ID NO: 37284 - DNA, 60 bp, Artificial
  Synthetic oligonucleotide
gaaatgtttaaatcagctgtaaagctattgagtgagagcaaccctggaacagccagctct

SEQ ID NO: 37285 - DNA, 60 bp, Artificial
  Synthetic oligonucleotide
aacttgaggaaatgtttaaatcagctgtaaagctattgagtgagagcaaccctggaacag

SEQ ID NO: 37286 - DNA, 60 bp, Artificial
  Synthetic oligonucleotide
ccatggcatactgcaaagtgtcactatgaacgagattaccaatatgagacaagttggggc

SEQ ID NO: 37287 - DNA, 60 bp, Artificial
  Synthetic oligonucleotide
cgaatacccatggcatactgcaaagtgtcactatgaacgagattaccagtatgaaacaag

SEQ ID NO: 37288 - DNA, 60 bp, Artificial
  Synthetic oligonucleotide
cgttccgttaatagtacatgacactaatgcttgctttgctactaattgatttcttcatta

SEQ ID NO: 37289 - DNA, 60 bp, Artificial
  Synthetic oligonucleotide
cgttccgttaatagtacatgacactaatgcttgctttgctactaactgattttcttatta

SEQ ID NO: 37290 - DNA, 60 bp, Artificial
  Synthetic oligonucleotide
ccaaactcggagaacttaaacgggagctggctgatcttattgcagctcagaaattggctt

SEQ ID NO: 37291 - DNA, 61 bp, Artificial
  Synthetic oligonucleotide
cgttccgttaatagtacatgacactaatgcttgctttgctactaactgattttcttattac

SEQ ID NO: 37292 - DNA, 61 bp, Artificial
  Synthetic oligonucleotide
cgttccgttaatagtacatgacactaatgcttgctttgctactaattgatttcttcattac

SEQ ID NO: 37293 - DNA, 60 bp, Artificial
  Synthetic oligonucleotide
tggcaaaagattggagtgaccgtattgagcagtggctaagtgaaccttgtaagctactcc

SEQ ID NO: 37294 - DNA, 60 bp, Artificial
  Synthetic oligonucleotide
tgttcactagaatggtattaaacccccatggagaagaccatgacgttgagttagcaggtc

SEQ ID NO: 37295 - DNA, 60 bp, Artificial
  Synthetic oligonucleotide
atcaagtaaagttggctgttgagttagaaaagctgatatcaaaaatagggtgtacagaaa

SEQ ID NO: 37296 - DNA, 60 bp, Artificial
  Synthetic oligonucleotide
gttttcaaggatattatgtctgtttcctcggtaagcaatctgaacctttgtatgttccac

SEQ ID NO: 37297 - DNA, 60 bp, Artificial
  Synthetic oligonucleotide
atctgaacctttgtatgttccactattagaagatttcaggtctgcagaggtgttcactag

SEQ ID NO: 37298 - DNA, 60 bp, Artificial
  Synthetic oligonucleotide
gttcacttgattgccccaattcaaacctgcacaaccatgaggagctgcatggtaggcttg

SEQ ID NO: 37299 - DNA, 60 bp, Artificial
  Synthetic oligonucleotide
catgaggagctgcatggtaggcttgggcttacaaagagttcaaatcacatatgaaaagac

SEQ ID NO: 37300 - DNA, 59 bp, Artificial
  Synthetic oligonucleotide
atgaaaagacatactgtgtgtcaggccaacttcttgaagggttgtgctttattcctgtc

SEQ ID NO: 37301 - DNA, 60 bp, Artificial
  Synthetic oligonucleotide
cataatgacagtgccagctaattgcttccttgtggctaaaaaagcaaataatcaagtaaa

SEQ ID NO: 37302 - DNA, 58 bp, Artificial
  Synthetic oligonucleotide
caggttggggctgtaacccacctgactgtccaggggttggaacaggctgtacagcatg

SEQ ID NO: 37303 - DNA, 60 bp, Artificial
  Synthetic oligonucleotide
acagcatgtggaatataccttgacaagttaaaatctgtaggtaaagcatacaaagtagtg

SEQ ID NO: 37304 - DNA, 60 bp, Artificial
  Synthetic oligonucleotide
acctggctgttacagaactctaggtgtatttagatacaagagccgttgttatgtcgggct

SEQ ID NO: 37305 - DNA, 60 bp, Artificial
  Synthetic oligonucleotide
caattgggtactgagcagacttgcaaaaccattgatatcaatgactgccttgttactcct

SEQ ID NO: 37306 - DNA, 60 bp, Artificial
  Synthetic oligonucleotide
tgttactccttcactgaaggtgtgtatggttggaacagtggccaaattgcaacctggaga

SEQ ID NO: 37307 - DNA, 60 bp, Artificial
  Synthetic oligonucleotide
aacctggagatacactcctctttttgggaccattggaacaagggggcttaattctcaagc

SEQ ID NO: 37308 - DNA, 60 bp, Artificial
  Synthetic oligonucleotide
gcccactcattggcagtagagatgtgtgttccaggtattcacgggtgggcaacaacagcc

SEQ ID NO: 37309 - DNA, 60 bp, Artificial
  Synthetic oligonucleotide
gaggtgcccagaacacacaggatcatttagaaagatatgtgggtttgctacaacacctgt

SEQ ID NO: 37310 - DNA, 60 bp, Artificial
  Synthetic oligonucleotide
gcatctacacacttactagcttgttttcactgttgcctggtgtagcccactcattggcag

SEQ ID NO: 37311 - DNA, 60 bp, Artificial
  Synthetic oligonucleotide
gacagaatctacagaaagtgcacttcaagcacattttgcaatctgcaaactaacttcaag

SEQ ID NO: 37312 - DNA, 60 bp, Artificial
  Synthetic oligonucleotide
ctcgattgtcataaaaagagctgtgctgaaggacaatgcccttactgcatgacattgaca

SEQ ID NO: 37313 - DNA, 60 bp, Artificial
  Synthetic oligonucleotide
aagagctgtgctgaaggacaatgcccttactgcatgacattgacagaatctacagaaagt

SEQ ID NO: 37314 - DNA, 60 bp, Artificial
  Synthetic oligonucleotide
aacattaagacagcatttcactgctttggtgaatgtaaaagatatgtttatccttggcaa

SEQ ID NO: 37315 - DNA, 55 bp, Artificial
  Synthetic oligonucleotide
accgaagaactatcatgaatccagcaaatggagaggaaaagatcccttttcatgt

SEQ ID NO: 37316 - DNA, 57 bp, Artificial
  Synthetic oligonucleotide
gggtgggcaacaacagccttgttcattactttttgttttggatggctccttatcccc

SEQ ID NO: 37317 - DNA, 60 bp, Artificial
  Synthetic oligonucleotide
gtggggaagggtggtcactcgggatcattgtttaggtgttgtcatgataatgaatgtact

SEQ ID NO: 37318 - DNA, 60 bp, Artificial
  Synthetic oligonucleotide
ttatttgggcagcaagtgcagatacaccgctccttgagcctggatggacagacacagcac

SEQ ID NO: 37319 - DNA, 60 bp, Artificial
  Synthetic oligonucleotide
ccacattaacctaattctcaatagagatttatcatttcaagacttggcagagaacccatg

SEQ ID NO: 37320 - DNA, 50 bp, Artificial
  Synthetic oligonucleotide
atggagcatggggatctggggtgggctttacattaacgtgtattgtaagc

SEQ ID NO: 37321 - DNA, 60 bp, Artificial
  Synthetic oligonucleotide
ggctacaaaagattcttttcagtcatttaatgtcacgcaaccgcacttaacagccaatct

SEQ ID NO: 37322 - DNA, 60 bp, Artificial
  Synthetic oligonucleotide
ccgcacttaacagccaatctactggaatgggtggacccagatagtaccatcaaagaccac

SEQ ID NO: 37323 - DNA, 60 bp, Artificial
  Synthetic oligonucleotide
acctttatcacatcaattaaggcttgcgatgcagctatgtgctatggtgcaacagtcagt

SEQ ID NO: 37324 - DNA, 60 bp, Artificial
  Synthetic oligonucleotide
agttgtcagccaacagttcacttgattgccccaattcaaacctgcacaaccatgaggagc

SEQ ID NO: 37325 - DNA, 57 bp, Artificial
  Synthetic oligonucleotide
gtctaaaaggaacatgcacaattccaattaatgtgtttgagactaattttaaagcaa

SEQ ID NO: 37326 - DNA, 60 bp, Artificial
  Synthetic oligonucleotide
gccagggctacgtgaccgggtttgtggagttagggattatccctttagcagaaattgggg

SEQ ID NO: 37327 - DNA, 60 bp, Artificial
  Synthetic oligonucleotide
tatggttggctggctcagtctcatcgtgtggtgctttactactatggtaacagggcacac

SEQ ID NO: 37328 - DNA, 60 bp, Artificial
  Synthetic oligonucleotide
ataatagtttactgtaatggacaaaagaaaataatcctaacaaagacattagtaataggc

SEQ ID NO: 37329 - DNA, 59 bp, Artificial
  Synthetic oligonucleotide
gttcaacaacatgtttagtaaataaagttcaagaatttcgaggctctgagcaaagagtg

SEQ ID NO: 37330 - DNA, 60 bp, Artificial
  Synthetic oligonucleotide
tccttggcaaagtgctaaatgcttctttgagaaggactatcaatatgagacaggttgggg

SEQ ID NO: 37331 - DNA, 54 bp, Artificial
  Synthetic oligonucleotide
ttagcaggtcaaggtaatatgagaattgcaggactgattgctggtaaagttcct

SEQ ID NO: 37332 - DNA, 60 bp, Artificial
  Synthetic oligonucleotide
catgctgacattcaggtattaggacactggatggatgcaatatttaacattaagacagca

SEQ ID NO: 37333 - DNA, 60 bp, Artificial
  Synthetic oligonucleotide
gttcctatgtacagttctctttcaacactagttaggaaagttgatccagaatatgtgttt

SEQ ID NO: 37334 - DNA, 60 bp, Artificial
  Synthetic oligonucleotide
acctgggataattgcagaagcaaaccatagtgtgtgtgataagaaaacaatacctgtgac

SEQ ID NO: 37335 - DNA, 60 bp, Artificial
  Synthetic oligonucleotide
gagcctggatggacagacacagcacacggtgtgggcatgatccctatgaaaactgacctg

SEQ ID NO: 37336 - DNA, 60 bp, Artificial
  Synthetic oligonucleotide
ccctggggaaatagaaaggattaccggctgtacagtgttttgtacattgtcaggtccagg

SEQ ID NO: 37337 - DNA, 60 bp, Artificial
  Synthetic oligonucleotide
tgacaattgagcttgttatttgggcagcaagtgcagatacaccgctccttgagcctggat

SEQ ID NO: 37338 - DNA, 60 bp, Artificial
  Synthetic oligonucleotide
ctccaccttcactatcatataaatcatgtttcttataacgaggcttttgttcctgcggag

SEQ ID NO: 37339 - DNA, 60 bp, Artificial
  Synthetic oligonucleotide
gagaagccataagaaaaaactgtaattgtcaccagatgtcaatatttaatttaaatgctt

SEQ ID NO: 37340 - DNA, 58 bp, Artificial
  Synthetic oligonucleotide
agggtcacagggttcaaccagattgattcagataaagtatatgatgatggagcacccc

SEQ ID NO: 37341 - DNA, 60 bp, Artificial
  Synthetic oligonucleotide
tggcttcttggcattatcagtggcaattggattgtggttgcagtcttgataattattttg

SEQ ID NO: 37342 - DNA, 60 bp, Artificial
  Synthetic oligonucleotide
tgtcttagacaatctaaatatgctacttacaatgtaaatacctatgcatgcagctgctat

SEQ ID NO: 37343 - DNA, 60 bp, Artificial
  Synthetic oligonucleotide
cagctgctataactagaactatcctaactaggtcaaaaaagttcccaaagaaggaggcta

SEQ ID NO: 37344 - DNA, 60 bp, Artificial
  Synthetic oligonucleotide
cctatggaacaatcacaggactcatacccgttggatggcattccaaacttatcagttgtc

SEQ ID NO: 37345 - DNA, 60 bp, Artificial
  Synthetic oligonucleotide
ccgaagtataggttatattgcaatcaatacctgcagtacattgagaacaaccagaacaga

SEQ ID NO: 37346 - DNA, 60 bp, Artificial
  Synthetic oligonucleotide
atagaaatggacaatttacttgagatttcatgagtattatcaacaatatatatatttgag

SEQ ID NO: 37347 - DNA, 51 bp, Artificial
  Synthetic oligonucleotide
aataaaagtacttgtgtgttttaaatttatcgtgttttaagtagatatttg

SEQ ID NO: 37348 - DNA, 60 bp, Artificial
  Synthetic oligonucleotide
tcaactttgtcctttatgctaagataacattcctcagcatgatctttagaagccttgctc

SEQ ID NO: 37349 - DNA, 60 bp, Artificial
  Synthetic oligonucleotide
aaatgccaaggatatcataccagagactcaatgcatctttggttttccaaatgaaccatg

SEQ ID NO: 37350 - DNA, 60 bp, Artificial
  Synthetic oligonucleotide
ttctggcgatggtagatttgttgttgtttcatcatttctcaaaattctggaaagcttttt

SEQ ID NO: 37351 - DNA, 60 bp, Artificial
  Synthetic oligonucleotide
ccccttaggttcttcagttttgacaataacaggctgttctacatcaataaggtcttctgg

SEQ ID NO: 37352 - DNA, 60 bp, Artificial
  Synthetic oligonucleotide
tctggatcatctactttgtacctatcttgtatctttctcaactggacactgttgtctgct

SEQ ID NO: 37353 - DNA, 60 bp, Artificial
  Synthetic oligonucleotide
agttgcctttaaaagatggacctctgtaaagcttattgaacttgacgtttggtatgcttt

SEQ ID NO: 37354 - DNA, 60 bp, Artificial
  Synthetic oligonucleotide
accaataaacagagccaaagtgatccgatctgctgccttaattgaagcgtgtaaattaat

SEQ ID NO: 37355 - DNA, 60 bp, Artificial
  Synthetic oligonucleotide
ctctgttgaaaataccaaagattgtctaggcattagattctctggaggtacatcatccac

SEQ ID NO: 37356 - DNA, 60 bp, Artificial
  Synthetic oligonucleotide
ttataacattccctatggaacaatcacaggactcatacccgttggatggcattccaaact

SEQ ID NO: 37357 - DNA, 60 bp, Artificial
  Synthetic oligonucleotide
tctcaactggacactgttgtctgcttggttcaagaggtagacctcagacacgaagaagag

SEQ ID NO: 37358 - DNA, 60 bp, Artificial
  Synthetic oligonucleotide
ctgagcaattggaagaatgattctctagttggcaatggaaatgataaggttagttttact

SEQ ID NO: 37359 - DNA, 58 bp, Artificial
  Synthetic oligonucleotide
ttttgctttatgcagtcattgcaagcacctgtgcatgttaccaagtaatctgctacag

SEQ ID NO: 37360 - DNA, 60 bp, Artificial
  Synthetic oligonucleotide
ggtaaccccatctgctgtaatctgagggtgcccaaatgatgttcctgcaaaatcccccag

SEQ ID NO: 37361 - DNA, 51 bp, Artificial
  Synthetic oligonucleotide
ctggtctttccctaaagaaaggaacactcctaaacagtgcatgcagctcaa

SEQ ID NO: 37362 - DNA, 60 bp, Artificial
  Synthetic oligonucleotide
gatgaccaaatctgagaaaatagttataagcaggcaagcttctttgaaagatcctatgtg

SEQ ID NO: 37363 - DNA, 60 bp, Artificial
  Synthetic oligonucleotide
ttgatcaaaacaagatgaccaaatctgagaaaatagttataagcaggcaagcttctttga

SEQ ID NO: 37364 - DNA, 60 bp, Artificial
  Synthetic oligonucleotide
atataatgcctacatggaacagtggaaggaggtttatgcacatatccagactcatagttt

SEQ ID NO: 37365 - DNA, 60 bp, Artificial
  Synthetic oligonucleotide
tagttttactataaatataatgcctacatggaacagtggaaggaggtttatgcacatatc

SEQ ID NO: 37366 - DNA, 60 bp, Artificial
  Synthetic oligonucleotide
aacttctgtgatactcctattgctacagagagtaccacatgtgatgttgtaccaataaac

SEQ ID NO: 37367 - DNA, 60 bp, Artificial
  Synthetic oligonucleotide
ggttagctttgcatcagtaatgtattcatgggtgaagaacttctgtgatactcctattgc

SEQ ID NO: 37368 - DNA, 60 bp, Artificial
  Synthetic oligonucleotide
aggagactctagcgtactaggcacgtattctaatgaattagctgtggaagctacttcaga

SEQ ID NO: 37369 - DNA, 60 bp, Artificial
  Synthetic oligonucleotide
gaacccccaccttaggtttttgctttatgcagtcattgcaagcacctgtgcatgttacca

SEQ ID NO: 37370 - DNA, 60 bp, Artificial
  Synthetic oligonucleotide
tcctgtctagacttgttgttgaacaaagcacccatctgagcaattggaagaatgattctc

SEQ ID NO: 37371 - DNA, 55 bp, Artificial
  Synthetic oligonucleotide
tactcaacacctacactttttacatagaccataaattccataggagaatgagtag

SEQ ID NO: 37372 - DNA, 60 bp, Artificial
  Synthetic oligonucleotide
cctattgctacagagagtaccacatgtgatgttgtaccaataaacagagccaaagtgatc

SEQ ID NO: 37373 - DNA, 57 bp, Artificial
  Synthetic oligonucleotide
atgttttttacaagaatacccatctaatgatttcacacaaatctctgctgacacatg

SEQ ID NO: 37374 - DNA, 60 bp, Artificial
  Synthetic oligonucleotide
agtgctcatataatcattgtgcaaatccactgacatatcaagctgataataatcagtttg

SEQ ID NO: 37375 - DNA, 58 bp, Artificial
  Synthetic oligonucleotide
tatattgaccaaacttgatagatcatatatgtttgtgcaatgtccacaaatacctcct

SEQ ID NO: 37376 - DNA, 60 bp, Artificial
  Synthetic oligonucleotide
tgatttatcttgcaatcacctgacagtctaacagaaagtcttgcaactgtaggagatttt

SEQ ID NO: 37377 - DNA, 64 bp, Artificial
  Synthetic oligonucleotide
cctcagatcttagtttaatttgatagggagatgacattgatacttgatttatcttgcaatcacc

SEQ ID NO: 37378 - DNA, 60 bp, Artificial
  Synthetic oligonucleotide
ttatcaccacaaagtagaaaatggttaccatcgagttcttcaggcttaaaattgattgta

SEQ ID NO: 37379 - DNA, 60 bp, Artificial
  Synthetic oligonucleotide
ttgaaacacagttccttactggtatatctaccttagcaattaagctagatttatcaccac

SEQ ID NO: 37380 - DNA, 60 bp, Artificial
  Synthetic oligonucleotide
atgaaccatgatatagggaaagcaatcataagaaacacaaaaacccatttaaagtaagaa

SEQ ID NO: 37381 - DNA, 60 bp, Artificial
  Synthetic oligonucleotide
ggaggctacccagttgaaaggtgcttttatccaatcccataagctagatatagtagtgtc

SEQ ID NO: 37382 - DNA, 60 bp, Artificial
  Synthetic oligonucleotide
cataccagagactcaatgcatctttggttttccaaatgaaccatgatatagggaaagcaa

SEQ ID NO: 37383 - DNA, 58 bp, Artificial
  Synthetic oligonucleotide
aggagattttaggtctacttttggatcaatgcttatagggttgttcgatttgtcaaca

SEQ ID NO: 37384 - DNA, 60 bp, Artificial
  Synthetic oligonucleotide
tcacctgacagtctaacagaaagtcttgcaactgtaggagattttaggtctacttttgga

SEQ ID NO: 37385 - DNA, 60 bp, Artificial
  Synthetic oligonucleotide
tcctaattcttcgcaaccccaccaagaagttggtgtaacacaaaagtctagaacccccac

SEQ ID NO: 37386 - DNA, 60 bp, Artificial
  Synthetic oligonucleotide
aagggatgttgctctagacatgggaactccagatcgatatactgtttcagttataacatt

SEQ ID NO: 37387 - DNA, 60 bp, Artificial
  Synthetic oligonucleotide
tagattgaacctgtatttgatttgatgtccatttctattaaatatctatactttccatca

SEQ ID NO: 37388 - DNA, 60 bp, Artificial
  Synthetic oligonucleotide
tgctgaaatgttcctcgagacatttgagttctacccactggttatcgacatgcaccgtgt

SEQ ID NO: 37389 - DNA, 60 bp, Artificial
  Synthetic oligonucleotide
gctgaaatgttcctcgagacatttgagttctacccactggttatcgacatgcaccgtgtg

SEQ ID NO: 37390 - DNA, 60 bp, Artificial
  Synthetic oligonucleotide
ggcagaggacctccaatgcagagcatcatccttaaagcacatgtatcaaaagatgcaggg

SEQ ID NO: 37391 - DNA, 60 bp, Artificial
  Synthetic oligonucleotide
tgcaacaacaccagtatgccaatttgatggaaatacaatatctggatacaagcggatgat

SEQ ID NO: 37392 - DNA, 60 bp, Artificial
  Synthetic oligonucleotide
gggagattgggaaaacatcgcagtgcacagtcttctgcactttggcagggccaggtgctg

SEQ ID NO: 37393 - DNA, 60 bp, Artificial
  Synthetic oligonucleotide
tgtttaccttatgctgcccccgaagacccatctatgctaaagagcataagccttaactgt

SEQ ID NO: 37394 - DNA, 60 bp, Artificial
  Synthetic oligonucleotide
aaaatggaatgtccacacactattggtttgggtcaaggccttgtcattggttcagtggag

SEQ ID NO: 37395 - DNA, 60 bp, Artificial
  Synthetic oligonucleotide
cggacccggaagacgattgcttgttttgacatttcatgtaaccaaacagtgtgtcagccg

SEQ ID NO: 37396 - DNA, 60 bp, Artificial
  Synthetic oligonucleotide
acaaagtgctctagtacaggcctggttgcagctgcaccacatttagaccgggtaacaggg

SEQ ID NO: 37397 - DNA, 60 bp, Artificial
  Synthetic oligonucleotide
ctaattcctgggattgcacattcacttgccgtagaattatgtgttccaggccttcatggc

SEQ ID NO: 37398 - DNA, 60 bp, Artificial
  Synthetic oligonucleotide
tatcgaacattatccctttttcgttaccggagccgtttctttgtaggctttatctggtgc

SEQ ID NO: 37399 - DNA, 60 bp, Artificial
  Synthetic oligonucleotide
aaagcaccgtcaactgaagcatctgacacgatacagggtatagccttttcaggcagcccc

SEQ ID NO: 37400 - DNA, 60 bp, Artificial
  Synthetic oligonucleotide
ggaacaggttgtactgcatgtggtgtatatcttgacaaacttaaatcagtagggaaggtt

SEQ ID NO: 37401 - DNA, 60 bp, Artificial
  Synthetic oligonucleotide
aggtcagctggttgaaggggtatgttttaatcctgtacacacaatggttctttcccaacc

SEQ ID NO: 37402 - DNA, 60 bp, Artificial
  Synthetic oligonucleotide
ggctttcagggctattatatttgtcttgtgggaagcagctcagaaccattatatgttcct

SEQ ID NO: 37403 - DNA, 60 bp, Artificial
  Synthetic oligonucleotide
cccatgagaactgacttggaattggatttctcactaccatcatctgcaagttacacatac

SEQ ID NO: 37404 - DNA, 60 bp, Artificial
  Synthetic oligonucleotide
tcttggaggggttaaccttgctgtgcttaatacccatttccctggaaaccagtccattcc

SEQ ID NO: 37405 - DNA, 60 bp, Artificial
  Synthetic oligonucleotide
tctacatcaatgcggcgaaggtcaaagcttacctgcgaaggtcagcggagcaactggttt

SEQ ID NO: 37406 - DNA, 60 bp, Artificial
  Synthetic oligonucleotide
caactggtttcgcttactcttggaggagttaaccttgctgtgcttaatacccattttcct

SEQ ID NO: 37407 - DNA, 52 bp, Artificial
  Synthetic oligonucleotide
accgaagagcctattcaggtaagcaatatgatgcatactgtgtgcaaacata

SEQ ID NO: 37408 - DNA, 60 bp, Artificial
  Synthetic oligonucleotide
ctcctactccttttgtgagagtgttccaaatctggatagatttgtatttcagatggccag

SEQ ID NO: 37409 - DNA, 60 bp, Artificial
  Synthetic oligonucleotide
ggttgcagaccaatgtaaaacgaatcagattaaattggctgaggccatggaaaaaattgt

SEQ ID NO: 37410 - DNA, 60 bp, Artificial
  Synthetic oligonucleotide
accagtgcaaaacaaatcagattaaattggctgaggccatggaaaaaattgtcatgccac

SEQ ID NO: 37411 - DNA, 60 bp, Artificial
  Synthetic oligonucleotide
agtagtgtactccactatagaacaaagcttttaaatggcaaaccaatttattttccaaga

SEQ ID NO: 37412 - DNA, 60 bp, Artificial
  Synthetic oligonucleotide
ctgtattggtggaggttgctgacatggagttacacacaaagaagattgaaatatcaggct

SEQ ID NO: 37413 - DNA, 60 bp, Artificial
  Synthetic oligonucleotide
aggtgttgaacccggggaccatttaaaagagagatcaatgctcagctatgggaatgtact

SEQ ID NO: 37414 - DNA, 60 bp, Artificial
  Synthetic oligonucleotide
gtgttgaacccggggaccatttaaaagagagatcaatgctcagctatgggaatgtactgg

SEQ ID NO: 37415 - DNA, 60 bp, Artificial
  Synthetic oligonucleotide
tcttactttctacctcagtgtacttatatatatgcaagtagcatatatataagtacacaa

SEQ ID NO: 37416 - DNA, 60 bp, Artificial
  Synthetic oligonucleotide
cttactttctacctcagtgtacttatatatatgcaagtagcatatatataagtacacaat

SEQ ID NO: 37417 - DNA, 60 bp, Artificial
  Synthetic oligonucleotide
ggcgaacacaatcaatgggaatacaactggaccagaggattatagtgctattcatggttg

SEQ ID NO: 37418 - DNA, 60 bp, Artificial
  Synthetic oligonucleotide
acagccttcactagttcagctagagagtttgtgagcagattcggcatcagattagcctaa

SEQ ID NO: 37419 - DNA, 60 bp, Artificial
  Synthetic oligonucleotide
cagccttcactagttcagctagagagtttgtgagcagattcggcatcagattagcctaac

SEQ ID NO: 37420 - DNA, 60 bp, Artificial
  Synthetic oligonucleotide
agggtccgaagatggtcaatggacccaaactgccttgagaaagcaatttggcagcgatac

SEQ ID NO: 37421 - DNA, 60 bp, Artificial
  Synthetic oligonucleotide
agggtacgaaggtggtccatggaccctaactgccttgagaaagcaatttggcagcgctac

SEQ ID NO: 37422 - DNA, 60 bp, Artificial
  Synthetic oligonucleotide
tcaaagcttacctccgtaggtcatccgaacttctggtttcacttacacttggaggtgtta

SEQ ID NO: 37423 - DNA, 60 bp, Artificial
  Synthetic oligonucleotide
cctccgtaggtcatccgaacttctggtttcacttacacttggaggtgttaaccttgcggt

SEQ ID NO: 37424 - DNA, 60 bp, Artificial
  Synthetic oligonucleotide
cctaggctttgcccctggtgctgagatgtttctggaaacctttgagttttacccactggt

SEQ ID NO: 37425 - DNA, 60 bp, Artificial
  Synthetic oligonucleotide
cttgttgcaacaggccttgccaagcttgcagagaccgaggggaaaggagtttttgacgaa

SEQ ID NO: 37426 - DNA, 60 bp, Artificial
  Synthetic oligonucleotide
ataactctgttctggcactatctgtttgctcaaatacagtcaatgctaacggagtgaaac

SEQ ID NO: 37427 - DNA, 60 bp, Artificial
  Synthetic oligonucleotide
actctgttctggcactatctgtttgctcaaatacagtcaatactaacggagtgaaacatc

SEQ ID NO: 37428 - DNA, 60 bp, Artificial
  Synthetic oligonucleotide
ctgttctggcactatctgtttgctcaaatacagtcaatgctaatggagtgaaacatcaag

SEQ ID NO: 37429 - DNA, 60 bp, Artificial
  Synthetic oligonucleotide
ctgttctggcactatctgtttgctcaaatacagtcaatgctaacggagtgaaacatcaag

SEQ ID NO: 37430 - DNA, 60 bp, Artificial
  Synthetic oligonucleotide
ctggcactatctgtttgctcaaatacagtcaatgctaacggagtgaaacatcaaggtcat

SEQ ID NO: 37431 - DNA, 60 bp, Artificial
  Synthetic oligonucleotide
ctggcactatctgtttgctcaaatacagtcaatgctaacggagtgaaacatcaaggccat

SEQ ID NO: 37432 - DNA, 60 bp, Artificial
  Synthetic oligonucleotide
ctggcactatctgtttgctcaaatacagtcaatgctaatggagtgaaacatcaaggtcat

SEQ ID NO: 37433 - DNA, 60 bp, Artificial
  Synthetic oligonucleotide
taatacgaattttcctggcaacaggaacagcccagttcctgacgatggtcttaccctcca

SEQ ID NO: 37434 - DNA, 60 bp, Artificial
  Synthetic oligonucleotide
gtctctcttacattctacctcagtgtacttatatatatgcaagtagcatatatataagta

SEQ ID NO: 37435 - DNA, 60 bp, Artificial
  Synthetic oligonucleotide
tctctcttacattctacctcagtgtacttatatatatgcaagtagcatatatataagtac

SEQ ID NO: 37436 - DNA, 60 bp, Artificial
  Synthetic oligonucleotide
cacactcttaaatttccgtgcaatatgtctatgtattgcacaccattatactgcaaggct

SEQ ID NO: 37437 - DNA, 60 bp, Artificial
  Synthetic oligonucleotide
ccctttactttccgtgcaatatgtctatgtattgcacaccattatactgcaaagcttcta

SEQ ID NO: 37438 - DNA, 50 bp, Artificial
  Synthetic oligonucleotide
gtggttttcatatggggaacagggtgggcttagggccaggtcaccttaag

SEQ ID NO: 37439 - DNA, 60 bp, Artificial
  Synthetic oligonucleotide
gctggctgatcatattgcagctcagaaattggcttcaaaacctgttgatccaacagggat

SEQ ID NO: 37440 - DNA, 60 bp, Artificial
  Synthetic oligonucleotide
gctctttgccgatgactctttccagcaaaacaggatctacatgcaccctgccgtgttgac

SEQ ID NO: 37441 - DNA, 60 bp, Artificial
  Synthetic oligonucleotide
ggcaacaaacagtgtcagcattggaggataaactcgcagactacaagagaagaatggcag

SEQ ID NO: 37442 - DNA, 56 bp, Artificial
  Synthetic oligonucleotide
gaaatcaatgcccatgagggtcaactggtgatagccaggcagaaggtgagggatgc

SEQ ID NO: 37443 - DNA, 60 bp, Artificial
  Synthetic oligonucleotide
caacccataagctgccactaatggcaactccatcacctttgaatacatctcctgcttagc

SEQ ID NO: 37444 - DNA, 60 bp, Artificial
  Synthetic oligonucleotide
aagcgtgtccacaccactgggcttagttatgaccacatacgaatcttctacattaaagga

SEQ ID NO: 37445 - DNA, 60 bp, Artificial
  Synthetic oligonucleotide
ggaactacagagagagatcaatgcccatgagggtcaactggtgatagccaggcagaaggt

SEQ ID NO: 37446 - DNA, 60 bp, Artificial
  Synthetic oligonucleotide
ggaactacagagagaaatcaatgcccatgagggtcaactggtgatagccaggcagaaggt

SEQ ID NO: 37447 - DNA, 60 bp, Artificial
  Synthetic oligonucleotide
gggacaggaatagaaaggcatatgcagctgctacactctgaaatgatattggacatctgc

SEQ ID NO: 37448 - DNA, 50 bp, Artificial
  Synthetic oligonucleotide
gaaatcaatgcccatgagggtcaactggtgatagccaggcagaaggtgag

SEQ ID NO: 37449 - DNA, 59 bp, Artificial
  Synthetic oligonucleotide
cccggaaaaaaatggatacaaaacctactgacccgactgggattgaacctgatgatcac

SEQ ID NO: 37450 - DNA, 52 bp, Artificial
  Synthetic oligonucleotide
acaacaactacctacctcaaaacaacaacactacctcaacaatcactccctc

SEQ ID NO: 37451 - DNA, 56 bp, Artificial
  Synthetic oligonucleotide
actaacaacaactacctacctcaaaacaacaacactacctcaacaactactacctc

SEQ ID NO: 37452 - DNA, 58 bp, Artificial
  Synthetic oligonucleotide
ttactaacaacaactacctacctcaaaacaacaacactacctcaacaactactacctc

SEQ ID NO: 37453 - DNA, 60 bp, Artificial
  Synthetic oligonucleotide
ctttactaacaacaactacctacctcaaaacaacaacactacctcaacaactactacctc

SEQ ID NO: 37454 - DNA, 60 bp, Artificial
  Synthetic oligonucleotide
gggacatcaacaaatcaggccgttcgggaatagcacttgttgcaacaggccttgccaagc

SEQ ID NO: 37455 - DNA, 60 bp, Artificial
  Synthetic oligonucleotide
gcccaggcaaagggtatgcaattgttgatgagccattcccagagattcctcggcaagggt

SEQ ID NO: 37456 - DNA, 56 bp, Artificial
  Synthetic oligonucleotide
ggtggactttgtgggagcagccgtgtcttgtgatgccgccttcttaaatttgacag

SEQ ID NO: 37457 - DNA, 60 bp, Artificial
  Synthetic oligonucleotide
agagcccaggcaaagggtatgcaattgttgatgagccattcccagagattcctcggcaag

SEQ ID NO: 37458 - DNA, 60 bp, Artificial
  Synthetic oligonucleotide
cgaatggcattcattggaacaatggcccagaaatttacctttcattcctcccaggaacag

SEQ ID NO: 37459 - DNA, 60 bp, Artificial
  Synthetic oligonucleotide
cttcccaggaacagaaatgtttctagaagttttcaaattctaccctttaaccattggaat

SEQ ID NO: 37460 - DNA, 60 bp, Artificial
  Synthetic oligonucleotide
ctgctctcgctcgtaaaccggagcggaaagctactcctaaatttggagagtggcaggtgg

SEQ ID NO: 37461 - DNA, 60 bp, Artificial
  Synthetic oligonucleotide
ttgcagaatcgaatggcattcattggaacaatggcccagaaatttacctttcattcctcc

SEQ ID NO: 37462 - DNA, 60 bp, Artificial
  Synthetic oligonucleotide
ttagcaagatgggtccttgagcatttcactgaagatgacgatgagtcccaaagagaactc

SEQ ID NO: 37463 - DNA, 60 bp, Artificial
  Synthetic oligonucleotide
tttaaccattggaatttacagagtcaagcatggtatgatggatcctcagtacctaaagaa

SEQ ID NO: 37464 - DNA, 60 bp, Artificial
  Synthetic oligonucleotide
tcattcttcccaggaacagaaatgtttctagaagttttcaaattctaccctttaaccatt

SEQ ID NO: 37465 - DNA, 60 bp, Artificial
  Synthetic oligonucleotide
agaatcaaatggcattcattggaacaatggcccagaaatttatctttcattcttcccagg

SEQ ID NO: 37466 - DNA, 60 bp, Artificial
  Synthetic oligonucleotide
ttacagagtcaagcatggtatgatggatcctcagtacctgaagaaggcacttaggcaacg

SEQ ID NO: 37467 - DNA, 55 bp, Artificial
  Synthetic oligonucleotide
ttggagaccctggtgatatcatgtcaacaacaagtgggatgagatgccctgagca

SEQ ID NO: 37468 - DNA, 60 bp, Artificial
  Synthetic oligonucleotide
catctctgatttaacatttctacctccgtacacttatatatatgcacgtagcatatatat

SEQ ID NO: 37469 - DNA, 60 bp, Artificial
  Synthetic oligonucleotide
ccaggacatggacatagtggcctctgagcacctgctgcaccagtctcttgttggcaagca

SEQ ID NO: 37470 - DNA, 60 bp, Artificial
  Synthetic oligonucleotide
acaggtcagactgcagattggctgagcattgttgtctatcttacatcctttgtggttccg

SEQ ID NO: 37471 - DNA, 60 bp, Artificial
  Synthetic oligonucleotide
caggtcagactgcagattggctgagcattgttgtctatcttacatcctttgtggttccga

SEQ ID NO: 37472 - DNA, 60 bp, Artificial
  Synthetic oligonucleotide
tgaaataatcacattgcatcctaggattgaagaaggtttttttgacctgatgcatgtaca

SEQ ID NO: 37473 - DNA, 60 bp, Artificial
  Synthetic oligonucleotide
cgatcaccaattaagcaagctgagttcagagccactgtagtagtgcctttggctgaggta

SEQ ID NO: 37474 - DNA, 60 bp, Artificial
  Synthetic oligonucleotide
cggtcaccaattaagcaagctgagttcagagccactgtagtagtgcctttggctgaggta

SEQ ID NO: 37475 - DNA, 60 bp, Artificial
  Synthetic oligonucleotide
tggaccccgatgatgttaacaaaagcacattacagagcagacgggcagctgtgtctgcac

SEQ ID NO: 37476 - DNA, 60 bp, Artificial
  Synthetic oligonucleotide
ccccttgatgatgcaaagtctgtgaggcttgccataatgctaggaggtagcttacctctt

SEQ ID NO: 37477 - DNA, 60 bp, Artificial
  Synthetic oligonucleotide
accagcagtacttttgacccagaggttgcatacattaactttaagcgtatctacaccact

SEQ ID NO: 37478 - DNA, 60 bp, Artificial
  Synthetic oligonucleotide
ccagcagtacttttgacccagaggttgcatacattaactttaagcgtatctacaccactg

SEQ ID NO: 37479 - DNA, 55 bp, Artificial
  Synthetic oligonucleotide
aacaccagcagtacttttgacccagaggttgcatacgctaactttaagcgtatcc

SEQ ID NO: 37480 - DNA, 51 bp, Artificial
  Synthetic oligonucleotide
agcaatgaatgcttaacggatttagataggcttgttaggctcacattacca

SEQ ID NO: 37481 - DNA, 60 bp, Artificial
  Synthetic oligonucleotide
gcagtccacccttgcaatgtattctgtgtcttatcaggaccaggtgcttcatgtgaagcc

SEQ ID NO: 37482 - DNA, 60 bp, Artificial
  Synthetic oligonucleotide
tatgaggcagtccacccttgcaatgtattctgtgtcttatcaggaccaggtgcttcatgt

SEQ ID NO: 37483 - DNA, 60 bp, Artificial
  Synthetic oligonucleotide
ggcagtccacccttgcaatgtattctgtgtcttatcaggaccaggtgcttcatgtgaagc

SEQ ID NO: 37484 - DNA, 60 bp, Artificial
  Synthetic oligonucleotide
gatctacatgcaccctgctgtgttgacagccggcagaatcagtgagatgggtgtctgctt

SEQ ID NO: 37485 - DNA, 60 bp, Artificial
  Synthetic oligonucleotide
agatggccagtgccactgatgatgcacaaaaggattccatctacgcatcagctctggtgg

SEQ ID NO: 37486 - DNA, 60 bp, Artificial
  Synthetic oligonucleotide
cactattattatcaggggaatcatcatatcagggtatgggtgcatttatgggtgggaatt

SEQ ID NO: 37487 - DNA, 51 bp, Artificial
  Synthetic oligonucleotide
tttcagttgcaaaatctttgttaaagcttgatttaagcgggatcaaaaaga

SEQ ID NO: 37488 - DNA, 51 bp, Artificial
  Synthetic oligonucleotide
tttcagttgcaaaatctttgttaaagcttgatttaagcaggatcaaaaaga

SEQ ID NO: 37489 - DNA, 51 bp, Artificial
  Synthetic oligonucleotide
ttccagttgcaaaatctttgttaaagcttgatttaagcgggatcaaaaaga

SEQ ID NO: 37490 - DNA, 60 bp, Artificial
  Synthetic oligonucleotide
aagtgccctgaattgagcggttcattcagaaaaaaatgtgcatttgcaacaacgcctgtt

SEQ ID NO: 37491 - DNA, 60 bp, Artificial
  Synthetic oligonucleotide
tacgaagtgctcaagtactgggttggttgcagctgcaccacacttggatcgtgtgacagg

SEQ ID NO: 37492 - DNA, 60 bp, Artificial
  Synthetic oligonucleotide
cggcacgtcagtacgtaagtgttaactttgagtgagtgacttgagcatcttagatgcagc

SEQ ID NO: 37493 - DNA, 60 bp, Artificial
  Synthetic oligonucleotide
atacacacatgatgaacagccaatacatgtttgactacccggcaattaacattgatgtga

SEQ ID NO: 37494 - DNA, 60 bp, Artificial
  Synthetic oligonucleotide
ctgatcacacacatgatgaacagccagtacatgtttgactacccggcaattaacattgat

SEQ ID NO: 37495 - DNA, 60 bp, Artificial
  Synthetic oligonucleotide
tgatacacacatgatgaacagccaatacatgtttgactacccggcaattaacattgatgt

SEQ ID NO: 37496 - DNA, 60 bp, Artificial
  Synthetic oligonucleotide
tgtattcactggagaaggtgtcaactttctcaatttgttcatgcataataatgcaggtat

SEQ ID NO: 37497 - DNA, 60 bp, Artificial
  Synthetic oligonucleotide
tgtattcactggagaaggtgtcaactttctcaatttgttcacgcataataatgcaggtat

SEQ ID NO: 37498 - DNA, 60 bp, Artificial
  Synthetic oligonucleotide
ctctgtattcactggagaaggtgtcaactttctcaatttgttcatgcataataatgcagg

SEQ ID NO: 37499 - DNA, 60 bp, Artificial
  Synthetic oligonucleotide
ggagaaggtgtcaactttctcaatttgttcacgcataataatgcaggtattaaatctgca

SEQ ID NO: 37500 - DNA, 60 bp, Artificial
  Synthetic oligonucleotide
ggagaaggtgtcaactttctcaatttgttcatgcataataatgcaggtattaaatctgca

SEQ ID NO: 37501 - DNA, 60 bp, Artificial
  Synthetic oligonucleotide
gtattcactggagaaggtgtcaactttctcaatttgttcatgcataataatgcaggtatt

SEQ ID NO: 37502 - DNA, 60 bp, Artificial
  Synthetic oligonucleotide
gaaatgtttaaatcagctgtaaagctattgagtgagagtaaccctggaacagccagctct

SEQ ID NO: 37503 - DNA, 60 bp, Artificial
  Synthetic oligonucleotide
gtcaaatttacagtggttaataaccattttccccagtatactgcaaatccggtgtcagac

SEQ ID NO: 37504 - DNA, 55 bp, Artificial
  Synthetic oligonucleotide
cgatgttccacaacggaatgcagctacatttaatccggatgcagggtatgtggca

SEQ ID NO: 37505 - DNA, 60 bp, Artificial
  Synthetic oligonucleotide
caaatttacagtggttaataaccattttccccagtacactgcaaatccagtgtcagacac

SEQ ID NO: 37506 - DNA, 60 bp, Artificial
  Synthetic oligonucleotide
caaatttacagtggttaataaccattttccccagtatactgcaaatccagtgtcagacac

SEQ ID NO: 37507 - DNA, 60 bp, Artificial
  Synthetic oligonucleotide
gtcaaatttacagtggttaataaccattttccccagtacactgcaaatccagtgtcagac

SEQ ID NO: 37508 - DNA, 60 bp, Artificial
  Synthetic oligonucleotide
gtcaaatttacagtggttaataaccattttccccagtatactgcaaatccagtgtcagac

SEQ ID NO: 37509 - DNA, 60 bp, Artificial
  Synthetic oligonucleotide
cttcaaaaccagttgatccaacagggcttgagcctgatgaccatttaaaggagaaatcag

SEQ ID NO: 37510 - DNA, 60 bp, Artificial
  Synthetic oligonucleotide
gctgcaaagccagttgatccaacagggcttgagcctgatgaccatctgaaggagaaatca

SEQ ID NO: 37511 - DNA, 60 bp, Artificial
  Synthetic oligonucleotide
ctgttggtcaactaagctgggccaagtcaggattctcaccagcagctaggaccttccttg

SEQ ID NO: 37512 - DNA, 60 bp, Artificial
  Synthetic oligonucleotide
gtcaacttcatgagaaaagtcctccgccagcgctatggcacattaactgcagagcagtgg

SEQ ID NO: 37513 - DNA, 60 bp, Artificial
  Synthetic oligonucleotide
ctctccaccgcctctccggctatctagccaagtgggttgcagaccagtgcaagactaacc

SEQ ID NO: 37514 - DNA, 60 bp, Artificial
  Synthetic oligonucleotide
tcgtcatgccacttgctgaggtgaaaggttgcacctggaccgaaggactcaccatgtacc

SEQ ID NO: 37515 - DNA, 60 bp, Artificial
  Synthetic oligonucleotide
ctgaggtgaaaggctgcacctggaccgaaggactcaccatgtacctaggatttgcgccag

SEQ ID NO: 37516 - DNA, 56 bp, Artificial
  Synthetic oligonucleotide
aaaatagaagctgttcgtgcagcctttaatgctgttggtcaactaagctgggccaa

SEQ ID NO: 37517 - DNA, 60 bp, Artificial
  Synthetic oligonucleotide
accttccttgcccagtttggtataaacatttaaacaaagaaaaatccctaccctttcccc

SEQ ID NO: 37518 - DNA, 60 bp, Artificial
  Synthetic oligonucleotide
tggtcaactaagctgggccaagtcaggattctcaccagcagctaggaccttccttgccca

SEQ ID NO: 37519 - DNA, 60 bp, Artificial
  Synthetic oligonucleotide
agaccagtgcaagactaaccaaatcaaactggctgaggccatggaaaaaatcgtcatgcc

SEQ ID NO: 37520 - DNA, 60 bp, Artificial
  Synthetic oligonucleotide
tcgtcatgccacttgctgaggtgaaaggctgcacctggaccgaaggactcaccatgtacc

SEQ ID NO: 37521 - DNA, 60 bp, Artificial
  Synthetic oligonucleotide
actgccctcactctccaccgcctctccggctatctagccaagtgggttgcagaccagtgc

SEQ ID NO: 37522 - DNA, 60 bp, Artificial
  Synthetic oligonucleotide
tggtgtttcaggacaccatacgccatttctgcagcattgtttattcatctctattgattg

SEQ ID NO: 37523 - DNA, 60 bp, Artificial
  Synthetic oligonucleotide
ccctttcccccagtatggtgtttcaggacaccatacgccatttctgcagcattgtttatt

SEQ ID NO: 37524 - DNA, 60 bp, Artificial
  Synthetic oligonucleotide
catgagaaaagtcctccgccagcgctatggcacattaactgcagagcagtggatgactca

SEQ ID NO: 37525 - DNA, 60 bp, Artificial
  Synthetic oligonucleotide
agagcagtggatgactcaaaaaatagaagctgttcgtgcagcctttaatgctgttggtca

SEQ ID NO: 37526 - DNA, 60 bp, Artificial
  Synthetic oligonucleotide
ggattcggttcaaggatgatagttcttttgaggatgtcaatggaattcggaaaccaaagc

SEQ ID NO: 37527 - DNA, 60 bp, Artificial
  Synthetic oligonucleotide
cagcttggtcattgaccactcaggtaatctgctgctctgtatgtttattgttagtttgtt

SEQ ID NO: 37528 - DNA, 60 bp, Artificial
  Synthetic oligonucleotide
acagcttggtcattgaccactcaggtaatctgctgctctgtatgtttattgttagtttgt

SEQ ID NO: 37529 - DNA, 60 bp, Artificial
  Synthetic oligonucleotide
tgcaatgtacctaggctttgcccctggtgctgagatgtttctggaaacctttgagtttta

SEQ ID NO: 37530 - DNA, 60 bp, Artificial
  Synthetic oligonucleotide
cccctggtgctgagatgtttctggaaacctttgagttctacccactggtcatcgacatgc

SEQ ID NO: 37531 - DNA, 60 bp, Artificial
  Synthetic oligonucleotide
cccctggtgctgagatgtttctggaaacctttgagttttacccactggttattgacatgc

SEQ ID NO: 37532 - DNA, 60 bp, Artificial
  Synthetic oligonucleotide
ccagtcttacctcaggagaacacaatcaatgggaatacaactggaccagagaattattgt

SEQ ID NO: 37533 - DNA, 56 bp, Artificial
  Synthetic oligonucleotide
ttatatatatgcacgtagcatatatataagtgtacgattctactacctcaaacagt

SEQ ID NO: 37534 - DNA, 60 bp, Artificial
  Synthetic oligonucleotide
tgagatgaacaggtggtttgaagagttcaagaaagagaatgggcttgtagacactttcac

SEQ ID NO: 37535 - DNA, 60 bp, Artificial
  Synthetic oligonucleotide
ccctgcagcttttgatgcatgtgctttgaggatgatgctctgcattggaggtcctctacc

SEQ ID NO: 37536 - DNA, 60 bp, Artificial
  Synthetic oligonucleotide
ccaaatggggcccaatacactgctgttccttcttttcaggcatgatgcaacaggttctca

SEQ ID NO: 37537 - DNA, 60 bp, Artificial
  Synthetic oligonucleotide
gctagaccaacttacggtgcgggtgaaatcactgtactagtggaggttgctgacatggag

SEQ ID NO: 37538 - DNA, 60 bp, Artificial
  Synthetic oligonucleotide
gcttggaaacaagcttatcaattgaagcaccatggggtgcaataaatgtccaatcaacct

SEQ ID NO: 37539 - DNA, 60 bp, Artificial
  Synthetic oligonucleotide
gactaggcagtgaactggggtgttatactatcaatagggtaaagtcatttaagctttgcg

SEQ ID NO: 37540 - DNA, 60 bp, Artificial
  Synthetic oligonucleotide
gactaggcagtgaactggggtgttatactatcaatagggtgaagtcatttaagctttgcg

SEQ ID NO: 37541 - DNA, 60 bp, Artificial
  Synthetic oligonucleotide
gtgctgacagctggcagaattagtgagatgggtgtctgctttgggacaatccctgtggcc

SEQ ID NO: 37542 - DNA, 60 bp, Artificial
  Synthetic oligonucleotide
ggtctatcccaaaagcaaacaacacaccagaaaattgctgccaactgcatctgatgtgca

SEQ ID NO: 37543 - DNA, 60 bp, Artificial
  Synthetic oligonucleotide
agctgacaaagacaattgttgcactgtcatacctttgaatagagctatccgggctagatc

SEQ ID NO: 37544 - DNA, 60 bp, Artificial
  Synthetic oligonucleotide
caaaccatcatatttccaactggaaaaatgattgtcttgttggtaatggaaagcagaatg

SEQ ID NO: 37545 - DNA, 60 bp, Artificial
  Synthetic oligonucleotide
atgttgacacttttcggcagcaacaaaccctctgagtctgctaagacagatgaaggtccc

SEQ ID NO: 37546 - DNA, 60 bp, Artificial
  Synthetic oligonucleotide
ggttcagggctgcagagcaacagattaactttgtgtgccagcgagttgatcaagacattg

SEQ ID NO: 37547 - DNA, 60 bp, Artificial
  Synthetic oligonucleotide
gcacactatagagtctgccaggctacacatagatttagggatgacttgaagaaaacaata

SEQ ID NO: 37548 - DNA, 60 bp, Artificial
  Synthetic oligonucleotide
taaccctgcagactgtccaggcataggtactggctgcactgcatgtggtctataccttga

SEQ ID NO: 37549 - DNA, 60 bp, Artificial
  Synthetic oligonucleotide
ttacacactgtgaactcacggaatccgcatttcaggcacactatagagtctgccaggcta

SEQ ID NO: 37550 - DNA, 60 bp, Artificial
  Synthetic oligonucleotide
gggatgacttgaagaaaacaataacacctcagtcaacaagtccaggttgctatcgcacac

SEQ ID NO: 37551 - DNA, 60 bp, Artificial
  Synthetic oligonucleotide
gcgagatgtcattttgaaagggactttgagtatgaaaacagttggagttgtaaccctgca

SEQ ID NO: 37552 - DNA, 60 bp, Artificial
  Synthetic oligonucleotide
gaaagttgcattgcccttgatatgggaaggatatatagacttgcctggctactatgaaac

SEQ ID NO: 37553 - DNA, 60 bp, Artificial
  Synthetic oligonucleotide
gccctggtttgttccctaaattaaaccaatcctcatgtgagaaagttgcattgcccttga

SEQ ID NO: 37554 - DNA, 60 bp, Artificial
  Synthetic oligonucleotide
tgcctggctactatgaaacaattcacccttgtaatgtcttctgtgttttgtctggcccag

SEQ ID NO: 37555 - DNA, 60 bp, Artificial
  Synthetic oligonucleotide
aacatccccgacatgtttggtttcaaaacagaatcggttcagggctgcagagcaacagat

SEQ ID NO: 37556 - DNA, 61 bp, Artificial
  Synthetic oligonucleotide
gttcgttacagtaggaaagtgtgtgttcaatttggtgaagaaaacctttgtaaaatcattg

SEQ ID NO: 37557 - DNA, 60 bp, Artificial
  Synthetic oligonucleotide
agtgtccacactcaatcaactttggagagagcagtgtaacaggtaaggtggaattacccc

SEQ ID NO: 37558 - DNA, 60 bp, Artificial
  Synthetic oligonucleotide
cactgagtgtatttgctggaaatcaagacggaactgtaatctacagccctggtttgttcc

SEQ ID NO: 37559 - DNA, 60 bp, Artificial
  Synthetic oligonucleotide
gaggaagttgcaacttattcaattgctggtcaggttgagggcaaagttccgcacactgaa

SEQ ID NO: 37560 - DNA, 60 bp, Artificial
  Synthetic oligonucleotide
caactgtaatgatactgacaataaagtacagggttattatctctgcattgtaggagccaa

SEQ ID NO: 37561 - DNA, 60 bp, Artificial
  Synthetic oligonucleotide
tggtttctggatacaaaaaagtaatggcaactattgattcttttcaagcattcaacacca

SEQ ID NO: 37562 - DNA, 60 bp, Artificial
  Synthetic oligonucleotide
caccagctacatacattatactgatgaacggattgagtggaaagacccggatgggatgct

SEQ ID NO: 37563 - DNA, 60 bp, Artificial
  Synthetic oligonucleotide
gcatctatagagggtgcatggggttctggagttgggttcacccttacctgccagatctca

SEQ ID NO: 37564 - DNA, 60 bp, Artificial
  Synthetic oligonucleotide
gacagaacacagtgaaggtatctgggaaaggtggacatagtggatcctccttcaagtgct

SEQ ID NO: 37565 - DNA, 60 bp, Artificial
  Synthetic oligonucleotide
tgcattataggcactgtttcaaagttctcacaaggtgacaccctggtgtttctcggtccc

SEQ ID NO: 37566 - DNA, 60 bp, Artificial
  Synthetic oligonucleotide
gctcaatggtatgtgaagtgtgtaaatatgaatgtgaaacaggaaaggaactcaaagcac

SEQ ID NO: 37567 - DNA, 60 bp, Artificial
  Synthetic oligonucleotide
acaggtaaggtggaattaccccccatcccacttactgatgcagagacgttagtccctgaa

SEQ ID NO: 37568 - DNA, 60 bp, Artificial
  Synthetic oligonucleotide
cctttcattgctatggtgcatgcaccaaatatgaatatccctggcacacagcgagatgtc

SEQ ID NO: 37569 - DNA, 60 bp, Artificial
  Synthetic oligonucleotide
tataccttgaccagctcaagcctgtcgggagtgcttataaattgattacagttcgttaca

SEQ ID NO: 37570 - DNA, 60 bp, Artificial
  Synthetic oligonucleotide
ctcttccatcaagctccaaatacacatacaagagaaaattgacaagtcccattaaccaag

SEQ ID NO: 37571 - DNA, 60 bp, Artificial
  Synthetic oligonucleotide
gacatgcacactggcacataggatggttgaagaatcttacaggaacagaaagtcagtcat

SEQ ID NO: 37572 - DNA, 59 bp, Artificial
  Synthetic oligonucleotide
cccggtgtagcacattctattgcaattgaattatgtgtacctggttttcatggatgggc

SEQ ID NO: 37573 - DNA, 60 bp, Artificial
  Synthetic oligonucleotide
gaatcaattctttgggctgccagtgcatcagagattgtcttggaaccaagttggaatgat

SEQ ID NO: 37574 - DNA, 60 bp, Artificial
  Synthetic oligonucleotide
ggacaatgcatctactcagtaacaagcctgttttcaattatgcccggtgtagcacattct

SEQ ID NO: 37575 - DNA, 52 bp, Artificial
  Synthetic oligonucleotide
cacattttgcttcggttggatactaatcccttctatcacactagctatactg

SEQ ID NO: 37576 - DNA, 60 bp, Artificial
  Synthetic oligonucleotide
gcacaactggtatattgatagagggcaagtgctttgtaccagaccagagcattatcagtg

SEQ ID NO: 37577 - DNA, 60 bp, Artificial
  Synthetic oligonucleotide
gttcctgtccattcatgcaatatgatgaaaagctgccttgtgggtttaggaccttaccgg

SEQ ID NO: 37578 - DNA, 60 bp, Artificial
  Synthetic oligonucleotide
gtgctgtcatggtactgattgctcccagcaagggcttcaagcaagtgctccgcacctgga

SEQ ID NO: 37579 - DNA, 60 bp, Artificial
  Synthetic oligonucleotide
gtaactttgctactacccctgtgtgtgagtatgatggcaatatggtttctggatacaaaa

SEQ ID NO: 37580 - DNA, 60 bp, Artificial
  Synthetic oligonucleotide
aggattggtgcacaacaacatgtcagtttggtgatcctggggatataatgagtcccaagg

SEQ ID NO: 37581 - DNA, 60 bp, Artificial
  Synthetic oligonucleotide
caccctggtgtttctcggtcccatggagggtggaggtttaatatttaaggattggtgcac

SEQ ID NO: 37582 - DNA, 60 bp, Artificial
  Synthetic oligonucleotide
ttggaaatccatcgggctttacatcttgagttttgccctaccgataattcttaaggcctt

SEQ ID NO: 37583 - DNA, 60 bp, Artificial
  Synthetic oligonucleotide
ggccttatatatgttatccaccaggggccgtcaaacaattaaagagaacaaagggacgag

SEQ ID NO: 37584 - DNA, 60 bp, Artificial
  Synthetic oligonucleotide
aacaaagggacgagaattcgatttaaggatgattcatcttatgaagaggtcaatgggata

SEQ ID NO: 37585 - DNA, 60 bp, Artificial
  Synthetic oligonucleotide
gacgagaattcgatttaaggatgattcatcttatgaagaggtcaatgggatacgcaaacc

SEQ ID NO: 37586 - DNA, 60 bp, Artificial
  Synthetic oligonucleotide
caatgggatacgcaaaccaagacatctgtatgtttccatgcctactgctcaatctacaat

SEQ ID NO: 37587 - DNA, 60 bp, Artificial
  Synthetic oligonucleotide
aaaataattatcttatacatgagccactgggggagagaagctgtcaatcacttccacctt

SEQ ID NO: 37588 - DNA, 60 bp, Artificial
  Synthetic oligonucleotide
ctacccctcattctgtttgggtctttgcatgtgctcctgatcgttgtccacctacagcac

SEQ ID NO: 37589 - DNA, 60 bp, Artificial
  Synthetic oligonucleotide
tgctacccctcattctgtttgggtctttgcatgtgctcctgatcgttgtccacctacagc

SEQ ID NO: 37590 - DNA, 52 bp, Artificial
  Synthetic oligonucleotide
gtatagatttgttttatccactctgttatcatctctttaactgattgatcag

SEQ ID NO: 37591 - DNA, 60 bp, Artificial
  Synthetic oligonucleotide
gggcactaatcaaagtttattgcactagggtgggtttaagggccaattatatcacagggt

SEQ ID NO: 37592 - DNA, 60 bp, Artificial
  Synthetic oligonucleotide
tataaccagggtaatgggcactaatcaaagtttattgcactagggtgggtttaagggcca

SEQ ID NO: 37593 - DNA, 60 bp, Artificial
  Synthetic oligonucleotide
cttaagctttaagtggggcattaaactagattatattcagggcattatatataaccaggg

SEQ ID NO: 37594 - DNA, 60 bp, Artificial
  Synthetic oligonucleotide
cgtacaattgcttgtggcttgtttcctgctcaggtcaaggctagaaatatcatcagtcct

SEQ ID NO: 37595 - DNA, 60 bp, Artificial
  Synthetic oligonucleotide
gcaaaccaagacatctgtatgtttccatgcctactgctcaatctacaatgaaagcagatg

SEQ ID NO: 37596 - DNA, 60 bp, Artificial
  Synthetic oligonucleotide
catcagtcctgtcatgggtgtgattggatttagtttttttgttaaagattggatggagag

SEQ ID NO: 37597 - DNA, 60 bp, Artificial
  Synthetic oligonucleotide
gtggcttgtttcctgctcaggtcaaggctagaaatatcatcagtcctgtcatgggtgtga

SEQ ID NO: 37598 - DNA, 60 bp, Artificial
  Synthetic oligonucleotide
ccctagggatgccgcattagcaaccaacagagcctactttataacacgccagatgcaagt

SEQ ID NO: 37599 - DNA, 60 bp, Artificial
  Synthetic oligonucleotide
tgaacaaaaagaccctagggatgccgcattagcaaccaacagagcctactttataacacg

SEQ ID NO: 37600 - DNA, 60 bp, Artificial
  Synthetic oligonucleotide
cgccagatgcaagttgatgagtcaaaagtcagtgatattgaagacttgattgctgatgca

SEQ ID NO: 37601 - DNA, 60 bp, Artificial
  Synthetic oligonucleotide
ttataacacgccagatgcaagttgatgagtcaaaagtcagtgatattgaagacttgattg

SEQ ID NO: 37602 - DNA, 60 bp, Artificial
  Synthetic oligonucleotide
gcaagagctgaatcagccaccatatttgcagatattgctacccctcattctgtttgggtc

SEQ ID NO: 37603 - DNA, 60 bp, Artificial
  Synthetic oligonucleotide
gacttgattgctgatgcaagagctgaatcagccaccatatttgcagatattgctacccct

SEQ ID NO: 37604 - DNA, 52 bp, Artificial
  Synthetic oligonucleotide
ccaaacttggagagctcaagagacagcttgctgacttggtggcagctcaaaa

SEQ ID NO: 37605 - DNA, 60 bp, Artificial
  Synthetic oligonucleotide
tgagatatgggaatgtccttgatgtcaattctattgacctggaagaaccaagtggacaaa

SEQ ID NO: 37606 - DNA, 60 bp, Artificial
  Synthetic oligonucleotide
agagaatatcactgcacacgaacaacaactcgtgactgccaggcagaagctgaaagatgc

SEQ ID NO: 37607 - DNA, 60 bp, Artificial
  Synthetic oligonucleotide
acctcatccacagacccttccctttctacctcaaaaaaatactacctcgaatatgatttt

SEQ ID NO: 37608 - DNA, 60 bp, Artificial
  Synthetic oligonucleotide
agtcaatggggattcaactggaccagaagatcatcatcctgtatatgttgtcttggggta

SEQ ID NO: 37609 - DNA, 52 bp, Artificial
  Synthetic oligonucleotide
tgcaattccgatcatcctaaaggctttgtacatgctgtcaacccgtggaagg

SEQ ID NO: 37610 - DNA, 60 bp, Artificial
  Synthetic oligonucleotide
tccttgatgtcaattctattgacctggaagaaccaagtggacaaaccgctgactggaagg

SEQ ID NO: 37611 - DNA, 60 bp, Artificial
  Synthetic oligonucleotide
agtggacaaaccgctgactggaaggctattggagcatacatactgggttttgcaattccg

SEQ ID NO: 37612 - DNA, 60 bp, Artificial
  Synthetic oligonucleotide
caaggggactagaattagattcaaggatgattcatcttttgaagaagtaaatgggattag

SEQ ID NO: 37613 - DNA, 60 bp, Artificial
  Synthetic oligonucleotide
atgggattaggaagccaaagcatctctacatctccatgccgactgctcagtccacaatga

SEQ ID NO: 37614 - DNA, 60 bp, Artificial
  Synthetic oligonucleotide
tagcccccattcagtgtgggtgtttgcatgtgcacctgataggtgtccaccgacagcatt

SEQ ID NO: 37615 - DNA, 57 bp, Artificial
  Synthetic oligonucleotide
cttattgaccaggctgagtctgagtctgccaccctgtttacagaaatagctagcccc

SEQ ID NO: 37616 - DNA, 60 bp, Artificial
  Synthetic oligonucleotide
ggtgggaagtgggtttactactaattacgggttactgtcctttgcactactattaaatac

SEQ ID NO: 37617 - DNA, 60 bp, Artificial
  Synthetic oligonucleotide
tttgcactactattaaatacatttgcactattggggaaatggggatatacatgtagtcag

SEQ ID NO: 37618 - DNA, 60 bp, Artificial
  Synthetic oligonucleotide
cactactattaaatacatttgcactattggggaaatggggatatacatgtagtcagtatg

SEQ ID NO: 37619 - DNA, 60 bp, Artificial
  Synthetic oligonucleotide
gaagttaaagaagaaatcagcattctatcaatcttatttgagacgaacacagtcaatggg

SEQ ID NO: 37620 - DNA, 60 bp, Artificial
  Synthetic oligonucleotide
cgacagcattatatgtggcaggagtgccagagctaggtgccttttttgccatactacaag

SEQ ID NO: 37621 - DNA, 56 bp, Artificial
  Synthetic oligonucleotide
ggccaccaataaggcatacttttttaacaggcaacgccaggttgatgagtctcaag

SEQ ID NO: 37622 - DNA, 60 bp, Artificial
  Synthetic oligonucleotide
gcggaatgccctttcttacctaagcccaaaacagctgctgagacattcatggccaccaat

SEQ ID NO: 37623 - DNA, 56 bp, Artificial
  Synthetic oligonucleotide
gtttcctgctcaagtgaaagcccggaatatcataagcccagtgatgggggtcattg

SEQ ID NO: 37624 - DNA, 60 bp, Artificial
  Synthetic oligonucleotide
ggaagccaaagcatctctacatctccatgccgactgctcagtccacaatgaaagctgagg

SEQ ID NO: 37625 - DNA, 60 bp, Artificial
  Synthetic oligonucleotide
gtgggtgtttgcatgtgcacctgataggtgtccaccgacagcattatatgtggcaggagt

SEQ ID NO: 37626 - DNA, 60 bp, Artificial
  Synthetic oligonucleotide
ccaaacttggagagctcaagagacagcttgctgacttggtggcagctcaaaaactggcta

SEQ ID NO: 37627 - DNA, 60 bp, Artificial
  Synthetic oligonucleotide
cttattgaccaggctgagtctgagtctgccaccctgtttacagaaatagctagcccccat

SEQ ID NO: 37628 - DNA, 60 bp, Artificial
  Synthetic oligonucleotide
ggggattcaactggaccagaagatcatcatcctgtatatgttgtcttggggtaaggaggc

SEQ ID NO: 37629 - DNA, 58 bp, Artificial
  Synthetic oligonucleotide
gggtgtagggtggtgtttagtcttaatgatgggttttcaggggcttgtgccatatgtt

SEQ ID NO: 37630 - DNA, 60 bp, Artificial
  Synthetic oligonucleotide
ctccttgataagctactgctgtaaaagctggaatgagcaacctccaagaattgcaagaga

SEQ ID NO: 37631 - DNA, 60 bp, Artificial
  Synthetic oligonucleotide
tagtagtagactccttgataagctactgctgtaaaagctggaatgagcaacctccaagaa

SEQ ID NO: 37632 - DNA, 60 bp, Artificial
  Synthetic oligonucleotide
atattataagggtgggaagtgggtttactactaattacgggttactgtcctttgcactac

SEQ ID NO: 37633 - DNA, 60 bp, Artificial
  Synthetic oligonucleotide
ggacaaaccgctgactggaaggctattggagcatacatactgggttttgcaattccgatc

SEQ ID NO: 37634 - DNA, 60 bp, Artificial
  Synthetic oligonucleotide
actgggttctctccagcagcaagagacttcttgcgccaattcggaattggcatatagtgg

SEQ ID NO: 37635 - DNA, 60 bp, Artificial
  Synthetic oligonucleotide
cggcacgtcagtacgtaagtgttaactttgagtgtgtgtaaagagcagcttgtgatcaac

SEQ ID NO: 37636 - DNA, 53 bp, Artificial
  Synthetic oligonucleotide
ttgatttcatctagacttaaccttgactgcgtgccgccactatatctttgaga

SEQ ID NO: 37637 - DNA, 60 bp, Artificial
  Synthetic oligonucleotide
ggcagtgcatacaagctaatcacagtccgttacagccgtaaagtatgtgttcagtttggt

SEQ ID NO: 37638 - DNA, 60 bp, Artificial
  Synthetic oligonucleotide
cgtctatgagagaacctactgtacaactggtatactaacagaagggaagtgttttgtgcc

SEQ ID NO: 37639 - DNA, 60 bp, Artificial
  Synthetic oligonucleotide
gagtatgatggtaatatggtctctgggtataagaaagtaatggcaactattgattccttt

SEQ ID NO: 37640 - DNA, 60 bp, Artificial
  Synthetic oligonucleotide
gcccataatttgtcttgccctcagtcacagtgtccttattgctttacacattgtgagcct

SEQ ID NO: 37641 - DNA, 60 bp, Artificial
  Synthetic oligonucleotide
cttgccctcagtcacagtgtccttattgctttacacactgtgagcctacagaatctgcct

SEQ ID NO: 37642 - DNA, 60 bp, Artificial
  Synthetic oligonucleotide
gcaagtatgagtgtgaaacagggaaggagcttaaagcccataatttatcttgccctcagt

SEQ ID NO: 37643 - DNA, 60 bp, Artificial
  Synthetic oligonucleotide
cttcacatagagatagagagtcaagggatctctacaagtgttcatgcattaggtcattgg

SEQ ID NO: 37644 - DNA, 60 bp, Artificial
  Synthetic oligonucleotide
gagatagagagtcaagggatttctacaagtgttcatgcattaggtcattggtttgatggg

SEQ ID NO: 37645 - DNA, 60 bp, Artificial
  Synthetic oligonucleotide
gtagatcttcacatagagatagagagtcaagggatttctacaagtgttcatgcattaggt

SEQ ID NO: 37646 - DNA, 60 bp, Artificial
  Synthetic oligonucleotide
ggccaaaatacagtgaaggtttccgggaagggtgggcatagtggctcttcattcaagtgt

SEQ ID NO: 37647 - DNA, 60 bp, Artificial
  Synthetic oligonucleotide
cacagtgaaggtttccgggaagggtgggcatagtggctcttcattcaagtgttgccatgg

SEQ ID NO: 37648 - DNA, 60 bp, Artificial
  Synthetic oligonucleotide
atggtgcaccacaatgtggcatttcatgctggtttgttaagtctggggagtggataacag

SEQ ID NO: 37649 - DNA, 60 bp, Artificial
  Synthetic oligonucleotide
ggtgcaccacaatgtggcatttcatgctggtttgttaagtctggggagtggataacagga

SEQ ID NO: 37650 - DNA, 60 bp, Artificial
  Synthetic oligonucleotide
cactcattagaggccaaaatacagtgaaggtttccgggaagggtgggcatagtggctctt

SEQ ID NO: 37651 - DNA, 60 bp, Artificial
  Synthetic oligonucleotide
gatggtaatatggtctctgggtataagaaagtaatggcaactattgattcctttcaatca

SEQ ID NO: 37652 - DNA, 60 bp, Artificial
  Synthetic oligonucleotide
gtgaggcattctcagaaggtggtattttcaacattacatcccctacttgccttgtgtcaa

SEQ ID NO: 37653 - DNA, 60 bp, Artificial
  Synthetic oligonucleotide
caaataactgtaatgacactgacaacaaggttcaaggatattacctttgtattgtcgggg

SEQ ID NO: 37654 - DNA, 60 bp, Artificial
  Synthetic oligonucleotide
aatccaagttgtctatgaaagaacctactgtacaactggtatactaacagaagggaagtg

SEQ ID NO: 37655 - DNA, 60 bp, Artificial
  Synthetic oligonucleotide
attgtaagccaacgatgcatatgattgtgcctgtgcactcatgcaacatgatgaaaagct

SEQ ID NO: 37656 - DNA, 60 bp, Artificial
  Synthetic oligonucleotide
tgaaagaacctactgtacaactggtatactaacagaagggaagtgttttgtgccagacca

SEQ ID NO: 37657 - DNA, 55 bp, Artificial
  Synthetic oligonucleotide
taatcacagtccgttacagccgtaaagtatgtgttcagtttggtgaagaaaacct

SEQ ID NO: 37658 - DNA, 61 bp, Artificial
  Synthetic oligonucleotide
gtatgatggtaatatggtctctaggtataagaaagtaatggcaactattgattcctttcag

SEQ ID NO: 37659 - DNA, 60 bp, Artificial
  Synthetic oligonucleotide
gcccaagctgccaaggactcatttgagacaacatcaagcgaggttaatctgaaggggaca

SEQ ID NO: 37660 - DNA, 60 bp, Artificial
  Synthetic oligonucleotide
ggggtttgatatttaaggattggtgcactagcacatgccaatttggtgatccaggagaca

SEQ ID NO: 37661 - DNA, 60 bp, Artificial
  Synthetic oligonucleotide
ggtgggggtttgatatttaaggattggtgcactagcacatgccaatttggtgatccagga

SEQ ID NO: 37662 - DNA, 60 bp, Artificial
  Synthetic oligonucleotide
aggtgggggcttaatatttaaggattggtgcactagcacatgccaatttggtgatcctgg

SEQ ID NO: 37663 - DNA, 60 bp, Artificial
  Synthetic oligonucleotide
agtggatgacatctaagttggacgcagtcaaggctgcatttggctcagttgcccaaatat

SEQ ID NO: 37664 - DNA, 60 bp, Artificial
  Synthetic oligonucleotide
aatggatgacatctaagttggacgcagtcaaggctgcatttggctcagttgcccaaatat

SEQ ID NO: 37665 - DNA, 60 bp, Artificial
  Synthetic oligonucleotide
cagaagagtggatgacatctaagttggacgcagtcaaggctgcatttggctcagttgccc

SEQ ID NO: 37666 - DNA, 60 bp, Artificial
  Synthetic oligonucleotide
gacatctaagttggacgcagtcaaggctgcatttggctcagttgcccagatatcctgggc

SEQ ID NO: 37667 - DNA, 60 bp, Artificial
  Synthetic oligonucleotide
gacatctaagttggacgcagtcaaggctgcatttggctcagttgcccaaatatcctgggc

SEQ ID NO: 37668 - DNA, 60 bp, Artificial
  Synthetic oligonucleotide
gacatctaagttggacgcagtcaaggctgcatttggctcagttgcccaaatatcatgggc

SEQ ID NO: 37669 - DNA, 60 bp, Artificial
  Synthetic oligonucleotide
ccgctgtgctgacagccggaagaatcagtgaaatgggtgtctgctttggaacaatcccgg

SEQ ID NO: 37670 - DNA, 60 bp, Artificial
  Synthetic oligonucleotide
ccctgctgtgttaacagccggtagaatcagtgaaatgggtgtctgctttggaacaatccc

SEQ ID NO: 37671 - DNA, 60 bp, Artificial
  Synthetic oligonucleotide
aaaaagtcttgaagttgaatgctaccagattctgatcttcctcaaactcgaggtctttgc

SEQ ID NO: 37672 - DNA, 60 bp, Artificial
  Synthetic oligonucleotide
gatctggacacaccaagtccattctcaaccttcggacaagcacagagaccaacaatccat

SEQ ID NO: 37673 - DNA, 60 bp, Artificial
  Synthetic oligonucleotide
ggacacaccaagtccattctcaaccttcggacaagcacagagaccaacaatccatgcgcc

SEQ ID NO: 37674 - DNA, 53 bp, Artificial
  Synthetic oligonucleotide
actctgaacgcgaaggtctaactgatctccttgattacctaaattcacccacc

SEQ ID NO: 37675 - DNA, 60 bp, Artificial
  Synthetic oligonucleotide
gggtgggaattattactcaggggtgggtcagttaatccgttgtgggtgggtttaggtgta

SEQ ID NO: 37676 - DNA, 60 bp, Artificial
  Synthetic oligonucleotide
ggtgggaatcattattcagagggtgggtcagttaatccgttgtgggtgggtttagttttg

SEQ ID NO: 37677 - DNA, 60 bp, Artificial
  Synthetic oligonucleotide
tcaggggtgggtcagttaatccgttgtgggtgggtttagctccaggctaccttaagtagc

SEQ ID NO: 37678 - DNA, 60 bp, Artificial
  Synthetic oligonucleotide
caggggtgggtcagttaatccgttgtgggtgggtttagctccaggctaccttaagtagcc

SEQ ID NO: 37679 - DNA, 60 bp, Artificial
  Synthetic oligonucleotide
ctggcactatctgtttgctcaaatacagtcaatactaacggagtgaaacatcaaggtcat

SEQ ID NO: 37680 - DNA, 60 bp, Artificial
  Synthetic oligonucleotide
ctgttctggcactatctgtttgctcaaatacagtcaatactaacggagtgaaacatcaag

SEQ ID NO: 37681 - DNA, 60 bp, Artificial
  Synthetic oligonucleotide
gcagggtttgtggcatttatggctgaccatggagaatctatcaatttggcagccgttagg

SEQ ID NO: 37682 - DNA, 60 bp, Artificial
  Synthetic oligonucleotide
gcagggtttgtggcatttatggctgaccatggagaatctattaatttggcagccgttagg

SEQ ID NO: 37683 - DNA, 60 bp, Artificial
  Synthetic oligonucleotide
gcagggtttgtggcatttatggctgaccatggagaatctatcaatctgtcagccgttagg

SEQ ID NO: 37684 - DNA, 51 bp, Artificial
  Synthetic oligonucleotide
gtcaaattcacagtggttaataaccattttccccaatatgtctcaaatcct

SEQ ID NO: 37685 - DNA, 53 bp, Artificial
  Synthetic oligonucleotide
gggtcaaattcacagtggttaataaccattttccccaatatgtctcaaatcct

SEQ ID NO: 37686 - DNA, 60 bp, Artificial
  Synthetic oligonucleotide
cggcacaaccaagtgtcgaccttacttttggtggggtcaaattcacagtggttaataacc

SEQ ID NO: 37687 - DNA, 60 bp, Artificial
  Synthetic oligonucleotide
gtcaattcagggcaaaattgatgagttaaggagacagctggctgatcgtgtggctgcagg

SEQ ID NO: 37688 - DNA, 60 bp, Artificial
  Synthetic oligonucleotide
agacagctggctgatcgtgtggctgcaggaaaaaacattggcagggagagggacccaact

SEQ ID NO: 37689 - DNA, 60 bp, Artificial
  Synthetic oligonucleotide
gatccaacagggcttgagcctgatgaccatttaaaggagaaatcagctctgcgatatggg

SEQ ID NO: 37690 - DNA, 60 bp, Artificial
  Synthetic oligonucleotide
catgtgctttaaggatgatgctctgcattggaggtcctctacctctcttgtctagcatga

SEQ ID NO: 37691 - DNA, 60 bp, Artificial
  Synthetic oligonucleotide
ctttaaggatgatgctctgcattggaggtcctctacctctcttgtctagcatgacaggtc

SEQ ID NO: 37692 - DNA, 60 bp, Artificial
  Synthetic oligonucleotide
ccaatcaatgggaatacaactggaccaaagaatcatagtgctctttatggttgcctgggg

SEQ ID NO: 37693 - DNA, 60 bp, Artificial
  Synthetic oligonucleotide
ccaatccagccaaaattcatttgagacagtgtctactgaggttgaccttaaaggaacctg

SEQ ID NO: 37694 - DNA, 60 bp, Artificial
  Synthetic oligonucleotide
cttactggattcatgaacttggtactggttctccactagttcaaacccagctgtattctg

SEQ ID NO: 37695 - DNA, 60 bp, Artificial
  Synthetic oligonucleotide
cggtggaagccgacccggatgatgttaacaagagcacactacagagtagacgggcagctg

SEQ ID NO: 37696 - DNA, 60 bp, Artificial
  Synthetic oligonucleotide
tgcacacatggtgtgccaggagatctacaggtctaccacatcggaaatttattaaaaggg

SEQ ID NO: 37697 - DNA, 60 bp, Artificial
  Synthetic oligonucleotide
gcacacatggtgtgccaggagatctacaggtctaccacatcggaaatttattaaaagggg

SEQ ID NO: 37698 - DNA, 51 bp, Artificial
  Synthetic oligonucleotide
gaagtgcaggaagcagatctttgctgcttgtaaaagtggtaagtatgtttt

SEQ ID NO: 37699 - DNA, 60 bp, Artificial
  Synthetic oligonucleotide
atccaggacatggacatagtggcctctgagcacctgctgcaccagtctcttgttggcaag

SEQ ID NO: 37700 - DNA, 60 bp, Artificial
  Synthetic oligonucleotide
aacccaccatggggggacatcaacaagtcaggccgttcaggaatagcacttgttgcaaca

SEQ ID NO: 37701 - DNA, 60 bp, Artificial
  Synthetic oligonucleotide
tagaggaaatgtttaaatcagctgtaaagctattgagtgagagcaaccctggaactgcca

SEQ ID NO: 37702 - DNA, 60 bp, Artificial
  Synthetic oligonucleotide
ccattcaatgattatcagcaagcaataacagacatttgtcaattttctgaatacacaccg

SEQ ID NO: 37703 - DNA, 60 bp, Artificial
  Synthetic oligonucleotide
ccacaaaacttagattcttcttctgtatgatgtcttaacatcttgcggagtctactacta

SEQ ID NO: 37704 - DNA, 60 bp, Artificial
  Synthetic oligonucleotide
tatccacaccaatgggcttaactacgaccacatacgaatcttctacattaaaggacgcga

SEQ ID NO: 37705 - DNA, 60 bp, Artificial
  Synthetic oligonucleotide
gtcaaccatttccatctgggtgatgatatggaccctgagctcagaacacttgcacaaagc

SEQ ID NO: 37706 - DNA, 60 bp, Artificial
  Synthetic oligonucleotide
gtcaaccatttccatctgggtgatgatatggaccctgagctcagaacacttgcacaaagt

SEQ ID NO: 37707 - DNA, 60 bp, Artificial
  Synthetic oligonucleotide
gtcaaccacttccatctgggtgatgatatggaccctgagctcagaacacttgcacaaagt

SEQ ID NO: 37708 - DNA, 60 bp, Artificial
  Synthetic oligonucleotide
aatggcagatgctgtgtcccggaagaagatggatactaaacctactgacccgactgggat

SEQ ID NO: 37709 - DNA, 60 bp, Artificial
  Synthetic oligonucleotide
aaaaatctaaattgttgttcctgcatacacacacgcacatccaatgatatgaatttgaag

SEQ ID NO: 37710 - DNA, 60 bp, Artificial
  Synthetic oligonucleotide
cgcacatccaatgatatgaatttgaagggttgggcactaaattcacacaaatgcataatt

SEQ ID NO: 37711 - DNA, 60 bp, Artificial
  Synthetic oligonucleotide
taatttgtagttcctgcatacacacacgcacatccaatgatatgaatttgaagggttggg

SEQ ID NO: 37712 - DNA, 60 bp, Artificial
  Synthetic oligonucleotide
gatttgtctgcaatctcttcatagcaataagctttgatggatttctcatttggacccaag

SEQ ID NO: 37713 - DNA, 60 bp, Artificial
  Synthetic oligonucleotide
gatttgtctgttatctcttcagaacagtaagctttgatggatttctcatttggacctaga

SEQ ID NO: 37714 - DNA, 60 bp, Artificial
  Synthetic oligonucleotide
ataccagcgaccaaacaaacctctaacacttgtaggcaataagctttgcattggtgacaa

SEQ ID NO: 37715 - DNA, 60 bp, Artificial
  Synthetic oligonucleotide
gcgaccaaacaaacctctaacacttgtaggcaataagctttgcattggtgacaaatactg

SEQ ID NO: 37716 - DNA, 60 bp, Artificial
  Synthetic oligonucleotide
gcggccacaaaacccttaatgttcatgcatgcttcagacaacataagtcatgtattcgtt

SEQ ID NO: 37717 - DNA, 60 bp, Artificial
  Synthetic oligonucleotide
tgccttacgtgcatttgtcgtgataaaagcatacacagagccaacaataattgtgttgct

SEQ ID NO: 37718 - DNA, 60 bp, Artificial
  Synthetic oligonucleotide
gcggccacaaaacccttaatgttcatgcatgcttcaggcaacataagtcatgtattcgtt

SEQ ID NO: 37719 - DNA, 60 bp, Artificial
  Synthetic oligonucleotide
ggccattggcaagatacgttgttgcagtacttaaagagaatgacaaagtgtacaaattag

SEQ ID NO: 37720 - DNA, 60 bp, Artificial
  Synthetic oligonucleotide
gtctattcgactcctcaaaacaggcgaatgtaagatagcaggagcattatccagaattgc

SEQ ID NO: 37721 - DNA, 60 bp, Artificial
  Synthetic oligonucleotide
ggccattggcaagatacattgttgcagtacttaaagagaatgacaaagtgtacaaactag

SEQ ID NO: 37722 - DNA, 60 bp, Artificial
  Synthetic oligonucleotide
ccaaacaagcctctagcacttgtaggcaataagctttgcattggtgacaaatactgcatg

SEQ ID NO: 37723 - DNA, 60 bp, Artificial
  Synthetic oligonucleotide
gcgaccaaacaagcctctagcacttgtaggcaataagctttgcattggtgacaaatactg

SEQ ID NO: 37724 - DNA, 60 bp, Artificial
  Synthetic oligonucleotide
aaggtctattcgactcctcaaaacaggcgaatgtaaaatagcaggggtgttatctagaat

SEQ ID NO: 37725 - DNA, 60 bp, Artificial
  Synthetic oligonucleotide
caagcctctagcacttgtaggcaataagctttgcattggtgacaaatactgcatgatagc

SEQ ID NO: 37726 - DNA, 60 bp, Artificial
  Synthetic oligonucleotide
aaactagtctcgcaaaaagaagtgaatgggaagttacacttaaccttgggggctggaaga

SEQ ID NO: 37727 - DNA, 60 bp, Artificial
  Synthetic oligonucleotide
agattaaaactagtctcgcaaaaagaagtgaatgggaagttacacttaaccttgggggct

SEQ ID NO: 37728 - DNA, 60 bp, Artificial
  Synthetic oligonucleotide
ctaattaaattaccccataccgattatgcctggacttttgttcttgcggagtctactact

SEQ ID NO: 37729 - DNA, 60 bp, Artificial
  Synthetic oligonucleotide
gcactttactaattaaattacctcataccgattatgcctggacttttgttcttgcggagt

SEQ ID NO: 37730 - DNA, 60 bp, Artificial
  Synthetic oligonucleotide
ctaattaaattacctcataccgattatgcctggacttttgttcttgcggagtctactact

SEQ ID NO: 37731 - DNA, 60 bp, Artificial
  Synthetic oligonucleotide
ctttactaattaaattaccccataccgattatgcctggacttttgttcttgcggagtcta

SEQ ID NO: 37732 - DNA, 60 bp, Artificial
  Synthetic oligonucleotide
aagaaagagaaattaggaattaagaacttttctacttatgaacaggtttgcaaagtggcc

SEQ ID NO: 37733 - DNA, 60 bp, Artificial
  Synthetic oligonucleotide
ccttgaccgcatagaagacagccgttgcaatttaagcttgttgaagttatggaaggtctc

SEQ ID NO: 37734 - DNA, 60 bp, Artificial
  Synthetic oligonucleotide
taaaccttgaccgcatagaagacagccgttgcaatttaagcttgttgaagttatggaagg

SEQ ID NO: 37735 - DNA, 60 bp, Artificial
  Synthetic oligonucleotide
ccttcagttctctgatccaaacagacagaaacttagaatagttgaatccaggcctgcaga

SEQ ID NO: 37736 - DNA, 60 bp, Artificial
  Synthetic oligonucleotide
tgggagcttgatctgatgaattcactctgttccgacgagaaaagagatgctagaaccgca

SEQ ID NO: 37737 - DNA, 60 bp, Artificial
  Synthetic oligonucleotide
caacctaaaccttcagttctctgatccaaacagacagaaacttagaatagttgaatccag

SEQ ID NO: 37738 - DNA, 60 bp, Artificial
  Synthetic oligonucleotide
cagtcacagctgcaagtccagtgtatcagaggtgtttccaagatggggctatagtgaagc

SEQ ID NO: 37739 - DNA, 60 bp, Artificial
  Synthetic oligonucleotide
ttcaccactatctctcttactttctacctcagtgtacttatatatatgcaagtagcatat

SEQ ID NO: 37740 - DNA, 60 bp, Artificial
  Synthetic oligonucleotide
gcctgacgttagacatggtgtttactatggaaacgtctgatatgatgactttaatcggat

SEQ ID NO: 37741 - DNA, 60 bp, Artificial
  Synthetic oligonucleotide
atctttgagatacacaaggaaagcatgtattcagcttggtactgaacaaacttgtaaaag

SEQ ID NO: 37742 - DNA, 60 bp, Artificial
  Synthetic oligonucleotide
gatatctagccagatgggttcttgagcattttaactcagatgatgacgagtctcagagag

SEQ ID NO: 37743 - DNA, 60 bp, Artificial
  Synthetic oligonucleotide
ccataggctttcaggatatctagccagatgggttcttgagcatttcaccgcagatgacga

SEQ ID NO: 37744 - DNA, 60 bp, Artificial
  Synthetic oligonucleotide
gcagggtttgtggcatttatggctgaccacggagagtctatcaatctgtcagccgttagg

SEQ ID NO: 37745 - DNA, 60 bp, Artificial
  Synthetic oligonucleotide
tcttaccatccataggctttcaggatatctagccagatgggttcttgagcatttcaccgc

SEQ ID NO: 37746 - DNA, 60 bp, Artificial
  Synthetic oligonucleotide
gcagggtttgtggcatttatggctgaccacggagagtctatcaatctgtctgccgttagg

SEQ ID NO: 37747 - DNA, 60 bp, Artificial
  Synthetic oligonucleotide
gtatgatggatccccagtatctgaagaaggctctcaggcaacgctatggcaccttgactg

SEQ ID NO: 37748 - DNA, 60 bp, Artificial
  Synthetic oligonucleotide
gatggatccccagtacttgaagaaggctctcaggcaacgctatggcaccttgactgcaga

SEQ ID NO: 37749 - DNA, 60 bp, Artificial
  Synthetic oligonucleotide
tggcttctaaaaggtcttatgaccataaacatagcagcacaatgggtgggtggtagggga

SEQ ID NO: 37750 - DNA, 60 bp, Artificial
  Synthetic oligonucleotide
ggcttctaaaaggtcttatgaccataaacatagcagcacaatgggtgggtggtaggggac

SEQ ID NO: 37751 - DNA, 60 bp, Artificial
  Synthetic oligonucleotide
cacctgtttgtgagtatcaagggaatacagtttcaggatatcaaaggatgatggctacaa

SEQ ID NO: 37752 - DNA, 60 bp, Artificial
  Synthetic oligonucleotide
gtttgctacaacacctgtttgtgagtatcaagggaatacagtttcaggatatcaaaggat

SEQ ID NO: 37753 - DNA, 60 bp, Artificial
  Synthetic oligonucleotide
aatcttatccaagaaaaattgatgcaggctgtttgtttataaatgctttttgaatatttg

SEQ ID NO: 37754 - DNA, 60 bp, Artificial
  Synthetic oligonucleotide
gatgaacacagagccaacagttgctgagcttgtcagctatggtataaaggaaggtaggtt

SEQ ID NO: 37755 - DNA, 60 bp, Artificial
  Synthetic oligonucleotide
gaaaggtaacttgatgaacacagagccaacagttgctgagcttgtcagctatggtataaa

SEQ ID NO: 37756 - DNA, 60 bp, Artificial
  Synthetic oligonucleotide
ggtaaaattagtgggagaaacaggcatggcaatactacaacaattagcttttgcacaggc

SEQ ID NO: 37757 - DNA, 60 bp, Artificial
  Synthetic oligonucleotide
ggtaaaattagtgggagaaacaggcatggcaatactacaacaattagcttttgcacaagc

SEQ ID NO: 37758 - DNA, 60 bp, Artificial
  Synthetic oligonucleotide
catgctgaaaggtaacttgatgaacacagagccaacagttgctgagcttgtcagctatgg

SEQ ID NO: 37759 - DNA, 60 bp, Artificial
  Synthetic oligonucleotide
ggattatcaatatgaaacaagttggggctgtaatccaccagactgtccaggggtaggtac

SEQ ID NO: 37760 - DNA, 57 bp, Artificial
  Synthetic oligonucleotide
ttatcaatatgaaacaagttggggctgtaatccaccagactgtccaggggtaggtac

SEQ ID NO: 37761 - DNA, 60 bp, Artificial
  Synthetic oligonucleotide
ggtattttcatgtgccccggatcgatgcccaccaacatgcatttatgttgcagggatggc

SEQ ID NO: 37762 - DNA, 60 bp, Artificial
  Synthetic oligonucleotide
aaatctgcgcggcccagtgagccgtgaacatgtggagtggtgcagggaatttgtcaaagg

SEQ ID NO: 37763 - DNA, 60 bp, Artificial
  Synthetic oligonucleotide
aagtccacggggcccagtgagccgtgaacatgtggagtggtgcagggaatttgtcaaagg

SEQ ID NO: 37764 - DNA, 59 bp, Artificial
  Synthetic oligonucleotide
aaacccgcgaggcccagtgagccgtgaacatgtggagtggtgcagagaatttgtcaaag

SEQ ID NO: 37765 - DNA, 60 bp, Artificial
  Synthetic oligonucleotide
tcaacagtggtggcgatgaaaatccacgaggcccagtgagccgtgaacatgtggagtggt

SEQ ID NO: 37766 - DNA, 60 bp, Artificial
  Synthetic oligonucleotide
gaaaatctgcgcggcccagtgagccgtgaacatgtggagtggtgcagggaatttgtcaaa

SEQ ID NO: 37767 - DNA, 60 bp, Artificial
  Synthetic oligonucleotide
gaaaatccgcgcggcccagtgagccgtgaacatgtggagtggtgcagggaatttgtcaaa

SEQ ID NO: 37768 - DNA, 60 bp, Artificial
  Synthetic oligonucleotide
aaatccgcgcggcccagtgagccgtgaacatgtggagtggtgcagggaatttgtcaaagg

SEQ ID NO: 37769 - DNA, 60 bp, Artificial
  Synthetic oligonucleotide
aagtccacgaggcccagtgagccgtgaacatgtggagtggtgcagggaatttgtcaaagg

SEQ ID NO: 37770 - DNA, 60 bp, Artificial
  Synthetic oligonucleotide
ggaagtggctagtgatggccagtttagtatggcctgttttgacactgagaaatgtctatg

SEQ ID NO: 37771 - DNA, 60 bp, Artificial
  Synthetic oligonucleotide
ggaagtggctagtgatggccagtttagtatggcctgttttgacactgagaaatgtttatg

SEQ ID NO: 37772 - DNA, 60 bp, Artificial
  Synthetic oligonucleotide
tctatcaatcatacctcagacgcacacaatcaatgggaatacaactggaccagaggataa

SEQ ID NO: 37773 - DNA, 60 bp, Artificial
  Synthetic oligonucleotide
agtagacgggcagctgtgtctacattggagaccaaactcggagaacttaagaggcagctt

SEQ ID NO: 37774 - DNA, 60 bp, Artificial
  Synthetic oligonucleotide
ggctgtacttggaatgatggtgatgcaatgtacctggggtttgctgctggtgctgagatg

SEQ ID NO: 37775 - DNA, 60 bp, Artificial
  Synthetic oligonucleotide
ctgcttacataaagaatggcctcactcaagaaactggagatgtaatcccacttggtgctg

SEQ ID NO: 37776 - DNA, 60 bp, Artificial
  Synthetic oligonucleotide
ctgcttgcataaagaatggcctcactcaagaaactggagatgtaatcccacttggtgctg

SEQ ID NO: 37777 - DNA, 52 bp, Artificial
  Synthetic oligonucleotide
cttgttgcaacaggccttgccaagcttgcagagactgaagggaaaggagtgt

SEQ ID NO: 37778 - DNA, 52 bp, Artificial
  Synthetic oligonucleotide
cttgttgcaacaggccttgccaagcttgcagagactgaagggaagggagtgt

SEQ ID NO: 37779 - DNA, 60 bp, Artificial
  Synthetic oligonucleotide
gaaagttccaagttgtgtttaatcctccttggggggatataaacaagtgtggtaaatcag

SEQ ID NO: 37780 - DNA, 60 bp, Artificial
  Synthetic oligonucleotide
aagttccaagttgtgtttaatcctccttggggggatataaacaagtgtggtaaatcaggc

SEQ ID NO: 37781 - DNA, 60 bp, Artificial
  Synthetic oligonucleotide
gcatctctctgtgatagagtgcctgacttagctctagcagaaatgaaaatggcccttgct

SEQ ID NO: 37782 - DNA, 60 bp, Artificial
  Synthetic oligonucleotide
tgttaacatcatctaaaagctggcattgtgtggccttccctaacatcttaaacaagttgc

SEQ ID NO: 37783 - DNA, 60 bp, Artificial
  Synthetic oligonucleotide
aactgctgggttaacacggaatctttatgagttgaagatagaatgtccacatactgtggg

SEQ ID NO: 37784 - DNA, 60 bp, Artificial
  Synthetic oligonucleotide
caagtcccattaaccaagaacaatcagtagaccttcatattgagatagaaagtcaaagga

SEQ ID NO: 37785 - DNA, 60 bp, Artificial
  Synthetic oligonucleotide
caagccctataaaccaagaacaatcaatagaccttcatattgagatagaaagtcaaggga

SEQ ID NO: 37786 - DNA, 60 bp, Artificial
  Synthetic oligonucleotide
atcagtagaccttcatattgagatagaaagtcaaaggatttctacaagtgtgcatgcttt

SEQ ID NO: 37787 - DNA, 60 bp, Artificial
  Synthetic oligonucleotide
gggctgcaaacagcatctatagagggtgcatggggttctggagttgggtttacccttacc

SEQ ID NO: 37788 - DNA, 60 bp, Artificial
  Synthetic oligonucleotide
ttgacaagtcccattaaccaagaacaatcagtagaccttcatattgagatagaaagtcaa

SEQ ID NO: 37789 - DNA, 60 bp, Artificial
  Synthetic oligonucleotide
ctgtttcaaagttctcacaaggtgacaccctagtgttccttggtcccatggaagggggag

SEQ ID NO: 37790 - DNA, 57 bp, Artificial
  Synthetic oligonucleotide
ctgtttcaaagttctcacaaggtgacaccctagtgttccttggtcccatggaagggg

SEQ ID NO: 37791 - DNA, 60 bp, Artificial
  Synthetic oligonucleotide
tgcattataggtactgtttcaaagttctcacaaggtgacaccctggtgtttcttggtccc

SEQ ID NO: 37792 - DNA, 60 bp, Artificial
  Synthetic oligonucleotide
cggcatgtgaaagtatgcattataggtactgtttcaaagttctcacaaggtgacaccctg

SEQ ID NO: 37793 - DNA, 60 bp, Artificial
  Synthetic oligonucleotide
aggcatgtgaaagtatgcattataggcactgtttcaaagttctcacaaggtgacaccctg

SEQ ID NO: 37794 - DNA, 54 bp, Artificial
  Synthetic oligonucleotide
gaagggggaggtctaatattcaaagattggtgcacaacaacatgtcagtttggg

SEQ ID NO: 37795 - DNA, 60 bp, Artificial
  Synthetic oligonucleotide
tgatgattccttccagcagaacaggatctacatgcaccctgctgtgctgacagccggcag

SEQ ID NO: 37796 - DNA, 60 bp, Artificial
  Synthetic oligonucleotide
tgatgattccttccagcagaacaggatctacatgcaccctgctgtgctgacagctggcag

SEQ ID NO: 37797 - DNA, 60 bp, Artificial
  Synthetic oligonucleotide
aagactgacacccaggctggcaacccctgcgcacagaacattgtcgccctgttcaacatc

SEQ ID NO: 37798 - DNA, 60 bp, Artificial
  Synthetic oligonucleotide
cacagcagcactagccgctgcaattgcaactgagtataaagtccctggatcacttgtggt

SEQ ID NO: 37799 - DNA, 60 bp, Artificial
  Synthetic oligonucleotide
ggttgctgcaaccaaattttgtgctcctatattggagtgtgcctggactagctgtacagg

SEQ ID NO: 37800 - DNA, 60 bp, Artificial
  Synthetic oligonucleotide
ggatcacttgtggtaaatgttaaggacatgctatcagacatgattaggagaaggaacaag

SEQ ID NO: 37801 - DNA, 60 bp, Artificial
  Synthetic oligonucleotide
gaggcttgtttcatctgatagtgaaaaggattcagtgtatgcttctgccttggttgctgc

SEQ ID NO: 37802 - DNA, 60 bp, Artificial
  Synthetic oligonucleotide
aggttagcatgaggcttgtttcatctgatagtgaaaaggattcagtgtatgcttctgcct

SEQ ID NO: 37803 - DNA, 60 bp, Artificial
  Synthetic oligonucleotide
cagcttctttctgtgaagccataccggacctgtcagggtatgaggttagcatgaggcttg

SEQ ID NO: 37804 - DNA, 60 bp, Artificial
  Synthetic oligonucleotide
gaccaattcagcttctttctgtgaagccataccggacctgtcagggtatgaggttagcat

SEQ ID NO: 37805 - DNA, 60 bp, Artificial
  Synthetic oligonucleotide
gattgtcgcagacaacaaggatgccattcttgcatggcacaaagcttacagcgagaagca

SEQ ID NO: 37806 - DNA, 60 bp, Artificial
  Synthetic oligonucleotide
catgcagaaccagattgtcgcagacaacaaggatgccattcttgcatggcacaaagctta

SEQ ID NO: 37807 - DNA, 60 bp, Artificial
  Synthetic oligonucleotide
aaaacacagcagcactagccgctgcaattgcaactgagtataaagtccctggatcacttg

SEQ ID NO: 37808 - DNA, 60 bp, Artificial
  Synthetic oligonucleotide
cctggactagctgtacaggaatggtcgaacgtggacttgactggtttgagaacaacagag

SEQ ID NO: 37809 - DNA, 60 bp, Artificial
  Synthetic oligonucleotide
tgcctggactagctgtacaggaatggtcgaacgtggacttgactggtttgagaacaacag

SEQ ID NO: 37810 - DNA, 60 bp, Artificial
  Synthetic oligonucleotide
gacggtcctaaaattgcagaggacttgaaagagtctctgaaaagccttgtggcatggatc

SEQ ID NO: 37811 - DNA, 60 bp, Artificial
  Synthetic oligonucleotide
tagacggtcctaaaattgcagaggacttgaaagagtctctgaaaagccttgtggcatgga

SEQ ID NO: 37812 - DNA, 60 bp, Artificial
  Synthetic oligonucleotide
aatcaagtgccatgagagcccaaggggctcagatcgacaccgtatttagtagctactact

SEQ ID NO: 37813 - DNA, 60 bp, Artificial
  Synthetic oligonucleotide
tgttgatagtttgaccaaatacctgcaaaaagctcttgaactagccaagcaatcaagtgc

SEQ ID NO: 37814 - DNA, 60 bp, Artificial
  Synthetic oligonucleotide
ttcaatccaccatggggcgacatcaacaaggcaggaaaatcgggaattgctctggcagca

SEQ ID NO: 37815 - DNA, 60 bp, Artificial
  Synthetic oligonucleotide
aagttccttgttgttttcaatccaccatggggcgacatcaacaaggcaggaaaatcggga

SEQ ID NO: 37816 - DNA, 60 bp, Artificial
  Synthetic oligonucleotide
ctctggcagcaaccggtatggcaaagctaatagagctagacggtcctaaaattgcagagg

SEQ ID NO: 37817 - DNA, 60 bp, Artificial
  Synthetic oligonucleotide
aaaatcgggaattgctctggcagcaaccggtatggcaaagctaatagagctagacggtcc

SEQ ID NO: 37818 - DNA, 60 bp, Artificial
  Synthetic oligonucleotide
agaacagaggtgcctagtccagaacagttgctaggttaccagagggctgccttaaagtgg

SEQ ID NO: 37819 - DNA, 60 bp, Artificial
  Synthetic oligonucleotide
ggctttggaaggcaggtgtgacagcagagatgtttccgacagtctcacagttcctctttg

SEQ ID NO: 37820 - DNA, 60 bp, Artificial
  Synthetic oligonucleotide
gagcccaaggggctcagatcgacaccgtatttagtagctactactggctttggaaggcag

SEQ ID NO: 37821 - DNA, 60 bp, Artificial
  Synthetic oligonucleotide
cagaggtgcctagtccagaacagttgctaggttaccagagggctgccttaaagtggagaa

SEQ ID NO: 37822 - DNA, 60 bp, Artificial
  Synthetic oligonucleotide
gagcttggtgtttgcttcggggcaattccagtagccaaccctgatgatgcagccgatggt

SEQ ID NO: 37823 - DNA, 60 bp, Artificial
  Synthetic oligonucleotide
gcttctgccttggttgctgcaaccaaattttgtgctcctatattggagtgtgcctggact

SEQ ID NO: 37824 - DNA, 55 bp, Artificial
  Synthetic oligonucleotide
aaaatctgggacactgagtacgggaaactgagaacagaggtgcctagtccagaac

SEQ ID NO: 37825 - DNA, 60 bp, Artificial
  Synthetic oligonucleotide
tctcaaagacaaacgtgccgctttcgcccacattgtctttgaactctgaccatgcagaac

SEQ ID NO: 37826 - DNA, 60 bp, Artificial
  Synthetic oligonucleotide
cgtgccgctttcgcccacattgtctttgaactctgaccatgcagaaccagattgtcgcag

SEQ ID NO: 37827 - DNA, 60 bp, Artificial
  Synthetic oligonucleotide
caggctggcaacccctgcgcacagaacattgtcgccctgttcaacatccaaaaggcaggc

SEQ ID NO: 37828 - DNA, 60 bp, Artificial
  Synthetic oligonucleotide
aaggaacaagattctaaacagagatggcagtgaagatgttccaaaaagagggcctgttag

SEQ ID NO: 37829 - DNA, 60 bp, Artificial
  Synthetic oligonucleotide
ggcaggctttgacattgagagcatggacattgttgcctcggagcatctgctgcatcagtc

SEQ ID NO: 37830 - DNA, 60 bp, Artificial
  Synthetic oligonucleotide
gttcaacatccaaaaggcaggctttgacattgagagcatggacattgttgcctcggagca

SEQ ID NO: 37831 - DNA, 60 bp, Artificial
  Synthetic oligonucleotide
ctgaaatggggaaagaagttactagcactctttgctgatgacagcttcactgccaatcgg

SEQ ID NO: 37832 - DNA, 60 bp, Artificial
  Synthetic oligonucleotide
gtcaagtatgcctctgaaatggggaaagaagttactagcactctttgctgatgacagctt

SEQ ID NO: 37833 - DNA, 60 bp, Artificial
  Synthetic oligonucleotide
agaacaacagagagatggtaaaaatctgggacactgagtacgggaaactgagaacagagg

SEQ ID NO: 37834 - DNA, 60 bp, Artificial
  Synthetic oligonucleotide
gcaggaagaatgtctgagcttggtgtttgcttcggggcaattccagtagccaaccctgat

SEQ ID NO: 37835 - DNA, 60 bp, Artificial
  Synthetic oligonucleotide
cctgtttctctctatttctcttacttctgctattattaacaaaggggctgtgcggcaacg

SEQ ID NO: 37836 - DNA, 60 bp, Artificial
  Synthetic oligonucleotide
aactgccgcatgctacctgtttctctctatttctcttacttctgctattattaacaaagg

SEQ ID NO: 37837 - DNA, 60 bp, Artificial
  Synthetic oligonucleotide
ggcctgttagcaaagagcacattgactgggccagggatcttgctcagggcaagttccttg

SEQ ID NO: 37838 - DNA, 60 bp, Artificial
  Synthetic oligonucleotide
tatttagcttcttatgtccaagacggagtcataagaagaatgtataatctatactaacag

SEQ ID NO: 37839 - DNA, 60 bp, Artificial
  Synthetic oligonucleotide
cttagggcccctagagcaaggtggtgttatattaaagcaatggtgcacaacatcatgtac

SEQ ID NO: 37840 - DNA, 59 bp, Artificial
  Synthetic oligonucleotide
aaaaggctgagacaactgatacaacacaggctgcatcaacaacctttgaagcacaaaca

SEQ ID NO: 37841 - DNA, 60 bp, Artificial
  Synthetic oligonucleotide
cacattgttgttcttagggcccctagagcaaggtggtgttatattaaagcaatggtgcac

SEQ ID NO: 37842 - DNA, 60 bp, Artificial
  Synthetic oligonucleotide
atcaacaacctttgaagcacaaacaaagacagtaaacatcagaggcacatgcatcctagc

SEQ ID NO: 37843 - DNA, 60 bp, Artificial
  Synthetic oligonucleotide
acccatgtaaagttgatctacacacccagtccattgacggtgcttggggctctggagtag

SEQ ID NO: 37844 - DNA, 60 bp, Artificial
  Synthetic oligonucleotide
cagagctgtgttgaaggtcaatgcccatactgtatgactgtgacagaggcaacccagagt

SEQ ID NO: 37845 - DNA, 60 bp, Artificial
  Synthetic oligonucleotide
acagggagatttcatgaggccttaaaaaaatctcttaaaaaacctgaggtgcatagaggg

SEQ ID NO: 37846 - DNA, 59 bp, Artificial
  Synthetic oligonucleotide
gcaacaaaggactcatttcaatcattcaacctgacagatccacacataacatcaagtaa

SEQ ID NO: 37847 - DNA, 60 bp, Artificial
  Synthetic oligonucleotide
tcgcacacttggtgtatttagataccgtagtagatgctatgtaggccttgtgtggggttg

SEQ ID NO: 37848 - DNA, 60 bp, Artificial
  Synthetic oligonucleotide
gctatgtaggccttgtgtggggttgccttttaaccattgagttagtgctatgggcagcaa

SEQ ID NO: 37849 - DNA, 60 bp, Artificial
  Synthetic oligonucleotide
aatggtgcacaacatcatgtacttttggggatcctggtgatatcatgtctactacatcag

SEQ ID NO: 37850 - DNA, 60 bp, Artificial
  Synthetic oligonucleotide
catgtacttttggggatcctggtgatatcatgtctactacatcagggatgaggtgccctg

SEQ ID NO: 37851 - DNA, 60 bp, Artificial
  Synthetic oligonucleotide
gcaatagaattcaaattacatttgagaaaacacactgcgttacaggtcagctagttgagg

SEQ ID NO: 37852 - DNA, 60 bp, Artificial
  Synthetic oligonucleotide
gtaacactgcctacaacttgtttttttactgcaaagaaagctgatcaatataagattgtt

SEQ ID NO: 37853 - DNA, 60 bp, Artificial
  Synthetic oligonucleotide
ttgacctgtaaccaaacacaatgtcaaccaacagtatacctcatcactcctgttgggaca

SEQ ID NO: 37854 - DNA, 60 bp, Artificial
  Synthetic oligonucleotide
ctcatcactcctgttgggacatgtatgtcaatcagaagttgtatggctaaccttttaagc

SEQ ID NO: 37855 - DNA, 60 bp, Artificial
  Synthetic oligonucleotide
aaaatagtatccaagggtattatgtctgttttattggaagccactctgagcctttgatca

SEQ ID NO: 37856 - DNA, 60 bp, Artificial
  Synthetic oligonucleotide
ccaagggtattatgtctgttttattggaagccactctgagcctttgatcatccccactct

SEQ ID NO: 37857 - DNA, 60 bp, Artificial
  Synthetic oligonucleotide
tctggagtaggattcaccttaacatgtgttgtgggtttaactgaatgtccaagctttatc

SEQ ID NO: 37858 - DNA, 60 bp, Artificial
  Synthetic oligonucleotide
cctttgaaggaatcataagcaagactggctgtacagaaaatagtatccaagggtattatg

SEQ ID NO: 37859 - DNA, 60 bp, Artificial
  Synthetic oligonucleotide
ggccttgtgtggggttgccttttaaccattgagttagtgctatgggcagcaagtgctgag

SEQ ID NO: 37860 - DNA, 60 bp, Artificial
  Synthetic oligonucleotide
cttgagtcacataaacagagctgtgttgaaggtcaatgcccatactgtatgactgtgaca

SEQ ID NO: 37861 - DNA, 60 bp, Artificial
  Synthetic oligonucleotide
cagtttgtgagtatcaaggtaatactatttcaggatatcaaagactcatggcaacaaagg

SEQ ID NO: 37862 - DNA, 60 bp, Artificial
  Synthetic oligonucleotide
ggcacaggttgtactgcctgtgggatttaccttgataagttaaaatcagttggtaaagcc

SEQ ID NO: 37863 - DNA, 60 bp, Artificial
  Synthetic oligonucleotide
ggctgggctacaatagctttattgtcaaccttttgttttggatggcttctaatccctggc

SEQ ID NO: 37864 - DNA, 60 bp, Artificial
  Synthetic oligonucleotide
ccccactctagaagatataagatcagcagaattagccagtcgtatgctgctccatccaag

SEQ ID NO: 37865 - DNA, 60 bp, Artificial
  Synthetic oligonucleotide
cgtatgctgctccatccaagaggtgaagatcatgatccactccaaaatgcccaggcagtt

SEQ ID NO: 37866 - DNA, 60 bp, Artificial
  Synthetic oligonucleotide
actgttgctaccctagcaaggggttccaacacagttaaagttgttggtaaaggtggacac

SEQ ID NO: 37867 - DNA, 60 bp, Artificial
  Synthetic oligonucleotide
aagctttatcacttccattaaagcatgtgaccttgcaatgtgctatgggtcaactgttgc

SEQ ID NO: 37868 - DNA, 55 bp, Artificial
  Synthetic oligonucleotide
tgtattaccctaacactttataagtgacaaaaagctaatcaaaaaaaacaagatc

SEQ ID NO: 37869 - DNA, 60 bp, Artificial
  Synthetic oligonucleotide
tgggcagcaagtgctgagacaccacttttagaacctggatggtctgacacagcccatggt

SEQ ID NO: 37870 - DNA, 60 bp, Artificial
  Synthetic oligonucleotide
aaccaaatagactcggacaaagtctatgatgacggggccccgccatgctcttttaagtgc

SEQ ID NO: 37871 - DNA, 58 bp, Artificial
  Synthetic oligonucleotide
tgttgtcatgactctgattgttcatctgagggattaatggcatctgcaccccatcttg

SEQ ID NO: 37872 - DNA, 60 bp, Artificial
  Synthetic oligonucleotide
gtcctttgttatgatttgacctgtaaccaaacacaatgtcaaccaacagtatacctcatc

SEQ ID NO: 37873 - DNA, 60 bp, Artificial
  Synthetic oligonucleotide
gcatcctagcatctgatctatatgacacattaaaacgagttaagaaaacagtcctttgtt

SEQ ID NO: 37874 - DNA, 60 bp, Artificial
  Synthetic oligonucleotide
aaggtaatatctttgaaatataccagaaaagtatgtatccagctaggcacagaacaggta

SEQ ID NO: 37875 - DNA, 60 bp, Artificial
  Synthetic oligonucleotide
ctatcagtatgaaacaggttggggctgtaaccccggagattgccctggtgttggcacagg

SEQ ID NO: 37876 - DNA, 60 bp, Artificial
  Synthetic oligonucleotide
ggagaaggctaacaaatcctgcaaataaagaggagtcattgccatttcattttcagatgg

SEQ ID NO: 37877 - DNA, 60 bp, Artificial
  Synthetic oligonucleotide
gttccatggtttgtgacatatgtcatcatgagtgtgagactgttaaagagcttgagtcac

SEQ ID NO: 37878 - DNA, 60 bp, Artificial
  Synthetic oligonucleotide
acaggttggggctgtaaccccggagattgccctggtgttggcacaggttgtactgcctgt

SEQ ID NO: 37879 - DNA, 60 bp, Artificial
  Synthetic oligonucleotide
gcctgatgttgcacattcccttgctgttgagctatgtgtacctgggcttcatggctgggc

SEQ ID NO: 37880 - DNA, 60 bp, Artificial
  Synthetic oligonucleotide
cctgtaattttgatttacatactacatcatctacccaaaaaagctttacacagctggaat

SEQ ID NO: 37881 - DNA, 60 bp, Artificial
  Synthetic oligonucleotide
ggaagggtggttattcaccatcctaggggtctgctacattatgacaactgtgctacccaa

SEQ ID NO: 37882 - DNA, 60 bp, Artificial
  Synthetic oligonucleotide
acctacatgccttgtcaacaaagtacaaagatttcggggttcagaacaaaagattaactt

SEQ ID NO: 37883 - DNA, 60 bp, Artificial
  Synthetic oligonucleotide
cagctggaatggagaaaaaaggctgagacaactgatacaacacaggctgcatcaacaacc

SEQ ID NO: 37884 - DNA, 60 bp, Artificial
  Synthetic oligonucleotide
aaaaggtaacaggttgcacagttttttgcacacttgcagggcctggagcaaattgtgagg

SEQ ID NO: 37885 - DNA, 57 bp, Artificial
  Synthetic oligonucleotide
cccatgtatagttctttctcaactcttgtccggaatgctgatcctgaatatgtgttt

SEQ ID NO: 37886 - DNA, 60 bp, Artificial
  Synthetic oligonucleotide
gcatagagggtgttatcgcacacttggtgtatttagataccgtagtagatgctatgtagg

SEQ ID NO: 37887 - DNA, 60 bp, Artificial
  Synthetic oligonucleotide
tcatacagttataggagaaggctaacaaatcctgcaaataaagaggagtcattgccattt

SEQ ID NO: 37888 - DNA, 60 bp, Artificial
  Synthetic oligonucleotide
tttgtcaccgcataagaagaaatggttgccatctagttcgtcaattttaaaatacacaga

SEQ ID NO: 37889 - DNA, 60 bp, Artificial
  Synthetic oligonucleotide
taaacaggtgtatataaataaggccaaggccagctttggcccttttaaggctcttttttt

SEQ ID NO: 37890 - DNA, 60 bp, Artificial
  Synthetic oligonucleotide
gagatgacattgaaacttgacttattacgcaatcaccagaaagtcttactgaaagcctag

SEQ ID NO: 37891 - DNA, 60 bp, Artificial
  Synthetic oligonucleotide
ataaaaacatttctcaacacatacatttctttctggagaaagtgccaaactagatggtat

SEQ ID NO: 37892 - DNA, 60 bp, Artificial
  Synthetic oligonucleotide
gagctgatcttagtgttaacagtgaactgaaaatgatcaatcaatgacaaactttcccac

SEQ ID NO: 37893 - DNA, 60 bp, Artificial
  Synthetic oligonucleotide
ggctcatcagaatacttggaaacacagttcctcacaggaacatcaactttctttataaaa

SEQ ID NO: 37894 - DNA, 60 bp, Artificial
  Synthetic oligonucleotide
caatctccagtacaggtagacaagtaatctgtgacagtggtatcaacttttgctgtagag

SEQ ID NO: 37895 - DNA, 60 bp, Artificial
  Synthetic oligonucleotide
cagacgacatcctttctaggttaatagtagaaaaaagcactcatttgagcaactggaaag

SEQ ID NO: 37896 - DNA, 60 bp, Artificial
  Synthetic oligonucleotide
cagactctaaaggattcgtcaaagcaactatcattgatcagaacaagatgacacctaaag

SEQ ID NO: 37897 - DNA, 60 bp, Artificial
  Synthetic oligonucleotide
ggaacactagaaaatccattgtgttttgttttccacttaaattggtctttcaataaagat

SEQ ID NO: 37898 - DNA, 60 bp, Artificial
  Synthetic oligonucleotide
gcaccttcatttatagcaagacagcccagctcctcacaaccccaccaagaagttggttgt

SEQ ID NO: 37899 - DNA, 60 bp, Artificial
  Synthetic oligonucleotide
ccagtaacggaaaatatgccaaaggagtttcctttgcctcagtcatgtattcttgggtta

SEQ ID NO: 37900 - DNA, 60 bp, Artificial
  Synthetic oligonucleotide
gcctagatactgtagggtttgtcattcctgatttaggatctgagaggatcgggtcatttg

SEQ ID NO: 37901 - DNA, 56 bp, Artificial
  Synthetic oligonucleotide
tttagagattgagatagacaatcctaaaaataggtttgatgaattataatcttaag

SEQ ID NO: 37902 - DNA, 60 bp, Artificial
  Synthetic oligonucleotide
cccatcaatagagcaaaggcaatcagatcagctgctttgatcgaagcatgcaaactcatg

SEQ ID NO: 37903 - DNA, 60 bp, Artificial
  Synthetic oligonucleotide
cagcttaatttaaccagtaacggaaaatatgccaaaggagtttcctttgcctcagtcatg

SEQ ID NO: 37904 - DNA, 60 bp, Artificial
  Synthetic oligonucleotide
tacaacctttacaatctccagtacaggtagacaagtaatctgtgacagtggtatcaactt

SEQ ID NO: 37905 - DNA, 60 bp, Artificial
  Synthetic oligonucleotide
gcaaaagtcattacgacctgaaggtgcttttgattttctacaacctttacaatctccagt

SEQ ID NO: 37906 - DNA, 60 bp, Artificial
  Synthetic oligonucleotide
cattaactaatgtgctaagatcaaaaacattagtgcagtgaccacagattgcaccttcat

SEQ ID NO: 37907 - DNA, 51 bp, Artificial
  Synthetic oligonucleotide
ttcagctccatcttcatgtcttcatggtcctctgcattgttcatgagtaaa

SEQ ID NO: 37908 - DNA, 60 bp, Artificial
  Synthetic oligonucleotide
agagagtgtctcaaccacttgtccgttggtggatgatggaacacttgtggtcgatggagt

SEQ ID NO: 37909 - DNA, 60 bp, Artificial
  Synthetic oligonucleotide
caggcatcaaagatcttttctgaatctgttatgcaagctaaaactgaatcagaacctttt

SEQ ID NO: 37910 - DNA, 60 bp, Artificial
  Synthetic oligonucleotide
actcccctattgagcattcacgagtatctatggtattctttattgaaccatctttatcag

SEQ ID NO: 37911 - DNA, 60 bp, Artificial
  Synthetic oligonucleotide
cagtttcagttatcaactcccctattgagcattcacgagtatctatggtattctttattg

SEQ ID NO: 37912 - DNA, 54 bp, Artificial
  Synthetic oligonucleotide
cttgtttagtgttgatagagcactgcagccatgcctgcatgcaaacaagttttt

SEQ ID NO: 37913 - DNA, 60 bp, Artificial
  Synthetic oligonucleotide
cctttatagcctttgtcatacctaacttttggtatcttgtttagtgttgatagagcactg

SEQ ID NO: 37914 - DNA, 60 bp, Artificial
  Synthetic oligonucleotide
gtggcagctcgagatataggagttcctcctctgtagacagtttcagttatcaactcccct

SEQ ID NO: 37915 - DNA, 60 bp, Artificial
  Synthetic oligonucleotide
acaatcgttctttgtggcagctcgagatataggagttcctcctctgtagacagtttcagt

SEQ ID NO: 37916 - DNA, 60 bp, Artificial
  Synthetic oligonucleotide
aaaacagaaccagtttccttttttatgtccatctctatcatgtatctatattttccatcg

SEQ ID NO: 37917 - DNA, 60 bp, Artificial
  Synthetic oligonucleotide
gtatcaacttttgctgtagagtatttgtatcgtacatcatattctacaccaacacttttt

SEQ ID NO: 37918 - DNA, 60 bp, Artificial
  Synthetic oligonucleotide
cctgaaaattctattcctttatagcctttgtcatacctaacttttggtatcttgtttagt

SEQ ID NO: 37919 - DNA, 59 bp, Artificial
  Synthetic oligonucleotide
ttttccatcgacttcagttgaaaacactaaagattgcctgggcataagattctctggag

SEQ ID NO: 37920 - DNA, 60 bp, Artificial
  Synthetic oligonucleotide
ggaacagccatccatcttcaatcgagaagaaaatgtagtgtcagacgtgtactccatgac

SEQ ID NO: 37921 - DNA, 60 bp, Artificial
  Synthetic oligonucleotide
catagctgattatggtatcttgatctatgacgtcaacttggtcaatctttaactctattg

SEQ ID NO: 37922 - DNA, 60 bp, Artificial
  Synthetic oligonucleotide
ggctatccctgtatcggcatgatgaatgttctcatcatgagcacttttgtcgtcatagct

SEQ ID NO: 37923 - DNA, 60 bp, Artificial
  Synthetic oligonucleotide
gcaacccagttgaaaggtgctttgacccagtcccatagtgtggctatccctgtatcggca

SEQ ID NO: 37924 - DNA, 60 bp, Artificial
  Synthetic oligonucleotide
aagaatgatgcaacccagttgaaaggtgctttgacccagtcccatagtgtggctatccct

SEQ ID NO: 37925 - DNA, 60 bp, Artificial
  Synthetic oligonucleotide
gacaatttgtatatataacctagtatatacaaacccacaagaacagctgaaattactaaa

SEQ ID NO: 37926 - DNA, 60 bp, Artificial
  Synthetic oligonucleotide
ctgcagaacagctccaagtaaattgatctctagatatagtggctttaacagctaatggtg

SEQ ID NO: 37927 - DNA, 52 bp, Artificial
  Synthetic oligonucleotide
aaagggaactgaaatgttttaggtggagttctccttctaggttctccatatt

SEQ ID NO: 37928 - DNA, 60 bp, Artificial
  Synthetic oligonucleotide
caaggaactgattcctgcagtcagaaccattgattcagacaacaaacttgctttaggtag

SEQ ID NO: 37929 - DNA, 60 bp, Artificial
  Synthetic oligonucleotide
aaaagtaaccagtatgtctcgcataactaacgtgcttgaaagcttcaaaaagaatgacaa

SEQ ID NO: 37930 - DNA, 60 bp, Artificial
  Synthetic oligonucleotide
tagatcggatatactccctgtaagaattttttgatttttggtaacagcaaacagcttatc

SEQ ID NO: 37931 - DNA, 60 bp, Artificial
  Synthetic oligonucleotide
gatttagatccaactgcagaacagctccaagtaaattgatctctagatatagtggcttta

SEQ ID NO: 37932 - DNA, 60 bp, Artificial
  Synthetic oligonucleotide
tgctcggtgtcttcttaaacatctcttttggcatgtcaatgataacctttagtttcccca

SEQ ID NO: 37933 - DNA, 60 bp, Artificial
  Synthetic oligonucleotide
gttcgtcaattttaaaatacacagatctgtctccagaagctgtctggaaatccatggctt

SEQ ID NO: 37934 - DNA, 60 bp, Artificial
  Synthetic oligonucleotide
cattaagagggctctatcctggcctctcacttatccaactttgaaattctttgagttctc

SEQ ID NO: 37935 - DNA, 60 bp, Artificial
  Synthetic oligonucleotide
gctcgcgagttgcccgtaatgagcacttctccggaccagttgaaaagagtgactgtggac

SEQ ID NO: 37936 - DNA, 60 bp, Artificial
  Synthetic oligonucleotide
tgctcgcgagttgcccgtaatgagcacttctccggaccagttgaaaagagtgactgtgga

SEQ ID NO: 37937 - DNA, 60 bp, Artificial
  Synthetic oligonucleotide
tatgctcgcgagttgcccgtaatgagcacttctccggaccagttgaaaagagtgactgtg

SEQ ID NO: 37938 - DNA, 60 bp, Artificial
  Synthetic oligonucleotide
gtggtgtgagccaaacattaagagggctctatcctggcctctcacttatccaactctgaa

SEQ ID NO: 37939 - DNA, 60 bp, Artificial
  Synthetic oligonucleotide
tgtgaaccaaacattaagagggctctatcctggcctctcacttatccaactttgaaattc

SEQ ID NO: 37940 - DNA, 60 bp, Artificial
  Synthetic oligonucleotide
caaagaatttcagagttggataagtgagaggccaggatagagccctcttaatgtttggct

SEQ ID NO: 37941 - DNA, 60 bp, Artificial
  Synthetic oligonucleotide
ccaaacattaagagggctctatcctggcctctcacttatccaactttgaaattctttgag

SEQ ID NO: 37942 - DNA, 60 bp, Artificial
  Synthetic oligonucleotide
gctcgcgagttgcccgtaatgagcacttctccggaccagttgaaaagagtgaccgtggac

SEQ ID NO: 37943 - DNA, 60 bp, Artificial
  Synthetic oligonucleotide
gcactaaagtggtgtgagccaaacattaagagggctctatcctggcctctcacttatcca

SEQ ID NO: 37944 - DNA, 60 bp, Artificial
  Synthetic oligonucleotide
cagagttggataagtgagaggccaggatagagccctcttaatgtttggctcacaccactt

SEQ ID NO: 37945 - DNA, 60 bp, Artificial
  Synthetic oligonucleotide
ctattatgctcgcgagttgcccgtaatgagcacttctccggaccagttgaaaagagtgac

SEQ ID NO: 37946 - DNA, 60 bp, Artificial
  Synthetic oligonucleotide
aatgagcacttctccggaccagttgaaaagagtgaccgtggactttgtcccattcggtaa

SEQ ID NO: 37947 - DNA, 60 bp, Artificial
  Synthetic oligonucleotide
gcacttctccggaccagttgaaaagagtgaccgtggactttgtcccattcggtaagcgtc

SEQ ID NO: 37948 - DNA, 60 bp, Artificial
  Synthetic oligonucleotide
gtccacggtcactcttttcaactggtccggagaagtgctcattacgggcaactcgcgagc

SEQ ID NO: 37949 - DNA, 60 bp, Artificial
  Synthetic oligonucleotide
ccaaatgggacaaagtccacggtcactcttttcaactggtccggagaagtgctcattacg

SEQ ID NO: 37950 - DNA, 60 bp, Artificial
  Synthetic oligonucleotide
ctgatgatgctttattcatttatggttatttagagccagtagatgatggaacagaatggt

SEQ ID NO: 37951 - DNA, 60 bp, Artificial
  Synthetic oligonucleotide
gtttactacaaatggagaaatacagagagatccatgagagagtaaaggaagcagtcccag

SEQ ID NO: 37952 - DNA, 60 bp, Artificial
  Synthetic oligonucleotide
ctgcaatgacaatgcaatcaccacttcaattgaggtttcggatgcaggcaaagcaacaca

SEQ ID NO: 37953 - DNA, 60 bp, Artificial
  Synthetic oligonucleotide
tcccagcatagtcactgcaatgacaatgcaatcaccacttcaattaagatttcgaatgca

SEQ ID NO: 37954 - DNA, 60 bp, Artificial
  Synthetic oligonucleotide
ttcggatgcaggcaaagcaacacatgaaagtatgtaagttagatggtgaatgggtaacat

SEQ ID NO: 37955 - DNA, 60 bp, Artificial
  Synthetic oligonucleotide
ctgcaatgacaatgcaatcaccacttcaattaagatttcgaatgcaggcaaagcaacaca

SEQ ID NO: 37956 - DNA, 60 bp, Artificial
  Synthetic oligonucleotide
tccagttaatattatcctcatgactcggtatatgtccaaacattataatttccatgcaaa

SEQ ID NO: 37957 - DNA, 60 bp, Artificial
  Synthetic oligonucleotide
cctcatgactcggtatatgtccaaacattataatttccatgcaaagcagttatctctcat

SEQ ID NO: 37958 - DNA, 60 bp, Artificial
  Synthetic oligonucleotide
gatacatgtccaaacattataatttccatgcaaagcagttatctcttatggatccatacg

SEQ ID NO: 37959 - DNA, 60 bp, Artificial
  Synthetic oligonucleotide
gggacatcaacaaatcaggccgttcaggaatagcacttgttgcaacaggccttgccaagc

SEQ ID NO: 37960 - DNA, 60 bp, Artificial
  Synthetic oligonucleotide
gataccaaagggcactggagacatcctagttgactgttcaggtggacagcaacatttctt

SEQ ID NO: 37961 - DNA, 60 bp, Artificial
  Synthetic oligonucleotide
gaatatataaaaactgaagccatagtgtgtgttgagctcaccagccaagaaagacagtgc

SEQ ID NO: 37962 - DNA, 60 bp, Artificial
  Synthetic oligonucleotide
tgtcaacttcatgaggaaggtcttacgccagagatatgggcagctgactgcagaagaatg

SEQ ID NO: 37963 - DNA, 60 bp, Artificial
  Synthetic oligonucleotide
tgtcaacttcatgaggaaggtcttacgccagaggtatggacagctgactgcagaggaatg

SEQ ID NO: 37964 - DNA, 60 bp, Artificial
  Synthetic oligonucleotide
ctgtctaaccatataacttagatttctcctctgtatgatgtcttaacatcttgcggagtc

SEQ ID NO: 37965 - DNA, 60 bp, Artificial
  Synthetic oligonucleotide
atcattctaccaatcatacctcagacgcacacaatcaatgggaatacaactggaccagag

SEQ ID NO: 37966 - DNA, 60 bp, Artificial
  Synthetic oligonucleotide
cattctaccaatcatacctcagacgcacacaatcaatgggaatacaactggaccagagga

SEQ ID NO: 37967 - DNA, 60 bp, Artificial
  Synthetic oligonucleotide
cattctatcaatcatacctcagacgcacacaatcaatgggaatacaactggaccagagaa

SEQ ID NO: 37968 - DNA, 60 bp, Artificial
  Synthetic oligonucleotide
cattctatcaatcatacctcagacgcacacaatcaatgggaatacaactggaccagagga

SEQ ID NO: 37969 - DNA, 60 bp, Artificial
  Synthetic oligonucleotide
atcattctatcaatcatacctcagacgcacacaatcaatgggaatacaactggaccagag

SEQ ID NO: 37970 - DNA, 60 bp, Artificial
  Synthetic oligonucleotide
gaccaggatacggttcaaggatgattcatcttttgaagaggtcaatggcatccgaaagcc

SEQ ID NO: 37971 - DNA, 50 bp, Artificial
  Synthetic oligonucleotide
tcaaggatgattcatcttttgaagaggtcaatggcatccgaaagcccaag

SEQ ID NO: 37972 - DNA, 60 bp, Artificial
  Synthetic oligonucleotide
cactgttcacagatattgctactccacactcagtgtgggtatttgcatgtgcaccagatc

SEQ ID NO: 37973 - DNA, 60 bp, Artificial
  Synthetic oligonucleotide
tgttagttagatggattttctgggcttgtgccaattatttaatcatctcaggactctcta

SEQ ID NO: 37974 - DNA, 60 bp, Artificial
  Synthetic oligonucleotide
gttagatggattttctgggcttgtgccaatcatttaatcatctcaggactctctaatgtg

SEQ ID NO: 37975 - DNA, 60 bp, Artificial
  Synthetic oligonucleotide
gccctttcctgccgaagccaaaggctccatctgaagcattcatggccactaacaaggcct

SEQ ID NO: 37976 - DNA, 60 bp, Artificial
  Synthetic oligonucleotide
ggacagactgctgattggaggtctattggggcttatatactaggctttgcaatcccaatc

SEQ ID NO: 37977 - DNA, 60 bp, Artificial
  Synthetic oligonucleotide
gttagatggattttctgggcttgtgccaattatttaatcatctcaggactctctaatgtg

SEQ ID NO: 37978 - DNA, 60 bp, Artificial
  Synthetic oligonucleotide
gggcagactgccgactggaggtctattggagcttatatactaggctttgcaatcccaatt

SEQ ID NO: 37979 - DNA, 60 bp, Artificial
  Synthetic oligonucleotide
gttggttagatggattttctgggcttgtgccaatcatttaatcatctcaggactctctaa

SEQ ID NO: 37980 - DNA, 60 bp, Artificial
  Synthetic oligonucleotide
cggtaataaggggtcttctaagtctgccagaaaggatgaaggtcctttagtttcacttgc

SEQ ID NO: 37981 - DNA, 57 bp, Artificial
  Synthetic oligonucleotide
ataaggggtcttctaagtctgccagaaaggatgaaggtcctttagtttcacttgcta

SEQ ID NO: 37982 - DNA, 60 bp, Artificial
  Synthetic oligonucleotide
caaggggtcttctaagtctgccagaaaggatgaaggtcctttagtttcacttgctaaaca

SEQ ID NO: 37983 - DNA, 57 bp, Artificial
  Synthetic oligonucleotide
ggcactccatcatgggtcaattgtggatgaccaaacattttcacaggatcattcaag

SEQ ID NO: 37984 - DNA, 57 bp, Artificial
  Synthetic oligonucleotide
ggcactccatcacgagtcaattgtgggtgaccaaacattttcacaggatcattcaag

SEQ ID NO: 37985 - DNA, 57 bp, Artificial
  Synthetic oligonucleotide
ggcactccatcatgagtcagttgtgggtgaccaaacattttcacaggatcattcaag

SEQ ID NO: 37986 - DNA, 57 bp, Artificial
  Synthetic oligonucleotide
ggcactccatcatgggtcaattgcggatgaccaaacattttcacaggatcattcaag

SEQ ID NO: 37987 - DNA, 60 bp, Artificial
  Synthetic oligonucleotide
aggtaagaccaacctacggcgcaggagaaatcactgtactggtagaagttgctgacatgg

SEQ ID NO: 37988 - DNA, 53 bp, Artificial
  Synthetic oligonucleotide
gctaggcatgtgacacaatgccctaagcggaaggagagagtagaagaaactga

SEQ ID NO: 37989 - DNA, 60 bp, Artificial
  Synthetic oligonucleotide
cctcagacgggcttgctaggcatgtgacacaatgccctaagcggaaggagaaagtagaag

SEQ ID NO: 37990 - DNA, 60 bp, Artificial
  Synthetic oligonucleotide
atcaattgaggcaccatggggagcaataaatgttcagtcaacctacaaaccaactgtatc

SEQ ID NO: 37991 - DNA, 60 bp, Artificial
  Synthetic oligonucleotide
gtgttgctccgatgaaatacaaaaccgccaagtataccaatctagtgtgcattatcttcc

SEQ ID NO: 37992 - DNA, 60 bp, Artificial
  Synthetic oligonucleotide
gcttattaccaattcatccttttagcccatgtccaacaatatgtatctgcggtatggttt

SEQ ID NO: 37993 - DNA, 60 bp, Artificial
  Synthetic oligonucleotide
ttgtgatctagattgctacccttattattcagccaacctagctgactgctcttggagtga

SEQ ID NO: 37994 - DNA, 60 bp, Artificial
  Synthetic oligonucleotide
cggatatgttatgtattttgtgcttattgcggaatggtgcatgaaaagaagggcctagtt

SEQ ID NO: 37995 - DNA, 60 bp, Artificial
  Synthetic oligonucleotide
gatattcttggaacttttatggtattcgacgtaaatcatgagggcatcttagcacctaag

SEQ ID NO: 37996 - DNA, 60 bp, Artificial
  Synthetic oligonucleotide
tgttgaaacctgaaaggtctattcgactcctcaaaacaggcgagtgtaaaatagcagggg

SEQ ID NO: 37997 - DNA, 60 bp, Artificial
  Synthetic oligonucleotide
gacaccagcagggccagacagcatacagtggagaacatatattcaaaataacaacttgca

SEQ ID NO: 37998 - DNA, 60 bp, Artificial
  Synthetic oligonucleotide
gaccactagcaagatatattgtcgcaatacttaaagaaaatgacaaagtgtataaactgg

SEQ ID NO: 37999 - DNA, 60 bp, Artificial
  Synthetic oligonucleotide
gagcagttggaagttgaattttgtgtttcagagcctacaggtacaatgtgcaataccatc

SEQ ID NO: 38000 - DNA, 60 bp, Artificial
  Synthetic oligonucleotide
cgtgtaaaatcagcatgacttcaaatggtgtttatcagtgtccaatagtgtctacctgtg

SEQ ID NO: 38001 - DNA, 60 bp, Artificial
  Synthetic oligonucleotide
atgcatgctttaggcaacataaatcatgtattcgttacttcaaggggtcaatcttacccg

SEQ ID NO: 38002 - DNA, 60 bp, Artificial
  Synthetic oligonucleotide
caaccctcaatgtggttcagtccagtcatttgatggtaaactctatggtgttgggaatcc

SEQ ID NO: 38003 - DNA, 60 bp, Artificial
  Synthetic oligonucleotide
gctaaccttctctcgcgagcataccagcacctggggttgtgaagaatggggttgcttagc

SEQ ID NO: 38004 - DNA, 60 bp, Artificial
  Synthetic oligonucleotide
gctgtaggatgaaagattctgggaactgcaatgttgcaactaacagatggccagtgatac

SEQ ID NO: 38005 - DNA, 60 bp, Artificial
  Synthetic oligonucleotide
gactgcacaggtcaggcttcagacagataccacaaatcattttgaaattgcaggcactac

SEQ ID NO: 38006 - DNA, 60 bp, Artificial
  Synthetic oligonucleotide
ctgaatcatatgtttgcagcgcagattgtaccataggtgtagacaaagagactgcacagg

SEQ ID NO: 38007 - DNA, 60 bp, Artificial
  Synthetic oligonucleotide
actccatactgaatcatatgtttgcagcgcagattgtaccataggtgtagacaaagagac

SEQ ID NO: 38008 - DNA, 60 bp, Artificial
  Synthetic oligonucleotide
tcgcaataaggaaatggctagtctctgattggcatgattgcaggcctaagaagatcgttg

SEQ ID NO: 38009 - DNA, 60 bp, Artificial
  Synthetic oligonucleotide
caacaatgctctcaaaaaagtccaatgatgacttgattgcatacacaaataagataaaaa

SEQ ID NO: 38010 - DNA, 60 bp, Artificial
  Synthetic oligonucleotide
cccaattctcagataactcaggatacagtcagacaacatggagagtgtacttaaggtctc

SEQ ID NO: 38011 - DNA, 60 bp, Artificial
  Synthetic oligonucleotide
gtgactattatacccaattctcagataactcaggatacagtcagacaacatggagagtgt

SEQ ID NO: 38012 - DNA, 60 bp, Artificial
  Synthetic oligonucleotide
tgaagcatctatggcccttgtcgacgcaaagcctatcatagaactagcaccagttgatca

SEQ ID NO: 38013 - DNA, 60 bp, Artificial
  Synthetic oligonucleotide
gtgtggcacgcattgtgtctgtggtgcccgctatgatacttcagatagaatgaaactgca

SEQ ID NO: 38014 - DNA, 60 bp, Artificial
  Synthetic oligonucleotide
cgcaatgtactgtgaagaatgtgacatgtatcatgacaagtctgggttgaaaggacatgg

SEQ ID NO: 38015 - DNA, 60 bp, Artificial
  Synthetic oligonucleotide
cagttgatcagacagcatatataagagaaaaagatgaaaggtgtaaaacttggatgtgta

SEQ ID NO: 38016 - DNA, 60 bp, Artificial
  Synthetic oligonucleotide
ggcccttgttgacgcaaagcctatcatagaactagcaccagttgatcagacagcatatat

SEQ ID NO: 38017 - DNA, 60 bp, Artificial
  Synthetic oligonucleotide
ccaagaaggcgatgggactaaaagctgtagaatgaaagattctgggaactgcaatgttgc

SEQ ID NO: 38018 - DNA, 60 bp, Artificial
  Synthetic oligonucleotide
ctatggcccttgtcgacgcaaagcctatcatagaactagcaccagttgatcagacagcat

SEQ ID NO: 38019 - DNA, 60 bp, Artificial
  Synthetic oligonucleotide
gccctgctagttacagacttgaagaagacagcggcactgtgactataattgattacaaaa

SEQ ID NO: 38020 - DNA, 51 bp, Artificial
  Synthetic oligonucleotide
caaaaagattttaggaacaatcaagatgaaggcaattttaggagatgtcaa

SEQ ID NO: 38021 - DNA, 60 bp, Artificial
  Synthetic oligonucleotide
gattctgggaactgcaatgttgcaactaacagatggccagtgatacaatgcgagaatgac

SEQ ID NO: 38022 - DNA, 60 bp, Artificial
  Synthetic oligonucleotide
aattgcaggcactactgtgaagtcaggatggttcaaaagcacgacatatataactcttga

SEQ ID NO: 38023 - DNA, 60 bp, Artificial
  Synthetic oligonucleotide
atgggactaaaagctgtaggatgaaagattctgggaactgcaatgttgcaactaacagat

SEQ ID NO: 38024 - DNA, 60 bp, Artificial
  Synthetic oligonucleotide
tgcctatattcatccccatagcatatatatacggtataatttacaataagtcgtgcaaaa

SEQ ID NO: 38025 - DNA, 60 bp, Artificial
  Synthetic oligonucleotide
gcaaattccttcaaagccctgctagttacagacttgaagaagacagtggtactgtgacta

SEQ ID NO: 38026 - DNA, 60 bp, Artificial
  Synthetic oligonucleotide
tcattttgaaattgcaggcactactgtgaagtcaggatggttcaagagcacgacatatat

SEQ ID NO: 38027 - DNA, 60 bp, Artificial
  Synthetic oligonucleotide
ggtcactattgcttaagccctggatgtactactgtccggtaccctattaatccaaagcac

SEQ ID NO: 38028 - DNA, 60 bp, Artificial
  Synthetic oligonucleotide
agagacacccttagaaagcatgaagatgcatataagagagagatgaagattagatagggg

SEQ ID NO: 38029 - DNA, 60 bp, Artificial
  Synthetic oligonucleotide
ctgttcaaacatctctacctccgtacacttatatatatgcacgtagcatatatataagtg

SEQ ID NO: 38030 - DNA, 60 bp, Artificial
  Synthetic oligonucleotide
tacacacctctacctccgtacacttatatatatgcacgtagcatatatataagtgtacga

SEQ ID NO: 38031 - DNA, 60 bp, Artificial
  Synthetic oligonucleotide
cgcttactgcggaatggtgcatgaaaagaagggcctaattttactagataatttcacatc

SEQ ID NO: 38032 - DNA, 60 bp, Artificial
  Synthetic oligonucleotide
atggaatgagttaagcttgtgggggaaatatgttttgcttacattagccataattatcag

SEQ ID NO: 38033 - DNA, 60 bp, Artificial
  Synthetic oligonucleotide
ggggtgttacactatcaatagagtgaagtcattcaagctgtgcgaaaacagtgcaacagg

SEQ ID NO: 38034 - DNA, 60 bp, Artificial
  Synthetic oligonucleotide
tggggtgttacactatcaatagagtgaagtcattcaagctgtgcgaaaacagtgcaacag

SEQ ID NO: 38035 - DNA, 60 bp, Artificial
  Synthetic oligonucleotide
gctgcttacctcagatttgagagtgactacgggtcccaattggagtccgctatcgttcga

SEQ ID NO: 38036 - DNA, 60 bp, Artificial
  Synthetic oligonucleotide
tacaaaccaactgtatcaactgcaaacatagcacttagttggagctcagtggaacacaga

SEQ ID NO: 38037 - DNA, 60 bp, Artificial
  Synthetic oligonucleotide
cggcacaaccaagtgttgatcttacatttggtggcatcaagtttacactggttaataacc

SEQ ID NO: 38038 - DNA, 60 bp, Artificial
  Synthetic oligonucleotide
agacggcacaaccaagtgttgatcttacatttggtggcatcaaatttacactggttaata

SEQ ID NO: 38039 - DNA, 60 bp, Artificial
  Synthetic oligonucleotide
gtctggcttgcacaggttgctatgcctgtagctctggcatctcctgtaaagtcaggattc

SEQ ID NO: 38040 - DNA, 60 bp, Artificial
  Synthetic oligonucleotide
aagtctggcttgcacaggttgctatgcctgtagctctggcatctcctgtaaagtcaggat

SEQ ID NO: 38041 - DNA, 60 bp, Artificial
  Synthetic oligonucleotide
cagtttcattgtcaccggttcaatcagcacccattggacatggaaagacaattgaggcat

SEQ ID NO: 38042 - DNA, 60 bp, Artificial
  Synthetic oligonucleotide
gaagaacttgctaaattcaacaagcttagaaacaagcttatcaattgaggcaccatgggg

SEQ ID NO: 38043 - DNA, 60 bp, Artificial
  Synthetic oligonucleotide
actggaggataaacttgcagacttcaagcgaagaatggcagatgctgtgtccaggaaaaa

SEQ ID NO: 38044 - DNA, 60 bp, Artificial
  Synthetic oligonucleotide
cgaagaagagcgaaagtaaacctagacagtagacaagtagatagtatttcttcatcttta

SEQ ID NO: 38045 - DNA, 50 bp, Artificial
  Synthetic oligonucleotide
atagaagacagccgttgcaatttaagcttgttgaagttatggaaggtctc

SEQ ID NO: 38046 - DNA, 53 bp, Artificial
  Synthetic oligonucleotide
cgcatagaagacagccgttgcaatttaagcttgttgaagttatggaaggtttt

SEQ ID NO: 38047 - DNA, 60 bp, Artificial
  Synthetic oligonucleotide
catagatgctggttgtactatcattgatcacattgactcaccatcatcaatctgggtctt

SEQ ID NO: 38048 - DNA, 60 bp, Artificial
  Synthetic oligonucleotide
catagatgctggttgtactatcattgattacattgactcaccatcatcaatctgggtctt

SEQ ID NO: 38049 - DNA, 60 bp, Artificial
  Synthetic oligonucleotide
gcaaagatggagacaaaggaagctcaggctgtgaggaaacacgcaatagatgctggttgt

SEQ ID NO: 38050 - DNA, 60 bp, Artificial
  Synthetic oligonucleotide
tgcaaagatggagacaaaggaagctcaggctgtgaggaaacacgcaatagatgctggttg

SEQ ID NO: 38051 - DNA, 60 bp, Artificial
  Synthetic oligonucleotide
gttgtactatcattgattacattgactcaccatcatcaatctgggtctttgctggggcac

SEQ ID NO: 38052 - DNA, 60 bp, Artificial
  Synthetic oligonucleotide
gttgtactatcattgatcacattgactcaccatcatcaatctgggtctttgctggggcac

SEQ ID NO: 38053 - DNA, 60 bp, Artificial
  Synthetic oligonucleotide
gcattgaggaatctagactttgactgtctcagtgtgcaggattacaatggcatgatagaa

SEQ ID NO: 38054 - DNA, 60 bp, Artificial
  Synthetic oligonucleotide
aataaaggctttgaggacagcaatgaatgcttaacagatctagacaggcttgttaggctc

SEQ ID NO: 38055 - DNA, 58 bp, Artificial
  Synthetic oligonucleotide
ttttgctgatgactctttccagcaaaacaggatctatatgcaccctgctgtgttgaca

SEQ ID NO: 38056 - DNA, 60 bp, Artificial
  Synthetic oligonucleotide
atcaacaagcaataacagacatttgtcaattttctgagtatacaccaaacaaggagagca

SEQ ID NO: 38057 - DNA, 60 bp, Artificial
  Synthetic oligonucleotide
cagcaagcaataacagacatttgtcaattttctgagtatacaccgaacaaagagagcatt

SEQ ID NO: 38058 - DNA, 60 bp, Artificial
  Synthetic oligonucleotide
accaagtggccaaacagcagattggtatacaattggagtttatgtgatagggcttacact

SEQ ID NO: 38059 - DNA, 60 bp, Artificial
  Synthetic oligonucleotide
caagtggccaaacagcagattggtatacaattggagtttatgtgatgggattcacacttc

SEQ ID NO: 38060 - DNA, 60 bp, Artificial
  Synthetic oligonucleotide
caagctgagttcagagccgctgtagtagtgcctttggttgaggtaaagggctgtacttgg

SEQ ID NO: 38061 - DNA, 60 bp, Artificial
  Synthetic oligonucleotide
gtgtcagaagcaaggtcatttatgagatggtaaaactagtaggtgagacaggcatggcaa

SEQ ID NO: 38062 - DNA, 60 bp, Artificial
  Synthetic oligonucleotide
agaaggtgtcaactttctcaatttgttcatgcacaataatgcaggtattaaatctgcatt

SEQ ID NO: 38063 - DNA, 60 bp, Artificial
  Synthetic oligonucleotide
tcctctgcttactaacaacaacattctacctcaacacaaaactatctcaacctaactacc

SEQ ID NO: 38064 - DNA, 60 bp, Artificial
  Synthetic oligonucleotide
ttcctctgcttactaacaacaacattctacctcaacacaaaactatctcaacctaactac

SEQ ID NO: 38065 - DNA, 60 bp, Artificial
  Synthetic oligonucleotide
ccctgctgtgttgacagccggcagaatcagtgagatgggtgtctgctttggaacagtccc

SEQ ID NO: 38066 - DNA, 60 bp, Artificial
  Synthetic oligonucleotide
catcaacaagtcaggccgatcaggaatagcacttgttgcaacaggccttgccaagctcgc

SEQ ID NO: 38067 - DNA, 60 bp, Artificial
  Synthetic oligonucleotide
ggaggaaggacataggtttccgtgtcaatgcaaacacggcagccttaagcaacaaagtcc

SEQ ID NO: 38068 - DNA, 60 bp, Artificial
  Synthetic oligonucleotide
ggaggaaggacataggtttccgtgtcaatgcaaacacggcagccttaagcaacaaggtcc

SEQ ID NO: 38069 - DNA, 60 bp, Artificial
  Synthetic oligonucleotide
gaggaaggacataggtttccgtgtcaatgcaaacacggcagccttaagcaacaaggtcct

SEQ ID NO: 38070 - DNA, 60 bp, Artificial
  Synthetic oligonucleotide
gggcatggctgcttgtccattgtttatgatgaaactgacactcagaccacatatcacgag

SEQ ID NO: 38071 - DNA, 60 bp, Artificial
  Synthetic oligonucleotide
ggggcatggctgcttgtccattgtttatgatgaaactgacactcagaccacataccacga

SEQ ID NO: 38072 - DNA, 60 bp, Artificial
  Synthetic oligonucleotide
agtgggggcatggctgcttgtccattgtttatgatgaaactgacactcagaccacatacc

SEQ ID NO: 38073 - DNA, 60 bp, Artificial
  Synthetic oligonucleotide
acgctgaaatgcatgaccttaactgcagttacaatatatgcccttattgtgcatcaagat

SEQ ID NO: 38074 - DNA, 60 bp, Artificial
  Synthetic oligonucleotide
aagcatgttaagggcagaatcaaaggcaatgttggatcttcttaacaatcacaaaagtgg

SEQ ID NO: 38075 - DNA, 60 bp, Artificial
  Synthetic oligonucleotide
gcacatttaagctaacatcaagcatgttaagggcagaatcaaaggcaatgttggatgttc

SEQ ID NO: 38076 - DNA, 60 bp, Artificial
  Synthetic oligonucleotide
acaatcttctcatctatttagttaggaagttgaatgatccgagtattgtaacagccatga

SEQ ID NO: 38077 - DNA, 60 bp, Artificial
  Synthetic oligonucleotide
taactactgaaatatgtcaagccaattcatttttgaagatgtaccacaacggaatgcagc

SEQ ID NO: 38078 - DNA, 60 bp, Artificial
  Synthetic oligonucleotide
aaacctctccgttacacactcttaaatttccgtgcaatatgtctatgtattgcacaccat

SEQ ID NO: 38079 - DNA, 60 bp, Artificial
  Synthetic oligonucleotide
taactacagaaatatgtcaagccaattcatttttgaagatgtaccacaacggaatgcagc

SEQ ID NO: 38080 - DNA, 60 bp, Artificial
  Synthetic oligonucleotide
ggtcctctgcctctcttgtctagcatgacaggtctggcaccaattatattccctctggct

SEQ ID NO: 38081 - DNA, 60 bp, Artificial
  Synthetic oligonucleotide
gaggtcctctgcctctcttgtctagcatgacaggtctggcaccaattatattccctctgg

SEQ ID NO: 38082 - DNA, 60 bp, Artificial
  Synthetic oligonucleotide
agccagagggaatataattggtgccagacctgtcatgctagacaagagaggcagaggacc

SEQ ID NO: 38083 - DNA, 60 bp, Artificial
  Synthetic oligonucleotide
atataagtacacaacatactacctcaacagactgatttcttgattgcttttcaaggagtc

SEQ ID NO: 38084 - DNA, 60 bp, Artificial
  Synthetic oligonucleotide
ggctgggtagtgaactggggtgttacactatcaatagggtgaagtcatttaagctatgcg

SEQ ID NO: 38085 - DNA, 60 bp, Artificial
  Synthetic oligonucleotide
ccgcaaaagaaagcagtcaatcagcaacatggggatgtggaagtggctagtaatagccag

SEQ ID NO: 38086 - DNA, 60 bp, Artificial
  Synthetic oligonucleotide
cctgcaccgtctgtcaggatacctagcgcgctgggcctttacccagatgcgatcaccaat

SEQ ID NO: 38087 - DNA, 60 bp, Artificial
  Synthetic oligonucleotide
ccctgcaccgtctgtcaggatacctagcgcgctgggcctttacccagatgcgatcaccaa

SEQ ID NO: 38088 - DNA, 60 bp, Artificial
  Synthetic oligonucleotide
cggctggcagaatcagtgaaatgggtgtctgctttggaacaatccctgtggccaatcccg

SEQ ID NO: 38089 - DNA, 60 bp, Artificial
  Synthetic oligonucleotide
cagctggcagaatcagtgaaatgggtgtctgctttggaacaatccctgtggccaatcccg

SEQ ID NO: 38090 - DNA, 55 bp, Artificial
  Synthetic oligonucleotide
tacagtacatgttaaaagtgatgatccagatgtagttgcagctagctcaagtctc

SEQ ID NO: 38091 - DNA, 60 bp, Artificial
  Synthetic oligonucleotide
atggatcctgaactcaggcagctagcacaatctctgattgatgcaaaggtgaaagaaatt

SEQ ID NO: 38092 - DNA, 51 bp, Artificial
  Synthetic oligonucleotide
ctgaggtgacagaaacaacaagtatagttgcatcacctagaactcatatga

SEQ ID NO: 38093 - DNA, 52 bp, Artificial
  Synthetic oligonucleotide
tctgaggtgacagaaacaacaagtatagttgcatcacctagaactcatatga

SEQ ID NO: 38094 - DNA, 60 bp, Artificial
  Synthetic oligonucleotide
aattgtttaggacgaaattttaaaataattggatatttcaaaattagttaattggctaac

SEQ ID NO: 38095 - DNA, 60 bp, Artificial
  Synthetic oligonucleotide
aattgtttaggactaaattttaaaataattggatatttcaaaattagttaattggctaac

SEQ ID NO: 38096 - DNA, 60 bp, Artificial
  Synthetic oligonucleotide
aactttccttcagaagttcgggataaagttgccataagctccggcaggcaaattgtttag

SEQ ID NO: 38097 - DNA, 60 bp, Artificial
  Synthetic oligonucleotide
aactttccttcagaaattcgggataaagttgccataagctccggcaggcaaattgtttag

SEQ ID NO: 38098 - DNA, 60 bp, Artificial
  Synthetic oligonucleotide
ccttcagaagttcgggataaagttgccataagctccggcaggcaaattgtttaggactaa

SEQ ID NO: 38099 - DNA, 60 bp, Artificial
  Synthetic oligonucleotide
ccttcagaaattcgggataaagttgccataagctccggcaggcaaattgtttaggacgaa

SEQ ID NO: 38100 - DNA, 60 bp, Artificial
  Synthetic oligonucleotide
gactattggaatctacagagtcaaaaacggaatgatggactcacagtatctgaagaaagc

SEQ ID NO: 38101 - DNA, 60 bp, Artificial
  Synthetic oligonucleotide
gactattggaatctacagagtcaaaaatggaatgatggactcacagtatctgaagaaagc

SEQ ID NO: 38102 - DNA, 60 bp, Artificial
  Synthetic oligonucleotide
tgaagaaagccttgaggcagaggtatggttcactaactgctgaaaagtggatgtcccaaa

SEQ ID NO: 38103 - DNA, 60 bp, Artificial
  Synthetic oligonucleotide
tgaagaaagccttaaggcagaggtatggttcactaactgctgaaaagtggatgtcccaaa

SEQ ID NO: 38104 - DNA, 52 bp, Artificial
  Synthetic oligonucleotide
aaaatggaatgatggactcacagtatctgaagaaagccttgaggcagaggta

SEQ ID NO: 38105 - DNA, 52 bp, Artificial
  Synthetic oligonucleotide
aaaacggaatgatggactcacagtatctgaagaaagccttaaggcagaggta

SEQ ID NO: 38106 - DNA, 60 bp, Artificial
  Synthetic oligonucleotide
aagccttgaggcagaggtatggttcactaactgctgaaaagtggatgtcccaaaagaccg

SEQ ID NO: 38107 - DNA, 60 bp, Artificial
  Synthetic oligonucleotide
aagccttaaggcagaggtatggttcactaactgctgaaaagtggatgtcccaaaagaccg

SEQ ID NO: 38108 - DNA, 60 bp, Artificial
  Synthetic oligonucleotide
ggaccagaggataattgttatgtttatggttgcctggggaaaggaagcagtggacaactt

SEQ ID NO: 38109 - DNA, 60 bp, Artificial
  Synthetic oligonucleotide
taacaaggggatgaggatcagattcaaggatgacagctcatatgaggatgtcaatggaat

SEQ ID NO: 38110 - DNA, 60 bp, Artificial
  Synthetic oligonucleotide
atacaactggaccagaggataattgttatgtttatggttgcctggggaaagaaggcagtg

SEQ ID NO: 38111 - DNA, 60 bp, Artificial
  Synthetic oligonucleotide
ctggaccagaggataattgttatgtttatggttgcctggggaaagaaggcagtggacaac

SEQ ID NO: 38112 - DNA, 60 bp, Artificial
  Synthetic oligonucleotide
caacaaggggatgaggatcagattcaaggatgacagctcatatgaggatgtcaatggaat

SEQ ID NO: 38113 - DNA, 60 bp, Artificial
  Synthetic oligonucleotide
caacaaagggatgaggatcagattcaaggatgacagctcatatgaggatgtcaatggaat

SEQ ID NO: 38114 - DNA, 60 bp, Artificial
  Synthetic oligonucleotide
gagtacttatcaggtgacagacaagtggaagagtggcctaaagcaacctgcacaggtgac

SEQ ID NO: 38115 - DNA, 57 bp, Artificial
  Synthetic oligonucleotide
aaaactcgtctgcacttcgtgcacagggtgcacagattgacactgctttcagctcat

SEQ ID NO: 38116 - DNA, 60 bp, Artificial
  Synthetic oligonucleotide
acttcgtgcacagggtgcacagattgacactgctttcagctcatactactggctctataa

SEQ ID NO: 38117 - DNA, 60 bp, Artificial
  Synthetic oligonucleotide
cttcgtgcacagggtgcacagattgacactgctttcagctcatactactggctctacaag

SEQ ID NO: 38118 - DNA, 60 bp, Artificial
  Synthetic oligonucleotide
cttggtgcacagggtgcacagattgacactgctttcagctcatactactggctctacaag

SEQ ID NO: 38119 - DNA, 60 bp, Artificial
  Synthetic oligonucleotide
gggtgcacagattgacactgctttcagctcatactactggctctacaaggccggcgcgac

SEQ ID NO: 38120 - DNA, 60 bp, Artificial
  Synthetic oligonucleotide
tttgcactactgggattagggttaatgttaagtccatagtttcaagtagccgataagata

SEQ ID NO: 38121 - DNA, 60 bp, Artificial
  Synthetic oligonucleotide
caccaacagccttatatgttgccggtgttccagaactgggtgcattttttgctattctac

SEQ ID NO: 38122 - DNA, 60 bp, Artificial
  Synthetic oligonucleotide
tacccaaaccaaaggcaccatctgaagcattcatggccaccaataaagcctacttcttga

SEQ ID NO: 38123 - DNA, 60 bp, Artificial
  Synthetic oligonucleotide
gaaccaagtggacagactgctgattggagatctattggggcatatatacttgggtttgca

SEQ ID NO: 38124 - DNA, 60 bp, Artificial
  Synthetic oligonucleotide
agccagaactagtcaatatctgaagattatgttggttgggtggattttccgggcttgtgc

SEQ ID NO: 38125 - DNA, 60 bp, Artificial
  Synthetic oligonucleotide
ctgctatattaactcacaacaacactacctcatccacaaaccctccccttttctacctca

SEQ ID NO: 38126 - DNA, 60 bp, Artificial
  Synthetic oligonucleotide
ctaggggaagggttgggtgggccatttatccattatataatctcagggtggtttaggatg

SEQ ID NO: 38127 - DNA, 60 bp, Artificial
  Synthetic oligonucleotide
gaagcttgaatttggaacagacagtacatttaaagctttctcagccatgcctaaaacctc

SEQ ID NO: 38128 - DNA, 60 bp, Artificial
  Synthetic oligonucleotide
tcaagtctcatggcaagaaagcttgaatttggaacagacagtacatttaaagctttttca

SEQ ID NO: 38129 - DNA, 58 bp, Artificial
  Synthetic oligonucleotide
aaagcttgaatttggaacagacagtacatttaaagctttctcagccatgcctaaaact

SEQ ID NO: 38130 - DNA, 60 bp, Artificial
  Synthetic oligonucleotide
cggaaatgtccttgatgtaaatgccatagacattgaagagccaagtgggcagacagcaga

SEQ ID NO: 38131 - DNA, 60 bp, Artificial
  Synthetic oligonucleotide
agagccaagtgggcagacagcagattggtatactataggagtatatgtgattggttttac

SEQ ID NO: 38132 - DNA, 60 bp, Artificial
  Synthetic oligonucleotide
aacctactgacccaactgggattgaacctgatgaccacctcaaagaaagatcaagtctca

SEQ ID NO: 38133 - DNA, 60 bp, Artificial
  Synthetic oligonucleotide
tcaagtctcagatacggaaatgtccttgatgtaaatgccatagacattgaagagccaagt

SEQ ID NO: 38134 - DNA, 60 bp, Artificial
  Synthetic oligonucleotide
cccattatattaaaggctctgtatatgttatcaacaaggggaagacagactgtgaaagag

SEQ ID NO: 38135 - DNA, 60 bp, Artificial
  Synthetic oligonucleotide
aggggaagacagactgtgaaagagaataaaggaacacgtatacgatttaaagatgacaca

SEQ ID NO: 38136 - DNA, 60 bp, Artificial
  Synthetic oligonucleotide
gtgggcagacagcagattggtatactataggagtatatgtgattggttttacacttccca

SEQ ID NO: 38137 - DNA, 60 bp, Artificial
  Synthetic oligonucleotide
ttggttttacacttcccattatattaaaggctctgtatatgttatcaacaaggggaagac

SEQ ID NO: 38138 - DNA, 60 bp, Artificial
  Synthetic oligonucleotide
ggaagacagactgtgaaagagaataaaggaacacgtatacgatttaaagatgacacatcc

SEQ ID NO: 38139 - DNA, 60 bp, Artificial
  Synthetic oligonucleotide
agatgacacatcctttgaagacataaatggtatcagacgaccgaaacacctatatgtgtc

SEQ ID NO: 38140 - DNA, 60 bp, Artificial
  Synthetic oligonucleotide
ggtaggtattagtttatagtcaattttattatttagtgggccccaaatggaaactgagct

SEQ ID NO: 38141 - DNA, 60 bp, Artificial
  Synthetic oligonucleotide
ggtttattaactaatgaactaatcagggtttaactggaagtaagggtttgatattaatta

SEQ ID NO: 38142 - DNA, 60 bp, Artificial
  Synthetic oligonucleotide
atattaattattcctaatattgaatgtaatagactactaatgacagttatgaatgtaacc

SEQ ID NO: 38143 - DNA, 60 bp, Artificial
  Synthetic oligonucleotide
gaatgtaaccatgtagacataatccagatatatatgtgatactatgttattactcaggtt

SEQ ID NO: 38144 - DNA, 60 bp, Artificial
  Synthetic oligonucleotide
tactcaggttgtttaggtaggtattagtttatagtcaattttattatttagtgggcccca

SEQ ID NO: 38145 - DNA, 60 bp, Artificial
  Synthetic oligonucleotide
caatcatatctgaggcgaactcaatccatggggattcagctggaccaaagaattattctt

SEQ ID NO: 38146 - DNA, 58 bp, Artificial
  Synthetic oligonucleotide
atcatatctgaggcgaactcaatccatggggattcagctggaccaaagaattattctt

SEQ ID NO: 38147 - DNA, 60 bp, Artificial
  Synthetic oligonucleotide
tatatgtgtcaatgccgactgcccaatcgactatgaaggcagaggagttgacccctggtc

SEQ ID NO: 38148 - DNA, 60 bp, Artificial
  Synthetic oligonucleotide
tgaagacataaatggtatcagacgaccgaaacacctatatgtgtcaatgccgactgccca

SEQ ID NO: 38149 - DNA, 60 bp, Artificial
  Synthetic oligonucleotide
acccctggtcgattccgcaccatagtatgcggtttattcccaacacaaattcaagtccgc

SEQ ID NO: 38150 - DNA, 60 bp, Artificial
  Synthetic oligonucleotide
gccgactgcccaatcgactatgaaggcagaggagttgacccctggtcgattccgcaccat

SEQ ID NO: 38151 - DNA, 60 bp, Artificial
  Synthetic oligonucleotide
gggctgagaggataagggagtttatggaaaaggaatgcccctttataaagccagagctta

SEQ ID NO: 38152 - DNA, 60 bp, Artificial
  Synthetic oligonucleotide
cccctggtcgattccgcaccatagtatgcggtttattcccaacacaaattcaagtccgca

SEQ ID NO: 38153 - DNA, 60 bp, Artificial
  Synthetic oligonucleotide
actatgcagcatcaggtgaccctacatcccctgataatattgaagcacctaatgcaccat

SEQ ID NO: 38154 - DNA, 54 bp, Artificial
  Synthetic oligonucleotide
ccagagcttaaaccagggacaaatgcacaagaagctgagttcttaaaaaagaat

SEQ ID NO: 38155 - DNA, 60 bp, Artificial
  Synthetic oligonucleotide
aatgcaccatgggtattttcatgtgccccggatcgatgcccaccaacatgcatttatgtt

SEQ ID NO: 38156 - DNA, 60 bp, Artificial
  Synthetic oligonucleotide
gcagcatcaggtgaccctacatcccctgataatattgaagcacctaatgcaccatgggta

SEQ ID NO: 38157 - DNA, 60 bp, Artificial
  Synthetic oligonucleotide
gtttaccatagagacagttagttactaacatgcagatgtgtattatcagggattagaatg

SEQ ID NO: 38158 - DNA, 53 bp, Artificial
  Synthetic oligonucleotide
acttccacctaggtgatgacatggaccctgagcttcgaggtcttgcacaggca

SEQ ID NO: 38159 - DNA, 60 bp, Artificial
  Synthetic oligonucleotide
gggttgatggtctttgagaattggatcatgaacaagcagtgagcttgggttatctcagac

SEQ ID NO: 38160 - DNA, 60 bp, Artificial
  Synthetic oligonucleotide
gacaccaaagaccccctgatttttttcgtcatgtccaacataaactattatgctcgcgag

SEQ ID NO: 38161 - DNA, 60 bp, Artificial
  Synthetic oligonucleotide
gggacaccaaagaccccctgaattttttcgtcatgtccaacataaactattatgctcgcg

SEQ ID NO: 38162 - DNA, 60 bp, Artificial
  Synthetic oligonucleotide
gggacaccaaagaccccctgatttttttcgtcatgtccaacataaactattatgctcgcg

SEQ ID NO: 38163 - DNA, 60 bp, Artificial
  Synthetic oligonucleotide
tggtctttgagaattggatcatgaacaagcagtgagcttgggttatctcagacaatacat

SEQ ID NO: 38164 - DNA, 60 bp, Artificial
  Synthetic oligonucleotide
cattaacagacagggaagggcttgcagcatcaatccaggccaagattgatgaactgaaaa

SEQ ID NO: 38165 - DNA, 60 bp, Artificial
  Synthetic oligonucleotide
gttgtcccgatacttctgaaggccttatatatgctcacaacaagaggaaggcagacaacc

SEQ ID NO: 38166 - DNA, 60 bp, Artificial
  Synthetic oligonucleotide
gggaatcattatatcagggtaggggtacatttatgggtgggaatcattattcaaagggtg

SEQ ID NO: 38167 - DNA, 60 bp, Artificial
  Synthetic oligonucleotide
agattggagtgaccgtattgagcagtggttaagtgaaccttgtaagctactcccggacac

SEQ ID NO: 38168 - DNA, 60 bp, Artificial
  Synthetic oligonucleotide
ccaggtaggtacagaacagcaatctgtggactttatcctgcacagatcaaagccagacaa

SEQ ID NO: 38169 - DNA, 60 bp, Artificial
  Synthetic oligonucleotide
agaggaaggcagacaaccaaagataacaaagggaccaggattcgattcaaggatgacagc

SEQ ID NO: 38170 - DNA, 60 bp, Artificial
  Synthetic oligonucleotide
ctctttatggttgcctggggtaaagaggctgtggataatttccaccttggagatgatatg

SEQ ID NO: 38171 - DNA, 60 bp, Artificial
  Synthetic oligonucleotide
gtaagctactcccggacacagcagcagtaagccttcatggaggccctgcaacaaacaggg

SEQ ID NO: 38172 - DNA, 60 bp, Artificial
  Synthetic oligonucleotide
acgggatcccactggagtagaacctggagaccatctaaaagagagatcaatgctcagtta

SEQ ID NO: 38173 - DNA, 60 bp, Artificial
  Synthetic oligonucleotide
tcaatccaggccaagattgatgaactgaaaaggcagctagcggataggattgcaactgga

SEQ ID NO: 38174 - DNA, 60 bp, Artificial
  Synthetic oligonucleotide
ggtgggaatcattattcaaagggtgggtcagttaatctgttgcgggtgggtttaggttca

SEQ ID NO: 38175 - DNA, 53 bp, Artificial
  Synthetic oligonucleotide
tatggaaacaaaagaatcaaaggccatacgtcaacatgctgaatctgcaggtt

SEQ ID NO: 38176 - DNA, 60 bp, Artificial
  Synthetic oligonucleotide
atcgatatgggtttttgccggagcaccagatcgctgtccaccgacatgcctgtttattgc

SEQ ID NO: 38177 - DNA, 60 bp, Artificial
  Synthetic oligonucleotide
gcagggattgctgaacttggcgcattcttctccattttacaggacatgcgaaacacaatt

SEQ ID NO: 38178 - DNA, 60 bp, Artificial
  Synthetic oligonucleotide
agaccctagggatgctgcactggcaaccaatcgagcctatttcataacacgtcaattaca

SEQ ID NO: 38179 - DNA, 60 bp, Artificial
  Synthetic oligonucleotide
ttcatcctatgaggaagtcaatggaatacgtaagccaagacacctgtatgtttctatgcc

SEQ ID NO: 38180 - DNA, 60 bp, Artificial
  Synthetic oligonucleotide
tgacctagaagaaccgaacggccagacagctgattggaagtctattgggctatatatttt

SEQ ID NO: 38181 - DNA, 60 bp, Artificial
  Synthetic oligonucleotide
ttaagatatggtaatgtccttgatgtaaactccattgacctagaagaaccgaacggccag

SEQ ID NO: 38182 - DNA, 60 bp, Artificial
  Synthetic oligonucleotide
gtggatattaactcaacttatattcagggcattattgtaaccagggtaatgggcaccaat

SEQ ID NO: 38183 - DNA, 60 bp, Artificial
  Synthetic oligonucleotide
tttgttaagtccttagagtcatgttaagtctttagagttttgttaagttttgttaagtac

SEQ ID NO: 38184 - DNA, 60 bp, Artificial
  Synthetic oligonucleotide
ttgcactaccaattatccttaaggccttgtacatgttatctaccaggggccgtcagacaa

SEQ ID NO: 38185 - DNA, 60 bp, Artificial
  Synthetic oligonucleotide
gcaccagatcgttgtccacccacagcattatatgtggcagggatgccagagctaggcgca

SEQ ID NO: 38186 - DNA, 60 bp, Artificial
  Synthetic oligonucleotide
aaaataatcatcctgtacatgagccattgggggagagaggctgtgaatcactttcatctt

SEQ ID NO: 38187 - DNA, 60 bp, Artificial
  Synthetic oligonucleotide
aaagattggatggagaggattgatgaatttttggctgctcgctgtccatttttacctgag

SEQ ID NO: 38188 - DNA, 60 bp, Artificial
  Synthetic oligonucleotide
ctaccaggggccgtcagacaatcaaggaaaacaaggggacaagaattcgattcaaagatg

SEQ ID NO: 38189 - DNA, 60 bp, Artificial
  Synthetic oligonucleotide
acccctggcaggttccgtacaattgcttgtgggttgtttccagctcaagtcaaggctaga

SEQ ID NO: 38190 - DNA, 60 bp, Artificial
  Synthetic oligonucleotide
cactatattcgcagatattgccactcctcactcagtctgggtttttgcatgtgcaccaga

SEQ ID NO: 38191 - DNA, 60 bp, Artificial
  Synthetic oligonucleotide
tgatatggatcctgaactcagggaacttgcccagacccttgtggacatcaaggtcaggga

SEQ ID NO: 38192 - DNA, 60 bp, Artificial
  Synthetic oligonucleotide
tcgtcaagctatttgaagttcaaaaaacagggttcaacattcaggacatggacatagtgg

SEQ ID NO: 38193 - DNA, 59 bp, Artificial
  Synthetic oligonucleotide
agttcctggcgagattgtaatgtctgtcaaagagatgctgtcagacatgattcggagaa

SEQ ID NO: 38194 - DNA, 52 bp, Artificial
  Synthetic oligonucleotide
aaaacagggttcaacattcaggacatggacatagtggcctctgagcacttgc

SEQ ID NO: 38195 - DNA, 60 bp, Artificial
  Synthetic oligonucleotide
aattcagaaaacagggttcaacattcaggacatggacatagtggcctctgagcacttgct

SEQ ID NO: 38196 - DNA, 60 bp, Artificial
  Synthetic oligonucleotide
gtcaagctgtttgaaatccagaaaacagggttcaacattcaggacatggacatagtggcc

SEQ ID NO: 38197 - DNA, 60 bp, Artificial
  Synthetic oligonucleotide
tgataaagaaaaggactcaatcttttctaatgctctggtggaggcaacacgattctgtgc

SEQ ID NO: 38198 - DNA, 60 bp, Artificial
  Synthetic oligonucleotide
ggcccttgctacagatgataaagaaaaggactcaatcttttctaatgctctggtggaggc

SEQ ID NO: 38199 - DNA, 60 bp, Artificial
  Synthetic oligonucleotide
cgtgccgcagtcgcccgattgtactttgaagaagcaagatggagaaccagatcaaggcaa

SEQ ID NO: 38200 - DNA, 60 bp, Artificial
  Synthetic oligonucleotide
cgtgccgcagtcgcccgattgtactttgaagaagcaagatggagaatcagatcaaggcaa

SEQ ID NO: 38201 - DNA, 60 bp, Artificial
  Synthetic oligonucleotide
tctcaaagacaaacgtgccgcagtcgcccgattgtactttgaagaagcaagatggagaac

SEQ ID NO: 38202 - DNA, 60 bp, Artificial
  Synthetic oligonucleotide
tctcaaagacaaacgtgccgcagtcgcccgattgtactttgaagaagcaagatggagaat

SEQ ID NO: 38203 - DNA, 60 bp, Artificial
  Synthetic oligonucleotide
gagtgtgagatcattgcggcccggatttccagactttagcttgtacttgctgatcaagtc

SEQ ID NO: 38204 - DNA, 60 bp, Artificial
  Synthetic oligonucleotide
cggcaattcttgagagtgtgagatcattgcggcccggatttccagactttagcttgtact

SEQ ID NO: 38205 - DNA, 60 bp, Artificial
  Synthetic oligonucleotide
gctacacagctgatgaggatgggaggaggcatgggattagacgactctctactcttctct

SEQ ID NO: 38206 - DNA, 60 bp, Artificial
  Synthetic oligonucleotide
gtgattttgctacacagctgatgaggatgggaggaggcatgggattagacgactctctac

SEQ ID NO: 38207 - DNA, 60 bp, Artificial
  Synthetic oligonucleotide
aagccttgagctggcctcttgggtatccttccctaaagtttttttatcactcgcacgttg

SEQ ID NO: 38208 - DNA, 60 bp, Artificial
  Synthetic oligonucleotide
gacttgtctacgatggtgtgagcctaatattaagaaagccttgagctggcctcttgggta

SEQ ID NO: 38209 - DNA, 60 bp, Artificial
  Synthetic oligonucleotide
agaattggacattaagacttgtctacgatggtgtgagcctaatattaagaaagccttgag

SEQ ID NO: 38210 - DNA, 60 bp, Artificial
  Synthetic oligonucleotide
ctcctgagttctttgatacaaccatagataggatatcagaattggacattaagacttgtc

SEQ ID NO: 38211 - DNA, 60 bp, Artificial
  Synthetic oligonucleotide
gtcactcaaaaatctcctgagttctttgatacaaccatagataggatatcagaattggac

SEQ ID NO: 38212 - DNA, 60 bp, Artificial
  Synthetic oligonucleotide
ggaatggaagtccctgttcaccacctgagacaatcatttgagtctaagcggaagctatca

SEQ ID NO: 38213 - DNA, 60 bp, Artificial
  Synthetic oligonucleotide
ctggttacaacatatctaaggagatagcttacatacaggttataaggatgctaactgccc

SEQ ID NO: 38214 - DNA, 60 bp, Artificial
  Synthetic oligonucleotide
tatgaggtgctcactggttacaacatatctaaggagatagcttacatacaggttataagg

SEQ ID NO: 38215 - DNA, 60 bp, Artificial
  Synthetic oligonucleotide
tattatgcattgcagataccttgttttaccatgtcagtagggcctcttagccgacagtca

SEQ ID NO: 38216 - DNA, 60 bp, Artificial
  Synthetic oligonucleotide
gataccttgttttaccatgtcagtagggcctcttagccgacagtcagtccaatatgtgcc

SEQ ID NO: 38217 - DNA, 60 bp, Artificial
  Synthetic oligonucleotide
gggggggacacaaagaccccctgatttatttcacaatgtcaaaaaacaattattatgcat

SEQ ID NO: 38218 - DNA, 60 bp, Artificial
  Synthetic oligonucleotide
ccgacagtcagtccaatatgtgcctttcaataaacagtataattgtccagtatccaatta

SEQ ID NO: 38219 - DNA, 60 bp, Artificial
  Synthetic oligonucleotide
tatccaattatagaggaatggaagtccctgttcaccacctgagacaatcatttgagtcta

SEQ ID NO: 38220 - DNA, 60 bp, Artificial
  Synthetic oligonucleotide
cacagttggagaaggtttcagatttgagtttatcagaccaagagacatgagaatgtctct

SEQ ID NO: 38221 - DNA, 60 bp, Artificial
  Synthetic oligonucleotide
gtttcagatttgagtttatcagaccaagagacatgagaatgtctctcctgtttccagcag

SEQ ID NO: 38222 - DNA, 60 bp, Artificial
  Synthetic oligonucleotide
attgattgtcttagagaactgaatcatgaataagcaatgagcatgcacaatgtcttcgac

SEQ ID NO: 38223 - DNA, 60 bp, Artificial
  Synthetic oligonucleotide
gaactgaatcatgaataagcaatgagcatgcacaatgtcttcgaccacgccttctggcag

SEQ ID NO: 38224 - DNA, 60 bp, Artificial
  Synthetic oligonucleotide
ggttataaggatgctaactgccctagaatatgacctttctgatgactgttgtcagtcacc

SEQ ID NO: 38225 - DNA, 60 bp, Artificial
  Synthetic oligonucleotide
ggatgctaactgccctagaatatgacctttctgatgactgttgtcagtcaccattgtgcc

SEQ ID NO: 38226 - DNA, 60 bp, Artificial
  Synthetic oligonucleotide
gtcagtcaccattgtgccacatcctgttatcacagaagtctgtcatatcagagcagattt

SEQ ID NO: 38227 - DNA, 53 bp, Artificial
  Synthetic oligonucleotide
atgctgcctagaggggttggggacttgggaaggatgtagattgttgatctcgg

SEQ ID NO: 38228 - DNA, 60 bp, Artificial
  Synthetic oligonucleotide
cattagtgctctaggaaacttgtcagatatagcatccattgccctgcctgttactggcag

SEQ ID NO: 38229 - DNA, 60 bp, Artificial
  Synthetic oligonucleotide
gctctaggaaacttgtcagatatagcatccattgccctgcctgttactggcagatagtcc

SEQ ID NO: 38230 - DNA, 60 bp, Artificial
  Synthetic oligonucleotide
ctcggtaacctaggaaatgaactgttgtataaggcacctagaaaggccttagcaactgtc

SEQ ID NO: 38231 - DNA, 60 bp, Artificial
  Synthetic oligonucleotide
gctccagcaatcctaatgctaaaggaagtattgctatggaacattacagtgaaactctta

SEQ ID NO: 38232 - DNA, 60 bp, Artificial
  Synthetic oligonucleotide
tgttaagagtttcactgtaatgttccatagcaatacttcctttagcattaggattgctgg

SEQ ID NO: 38233 - DNA, 60 bp, Artificial
  Synthetic oligonucleotide
cttgttaagagtttcactgtaatgttccatagcaatacttcctttagcattaggattgct

SEQ ID NO: 38234 - DNA, 60 bp, Artificial
  Synthetic oligonucleotide
attctgaagtgcaggaagcagatctttgctgcttgtaaaagtggtaagtatgttttttgt

SEQ ID NO: 38235 - DNA, 60 bp, Artificial
  Synthetic oligonucleotide
attttgaagtgcaggaagcagatctttgctgcttgtaaaagtggtaagtatgttttttgt

SEQ ID NO: 38236 - DNA, 60 bp, Artificial
  Synthetic oligonucleotide
agtagtaggctccctaaagagcactatactgaagatggcaacactagaggaactccaaaa

SEQ ID NO: 38237 - DNA, 60 bp, Artificial
  Synthetic oligonucleotide
ggcactggagatatcctggtggactgttcaggtggacagcaacatttcttaaaagacaac

SEQ ID NO: 38238 - DNA, 60 bp, Artificial
  Synthetic oligonucleotide
aaaggcactggagatatcctggtggactgttcaggtggacagcaacatttcttaaaagac

SEQ ID NO: 38239 - DNA, 60 bp, Artificial
  Synthetic oligonucleotide
ggcactggagatatcctggtggactgttcaggtggacagcaacatttcttaaaagacaat

SEQ ID NO: 38240 - DNA, 60 bp, Artificial
  Synthetic oligonucleotide
catgtgcacctgataggtgccctcctacatgcatttacattgctgggatggcagaacttg

SEQ ID NO: 38241 - DNA, 60 bp, Artificial
  Synthetic oligonucleotide
ccgtgggtatttgcatgtgcacctgataggtgccctcctacatgcatttacattgctggg

SEQ ID NO: 38242 - DNA, 60 bp, Artificial
  Synthetic oligonucleotide
ccatgggtatttgcatgtgcacctgataggtgccctcctacatgcatttacattgctggg

SEQ ID NO: 38243 - DNA, 60 bp, Artificial
  Synthetic oligonucleotide
tgtgcacctgataggtgccctcctacatgcatttacattgctgggatggcagagcttggt

SEQ ID NO: 38244 - DNA, 60 bp, Artificial
  Synthetic oligonucleotide
gctaacaccagcagtacttttgacccagaggtcgcatacgctaactttaagcgtatccac

SEQ ID NO: 38245 - DNA, 60 bp, Artificial
  Synthetic oligonucleotide
ccttcaggagacatcttctccaccatcttggtgggcttgttccctcgggtcaggcagagc

SEQ ID NO: 38246 - DNA, 60 bp, Artificial
  Synthetic oligonucleotide
tgggacacaaagaccccctatttttaaacagatgaacataatgaacttcatatatgagat

SEQ ID NO: 38247 - DNA, 60 bp, Artificial
  Synthetic oligonucleotide
attggctgatggcttcccatttgcgtccacaatcccaagagcaatcatcagcttccttct

SEQ ID NO: 38248 - DNA, 60 bp, Artificial
  Synthetic oligonucleotide
tggcttcccatttgcgtccacaatcccaagagcaatcatcagcttccttctttctgctgg

SEQ ID NO: 38249 - DNA, 60 bp, Artificial
  Synthetic oligonucleotide
ccattgccgcctgcattggctgtacaaaggactcaacaacagcttccttgggctggcctc

SEQ ID NO: 38250 - DNA, 60 bp, Artificial
  Synthetic oligonucleotide
cacgctgagatcttggaagtcagcagctgccacatgcattctgaggatgaatccttgggt

SEQ ID NO: 38251 - DNA, 60 bp, Artificial
  Synthetic oligonucleotide
cctcttagactcttgttgattgtcctggagaactggatgagaaagacactcattgcgtcg

SEQ ID NO: 38252 - DNA, 60 bp, Artificial
  Synthetic oligonucleotide
aagcccagcaaagcatgggtgcatcatggccctaggatagttgggagagatggcatccat

SEQ ID NO: 38253 - DNA, 60 bp, Artificial
  Synthetic oligonucleotide
agcccagcaaagcatgggtgcatcatggccctaggatagttgggagagatggcatccatt

SEQ ID NO: 38254 - DNA, 60 bp, Artificial
  Synthetic oligonucleotide
tcccgctcttcagtccataagtggaaattaggcgattaaccttcacctttccttcaggag

SEQ ID NO: 38255 - DNA, 54 bp, Artificial
  Synthetic oligonucleotide
aactctagagttgaaaatcccacttgctcagactttgatgagatgctgagagag

SEQ ID NO: 38256 - DNA, 60 bp, Artificial
  Synthetic oligonucleotide
agactttgatgagatgctgagagagcttatgctctttcctaatgaggcatacactcggtc

SEQ ID NO: 38257 - DNA, 60 bp, Artificial
  Synthetic oligonucleotide
accacaggagcacacttgaggacttctactcaagggggcacttcccattcaggtggggac

SEQ ID NO: 38258 - DNA, 60 bp, Artificial
  Synthetic oligonucleotide
aggtggggacctgggagcttcaactctagagttgaaaatcccacttgctcagactttgat

SEQ ID NO: 38259 - DNA, 60 bp, Artificial
  Synthetic oligonucleotide
cggtctttcttacccaatatatctgaggctatatcatggcctctgggttacccctgctcc

SEQ ID NO: 38260 - DNA, 60 bp, Artificial
  Synthetic oligonucleotide
ggttacccctgctccaaattcatacagcttagtaatgagcaaaaatcccagctcacgctg

SEQ ID NO: 38261 - DNA, 60 bp, Artificial
  Synthetic oligonucleotide
gagatgctgagagagcttatgctctttcctaatgaggcatacactcggtctttcttaccc

SEQ ID NO: 38262 - DNA, 60 bp, Artificial
  Synthetic oligonucleotide
acactcggtctttcttacccaatatatctgaggctatatcatggcctctgggttacccct

SEQ ID NO: 38263 - DNA, 60 bp, Artificial
  Synthetic oligonucleotide
gaggtgggttattacccttatgagggctttaccacctatagggtctcagtccatcatgac

SEQ ID NO: 38264 - DNA, 60 bp, Artificial
  Synthetic oligonucleotide
gctgaggtgggttattacccttatgagggctttaccacctatagggtctcagtccatcat

SEQ ID NO: 38265 - DNA, 55 bp, Artificial
  Synthetic oligonucleotide
caggcagagcacgatcatcattttcacatcatccttccaagtggctccacctttt

SEQ ID NO: 38266 - DNA, 60 bp, Artificial
  Synthetic oligonucleotide
ggagacatcttctccaccatcttggtgggcttgttccctcgggtcaggcagagcacgatc

SEQ ID NO: 38267 - DNA, 60 bp, Artificial
  Synthetic oligonucleotide
ctttttgctggaccagctcaacaatcctcctggcgtcaaagccttggtatgcaaagtctg

SEQ ID NO: 38268 - DNA, 60 bp, Artificial
  Synthetic oligonucleotide
caggcagagcacgatcatcattttcacatcatccttccaagtggctccacctttttgctg

SEQ ID NO: 38269 - DNA, 60 bp, Artificial
  Synthetic oligonucleotide
gcaaagtctgcaacccagccttggatctcggcaagatttacagcctcacctgagaactca

SEQ ID NO: 38270 - DNA, 60 bp, Artificial
  Synthetic oligonucleotide
gaccagctcaacaatcctcctggcgtcaaagccttggtatgcaaagtctgcaacccagcc

SEQ ID NO: 38271 - DNA, 60 bp, Artificial
  Synthetic oligonucleotide
ccagccttggatctcggcaagatttacagcctcacctgagaactcaacagcaatcctggc

SEQ ID NO: 38272 - DNA, 60 bp, Artificial
  Synthetic oligonucleotide
agaaagtggataccttctgatgacacctggtttgaagtcctgaactaccatggggagtct

SEQ ID NO: 38273 - DNA, 52 bp, Artificial
  Synthetic oligonucleotide
tcttgacattgacatgacatacagtagaatccctactgtgctgacaaacatg

SEQ ID NO: 38274 - DNA, 60 bp, Artificial
  Synthetic oligonucleotide
ctacatttgaccaagcatttgtagaggcccacaagatgatcttgaaggaggcaaccaaca

SEQ ID NO: 38275 - DNA, 60 bp, Artificial
  Synthetic oligonucleotide
tgaatccttgggtttctacatttgaccaagcatttgtagaggcccacaagatgatcttga

SEQ ID NO: 38276 - DNA, 60 bp, Artificial
  Synthetic oligonucleotide
cctcccgatcccattctcacactcctcgcatagcaacccactagcttattcttctatagc

SEQ ID NO: 38277 - DNA, 60 bp, Artificial
  Synthetic oligonucleotide
ccccacccctccccctcccgatcccattctcacactcctcgcatagcaacccactagctt

SEQ ID NO: 38278 - DNA, 60 bp, Artificial
  Synthetic oligonucleotide
tggggagtctgagtttgacaccagctcagacagcgacgctgcctaagcccccccacccct

SEQ ID NO: 38279 - DNA, 60 bp, Artificial
  Synthetic oligonucleotide
tctgatgacacctggtttgaagtcctgaactaccatggggagtctgagtttgacaccagc

SEQ ID NO: 38280 - DNA, 60 bp, Artificial
  Synthetic oligonucleotide
cttctatagcattagcttctcccttaaaacacccaccctttagcttatctagctgaagct

SEQ ID NO: 38281 - DNA, 60 bp, Artificial
  Synthetic oligonucleotide
ccactagcttattcttctatagcattagcttctcccttaaaacacccaccctttagctta

SEQ ID NO: 38282 - DNA, 56 bp, Artificial
  Synthetic oligonucleotide
agtccatcatgacatggagattcctgttggcacttaccggcaggtaatggaccaca

SEQ ID NO: 38283 - DNA, 60 bp, Artificial
  Synthetic oligonucleotide
agtccatcatgacatggagattcctgttggcacttaccggcaggtaatggaccacaggag

SEQ ID NO: 38284 - DNA, 60 bp, Artificial
  Synthetic oligonucleotide
gccaatcatcctgtcttatggaggcatgggtaatcctgaggctgaggtgggttattaccc

SEQ ID NO: 38285 - DNA, 60 bp, Artificial
  Synthetic oligonucleotide
ccgctcttcagtccataagtggaaattaggcgattaaccttcacctttccttcaggagac

SEQ ID NO: 38286 - DNA, 60 bp, Artificial
  Synthetic oligonucleotide
tatatgagatgccaatcatcctgtcttatggaggcatgggtaatcctgaggctgaggtgg

SEQ ID NO: 38287 - DNA, 60 bp, Artificial
  Synthetic oligonucleotide
gctcacgctgagatcttggaagtcagcagctgccacatgcattctgaggatgaatccttg

SEQ ID NO: 38288 - DNA, 60 bp, Artificial
  Synthetic oligonucleotide
ggctggcctcttagactcttgttgattgtcctggagaactggatgagaaagacactcatt

SEQ ID NO: 38289 - DNA, 60 bp, Artificial
  Synthetic oligonucleotide
tacaattcacacatacactgattgggttgggtgggtcaaatcaaacacatataagctggg

SEQ ID NO: 38290 - DNA, 60 bp, Artificial
  Synthetic oligonucleotide
gattaaattcacacatacactgattgggttgggtgggtcaaatcaaatacatataagctg

SEQ ID NO: 38291 - DNA, 60 bp, Artificial
  Synthetic oligonucleotide
ttatccttctatacatgttagaatggggtaaagaaatggtggatcatttccatcttggtg

SEQ ID NO: 38292 - DNA, 60 bp, Artificial
  Synthetic oligonucleotide
acttgttcatcatatttcttgagtgagatagagctggctgttccagggttgctctcactc

SEQ ID NO: 38293 - DNA, 60 bp, Artificial
  Synthetic oligonucleotide
cttgttcatcatatttcttgagtgagatagagctggctgttccagggttgctctcactca

SEQ ID NO: 38294 - DNA, 60 bp, Artificial
  Synthetic oligonucleotide
gggctggaagattgccgtatataatacgaattttcctggcaaccggaacaacccagttcc

SEQ ID NO: 38295 - DNA, 60 bp, Artificial
  Synthetic oligonucleotide
cctcaaccatcttgacattgatgaaccaacagggcaaactgctgactggttaagcattgt

SEQ ID NO: 38296 - DNA, 60 bp, Artificial
  Synthetic oligonucleotide
ctcaatcatcttgacattgatgaaccaacagggcaaactgctgactggctaagcattgtg

SEQ ID NO: 38297 - DNA, 60 bp, Artificial
  Synthetic oligonucleotide
tagtagtaggctccctaaagagcactatactaaaaatggcaacactagaggaactccaaa

SEQ ID NO: 38298 - DNA, 60 bp, Artificial
  Synthetic oligonucleotide
cacaatcaatccagggcaaaattgatgagctaaggagacagctggctgatcgtgtggctg

SEQ ID NO: 38299 - DNA, 60 bp, Artificial
  Synthetic oligonucleotide
cattgacctcaatcatcttgacattgatgaaccaacagggcaaactgctgactggctaag

SEQ ID NO: 38300 - DNA, 60 bp, Artificial
  Synthetic oligonucleotide
tagtagtagactccttgaaaagctactacgagaaaaactggaatgagtgacttgacagct

SEQ ID NO: 38301 - DNA, 60 bp, Artificial
  Synthetic oligonucleotide
tagtagtagactccttgaaaagctactacgagaaaaactggaatgagtgacttgacagat

SEQ ID NO: 38302 - DNA, 60 bp, Artificial
  Synthetic oligonucleotide
gcagacttcaagcgacaaatggcagatgctgtgtccaggaaaaaaatggatactaaacct

SEQ ID NO: 38303 - DNA, 60 bp, Artificial
  Synthetic oligonucleotide
tcgtgtgggtgcgagacatcatagcagaagctgatggcaaggctagactgaaaaagtaca

SEQ ID NO: 38304 - DNA, 54 bp, Artificial
  Synthetic oligonucleotide
tcgtgtgggtgcgagacatcatagcagaagctgatggcaaggctagactgaaaa

SEQ ID NO: 38305 - DNA, 60 bp, Artificial
  Synthetic oligonucleotide
ggcttccaagccattctacccaatagagttcaacccgagtgttgagcttcaagtgctccg

SEQ ID NO: 38306 - DNA, 53 bp, Artificial
  Synthetic oligonucleotide
ttggatggcttccaagccattctacccaatagagttcaacccaagggttgagc

SEQ ID NO: 38307 - DNA, 51 bp, Artificial
  Synthetic oligonucleotide
aagaatacctacagagggtggttggcaacagtcactgctctggttgaagtg

SEQ ID NO: 38308 - DNA, 60 bp, Artificial
  Synthetic oligonucleotide
cacaagaacacctacagagggtggttggcaacagtcactgctttggttgaagtgtactcc

SEQ ID NO: 38309 - DNA, 60 bp, Artificial
  Synthetic oligonucleotide
cattgctgcagcagcccgtgctgtcgtgtgggtgcgagacatcatagcagaagctgatgg

SEQ ID NO: 38310 - DNA, 60 bp, Artificial
  Synthetic oligonucleotide
gggtgtcactaccattgctgcggcggcccgtgctgtcgtgtgggtgcgagacatcatagc

SEQ ID NO: 38311 - DNA, 56 bp, Artificial
  Synthetic oligonucleotide
cccgctgttacagccgcctcacttgggattttggagagattgtctgaagccacccc

SEQ ID NO: 38312 - DNA, 60 bp, Artificial
  Synthetic oligonucleotide
catcctcactggtcctcctggtataggcaaaacaaggcttgcacagcaccttgctgcagg

SEQ ID NO: 38313 - DNA, 60 bp, Artificial
  Synthetic oligonucleotide
ggcaaaacaaggcttgcacagcaccttgctgcaggttttggtaaggtgtcaaatttttcc

SEQ ID NO: 38314 - DNA, 57 bp, Artificial
  Synthetic oligonucleotide
ggcaaaacaaggcttgcacagcaccttgctgcaggttttggtaaggtgtcaaatttt

SEQ ID NO: 38315 - DNA, 60 bp, Artificial
  Synthetic oligonucleotide
ggagcttcgtgagcgatacgcgctcggaatggactctgaggatgtgcaacgttatcgtgc

SEQ ID NO: 38316 - DNA, 60 bp, Artificial
  Synthetic oligonucleotide
acttcgcgagcgttacgcgctcggaatggactctgaggatgtgcaacgttatcgtgcttg

SEQ ID NO: 38317 - DNA, 60 bp, Artificial
  Synthetic oligonucleotide
cgcgctcggaatggactctgaggatgtgcaacgttatcgtgcttggcttgagctacgagc

SEQ ID NO: 38318 - DNA, 60 bp, Artificial
  Synthetic oligonucleotide
atcgtgcttggcttgagctacgagcgatgcgcatgggtgcaggtgcctaccaacacgcca

SEQ ID NO: 38319 - DNA, 60 bp, Artificial
  Synthetic oligonucleotide
gcttggcttgagctacgagcgatgcgcatgggtgcaggtgcctaccaacatgccaccatt

SEQ ID NO: 38320 - DNA, 60 bp, Artificial
  Synthetic oligonucleotide
tgagctacgagcgatgcgcatgggtgcaggtgcctaccaacacgccaccatcattggtag

SEQ ID NO: 38321 - DNA, 60 bp, Artificial
  Synthetic oligonucleotide
gcgtggagattgtggcacaccctattttgactcatgccgtcggttggttggtttacatgc

SEQ ID NO: 38322 - DNA, 58 bp, Artificial
  Synthetic oligonucleotide
ggctggccaaaagggggactactgggacgaggacaaacagtgttacacaggtgtgttg

SEQ ID NO: 38323 - DNA, 60 bp, Artificial
  Synthetic oligonucleotide
ggactgtggcacaccctattttgactcatgccgtcgtttggtcggactgcacgcagccac

SEQ ID NO: 38324 - DNA, 60 bp, Artificial
  Synthetic oligonucleotide
ggagattgtggcacaccctattttgactcatgccgtcggttggttggtttacatgcagcc

SEQ ID NO: 38325 - DNA, 60 bp, Artificial
  Synthetic oligonucleotide
cccgctgttacagccgcctcacttgggattttggagagattgtctgaagccacccccatc

SEQ ID NO: 38326 - DNA, 60 bp, Artificial
  Synthetic oligonucleotide
agcaccctgccgtcacggccgcctcacttgggattttggagagattgtctgaagccactc

SEQ ID NO: 38327 - DNA, 60 bp, Artificial
  Synthetic oligonucleotide
acttccgcaggtgccctcgccccaggtaagactaaaagagatttgtgtgaccccgacacg

SEQ ID NO: 38328 - DNA, 60 bp, Artificial
  Synthetic oligonucleotide
cccgccattgagaagcttgacccctgcatggttgcggccatcacggaggtgcgcaccgca

SEQ ID NO: 38329 - DNA, 60 bp, Artificial
  Synthetic oligonucleotide
tcatcgccggccaggtgctcccacacccaggagacaacgacaacttctggaggctcaccc

SEQ ID NO: 38330 - DNA, 60 bp, Artificial
  Synthetic oligonucleotide
ctctgtgagcacgtccacttccacctttgaacttggcatgctcgccaacgggacctggct

SEQ ID NO: 38331 - DNA, 60 bp, Artificial
  Synthetic oligonucleotide
gaccatgccaaatttcaatgcaacagccagcggagcagacgacctggtgcctgtctgggg

SEQ ID NO: 38332 - DNA, 60 bp, Artificial
  Synthetic oligonucleotide
cccagcccattgagatcgacgctgagaccagaaccatccaactccagaatgttttgattg

SEQ ID NO: 38333 - DNA, 60 bp, Artificial
  Synthetic oligonucleotide
ggcgtcctcttggccacctttctgtccgcaatcattttgggatccatgccttcagacggt

SEQ ID NO: 38334 - DNA, 60 bp, Artificial
  Synthetic oligonucleotide
ccactgtcgtcatcaatgacccttcacccacccgacttgctcttgccctcatgcgtcacc

SEQ ID NO: 38335 - DNA, 60 bp, Artificial
  Synthetic oligonucleotide
gcgcggttcgtggaggccgtaattaacacttaccacaattctggcctcgttgcccagccc

SEQ ID NO: 38336 - DNA, 60 bp, Artificial
  Synthetic oligonucleotide
ctgcacatcgggtccgtcaatgaacttgccccgtttctaacctatggggacgacggcctt

SEQ ID NO: 38337 - DNA, 60 bp, Artificial
  Synthetic oligonucleotide
ggttcgtgtggtcgttctcccgcctggccctcaatttgggttgactgaggtgacacacct

SEQ ID NO: 38338 - DNA, 60 bp, Artificial
  Synthetic oligonucleotide
ccacacctacatagttgccctaaaagatgagctgcggcccgtcgagaaggttgccgaggg

SEQ ID NO: 38339 - DNA, 60 bp, Artificial
  Synthetic oligonucleotide
aaacagtgacaaacctcctccccatacaagtcggcgttgacccgtcgagcgccaactgtg

SEQ ID NO: 38340 - DNA, 60 bp, Artificial
  Synthetic oligonucleotide
tacaaccaaccacaatccactcattaaccctactcactcccgcgctgctgcactggctcg

SEQ ID NO: 38341 - DNA, 60 bp, Artificial
  Synthetic oligonucleotide
acacctttgctggcctccgtgccaaacatcaggcaaatcccaatcgcccggacatgatgc

SEQ ID NO: 38342 - DNA, 60 bp, Artificial
  Synthetic oligonucleotide
ggaggtatttcgcttcgcacggtgggttcacggccatcaatcaggtcggtgttctcgacc

SEQ ID NO: 38343 - DNA, 60 bp, Artificial
  Synthetic oligonucleotide
taccatcatgtggcgcgggctcgagtgcaccagatctgacattgtgacccatctgcccca

SEQ ID NO: 38344 - DNA, 60 bp, Artificial
  Synthetic oligonucleotide
cgctggatttcggctgtcctaaaatggctccagttgtttccagagatagacataggcata

SEQ ID NO: 38345 - DNA, 60 bp, Artificial
  Synthetic oligonucleotide
cggacaagtcccaccaaatccatcgtgattatgccccggatcaattggctcaggcccttg

SEQ ID NO: 38346 - DNA, 60 bp, Artificial
  Synthetic oligonucleotide
gctcgggccgggcatgaacccttacacccagcacatcgctgcaatgtacggaggttgggc

SEQ ID NO: 38347 - DNA, 60 bp, Artificial
  Synthetic oligonucleotide
tgatgcccgcggcggcgtgccacttgaggtgacattggaggacatccggacatcccttta

SEQ ID NO: 38348 - DNA, 60 bp, Artificial
  Synthetic oligonucleotide
tacaactcaattggcaccaccgccgttgttgggcacaatgggacaaccccgttgccgcga

SEQ ID NO: 38349 - DNA, 60 bp, Artificial
  Synthetic oligonucleotide
ggcggcggctactacgtgcacatcggcaatggtgtcgggatcacccttaaacatgttgcc

SEQ ID NO: 38350 - DNA, 60 bp, Artificial
  Synthetic oligonucleotide
ctccccaggtggttgcgcgtgtacggattcaagtcccgagagttggcaaagaaggcgatc

SEQ ID NO: 38351 - DNA, 59 bp, Artificial
  Synthetic oligonucleotide
tcggttgtgttcgaccaaacccgactgagcgtggtgagggtcaaggttcctgggcttga

SEQ ID NO: 38352 - DNA, 60 bp, Artificial
  Synthetic oligonucleotide
agtctattgctccgccccagaagtcgaacaggtacggcgtgtcagccctggagatactgg

SEQ ID NO: 38353 - DNA, 60 bp, Artificial
  Synthetic oligonucleotide
ggcacaagctgagttgacaaacagggttaagccagtggtgataatgatgtgtggccctcc

SEQ ID NO: 38354 - DNA, 60 bp, Artificial
  Synthetic oligonucleotide
agcagatgactgtaacaaactgcaagcaatcgctgatacagcccctttaacactcaactg

SEQ ID NO: 38355 - DNA, 60 bp, Artificial
  Synthetic oligonucleotide
tggaggttgtccgtgatgccgtcttagcagcaattaatggcctggtctcacgcccgttca

SEQ ID NO: 38356 - DNA, 60 bp, Artificial
  Synthetic oligonucleotide
cgcttcaaccacccaactcaggactggtccaaggacactccagacttccagcaagatagt

SEQ ID NO: 38357 - DNA, 60 bp, Artificial
  Synthetic oligonucleotide
ggcaagggcaccatgcgtcccaccaccataaacaggcttttaatccaggcagtcgccctc

SEQ ID NO: 38358 - DNA, 60 bp, Artificial
  Synthetic oligonucleotide
gcattcccctagggccgctttctccatacctaggattaccatacacccaatcgctgcctg

SEQ ID NO: 38359 - DNA, 60 bp, Artificial
  Synthetic oligonucleotide
gtatgggctgtgtgaaacagaagatgagggcacccaagagcaagaagccaccattgaatt

SEQ ID NO: 38360 - DNA, 60 bp, Artificial
  Synthetic oligonucleotide
tacaacagaatactttccaacatgatagggaaatgatagggtaccaggtgcaggccagta

SEQ ID NO: 38361 - DNA, 60 bp, Artificial
  Synthetic oligonucleotide
atcactttgatgcggattactcagcttgggactcaacacaaaataggcaaattatgatgg

SEQ ID NO: 38362 - DNA, 60 bp, Artificial
  Synthetic oligonucleotide
aagtccaagacaaagagaaaccgtcaggaagaacgtcggcagcttggcttggttacaggc

SEQ ID NO: 38363 - DNA, 60 bp, Artificial
  Synthetic oligonucleotide
gcatcagcagtggtccccagactctgccaatcaatggtgtgtttgtatttgtgtcctggg

SEQ ID NO: 38364 - DNA, 60 bp, Artificial
  Synthetic oligonucleotide
gctggaacaggttatggacacgcccacgccctggtcatatgctgatgcttgccagtcatt

SEQ ID NO: 38365 - DNA, 60 bp, Artificial
  Synthetic oligonucleotide
ccatgaagcccctatatacagcagccctcaaagatgaacttgtcaaaccagagaagatct

SEQ ID NO: 38366 - DNA, 60 bp, Artificial
  Synthetic oligonucleotide
ctctcgaggatgtacgcaatgtcctctaccacaatagcagccagccacagccaaccatgc

SEQ ID NO: 38367 - DNA, 60 bp, Artificial
  Synthetic oligonucleotide
ggctgacctgtcaaccgtcatacgatctgcacgggcttttggccccttctgtgacgccat

SEQ ID NO: 38368 - DNA, 60 bp, Artificial
  Synthetic oligonucleotide
actgcaggcagggggtttgtctagtgcggatgcagctagggctgttgcaggcgctcctgt

SEQ ID NO: 38369 - DNA, 60 bp, Artificial
  Synthetic oligonucleotide
ggcccccacttgaatcctttcttagctcatttatcacagatgtacaatggatgggttggc

SEQ ID NO: 38370 - DNA, 60 bp, Artificial
  Synthetic oligonucleotide
agaataccttgaagacaggcagcgctatgaggaggagatggctgaagtgcaggccggcgg

SEQ ID NO: 38371 - DNA, 60 bp, Artificial
  Synthetic oligonucleotide
gaggtgatcagactgagaagacacttaaagacattgaggcagcagtcattgatatggagg

SEQ ID NO: 38372 - DNA, 60 bp, Artificial
  Synthetic oligonucleotide
tcaactcaatccatggcctcaaaaatgccctgactggttacaccatcacaccctgcacca

SEQ ID NO: 38373 - DNA, 60 bp, Artificial
  Synthetic oligonucleotide
agtccattgacaccgctgtcctcgcgctcacccggctcagggctgccagggctgccgcat

SEQ ID NO: 38374 - DNA, 60 bp, Artificial
  Synthetic oligonucleotide
atgtgagaacacaagtgcacaaacccaacgccaacagtccattgacaccgctgtcctcgc

SEQ ID NO: 38375 - DNA, 60 bp, Artificial
  Synthetic oligonucleotide
ggattgggttggccataggtttcactaaggataaagtgacaaaggtgatgaaaagtgcag

SEQ ID NO: 38376 - DNA, 60 bp, Artificial
  Synthetic oligonucleotide
gatggcgggttcagctcttgtcatacaccgagccgtcaagcgtatgttcggcacccacac

SEQ ID NO: 38377 - DNA, 60 bp, Artificial
  Synthetic oligonucleotide
gtcccctgcacctgtaggttttccagacataggcgggtgtgattggcatgttggtttcac

SEQ ID NO: 38378 - DNA, 60 bp, Artificial
  Synthetic oligonucleotide
cccctgacgtgtccaacttcatagcttctctcctccctgacatgcaccttcaaggcccgg

SEQ ID NO: 38379 - DNA, 55 bp, Artificial
  Synthetic oligonucleotide
ccccagtcgatcaacgcaatagtggggcagccaaggaacccctgattggagatat

SEQ ID NO: 38380 - DNA, 60 bp, Artificial
  Synthetic oligonucleotide
ggtttgatgctggtggtctaggtcctgccaccttgccatcgaattattgtcgtgttcaag

SEQ ID NO: 38381 - DNA, 60 bp, Artificial
  Synthetic oligonucleotide
gaccctcctaaacaacaacgggacagggcaccacggagtgtggctgaaacccaacaggca

SEQ ID NO: 38382 - DNA, 60 bp, Artificial
  Synthetic oligonucleotide
gatggcgtcgaaagacgtcgttgcaactaacgcttcaagcactggtgacaatagtaacac

SEQ ID NO: 38383 - DNA, 60 bp, Artificial
  Synthetic oligonucleotide
agtcgggtatgctcctgactggtgccaatgcaaaaggaatggatctcggcactctcccag

SEQ ID NO: 38384 - DNA, 60 bp, Artificial
  Synthetic oligonucleotide
ctgaccaaatttcaatggatcctgttgcgggtgcttctaccgcagttgcaacagctgggc

SEQ ID NO: 38385 - DNA, 60 bp, Artificial
  Synthetic oligonucleotide
gggcgatgtcaaattgatggtcagttgcaaggtaccaccccagtatccctcagccaatta

SEQ ID NO: 38386 - DNA, 60 bp, Artificial
  Synthetic oligonucleotide
ggtcattatgctgggcacgaaatagtcaggaacagtaagggccctgcactctcatctaaa

SEQ ID NO: 38387 - DNA, 60 bp, Artificial
  Synthetic oligonucleotide
ggcaggccatgttccgctggatgcgttttcatgaccttggactttggacaggagatcgcg

SEQ ID NO: 38388 - DNA, 60 bp, Artificial
  Synthetic oligonucleotide
gttggtttcacttttgaggcacgagaccaggacccctctcagaatgtgacctttgcaacc

SEQ ID NO: 38389 - DNA, 60 bp, Artificial
  Synthetic oligonucleotide
gggttccatagtggtgacatcataggtagtttggattggatctcagctccatcggatggc

SEQ ID NO: 38390 - DNA, 60 bp, Artificial
  Synthetic oligonucleotide
cgagcgccactactttaaaatctggtgggttcatgcctgttcctatacctttaacccaga

SEQ ID NO: 38391 - DNA, 60 bp, Artificial
  Synthetic oligonucleotide
gggacgatgagatcgtgtccacagacattgattttgacccggctcgactcacccaggtcc

SEQ ID NO: 38392 - DNA, 60 bp, Artificial
  Synthetic oligonucleotide
ccctggctttggtgaggttatcctttactttcactctaaatttcctggttctggccccac

SEQ ID NO: 38393 - DNA, 60 bp, Artificial
  Synthetic oligonucleotide
gtaataagggttaaggagggtctcccatcaggcttcccctgtacttcacaagtcaatagc

SEQ ID NO: 38394 - DNA, 60 bp, Artificial
  Synthetic oligonucleotide
ggagagttctgacatgccccgcaccagactttagttttctgttccttgttcctccctctg

SEQ ID NO: 38395 - DNA, 60 bp, Artificial
  Synthetic oligonucleotide
cggccagatctaacagggatggttcttgaggaagggtgtcctgaaggggtggtttgctcg

SEQ ID NO: 38396 - DNA, 60 bp, Artificial
  Synthetic oligonucleotide
ccatagaaagacagctatggtggactcgtggccccaatcatgatgacccaaatgagacgc

SEQ ID NO: 38397 - DNA, 60 bp, Artificial
  Synthetic oligonucleotide
tgggtctggaggcactgatgcttttgtggttgctgggagagttctgacatgccccgcacc

SEQ ID NO: 38398 - DNA, 60 bp, Artificial
  Synthetic oligonucleotide
gctccggatgggggttctgggtcagccctacagtgttcattactactacccatgttatac

SEQ ID NO: 38399 - DNA, 60 bp, Artificial
  Synthetic oligonucleotide
ccgtctccttagagggtcctgacagggaacaccgctgtcgagtgcatcaggctaaggcta

SEQ ID NO: 38400 - DNA, 60 bp, Artificial
  Synthetic oligonucleotide
tgcccccgctgtttccccatctttccctggtgaacgaatccttttctttaggtctatagt

SEQ ID NO: 38401 - DNA, 60 bp, Artificial
  Synthetic oligonucleotide
gaggcccgtttacacccccaactacctggtctgcccagacacattgaaaggtctcgctgg

SEQ ID NO: 38402 - DNA, 60 bp, Artificial
  Synthetic oligonucleotide
gccaacgcgatcctctgtgcactcggctcgctgttctcaaagccaattaaagacctgtta

SEQ ID NO: 38403 - DNA, 60 bp, Artificial
  Synthetic oligonucleotide
cgtccagatccacctccacgtccacagcaacctctaccttgtctagaaccagcgactggg

SEQ ID NO: 38404 - DNA, 60 bp, Artificial
  Synthetic oligonucleotide
gggatgtctctggaccacaagaacagggccactatgccacccgagcccatgaagcacaca

SEQ ID NO: 38405 - DNA, 60 bp, Artificial
  Synthetic oligonucleotide
ggctctgtttctgttgacaaagttgaggaccacacatctcagactgcaaacgaggtgagc

SEQ ID NO: 38406 - DNA, 60 bp, Artificial
  Synthetic oligonucleotide
cctgcaagaccgggaccgctactatgaagaagtggcagttgcccgtgcaacagaggagga

SEQ ID NO: 38407 - DNA, 60 bp, Artificial
  Synthetic oligonucleotide
ctatgtgtccccatgtgattgttgatgtgagacagcttgaaccagtgcctctgcccctcc

SEQ ID NO: 38408 - DNA, 60 bp, Artificial
  Synthetic oligonucleotide
cgtcggtggccagatggggatgcttctcacaggggcaaacgcgaagaacatggatcttgg

SEQ ID NO: 38409 - DNA, 60 bp, Artificial
  Synthetic oligonucleotide
ctaactctgagcgcaatggcagaagtatcaggtctctcaccagatgttgttcaagcccac

SEQ ID NO: 38410 - DNA, 60 bp, Artificial
  Synthetic oligonucleotide
ggcccaatcatgagaacccgtacgagagcatggttccccattctcagcgagccacacagc

SEQ ID NO: 38411 - DNA, 60 bp, Artificial
  Synthetic oligonucleotide
ccaaccgagacccaagaagcgagtgagcccgaaaaggaagtggctcaaggtagatgggag

SEQ ID NO: 38412 - DNA, 60 bp, Artificial
  Synthetic oligonucleotide
cccagcagtgaccagcactgccccacagttaagatcgggcccaaaacactaacagtcccc

SEQ ID NO: 38413 - DNA, 60 bp, Artificial
  Synthetic oligonucleotide
gctggtgccttcttcgcaggattagcaggtgatgtcgtgtcgaacggcatcggttccctc

SEQ ID NO: 38414 - DNA, 60 bp, Artificial
  Synthetic oligonucleotide
cgctggcggcttctcccctgcggatgctgctagaggggctgttaatgctccaatgacaaa

SEQ ID NO: 38415 - DNA, 60 bp, Artificial
  Synthetic oligonucleotide
ggaggctatagggaacaaccatctcacgaccctcctcaaggataaggacagtctcacggc

SEQ ID NO: 38416 - DNA, 60 bp, Artificial
  Synthetic oligonucleotide
ggctgacacatgcccagtcactctaaattgtgataggatcgagaacaaggggaagatgtt

SEQ ID NO: 38417 - DNA, 60 bp, Artificial
  Synthetic oligonucleotide
caccaacagggtctccgcattcaggaagctggccgcagacaacaagtatggaatcgtgga

SEQ ID NO: 38418 - DNA, 60 bp, Artificial
  Synthetic oligonucleotide
attttggcgctcatcaccagatgccctacctcctggcacatatgaacctgcttacctggg

SEQ ID NO: 38419 - DNA, 60 bp, Artificial
  Synthetic oligonucleotide
cggaccttggtacgatgatcaggtgtgccagggcttttggcggcctcatggacagtatga

SEQ ID NO: 38420 - DNA, 60 bp, Artificial
  Synthetic oligonucleotide
ccccagagagcccgtgatcatccattacacgtccaggtcaagaacctaggcggcacacag

SEQ ID NO: 38421 - DNA, 60 bp, Artificial
  Synthetic oligonucleotide
gagcctcaatcgcagctcctgttgtcggtcagcaaaatataattgacccctggattagag

SEQ ID NO: 38422 - DNA, 60 bp, Artificial
  Synthetic oligonucleotide
ggttggggtttctgggtttcatccaacctcctgatcacaacaacacacgtcctgcccaag

SEQ ID NO: 38423 - DNA, 60 bp, Artificial
  Synthetic oligonucleotide
ccggccaaaagggtgattactgggatgaggacaaacagtgttacacaggtgtgttggcgg

SEQ ID NO: 38424 - DNA, 60 bp, Artificial
  Synthetic oligonucleotide
tgttcagatggatgaggttttcagatctgagcacgtgggagggcgatcgcaatctggctc

SEQ ID NO: 38425 - DNA, 60 bp, Artificial
  Synthetic oligonucleotide
gtcatcgacgcccgttcacttgaacctgtcaccatcaccatgccagacttgcgtcccaac

SEQ ID NO: 38426 - DNA, 60 bp, Artificial
  Synthetic oligonucleotide
ttcacacatttggtcccaaattaaaggtgcaactgttgtcctaacagcgctaaccttcta

SEQ ID NO: 38427 - DNA, 60 bp, Artificial
  Synthetic oligonucleotide
cgccaatcagcatgtggtaaccgttaattcggtgtttgatttggcctgggctgttcgtcg

SEQ ID NO: 38428 - DNA, 60 bp, Artificial
  Synthetic oligonucleotide
caacatgtggtaaccgttaattcggtgtttgacttggcctgggctcttcgccgacacctt

SEQ ID NO: 38429 - DNA, 60 bp, Artificial
  Synthetic oligonucleotide
tggccctcgggccagggctcaacccctaccttgcccacctctcagccatgtacaccggct

SEQ ID NO: 38430 - DNA, 60 bp, Artificial
  Synthetic oligonucleotide
ggcaacccccagatgtggctagcttcctggccaacctcaccccggagtgcgtcctgcagg

SEQ ID NO: 38431 - DNA, 60 bp, Artificial
  Synthetic oligonucleotide
cgcgatgccattttaacagcgttgaacgccctggtgtcccagccaatgcgggagttgatt

SEQ ID NO: 38432 - DNA, 60 bp, Artificial
  Synthetic oligonucleotide
cgggggaattggactggccctcggcttcaccaaggataaggccacgaaactcttgaagtc

SEQ ID NO: 38433 - DNA, 60 bp, Artificial
  Synthetic oligonucleotide
cggcgcggacccctttgttgttaccggccgtgtcctcacctgccctagccccaacttttc

SEQ ID NO: 38434 - DNA, 60 bp, Artificial
  Synthetic oligonucleotide
tgcaccctttccggcgacctcctgggcacaaccccatcgtctcccgccgacctgggcgct

SEQ ID NO: 38435 - DNA, 60 bp, Artificial
  Synthetic oligonucleotide
ggccgatctctcgaccgtgatccgagcagccatggcctttgggcctttctgcgacgccat

SEQ ID NO: 38436 - DNA, 60 bp, Artificial
  Synthetic oligonucleotide
ggtggccagcgcgacgaccgttggggagcgcactgtgaacacccgtagtcttcaaaattt

SEQ ID NO: 38437 - DNA, 60 bp, Artificial
  Synthetic oligonucleotide
gacattgagaaccaccgccggcagagacccggagatacccagggcttgaaccagttgttc

SEQ ID NO: 38438 - DNA, 60 bp, Artificial
  Synthetic oligonucleotide
tccagcgctttggctccggctggggctgctgggtgtccccgacccttttcatcaccgcga

SEQ ID NO: 38439 - DNA, 60 bp, Artificial
  Synthetic oligonucleotide
atcgggaagaccaagctggcagaacacattgcccatcagctcgccaaagccatccgccct

SEQ ID NO: 38440 - DNA, 60 bp, Artificial
  Synthetic oligonucleotide
agatcagggaggaacgtggcggcaactactctatccaggagtaccttgaggaccgcgagc

SEQ ID NO: 38441 - DNA, 60 bp, Artificial
  Synthetic oligonucleotide
aagggcatgaccttcacctcggaggccatagttatcaccacaaatgcccctgggccagcc

SEQ ID NO: 38442 - DNA, 60 bp, Artificial
  Synthetic oligonucleotide
agcaactgctacaccttctgctgcaaagtcctcgacctcgatgacgactggctgtcccgc

SEQ ID NO: 38443 - DNA, 57 bp, Artificial
  Synthetic oligonucleotide
ccccacgaccctggttgactggaatggcactcggctctccgccccgcaggcccgagt

SEQ ID NO: 38444 - DNA, 60 bp, Artificial
  Synthetic oligonucleotide
attgcagacagtttgggtcacccctcctggatctacggccacctcccaggtttcctccca

SEQ ID NO: 38445 - DNA, 60 bp, Artificial
  Synthetic oligonucleotide
gcggcgctgtccacctcgacgtccacccaccccatgctgttcaggggccctcatggaatg

SEQ ID NO: 38446 - DNA, 60 bp, Artificial
  Synthetic oligonucleotide
tcccctcagatggccctctcagtcccaataatttcagtgcagagtctgtctgcttggtgg

SEQ ID NO: 38447 - DNA, 59 bp, Artificial
  Synthetic oligonucleotide
gagcttgaggaagccctcgcggggtttgccatcgccctctgcacgatcatctggcgggg

SEQ ID NO: 38448 - DNA, 60 bp, Artificial
  Synthetic oligonucleotide
tggtggcggtgcatgagggcctcccatctggctttccgtgcacttctcaggtgaattcca

SEQ ID NO: 38449 - DNA, 60 bp, Artificial
  Synthetic oligonucleotide
tcaaccaacttgccaccccccagcccaccgttgagattaactatgccttgaaacggttgg

SEQ ID NO: 38450 - DNA, 60 bp, Artificial
  Synthetic oligonucleotide
tgacccatggatttttgctaattttgtgcaagcccctcaaggcgaatttactatatcccc

SEQ ID NO: 38451 - DNA, 60 bp, Artificial
  Synthetic oligonucleotide
gtccctcgtttaaatggtgctaatcctggtctttgcccctgcctgcttccccaggaatgg

SEQ ID NO: 38452 - DNA, 60 bp, Artificial
  Synthetic oligonucleotide
ttactatcagttgcggcctgtgggaaatgctagtgttggccgccgtcttccccgtcttga

SEQ ID NO: 38453 - DNA, 60 bp, Artificial
  Synthetic oligonucleotide
taagacctccctaccccgcctcttggcggccgcaacggccctcgcccttgagcgacttga

SEQ ID NO: 38454 - DNA, 60 bp, Artificial
  Synthetic oligonucleotide
tgagtttgacccagacaggctcaccaaagttttgaaaggctatggactcaagcccacccg

SEQ ID NO: 38455 - DNA, 60 bp, Artificial
  Synthetic oligonucleotide
ctctattggacccgtggacccaaccatgatgaccccaacgagaccttggtccctcacagc

SEQ ID NO: 38456 - DNA, 60 bp, Artificial
  Synthetic oligonucleotide
tcctccgcccttgtcatccaccgggcagtccagcggatccgtgccccatccacccagttg

SEQ ID NO: 38457 - DNA, 60 bp, Artificial
  Synthetic oligonucleotide
ccctggagctatcaagacgcctgcatgtccctggataaaaccacaagctctggctacccc

SEQ ID NO: 38458 - DNA, 60 bp, Artificial
  Synthetic oligonucleotide
ccgttgaaggtgttggggtcattggccacaagggcatggtagacaggtatgggctgtgcg

SEQ ID NO: 38459 - DNA, 60 bp, Artificial
  Synthetic oligonucleotide
gggcccctgaaggcaccgttgcctctgtcctcattaagcgcccaacgggagagctcattc

SEQ ID NO: 38460 - DNA, 60 bp, Artificial
  Synthetic oligonucleotide
ctacttcttcaagcggggcaacgagtgggtggtctttggagtccacgctgcagccacgcg

SEQ ID NO: 38461 - DNA, 60 bp, Artificial
  Synthetic oligonucleotide
tcccagccagtgagatcgcggtcagttcccacggcgagttcacccaattccgctttcccc

SEQ ID NO: 38462 - DNA, 60 bp, Artificial
  Synthetic oligonucleotide
gcgggccgtgcgtttccttgaataatgtcttggttcacaggagctgccctcgccgctgga

SEQ ID NO: 38463 - DNA, 60 bp, Artificial
  Synthetic oligonucleotide
ccttagttgaggctggcttcacccccaccgacgctcgacgtctcgcaggtagtggtgaga

SEQ ID NO: 38464 - DNA, 60 bp, Artificial
  Synthetic oligonucleotide
cacagagcccgccgaaattatcaggcaggttttggtccacttttgtgaagggatgaggtc

SEQ ID NO: 38465 - DNA, 60 bp, Artificial
  Synthetic oligonucleotide
cctgtgggcctttcattgctggccaaaagggtgattactgggatgaggacaagcagtgtt

SEQ ID NO: 38466 - DNA, 60 bp, Artificial
  Synthetic oligonucleotide
acgccattactccaccgattcgctcaccgccctaatcaacaaaatcacaaagttcgtccc

SEQ ID NO: 38467 - DNA, 60 bp, Artificial
  Synthetic oligonucleotide
ggcacctacgagactcccaacatcaccgtccagggttatcacctccgcattctcaatggg

SEQ ID NO: 38468 - DNA, 60 bp, Artificial
  Synthetic oligonucleotide
ggcccctgaacagcagatggacaatgggatttcaccagcaaacctcttaccccggaggct

SEQ ID NO: 38469 - DNA, 60 bp, Artificial
  Synthetic oligonucleotide
aacgaatggcgagaccaaacttgcccagcgcgtctcgaaaacatctaaagtggagaatgc

SEQ ID NO: 38470 - DNA, 60 bp, Artificial
  Synthetic oligonucleotide
ggaatggggtggttgtcacggtcacacacgttgcctccgcatctgaccaagtagaagggg

SEQ ID NO: 38471 - DNA, 60 bp, Artificial
  Synthetic oligonucleotide
ggttcataggtggtgcaggcctcagtcaaggcaaccccagtgaagaggttaccaaattag

SEQ ID NO: 38472 - DNA, 60 bp, Artificial
  Synthetic oligonucleotide
ccagtgtactactctgcccgcttgcaccccgtcacaacacttgctgaaggcacctacgag

SEQ ID NO: 38473 - DNA, 60 bp, Artificial
  Synthetic oligonucleotide
acgccctggcttatgcttcacagcacggccatgcagtcttcgaggaagttgccgagttgg

SEQ ID NO: 38474 - DNA, 60 bp, Artificial
  Synthetic oligonucleotide
ggccaattccacaactctgggctggtccaccttgccaattgaaccaattgctggtgctgt

SEQ ID NO: 38475 - DNA, 60 bp, Artificial
  Synthetic oligonucleotide
gtgacgattgcctatattcagtgtgcccagcaactgcctcaatcttccaaacagtgttgg

SEQ ID NO: 38476 - DNA, 60 bp, Artificial
  Synthetic oligonucleotide
gaccgatgtggcactttccagcaaaacggccggtcaaacagccgtcccaagtacccagga

SEQ ID NO: 38477 - DNA, 60 bp, Artificial
  Synthetic oligonucleotide
ggtggggtcttgtactgcttggactatagcaaatgggactcaacacagcaccctgcggtc

SEQ ID NO: 38478 - DNA, 60 bp, Artificial
  Synthetic oligonucleotide
ggccatcaacccgtgggatgcgtcattggccaactccatgctgtctatgtttgagaccac

SEQ ID NO: 38479 - DNA, 60 bp, Artificial
  Synthetic oligonucleotide
ccgcactcctagagttggcggcttcccgagatgtgaccggcaccgatgagctcaagcgct

SEQ ID NO: 38480 - DNA, 60 bp, Artificial
  Synthetic oligonucleotide
cagactcgggagcccaacacacagatgctcccctatataaacagggtggtgccggtcacc

SEQ ID NO: 38481 - DNA, 60 bp, Artificial
  Synthetic oligonucleotide
gtgcgcttagtgccttcaagaagggctccagttatggggctccaccagcccccgctggct

SEQ ID NO: 38482 - DNA, 60 bp, Artificial
  Synthetic oligonucleotide
gaattcctctcaaagcatatggcagatgtgtcttttccccacaaccctgaatgcaccgtc

SEQ ID NO: 38483 - DNA, 60 bp, Artificial
  Synthetic oligonucleotide
gggtggttggccacagttaccgctcttgttgaggtttattccagcttgtttcaggacatg

SEQ ID NO: 38484 - DNA, 60 bp, Artificial
  Synthetic oligonucleotide
ggctgccatcccgtcattcacagaggagggtctcttggactccttcatgtcaaaaccacc

SEQ ID NO: 38485 - DNA, 60 bp, Artificial
  Synthetic oligonucleotide
cgtcagcagaaatcttacttttatgcaatgtggcggcaggtggtcaagaagggaaaggag

SEQ ID NO: 38486 - DNA, 60 bp, Artificial
  Synthetic oligonucleotide
ttgcggcagctgcccgagccgttgtgtgggtgcgtgacatcattgccgaagccgacggca

SEQ ID NO: 38487 - DNA, 60 bp, Artificial
  Synthetic oligonucleotide
gccgccattgctgccggtgccctcctcatactcatgaaactgtccgggtgttcaaacacc

SEQ ID NO: 38488 - DNA, 60 bp, Artificial
  Synthetic oligonucleotide
cggcggaagtgtattgctcccagttggaaagcacggctgagatgtttcaaaacaatgtgg

SEQ ID NO: 38489 - DNA, 60 bp, Artificial
  Synthetic oligonucleotide
gccaccaaccaaaacgtgtatgtcacacctacttggatcaatggtgatccttccaaaccc

SEQ ID NO: 38490 - DNA, 60 bp, Artificial
  Synthetic oligonucleotide
ctggtacaagaatttggcacatcaccactagcgggtctgactaggtcgtatgtgagtgag

SEQ ID NO: 38491 - DNA, 56 bp, Artificial
  Synthetic oligonucleotide
tcctcacgcgtccgggtggataattgtgattaagcgatcacagccatgctttctgg

SEQ ID NO: 38492 - DNA, 60 bp, Artificial
  Synthetic oligonucleotide
actggcacacggttccaccgctcacccgcctggcccgaaccagtggagggagagacacac

SEQ ID NO: 38493 - DNA, 60 bp, Artificial
  Synthetic oligonucleotide
tactctgagccgaccccggggatcccaccagccctgttacaacgggccgccactcatacg

SEQ ID NO: 38494 - DNA, 60 bp, Artificial
  Synthetic oligonucleotide
ctgacgatgagtacgatgagtggcgagaccttgtgcgcgactggaggcaagacatgaccg

SEQ ID NO: 38495 - DNA, 58 bp, Artificial
  Synthetic oligonucleotide
cacgcaacatgacctgggctgaaactttacgcctactcgccgagactgtggcggagag

SEQ ID NO: 38496 - DNA, 60 bp, Artificial
  Synthetic oligonucleotide
cactcgcatggcagctaacacttttctgggggccatccaccttggtcctcgaatcaaccc

SEQ ID NO: 38497 - DNA, 60 bp, Artificial
  Synthetic oligonucleotide
cagagcagcaacaatgttccgcttgcatcacctcaggacaccattggcccgagcgcagca

SEQ ID NO: 38498 - DNA, 60 bp, Artificial
  Synthetic oligonucleotide
agcttgtggacgcggcacgtaacccaggacacgcgttgcgacgccattactccaccgatt

SEQ ID NO: 38499 - DNA, 60 bp, Artificial
  Synthetic oligonucleotide
tatcaccgccgtcctacctcctggggtcaacccagctaacgtgcaaaaccccggtgtctt

SEQ ID NO: 38500 - DNA, 60 bp, Artificial
  Synthetic oligonucleotide
acattcacatccggtggcgagcacgttgggtacggctgtcacatggggaatggggtggtt

SEQ ID NO: 38501 - DNA, 60 bp, Artificial
  Synthetic oligonucleotide
ctcgcagcgggctttggtaaggtgtcgaatttctctgtcacactggaccaccatgattca

SEQ ID NO: 38502 - DNA, 60 bp, Artificial
  Synthetic oligonucleotide
actggaaatgaggtcgccatttgggacgaatttgacgtggacacgcagggcaagtatgtc

SEQ ID NO: 38503 - DNA, 60 bp, Artificial
  Synthetic oligonucleotide
ctgccccctaccctctcaattgcgaccgagtggagaataagggtaaggtttttacatctg

SEQ ID NO: 38504 - DNA, 60 bp, Artificial
  Synthetic oligonucleotide
cgtgccggtgctttctaccgacgtgttacgacggtggatgtctcgtcacccgccattgag

SEQ ID NO: 38505 - DNA, 60 bp, Artificial
  Synthetic oligonucleotide
tggggttcgggtgaaacccgtcctgactagcgttgatggcctgtctcgcttgatggagac

SEQ ID NO: 38506 - DNA, 60 bp, Artificial
  Synthetic oligonucleotide
acgtgccctcgggacttggtgtcaccagcagcgtcaggcctgaaagcttatatggctgca

SEQ ID NO: 38507 - DNA, 60 bp, Artificial
  Synthetic oligonucleotide
gggggctggggcctaccaacatgcaaccataattggcaggggcggggtccaggataccat

SEQ ID NO: 38508 - DNA, 60 bp, Artificial
  Synthetic oligonucleotide
gggccgccactcatacgcgcacgtacctggagacaataataggcacccacagatcgccaa

SEQ ID NO: 38509 - DNA, 60 bp, Artificial
  Synthetic oligonucleotide
gtgttgttatcccgagttgcttcccgaatttggaacaatgtgggactgtgaccagtcgcc

SEQ ID NO: 38510 - DNA, 60 bp, Artificial
  Synthetic oligonucleotide
aaatccattgtccatgaactttcgccaaaaactgtggccatatctgaattgaccacccca

SEQ ID NO: 38511 - DNA, 60 bp, Artificial
  Synthetic oligonucleotide
ggtcggtgaacctcttgatggtctgagcttcatgactgtggataacccaaaccccttggg

SEQ ID NO: 38512 - DNA, 60 bp, Artificial
  Synthetic oligonucleotide
tggcttggtctggctctattgaagttaggttttctatctctggttctggtgttttcgggg

SEQ ID NO: 38513 - DNA, 60 bp, Artificial
  Synthetic oligonucleotide
cgactggaggctgatgacggttccataacaacccctgaacaaggtacaatggtcggcggc

SEQ ID NO: 38514 - DNA, 60 bp, Artificial
  Synthetic oligonucleotide
gggttgctacggtttgtgctgctgcattcaagggtgttagcgacgcaataacggccaacc

SEQ ID NO: 38515 - DNA, 60 bp, Artificial
  Synthetic oligonucleotide
gggccagagtcctctaattccattgggtgcacagcacacgtgcttactcctggtgaaccc

SEQ ID NO: 38516 - DNA, 60 bp, Artificial
  Synthetic oligonucleotide
cttcagggccgtggaacgtggatacgacgtaagctttgctgaggaatctgggcctggcac

SEQ ID NO: 38517 - DNA, 60 bp, Artificial
  Synthetic oligonucleotide
gtaacaactgccacggtaacaggtaacacacttaaacccagcaacacaattgacaacacg

SEQ ID NO: 38518 - DNA, 60 bp, Artificial
  Synthetic oligonucleotide
gtggtcacccaatttgtcacaccaggtggcatcgtcatccttgagtcctgtggtggggca

SEQ ID NO: 38519 - DNA, 60 bp, Artificial
  Synthetic oligonucleotide
gcaggatggagcacacctagatacaggcccattaccgtctctataagtcagcaagaaggt

SEQ ID NO: 38520 - DNA, 60 bp, Artificial
  Synthetic oligonucleotide
ctgctcttggccaacagcgtgaactggcacttcagcgaatgaatctcgatcgccaggcgc

SEQ ID NO: 38521 - DNA, 60 bp, Artificial
  Synthetic oligonucleotide
gccccgatgatctggttaatgtcgctgctcatatccgcaaggcactttctgctcagtcac

SEQ ID NO: 38522 - DNA, 60 bp, Artificial
  Synthetic oligonucleotide
ggtgtggagttttacaacaaggtcctaaaattggccgcaaaggctgttgagtatgaagga

SEQ ID NO: 38523 - DNA, 60 bp, Artificial
  Synthetic oligonucleotide
ctggactgcacacaggatctgcggggcccaaaactcctagcgcaaagctggttgttccct

SEQ ID NO: 38524 - DNA, 60 bp, Artificial
  Synthetic oligonucleotide
atgtcacaaaccctttggcggagtcgcataatcgagcacgccctggaaccgctgtcccac

SEQ ID NO: 38525 - DNA, 60 bp, Artificial
  Synthetic oligonucleotide
aattgtcagggtgctccaacaccacaagttattggcaccgactcctcaaggtgtgtgggg

SEQ ID NO: 38526 - DNA, 60 bp, Artificial
  Synthetic oligonucleotide
caaatagaatccaggcagattgggtgcgccgtcaagaggcactacaaatccgtggccagg

SEQ ID NO: 38527 - DNA, 60 bp, Artificial
  Synthetic oligonucleotide
tcctacaacggggcatcctttctggcatcactgagacacgacacctccaggccatgcagg

SEQ ID NO: 38528 - DNA, 60 bp, Artificial
  Synthetic oligonucleotide
ggtacctcacgcgttcgggtggtcaaatgcaattaagcgattgcagccgtgctttcttgg

SEQ ID NO: 38529 - DNA, 60 bp, Artificial
  Synthetic oligonucleotide
ctcattgccaaactccggccaacagtcctcacaatgattctccagcaacacaagaacacc

SEQ ID NO: 38530 - DNA, 60 bp, Artificial
  Synthetic oligonucleotide
tgtggataacatgcccgcgtgacctggtggcccccgccgcatctggtttaaaagcataca

SEQ ID NO: 38531 - DNA, 60 bp, Artificial
  Synthetic oligonucleotide
ctcccctacatcaacagagtggtcccggtgtcttctgcatttgacttcatccgaggcctc

SEQ ID NO: 38532 - DNA, 60 bp, Artificial
  Synthetic oligonucleotide
gctgaatgagtcactcaagggtggggtgctttactgtctcgattatagcaagtgggattc

SEQ ID NO: 38533 - DNA, 60 bp, Artificial
  Synthetic oligonucleotide
actcgttaccaccgctcacctgcatggcccaaccctgtggaaggagaaacacacgcccct

SEQ ID NO: 38534 - DNA, 60 bp, Artificial
  Synthetic oligonucleotide
atcgcgacgcgcgtggcatccagttagaaaacgccctcgcgtacgcatcgcagcatggcc

SEQ ID NO: 38535 - DNA, 60 bp, Artificial
  Synthetic oligonucleotide
ggcccggtgcagcagaggtgtactgctcgcaactggaaagcactgccgagattttccaga

SEQ ID NO: 38536 - DNA, 60 bp, Artificial
  Synthetic oligonucleotide
cagaacttcacatcattctctccaacttttgatgcggcagggatatgggtgtggatgcct

SEQ ID NO: 38537 - DNA, 60 bp, Artificial
  Synthetic oligonucleotide
tgagtggcgtgacctggtacgggactggcggcaagacatgactgttggggagtttgtgga

SEQ ID NO: 38538 - DNA, 60 bp, Artificial
  Synthetic oligonucleotide
ccaccgattcgctcaccgccctaattaacaaaatcacgaaatttgtccctgtgcatgcca

SEQ ID NO: 38539 - DNA, 60 bp, Artificial
  Synthetic oligonucleotide
ccgcacccaaccaatgcgtgctccacgtgcgccccgtaatcaaggttatgatgaagaagc

SEQ ID NO: 38540 - DNA, 60 bp, Artificial
  Synthetic oligonucleotide
gctttgtgtccccagcccgtgtcccatttgttggagagcccccgaagaacgtgcattcaa

SEQ ID NO: 38541 - DNA, 60 bp, Artificial
  Synthetic oligonucleotide
cctacggggatgactgtttatactcagtgtgccctgcaacagcctccattttccagacag

SEQ ID NO: 38542 - DNA, 60 bp, Artificial
  Synthetic oligonucleotide
catcctcctagacacaccccgaaagactccagttgcaatcatcctcactggtcctcctgg

SEQ ID NO: 38543 - DNA, 60 bp, Artificial
  Synthetic oligonucleotide
aatgggtgggcgaattgtgggactggttgtggtggcggctgcggaacaggtgaaccatca

SEQ ID NO: 38544 - DNA, 60 bp, Artificial
  Synthetic oligonucleotide
tacaccctgtcaccacgcttgcggaggggacgtatgagacacccaatatcacggtccagg

SEQ ID NO: 38545 - DNA, 60 bp, Artificial
  Synthetic oligonucleotide
gccgctaacactttccttggggctatccaccttggcccacgcatcaacccatacaccgct

SEQ ID NO: 38546 - DNA, 60 bp, Artificial
  Synthetic oligonucleotide
gcgatctcgggcatctattccgcttcaccaacaacatcaggctgctcgactggagtggag

SEQ ID NO: 38547 - DNA, 60 bp, Artificial
  Synthetic oligonucleotide
aagcgttgttcacaggtttccgatcagaggacgtggcaaactcgttctggtacatggcag

SEQ ID NO: 38548 - DNA, 60 bp, Artificial
  Synthetic oligonucleotide
cgtcacggttattgggaaaggtggcgtcaaacatgagaagattagaaccagcaccctcag

SEQ ID NO: 38549 - DNA, 60 bp, Artificial
  Synthetic oligonucleotide
gcttccattgacatcttacggtacttctcggatcggtctcccattgttgattctgctgcc

SEQ ID NO: 38550 - DNA, 60 bp, Artificial
  Synthetic oligonucleotide
cccgcacatgttgacgattttgaagagtgctcacaccaacctgcttcgctgggcagtggc

SEQ ID NO: 38551 - DNA, 60 bp, Artificial
  Synthetic oligonucleotide
ccacaaatttccgagggatgtatatctgtggttcattgcaacgggcttggggcgataaga

SEQ ID NO: 38552 - DNA, 60 bp, Artificial
  Synthetic oligonucleotide
ggcaatgagagctgtggaatacgaagggctgcacctcaaaccccccagttatagctcagc

SEQ ID NO: 38553 - DNA, 60 bp, Artificial
  Synthetic oligonucleotide
attgatgtcacaaacccactggtggaatcgcacaaacgcgcgcggcccggcacatctgtc

SEQ ID NO: 38554 - DNA, 60 bp, Artificial
  Synthetic oligonucleotide
ccgcatatgatgtgctgactgtcccagacaaggtccctgcaatgttgaggcactggatgg

SEQ ID NO: 38555 - DNA, 60 bp, Artificial
  Synthetic oligonucleotide
tcgcatggtctggctctattgaagttaggttctctatttctggctctggtgtgttcgggg

SEQ ID NO: 38556 - DNA, 60 bp, Artificial
  Synthetic oligonucleotide
acatggcccgatccagtcggttcgattggcacgtgcggctgggtttagggttgaccctta

SEQ ID NO: 38557 - DNA, 60 bp, Artificial
  Synthetic oligonucleotide
ggtaccacacgcgttcgggtggataattgtggttaagcgaccacagccatgaccctctgg

SEQ ID NO: 38558 - DNA, 60 bp, Artificial
  Synthetic oligonucleotide
atatcatccccacccgcctacgacagggaagcccggagtgtgcagcttgaaaatgccctg

SEQ ID NO: 38559 - DNA, 58 bp, Artificial
  Synthetic oligonucleotide
agatttctcacatttgcgcctttccgtccggccataccttggttacaatcccgagggg

SEQ ID NO: 38560 - DNA, 60 bp, Artificial
  Synthetic oligonucleotide
tacagcaagtgggattccactcaacacccggccgtcacagctgcgtccttggcaatcctt

SEQ ID NO: 38561 - DNA, 60 bp, Artificial
  Synthetic oligonucleotide
attaccccacctctgttctgccagaaaacccgagggctggagccttttaccgccgcgtca

SEQ ID NO: 38562 - DNA, 60 bp, Artificial
  Synthetic oligonucleotide
cacaaatgccaattacatcaatctgtccctcctggcaaaattgcgacccacggttttgac

SEQ ID NO: 38563 - DNA, 60 bp, Artificial
  Synthetic oligonucleotide
ccccaggacaccattggaccaacgagtgcacttctattgcccactcaagttgagacacca

SEQ ID NO: 38564 - DNA, 60 bp, Artificial
  Synthetic oligonucleotide
agggcgctggcacaagttttcgcagaaccctcttccaacgaaattgcggaaacgtgcacg

SEQ ID NO: 38565 - DNA, 60 bp, Artificial
  Synthetic oligonucleotide
cacctttctcggtgccatacatctgggcccacgcattaacccctacactgcacacctgag

SEQ ID NO: 38566 - DNA, 60 bp, Artificial
  Synthetic oligonucleotide
aatctcaggttccgggctctttgctggccgggccattactgctatcctgccaccaggtgt

SEQ ID NO: 38567 - DNA, 60 bp, Artificial
  Synthetic oligonucleotide
ggcacacaccgatcccctaatttaacttacaacgaagcatgtgccttgttggaccgcagc

SEQ ID NO: 38568 - DNA, 60 bp, Artificial
  Synthetic oligonucleotide
gcctgctggacagacctatactgcaacgttcagtgttgtcgggcatctcagagactcggc

SEQ ID NO: 38569 - DNA, 60 bp, Artificial
  Synthetic oligonucleotide
ccgttcaagctactttaactgagatgcaagcacgaagggcgcacgagagggaacgagcgg

SEQ ID NO: 38570 - DNA, 60 bp, Artificial
  Synthetic oligonucleotide
agggtgagctagtggatgcagcgcacaacccaggtcacatcctgcgtcgtcactactcca

SEQ ID NO: 38571 - DNA, 60 bp, Artificial
  Synthetic oligonucleotide
aataatgtcttggtttactggagcagccttagccgccggctctgtcgtggacatggccgg

SEQ ID NO: 38572 - DNA, 60 bp, Artificial
  Synthetic oligonucleotide
gccacactaccaactgggtgatggggcaccagtttactactcaactcgattgcaccccgt

SEQ ID NO: 38573 - DNA, 60 bp, Artificial
  Synthetic oligonucleotide
gggtcctatgcctgctttgtctccccagcacgggttccatttgtcggggacccaccaaaa

SEQ ID NO: 38574 - DNA, 60 bp, Artificial
  Synthetic oligonucleotide
tgcaacttcgtgccatgcggctaggtgcaggtgcctaccagcatgcaaccatcattgggc

SEQ ID NO: 38575 - DNA, 60 bp, Artificial
  Synthetic oligonucleotide
atcattgggcgcggacgtgttgaggataccatcatccgcacacagcccatgcgtgcccca

SEQ ID NO: 38576 - DNA, 60 bp, Artificial
  Synthetic oligonucleotide
gccccacgtgctcctcgttccaccggatatgatgaggaagccccaacaccgattgtcact

SEQ ID NO: 38577 - DNA, 60 bp, Artificial
  Synthetic oligonucleotide
ccccacctttgtgggcagacacgtgaaaataacagccatcaacccctgggacgcatccct

SEQ ID NO: 38578 - DNA, 60 bp, Artificial
  Synthetic oligonucleotide
cggatgacgagtatgatgagtggcgtgaccttgtgcgtgactggagacaggacatgactg

SEQ ID NO: 38579 - DNA, 60 bp, Artificial
  Synthetic oligonucleotide
ccctgcccgccccatacacgagaaatgcaccaacatggtcgggaccaatttccaattcgg

SEQ ID NO: 38580 - DNA, 60 bp, Artificial
  Synthetic oligonucleotide
gacaactaggtcacaacgtgacgaggaggccaaaggcaaaactaaacatggtaggggagc

SEQ ID NO: 38581 - DNA, 60 bp, Artificial
  Synthetic oligonucleotide
cagggctgtgggtttggatgccatggacccgaaacaaaccagacgggcgcacgaacacaa

SEQ ID NO: 38582 - DNA, 60 bp, Artificial
  Synthetic oligonucleotide
aaccatggcatactaaccgctgcgtcgcatgacttcacatctctgtcccaaactttcgat

SEQ ID NO: 38583 - DNA, 60 bp, Artificial
  Synthetic oligonucleotide
gagattgccgaaattgccaagaggacggcacagtcagaagggctggtgctcaccaatgtg

SEQ ID NO: 38584 - DNA, 60 bp, Artificial
  Synthetic oligonucleotide
gtctggactcccctcgggcatgccatttaccagtgttgtcaactctcttaaccatatgac

SEQ ID NO: 38585 - DNA, 60 bp, Artificial
  Synthetic oligonucleotide
ggctattcagtcaccaacgcggcaattggcacacaccaactccttgactacgagaccagt

SEQ ID NO: 38586 - DNA, 60 bp, Artificial
  Synthetic oligonucleotide
tgaaaccaaacaggacatgtacgcccatgtttgccaagtggtcgcctgggtgcggcgcga

SEQ ID NO: 38587 - DNA, 60 bp, Artificial
  Synthetic oligonucleotide
tacggcccaccgctgccgataaaacagacaaaatagcccccacccacacaccagtctttt

SEQ ID NO: 38588 - DNA, 60 bp, Artificial
  Synthetic oligonucleotide
tgcagcgggcagccacacacacccgtacatacctggagtcaatagtcggcacacaccgat

SEQ ID NO: 38589 - DNA, 60 bp, Artificial
  Synthetic oligonucleotide
ctgttcacacatatggtgatgattgcatttactccttgtgcccggcaaccgcttccatct

SEQ ID NO: 38590 - DNA, 60 bp, Artificial
  Synthetic oligonucleotide
gcactcatcacacgaggacaggacatctcccgcgaccttgctgtcaatggaacggcgcaa

SEQ ID NO: 38591 - DNA, 60 bp, Artificial
  Synthetic oligonucleotide
agcctggccagaacaactctccagtgaaacccatgccccagccccatttggtgccggtga

SEQ ID NO: 38592 - DNA, 60 bp, Artificial
  Synthetic oligonucleotide
ccgccacgtcaaccaatggggagaccaagttggcacagaaagtgagtcgagtttcaaagg

SEQ ID NO: 38593 - DNA, 60 bp, Artificial
  Synthetic oligonucleotide
ggtccaccgggtatagggaaaacacaccttgcacagcacttagccgctggttttggcaaa

SEQ ID NO: 38594 - DNA, 60 bp, Artificial
  Synthetic oligonucleotide
gaaaccttgcgtctgcttgttgaaacaatcacggagagtttggcccactttggcccgctg

SEQ ID NO: 38595 - DNA, 60 bp, Artificial
  Synthetic oligonucleotide
ggctcgccaccatcacagcccttgttgaggtctattcaaatttgttccaggacatgcgtg

SEQ ID NO: 38596 - DNA, 60 bp, Artificial
  Synthetic oligonucleotide
gaccatagctgcagctgcgagagcgttcacctgggttcgtgacatcattgtggaggcgga

SEQ ID NO: 38597 - DNA, 60 bp, Artificial
  Synthetic oligonucleotide
cgcaccgctgccttgttggaacttgctgcatcgcgagatgtcactggcacggaagaactg

SEQ ID NO: 38598 - DNA, 60 bp, Artificial
  Synthetic oligonucleotide
tgcaaacacgggaaccaaatacccagatgctcccctacatcaatcgggtggtgccagtca

SEQ ID NO: 38599 - DNA, 60 bp, Artificial
  Synthetic oligonucleotide
gaggagggcacggagctgattcaggagtttgggacatcaccaatggcagggcttgcacga

SEQ ID NO: 38600 - DNA, 60 bp, Artificial
  Synthetic oligonucleotide
gcgttcattgacgctcgcacaaccgaccccatactgatcaatttgcccgatatccggccc

SEQ ID NO: 38601 - DNA, 60 bp, Artificial
  Synthetic oligonucleotide
gccacagcagctttcaaagggatagctacgcgcctgcaggcagttgcacctatgacacct

SEQ ID NO: 38602 - DNA, 60 bp, Artificial
  Synthetic oligonucleotide
ggggttatgggtcgcgcagcccttgatcaacccgttccaaactggctccgtttccacatg

SEQ ID NO: 38603 - DNA, 60 bp, Artificial
  Synthetic oligonucleotide
cgagcaagtcaatcaccactttggcgcaaactccaccacacttggttggtcaacactgcc

SEQ ID NO: 38604 - DNA, 60 bp, Artificial
  Synthetic oligonucleotide
cattgtcaatcactggacagatgtgtcattgtccgccaagacctcggggcagaccaccat

SEQ ID NO: 38605 - DNA, 60 bp, Artificial
  Synthetic oligonucleotide
ctcgacatcacgtcaatcaggcggcaattcttctggattaaggctaaccgcaccacagac

SEQ ID NO: 38606 - DNA, 60 bp, Artificial
  Synthetic oligonucleotide
tttggtgggcgactggtcgcagctgtgataccaccaggcatcgagattggaccagggttg

SEQ ID NO: 38607 - DNA, 60 bp, Artificial
  Synthetic oligonucleotide
ccgcaaggactttgtgcactccgtcaagttaacccttgcacggaggcgcgatcttcagta

SEQ ID NO: 38608 - DNA, 60 bp, Artificial
  Synthetic oligonucleotide
tgaattcatcggattgggacttgcaggtgccggcgtcctgagcaacgcattgctccgcag

SEQ ID NO: 38609 - DNA, 60 bp, Artificial
  Synthetic oligonucleotide
tctgaattcatcggattgggacttgcaggtgccggcgtcctgagcaacgcattgctccgc

SEQ ID NO: 38610 - DNA, 60 bp, Artificial
  Synthetic oligonucleotide
aaggcccaatccaatccgttcgccttgcgcgcgcggctggatttagggttgacccttact

SEQ ID NO: 38611 - DNA, 60 bp, Artificial
  Synthetic oligonucleotide
ggccccatccaatcagtgcgtcttgcacgcgcggctggatttagggttgacccttactca

SEQ ID NO: 38612 - DNA, 60 bp, Artificial
  Synthetic oligonucleotide
ccgtccgtaggctcctcaacgcagtgagaaccagactcaacgccactttcactgtatgcg

SEQ ID NO: 38613 - DNA, 60 bp, Artificial
  Synthetic oligonucleotide
tcataccaaaaggaacgcggcttcacgtttccccagcacacactgaggacttcgaggagt

SEQ ID NO: 38614 - DNA, 60 bp, Artificial
  Synthetic oligonucleotide
cccaacctcaaggggccagcagttgtggaatgcttgcttgtacgctagtcaacatggcgt

SEQ ID NO: 38615 - DNA, 60 bp, Artificial
  Synthetic oligonucleotide
gtacctcgatgctgcaatacccacatgtcctgtttgatgctcgccaagtggaacctgtca

SEQ ID NO: 38616 - DNA, 60 bp, Artificial
  Synthetic oligonucleotide
ggcgatgatgagtggtcttcaacttatgaggctatcgaccctgttgtccctccaatgcac

SEQ ID NO: 38617 - DNA, 60 bp, Artificial
  Synthetic oligonucleotide
gggaaagcgaaggatgatttggggatgtgatgtcggagttgcaactgtttgcgcagctgc

SEQ ID NO: 38618 - DNA, 60 bp, Artificial
  Synthetic oligonucleotide
ggtgcaaaacttggggttggtgttgcaactgatttcattgtccctgggatccctgatggt

SEQ ID NO: 38619 - DNA, 60 bp, Artificial
  Synthetic oligonucleotide
tgccactcgaaaattggacctgtcagttgaggattttctaatgctacgtcaccgcgcggc

SEQ ID NO: 38620 - DNA, 60 bp, Artificial
  Synthetic oligonucleotide
gggctcttcgtcgtcaccttacgctggcagggcagtttcaagccatcagagccgcatatg

SEQ ID NO: 38621 - DNA, 60 bp, Artificial
  Synthetic oligonucleotide
aaaacttctacctactctctcttgttgtctgaggacacatccgacgaactgcaccctgac

SEQ ID NO: 38622 - DNA, 60 bp, Artificial
  Synthetic oligonucleotide
ctgttgccatctctgagctgaataacccaacaaccacatcagataccgactctgttgagc

SEQ ID NO: 38623 - DNA, 60 bp, Artificial
  Synthetic oligonucleotide
cctgcacacctctaggcaactatcgctaaaccactacttgctcccacctgattcctttgc

SEQ ID NO: 38624 - DNA, 52 bp, Artificial
  Synthetic oligonucleotide
atggctgtcacttttaaacgagccctcggggcacggcctaaacagcctcccc

SEQ ID NO: 38625 - DNA, 55 bp, Artificial
  Synthetic oligonucleotide
tctagcatggctgtcacttttaaacgagccctcggggcgcggtctaaacagcccc

SEQ ID NO: 38626 - DNA, 60 bp, Artificial
  Synthetic oligonucleotide
ccgcaaaatcttcaagtgacggagtactttctagcatggctgtcacttttaaacgagccc

SEQ ID NO: 38627 - DNA, 60 bp, Artificial
  Synthetic oligonucleotide
acccgccaatcaacatgtggtaaccgttaattcggtgtttgatttggcctgggctcttcg

SEQ ID NO: 38628 - DNA, 60 bp, Artificial
  Synthetic oligonucleotide
cgccaatcagcatgtggtaaccgttaattcggtgtttgatttggcctgggctcttcgtcg

SEQ ID NO: 38629 - DNA, 60 bp, Artificial
  Synthetic oligonucleotide
tccacctcgcgggccgtccaggttatgcagggctatgtcccacaggctgaccatgtcatc

SEQ ID NO: 38630 - DNA, 60 bp, Artificial
  Synthetic oligonucleotide
taactccaccttcgaactcggcatgcttgccaacggcacctggctcggccccgcgcagct

SEQ ID NO: 38631 - DNA, 60 bp, Artificial
  Synthetic oligonucleotide
gccccgggactttgatcaggttgcagccctagtttacaaatctgctgaagcctctggaat

SEQ ID NO: 38632 - DNA, 60 bp, Artificial
  Synthetic oligonucleotide
ataggtgcaccaccaagtgccttgaggattgtgggtggttcgtgggtcgctgctcctgcc

SEQ ID NO: 38633 - DNA, 60 bp, Artificial
  Synthetic oligonucleotide
aacctcagctggtgcccttgcccctgggaagaccaagagagatttgtgtgaccccgacac

SEQ ID NO: 38634 - DNA, 60 bp, Artificial
  Synthetic oligonucleotide
tggtaccaaatattcagtgtccccaggcatgaaagaggaggcggccaagtgctcccacca

SEQ ID NO: 38635 - DNA, 60 bp, Artificial
  Synthetic oligonucleotide
tcaaactcgaccgtgacgggccaacgctgggactgtaacccgcagacacccttcgtggca

SEQ ID NO: 38636 - DNA, 60 bp, Artificial
  Synthetic oligonucleotide
atcccatgcccgtcaccacagcttttaccttcccggccggcactgttatcctgcatacgg

SEQ ID NO: 38637 - DNA, 60 bp, Artificial
  Synthetic oligonucleotide
atgacccatcacccactcgtcttgccctcgcccttatgcggcacctcaagaacccaattg

SEQ ID NO: 38638 - DNA, 60 bp, Artificial
  Synthetic oligonucleotide
ttgccgtcgctgccattccaccaggcgtggacccggagagtgtcaatgtgttgcgcatgc

SEQ ID NO: 38639 - DNA, 60 bp, Artificial
  Synthetic oligonucleotide
ctgcgtttagtcccatggtccaagagctcgcccgcaaggtcattaatgtagttaagggcg

SEQ ID NO: 38640 - DNA, 60 bp, Artificial
  Synthetic oligonucleotide
gggctgttcaaacaggcatgggactcactgcctggctggagcgaggtggaggcgtacttt

SEQ ID NO: 38641 - DNA, 60 bp, Artificial
  Synthetic oligonucleotide
tccaggcctacacagacaaatcccaccagattcaccgcgactatgccccggaccagcttg

SEQ ID NO: 38642 - DNA, 60 bp, Artificial
  Synthetic oligonucleotide
gcatgctcatggggctaacggctggtgctcaaccctccatcagcagccctatttccaatg

SEQ ID NO: 38643 - DNA, 60 bp, Artificial
  Synthetic oligonucleotide
gagttccgcgcgctccaatcccttttcctccgcaagctcggggtccgtgggaggtatttc

SEQ ID NO: 38644 - DNA, 60 bp, Artificial
  Synthetic oligonucleotide
tgccgcacccaagtgataatgacaacttctggcggcttaccccggtcgttcgcggcaaca

SEQ ID NO: 38645 - DNA, 58 bp, Artificial
  Synthetic oligonucleotide
ccccactgcaggcgtggcctcggctgacccgtcgcagctcctcaccagggtggctctt

SEQ ID NO: 38646 - DNA, 60 bp, Artificial
  Synthetic oligonucleotide
tgatgggctgcgagttgcggtgtcccaaacacttaaaacccgccccacagccttggtcga

SEQ ID NO: 38647 - DNA, 60 bp, Artificial
  Synthetic oligonucleotide
gaccctctccatagccgcattcaaaacagccaacaagtccaccagaaatgaccgccaggg

SEQ ID NO: 38648 - DNA, 60 bp, Artificial
  Synthetic oligonucleotide
aaggatgagttgcgcccggttgaaaaggtcgccgagggtaagcgcaggcttatttggggc

SEQ ID NO: 38649 - DNA, 60 bp, Artificial
  Synthetic oligonucleotide
tgacgatgcccgtgactaccgctcgttctatacagcctaccaacttgggcgcgagggcaa

SEQ ID NO: 38650 - DNA, 60 bp, Artificial
  Synthetic oligonucleotide
atgagtacactgcagaggaggttatggtcatcgacgagacgcccgcggagccaggtcagt

SEQ ID NO: 38651 - DNA, 60 bp, Artificial
  Synthetic oligonucleotide
ccaccacctgcaacgttgttcaaggctgattgttcccacctgcattttgacatccacccg

SEQ ID NO: 38652 - DNA, 60 bp, Artificial
  Synthetic oligonucleotide
tcaaggttcctgggcttgagacacggcgcggatactgcggcctcccatatgtcaacagtg

SEQ ID NO: 38653 - DNA, 60 bp, Artificial
  Synthetic oligonucleotide
ctacgcgtcactggtgccccagctgtccgccatgtccaacaagattgtagagctctccac

SEQ ID NO: 38654 - DNA, 60 bp, Artificial
  Synthetic oligonucleotide
ctgaagggctatgggttgtccccaacggctccagacaaagggatgaacattgagatcaag

SEQ ID NO: 38655 - DNA, 60 bp, Artificial
  Synthetic oligonucleotide
gcacgtaacccaggccatgtgttgcgtcgtcattactccaccgattcgctcaccgcccta

SEQ ID NO: 38656 - DNA, 60 bp, Artificial
  Synthetic oligonucleotide
caattgaccccacttctcgaggtcagcagttgtggaatgcatgtctctatgctagtcaac

SEQ ID NO: 38657 - DNA, 60 bp, Artificial
  Synthetic oligonucleotide
ctgttgctttagaagcacaaggatcctccccagcgctgctccgttcttctcgggtaagcc

SEQ ID NO: 38658 - DNA, 60 bp, Artificial
  Synthetic oligonucleotide
ggtgtcgctgtcaaggttacatccggtctcccttctggtatgcccctcacatccgtgatt

SEQ ID NO: 38659 - DNA, 60 bp, Artificial
  Synthetic oligonucleotide
gatccgtcaccgatgtgtgtggcgagcacaaaggctactgcgtccatatgggtcatgggg

SEQ ID NO: 38660 - DNA, 60 bp, Artificial
  Synthetic oligonucleotide
tctcccaccttagccttgccaagcgtggtgctgagtgctggtgtaaagagtatgttctcg

SEQ ID NO: 38661 - DNA, 60 bp, Artificial
  Synthetic oligonucleotide
ccccaccttcctcaacattgattcactggcccaaaccatgaagcaagacttcaccctgaa

SEQ ID NO: 38662 - DNA, 60 bp, Artificial
  Synthetic oligonucleotide
tgattatgacttctaactctgaaaccccagtaaagccctcgtctaagcgcgctggtgcat

SEQ ID NO: 38663 - DNA, 60 bp, Artificial
  Synthetic oligonucleotide
ccgcaaggattttgtgtgctccgtcaagttaacgcttgctcggagacgcgatcttcagta

SEQ ID NO: 38664 - DNA, 60 bp, Artificial
  Synthetic oligonucleotide
attgcgggctcccatacattgatgacaacgggagggtcactgggttgcacactgggtccg

SEQ ID NO: 38665 - DNA, 60 bp, Artificial
  Synthetic oligonucleotide
cagccgctcaagcactggcaaagaaactatccgaccaagaaccatcagttataaaccttg

SEQ ID NO: 38666 - DNA, 60 bp, Artificial
  Synthetic oligonucleotide
gcttcacacatccggaaagcgctctccacgcagtctcacccagccaacatcgatatgtgt

SEQ ID NO: 38667 - DNA, 60 bp, Artificial
  Synthetic oligonucleotide
ctcaataaccccacgacaacatctgacaccgattctgtagagaaactattggaactggct

SEQ ID NO: 38668 - DNA, 60 bp, Artificial
  Synthetic oligonucleotide
cgaggagtcatttaatggaaggaagtacattgtatcccgctgcaacgaggcctctctcgc

SEQ ID NO: 38669 - DNA, 60 bp, Artificial
  Synthetic oligonucleotide
ggatcccaacttaccacttttccgcctagaaggtgatagtgatagctccgtcacaacacc

SEQ ID NO: 38670 - DNA, 60 bp, Artificial
  Synthetic oligonucleotide
gatggcttctcctttgttggtgtctcaaacattggtaaacttgaatttccactttctgcc

SEQ ID NO: 38671 - DNA, 60 bp, Artificial
  Synthetic oligonucleotide
tctggcgtctttggaggaaaactggctgccatagttgtgcccccgggtgttaaccccgtg

SEQ ID NO: 38672 - DNA, 60 bp, Artificial
  Synthetic oligonucleotide
gtacaacgacttgatcaacccctacgccaatgacaccaactcctctggatgtattgtcac

SEQ ID NO: 38673 - DNA, 60 bp, Artificial
  Synthetic oligonucleotide
cgactcggctgatgtcattcagaacaacaccaacttcaggggtatgtacatctgtgggtc

SEQ ID NO: 38674 - DNA, 60 bp, Artificial
  Synthetic oligonucleotide
ctggtatccaaacctcagatgacacgttggctgttttggggtacaccggaattggcgagc

SEQ ID NO: 38675 - DNA, 60 bp, Artificial
  Synthetic oligonucleotide
ggggtgtgatgttggagttgctaccgtatgcgcagctgctttcaaaggtgttagtgatgc

SEQ ID NO: 38676 - DNA, 60 bp, Artificial
  Synthetic oligonucleotide
ggctcttcgccgacacctcacactggctggacagtttcaagccatcaaggccgcatacga

SEQ ID NO: 38677 - DNA, 60 bp, Artificial
  Synthetic oligonucleotide
cctggaggaatagtcatccttgagtcttgtggtggtgcacgcatctgggcattgggtcac

SEQ ID NO: 38678 - DNA, 60 bp, Artificial
  Synthetic oligonucleotide
tcatcaaagtggaaattggcaacacagggcatcggcctccctcacgagtacacaattggg

SEQ ID NO: 38679 - DNA, 60 bp, Artificial
  Synthetic oligonucleotide
actgatggccctccccatgacatcttgcaccgtgtccaaagaatgctaattgatcacctc

SEQ ID NO: 38680 - DNA, 60 bp, Artificial
  Synthetic oligonucleotide
gtttatgactgtggacaaccccaaccccattggtttcctcccaaaattaatcggtctcat

SEQ ID NO: 38681 - DNA, 60 bp, Artificial
  Synthetic oligonucleotide
tagagttataccaaaaggaacccgcctccacgtctccccggcgcacactgacgactatga

SEQ ID NO: 38682 - DNA, 60 bp, Artificial
  Synthetic oligonucleotide
gggaccctcacttcaggcttgtgattgaccccaataaatttctttctgtgggcttctgca

SEQ ID NO: 38683 - DNA, 60 bp, Artificial
  Synthetic oligonucleotide
ccaggaaacagctggttggagcacaccaaggttccgacccctcacagttaccattagcca

SEQ ID NO: 38684 - DNA, 60 bp, Artificial
  Synthetic oligonucleotide
cctcctcgaaagaattggagtgtctagggacatactgcaaaccaccgcaatctggaaaat

SEQ ID NO: 38685 - DNA, 60 bp, Artificial
  Synthetic oligonucleotide
ggtacaaggccctatccaatcagttcgactcgcacgggctgctgggtttagggttgaccc

SEQ ID NO: 38686 - DNA, 60 bp, Artificial
  Synthetic oligonucleotide
ctgcgcttggtcaacaacgtgaactggcactacaacgtatgaatcttgatcgtcaggcgt

SEQ ID NO: 38687 - DNA, 60 bp, Artificial
  Synthetic oligonucleotide
cgctgtaccaaaggatcagaagcgctgccaaggtctttgctgttgattattccaagtggg

SEQ ID NO: 38688 - DNA, 60 bp, Artificial
  Synthetic oligonucleotide
tctggtttcatggagattggtttaagtgtggacgggtacttttatgcaggaacaggagcc

SEQ ID NO: 38689 - DNA, 60 bp, Artificial
  Synthetic oligonucleotide
ggcggtttgtgtccttcccaaagatcgggagtagcagggcataggttggaagagaaatct

SEQ ID NO: 38690 - DNA, 60 bp, Artificial
  Synthetic oligonucleotide
gccacgggatgtttctgaggccgagcgacggcgacgtgaattctttgaacgtcaaaccgc

SEQ ID NO: 38691 - DNA, 60 bp, Artificial
  Synthetic oligonucleotide
cgcaacgcacttgtgacattcagtcccctccagcaattgatataaagtcacgagcagccc

SEQ ID NO: 38692 - DNA, 60 bp, Artificial
  Synthetic oligonucleotide
ttgtggcgcgctctggtctcccctcgggcatgcctttcactagtgtcatcaattcaatca

SEQ ID NO: 38693 - DNA, 60 bp, Artificial
  Synthetic oligonucleotide
gagtggcagcaggcatgttggaacgtggcacttcctgtggcccacacgttccaggtttga

SEQ ID NO: 38694 - DNA, 60 bp, Artificial
  Synthetic oligonucleotide
tgacgactgcctctatggtttcacaccggcaactgcttctctagcatcaatgatcataga

SEQ ID NO: 38695 - DNA, 60 bp, Artificial
  Synthetic oligonucleotide
gccagtcttcttgaagagaacctttgccacaacaccacacggtttgcgcgccctgcttga

SEQ ID NO: 38696 - DNA, 60 bp, Artificial
  Synthetic oligonucleotide
ggccgtgcaatcaaggggtaacctcgctaccctgtctggcgccatgagcacattccaaag

SEQ ID NO: 38697 - DNA, 60 bp, Artificial
  Synthetic oligonucleotide
gcgccaagtggttgcattgcacgctgctgggagcactgatggcaccactaaactcgcaca

SEQ ID NO: 38698 - DNA, 60 bp, Artificial
  Synthetic oligonucleotide
ggagagggacaatatgacacacccaccacaaccgtcaatggctttcatgtaaagatcacc

SEQ ID NO: 38699 - DNA, 60 bp, Artificial
  Synthetic oligonucleotide
aaacaatgccccacgaaacacattcacctgccccctttggatcaggcgacaagaggtatg

SEQ ID NO: 38700 - DNA, 60 bp, Artificial
  Synthetic oligonucleotide
tgtttggaagggactgcctgtgttgcgtggcagtgatgtgggtgggttgccaactggcac

SEQ ID NO: 38701 - DNA, 60 bp, Artificial
  Synthetic oligonucleotide
tttcaaaacacgtcttgcccgagcgacagagccattacgtcaggtcttggctgtagccgc

SEQ ID NO: 38702 - DNA, 60 bp, Artificial
  Synthetic oligonucleotide
gggttcagttcaatccccggcctttggagggctctgaaacatctccctgacacatcctcc

SEQ ID NO: 38703 - DNA, 60 bp, Artificial
  Synthetic oligonucleotide
tgtcccaggtgcaattcccacttaacccggaatccaccctttttcgcactggcaacggtg

SEQ ID NO: 38704 - DNA, 60 bp, Artificial
  Synthetic oligonucleotide
tgtattcctcacaattggacagcacagccactatcttccaatctggtccagttaacatcc

SEQ ID NO: 38705 - DNA, 60 bp, Artificial
  Synthetic oligonucleotide
tcattaccgagcaacgtgtctcttcaaatgtacaacgggacatcatgtacaaggtgtggt

SEQ ID NO: 38706 - DNA, 60 bp, Artificial
  Synthetic oligonucleotide
ccaaatattcatggcccgatgcagactacatcccttacaatgctgttgtggggacactgg

SEQ ID NO: 38707 - DNA, 60 bp, Artificial
  Synthetic oligonucleotide
ccctcgggctggagccttttaccgtcgaatcatcacggtggatgtgcgctcccctgaaat

SEQ ID NO: 38708 - DNA, 60 bp, Artificial
  Synthetic oligonucleotide
tacatgatttgatcgacaagaagtttgaagagcagtctggtgaggtgaggggtttgtgga

SEQ ID NO: 38709 - DNA, 60 bp, Artificial
  Synthetic oligonucleotide
caacgggcacgtggcaaccgtgcgggaggttatgcagttgggatggtgatagttggctca

SEQ ID NO: 38710 - DNA, 60 bp, Artificial
  Synthetic oligonucleotide
ctacaatacagcttgataacccgcgacctgtccctgtatgtgtggtgttctccggacccc

SEQ ID NO: 38711 - DNA, 60 bp, Artificial
  Synthetic oligonucleotide
tgggattcgccgtgatggttatatggtgacatctggcactattggcactcggcaggaact

SEQ ID NO: 38712 - DNA, 60 bp, Artificial
  Synthetic oligonucleotide
gcgtaccaactcaactgcacaacccgctgattggccatcaggctcaaatactggcaatgg

SEQ ID NO: 38713 - DNA, 60 bp, Artificial
  Synthetic oligonucleotide
gagcatgactggaagagttattggtatgctatgtggcgacgtgtggtgggaggctgccgt

SEQ ID NO: 38714 - DNA, 60 bp, Artificial
  Synthetic oligonucleotide
ggggacctgtgctagagtacctgctgtaactggtgacactttaaatccactaccaaacac

SEQ ID NO: 38715 - DNA, 59 bp, Artificial
  Synthetic oligonucleotide
aggcaaaaggcaaaacaaagcatgggcgtggagctcgtcatgggcggggccgctctact

SEQ ID NO: 38716 - DNA, 60 bp, Artificial
  Synthetic oligonucleotide
ggctacacaggcaatcccgttgcgatctgggatgaatttgacaccgaccgtgatggcaag

SEQ ID NO: 38717 - DNA, 60 bp, Artificial
  Synthetic oligonucleotide
taaaaccccctggacaagccatggagaatggaggctcaccctcacaccttttgccacgca

SEQ ID NO: 38718 - DNA, 60 bp, Artificial
  Synthetic oligonucleotide
actaccaatgaaggctgtgggctattagtgtttgagatggagggcaatggctcccgactt

SEQ ID NO: 38719 - DNA, 60 bp, Artificial
  Synthetic oligonucleotide
aagttgagtcttgcgacttcacttttgaagtccacctcctccgacagtgctacctcaggg

SEQ ID NO: 38720 - DNA, 60 bp, Artificial
  Synthetic oligonucleotide
cgcctcctcgctccaaaccaataacaatcaatttgtaaccaaacatggcaaggcaaatgt

SEQ ID NO: 38721 - DNA, 60 bp, Artificial
  Synthetic oligonucleotide
aggccctgcggacgcaccccttgtacctgttaatccagaacagcccaatctccctgccca

SEQ ID NO: 38722 - DNA, 60 bp, Artificial
  Synthetic oligonucleotide
gtcgttcctatgacaccagtggctgtaggtatcaacatggactcggcccacattgaggtc

SEQ ID NO: 38723 - DNA, 60 bp, Artificial
  Synthetic oligonucleotide
tgtgtgcggagctgctttgctctccttcgcacgattccttggaacactcgacagccccag

SEQ ID NO: 38724 - DNA, 60 bp, Artificial
  Synthetic oligonucleotide
ccttagactacagcaaatgggacagtacacagtccgccgctgtcactgctgcatccctgg

SEQ ID NO: 38725 - DNA, 60 bp, Artificial
  Synthetic oligonucleotide
caggagcattacgggaacacctcgagcaagtgtggaacaaagctttacttggcacacccc

SEQ ID NO: 38726 - DNA, 60 bp, Artificial
  Synthetic oligonucleotide
aaaatgcccaagggaaacggcgcctcttgtggggtgcggatgctggcttgacccttgtgt

SEQ ID NO: 38727 - DNA, 60 bp, Artificial
  Synthetic oligonucleotide
gcaagcttgtgaattcgaggctgaggggttgctgtcacggttattcgggacagccggttc

SEQ ID NO: 38728 - DNA, 59 bp, Artificial
  Synthetic oligonucleotide
ttttcgagaaggccagggagattgcggagaagaccagcaaagtagaggggtatctcctg

SEQ ID NO: 38729 - DNA, 60 bp, Artificial
  Synthetic oligonucleotide
cccaaaggtacaacacctggctcaatattcgtaacatgaggcttggggctggcgcttacc

SEQ ID NO: 38730 - DNA, 60 bp, Artificial
  Synthetic oligonucleotide
ggatttacgtcgtgattggcgggaggaaatgactgccgaccagttcttgcagctccggga

SEQ ID NO: 38731 - DNA, 60 bp, Artificial
  Synthetic oligonucleotide
cttgtgttcatcagcccttcgcctcttttcagctgttgccccgtttgcaattgctgtggc

SEQ ID NO: 38732 - DNA, 60 bp, Artificial
  Synthetic oligonucleotide
ccacacacggcccggccctgagagcgcaggccgccattgaggctgggtttgatgtggtta

SEQ ID NO: 38733 - DNA, 60 bp, Artificial
  Synthetic oligonucleotide
ggggagcaatggacattagagtcacagtctcaggctcgggtctatttgcaggcaagcttg

SEQ ID NO: 38734 - DNA, 60 bp, Artificial
  Synthetic oligonucleotide
ggtgttgcagtgcactaccttctcatgtgtcgtggtttcagacgctcacccacctccagg

SEQ ID NO: 38735 - DNA, 60 bp, Artificial
  Synthetic oligonucleotide
cccctctctgcttcacttgttggcccacatgggaatactggccgggcccaaattgcttgg

SEQ ID NO: 38736 - DNA, 60 bp, Artificial
  Synthetic oligonucleotide
ccttgcaatgaactgtgtcactgctcttaaaccaacagtcctcaccatgatctaccagca

SEQ ID NO: 38737 - DNA, 60 bp, Artificial
  Synthetic oligonucleotide
cctgaagctccaactacaccaggctgggttgcaattgcggctggggtcctgctgcttttg

SEQ ID NO: 38738 - DNA, 60 bp, Artificial
  Synthetic oligonucleotide
cgcattactgaaccagcgtgcttcaatgtggctgatgtccgtgccgtggattaccaccgc

SEQ ID NO: 38739 - DNA, 60 bp, Artificial
  Synthetic oligonucleotide
gtggaatttgaaagtgatggcagtcacattggttggggtgtgcaccttggtaatgggcgc

SEQ ID NO: 38740 - DNA, 60 bp, Artificial
  Synthetic oligonucleotide
agtcaggcccgagcgctgaacagtggcggactgcctacacccttttcggcactgtctcct

SEQ ID NO: 38741 - DNA, 60 bp, Artificial
  Synthetic oligonucleotide
agtcaggcccgagcactgaacagtggcggactgcctacacccttttcggcactgtctcct

SEQ ID NO: 38742 - DNA, 60 bp, Artificial
  Synthetic oligonucleotide
ttgctgaaccccaatcaggcccgagcactgaacagtggcggactgcctacacccttttcg

SEQ ID NO: 38743 - DNA, 60 bp, Artificial
  Synthetic oligonucleotide
agtgatttaattagagaaggaaacatgagtgacaacaaaagcaccccagagcaacagcat

SEQ ID NO: 38744 - DNA, 56 bp, Artificial
  Synthetic oligonucleotide
gggacgatcctcacagtggggcggctcgggccgggcatgaacccctacaccaatca

SEQ ID NO: 38745 - DNA, 60 bp, Artificial
  Synthetic oligonucleotide
acccttttcggcactgtctcctggaacgctaatgccggccccgggacgatcctcacagtg

SEQ ID NO: 38746 - DNA, 60 bp, Artificial
  Synthetic oligonucleotide
tacacccttttcggcactgtctcctggaacgctaatgccggccccgggacgatcctcaca

SEQ ID NO: 38747 - DNA, 60 bp, Artificial
  Synthetic oligonucleotide
cctggccaacccagcaccactggactatgtcaactttgaagcatgttcgaggcgcatcga

SEQ ID NO: 38748 - DNA, 60 bp, Artificial
  Synthetic oligonucleotide
gggtcatggggtctatgcctctgtggcacatgtagtcaagggtgactctttctttctggg

SEQ ID NO: 38749 - DNA, 60 bp, Artificial
  Synthetic oligonucleotide
gggagcacaagggttactgcgtccacatgggtcatggggtctatgcctctgtggcacatg

SEQ ID NO: 38750 - DNA, 60 bp, Artificial
  Synthetic oligonucleotide
tggctgtcacttttaaacgagccctcggggcgcggcataaacagcctcccccgagggaaa

SEQ ID NO: 38751 - DNA, 51 bp, Artificial
  Synthetic oligonucleotide
tggctgtcacttttaaacgagccctcggggcgcggcataaacagcctcccc

SEQ ID NO: 38752 - DNA, 60 bp, Artificial
  Synthetic oligonucleotide
ttgatttggccctcgggccagggcttaacccctaccttgcccacctctcagccatgtaca

SEQ ID NO: 38753 - DNA, 60 bp, Artificial
  Synthetic oligonucleotide
ttgatctggccctcgggccagggcttaacccctaccttgcccacctctcagccatgtaca

SEQ ID NO: 38754 - DNA, 60 bp, Artificial
  Synthetic oligonucleotide
tttgatttggccctcgggccagggcttaacccctaccttgcccacctctcagccatgtac

SEQ ID NO: 38755 - DNA, 60 bp, Artificial
  Synthetic oligonucleotide
gacaaagtggtacgcatcagcatcctacctgaaactggaacccgtggcggcaatcatccc

SEQ ID NO: 38756 - DNA, 60 bp, Artificial
  Synthetic oligonucleotide
gccggtgtgttacattctaactggaccacctggatgcgggaaaacaacggccgctcaagc

SEQ ID NO: 38757 - DNA, 60 bp, Artificial
  Synthetic oligonucleotide
ccctggaacctccgtcccacgcagttgttataagaaaaacttttcccatctgtcgcttgc

SEQ ID NO: 38758 - DNA, 60 bp, Artificial
  Synthetic oligonucleotide
ggcaaaccaacacgtgacccgtggggatcaccggtagcaactgaatggaagcccaaaccc

SEQ ID NO: 38759 - DNA, 60 bp, Artificial
  Synthetic oligonucleotide
cttggcagtggcgatccacgatgtccaaagtcccttacggcaatcgttgttgattccctg

SEQ ID NO: 38760 - DNA, 60 bp, Artificial
  Synthetic oligonucleotide
agcacagctcctacaggggtcgtggagtcgctctcactgatgatgagtacgatgagtgga

SEQ ID NO: 38761 - DNA, 60 bp, Artificial
  Synthetic oligonucleotide
tttggcctgggctcttcgtcgtcacctatcactgacaggacagttccaagcaatcagagc

SEQ ID NO: 38762 - DNA, 60 bp, Artificial
  Synthetic oligonucleotide
gcagctgcggatatggccactgggaagagtgttgattctgagtgggaggcgttcttttct

SEQ ID NO: 38763 - DNA, 60 bp, Artificial
  Synthetic oligonucleotide
ggggtgtgatgttggagttgccactgtgtgcgctgctgctttcaaggccgttagcgatgc

SEQ ID NO: 38764 - DNA, 60 bp, Artificial
  Synthetic oligonucleotide
gccctttgttttccaagctaatcgccattttgacttcaatcaagaaacggcaggctggag

SEQ ID NO: 38765 - DNA, 60 bp, Artificial
  Synthetic oligonucleotide
gacttggttaacgttgccgctcacatccgcaaggcactatcttctcagtcgcacccggct

SEQ ID NO: 38766 - DNA, 60 bp, Artificial
  Synthetic oligonucleotide
gacagtgttaggttagatgaactacccgccaatcaacatgtggtaaccgttaactcggtg

SEQ ID NO: 38767 - DNA, 60 bp, Artificial
  Synthetic oligonucleotide
gacagtgtcaggttagacgaactacccgccaatcaacatgtggtaaccgttaactcggtg

SEQ ID NO: 38768 - DNA, 60 bp, Artificial
  Synthetic oligonucleotide
gggcatggttcggactgtacacgagaacagtgggtgtggggcccatgttcacgtagtctc

SEQ ID NO: 38769 - DNA, 56 bp, Artificial
  Synthetic oligonucleotide
aagggcatgacaagaactgcacacgagaacagtgggtgtggggcccatgttcacgt

SEQ ID NO: 38770 - DNA, 60 bp, Artificial
  Synthetic oligonucleotide
gctttcgtgagtggtggaattgggctcagtggtgaggtgtttgagaattagccactatgg

SEQ ID NO: 38771 - DNA, 60 bp, Artificial
  Synthetic oligonucleotide
gacgaagctgccgctgcaaatctgcactctttctatagcttctacaaaacggactagttc

SEQ ID NO: 38772 - DNA, 60 bp, Artificial
  Synthetic oligonucleotide
gtacaagggcatggctcgaactgcacacgagaacagtgggtgtggggcccatgttcacgt

SEQ ID NO: 38773 - DNA, 60 bp, Artificial
  Synthetic oligonucleotide
ctgttcataacatcaactcatgtcataccccagggcgcaaaggagttctttggagtcccc

SEQ ID NO: 38774 - DNA, 60 bp, Artificial
  Synthetic oligonucleotide
atgtggtaaccgttaattcggtgtttgatttggcctgggctcttcgccgacaccttacgc

SEQ ID NO: 38775 - DNA, 60 bp, Artificial
  Synthetic oligonucleotide
ggccgccaaccgagcgctcgcacaagtgttccaggaaccatcttcacaggacattggtga

SEQ ID NO: 38776 - DNA, 60 bp, Artificial
  Synthetic oligonucleotide
tcgtctgcgccactcagggtcctgatggtgaggccactctggagggtggtgagaatcatg

SEQ ID NO: 38777 - DNA, 60 bp, Artificial
  Synthetic oligonucleotide
gtcgggttcttaccagaccaaccccagactttgaatttatgtttttggttccccctactg

SEQ ID NO: 38778 - DNA, 60 bp, Artificial
  Synthetic oligonucleotide
ccaggaatggcgtcgaccattgggatgcctacaagggagaacgaatagtcctctgggatg

SEQ ID NO: 38779 - DNA, 60 bp, Artificial
  Synthetic oligonucleotide
cccttatctttcacatttggctcgcatgtacaatggttacgcaggtggcatggaggtgca

SEQ ID NO: 38780 - DNA, 58 bp, Artificial
  Synthetic oligonucleotide
ttttgccgctgtcccaccgaactttccggcagaaaatcttagcgcagcgcaagtcacc

SEQ ID NO: 38781 - DNA, 60 bp, Artificial
  Synthetic oligonucleotide
taggaccagggagtgggtgaattcgcagaacctaggcccctatatggatggtgccctgcg

SEQ ID NO: 38782 - DNA, 60 bp, Artificial
  Synthetic oligonucleotide
cgaggcttgttccaggcgggtggatttcttggtctatgcagagtcacctgatgtcgagaa

SEQ ID NO: 38783 - DNA, 55 bp, Artificial
  Synthetic oligonucleotide
ttttcttcccgtcccgcctcaaacttgaccttccagaatccgcagcctcctcgcc

SEQ ID NO: 38784 - DNA, 60 bp, Artificial
  Synthetic oligonucleotide
gtccacgagtgcctcttcggcctcgtcagtttcaaccacgtcgacagggctttccagtac

SEQ ID NO: 38785 - DNA, 60 bp, Artificial
  Synthetic oligonucleotide
cgtcccctttggcaccggctgggcgttttgggtgtcaccaagtcttttgatcaccaccac

SEQ ID NO: 38786 - DNA, 58 bp, Artificial
  Synthetic oligonucleotide
gccaatttcacagatccaagttcacaaatcaggtgagttctgccgcctaagattcccc

SEQ ID NO: 38787 - DNA, 60 bp, Artificial
  Synthetic oligonucleotide
acggaccttattgggggtgggataggttctttgattaatgctggtgctaatgcaatcaat

SEQ ID NO: 38788 - DNA, 60 bp, Artificial
  Synthetic oligonucleotide
aagttttctgctgagcccgagctagcacaggtggtggcggaggacctccttgcccctagt

SEQ ID NO: 38789 - DNA, 60 bp, Artificial
  Synthetic oligonucleotide
agatggtctcctgcagggcactacgcaacttgtgtcttgtaatgtttgcagctttagggg

SEQ ID NO: 38790 - DNA, 60 bp, Artificial
  Synthetic oligonucleotide
caggttcctatcctctggttgttcccgctgatggctactttagatttgaatcttgggtga

SEQ ID NO: 38791 - DNA, 60 bp, Artificial
  Synthetic oligonucleotide
atggcgatgatgagatcgtgagcacagacatcaccttggaccccaacatgctcacagaga

SEQ ID NO: 38792 - DNA, 60 bp, Artificial
  Synthetic oligonucleotide
cccttcctttaacacaaggaggcaaccgcttttcgcacacctgcgtaggcggggagagtc

SEQ ID NO: 38793 - DNA, 60 bp, Artificial
  Synthetic oligonucleotide
ggcttcaccacggaaaaggttgggcgtatgctgtcatccgctgcttcaactctgcgtgcc

SEQ ID NO: 38794 - DNA, 60 bp, Artificial
  Synthetic oligonucleotide
gcgtctaacgacgctaccactgcctcttgtggcgaaaacaccgctaagaaagacagtgac

SEQ ID NO: 38795 - DNA, 60 bp, Artificial
  Synthetic oligonucleotide
gctgaagaaggttgccaacgtgattctatgtggcctaacctccctcttctccaggcccat

SEQ ID NO: 38796 - DNA, 60 bp, Artificial
  Synthetic oligonucleotide
ccttacaactctactcaaggataaagacagcttgacggcgttcatgaagaccctcgacat

SEQ ID NO: 38797 - DNA, 60 bp, Artificial
  Synthetic oligonucleotide
cttgtgactggacctttggtggaatcgtggaatcccttatcctggtgggtgaactcttcg

SEQ ID NO: 38798 - DNA, 60 bp, Artificial
  Synthetic oligonucleotide
caaagggctcagtgatgaagagtacgacgagtacaagaggataagggaagagcgtgaggg

SEQ ID NO: 38799 - DNA, 60 bp, Artificial
  Synthetic oligonucleotide
agatacttttctctctgctggctacctccccgctgacgcggctagaggctctcttggcgt

SEQ ID NO: 38800 - DNA, 60 bp, Artificial
  Synthetic oligonucleotide
ccatggtgccccactcacaaagagcaatacaattgatggccctgctgggagaagcctcat

SEQ ID NO: 38801 - DNA, 59 bp, Artificial
  Synthetic oligonucleotide
tcaccagacatcgttggcactataaacgccctgcttgctaggatctcagcagccaggtc

SEQ ID NO: 38802 - DNA, 60 bp, Artificial
  Synthetic oligonucleotide
gtttccccccgcaatgccccaggtgagattttgctagatttggaattaggccccgatctt

SEQ ID NO: 38803 - DNA, 60 bp, Artificial
  Synthetic oligonucleotide
ccagaggtcaacaatgagaccatggccttggaaccagtggtgggcgctcctcttgctgct

SEQ ID NO: 38804 - DNA, 60 bp, Artificial
  Synthetic oligonucleotide
tacgtgcccagacatgaagccatgttccgctggatgcggttctcagacctcagcacgtgg

SEQ ID NO: 38805 - DNA, 60 bp, Artificial
  Synthetic oligonucleotide
tttcaaccagtggcggttgccggcctacggcggcgcactgacgaataacaccaatcttgc

SEQ ID NO: 38806 - DNA, 60 bp, Artificial
  Synthetic oligonucleotide
cctgctcccccaggagtgggttcaacactttttccaggagtcggccacctctcaaagcga

SEQ ID NO: 38807 - DNA, 59 bp, Artificial
  Synthetic oligonucleotide
aaccttgatggcacaccctatgacccagctgatgacatccctgcagtattgggctcccc

SEQ ID NO: 38808 - DNA, 60 bp, Artificial
  Synthetic oligonucleotide
ccccaagcttggttttgtcgtggccaccgtagagagcacagatttccacgccaaccaacc

SEQ ID NO: 38809 - DNA, 60 bp, Artificial
  Synthetic oligonucleotide
aaaagatccaattggtgcaattcctggcggcaggcggctgagtctagtgccccgactccg

SEQ ID NO: 38810 - DNA, 60 bp, Artificial
  Synthetic oligonucleotide
ccaccatgtgaggaagaacgaccactggaatggtgagaccttcacgggtcctctggcgga

SEQ ID NO: 38811 - DNA, 60 bp, Artificial
  Synthetic oligonucleotide
gaaaagatctacggcacagtgaagaagaggctcctttggggttcggatttgggcacgatg

SEQ ID NO: 38812 - DNA, 60 bp, Artificial
  Synthetic oligonucleotide
tattaaaagatctagtggggaactcctaccccttgcggtgagaatgggaacccacgccac

SEQ ID NO: 38813 - DNA, 60 bp, Artificial
  Synthetic oligonucleotide
ggacaagataaactctttcaggaagatggctgctgacaataggtatgggttctttgagac

SEQ ID NO: 38814 - DNA, 60 bp, Artificial
  Synthetic oligonucleotide
aaacggcaacaccccttatgggaagggcgtgatgaagacgctcacccagaactcccttgt

SEQ ID NO: 38815 - DNA, 60 bp, Artificial
  Synthetic oligonucleotide
ggatgaacatgaatgaagatgggccagctatatttgagaggcacgcgcggcatacctacc

SEQ ID NO: 38816 - DNA, 60 bp, Artificial
  Synthetic oligonucleotide
ctggctgatacgtgcccagtcaccctaaactgtgataggattgagaacaagggcaagctc

SEQ ID NO: 38817 - DNA, 60 bp, Artificial
  Synthetic oligonucleotide
gtcaacttcttggaacagactcttgaacccgccaaaaagtggagttactcgcaagcctgc

SEQ ID NO: 38818 - DNA, 60 bp, Artificial
  Synthetic oligonucleotide
agtcgtttacacaccccagaactccatccccatagactcactgcgccgcctggcaggtga

SEQ ID NO: 38819 - DNA, 60 bp, Artificial
  Synthetic oligonucleotide
ccctgaacttgattatgtcgaaatggatgagaccaaggacaccgcctatgccgtcccgcc

SEQ ID NO: 38820 - DNA, 60 bp, Artificial
  Synthetic oligonucleotide
gacaggggtgggacggaacagattcaaccccttgaagaacccgcggacaccactctaagg

SEQ ID NO: 38821 - DNA, 60 bp, Artificial
  Synthetic oligonucleotide
cccgggcgcaataatagagatgtgggacggcgagatttaccactacggcatttacgctgg

SEQ ID NO: 38822 - DNA, 60 bp, Artificial
  Synthetic oligonucleotide
tactgttacaaatacaattggcaaagcacaacaaattgaattagacaaggctgcgcttgg

SEQ ID NO: 38823 - DNA, 57 bp, Artificial
  Synthetic oligonucleotide
cataatgatgctagtgtagttaatgcttataatgtgtataatcctgccagcaatggc

SEQ ID NO: 38824 - DNA, 60 bp, Artificial
  Synthetic oligonucleotide
gttaccatcaccatgccagacttgcgtcccaacatgtaccatccaactggtgaccctggc

SEQ ID NO: 38825 - DNA, 60 bp, Artificial
  Synthetic oligonucleotide
acctgttaccatcaccatgccagacttgcgtcccaacatgtaccatccaactggtgaccc

SEQ ID NO: 38826 - DNA, 60 bp, Artificial
  Synthetic oligonucleotide
cccggtgggttttccacgtgcaacaggcattggaacttgaatggcagcacatatggctgg

SEQ ID NO: 38827 - DNA, 60 bp, Artificial
  Synthetic oligonucleotide
caccatcaccatgccagacttgcgtcccaacatgtaccatccaactggtgaccctggcct

SEQ ID NO: 38828 - DNA, 60 bp, Artificial
  Synthetic oligonucleotide
tatctcaaaagattcagacccagagttgaagccaaaggcaagaacaaaaataaaggccca

SEQ ID NO: 38829 - DNA, 60 bp, Artificial
  Synthetic oligonucleotide
ttctacctcaaaagattcagacccagagttgaagccaaaggtaagaacaagaacaaaggc

SEQ ID NO: 38830 - DNA, 60 bp, Artificial
  Synthetic oligonucleotide
gtgttcactgacgagacagggtgactgcggtctcccctacgtcgacgatcacggtgttgt

SEQ ID NO: 38831 - DNA, 60 bp, Artificial
  Synthetic oligonucleotide
attgacgagacagggtgactgcggtctcccctacgttgatgatcacggcgttgtcgttgg

SEQ ID NO: 38832 - DNA, 60 bp, Artificial
  Synthetic oligonucleotide
cggctcttcgtgttcattgacgagacagggtgactgcggtctcccctacgttgatgatca

SEQ ID NO: 38833 - DNA, 60 bp, Artificial
  Synthetic oligonucleotide
agcctgcggctcatcgtgttcactgacgagacagggtgactgcggtctcccctacgtcga

SEQ ID NO: 38834 - DNA, 60 bp, Artificial
  Synthetic oligonucleotide
gcacgtgggagggcgatcgcaatctggctcccagctttgtgaatgaagatggcgtcgaat

SEQ ID NO: 38835 - DNA, 60 bp, Artificial
  Synthetic oligonucleotide
gagcagcagggcataggttggaagagaaacctttctgtgaaaatgatttctgcttactgc

SEQ ID NO: 38836 - DNA, 57 bp, Artificial
  Synthetic oligonucleotide
gcacgtgggagggcgatcgcaatctggctcccgagaatgtgaatgaagatggcgtcg

SEQ ID NO: 38837 - DNA, 60 bp, Artificial
  Synthetic oligonucleotide
ttacactccaggtaggcaaatgacatcccgccctgtggacacatcccctctaccggtccc

SEQ ID NO: 38838 - DNA, 60 bp, Artificial
  Synthetic oligonucleotide
gaccccgcaggaacgctcagcagtctttgtgaatgaggatgagtgatggcgcagcgccaa

SEQ ID NO: 38839 - DNA, 60 bp, Artificial
  Synthetic oligonucleotide
atctgttctgcgctgggtgcgctttggaacaatggatgctgagaccccgcaggaacgctc

SEQ ID NO: 38840 - DNA, 60 bp, Artificial
  Synthetic oligonucleotide
atctgtcctgcgctgggtgcgctttgggacaatggatgctgagaccccgcaggaacgctc

SEQ ID NO: 38841 - DNA, 60 bp, Artificial
  Synthetic oligonucleotide
gctgggtgcgctttggaacaatggatgctgagaccccgcaggaacgctcagcagtctttg

SEQ ID NO: 38842 - DNA, 60 bp, Artificial
  Synthetic oligonucleotide
gggtgcgcttcggaacaatggatgctgagaccccgcaggaacgctcagcagtctttgtga

SEQ ID NO: 38843 - DNA, 60 bp, Artificial
  Synthetic oligonucleotide
gggtgcgctttggaacgatggatgctgagaccccgcaggaacgctcagcagtctttgtga

SEQ ID NO: 38844 - DNA, 60 bp, Artificial
  Synthetic oligonucleotide
tctagcatggctgtcacttttaaacgagccctcggggcgcggtctaaacagccccccccg

SEQ ID NO: 38845 - DNA, 60 bp, Artificial
  Synthetic oligonucleotide
aaataacctccagcccaccaccaacacttcaggtgcacagactgtcgctaagtccattta

SEQ ID NO: 38846 - DNA, 60 bp, Artificial
  Synthetic oligonucleotide
cttaccaaaagcgtcgtactcacactaaagtcccaccccatgaccatacttgacgccatg

SEQ ID NO: 38847 - DNA, 60 bp, Artificial
  Synthetic oligonucleotide
ctggggcaccaaacaacctccagcccaccaccaacacttcaggtgcacagactgtcgcta

SEQ ID NO: 38848 - DNA, 60 bp, Artificial
  Synthetic oligonucleotide
ttctgagccagatgtacgctggctgggctggtggcatgcagttccgcttcatagtcgctg

SEQ ID NO: 38849 - DNA, 60 bp, Artificial
  Synthetic oligonucleotide
atcgacgcccgttcacttgaacctgtcaccatcaccatgccagacttgcgtcccaacatg

SEQ ID NO: 38850 - DNA, 60 bp, Artificial
  Synthetic oligonucleotide
acccttcacagagcccaggggcaagccacctagaccgtcagtactggaggaagccaagaa

SEQ ID NO: 38851 - DNA, 60 bp, Artificial
  Synthetic oligonucleotide
gcaagtcatgagagaccagctgaaacccttcacagagcccaggggcaagccacctagacc

SEQ ID NO: 38852 - DNA, 60 bp, Artificial
  Synthetic oligonucleotide
attggtcatgaagtggttcttcccaaagaaagaggagaaagccgagatggaaaccttaag

SEQ ID NO: 38853 - DNA, 60 bp, Artificial
  Synthetic oligonucleotide
gttatgaagtggttcttcccaaagaaagaggaaaaggcagagatggagaccctgagggcc

SEQ ID NO: 38854 - DNA, 60 bp, Artificial
  Synthetic oligonucleotide
acactgtcagactccaccaagattgacgtgctggcgtatgatggttgcacgcagaccacc

SEQ ID NO: 38855 - DNA, 60 bp, Artificial
  Synthetic oligonucleotide
gcatgtgctcaacctgcgctaacgtgcttaaatattacaattgggacccccacattaaat

SEQ ID NO: 38856 - DNA, 60 bp, Artificial
  Synthetic oligonucleotide
cctatccagtctgtccgccttgcgcgcgcagctgggtttagggttgacccttactcatac

SEQ ID NO: 38857 - DNA, 60 bp, Artificial
  Synthetic oligonucleotide
tgtgcgtcgagtcctttggcatgctacccaggatcaggaggaatctatgcgcctggtttg

SEQ ID NO: 38858 - DNA, 60 bp, Artificial
  Synthetic oligonucleotide
ggctcaaagcttcctagaccactttaggatgctagtcattgataatcctgaccccgtggc

SEQ ID NO: 38859 - DNA, 60 bp, Artificial
  Synthetic oligonucleotide
gcgcggaatccgatagttcacacccgcctgacataacgactgaggatcaaggaaccgtcg

SEQ ID NO: 38860 - DNA, 60 bp, Artificial
  Synthetic oligonucleotide
ttcttactttctaccaaagcccggcgaagtacttcaccgatgtcttatggctgtggcgaa

SEQ ID NO: 38861 - DNA, 60 bp, Artificial
  Synthetic oligonucleotide
tggttccatggaggtgagattcaccataagtggttctggagttttcggtggtaaggtcgc

SEQ ID NO: 38862 - DNA, 60 bp, Artificial
  Synthetic oligonucleotide
accgtcgttgccactgggcctcaaccatcagccccagcaatggccaccttggctactgct

SEQ ID NO: 38863 - DNA, 60 bp, Artificial
  Synthetic oligonucleotide
ctcctacaattccctcatgtgcttgttgacgccagacagacagaacccgtaatcttcacg

SEQ ID NO: 38864 - DNA, 60 bp, Artificial
  Synthetic oligonucleotide
gctgttgctactctgtcatcaccctcaattgccgtgtttggtggtgtgtccttcaaaacc

SEQ ID NO: 38865 - DNA, 60 bp, Artificial
  Synthetic oligonucleotide
atgccacttacttctattcttaactctcttaatcactgtcttcttgtgggatcggctatt

SEQ ID NO: 38866 - DNA, 60 bp, Artificial
  Synthetic oligonucleotide
tcaagctaccctccaatacagtcctgtccaacaggttctggaaggaagaagcaccaacaa

SEQ ID NO: 38867 - DNA, 60 bp, Artificial
  Synthetic oligonucleotide
tagagctggtcaggtggttggacttcacgctggaagtggtggtgattctgccccaggcag

SEQ ID NO: 38868 - DNA, 60 bp, Artificial
  Synthetic oligonucleotide
ggccctgaatcgccacttgtcactaaccgggaagtggcaggcactcaaggctgtgtacga

SEQ ID NO: 38869 - DNA, 60 bp, Artificial
  Synthetic oligonucleotide
gtcatgaagtgcatcgaaccgaaattatgaaagcccccaagcagaagaaaaagagttttg

SEQ ID NO: 38870 - DNA, 60 bp, Artificial
  Synthetic oligonucleotide
caatggctcaactggctcaggctttgacaaccggatttaccttctctgttaacgacgccc

SEQ ID NO: 38871 - DNA, 60 bp, Artificial
  Synthetic oligonucleotide
cgatgtgttgccaacagcccaaacaacgggtgggaactttccagttgcattcgtttccaa

SEQ ID NO: 38872 - DNA, 60 bp, Artificial
  Synthetic oligonucleotide
cctcatacgaaaggctgaccgcactgctcttccaatgaatgctgctcgcatcgccgcacg

SEQ ID NO: 38873 - DNA, 60 bp, Artificial
  Synthetic oligonucleotide
cgaaagcatgttgacacagtctacaagattcttgctgcagcgaaaacaacctacaacggt

SEQ ID NO: 38874 - DNA, 60 bp, Artificial
  Synthetic oligonucleotide
acgaaggccataatatcggttcgtccgtgtttgtggttggagacgacaaagagattccac

SEQ ID NO: 38875 - DNA, 60 bp, Artificial
  Synthetic oligonucleotide
gataattgaaaaccacgaaaacactgccgagggatggatagtaactctaaccgccgtagc

SEQ ID NO: 38876 - DNA, 60 bp, Artificial
  Synthetic oligonucleotide
tgcaggcggcatctccaacaacaacggtccggaaggtggattcagatttggatccattgc

SEQ ID NO: 38877 - DNA, 60 bp, Artificial
  Synthetic oligonucleotide
ccgagctgcgctcggtgtcacaatgtcggatcaggatgtcacattgatgttctaccacat

SEQ ID NO: 38878 - DNA, 60 bp, Artificial
  Synthetic oligonucleotide
cgttggcgtggccgttgttgcagcctctgctttcaaggaagtttccagcgcgattatggc

SEQ ID NO: 38879 - DNA, 60 bp, Artificial
  Synthetic oligonucleotide
cccctccgacgtggaggtgcccgtcgccaaaactggtgaaagtgtaagcgacatcatggt

SEQ ID NO: 38880 - DNA, 60 bp, Artificial
  Synthetic oligonucleotide
ccatctcgtttgataccgagacggtctcaattctgggagggaaaccgccttcctggggtt

SEQ ID NO: 38881 - DNA, 60 bp, Artificial
  Synthetic oligonucleotide
cacttcaatttcctcttgaagccacctatgtgggaatggcgtcactgcacaacaagctgc

SEQ ID NO: 38882 - DNA, 60 bp, Artificial
  Synthetic oligonucleotide
aatgcccgatggtccctcgccacccaaggggtacccataccacatgagtaccaactggga

SEQ ID NO: 38883 - DNA, 60 bp, Artificial
  Synthetic oligonucleotide
agttcgttcgaaaccagtttggcgtccgcgctttgctggatcgatcgtcactgattcgcc

SEQ ID NO: 38884 - DNA, 60 bp, Artificial
  Synthetic oligonucleotide
gtgtttggattactatcaattggctatggagtacgagggcatcaaattggacgcaccaac

SEQ ID NO: 38885 - DNA, 60 bp, Artificial
  Synthetic oligonucleotide
ccccgcaggttacgatgaacaccgcctcgacaagattgtgtttgagaattgagctatggc

SEQ ID NO: 38886 - DNA, 60 bp, Artificial
  Synthetic oligonucleotide
gctgtaggaaaacggagattgatttggggatgcgacgttggcgtggccgttgttgcagcc

SEQ ID NO: 38887 - DNA, 60 bp, Artificial
  Synthetic oligonucleotide
ttttccggactatctagcctcccttggcgaagaagaatttatctatgagggtgacgaacc

SEQ ID NO: 38888 - DNA, 60 bp, Artificial
  Synthetic oligonucleotide
cggaagaaggatcacattgaccctgaaaccggaaagtgggacgagactctgcgcaaccac

SEQ ID NO: 38889 - DNA, 60 bp, Artificial
  Synthetic oligonucleotide
cacaccaacctgcaaacctgggagcccaagacgagaggtaccctgtatctctcacatcca

SEQ ID NO: 38890 - DNA, 60 bp, Artificial
  Synthetic oligonucleotide
cccactgtgccaaacgcaaagctcttgcaacacaaagaacagcacccgtatgcatcatcc

SEQ ID NO: 38891 - DNA, 60 bp, Artificial
  Synthetic oligonucleotide
ggagtcgtgttaagggagcaaccattgtgcttacagccctcctactgtacatgaaaaggt

SEQ ID NO: 38892 - DNA, 60 bp, Artificial
  Synthetic oligonucleotide
ccagggtcaagccttgggtgcgcagatcaaattccaagaggctgaaaacaagtttaaccg

SEQ ID NO: 38893 - DNA, 60 bp, Artificial
  Synthetic oligonucleotide
cacttgtcgctggaataaccgctatacagaaattggccgcaatgttttcagcatggtcga

SEQ ID NO: 38894 - DNA, 57 bp, Artificial
  Synthetic oligonucleotide
ttatcatgacctccaataatgaaacaccagtgaaaccaaactccacaagagcacccc

SEQ ID NO: 38895 - DNA, 60 bp, Artificial
  Synthetic oligonucleotide
gtgttagttgttagatgataggtttagataagatgatttggcctcaataaagccactggt

SEQ ID NO: 38896 - DNA, 60 bp, Artificial
  Synthetic oligonucleotide
ggtgtttggacatggtacagcggttggttctaagacgacgaactccaaggttctttctgg

SEQ ID NO: 38897 - DNA, 60 bp, Artificial
  Synthetic oligonucleotide
tgcaaacgacagacctttggctggtcccgaccagtacacaagggtattgaagtgcgcgtc

SEQ ID NO: 38898 - DNA, 60 bp, Artificial
  Synthetic oligonucleotide
ggagtgtgctcgtagcatcacccgacaacttacttccctttccaactacctttccgccca

SEQ ID NO: 38899 - DNA, 60 bp, Artificial
  Synthetic oligonucleotide
ctgtacctcggaactgattaatgacgacggctcttctcaatcccctggcgacatcccaca

SEQ ID NO: 38900 - DNA, 60 bp, Artificial
  Synthetic oligonucleotide
gcggaactggctttatcgctgaggcctgcccatcatgtgctctctacgacaaatgcccaa

SEQ ID NO: 38901 - DNA, 60 bp, Artificial
  Synthetic oligonucleotide
cacttgcgtacgcgattgcgaacagactgtccgcacaaaaaccatctgtgttgaatctca

SEQ ID NO: 38902 - DNA, 60 bp, Artificial
  Synthetic oligonucleotide
cccctggcgacatcccacactggactcaccacaagattgcatccggaattgttaacatcc

SEQ ID NO: 38903 - DNA, 60 bp, Artificial
  Synthetic oligonucleotide
cgccgcccatgtgaagaaagcccttggaaccaactcccatccggccaacaatgacatgtc

SEQ ID NO: 38904 - DNA, 60 bp, Artificial
  Synthetic oligonucleotide
cacgatcactgtggaaacacgtggtggaactgatttcgaatttcatcttctcaaaccacc

SEQ ID NO: 38905 - DNA, 60 bp, Artificial
  Synthetic oligonucleotide
cagcggccctccgccactggatggacaacacaaagttttcctccgaccatgtcgttacac

SEQ ID NO: 38906 - DNA, 60 bp, Artificial
  Synthetic oligonucleotide
gatggcgaattggcccatttccaaattcagcaaccgccaagctctgctgcccctgttacg

SEQ ID NO: 38907 - DNA, 60 bp, Artificial
  Synthetic oligonucleotide
ggcaggcaatgttccgctggatgcgcttccatgatctcgggttgtggacaggagatcgca

SEQ ID NO: 38908 - DNA, 60 bp, Artificial
  Synthetic oligonucleotide
tgtgcgtcgagttctttggcatgctacccaggatcaagaggaatctatgcgcctggtttg

SEQ ID NO: 38909 - DNA, 60 bp, Artificial
  Synthetic oligonucleotide
acaagtgctggagcgttgccaactccggtaaagcccttcaccacatatacgcgtgtgggt

SEQ ID NO: 38910 - DNA, 60 bp, Artificial
  Synthetic oligonucleotide
ccgcacctgtgggtaagaacacacccatcatgttcgcgtctgttgtcaggcgcaccggtg

SEQ ID NO: 38911 - DNA, 60 bp, Artificial
  Synthetic oligonucleotide
aacccattcacagccgttctgagccagatgtacgctggctgggctggtggcatgcagttc

SEQ ID NO: 38912 - DNA, 60 bp, Artificial
  Synthetic oligonucleotide
ccagcaagggcctcagtgatgaagagtacgatgagtacaagagaatcagggaggagagac

SEQ ID NO: 38913 - DNA, 60 bp, Artificial
  Synthetic oligonucleotide
ccagcaccattggactatgtcaactttgaagcatgctcgaggcgcatcgacttcctcgtg

SEQ ID NO: 38914 - DNA, 60 bp, Artificial
  Synthetic oligonucleotide
ccgttcacttgaacctgtcaccatcaccatgccagacttgcgtcccaacatgtaccaccc

SEQ ID NO: 38915 - DNA, 60 bp, Artificial
  Synthetic oligonucleotide
ccgttcacttgaacctgttactatcaccatgccagacttgcgtcccaacatgtaccaccc

SEQ ID NO: 38916 - DNA, 59 bp, Artificial
  Synthetic oligonucleotide
cagaggtcaacaatgaggttatggctttggagcccgttgttggtgccgctattgcggca

SEQ ID NO: 38917 - DNA, 57 bp, Artificial
  Synthetic oligonucleotide
cccatctgatgggtccgcagccaacctcgtcccagaggtcaacaatgaggttatggc

SEQ ID NO: 38918 - DNA, 59 bp, Artificial
  Synthetic oligonucleotide
agtctcaaccgtgcctaaagaaattttggactcctggactggcgctttcaacacgcgca

SEQ ID NO: 38919 - DNA, 57 bp, Artificial
  Synthetic oligonucleotide
tctcaaccgtgcctaaagaagttttggactcctggactggcgctttcaacacgcgca

SEQ ID NO: 38920 - DNA, 60 bp, Artificial
  Synthetic oligonucleotide
cagaggtcaacaatgaggttatggctttggagcccgttgttggtgccgctattgcggcac

SEQ ID NO: 38921 - DNA, 60 bp, Artificial
  Synthetic oligonucleotide
cagtctcaaccgtgcctaaagaaattttggactcctggactggcgctttcaacacgcgca

SEQ ID NO: 38922 - DNA, 60 bp, Artificial
  Synthetic oligonucleotide
ccagcaccactggactatgtcaactttgaagcatgctcgaggcgcatcgatttcctcgtg

SEQ ID NO: 38923 - DNA, 60 bp, Artificial
  Synthetic oligonucleotide
gtgtatgcagatgcacctgacattgagaaagccaagcgtgacttccccggtcaaccagat

SEQ ID NO: 38924 - DNA, 60 bp, Artificial
  Synthetic oligonucleotide
cacacttgggctcgtcacagggtcggagatcagaaagaggaacccagatgacttcaagcc

SEQ ID NO: 38925 - DNA, 60 bp, Artificial
  Synthetic oligonucleotide
ggatcggagtgaaacaaggtactgggcaccaaacgccgccttcacaacttcaatgtcagg

SEQ ID NO: 38926 - DNA, 60 bp, Artificial
  Synthetic oligonucleotide
ggagtacctccaagacagggacagatactatgaagagctagccattgccaaggccactga

SEQ ID NO: 38927 - DNA, 60 bp, Artificial
  Synthetic oligonucleotide
agacaaagaagggtgccccaagccccgagatgaagatgacctcactatcgattccaagga

SEQ ID NO: 38928 - DNA, 60 bp, Artificial
  Synthetic oligonucleotide
gcaacaagatcgccgccttcaggcaattggcagctgaaaacaaatatggtatggtggaca

SEQ ID NO: 38929 - DNA, 60 bp, Artificial
  Synthetic oligonucleotide
aacggcgaggatgaaccaaaggtggtatatagggtgggagaaggtgtgtccgggctgccc

SEQ ID NO: 38930 - DNA, 60 bp, Artificial
  Synthetic oligonucleotide
gaccccagtgaaaccatgataccacatgcgcagagacccgtgcagctcatggcactactg

SEQ ID NO: 38931 - DNA, 60 bp, Artificial
  Synthetic oligonucleotide
cgacagcacaacaagggcacatgaagcaaaagtggacacaacatctggccgcttcacccc

SEQ ID NO: 38932 - DNA, 60 bp, Artificial
  Synthetic oligonucleotide
atgaagatggcgtcgaatgacgctgctccatctaatgatggtgccgccggcctcgtccca

SEQ ID NO: 38933 - DNA, 60 bp, Artificial
  Synthetic oligonucleotide
tggaactccctacgaccctgcagaggacataccagctcctttgggcacaccagacttccg

SEQ ID NO: 38934 - DNA, 60 bp, Artificial
  Synthetic oligonucleotide
ggccgcgaatgctattctgtgtgctctctcatcactcttcactagacccattaaggacat

SEQ ID NO: 38935 - DNA, 60 bp, Artificial
  Synthetic oligonucleotide
gcccgcacgtgattgtggatgtcaggcagttggaaccaatcaatctcccgatgcctgatg

SEQ ID NO: 38936 - DNA, 60 bp, Artificial
  Synthetic oligonucleotide
acagctgccatcctctggtgggcggtctaacggggtcctagactgcttggtcccccagga

SEQ ID NO: 38937 - DNA, 60 bp, Artificial
  Synthetic oligonucleotide
cgcaccgctcccgccaggcacctatgaaccagcatacctaggtgggaaagatccacgtgt

SEQ ID NO: 38938 - DNA, 60 bp, Artificial
  Synthetic oligonucleotide
gagcccagagggaaaccaccaaacccgagtgtcctagaatcagcaaagaagaccatcatc

SEQ ID NO: 38939 - DNA, 60 bp, Artificial
  Synthetic oligonucleotide
gaggcgtttggggtgcccatgagccaaatccaaattcacaaatcaggggaattctgccgc

SEQ ID NO: 38940 - DNA, 60 bp, Artificial
  Synthetic oligonucleotide
agaagtgccaaatagtgtacaacgggtgtacctacgcaatggagtctgatgggagaggca

SEQ ID NO: 38941 - DNA, 60 bp, Artificial
  Synthetic oligonucleotide
gccccttgcagccagaatgggaacccacgccacaatgaaaatccagggaagaacggtggg

SEQ ID NO: 38942 - DNA, 60 bp, Artificial
  Synthetic oligonucleotide
ggtgtagtgaagtctctgacgcttgggtcattgatcgccagggcttccggtttgcttcac

SEQ ID NO: 38943 - DNA, 60 bp, Artificial
  Synthetic oligonucleotide
gttttggactcctggacatctgcgtttaacacgcgcagacagccgctgtttgcacacctt

SEQ ID NO: 38944 - DNA, 60 bp, Artificial
  Synthetic oligonucleotide
ccctagcgtttggtcaaggatagtcaactttggcacaggctggggattctgggtttctcc

SEQ ID NO: 38945 - DNA, 60 bp, Artificial
  Synthetic oligonucleotide
atacacttgcccccatgggaactggaaacgggcgtagaaggattcaataatggctggagc

SEQ ID NO: 38946 - DNA, 60 bp, Artificial
  Synthetic oligonucleotide
ggattcaccaaggagaagatcggcaagatgctttcatcagctgcatccacgcttaaggcc

SEQ ID NO: 38947 - DNA, 60 bp, Artificial
  Synthetic oligonucleotide
gtgtcttgtagggtgttaactaggcccagccctgatttctcgttcaattttcttgtccca

SEQ ID NO: 38948 - DNA, 60 bp, Artificial
  Synthetic oligonucleotide
accacctgctgcaataagtctcgccaaaattgaactgacaccactgtctctctactggag

SEQ ID NO: 38949 - DNA, 60 bp, Artificial
  Synthetic oligonucleotide
cctgtcgggcgaccaaaggattggactggtgcccagaaacggtgtagaccactgggacgc

SEQ ID NO: 38950 - DNA, 60 bp, Artificial
  Synthetic oligonucleotide
tggtttaacgttcctccgccgaacagtcacccgtgacccagcaggttggtttggaaagct

SEQ ID NO: 38951 - DNA, 60 bp, Artificial
  Synthetic oligonucleotide
ggtgaggttctctgctgaaccacagctagcacaaatagtagctgaagacctgctagcacc

SEQ ID NO: 38952 - DNA, 60 bp, Artificial
  Synthetic oligonucleotide
tacgaagaaggcaaacacatgccaccggtttacaccgcagcgctcaaggatgagctggtg

SEQ ID NO: 38953 - DNA, 60 bp, Artificial
  Synthetic oligonucleotide
tcaggggcacactcactagatcaacaagcagggccagcgaccaagccgacacaccaaccc

SEQ ID NO: 38954 - DNA, 60 bp, Artificial
  Synthetic oligonucleotide
ggactcttgacctggaggaagagaaagcaagaaaactgtccaccaaatccgcatcacccg

SEQ ID NO: 38955 - DNA, 55 bp, Artificial
  Synthetic oligonucleotide
cccacatgtcatgtgtgatgtgcgcaccctggagcccattcaactccctcttctt

SEQ ID NO: 38956 - DNA, 60 bp, Artificial
  Synthetic oligonucleotide
tgcaattcggctatcatataggaatttgtttaagaattgaccacaagtatccctttgggc

SEQ ID NO: 38957 - DNA, 60 bp, Artificial
  Synthetic oligonucleotide
aaggtgactgcgggctgccctatttcaattccaaccgccagttagtggcgttgcacgccg

SEQ ID NO: 38958 - DNA, 60 bp, Artificial
  Synthetic oligonucleotide
gtcatttgcacatccaactatcccacgtcagttatcccagacaacccaagggctgcggcc

SEQ ID NO: 38959 - DNA, 60 bp, Artificial
  Synthetic oligonucleotide
cagtgtgcgacgtgatacctaatcccgccacccgtgacatcgccgagactgcgttgacaa

SEQ ID NO: 38960 - DNA, 60 bp, Artificial
  Synthetic oligonucleotide
ccaccacacgactgtctgccgcggcccaaagggagtatatgtatagagtgtggagccctc

SEQ ID NO: 38961 - DNA, 60 bp, Artificial
  Synthetic oligonucleotide
tgcgagatgaaatcatacgcacggcaccacgcagagccccaactcgcccccaacaacact

SEQ ID NO: 38962 - DNA, 60 bp, Artificial
  Synthetic oligonucleotide
accatatggcagatgtcacattcccaagcaacccagaatgcactatcttccgcacgccag

SEQ ID NO: 38963 - DNA, 59 bp, Artificial
  Synthetic oligonucleotide
ggggtatgcccactgggacccgataccacagatcccctgcgtggcccgaagaacagcct

SEQ ID NO: 38964 - DNA, 60 bp, Artificial
  Synthetic oligonucleotide
ccacacatgcaaataggcagtggctccccggtttacttcaccacacggttgcacccagtc

SEQ ID NO: 38965 - DNA, 60 bp, Artificial
  Synthetic oligonucleotide
tggcatcaacgtccgacgaggttaacggtagtgctttcaaaataacacgcactgtcggag

SEQ ID NO: 38966 - DNA, 60 bp, Artificial
  Synthetic oligonucleotide
ggtggctccattggcattaatgtgccgcttgaaccagaaacccgattccaatacgttgga

SEQ ID NO: 38967 - DNA, 60 bp, Artificial
  Synthetic oligonucleotide
atgggaagggccagacgggtgttccaatgagttggttggtaggcgccctgcagactttcg

SEQ ID NO: 38968 - DNA, 60 bp, Artificial
  Synthetic oligonucleotide
gaagtcccagatggagttaactcgagacctctccatcaatggtccagccgcccgggtgca

SEQ ID NO: 38969 - DNA, 60 bp, Artificial
  Synthetic oligonucleotide
ggcgccctgcagactttcgggtctttggctgatgtcgctggcactgtctccaacatagtg

SEQ ID NO: 38970 - DNA, 60 bp, Artificial
  Synthetic oligonucleotide
gaagaggccccgacagcaattgtggagttcacgcagggtggtgaccacattggatacggg

SEQ ID NO: 38971 - DNA, 60 bp, Artificial
  Synthetic oligonucleotide
gaaacggtcccacacgcgttcgggtgggttttagacaattaagcgattgtcgccgtccct

SEQ ID NO: 38972 - DNA, 60 bp, Artificial
  Synthetic oligonucleotide
ccgttgtgtttgacaccgtacgccaaattgccataaagactgcccaaggagagggactgg

SEQ ID NO: 38973 - DNA, 60 bp, Artificial
  Synthetic oligonucleotide
gtgattggttagatggtttccaagccattcaagccaatagttctcaatgccactttcgag

SEQ ID NO: 38974 - DNA, 51 bp, Artificial
  Synthetic oligonucleotide
ccagagccaaagcagagcaacaacccgatggtcgttgacccgcctggcaca

SEQ ID NO: 38975 - DNA, 60 bp, Artificial
  Synthetic oligonucleotide
cctggccaagttgcaaggggaacttgttgacgcaactcgcaccccaggacatgcattgcg

SEQ ID NO: 38976 - DNA, 60 bp, Artificial
  Synthetic oligonucleotide
aagtgagtgcacggcgtattgctggttcaggtgagcgtgtgatctgggggaatttggatc

SEQ ID NO: 38977 - DNA, 60 bp, Artificial
  Synthetic oligonucleotide
aaggctggcaaacgcaggttgttgtggggctgtgatgctgccaccacactcatagccacc

SEQ ID NO: 38978 - DNA, 60 bp, Artificial
  Synthetic oligonucleotide
cttcatgtggtccgttcgtacagggtctcaagggcgactactgggatgaagagcaacagc

SEQ ID NO: 38979 - DNA, 60 bp, Artificial
  Synthetic oligonucleotide
gctttgccaccccagcacgagtgccgtatgttggtacaccacctaccaccatccattcca

SEQ ID NO: 38980 - DNA, 60 bp, Artificial
  Synthetic oligonucleotide
accaaggttgtgccagtgcaggccacgctcactgagatgcacgcacgtaggcaattcgag

SEQ ID NO: 38981 - DNA, 60 bp, Artificial
  Synthetic oligonucleotide
cctaccaccatccattccaacacacctcgatgtatgacttggggcgaaaccatagcactg

SEQ ID NO: 38982 - DNA, 60 bp, Artificial
  Synthetic oligonucleotide
aaacggattgaagccctatacggaacccaccgctggggtaccaccacagctcttgtcccg

SEQ ID NO: 38983 - DNA, 60 bp, Artificial
  Synthetic oligonucleotide
acgtggcatgcgccatggccacagggccggagtgagcctctcagacgatgagtatgacga

SEQ ID NO: 38984 - DNA, 60 bp, Artificial
  Synthetic oligonucleotide
atcagacccttccagcccacctgctttcgatcgacaggcacgcagtgcacagctggagaa

SEQ ID NO: 38985 - DNA, 59 bp, Artificial
  Synthetic oligonucleotide
cagcagcgcgcggagtgcgttggttgaaggatctctatgaggaggctgaaggacgtaga

SEQ ID NO: 38986 - DNA, 60 bp, Artificial
  Synthetic oligonucleotide
ctggggcacctggcattggaaaaacccgcttggcacaatatgttggccagcgctttggga

SEQ ID NO: 38987 - DNA, 60 bp, Artificial
  Synthetic oligonucleotide
tgtgtcagaactggaaacccaggcaaacaacattagatccaccattaagcttgacacccc

SEQ ID NO: 38988 - DNA, 60 bp, Artificial
  Synthetic oligonucleotide
gggaacactgtttgtatatgggatgagtttgatgtcgattccaagggtgcgtttgtggag

SEQ ID NO: 38989 - DNA, 60 bp, Artificial
  Synthetic oligonucleotide
ccaggtcaacagatggagaatggggtttcaccagaaggtctgctgcccaggcgcctaggt

SEQ ID NO: 38990 - DNA, 60 bp, Artificial
  Synthetic oligonucleotide
tgttgtggcaggagcgcatgctcagctatgatggacaccaagcaatactgtactcgtcac

SEQ ID NO: 38991 - DNA, 54 bp, Artificial
  Synthetic oligonucleotide
tcccttggtggccggccgtctactggggtatgtggacctgccataagctttcaa

SEQ ID NO: 38992 - DNA, 60 bp, Artificial
  Synthetic oligonucleotide
cccaatggcagcagaaattgtgacaaaccaggcacattcaacgtcacgtcatgcttggct

SEQ ID NO: 38993 - DNA, 60 bp, Artificial
  Synthetic oligonucleotide
caggcacgggggttgctcttaccaacagtatcaaccccgcatccctggcattggtgcgca

SEQ ID NO: 38994 - DNA, 60 bp, Artificial
  Synthetic oligonucleotide
cggtcctgtgattctatctgcagccaacattgcctacctcatgaccagaggctcaaggac

SEQ ID NO: 38995 - DNA, 60 bp, Artificial
  Synthetic oligonucleotide
ggcggtagttttgaggtccggctatcgatctctggttctggcgtgttcgctgggcgtatc

SEQ ID NO: 38996 - DNA, 60 bp, Artificial
  Synthetic oligonucleotide
caacattaacccgtacactgctcacctctctgggatgtgggccgggtggggcggtagttt

SEQ ID NO: 38997 - DNA, 60 bp, Artificial
  Synthetic oligonucleotide
ggactcaagcccactgcagcagacaagagtgatgcaatcaaacctaccaacacaccagtg

SEQ ID NO: 38998 - DNA, 60 bp, Artificial
  Synthetic oligonucleotide
caccatgtggcgtcaagttgtgaagaaaggtaaagcgtacttctgcccccttgttaagac

SEQ ID NO: 38999 - DNA, 60 bp, Artificial
  Synthetic oligonucleotide
gatccctgatgttagagcagtggactaccataggatggacggtgctgagcccacttgctc

SEQ ID NO: 39000 - DNA, 59 bp, Artificial
  Synthetic oligonucleotide
ctttgaccatcattcttcaacaacacaagtacaccgtctcagggtggctggccaccatg

SEQ ID NO: 39001 - DNA, 60 bp, Artificial
  Synthetic oligonucleotide
gcggcggcctaccatctgggatgccatttacatctgttgtcaattccattaaccatatga

SEQ ID NO: 39002 - DNA, 60 bp, Artificial
  Synthetic oligonucleotide
tatagtgtgtgccctgccactgcttcaatcttccacgctgtgcttgcgaacctgacatcg

SEQ ID NO: 39003 - DNA, 60 bp, Artificial
  Synthetic oligonucleotide
ggcgcctaggttactcgcgtggtaaccgtgttggtggtttggtggttggcatggtcttgg

SEQ ID NO: 39004 - DNA, 60 bp, Artificial
  Synthetic oligonucleotide
tgtcacaagtcgtggaactggtcaaaacaacgttcaccgctcaaggcccgacagacttgg

SEQ ID NO: 39005 - DNA, 60 bp, Artificial
  Synthetic oligonucleotide
gctgaaccccacccaattgtgtcttgtgccattgaggctctttcctccccagcagagggt

SEQ ID NO: 39006 - DNA, 60 bp, Artificial
  Synthetic oligonucleotide
ttgatctggcccttgggccagggctcaacccctaccttgcccacctctcagccatgtaca

SEQ ID NO: 39007 - DNA, 60 bp, Artificial
  Synthetic oligonucleotide
ttgatttggcccttgggccagggctcaacccctaccttgcccacctctcagccatgtaca

SEQ ID NO: 39008 - DNA, 60 bp, Artificial
  Synthetic oligonucleotide
ctcaaccctcaagcctctagtaggtgcatttatcgacggtctccggcttctaaccgttga

SEQ ID NO: 39009 - DNA, 60 bp, Artificial
  Synthetic oligonucleotide
gacctggctaatgttgctgcccatattcgcaaagcgttgtccactcagtcgcacccggcc

SEQ ID NO: 39010 - DNA, 60 bp, Artificial
  Synthetic oligonucleotide
ggagaggaggctattggtgctgatcgtgatagagtggtgcgtatcagtgtccttcccgag

SEQ ID NO: 39011 - DNA, 60 bp, Artificial
  Synthetic oligonucleotide
tgctgtgttcaatggagtagctgttaaggtatcatctggtttgccctcaggaatgccgct

SEQ ID NO: 39012 - DNA, 60 bp, Artificial
  Synthetic oligonucleotide
gcgtgagtgaccaaattttcggcaatctctcagcatacggtctcaaacccaccagggttg

SEQ ID NO: 39013 - DNA, 60 bp, Artificial
  Synthetic oligonucleotide
gctccacctcccactttcctcaacatagattctctagcacaaaccatgaaacaggatttc

SEQ ID NO: 39014 - DNA, 60 bp, Artificial
  Synthetic oligonucleotide
gtgttggtccagaagcctccagctcaataggttgcacggcacacgttcttactcctgatg

SEQ ID NO: 39015 - DNA, 60 bp, Artificial
  Synthetic oligonucleotide
gcctaaggcgtacacaacaacatccgggaaaattgtaggctgttttgcaaccacgtcaac

SEQ ID NO: 39016 - DNA, 60 bp, Artificial
  Synthetic oligonucleotide
tcagagccgcatatgatgtgcttactgtccccgataagatccccgctatgctgcgacatt

SEQ ID NO: 39017 - DNA, 60 bp, Artificial
  Synthetic oligonucleotide
ggaataaacatagacggtccaagcgttgaggcgttgtaccaacggattaagagcgccgca

SEQ ID NO: 39018 - DNA, 60 bp, Artificial
  Synthetic oligonucleotide
tattgacgtgaccaaccctcttgcggaatctcacaagcgcgcccgtcctgggacagctgt

SEQ ID NO: 39019 - DNA, 60 bp, Artificial
  Synthetic oligonucleotide
tcacttcatgtaacaaaagaaaggctatagcgcgaaagagacaagttccagtttgctaca

SEQ ID NO: 39020 - DNA, 60 bp, Artificial
  Synthetic oligonucleotide
caacatggaattctgagtcaattgtaaacgaactatccgcaaggactgttgcactctcag

SEQ ID NO: 39021 - DNA, 60 bp, Artificial
  Synthetic oligonucleotide
gagctggcactgcaacgtatgaatcttgatcgccaggcgttgaacaaccaagtagagcag

SEQ ID NO: 39022 - DNA, 60 bp, Artificial
  Synthetic oligonucleotide
cggccctttgtattccaggctaatcggcacttcgacttcaatcaagaaaccgctggctgg

SEQ ID NO: 39023 - DNA, 60 bp, Artificial
  Synthetic oligonucleotide
gctaatgattctaactcttctggttgcatcctcaccgtggaaacaaagccagggcctgac

SEQ ID NO: 39024 - DNA, 60 bp, Artificial
  Synthetic oligonucleotide
ccatgacacctcttgtgggccatatttaggcggtagaaagaaggatcacatgaccaacgg

SEQ ID NO: 39025 - DNA, 60 bp, Artificial
  Synthetic oligonucleotide
ccccgatgtccaaaatcgttaacagctattgttgtggactccctgaaaccatactgtgag

SEQ ID NO: 39026 - DNA, 60 bp, Artificial
  Synthetic oligonucleotide
gcgacctgttgaaaaggttgctgaggggaaaaggagaatgatctggggatgtgacgtggg

SEQ ID NO: 39027 - DNA, 60 bp, Artificial
  Synthetic oligonucleotide
ggctgagaaagcggttgagtacgaaggactccattttgaaccaccgtcctacacctcggc

SEQ ID NO: 39028 - DNA, 60 bp, Artificial
  Synthetic oligonucleotide
ccaacaccctcaaagctgtggaccgaggctatgatgtaagcttcgctgaagaatctggcc

SEQ ID NO: 39029 - DNA, 60 bp, Artificial
  Synthetic oligonucleotide
cgtcattgccgaaccaagcgcccaaatggcaactgcagctgacacggcaaccggaaaaag

SEQ ID NO: 39030 - DNA, 60 bp, Artificial
  Synthetic oligonucleotide
ccgggaggcattgtgattcttgaatcatgtggcggtgcacgcatttgggcgctgggtcac

SEQ ID NO: 39031 - DNA, 60 bp, Artificial
  Synthetic oligonucleotide
gttacccagaactcctcccagaatttggaacggtgtgggactgtgatcagtcaccgctgc

SEQ ID NO: 39032 - DNA, 60 bp, Artificial
  Synthetic oligonucleotide
tgtttgatttggcctgggctcttcgccgtcaccttacactaactggacagtttcaagcga

SEQ ID NO: 39033 - DNA, 60 bp, Artificial
  Synthetic oligonucleotide
atccttgagtcctgtggtggggcacgcatctgggctttgggtcacaacgtgatccgtgct

SEQ ID NO: 39034 - DNA, 60 bp, Artificial
  Synthetic oligonucleotide
acatgggaagggcgtcatgaagactctcaccactggctccctcattgcccgggcatcagg

SEQ ID NO: 39035 - DNA, 60 bp, Artificial
  Synthetic oligonucleotide
gtcgcagaagaccttctttctcctagcgtggtggatgtgggtgacttcaaaatatcaatc

SEQ ID NO: 39036 - DNA, 60 bp, Artificial
  Synthetic oligonucleotide
ctctagccaaggcacagtctcaaccgtgcctaaagaaattttggactcctggactggcgc

SEQ ID NO: 39037 - DNA, 60 bp, Artificial
  Synthetic oligonucleotide
gccagagcttaaacaagcactcaagaatatctcaatcaagaggtgccagatagtgtacag

SEQ ID NO: 39038 - DNA, 60 bp, Artificial
  Synthetic oligonucleotide
ctcaaggatgtcagaaccatgccagatcttaaacaagcactcaagaatatctcaatcaag

SEQ ID NO: 39039 - DNA, 60 bp, Artificial
  Synthetic oligonucleotide
aaacaagcactcaagaatatctcaatcaagaagtgccagatagtgtacagtggttgcacc

SEQ ID NO: 39040 - DNA, 60 bp, Artificial
  Synthetic oligonucleotide
gccagagcttaaacaagcactcaagaatatctcaatcaagaagtgccagatagtgtacag

SEQ ID NO: 39041 - DNA, 60 bp, Artificial
  Synthetic oligonucleotide
ccagttttgtgaatgaagatggcgtcgaatgacgccagcccatctgatgggtccacagcc

SEQ ID NO: 39042 - DNA, 60 bp, Artificial
  Synthetic oligonucleotide
cctggccaatccagcaccactggactatgtcaactttgaagcatgctcgaggcgcatcga

SEQ ID NO: 39043 - DNA, 60 bp, Artificial
  Synthetic oligonucleotide
gccaacccagcaccactggactatgtcaactttgaagcatgctcgaggcgcatcgatttc

SEQ ID NO: 39044 - DNA, 58 bp, Artificial
  Synthetic oligonucleotide
atgcaattcggctatcatataggaatttgtttaaaatgtgatcatgtgtatcccttcg

SEQ ID NO: 39045 - DNA, 60 bp, Artificial
  Synthetic oligonucleotide
tgctgggtttagggttgacccttactcatacacaaatcagaatttttatgacgatcaatt

SEQ ID NO: 39046 - DNA, 60 bp, Artificial
  Synthetic oligonucleotide
ctggatttagggttgacccttactcatacacaaaccaaaacttttatgacgatcaattaa

SEQ ID NO: 39047 - DNA, 60 bp, Artificial
  Synthetic oligonucleotide
cccatatccgtaaggcactatctgcccagtcacacccagccaatgttgagatgtgcaaag

SEQ ID NO: 39048 - DNA, 60 bp, Artificial
  Synthetic oligonucleotide
cagatcggtcacctatcgtggattctgccacaaacaccctaaagagcccgcctatcgcaa

SEQ ID NO: 39049 - DNA, 60 bp, Artificial
  Synthetic oligonucleotide
acgaggcctcacttgcagccttggaagggaattgtgtgcaatctgcgttgggagtgtgta

SEQ ID NO: 39050 - DNA, 60 bp, Artificial
  Synthetic oligonucleotide
tgctgatgacgccgacgcggttaaattcagatcatggtggaactccagaacccgcgctgg

SEQ ID NO: 39051 - DNA, 60 bp, Artificial
  Synthetic oligonucleotide
gctaccccgagttactccctgaattcggaactgtttgggattgcagtcgggcccctctcg

SEQ ID NO: 39052 - DNA, 60 bp, Artificial
  Synthetic oligonucleotide
ctgcacacactgaagacttcacagactgctcccatcaacctgcttcactgggcagcggcg

SEQ ID NO: 39053 - DNA, 60 bp, Artificial
  Synthetic oligonucleotide
gtggctaactcattctggtacatggctgcggcgatcctgtgctatctaatcactgggttg

SEQ ID NO: 39054 - DNA, 60 bp, Artificial
  Synthetic oligonucleotide
ctgttgaagccccctggctcaatgctgacccatggctctgtaccttctgacttgatccca

SEQ ID NO: 39055 - DNA, 60 bp, Artificial
  Synthetic oligonucleotide
gggtacaccgggattggagaggaagcaattggagccattcgggatagggtggtgcgtatc

SEQ ID NO: 39056 - DNA, 60 bp, Artificial
  Synthetic oligonucleotide
cactcggccagcagcgtgaactggcacttcaacgcatgaatctcgaccgtcaagcgctga

SEQ ID NO: 39057 - DNA, 60 bp, Artificial
  Synthetic oligonucleotide
cactcgtgacccttggggatctccggtggcgactgagtggaaaccaaaggcttacaccac

SEQ ID NO: 39058 - DNA, 60 bp, Artificial
  Synthetic oligonucleotide
tggccctcgggccagggctcaacccttaccttgcccacctctcagccatgtacaccggct

SEQ ID NO: 39059 - DNA, 60 bp, Artificial
  Synthetic oligonucleotide
gacatgatgctgggcagtgataatcccaactggggcgctcgtgctacaggcgatgcccta

SEQ ID NO: 39060 - DNA, 55 bp, Artificial
  Synthetic oligonucleotide
ttttgaattcatccaatttggcacgctccgtccgctgggacgcgaggaattttgg

SEQ ID NO: 39061 - DNA, 54 bp, Artificial
  Synthetic oligonucleotide
agttctttctgtcacctacatgggaatgcgctttgcctacaatcctttgagtgg

SEQ ID NO: 39062 - DNA, 60 bp, Artificial
  Synthetic oligonucleotide
ggtatttccctccgcacggtgggatcacgaccatcaatcaggtcggtgttctcgaccacg

SEQ ID NO: 39063 - DNA, 60 bp, Artificial
  Synthetic oligonucleotide
acataatgctgggcagtgataatcccaactggggcgcccgtgccactggtgatgccctgt

SEQ ID NO: 39064 - DNA, 52 bp, Artificial
  Synthetic oligonucleotide
gcaaattaaccaaattgacccctggatcttccaaaattttgtccaatgcccc

SEQ ID NO: 39065 - DNA, 52 bp, Artificial
  Synthetic oligonucleotide
gcaaatcaaccaaattgacccctggatcttccaaaattttgtccaatgcccc

SEQ ID NO: 39066 - DNA, 60 bp, Artificial
  Synthetic oligonucleotide
cttgcgtcccaacatgtaccatccaactggtgaccctggccttgtccccacactggtcct

SEQ ID NO: 39067 - DNA, 60 bp, Artificial
  Synthetic oligonucleotide
gcgtcccaacatgtaccatccaactggtgaccctggccttgtccccacactggtccttag

SEQ ID NO: 39068 - DNA, 60 bp, Artificial
  Synthetic oligonucleotide
tcacagagctgaaggaaggtggcatggatttttacgtgcccagacaggaacccatgttca

SEQ ID NO: 39069 - DNA, 60 bp, Artificial
  Synthetic oligonucleotide
ggcggtttgtgtccttcccaaagatcgggagtagcagggcataggttggaagagaaacct

SEQ ID NO: 39070 - DNA, 60 bp, Artificial
  Synthetic oligonucleotide
gtgtccttcccaaagatcgggagtagcagggcataggttggaagagaaacctttctgtga

SEQ ID NO: 39071 - DNA, 60 bp, Artificial
  Synthetic oligonucleotide
ctcacacgcttctgtcgtttgacgacctcgaatttctcttgcacaagaaagacctaaccg

SEQ ID NO: 39072 - DNA, 60 bp, Artificial
  Synthetic oligonucleotide
gccactatggctactactcacacgctcctgtcgtttgacgacctcgaatttctcttacac

SEQ ID NO: 39073 - DNA, 60 bp, Artificial
  Synthetic oligonucleotide
cgagtggtggaattgggctcagtggtgaggtgtttgagaattagccactatggctactac

SEQ ID NO: 39074 - DNA, 60 bp, Artificial
  Synthetic oligonucleotide
cgtgagtggtggaattgggctcagtggtgaggtgtttgagaattagccactatggctact

SEQ ID NO: 39075 - DNA, 60 bp, Artificial
  Synthetic oligonucleotide
cgcaagtggtggaattgggctcggtggtgaggtgtttgagaattagccactatggctact

SEQ ID NO: 39076 - DNA, 60 bp, Artificial
  Synthetic oligonucleotide
gtttggcagttaacctttgcatctggtttcatggagattggcttgagtgtggacgggtac

SEQ ID NO: 39077 - DNA, 60 bp, Artificial
  Synthetic oligonucleotide
gtttggcagttaacctttgcatctggtttcatggagattggcttaagtgtggacgggtac

SEQ ID NO: 39078 - DNA, 60 bp, Artificial
  Synthetic oligonucleotide
cgtttggcagttaacctttgcatctggtttcatggagataggtttaagtgtggacgggta

SEQ ID NO: 39079 - DNA, 51 bp, Artificial
  Synthetic oligonucleotide
gatgctagtgtagttaatgcttataatgtgtataatcctgccagcaatggc

SEQ ID NO: 39080 - DNA, 60 bp, Artificial
  Synthetic oligonucleotide
gaacaaccaagtagagcagtttaacaaaattctagagcagagggtacaaggccccatcca

SEQ ID NO: 39081 - DNA, 60 bp, Artificial
  Synthetic oligonucleotide
tggtctgaaaccgacccggaccgacaaaacggatgctgagataacgcctatccctgctga

SEQ ID NO: 39082 - DNA, 54 bp, Artificial
  Synthetic oligonucleotide
tgcaaatctgcactcttactatagcttctacaaaacggactagttccaacctgc

SEQ ID NO: 39083 - DNA, 60 bp, Artificial
  Synthetic oligonucleotide
gtgacttcccaggccaacctgacatgtggaagaacgctttcagttctgatttctcacaca

SEQ ID NO: 39084 - DNA, 60 bp, Artificial
  Synthetic oligonucleotide
gatgtaaccgcccttcactgtgatgtgttcgaagtttgagcatgtgctcaacctgcgcta

SEQ ID NO: 39085 - DNA, 60 bp, Artificial
  Synthetic oligonucleotide
aactcattgacgtacgccccgtgggacccaggccgtccaaaagcacactcgtgttcaacc

SEQ ID NO: 39086 - DNA, 60 bp, Artificial
  Synthetic oligonucleotide
ggcggggattggcggcccaccccaacaggtggaccaacaagagacatggaggacaaactt

SEQ ID NO: 39087 - DNA, 60 bp, Artificial
  Synthetic oligonucleotide
actcattgacgtacgccccgtgggacccaggccgtccaaaagcacactcgtgttcaacct

SEQ ID NO: 39088 - DNA, 60 bp, Artificial
  Synthetic oligonucleotide
gtttggcagttaacctttgcatctggtttcatggagattggtttaagtgtggacgggtac

SEQ ID NO: 39089 - DNA, 60 bp, Artificial
  Synthetic oligonucleotide
cgtgtggcagttaacctttgcatctggtttcatggagattggtttaagtgtggacgggta

SEQ ID NO: 39090 - DNA, 60 bp, Artificial
  Synthetic oligonucleotide
cgtatggcagttaacctttgcatctggtttcatggagattggtttaagtgtggacgggta

SEQ ID NO: 39091 - DNA, 60 bp, Artificial
  Synthetic oligonucleotide
tttttcgtatggcagttaacctttgcatctggtttcatggagattggtttaagtgtggac

SEQ ID NO: 39092 - DNA, 60 bp, Artificial
  Synthetic oligonucleotide
gcgcctggtctgcatgctgtatacgccactccgcacaaacagcccgggtgatgagtcttt

SEQ ID NO: 39093 - DNA, 60 bp, Artificial
  Synthetic oligonucleotide
ctcagggacaagacccctccctgttgtattcgggcaaccggaagactggcttggccagtt

SEQ ID NO: 39094 - DNA, 60 bp, Artificial
  Synthetic oligonucleotide
gggacaagacccctccctgttgtattcgggcaactggggaactagcttggccagttttcc

SEQ ID NO: 39095 - DNA, 60 bp, Artificial
  Synthetic oligonucleotide
tgaatgaagatggcgtcgaatgacgccgctccatctactgatggtgcagccggcctcgtg

SEQ ID NO: 39096 - DNA, 60 bp, Artificial
  Synthetic oligonucleotide
ggcctgggctcttcggagacacctgaaatggactggccagcggcaactcataaaagctgc

SEQ ID NO: 39097 - DNA, 60 bp, Artificial
  Synthetic oligonucleotide
ggcctgggctcttcggagacacctgaaatggactggacagtggcaactcattaaggctgc

SEQ ID NO: 39098 - DNA, 60 bp, Artificial
  Synthetic oligonucleotide
ccgtccacaccgtgtatgacatggcctgggctcttcggagacacctgaaatggtctggac

SEQ ID NO: 39099 - DNA, 60 bp, Artificial
  Synthetic oligonucleotide
ctgataaagacgtgacaacgatgttctactacatcaaggggaaagtgatcaatgatcagg

SEQ ID NO: 39100 - DNA, 60 bp, Artificial
  Synthetic oligonucleotide
gagtagcagggcataggttggaagagaaacctttctgtgaaaatgatttctgcttactgc

SEQ ID NO: 39101 - DNA, 60 bp, Artificial
  Synthetic oligonucleotide
gtgaatgatgatggcgtcgaaagacgtcgttgcagctactgctgctagcagtaacaatgc

SEQ ID NO: 39102 - DNA, 60 bp, Artificial
  Synthetic oligonucleotide
ggtaaccgttaactcggtgtttgatttggcctgggctcttcgtcgtcacctgtcactggc

SEQ ID NO: 39103 - DNA, 59 bp, Artificial
  Synthetic oligonucleotide
cggaggcgcgatcttcagtatttctataacaagctctctcgcaccatgcgtgcggaggc

SEQ ID NO: 39104 - DNA, 53 bp, Artificial
  Synthetic oligonucleotide
gatgtaaccgcccttcactgtgatgtgttcgaagtttgagcatgtgctcaacc

SEQ ID NO: 39105 - DNA, 60 bp, Artificial
  Synthetic oligonucleotide
tacccgccaatcagcatgtggtaaccgttaattcggtgtttgatttggcctgggctgttc

SEQ ID NO: 39106 - DNA, 59 bp, Artificial
  Synthetic oligonucleotide
ttccattataatcagaaagatgatcccaagatgagaattgtggctatgctttatacccc

SEQ ID NO: 39107 - DNA, 60 bp, Artificial
  Synthetic oligonucleotide
gcagggtgttgactagaccctcccctgattttgattttacatacctggtaccaccaacag

SEQ ID NO: 39108 - DNA, 60 bp, Artificial
  Synthetic oligonucleotide
gggtgttgactagaccctcccctgattttgatttcacatatctggtgccaccaacagtgg

SEQ ID NO: 39109 - DNA, 50 bp, Artificial
  Synthetic oligonucleotide
ccccatgggaactggaaatgggcgtagaagggttcaataatggctggagc

SEQ ID NO: 39110 - DNA, 50 bp, Artificial
  Synthetic oligonucleotide
ccccatgggaactggaaatgggcgtagaaggattcagtgatggctggagc

SEQ ID NO: 39111 - DNA, 60 bp, Artificial
  Synthetic oligonucleotide
gtgctcagcaatgggctcagttcattaattaatgcaggtgctaatgcaataaatcagagg

SEQ ID NO: 39112 - DNA, 60 bp, Artificial
  Synthetic oligonucleotide
gtgctcagcaatgggctcagctcactaattaatgcaggtgctaatgcaataaatcagaga

SEQ ID NO: 39113 - DNA, 60 bp, Artificial
  Synthetic oligonucleotide
tgctcagcaatgggctcagctcactaattaatgcaggtgctaatgcaataaatcagagag

SEQ ID NO: 39114 - DNA, 60 bp, Artificial
  Synthetic oligonucleotide
gctcagcaatgggctcagttcattaattaatgcaggtgctaatgcaataaatcagagggc

SEQ ID NO: 39115 - DNA, 60 bp, Artificial
  Synthetic oligonucleotide
gggctgcatccaggactagtgagtgggttagagatcaaaatagaaatttggaaccctaca

SEQ ID NO: 39116 - DNA, 60 bp, Artificial
  Synthetic oligonucleotide
ctggacacctgcgttcaacacccgcaggcagccgctttttgcacacctccgtaagagggg

SEQ ID NO: 39117 - DNA, 60 bp, Artificial
  Synthetic oligonucleotide
ggtcaccggtcaaacaaatattatagacccttggattagagcaaattttgtccaggcccc

SEQ ID NO: 39118 - DNA, 60 bp, Artificial
  Synthetic oligonucleotide
tcaaacaaatattatagacccttggattagagcaaattttgtccaggcccctaatggtga

SEQ ID NO: 39119 - DNA, 60 bp, Artificial
  Synthetic oligonucleotide
ccaggcaagaacctatgttcaggtggatgagattctcagatttgagcacgtgggagggcg

SEQ ID NO: 39120 - DNA, 60 bp, Artificial
  Synthetic oligonucleotide
agccccggtcaccggtcaaacaaatattatagacccttggattagagcaaattttgtcca

SEQ ID NO: 39121 - DNA, 60 bp, Artificial
  Synthetic oligonucleotide
ctggcacatttagcaagaatgtacaacgggtatgccggtgggatggaggtgcaggtcatg

SEQ ID NO: 39122 - DNA, 60 bp, Artificial
  Synthetic oligonucleotide
ttccattataatcagaaagatgatcccaagatgagaattgtggctatgctttataccccc

SEQ ID NO: 39123 - DNA, 56 bp, Artificial
  Synthetic oligonucleotide
agaggatgaaagtgatcaagtcgtggaactgccattagccaacagggaaggtaaaa

SEQ ID NO: 39124 - DNA, 60 bp, Artificial
  Synthetic oligonucleotide
cacaggcagccttttctatacctagaataactatccatccattagtagcttggtggcggg

SEQ ID NO: 39125 - DNA, 60 bp, Artificial
  Synthetic oligonucleotide
cccaacaaacatggatggcaccagtggtgctggtcagctggttccagaggcaagtacagc

SEQ ID NO: 39126 - DNA, 60 bp, Artificial
  Synthetic oligonucleotide
acaatggggtgggatgaagagccaagacagcaggagagcaccgttaaggcgtggtgcgac

SEQ ID NO: 39127 - DNA, 60 bp, Artificial
  Synthetic oligonucleotide
ccaaaagaccaaagagatcgtccaccgcgcactgctatggaggtgaggaagacaatgggg

SEQ ID NO: 39128 - DNA, 60 bp, Artificial
  Synthetic oligonucleotide
cccaggcagagatgacatcccgtatacgcccagtggtgatcatgatgtgtggccccccag

SEQ ID NO: 39129 - DNA, 60 bp, Artificial
  Synthetic oligonucleotide
aaggagaagcaaaatcaaacctcatcccaacatcaagctgtcagtacggccaccctcgcg

SEQ ID NO: 39130 - DNA, 60 bp, Artificial
  Synthetic oligonucleotide
cctgcctacaaagtgccgtcctttccatacttcaggtggctggttctgctgtagtggtga

SEQ ID NO: 39131 - DNA, 60 bp, Artificial
  Synthetic oligonucleotide
cagaccaggtggcaaggttgggctcgtgccccgtgaatccatagaccattgggacggtta

SEQ ID NO: 39132 - DNA, 60 bp, Artificial
  Synthetic oligonucleotide
cacgagtaccgaacagcccgcattggagggtggacataaagagcacaactgtagggtcca

SEQ ID NO: 39133 - DNA, 60 bp, Artificial
  Synthetic oligonucleotide
gcccctccttcaatttggagcagagttgtcaaatttggtagcggctggggattttgggtg

SEQ ID NO: 39134 - DNA, 60 bp, Artificial
  Synthetic oligonucleotide
caccaacgcaatagaacaggtcatggacacaccagtggcatggagcttcagcgatgcctg

SEQ ID NO: 39135 - DNA, 60 bp, Artificial
  Synthetic oligonucleotide
tgttccccctggttttgcagcccaaaatgtctcaatagcccaagcaacaatgtttcccca

SEQ ID NO: 39136 - DNA, 60 bp, Artificial
  Synthetic oligonucleotide
ggaacggaagctcatttgtacgggaactgggagatcaagctgctcatgccaacaacatgt

SEQ ID NO: 39137 - DNA, 60 bp, Artificial
  Synthetic oligonucleotide
actgagattgatgggactccctaccatgcatttgagagccccgccccaattggtttcccc

SEQ ID NO: 39138 - DNA, 60 bp, Artificial
  Synthetic oligonucleotide
agtgtcaaagacggtttaccatcaggttttccatgcacatcacaggttaacagcatcaac

SEQ ID NO: 39139 - DNA, 60 bp, Artificial
  Synthetic oligonucleotide
gttcaagcccctcaaggagagttcacaatttcccctaacaacactcccggagatatattg

SEQ ID NO: 39140 - DNA, 60 bp, Artificial
  Synthetic oligonucleotide
cacattcgagagagccacgccacacgaaagcactgatgaatgtcaggcagtgacctggtc

SEQ ID NO: 39141 - DNA, 60 bp, Artificial
  Synthetic oligonucleotide
cctggcccagatgtacaatggatgggttggtaatatgaaagttagggtgctgctcgctgg

SEQ ID NO: 39142 - DNA, 60 bp, Artificial
  Synthetic oligonucleotide
ggacccattgtggttaaacagcaagtggatggcctggtcttccttcggcgcaccatctca

SEQ ID NO: 39143 - DNA, 60 bp, Artificial
  Synthetic oligonucleotide
aatatggcactcgaccttcttcgccggtcacaaacaccctccccatcccggcaagaccac

SEQ ID NO: 39144 - DNA, 60 bp, Artificial
  Synthetic oligonucleotide
gtggcccaggattccacttttgctccccatctaggcactatccactataccaacgctaac

SEQ ID NO: 39145 - DNA, 60 bp, Artificial
  Synthetic oligonucleotide
ttcaaccctgactgaggctgcccagttggccccaccaatataccctcccggatttggcga

SEQ ID NO: 39146 - DNA, 60 bp, Artificial
  Synthetic oligonucleotide
gtgaggctgcactgttgcactatgttgaccctgacacacatcgcaatttgggcgaattca

SEQ ID NO: 39147 - DNA, 60 bp, Artificial
  Synthetic oligonucleotide
gacaccgccagacatctccagttttatcgcatcactattgcctgatttccacctccaggg

SEQ ID NO: 39148 - DNA, 60 bp, Artificial
  Synthetic oligonucleotide
cagggtggcagcattcaccagcttggctcgtgctaacgggttggggcttatcaatatggc

SEQ ID NO: 39149 - DNA, 60 bp, Artificial
  Synthetic oligonucleotide
gaccatggaagggctgcgcaatgcgctggtggggtaccggatagaagagtgtgacataat

SEQ ID NO: 39150 - DNA, 60 bp, Artificial
  Synthetic oligonucleotide
cactcctgactttcaccaagattcaaagcttgagatggttcgggatgctgtgctgtcggc

SEQ ID NO: 39151 - DNA, 60 bp, Artificial
  Synthetic oligonucleotide
cgccaggaagagaggcgacaattggggctcgttagtggtactgagatccgcaagcgcaag

SEQ ID NO: 39152 - DNA, 60 bp, Artificial
  Synthetic oligonucleotide
ctactgttctgcgcctgaaattgaacaggcacggagggcccacccaggcgataccaatgc

SEQ ID NO: 39153 - DNA, 60 bp, Artificial
  Synthetic oligonucleotide
agaaaagagtggtaattacagcattcaggaataccttgaagatcgccaacgctatgagga

SEQ ID NO: 39154 - DNA, 60 bp, Artificial
  Synthetic oligonucleotide
ccactacccttaacagactactaatccaagccactgcgctgaccatggaaaggcaagatg

SEQ ID NO: 39155 - DNA, 60 bp, Artificial
  Synthetic oligonucleotide
gtctctgatgcaataattataacaaccaatgctcctggcccagccccagtcgactttgtc

SEQ ID NO: 39156 - DNA, 60 bp, Artificial
  Synthetic oligonucleotide
gggacaaagtcaccaaagttatgaagagtgccgttgacggattgcgctcggcaacacaac

SEQ ID NO: 39157 - DNA, 60 bp, Artificial
  Synthetic oligonucleotide
ggggaagcccttaataatgtcgccgtccacagagttggtgagttcactcagttccgtttc

SEQ ID NO: 39158 - DNA, 60 bp, Artificial
  Synthetic oligonucleotide
ggggtgaccagacagagagaaccttgcgaggcattgaagatgctgtgatagacatggagg

SEQ ID NO: 39159 - DNA, 60 bp, Artificial
  Synthetic oligonucleotide
gagttgacggggggccatctttacaacaagtgctcagagaccagcttaaaccttttgctg

SEQ ID NO: 39160 - DNA, 60 bp, Artificial
  Synthetic oligonucleotide
ccggtccggtccgtaggctaggcattcggaggtcataatggcccaagccataattggagc

SEQ ID NO: 39161 - DNA, 60 bp, Artificial
  Synthetic oligonucleotide
gcagccacaaaatcaggcaatacagtggtgtgcgcaatccaaggtggtgaaggtgaagcc

SEQ ID NO: 39162 - DNA, 60 bp, Artificial
  Synthetic oligonucleotide
agcctcagcactcgctacaatatgctaactaatgctggcctatcctcctcagatgcggca

SEQ ID NO: 39163 - DNA, 60 bp, Artificial
  Synthetic oligonucleotide
attggaacggcaccagggtgtcagctccacggtcatctgccactacgttgaagtctgggg

SEQ ID NO: 39164 - DNA, 60 bp, Artificial
  Synthetic oligonucleotide
ggaagctcatgcatggtcagtcggggatgctgctcactggtgccaacgctaaaggcatgg

SEQ ID NO: 39165 - DNA, 60 bp, Artificial
  Synthetic oligonucleotide
cctagtgcattacagatgacatgggtaaccccacctggttctagctccacctctactgtt

SEQ ID NO: 39166 - DNA, 60 bp, Artificial
  Synthetic oligonucleotide
tgactccactccaactatgagattgatttgtatgttgtatacccctctccgtgctagtgg

SEQ ID NO: 39167 - DNA, 60 bp, Artificial
  Synthetic oligonucleotide
cccgtggcccgaatcatgatgacccatttgaaactttggttccacactcacaaagaaagg

SEQ ID NO: 39168 - DNA, 58 bp, Artificial
  Synthetic oligonucleotide
aaaatagcaagcagagtcatccaggaggtaaaggaaggtgggctagaaatctacatcc

SEQ ID NO: 39169 - DNA, 60 bp, Artificial
  Synthetic oligonucleotide
cacaggtgctcaaggaatatggcctaaaacccacaagacccgataaaactgatggaccca

SEQ ID NO: 39170 - DNA, 60 bp, Artificial
  Synthetic oligonucleotide
ccctcaatgttctctcaaattctagggttccctctttgataaagtctatgatggtctccc

SEQ ID NO: 39171 - DNA, 58 bp, Artificial
  Synthetic oligonucleotide
agggcaagcaacagcagaaagcacccacacaggccggcttttcaaatcctaactatgg

SEQ ID NO: 39172 - DNA, 60 bp, Artificial
  Synthetic oligonucleotide
ctagtcagctctgcaaaattcgagggacggtttaccatgcaactggtggccaagggctta

SEQ ID NO: 39173 - DNA, 65 bp, Artificial
  Synthetic oligonucleotide
ggtaatggttttagtagcaatgttaggttaagcaatatgcataatgatgctagtgtagttaatgc

SEQ ID NO: 39174 - DNA, 60 bp, Artificial
  Synthetic oligonucleotide
caggaacgctcagcagtctttgtgaatgaggatgagtgatggcgcagcgccaaaagccaa

SEQ ID NO: 39175 - DNA, 60 bp, Artificial
  Synthetic oligonucleotide
cgctcagcagtctttgtgaatgaggatgagtgatggcgcagcgccaaaagccagcggctc

SEQ ID NO: 39176 - DNA, 60 bp, Artificial
  Synthetic oligonucleotide
cgctcagcagtctttgtgaatgaggatgagtgatggcgcagcgccaaaagccaatggctc

SEQ ID NO: 39177 - DNA, 60 bp, Artificial
  Synthetic oligonucleotide
cgctcagcagtctttgtgaatgaggatgagtgatggcgcagcgccaaaagccaacggctc

SEQ ID NO: 39178 - DNA, 60 bp, Artificial
  Synthetic oligonucleotide
ctcagcagtctttgtgaatgaggatgagtgatggcgcagcgccaagagccaacggctctg

SEQ ID NO: 39179 - DNA, 60 bp, Artificial
  Synthetic oligonucleotide
gtctttgtgaatgaggatgagtgatggcgcagcgccaaaagccaacggctctgaggccag

SEQ ID NO: 39180 - DNA, 60 bp, Artificial
  Synthetic oligonucleotide
gtctttgtgaatgaggatgagtgatggcgcagcgccaaaagccaatggctctgaggccag

SEQ ID NO: 39181 - DNA, 60 bp, Artificial
  Synthetic oligonucleotide
gcgcctggtttgcatgctgtacacgccactccgcacaaacagcccgggtgatgagtcttt

SEQ ID NO: 39182 - DNA, 60 bp, Artificial
  Synthetic oligonucleotide
gcctggtctgcatgctgtacacgccactccgcacaaacagcccgggtgatgagtcttttg

SEQ ID NO: 39183 - DNA, 60 bp, Artificial
  Synthetic oligonucleotide
acggacggacccaccggaaacgaacccgaattcatcgctgaggcttgccctagctgcgct

SEQ ID NO: 39184 - DNA, 60 bp, Artificial
  Synthetic oligonucleotide
cggatccaccggaaacgaacccgaattcatcgctgaggcttgccctagttgcgcactcta

SEQ ID NO: 39185 - DNA, 60 bp, Artificial
  Synthetic oligonucleotide
cccaccggaaacgaacccgaattcatcgctgaggcttgccctagctgcgctctttacgac

SEQ ID NO: 39186 - DNA, 60 bp, Artificial
  Synthetic oligonucleotide
cggtaacgaacccgaattcatcgctgaggcttgccctagctgtgctctttacgacacctg

SEQ ID NO: 39187 - DNA, 60 bp, Artificial
  Synthetic oligonucleotide
cggaaacgaacccgaattcatcgctgaggcttgccctagttgcgcactctacgacacgtg

SEQ ID NO: 39188 - DNA, 60 bp, Artificial
  Synthetic oligonucleotide
caaagcacgatcggtattgtgttgactactcaaagtgggactcaacccaaccaccaaaag

SEQ ID NO: 39189 - DNA, 60 bp, Artificial
  Synthetic oligonucleotide
ccgcaaaatcttcaagtgacggagtgctttctagcatggctgtcacttttaaacgagccc

SEQ ID NO: 39190 - DNA, 60 bp, Artificial
  Synthetic oligonucleotide
gtaaaagaaatttgagacaatgtctcaaactctgagcttcgtgcttaaaactcacaacgt

SEQ ID NO: 39191 - DNA, 60 bp, Artificial
  Synthetic oligonucleotide
gacaatgtctcaaactctgagcttcgtgcttaaaactcacagtgtccgcaaggactttgt

SEQ ID NO: 39192 - DNA, 60 bp, Artificial
  Synthetic oligonucleotide
gacaatgtctcaaactctgagcttcgtgcttaaaactcacagtgtccgaaaggactttgt

SEQ ID NO: 39193 - DNA, 60 bp, Artificial
  Synthetic oligonucleotide
agacaatgtctcaaactctgagcttcgtgcttaaaactcacaacgtccgtaaggactttg

SEQ ID NO: 39194 - DNA, 60 bp, Artificial
  Synthetic oligonucleotide
gacaatgtctcaaactctgagcttcgtgcttaaaactcacagtgtccgtaaggactttgt

SEQ ID NO: 39195 - DNA, 60 bp, Artificial
  Synthetic oligonucleotide
gggagggcgatcgcaatctggctcccagctttgtgaatgaagatggcgtcgaatgacgcc

SEQ ID NO: 39196 - DNA, 60 bp, Artificial
  Synthetic oligonucleotide
atgtggtaaccgttaattcggtgtttgatttggcctgggctcttcgtcgtcaccttacgc

SEQ ID NO: 39197 - DNA, 58 bp, Artificial
  Synthetic oligonucleotide
ccctcggaccaggactcaacccctaccttgcccacctctcagccatgtacaccggctg

SEQ ID NO: 39198 - DNA, 58 bp, Artificial
  Synthetic oligonucleotide
ccctcgggccagggctcaacccctaccttgcccacctctcagccatgtacaccggctg

SEQ ID NO: 39199 - DNA, 60 bp, Artificial
  Synthetic oligonucleotide
ccaatctggccaacccagcaccactggactatgtcaactttgaagcttgctcgaggcgca

SEQ ID NO: 39200 - DNA, 60 bp, Artificial
  Synthetic oligonucleotide
aaatccatctgtcaaccgagtttacgacgtgcagtcccgcacacgcgggtggagcttccc

SEQ ID NO: 39201 - DNA, 60 bp, Artificial
  Synthetic oligonucleotide
atgacgtgcagtcccgcacacgcgggtggagcttccccatccctagctctagcgtgttca

SEQ ID NO: 39202 - DNA, 60 bp, Artificial
  Synthetic oligonucleotide
tagcgaagaaggctgtaaccaacattcggggtggagcccactgggccaaggggctgttca

SEQ ID NO: 39203 - DNA, 60 bp, Artificial
  Synthetic oligonucleotide
gcgtgtgtatggcatcaagtcccgagagctagcgaagaaggctgtaaccaacattcgggg

SEQ ID NO: 39204 - DNA, 60 bp, Artificial
  Synthetic oligonucleotide
ggcccctgacaaaggtaccgcacgatttgtggaggccgtgattaacacttaccacaactc

SEQ ID NO: 39205 - DNA, 60 bp, Artificial
  Synthetic oligonucleotide
ttgtcgaggccgtgattaacacttaccacaactccggcctggttgcccaacccgcagcgt

SEQ ID NO: 39206 - DNA, 60 bp, Artificial
  Synthetic oligonucleotide
taaatattgcaatagacatcctgtgcaacacctgtgccagtgatgggctgcgagttgcgg

SEQ ID NO: 39207 - DNA, 60 bp, Artificial
  Synthetic oligonucleotide
ctctggaattaccatccccagatattctctagaagaagcccgtgccatctatgacgggcg

SEQ ID NO: 39208 - DNA, 60 bp, Artificial
  Synthetic oligonucleotide
atcaccatccccagatattctctagaagaagcccgtgctatttacgacgggcgcttttat

SEQ ID NO: 39209 - DNA, 60 bp, Artificial
  Synthetic oligonucleotide
gcatccaacatgtgagtatgccatgcaatagtgatttaattagagaaggaaacatgagtg

SEQ ID NO: 39210 - DNA, 57 bp, Artificial
  Synthetic oligonucleotide
cccctgggcaccgacaccctatcggtcacagtgcagctcgagaccaggcccggccgt

SEQ ID NO: 39211 - DNA, 53 bp, Artificial
  Synthetic oligonucleotide
ctcacagtgtccgaaaggactttgtgcactccgtcaagttaacacttgcacgg

SEQ ID NO: 39212 - DNA, 60 bp, Artificial
  Synthetic oligonucleotide
cagcccgagtgatgagtcttttgtggtctctggccgccttctttctaagccggcagctga

SEQ ID NO: 39213 - DNA, 60 bp, Artificial
  Synthetic oligonucleotide
ggggcaccaggcaacctccagcccaccaccaacacttcaggtgcacaaattgtcgccaag

SEQ ID NO: 39214 - DNA, 60 bp, Artificial
  Synthetic oligonucleotide
tttgccactggtgcaccaggcaacctccagcccaccaccaacacttcaggtgcacagact

SEQ ID NO: 39215 - DNA, 60 bp, Artificial
  Synthetic oligonucleotide
ttaggttttgccactggggcaccaggcaacctccagcccaccaccaacacttcaggtgca

SEQ ID NO: 39216 - DNA, 60 bp, Artificial
  Synthetic oligonucleotide
tcccaacatgtaccatccaactggtgaccctggccttgtccccacactagtccttagtgt

SEQ ID NO: 39217 - DNA, 60 bp, Artificial
  Synthetic oligonucleotide
gcaccaggcaacctccagcccaccaccaacacttcaggtgcacaaattgtcgccaagtcc

SEQ ID NO: 39218 - DNA, 60 bp, Artificial
  Synthetic oligonucleotide
cgctcgttcactcgaacctgttaccatcaccatgccagacttgcgtcccaacatgtacca

SEQ ID NO: 39219 - DNA, 60 bp, Artificial
  Synthetic oligonucleotide
cgttcactcgaacctgttaccatcaccatgccagacttgcgtcccaacatgtaccatcca

SEQ ID NO: 39220 - DNA, 60 bp, Artificial
  Synthetic oligonucleotide
gcgtcgaatgacgccgctccatctaatgatggtgcagccggtctcgtaccagaggtcaac

SEQ ID NO: 39221 - DNA, 60 bp, Artificial
  Synthetic oligonucleotide
gcgtcgagtgacgccgctccatctaatgatggtgcagccggtcttgtaccagaggctaac

SEQ ID NO: 39222 - DNA, 60 bp, Artificial
  Synthetic oligonucleotide
aaggaacggcaaatactccatagaggaataccttcaggacagagacaagtattatgagga

SEQ ID NO: 39223 - DNA, 60 bp, Artificial
  Synthetic oligonucleotide
aataccttcaggacagagacaagtattatgaggaagtggccatagccagggcaactgagg

SEQ ID NO: 39224 - DNA, 60 bp, Artificial
  Synthetic oligonucleotide
aatactccatagaggaataccttcaggacagagacaagtattatgaggaggtggccatcg

SEQ ID NO: 39225 - DNA, 60 bp, Artificial
  Synthetic oligonucleotide
ggcgatcgcaatcttgctcccgaaggtgtgaatgaagatggcgtcgaatgacgctgctcc

SEQ ID NO: 39226 - DNA, 60 bp, Artificial
  Synthetic oligonucleotide
ttgatttggccctcgggccagggctcaacccctaccttgcccacctctcagccatgtaca

SEQ ID NO: 39227 - DNA, 60 bp, Artificial
  Synthetic oligonucleotide
ttgatctggccctcgggccagggctcaacccctaccttgcccacctctcagccatgtaca

SEQ ID NO: 39228 - DNA, 60 bp, Artificial
  Synthetic oligonucleotide
agggcgatcgcaatcttgctcccgaaggtgtgaatgaagatggcgtcgaatgacgctgct

SEQ ID NO: 39229 - DNA, 60 bp, Artificial
  Synthetic oligonucleotide
gtgacggagtgctttctagcatggctgtcacttttagacgagccctcggggcgcggtcta

SEQ ID NO: 39230 - DNA, 60 bp, Artificial
  Synthetic oligonucleotide
gtttgagtgatgtaaccgccctacactgtgatgtgttcgaagtttgagcatgtgctcaac

SEQ ID NO: 39231 - DNA, 53 bp, Artificial
  Synthetic oligonucleotide
gatgcaaccgccctacactgtgatgtgttcgaagtttgagcatgtgctcaacc

SEQ ID NO: 39232 - DNA, 60 bp, Artificial
  Synthetic oligonucleotide
cccattctccaacggtcaccaaatttacgcggacgaagctgccgctgcaaatctgcactc

SEQ ID NO: 39233 - DNA, 60 bp, Artificial
  Synthetic oligonucleotide
cccatctcaaacctgcatcaacagatgtagttaggagtggacccgaaaccctctgctgcg

SEQ ID NO: 39234 - DNA, 60 bp, Artificial
  Synthetic oligonucleotide
atgcataatgatgctagtgtagttaatgcttataatgtgtataatcctgccagcaatggc

SEQ ID NO: 39235 - DNA, 60 bp, Artificial
  Synthetic oligonucleotide
agcaatatgcataatgatgctagtgtagttaatgcttataatgtgtacaatcctgctagc

SEQ ID NO: 39236 - DNA, 60 bp, Artificial
  Synthetic oligonucleotide
cagccctaggtatgtacgcatcaagattcaggccaaaatctgaagcaaaagggaaaacca

SEQ ID NO: 39237 - DNA, 60 bp, Artificial
  Synthetic oligonucleotide
gcttggactactcaaagtgggactccaccatgtcaccgtgcgttgttaggttggcaatcg

SEQ ID NO: 39238 - DNA, 60 bp, Artificial
  Synthetic oligonucleotide
ccgaaaggactttgtgcactctgtcaagttaacacttgcacggaggcgcgatcttcagta

SEQ ID NO: 39239 - DNA, 59 bp, Artificial
  Synthetic oligonucleotide
agcaatcagagccgcatatgatgtgcttactgtccctgacaagatccctgcaatgctgc

SEQ ID NO: 39240 - DNA, 60 bp, Artificial
  Synthetic oligonucleotide
ccacaaaacaacccatttacagccgtgctgagccagatgtacgctggctgggctggtggc

SEQ ID NO: 39241 - DNA, 60 bp, Artificial
  Synthetic oligonucleotide
acagaacaacccattcacagccgtgctgagccagatgtacgctggctgggctggtggcat

SEQ ID NO: 39242 - DNA, 60 bp, Artificial
  Synthetic oligonucleotide
aacccattcacagccgtgctgagccagatgtacgctggctgggctggtggcatgcagttt

SEQ ID NO: 39243 - DNA, 60 bp, Artificial
  Synthetic oligonucleotide
ggggcaccaaacaacctccagcccaccaccaacacttcaggtgcacagactgtcgctaag

SEQ ID NO: 39244 - DNA, 60 bp, Artificial
  Synthetic oligonucleotide
aacaacccattcacagccgtgctgagccagatgtacgctggctgggctggtggcatgcag

SEQ ID NO: 39245 - DNA, 60 bp, Artificial
  Synthetic oligonucleotide
aaacaacccattcacagccgtgctgagccagatgtacgctggctgggctggtggcatgca

SEQ ID NO: 39246 - DNA, 60 bp, Artificial
  Synthetic oligonucleotide
gcgtggcatcacacaagtggctacattcatttggaaggtgatgtgcaatccggtgtgtgc

SEQ ID NO: 39247 - DNA, 60 bp, Artificial
  Synthetic oligonucleotide
cgaactcaggcaaagccctacaccatgtttatgcttgtgggctcaaagatgaactgcgcc

SEQ ID NO: 39248 - DNA, 60 bp, Artificial
  Synthetic oligonucleotide
caccctgacgccaactttgaaggggccaccaaacatgaatttgtgtacccagacgtgcaa

SEQ ID NO: 39249 - DNA, 60 bp, Artificial
  Synthetic oligonucleotide
ccaggccaagtgaggactttgagtttgtgctgatccgcgcaccttcaagcaaaacagtgg

SEQ ID NO: 39250 - DNA, 60 bp, Artificial
  Synthetic oligonucleotide
cggaacaaggccgtagaagggtggcagtcaaccagacatgggtccaagcctgggaagcat

SEQ ID NO: 39251 - DNA, 60 bp, Artificial
  Synthetic oligonucleotide
gttcaacaatgcccacgacatgacagcggaggaattccttgagttgcgcaaccgggcagc

SEQ ID NO: 39252 - DNA, 60 bp, Artificial
  Synthetic oligonucleotide
gcaactaaagctttgcaaggagtgaaaggaaagacaaaacgcgggcgcggtgccaggatc

SEQ ID NO: 39253 - DNA, 60 bp, Artificial
  Synthetic oligonucleotide
tcttggtggaccaacagacagctcaggcaggacgaggcccacgtgacagtggttgggaaa

SEQ ID NO: 39254 - DNA, 60 bp, Artificial
  Synthetic oligonucleotide
aacagctaagagacatatgtgtattgaggagtgtagcgagctggacaaggacgagagggg

SEQ ID NO: 39255 - DNA, 60 bp, Artificial
  Synthetic oligonucleotide
atctccaacatagcaccagatgggtttcctgacatgggggccatcccgttcagtggcacg

SEQ ID NO: 39256 - DNA, 60 bp, Artificial
  Synthetic oligonucleotide
agggactatgggctctctccaaccgcggcagacaaaaccgagttcattgacgtgtgcccc

SEQ ID NO: 39257 - DNA, 60 bp, Artificial
  Synthetic oligonucleotide
cctacaaccaagttcatgttgcgaggaagtcagatcccaggtcgcctggtgcggtccacc

SEQ ID NO: 39258 - DNA, 60 bp, Artificial
  Synthetic oligonucleotide
cctgctcaccaaccactgacctttgtctcgtaaaagcagagcccataagaagtgtggccc

SEQ ID NO: 39259 - DNA, 60 bp, Artificial
  Synthetic oligonucleotide
ctggtccagccccaggtttgacgacattgaccatccaagcggcaacgtttcctacccctc

SEQ ID NO: 39260 - DNA, 60 bp, Artificial
  Synthetic oligonucleotide
caggtttacccccacaatatgccagcacccggttttgtttttgttggggagaaattggtc

SEQ ID NO: 39261 - DNA, 60 bp, Artificial
  Synthetic oligonucleotide
aatgttatggagggtaagcctcgggctgacgcccctggcaccgctaccacagcatctgtt

SEQ ID NO: 39262 - DNA, 60 bp, Artificial
  Synthetic oligonucleotide
gctggctgtttgattttcatgtcctttgtgttttcagtcatagttggctaccttccaaac

SEQ ID NO: 39263 - DNA, 60 bp, Artificial
  Synthetic oligonucleotide
ggctaatgaagcagcaaccctgaatcagcttgagattgttagtgttttgtgctctgagct

SEQ ID NO: 39264 - DNA, 60 bp, Artificial
  Synthetic oligonucleotide
cgttggctcgcagccactgtcagtaacacttggactgtccctgacaaactactcctccgc

SEQ ID NO: 39265 - DNA, 60 bp, Artificial
  Synthetic oligonucleotide
gcgtcgtgcaatctacggtcaacttggtcgttgacgccatcaagtcgttctgggacaggg

SEQ ID NO: 39266 - DNA, 60 bp, Artificial
  Synthetic oligonucleotide
agaacccaaactgacaaaggttgacacattcatagagcgagcagctgcagacgtgctggg

SEQ ID NO: 39267 - DNA, 60 bp, Artificial
  Synthetic oligonucleotide
gcggccctttcgttcctggtaagaagatcgaccacgttaaggacgggaagctcgacgagg

SEQ ID NO: 39268 - DNA, 60 bp, Artificial
  Synthetic oligonucleotide
ggtgaggagttcttcgaacttgtcaagaaggagctccgtcgccaacaggccttcacgcgg

SEQ ID NO: 39269 - DNA, 60 bp, Artificial
  Synthetic oligonucleotide
cccctcaaccaagtgcgattgtcacaacacctggaacacctgttgctgcacccattggca

SEQ ID NO: 39270 - DNA, 60 bp, Artificial
  Synthetic oligonucleotide
ggacccagaactcttgacgacggtggtttctatgacaacgactatgaggggttgcctgga

SEQ ID NO: 39271 - DNA, 60 bp, Artificial
  Synthetic oligonucleotide
taataccactggcgagagtaacgcctagcggtttgatttaagtaaatgaattgtttagtg

SEQ ID NO: 39272 - DNA, 60 bp, Artificial
  Synthetic oligonucleotide
gcaggcttcagttggcggcaaatagcggacctgttctccaccgtcatgacaagtctgtgc

SEQ ID NO: 39273 - DNA, 60 bp, Artificial
  Synthetic oligonucleotide
gacggacctacacaaacaacccacggcgactgtggtctgccactctttgatgaggctggg

SEQ ID NO: 39274 - DNA, 60 bp, Artificial
  Synthetic oligonucleotide
gctctggggttgtaatgttggagttgcgctttgtgcggccgctgtgttccacaacttgtg

SEQ ID NO: 39275 - DNA, 60 bp, Artificial
  Synthetic oligonucleotide
aagagtatcacacaggttaccgcccagcaaaccttggccgcggagacccagacagccact

SEQ ID NO: 39276 - DNA, 60 bp, Artificial
  Synthetic oligonucleotide
gcaactcacctccaaggcaggagacttcttgtgcttagactactccaagtgggattccac

SEQ ID NO: 39277 - DNA, 60 bp, Artificial
  Synthetic oligonucleotide
gcagttccctcatgttgtcatcgacgcacgctcacttgaaccagtgactataacaatgcc

SEQ ID NO: 39278 - DNA, 60 bp, Artificial
  Synthetic oligonucleotide
tctgtggggaccccattgactaccgtggacttgttgccttcagggtggcaggtgttgagc

SEQ ID NO: 39279 - DNA, 60 bp, Artificial
  Synthetic oligonucleotide
caaaccgagctcaccaaaagcgtagttctcacactcaagtcacttccaatgaccgttctc

SEQ ID NO: 39280 - DNA, 60 bp, Artificial
  Synthetic oligonucleotide
gcggtgttgaggggatcactgtgacaacagttgacaacatcttacccttccactcacaga

SEQ ID NO: 39281 - DNA, 60 bp, Artificial
  Synthetic oligonucleotide
gtggcatgcagtttagattcatagtcgctggttctggtatctttggcggaaggcttgtgt

SEQ ID NO: 39282 - DNA, 60 bp, Artificial
  Synthetic oligonucleotide
ccttaactttagtgctgcattcaacgttcttgacctctcaacctcgtgcggccctttcgt

SEQ ID NO: 39283 - DNA, 60 bp, Artificial
  Synthetic oligonucleotide
gcggggattggaggaccaccacaacaggcctcacctcaagagtcttggcgtgtgaacttc

SEQ ID NO: 39284 - DNA, 60 bp, Artificial
  Synthetic oligonucleotide
cgcgcgcgttttgaaacactacaaggctttcaataaggtcatcccttgcttgcactctcg

SEQ ID NO: 39285 - DNA, 60 bp, Artificial
  Synthetic oligonucleotide
gaacacaccgatcatgttcagtgcagtggtgcggaggactggtgatgtgaatgctggccc

SEQ ID NO: 39286 - DNA, 60 bp, Artificial
  Synthetic oligonucleotide
aacttcggtctggaccattttgattcatacactggtgaggatgtggccattgcagacgag

SEQ ID NO: 39287 - DNA, 60 bp, Artificial
  Synthetic oligonucleotide
actattccgactggcgcctgggttgggttcggacaggtgtggaacgcctccaatggcacc

SEQ ID NO: 39288 - DNA, 60 bp, Artificial
  Synthetic oligonucleotide
gctccgtccagcattcgtcctgtcacaacaacaacgggtgcgcagctagttgcaaagtcg

SEQ ID NO: 39289 - DNA, 60 bp, Artificial
  Synthetic oligonucleotide
cgcagacatccacacgctcgtacttgggaagatcaacatgaccaaacaaaggccacagcc

SEQ ID NO: 39290 - DNA, 60 bp, Artificial
  Synthetic oligonucleotide
cctgaaattggccctgcaggatcgcgagaggaaaccagacaagtggtacagcaaactggg

SEQ ID NO: 39291 - DNA, 60 bp, Artificial
  Synthetic oligonucleotide
ggttgtgcatggtgccaaaaagttatccgacccgcttaaaaccttggccgcaattttgtt

SEQ ID NO: 39292 - DNA, 60 bp, Artificial
  Synthetic oligonucleotide
gcttctacgttgagcagcgctctgctccgttcacaagagctcgccttacaaaagcaggcc

SEQ ID NO: 39293 - DNA, 60 bp, Artificial
  Synthetic oligonucleotide
attgggagccccgacaaggatgaacttcactgaggctgaacttgcctctcagggtgccag

SEQ ID NO: 39294 - DNA, 60 bp, Artificial
  Synthetic oligonucleotide
cccacgtgcaactgccttttaccggcgggttataattgtggatgtgcggaacaaggccgt

SEQ ID NO: 39295 - DNA, 60 bp, Artificial
  Synthetic oligonucleotide
aaatctgaatccaatgatttcaccacaaatcaacccattaggttcactccagtgggcatg

SEQ ID NO: 39296 - DNA, 60 bp, Artificial
  Synthetic oligonucleotide
agatggcgtctaacgacgctaccgctgcccttggcagtcaaaactctgtcaatgacagtg

SEQ ID NO: 39297 - DNA, 54 bp, Artificial
  Synthetic oligonucleotide
aaaatactggactggaatggcacaaggtattgggcacctaacagtatgaaaacc

SEQ ID NO: 39298 - DNA, 60 bp, Artificial
  Synthetic oligonucleotide
gccaccgggaaaagcgttgattctgagtgggaggcattcttctcctttcacaccagcgtc

SEQ ID NO: 39299 - DNA, 60 bp, Artificial
  Synthetic oligonucleotide
atcctggagtcttgcggtggtgcacgcatctgggctttaggtcgcaacgtgatccgagca

SEQ ID NO: 39300 - DNA, 60 bp, Artificial
  Synthetic oligonucleotide
cactgaagagccctcctgttgcaatctttaatggtgttgctgtaaaagtgtcctctggct

SEQ ID NO: 39301 - DNA, 60 bp, Artificial
  Synthetic oligonucleotide
ggcccgtggagaaggttagtgaagggaagagaaggatgatttggggttgtgatgttggcg

SEQ ID NO: 39302 - DNA, 60 bp, Artificial
  Synthetic oligonucleotide
cccaaaacatattgacccaacatctcgagggcaacagctttggaatgcctgtctgtacgc

SEQ ID NO: 39303 - DNA, 60 bp, Artificial
  Synthetic oligonucleotide
cttgcctggccggagcgacaactcttgtatcaggtatagttgccacacaaaagctagctg

SEQ ID NO: 39304 - DNA, 60 bp, Artificial
  Synthetic oligonucleotide
caatacttggtgatgatgaatgggcatccacttttgacgctgttgacccagtcgttcccc

SEQ ID NO: 39305 - DNA, 60 bp, Artificial
  Synthetic oligonucleotide
caaagctgcacttggtcaacagcgtgaattggctctccagcgcattggcttggaccgcca

SEQ ID NO: 39306 - DNA, 60 bp, Artificial
  Synthetic oligonucleotide
gggctgttcgtcgtcatctcacactggcagggcagtttcaagctatcagagccgcatatg

SEQ ID NO: 39307 - DNA, 60 bp, Artificial
  Synthetic oligonucleotide
ccgggttgtgcgcattagcactctccctgaaactggtgctcgaggcggtaaccacccaat

SEQ ID NO: 39308 - DNA, 60 bp, Artificial
  Synthetic oligonucleotide
acacgtctccatgtctccccagcccacactgaggattatcaagaatgctcacaccaaccc

SEQ ID NO: 39309 - DNA, 60 bp, Artificial
  Synthetic oligonucleotide
agcctggccctgacttcaagtttcacctccttaagccacccggatctatgctaacccatg

SEQ ID NO: 39310 - DNA, 60 bp, Artificial
  Synthetic oligonucleotide
gtggatcgtggttatgacgtcagctttgctgaggaatcaggaccaggcaccaagttccac

SEQ ID NO: 39311 - DNA, 60 bp, Artificial
  Synthetic oligonucleotide
cctttggtggagtcgcacaagcgtgcaaggcctgggacgtctgttcctcgtagctgctat

SEQ ID NO: 39312 - DNA, 60 bp, Artificial
  Synthetic oligonucleotide
ggggtggcaacagattacatagtgcctggaatccctgatggctggcctgacaccacaatt

SEQ ID NO: 39313 - DNA, 60 bp, Artificial
  Synthetic oligonucleotide
aatgctaccttcactgtgtgtgttggacccgagacctcgcactcgattggttgcactgcg

SEQ ID NO: 39314 - DNA, 60 bp, Artificial
  Synthetic oligonucleotide
ggacttggttaatgtggctgctcatatccgtaaggcgctatccactcagtcccacccggc

SEQ ID NO: 39315 - DNA, 55 bp, Artificial
  Synthetic oligonucleotide
cgtctcggtagtacctgacgacgagtttgtgaatgttatggagggcaaagcccgc

SEQ ID NO: 39316 - DNA, 60 bp, Artificial
  Synthetic oligonucleotide
ctgacgacgagtttgtgaatgttatggagggcaaagcccgcacagcgccgcaaggcgaag

SEQ ID NO: 39317 - DNA, 60 bp, Artificial
  Synthetic oligonucleotide
tgacgacgagtttgtgaatgttatggagggcaaagcccgtacagcgccgcaaggcgaagc

SEQ ID NO: 39318 - DNA, 60 bp, Artificial
  Synthetic oligonucleotide
gtcatgtgtgatgtgcgcaccctggagcccattcaactccctcttcttgacgtgcgtcga

SEQ ID NO: 39319 - DNA, 60 bp, Artificial
  Synthetic oligonucleotide
gctgcaggctgacatgattgcaatcaaacaaggggtcttgaccgctggcggcttttcccc

SEQ ID NO: 39320 - DNA, 58 bp, Artificial
  Synthetic oligonucleotide
caggttggatgaactacccgccaatcaacatgtggtaaccgttaactcggtgtttgat

SEQ ID NO: 39321 - DNA, 60 bp, Artificial
  Synthetic oligonucleotide
ccatgggaaatggtagtgggcgcagaagaatgcagtaatggctggagcttttatagcagg

SEQ ID NO: 39322 - DNA, 60 bp, Artificial
  Synthetic oligonucleotide
caggtggatgagattctcagatttgagcacgtgggagggcgatcgcaatctggctcccag

SEQ ID NO: 39323 - DNA, 60 bp, Artificial
  Synthetic oligonucleotide
cagatggatgagattctcggatctgagcacgtgggagggcgatcgcaatctggctcccag

SEQ ID NO: 39324 - DNA, 56 bp, Artificial
  Synthetic oligonucleotide
ctcagacctcagcacgtgggagggcgatcgcaatctggctcccagtggtgtgaatg

SEQ ID NO: 39325 - DNA, 60 bp, Artificial
  Synthetic oligonucleotide
gcaaatcaaccaaattgacccctggatcttccaaaattttgtccagtgcccccttggtga

SEQ ID NO: 39326 - DNA, 60 bp, Artificial
  Synthetic oligonucleotide
gcaaattaaccaaattgacccctggatcttccaaaattttgtccagtgcccccttggtga

SEQ ID NO: 39327 - DNA, 53 bp, Artificial
  Synthetic oligonucleotide
ggcaaattaaccaaattgacccctggatcttccaaaattttgtccaatgcccc

SEQ ID NO: 39328 - DNA, 60 bp, Artificial
  Synthetic oligonucleotide
ccatagtgggatagaaatggtggtcccacgccaccgatctgttctgcgctgggtgcgctt

SEQ ID NO: 39329 - DNA, 60 bp, Artificial
  Synthetic oligonucleotide
tgaatgaggatgagtgatggcgcagcgccaagagccaacggctctgaagccagtggtcag

SEQ ID NO: 39330 - DNA, 60 bp, Artificial
  Synthetic oligonucleotide
ttgtgaatgaggatgagtgatggcgcagcgccaagagccaacggctctgaagccagtggc

SEQ ID NO: 39331 - DNA, 60 bp, Artificial
  Synthetic oligonucleotide
ccagagtgggatagaaatggtggtcccacgccaccgatctgttctgcgctgggtgcgctt

SEQ ID NO: 39332 - DNA, 60 bp, Artificial
  Synthetic oligonucleotide
ccagatcgattcgagtggcatgaccgccctacactgtgatgtgttcgaagtttgagcatg

SEQ ID NO: 39333 - DNA, 60 bp, Artificial
  Synthetic oligonucleotide
gtccgtaaggactttgtgcactccgtcaagttaacacttgctcggaggcgcgatcttcag

SEQ ID NO: 39334 - DNA, 60 bp, Artificial
  Synthetic oligonucleotide
ccgtaaggactttgtgcactccgtcaagttaacacttgctcggaggcgcgatcttcagta

SEQ ID NO: 39335 - DNA, 60 bp, Artificial
  Synthetic oligonucleotide
ggtaagaactgcacacgagaacagtgggtgtggggcccatgttcacgtgatctctagaga

SEQ ID NO: 39336 - DNA, 60 bp, Artificial
  Synthetic oligonucleotide
cgagaacagtgggtgtggggcccatgttcacgtgatctctagagaggacaacttcagagg

SEQ ID NO: 39337 - DNA, 59 bp, Artificial
  Synthetic oligonucleotide
ttttatgcaggaacaggggcctcaaccacactcattgacttgactgaactcattgacgt

SEQ ID NO: 39338 - DNA, 60 bp, Artificial
  Synthetic oligonucleotide
cggaggcgcgatcttcagtatctttataacaagctcgcacgtactatgcgtgccgaagct

SEQ ID NO: 39339 - DNA, 60 bp, Artificial
  Synthetic oligonucleotide
aggctctggagaatgggttggttttgaaagccgaccagttaggcaggttaggttttaatc

SEQ ID NO: 39340 - DNA, 60 bp, Artificial
  Synthetic oligonucleotide
actggtcgcggctgtgataccaccaggcatcgagattggaccagggttggaggtcaggca

SEQ ID NO: 39341 - DNA, 60 bp, Artificial
  Synthetic oligonucleotide
ccagcccaccaccaacacttcaggtgcacagactgtcgctaagtccatttatgccgtggt

SEQ ID NO: 39342 - DNA, 60 bp, Artificial
  Synthetic oligonucleotide
ccccaacatcccctgatggcgccagtggcgctggccagctggtaccggaggctaatacag

SEQ ID NO: 39343 - DNA, 60 bp, Artificial
  Synthetic oligonucleotide
aacatcccctgatggcgccagtggcgctggccagctggtaccggaggctaatacagctga

SEQ ID NO: 39344 - DNA, 53 bp, Artificial
  Synthetic oligonucleotide
ttgattactcaaagtgggattcaactcaatcacctcgtgttagtgcctcgtcc

SEQ ID NO: 39345 - DNA, 60 bp, Artificial
  Synthetic oligonucleotide
gccactggggcaccaaataacctccagcccaccaccaacacttcaggtgcacagactgtc

SEQ ID NO: 39346 - DNA, 60 bp, Artificial
  Synthetic oligonucleotide
ccaacactctccacagaacaacccattcacagccgtgctgagccagatgtacgctggctg

SEQ ID NO: 39347 - DNA, 60 bp, Artificial
  Synthetic oligonucleotide
cccaacatgtaccatccaactggtgaccctggccttgtccccacactagtccttagtgtt

SEQ ID NO: 39348 - DNA, 55 bp, Artificial
  Synthetic oligonucleotide
gtgaatgaagatggcgtctaacgacgctaccgctgcccttggcagtcaaaactct

SEQ ID NO: 39349 - DNA, 55 bp, Artificial
  Synthetic oligonucleotide
gtgaatgaagatggcgtctaacgacgctacctctgccttcggcagtcaaaactct

SEQ ID NO: 39350 - DNA, 60 bp, Artificial
  Synthetic oligonucleotide
ccaaggacttctggaaatggctgaagctgcactcccaccctcaaggagacagaccctacc

SEQ ID NO: 39351 - DNA, 60 bp, Artificial
  Synthetic oligonucleotide
ctattccaaggatcagctccaaggacttctggaaatggctgaagctgcacttccacctgc

SEQ ID NO: 39352 - DNA, 60 bp, Artificial
  Synthetic oligonucleotide
tgtaccctggagtgaaattctcagagaactcatgaccttgatctcacacatttggtccca

SEQ ID NO: 39353 - DNA, 60 bp, Artificial
  Synthetic oligonucleotide
gtaccctggagtgaaattctcagagaactcatgaccttgatctcacacatttggtcccaa

SEQ ID NO: 39354 - DNA, 60 bp, Artificial
  Synthetic oligonucleotide
cctcgaatttctcttacacaagaaagacctaaccgatctctacggagagaggtgtggcac

SEQ ID NO: 39355 - DNA, 60 bp, Artificial
  Synthetic oligonucleotide
cacaagaaagacctaaccgatctctacggagagaggtgcggtacactcaacctggtcatc

SEQ ID NO: 39356 - DNA, 60 bp, Artificial
  Synthetic oligonucleotide
agtcattgcagagctgaaggaaggtggcatggatttttacgtgcccagacaagagccaat

SEQ ID NO: 39357 - DNA, 60 bp, Artificial
  Synthetic oligonucleotide
gaatcacatgatctactttgccatggctgtgctcgaggcctacgaggaattcaaggtgcc

SEQ ID NO: 39358 - DNA, 60 bp, Artificial
  Synthetic oligonucleotide
tctggcgcggcagtgttactgggttaaggctaaccgcaccacagaccttttcgagccggc

SEQ ID NO: 39359 - DNA, 60 bp, Artificial
  Synthetic oligonucleotide
tagccaccctgtgctcaccagccgtgggcaggttggatgacatcggcttgactgtgacat

SEQ ID NO: 39360 - DNA, 60 bp, Artificial
  Synthetic oligonucleotide
acagtgaggggcgtggatacgtggtacccatgactgcccaagagaagcacacaggttggg

SEQ ID NO: 39361 - DNA, 60 bp, Artificial
  Synthetic oligonucleotide
gcctgctgtggggctgcgatgctggcgtgtcaatgatagccaacgctgttttcaaacctg

SEQ ID NO: 39362 - DNA, 60 bp, Artificial
  Synthetic oligonucleotide
ttactgagcgcctcgtggacaccgtgcccatgcaccctgtggctgttggcatatgtatgg

SEQ ID NO: 39363 - DNA, 60 bp, Artificial
  Synthetic oligonucleotide
gccttcccgcatgcacttgtggacgcgcgcatcactgacggcgtcaccttcaccttgggg

SEQ ID NO: 39364 - DNA, 60 bp, Artificial
  Synthetic oligonucleotide
aggaacgcgcactgtcaggcgcatcagaccctgactcccaaagatacaacgcttggcttg

SEQ ID NO: 39365 - DNA, 60 bp, Artificial
  Synthetic oligonucleotide
tgtgtgcgctcataccacccggtgttgatcccagtgctgtagaccaacctggggccttcc

SEQ ID NO: 39366 - DNA, 60 bp, Artificial
  Synthetic oligonucleotide
tcagtacaatagtgccgtgagtgctggttttgactcagtttccgcgcgtcaattggctgg

SEQ ID NO: 39367 - DNA, 60 bp, Artificial
  Synthetic oligonucleotide
aactcttcttgcccgaatgtccctggggccaggcttgaacccctacacgctccacttgtc

SEQ ID NO: 39368 - DNA, 60 bp, Artificial
  Synthetic oligonucleotide
aatgcaagcacaacacgtggtcggcactttttcccgtgggatgcctggtgtcacccccag

SEQ ID NO: 39369 - DNA, 60 bp, Artificial
  Synthetic oligonucleotide
tggccaacatgtgtgaccgtgtagccgaggtggagttcaaggtcgcagaaacagaccgcg

SEQ ID NO: 39370 - DNA, 60 bp, Artificial
  Synthetic oligonucleotide
aaatcaacaggcacttttcagctgagggcaccacgctcggctggtccacggccccgattg

SEQ ID NO: 39371 - DNA, 60 bp, Artificial
  Synthetic oligonucleotide
cacgctccacttgtccgccatgtgggccggctggggtgggtcatttgaaatcaaggtgat

SEQ ID NO: 39372 - DNA, 60 bp, Artificial
  Synthetic oligonucleotide
ggttgcgagcaacccagagggcactcaaaatagtaatgagtccagaccagtccagccagc

SEQ ID NO: 39373 - DNA, 60 bp, Artificial
  Synthetic oligonucleotide
tgatttcttccgccccaagcgcgttttgcagggcgacccgcaactcatcgcacaggtcct

SEQ ID NO: 39374 - DNA, 60 bp, Artificial
  Synthetic oligonucleotide
ggccgctgatgtcaaacatctatggttcaccgtcccacaggccatccataagcaagcgcg

SEQ ID NO: 39375 - DNA, 60 bp, Artificial
  Synthetic oligonucleotide
gccctaagtgaccacaagcacccactggccaacagatacactagggcctctttgcagagg

SEQ ID NO: 39376 - DNA, 60 bp, Artificial
  Synthetic oligonucleotide
gccactattggcatcgtgaattgtgccccttaccccttgaactgtgatcgccccgaagca

SEQ ID NO: 39377 - DNA, 60 bp, Artificial
  Synthetic oligonucleotide
gcaacagccttagacaccaaaacgtggcttgcgcacattctgggttggctcaaacccacc

SEQ ID NO: 39378 - DNA, 60 bp, Artificial
  Synthetic oligonucleotide
gggcaacacactcagtggtaaggtggccagggccagatatgtgtcagtcaacaacctcct

SEQ ID NO: 39379 - DNA, 60 bp, Artificial
  Synthetic oligonucleotide
aggtaaaactcggctggtggaggccctagccaagcaactgggagaggtcagccacttcac

SEQ ID NO: 39380 - DNA, 60 bp, Artificial
  Synthetic oligonucleotide
acacaggcaacacagtagcaatttgggacgagtttgatgtggactcaaaacaggctttca

SEQ ID NO: 39381 - DNA, 60 bp, Artificial
  Synthetic oligonucleotide
caaacttgacctatgctgctgcggtcgaatcaatggcccatgacacggcgtgcgggccaa

SEQ ID NO: 39382 - DNA, 60 bp, Artificial
  Synthetic oligonucleotide
caaatgttcaccaagaagctgatgagggtgtgtggttttatcacctcgacggtggctgcc

SEQ ID NO: 39383 - DNA, 60 bp, Artificial
  Synthetic oligonucleotide
ggtcaaccctatctcaatgcgcgacgacaactggttggagtgcacgccgcaactagcacg

SEQ ID NO: 39384 - DNA, 60 bp, Artificial
  Synthetic oligonucleotide
ccggtccatcgcatggccaaaattgctcccagaagaaacccatgcacctgcgccctatgg

SEQ ID NO: 39385 - DNA, 60 bp, Artificial
  Synthetic oligonucleotide
aggcatggctgaggtcactgcaagtgctgagggctaccagcttgtgaatgttaattgggc

SEQ ID NO: 39386 - DNA, 60 bp, Artificial
  Synthetic oligonucleotide
tagctatgggttggtccccactgctgcagacaaatctcaaagcattgagccaacagacac

SEQ ID NO: 39387 - DNA, 60 bp, Artificial
  Synthetic oligonucleotide
cggcacgcgcatggtcatctcagaagacaccaccttcagtttcaacggcatgtacaccct

SEQ ID NO: 39388 - DNA, 60 bp, Artificial
  Synthetic oligonucleotide
ggctggagccaccaccactcacagcaaagtgtgattttctttccctggttacgcgtaccg

SEQ ID NO: 39389 - DNA, 60 bp, Artificial
  Synthetic oligonucleotide
gctttgggtggagtctgtgctcggcacacacacaggtaacaacactgtgtacagttcgca

SEQ ID NO: 39390 - DNA, 60 bp, Artificial
  Synthetic oligonucleotide
tcctcctggtgggacattctcaaagcactcttcagcacactggtggtggcgtttggaccc

SEQ ID NO: 39391 - DNA, 60 bp, Artificial
  Synthetic oligonucleotide
tttacacctcaggacaggctgccgtctgggccacacctgcgcgctttccaatagttacgc

SEQ ID NO: 39392 - DNA, 60 bp, Artificial
  Synthetic oligonucleotide
cagtatgcagctttggcaattcccgggcagacctcaaccaaaaccagctcaatgtgggca

SEQ ID NO: 39393 - DNA, 60 bp, Artificial
  Synthetic oligonucleotide
aggtccattcacagctcacgatgagttggattgcaggagcaatgcagggcgctggcctgc

SEQ ID NO: 39394 - DNA, 60 bp, Artificial
  Synthetic oligonucleotide
tcaagcctccaaaccaagccatggaggtaggattcgaccctaggtcgctcctgccccgca

SEQ ID NO: 39395 - DNA, 60 bp, Artificial
  Synthetic oligonucleotide
gtgttggctaccaccaattgccccaccccagtcatgcctgaccatccaagggctatggct

SEQ ID NO: 39396 - DNA, 60 bp, Artificial
  Synthetic oligonucleotide
tggggcctaccaacacgcggttgtggacatcatcggcaagtcaggccacaggcgtgaggt

SEQ ID NO: 39397 - DNA, 60 bp, Artificial
  Synthetic oligonucleotide
tacttcaagcagcgtgagcacgagcaccaagtccgcatcaccctagcaagatgggccgca

SEQ ID NO: 39398 - DNA, 60 bp, Artificial
  Synthetic oligonucleotide
gcgaggtgactaagttgaaggaatgttgtgaagtgctgctgaacgaggtcaccgaattga

SEQ ID NO: 39399 - DNA, 60 bp, Artificial
  Synthetic oligonucleotide
aatttgctgacatggcgactagcacctggggcaaattcaaatcctggtgggacagcctct

SEQ ID NO: 39400 - DNA, 60 bp, Artificial
  Synthetic oligonucleotide
cagcgccctacggcaccacgtcggcttttgcaccatccctggcatcgtcaaattgatcac

SEQ ID NO: 39401 - DNA, 60 bp, Artificial
  Synthetic oligonucleotide
cttaccacggcccagacgcttggtgtttgttgagtcgccaattgacatcatcagcgccct

SEQ ID NO: 39402 - DNA, 60 bp, Artificial
  Synthetic oligonucleotide
tcgcacacaggtcatgcgtgcgccacgtgagccaaaaggtgacacctatgacagtgaggg

SEQ ID NO: 39403 - DNA, 60 bp, Artificial
  Synthetic oligonucleotide
tgtagctgagcatgttgcccacatagaagtggagtcaatattgcgcactgacattgtggg

SEQ ID NO: 39404 - DNA, 60 bp, Artificial
  Synthetic oligonucleotide
cgtggtgctcgcagggccattgccctcagggatgatgagtatgatgagtggcaggacatc

SEQ ID NO: 39405 - DNA, 60 bp, Artificial
  Synthetic oligonucleotide
cgcgtgacatcatactgggctggttgcggttccactcctacccgaacacagtcgcagaca

SEQ ID NO: 39406 - DNA, 60 bp, Artificial
  Synthetic oligonucleotide
ggacggttcgtgtccttccctaagatcgggagtagcagggcataggttggaagagaaacc

SEQ ID NO: 39407 - DNA, 60 bp, Artificial
  Synthetic oligonucleotide
cacatgggagggcgatcgcaatctggctcccagttttgtgaatgaagatggcgtcgaatg

SEQ ID NO: 39408 - DNA, 60 bp, Artificial
  Synthetic oligonucleotide
gcacatgggagggcgatcgcaatctggctcccagttttgtgaatgaagatggcgtcgaat

SEQ ID NO: 39409 - DNA, 60 bp, Artificial
  Synthetic oligonucleotide
tctggacacccccagatgtgtctgcgatgattgcccccttactcggtgactacgagttac

SEQ ID NO: 39410 - DNA, 60 bp, Artificial
  Synthetic oligonucleotide
acatgcttcccacatgtcatgtgtgatgtgcgcgccctggagcccattcaactccctctt

SEQ ID NO: 39411 - DNA, 50 bp, Artificial
  Synthetic oligonucleotide
aaaaccttcttgacctcctcagttcaaagtggaatcgtgcaaagttgggg

SEQ ID NO: 39412 - DNA, 60 bp, Artificial
  Synthetic oligonucleotide
aaccttctggacctcctcagttcaaagtggaatcgtgctaaacttgggcttgctctccca

SEQ ID NO: 39413 - DNA, 60 bp, Artificial
  Synthetic oligonucleotide
aaaagacaaggtcgcagtcgggaagcgtaggctcatctggggctgcgatgttggcgtcag

SEQ ID NO: 39414 - DNA, 60 bp, Artificial
  Synthetic oligonucleotide
gcacgatcggtattgtgttgactactcaaagtgggactccactcaaccaccaaaagtgac

SEQ ID NO: 39415 - DNA, 60 bp, Artificial
  Synthetic oligonucleotide
gcacgatcggtattgtgttgactactcaaagtgggactcaacccaaccaccaaaagtaac

SEQ ID NO: 39416 - DNA, 55 bp, Artificial
  Synthetic oligonucleotide
actcgaggactctggcgtgcaagtgacatggaacatcttcgactcgatggaccta

SEQ ID NO: 39417 - DNA, 60 bp, Artificial
  Synthetic oligonucleotide
aacgcctatccctgctgatgaaccagttgagtttctcaagcgaactattgttcgcactga

SEQ ID NO: 39418 - DNA, 60 bp, Artificial
  Synthetic oligonucleotide
cgcctatccctgctgatgaaccagttgagtttctcaagcggacgatagttcgcactgaga

SEQ ID NO: 39419 - DNA, 60 bp, Artificial
  Synthetic oligonucleotide
tatcaagatgaagctgaccttgcaaatctgcactcttactatagcttctacaaaacggac

SEQ ID NO: 39420 - DNA, 60 bp, Artificial
  Synthetic oligonucleotide
tatacttcacctctgtctatctatttaatcaatgggataattgttcttaatctagtagac

SEQ ID NO: 39421 - DNA, 60 bp, Artificial
  Synthetic oligonucleotide
gtgttgagaacgcttttgcgtggaaaggtctggcggtcatacgtggtcctgattgcgggg

SEQ ID NO: 39422 - DNA, 60 bp, Artificial
  Synthetic oligonucleotide
cgcagtcagggctatgatgaagaagcacccactccaatagtcgtgttcacttccggtgat

SEQ ID NO: 39423 - DNA, 60 bp, Artificial
  Synthetic oligonucleotide
agggtgccccggtctattactcagcccgcctccacccagtgacaacaatagcggaaggaa

SEQ ID NO: 39424 - DNA, 60 bp, Artificial
  Synthetic oligonucleotide
ttggtgggagcactccagcttggcggtgcgcttgttgacgctgctggcagcgtgtccaac

SEQ ID NO: 39425 - DNA, 60 bp, Artificial
  Synthetic oligonucleotide
cgatgaggaagcaaagggtaaaacaaaacatggccgcggtgcaaagcactcacgcagggg

SEQ ID NO: 39426 - DNA, 60 bp, Artificial
  Synthetic oligonucleotide
aaggaaatgagcaacgcaacatttggatcacctgtccgcgcgatctggtggcccctgccg

SEQ ID NO: 39427 - DNA, 60 bp, Artificial
  Synthetic oligonucleotide
gctacaaccctgaaggagacacattggacggcgtgcgggttaagcccacaaccaccagtg

SEQ ID NO: 39428 - DNA, 60 bp, Artificial
  Synthetic oligonucleotide
cgtggctggctagcaacggtcaccgctctgattgaggtgtactccaacttattccaggac

SEQ ID NO: 39429 - DNA, 60 bp, Artificial
  Synthetic oligonucleotide
cgcttgcttgctgagacggtgacggagtgtctagcgcatttcggcccgttcttgctcatg

SEQ ID NO: 39430 - DNA, 60 bp, Artificial
  Synthetic oligonucleotide
ctgaacctgccgaaatcgtgcgacaagtgctggtccacttttgtgaggggatgcgttcgc

SEQ ID NO: 39431 - DNA, 60 bp, Artificial
  Synthetic oligonucleotide
ccccaaatttcaaacaggtgggcccaacattgggaataacagaccggcagtcaacattgg

SEQ ID NO: 39432 - DNA, 60 bp, Artificial
  Synthetic oligonucleotide
gcggaccttttcaaggagctgccacacgtcgaaccagacgttggtcaccagcagaagtcc

SEQ ID NO: 39433 - DNA, 60 bp, Artificial
  Synthetic oligonucleotide
actagacgcgggtttcgaccccgtcagtgctcgccgtttggccgggtcaggggaacgccg

SEQ ID NO: 39434 - DNA, 60 bp, Artificial
  Synthetic oligonucleotide
ttggtcaagtccacctttcgagcgcaaggtccaacaccatgtgggtgggcggccatagcc

SEQ ID NO: 39435 - DNA, 60 bp, Artificial
  Synthetic oligonucleotide
gccctgacgggtacatgcgcacaggatctccagttggcacagttgttgatctaacacccg

SEQ ID NO: 39436 - DNA, 60 bp, Artificial
  Synthetic oligonucleotide
caatcaccacatccgcagtggagttgctatcatccccagcgcgaggccacttaaacgaca

SEQ ID NO: 39437 - DNA, 60 bp, Artificial
  Synthetic oligonucleotide
gccattcaccagtgtcatcaattccctcaaccacatgacgtattttgccgcggcagtgtt

SEQ ID NO: 39438 - DNA, 60 bp, Artificial
  Synthetic oligonucleotide
cgcccaggttgacgctcgcgctgtggatcctatcacatttaacatcaacgatgtgagagc

SEQ ID NO: 39439 - DNA, 60 bp, Artificial
  Synthetic oligonucleotide
gtgtcaccatttctggttctggcacctttgctggtaaaattattgttgccctactgcccc

SEQ ID NO: 39440 - DNA, 60 bp, Artificial
  Synthetic oligonucleotide
ggccacaggcacttatctgggatctgctacgctgtccccagctctcaacccatataccgc

SEQ ID NO: 39441 - DNA, 60 bp, Artificial
  Synthetic oligonucleotide
cccagaatgcatacaagctggcacttaaggatgaacttcggcccattgacaagaacgcgc

SEQ ID NO: 39442 - DNA, 60 bp, Artificial
  Synthetic oligonucleotide
tgtgatgccggggccacgctggtcgccactgcagcattcaaaggggtggccacgcgactg

SEQ ID NO: 39443 - DNA, 60 bp, Artificial
  Synthetic oligonucleotide
cgtgggtatcggtggaaactagaccaggacctgattttgacttctgcctcctgaaacccc

SEQ ID NO: 39444 - DNA, 60 bp, Artificial
  Synthetic oligonucleotide
ctcaagccttactctgaacccacaccaggtatcccacctgccttgctccaaagggcggca

SEQ ID NO: 39445 - DNA, 60 bp, Artificial
  Synthetic oligonucleotide
ggcacccacaggtcacctaatttaacttttggagaagcctgtgccttgttggagcgtaca

SEQ ID NO: 39446 - DNA, 60 bp, Artificial
  Synthetic oligonucleotide
ttgcgggacgccatatttcgacgcctgccgcagactggtgggtttgcacgccgcgacttc

SEQ ID NO: 39447 - DNA, 60 bp, Artificial
  Synthetic oligonucleotide
ggggcaggggcttaccaacatgccacaatcatcggcaggggtggtgtccaagacacgata

SEQ ID NO: 39448 - DNA, 58 bp, Artificial
  Synthetic oligonucleotide
tcacgcagggggggagtcagcctgtctgatgatgagtacgatgagtggcgagatctag

SEQ ID NO: 39449 - DNA, 60 bp, Artificial
  Synthetic oligonucleotide
tactggcacaggttgcttaaggtgtgtggaggagttaccactcttgctgcggcggctcgc

SEQ ID NO: 39450 - DNA, 60 bp, Artificial
  Synthetic oligonucleotide
atggaagctgatggtaagtcccggctcaagaagtacatggcccggaccgcagccttgctg

SEQ ID NO: 39451 - DNA, 60 bp, Artificial
  Synthetic oligonucleotide
ggggactattgggatgaagacaagcagtgctacactggcgtgctggcagaccacctcgct

SEQ ID NO: 39452 - DNA, 60 bp, Artificial
  Synthetic oligonucleotide
actggctggccttgcccgctcgtacgtcagtgagctggagtcggctgctaatagcatcag

SEQ ID NO: 39453 - DNA, 60 bp, Artificial
  Synthetic oligonucleotide
ggctgatgtgaatttcccccataaccctgagtgcaccgtgttccgggcccctgatgggga

SEQ ID NO: 39454 - DNA, 60 bp, Artificial
  Synthetic oligonucleotide
cggtctgtgctcagtcaaggggatgtggcgcgcttaccaaggctggacaagctcaaattc

SEQ ID NO: 39455 - DNA, 60 bp, Artificial
  Synthetic oligonucleotide
atgtcatctgcaccagcaattaccctacatctgtcctcccggagaacccacgggctggcg

SEQ ID NO: 39456 - DNA, 60 bp, Artificial
  Synthetic oligonucleotide
ttagactcattcctatcaaaaccacccgtggacatcaacccagatacgacgttccgtgag

SEQ ID NO: 39457 - DNA, 60 bp, Artificial
  Synthetic oligonucleotide
ccattcatgatctggccaagttacaaggcgagcttgtggaggcagcgcgcaatcctggtc

SEQ ID NO: 39458 - DNA, 60 bp, Artificial
  Synthetic oligonucleotide
tctcatatggccctgttggttccaataatgtcatcctttggcgcgagcgggtcttttcca

SEQ ID NO: 39459 - DNA, 60 bp, Artificial
  Synthetic oligonucleotide
gtagtggccatggcacgccaggtcaaccaccatttctccactgcagccacaacctatggg

SEQ ID NO: 39460 - DNA, 60 bp, Artificial
  Synthetic oligonucleotide
cctaacatcccaaatcattggcccgactcttgtgcctcgtctgtcattgcaacttgggac

SEQ ID NO: 39461 - DNA, 60 bp, Artificial
  Synthetic oligonucleotide
cgagagcccaacacacagatgttaccatacatcaatcgggtggtacctgtcgccacggct

SEQ ID NO: 39462 - DNA, 60 bp, Artificial
  Synthetic oligonucleotide
ctgtattcagtctgtcctgccacggcctccatcttccaatctgtattggccaatctcacc

SEQ ID NO: 39463 - DNA, 60 bp, Artificial
  Synthetic oligonucleotide
ggcctcctcattgtcaatcctagaacggctgtctgaggccaccccaatcaccacatccgc

SEQ ID NO: 39464 - DNA, 60 bp, Artificial
  Synthetic oligonucleotide
ggagggcaatggcctaccccaggctggagaacagcatgctcttgacgtgccaggaacaac

SEQ ID NO: 39465 - DNA, 60 bp, Artificial
  Synthetic oligonucleotide
acgcccttgcctatgcttcacagcacggccacagcgtctttgaggaggttgccaagttgg

SEQ ID NO: 39466 - DNA, 60 bp, Artificial
  Synthetic oligonucleotide
gcggacgaagctgccgctgcaaatctgcactcttactatagcttctacaaaacggactag

SEQ ID NO: 39467 - DNA, 60 bp, Artificial
  Synthetic oligonucleotide
gccactatggctactactcatacgcttctgtcgtttgacgacctcgaatttctcttacac

SEQ ID NO: 39468 - DNA, 60 bp, Artificial
  Synthetic oligonucleotide
tcatggggtctatgcttctgtggctcacgtagttaaaggagattcttactttcttgggga

SEQ ID NO: 39469 - DNA, 60 bp, Artificial
  Synthetic oligonucleotide
accctgttgttccaccaatgcactgggacgatgcaggcaagatcttccaacctcaccctg

SEQ ID NO: 39470 - DNA, 60 bp, Artificial
  Synthetic oligonucleotide
cccacatccgaaaggcactatccactcagtctcacccggcaaacattgacatgtgtaagg

SEQ ID NO: 39471 - DNA, 60 bp, Artificial
  Synthetic oligonucleotide
gctgtttcgtgagctgttctctctgctgggtaggatctggtcaagtgttaaagtttcaac

SEQ ID NO: 39472 - DNA, 60 bp, Artificial
  Synthetic oligonucleotide
tcttgcgggccttatcttggcggtaggaagaaagatcacatgattaatggtgaacctgac

SEQ ID NO: 39473 - DNA, 60 bp, Artificial
  Synthetic oligonucleotide
gacaatcatgagaacacactatcgggatggattgtcacactcacagcaatcatggagttg

SEQ ID NO: 39474 - DNA, 60 bp, Artificial
  Synthetic oligonucleotide
gtgtgctattctccagtccctagaggctaaaaacatccctgtcacttggaacctgttctc

SEQ ID NO: 39475 - DNA, 60 bp, Artificial
  Synthetic oligonucleotide
gctcttggtcaacagcgcgaattagcactgagaagaatggatttagatcgccaggcgcta

SEQ ID NO: 39476 - DNA, 60 bp, Artificial
  Synthetic oligonucleotide
gcgaaagaggcctgtcccagtgtgctacattctcactggaccaccagggtgcggcaagac

SEQ ID NO: 39477 - DNA, 60 bp, Artificial
  Synthetic oligonucleotide
caggaagggaaaaggcgaatgatctggggttgtgacgttggagttgctactgtgtgtgcc

SEQ ID NO: 39478 - DNA, 60 bp, Artificial
  Synthetic oligonucleotide
cgcaacctttacagtttgtgtaggccctgaggcttcgccatcagtagggtgcactgccca

SEQ ID NO: 39479 - DNA, 60 bp, Artificial
  Synthetic oligonucleotide
tgtctgtccggtgcaaccacacttgtgtctggtataatcgctactcagaaacttgcagca

SEQ ID NO: 39480 - DNA, 60 bp, Artificial
  Synthetic oligonucleotide
acccactggtggaatcccacaagcgtgcccgtcctggttctgctgttccaagaagctgct

SEQ ID NO: 39481 - DNA, 60 bp, Artificial
  Synthetic oligonucleotide
tgggctcttcgccgtcacctcacactatctgggcagttccaagccatcaaggccgcatat

SEQ ID NO: 39482 - DNA, 60 bp, Artificial
  Synthetic oligonucleotide
cgcggactgaccagatcgattcgagtggcatggccgccctacactgtgatgtgttcgaag

SEQ ID NO: 39483 - DNA, 60 bp, Artificial
  Synthetic oligonucleotide
gggtccattccttctgacctgatccctcgatcctcctcgctctggattggaaatcgtcat

SEQ ID NO: 39484 - DNA, 60 bp, Artificial
  Synthetic oligonucleotide
ccccttctcaacccttaccttgaacacttatctaaactctatgttgcttggtcaggctct

SEQ ID NO: 39485 - DNA, 60 bp, Artificial
  Synthetic oligonucleotide
ggtgatcctagatgtcccaagtcactcactgcaattgtagttgattctctgaaaccatac

SEQ ID NO: 39486 - DNA, 60 bp, Artificial
  Synthetic oligonucleotide
cggggattggtgaggaagcagttggtgctgacagggacaaagttgttcgcatcagcgtgc

SEQ ID NO: 39487 - DNA, 60 bp, Artificial
  Synthetic oligonucleotide
ctccgatcgatcgcccattgttgactctgcagtgaacacactaaagtctcctccagttgc

SEQ ID NO: 39488 - DNA, 60 bp, Artificial
  Synthetic oligonucleotide
ccaggtgggattgtgattcttgaatcatgtggtggtgcgcgcatctgggctttgggtcac

SEQ ID NO: 39489 - DNA, 60 bp, Artificial
  Synthetic oligonucleotide
agtgtgtccaggaggccctgtattccatcatccaaattgctggagctgcatttgtcacca

SEQ ID NO: 39490 - DNA, 60 bp, Artificial
  Synthetic oligonucleotide
cgctgaagaatctggccccggcacaaaattccacaagaatgcaattggatctgtcactga

SEQ ID NO: 39491 - DNA, 54 bp, Artificial
  Synthetic oligonucleotide
catttatcccgcatgtataatggttatgctggtggcatgcaggttcaggtggtc

SEQ ID NO: 39492 - DNA, 60 bp, Artificial
  Synthetic oligonucleotide
ccctccccaccatggatgactccaagttgaagaaggtggccaacatacttttgtgtgcct

SEQ ID NO: 39493 - DNA, 60 bp, Artificial
  Synthetic oligonucleotide
cccttcccaccatggatgactccaagttgaagaaggtagctaacatattcttgtgcgcgc

SEQ ID NO: 39494 - DNA, 60 bp, Artificial
  Synthetic oligonucleotide
cccttcccaccatggatgactccaagttgaagaaggtagctaacatattcttgtgtgcgc

SEQ ID NO: 39495 - DNA, 60 bp, Artificial
  Synthetic oligonucleotide
acatgtttcccacatgtcatgtgtgatgtgcgcaccctggagcccattcaactccctctt

SEQ ID NO: 39496 - DNA, 60 bp, Artificial
  Synthetic oligonucleotide
gcttagcccgttcatggatggtgctctccaaacaacttttgtcacaccaccatcgagcag

SEQ ID NO: 39497 - DNA, 60 bp, Artificial
  Synthetic oligonucleotide
caccaccccttccaataaagaagaggttggtgcattctccaacatcaaagttggacttaa

SEQ ID NO: 39498 - DNA, 60 bp, Artificial
  Synthetic oligonucleotide
taaagaagaggttggtgcattctccaacatcaaagttggatttaagaagatgctgggtgc

SEQ ID NO: 39499 - DNA, 60 bp, Artificial
  Synthetic oligonucleotide
ccaccccttccaataaagaagaggttggtgcattctccaacatcaaagttggacttaaga

SEQ ID NO: 39500 - DNA, 60 bp, Artificial
  Synthetic oligonucleotide
tgacatcctcagacatttcactgacaaatccccaattgttgattcggcctgcgcaacact

SEQ ID NO: 39501 - DNA, 60 bp, Artificial
  Synthetic oligonucleotide
ccaccaaaagtgacatctcaatcaattgacatcctcagacatttcactgacaaatcccca

SEQ ID NO: 39502 - DNA, 60 bp, Artificial
  Synthetic oligonucleotide
cgtgtccaaactgcacatctaaggttatcaacgatgatggctcgactgacggaaccatcc

SEQ ID NO: 39503 - DNA, 60 bp, Artificial
  Synthetic oligonucleotide
gcgcactctacgacacgtgtccaaactgcacatctaaggttatcaacgatgatggctcga

SEQ ID NO: 39504 - DNA, 60 bp, Artificial
  Synthetic oligonucleotide
gaaggcaaaccctaccattctaccaacaaaggcttgaagctcgtaggacttggcgcgaga

SEQ ID NO: 39505 - DNA, 60 bp, Artificial
  Synthetic oligonucleotide
ggagacaaaccctaccattctaccaacaaaggcttgaggctcgtagaacctggcgcgaga

SEQ ID NO: 39506 - DNA, 60 bp, Artificial
  Synthetic oligonucleotide
cgatagttcgcactgagaacggcgtacgtgcattgcttgatagatcatccataattcggc

SEQ ID NO: 39507 - DNA, 60 bp, Artificial
  Synthetic oligonucleotide
cccaattgttgattcggcatgtgcaacacttaaatcaaacccaattggcatcttcaacgg

SEQ ID NO: 39508 - DNA, 60 bp, Artificial
  Synthetic oligonucleotide
ttgttgattcggcctgcgcaacactaaaatcaaacccaattggcatcttcaacggtgttg

SEQ ID NO: 39509 - DNA, 60 bp, Artificial
  Synthetic oligonucleotide
tttgtttaagaattgatcatgtatcccttcgggctgccgcaatagcgcctaaccccaggg

SEQ ID NO: 39510 - DNA, 60 bp, Artificial
  Synthetic oligonucleotide
gcggtgtgaccaaggtagctcaattcatctggcgtgtcatgaccaacccagtggacgcct

SEQ ID NO: 39511 - DNA, 60 bp, Artificial
  Synthetic oligonucleotide
gtggttcttcccaaagaaagaggaagcaaatgagctggctatggtgaggtccatcgagga

SEQ ID NO: 39512 - DNA, 60 bp, Artificial
  Synthetic oligonucleotide
tcaaggatgtcaggaccatgccagagctcaaacaagcactcaagaatatctcaatcaaga

SEQ ID NO: 39513 - DNA, 60 bp, Artificial
  Synthetic oligonucleotide
tgtgtgatgtgcgcaccctggagcccattcaactccctcttcttgatgtgcgtcgagtcc

SEQ ID NO: 39514 - DNA, 60 bp, Artificial
  Synthetic oligonucleotide
gtcatgtgtgatgtgcgcaccctggagcccattcaactccctcttcttgatgtgcgtcga

SEQ ID NO: 39515 - DNA, 60 bp, Artificial
  Synthetic oligonucleotide
ccggtggtgggagcctcaattgcagctcctgtcgtcggtcaacaaaatataattgacccc

SEQ ID NO: 39516 - DNA, 60 bp, Artificial
  Synthetic oligonucleotide
gcttttgcccctccctgacataaggaatagattctttcactacaaccaggaagacacccc

SEQ ID NO: 39517 - DNA, 60 bp, Artificial
  Synthetic oligonucleotide
ttaggggcacgttaattagccaaacgccgaggtctgcagattcaacagattcagctccac

SEQ ID NO: 39518 - DNA, 60 bp, Artificial
  Synthetic oligonucleotide
aacatgaacctagcccccgcagttgcccctgctttccccggtgagcgcattctcttcttc

SEQ ID NO: 39519 - DNA, 60 bp, Artificial
  Synthetic oligonucleotide
tgcctcatcccacaggagtgggttcagcacttctaccaggaggccgccccatcacaatct

SEQ ID NO: 39520 - DNA, 60 bp, Artificial
  Synthetic oligonucleotide
agaggaaaggggtgtgcttggtctagtcactggcacggatatcaggaagagaagaccaga

SEQ ID NO: 39521 - DNA, 60 bp, Artificial
  Synthetic oligonucleotide
gtaggggcgacccgtgcccatgaggtgcacatagacaccacaaaccctagatacacccca

SEQ ID NO: 39522 - DNA, 60 bp, Artificial
  Synthetic oligonucleotide
cacaccaccatcgagcagagcttcatcaaatgggtcggtctcaaccgttcccaaagctgt

SEQ ID NO: 39523 - DNA, 57 bp, Artificial
  Synthetic oligonucleotide
acatccaccgctccttcacaatcaacccattctacggctctgactgcagggtctgga

SEQ ID NO: 39524 - DNA, 60 bp, Artificial
  Synthetic oligonucleotide
ctttgaggcaaagctacatagagaagggttcatcactgtggcaaattctggaaacaaccc

SEQ ID NO: 39525 - DNA, 60 bp, Artificial
  Synthetic oligonucleotide
ccgagacccaggagacgagtgagcccgagaaggaaactgcccagagtgaatgggagattg

SEQ ID NO: 39526 - DNA, 60 bp, Artificial
  Synthetic oligonucleotide
cctcgcagaccaagcatccaaagctaatctcatgtatgagcaggccaaacacatgcagcc

SEQ ID NO: 39527 - DNA, 60 bp, Artificial
  Synthetic oligonucleotide
gcaagttgcatagccttaccgtgcagagtgggaatgaacatgaatgaggacgggcctatc

SEQ ID NO: 39528 - DNA, 60 bp, Artificial
  Synthetic oligonucleotide
ggggaaccctgtcaaagatgccttgacactgcaagaactggccgacacctgtccagtcac

SEQ ID NO: 39529 - DNA, 60 bp, Artificial
  Synthetic oligonucleotide
gtggactacccgacctgacgacagtgcagaatgaacatgagaacaccccgtacacagtcc

SEQ ID NO: 39530 - DNA, 60 bp, Artificial
  Synthetic oligonucleotide
ctggctagaatagcagccgctaggtccctcctacacaaggccaaggaagagatgtttagc

SEQ ID NO: 39531 - DNA, 60 bp, Artificial
  Synthetic oligonucleotide
gggtcagttctccagcaatcctgtgcacaggcaacccactttgtcccgttctgattcccc

SEQ ID NO: 39532 - DNA, 60 bp, Artificial
  Synthetic oligonucleotide
accggcactgccccacagttaaggtcgggtccaaaacactagtgatcccaccagaacccc

SEQ ID NO: 39533 - DNA, 60 bp, Artificial
  Synthetic oligonucleotide
ctcacttcccaaaccgcaaacgaggtgagttcagccctcctcaggctcagacaagccagg

SEQ ID NO: 39534 - DNA, 60 bp, Artificial
  Synthetic oligonucleotide
tcctttaaacatgacaaggaaatgctgcaatcacaagttctggccaccaaacagctccag

SEQ ID NO: 39535 - DNA, 60 bp, Artificial
  Synthetic oligonucleotide
cgttggcgactttgtcatctcagttcaggaaggcctaccatcaggagtcccgtgcacgtc

SEQ ID NO: 39536 - DNA, 60 bp, Artificial
  Synthetic oligonucleotide
aggtcaagagagacttccctggtcagcctgatatgtggaaagatcacttcaaaccggact

SEQ ID NO: 39537 - DNA, 60 bp, Artificial
  Synthetic oligonucleotide
cccaggggtctctgactgcaagagtggcgggtcttgttcacgagaggagagatgaattcc

SEQ ID NO: 39538 - DNA, 60 bp, Artificial
  Synthetic oligonucleotide
gccaaatgggaatgctcctcactggggcgaacgcaaagaacatggacctcggcaccggcc

SEQ ID NO: 39539 - DNA, 60 bp, Artificial
  Synthetic oligonucleotide
gcatgttgtcatctgctgcgtcaaccctaagggcatgcaaagatctggggaactacgccc

SEQ ID NO: 39540 - DNA, 57 bp, Artificial
  Synthetic oligonucleotide
cgcagcggcccgaggaggcaacactgtcatctgtgccactcaagggcaggacgggga

SEQ ID NO: 39541 - DNA, 60 bp, Artificial
  Synthetic oligonucleotide
cgtcgacgtcaaacaaatccaaatccacaaatctggagaattttgcaggtttagattccc

SEQ ID NO: 39542 - DNA, 60 bp, Artificial
  Synthetic oligonucleotide
aactgctacaatttctgttgttgggtgcttgaacttaacgacacgtggctttgcaggagg

SEQ ID NO: 39543 - DNA, 60 bp, Artificial
  Synthetic oligonucleotide
ctactgggcaaactcaagccacttaacctactacatctgcttgcgtcgtgtgactggacg

SEQ ID NO: 39544 - DNA, 60 bp, Artificial
  Synthetic oligonucleotide
cttactgtggtgccccaatcctaggtcctggcaaggcgcccaagctcagcacgaagacca

SEQ ID NO: 39545 - DNA, 60 bp, Artificial
  Synthetic oligonucleotide
tattggacaagagggcccaaccatgagaacccatatgaaagcatggtcccccactcccaa

SEQ ID NO: 39546 - DNA, 52 bp, Artificial
  Synthetic oligonucleotide
ctagaaaggttcttgcagatcgtaagagagtcgtctcggtagtacctgacga

SEQ ID NO: 39547 - DNA, 60 bp, Artificial
  Synthetic oligonucleotide
cgatgctgctaggaagatacttgcagatcgtaagagagtcgtctcggtagtacctgacga

SEQ ID NO: 39548 - DNA, 52 bp, Artificial
  Synthetic oligonucleotide
ctagaaaggtccttgcagatcgtaagagagtcgtctcggtagtacctgacga

SEQ ID NO: 39549 - DNA, 60 bp, Artificial
  Synthetic oligonucleotide
gctgcagataaaagtgagacaatagccccaacccacacccccgtcttccttaagagaacg

SEQ ID NO: 39550 - DNA, 60 bp, Artificial
  Synthetic oligonucleotide
aaccactgtaccaactgaccaggccaaccttaaccagtgtcctggggcctctggtcccgt

SEQ ID NO: 39551 - DNA, 60 bp, Artificial
  Synthetic oligonucleotide
tgactgtggaggcatgcctacagggactcgttaccaccgctcacccgcatggcccaaccc

SEQ ID NO: 39552 - DNA, 60 bp, Artificial
  Synthetic oligonucleotide
gtcacagttttccaccaatgtaaactacatcaacttgtcccttatcgccaaactccgacc

SEQ ID NO: 39553 - DNA, 60 bp, Artificial
  Synthetic oligonucleotide
ggccgagacactccgactgttagcagagaccataactgaaagcttggtgcactttggccc

SEQ ID NO: 39554 - DNA, 60 bp, Artificial
  Synthetic oligonucleotide
ccgacctctgtacttcctgacaacccacgagcaggagctttctaccgccgggtcacaaca

SEQ ID NO: 39555 - DNA, 60 bp, Artificial
  Synthetic oligonucleotide
taaccaccactttgccgctaattccaccacgctcggttggtcgacactcccaattgagcc

SEQ ID NO: 39556 - DNA, 60 bp, Artificial
  Synthetic oligonucleotide
cgcccctcgcgcgccccggaaccaaggttatgatgaagaggcgcccacacctattgtcac

SEQ ID NO: 39557 - DNA, 60 bp, Artificial
  Synthetic oligonucleotide
ccgcaaacagcatcaggagcaccatcctcctggacacacctcggaaggctccagttgcaa

SEQ ID NO: 39558 - DNA, 60 bp, Artificial
  Synthetic oligonucleotide
tggaatttctgtcaaagcacatggccgatgttaccttcccacacaaccctgagtgcaccg

SEQ ID NO: 39559 - DNA, 60 bp, Artificial
  Synthetic oligonucleotide
ggtccacgcattaacccttacactgcacatctgagtgccatgtttgctggttggggcggc

SEQ ID NO: 39560 - DNA, 60 bp, Artificial
  Synthetic oligonucleotide
tctattactcggcgcgcctgcatcctgtgaccacgcttgcagaggggacgtacgaaacac

SEQ ID NO: 39561 - DNA, 60 bp, Artificial
  Synthetic oligonucleotide
atggtaaagcaagattgaagaagtacatggcccgcacggcagccctacttgagctcgcgg

SEQ ID NO: 39562 - DNA, 60 bp, Artificial
  Synthetic oligonucleotide
aacccaaacttccaaccggcccctcctagggtgaatttagggtttaggcctccatcaacc

SEQ ID NO: 39563 - DNA, 60 bp, Artificial
  Synthetic oligonucleotide
tgcccgcaccgtggaccccatcctcatcaacctccccgacatccgtgcagtggactatca

SEQ ID NO: 39564 - DNA, 60 bp, Artificial
  Synthetic oligonucleotide
gccacgtctggtttgaaagcgtacatggccgccaatcgagcgcttgcgcaggtattccag

SEQ ID NO: 39565 - DNA, 60 bp, Artificial
  Synthetic oligonucleotide
ggcatgttcactcctggaaaagtcaacatcgtgtggcccgttcgtggccggccaaaaggg

SEQ ID NO: 39566 - DNA, 60 bp, Artificial
  Synthetic oligonucleotide
gccttgattacagcaagtgggattcaacacaacaccccgctgttacagccgcctcacttg

SEQ ID NO: 39567 - DNA, 60 bp, Artificial
  Synthetic oligonucleotide
cctcttgcgtcaccacaagacacaattggtccaaacgcggcacttctccttcccacgcag

SEQ ID NO: 39568 - DNA, 60 bp, Artificial
  Synthetic oligonucleotide
ccataacaatgacagccagccgacaatgcgtttattgtgcatgctgtacacgccacttcg

SEQ ID NO: 39569 - DNA, 60 bp, Artificial
  Synthetic oligonucleotide
ttgctcaggccaccctctttcctcatgtgattgctgatgttcgcacattggaaccacttg

SEQ ID NO: 39570 - DNA, 60 bp, Artificial
  Synthetic oligonucleotide
gaaattaagactggtggtcttgaaatgtacgtgccgggttggcaggcaatgttccgctgg

SEQ ID NO: 39571 - DNA, 60 bp, Artificial
  Synthetic oligonucleotide
gctcgtgccggaggttaataatgctgaaccactgcctcttgatcctgtggctggggcttc

SEQ ID NO: 39572 - DNA, 60 bp, Artificial
  Synthetic oligonucleotide
ggttgggttggtaacatgcgagtcagggtcatcctggcaggtaacgcatttaccgccggt

SEQ ID NO: 39573 - DNA, 60 bp, Artificial
  Synthetic oligonucleotide
ggggctgacctgtctacagtcatccgagcggccagagctttcggtccattctgtgatgcc

SEQ ID NO: 39574 - DNA, 60 bp, Artificial
  Synthetic oligonucleotide
cgctggcgctcctgtgactcgcatcgttgattggaatggcactaggattgcagccccgaa

SEQ ID NO: 39575 - DNA, 60 bp, Artificial
  Synthetic oligonucleotide
gccagaggtaggcttggcatcaggagataatggcccaagctataattggtgctattgcag

SEQ ID NO: 39576 - DNA, 60 bp, Artificial
  Synthetic oligonucleotide
gcaaagcgcaatcaccactatccttcaaatggcaggttcggccctggtcatacatcgggc

SEQ ID NO: 39577 - DNA, 60 bp, Artificial
  Synthetic oligonucleotide
ccttcattggggagttgggtgagcaggctgcccatgctaacaacatgtatgagcagggga

SEQ ID NO: 39578 - DNA, 60 bp, Artificial
  Synthetic oligonucleotide
tgtgtgcggtgcaagctggtgagggtgagacaactttggaaggtggtgataaaggccact

SEQ ID NO: 39579 - DNA, 60 bp, Artificial
  Synthetic oligonucleotide
cccctggttttggtgaggctattgtctatttcatgtcacgcgtccccggctggaatagga

SEQ ID NO: 39580 - DNA, 60 bp, Artificial
  Synthetic oligonucleotide
ccgcagctcaatcccagcaacaacattcaatagacacagcagtcctggcattgacccgct

SEQ ID NO: 39581 - DNA, 60 bp, Artificial
  Synthetic oligonucleotide
aactgaagccattcgctgaaccacgggggcgcatgccagaacctggattgttggaagcag

SEQ ID NO: 39582 - DNA, 60 bp, Artificial
  Synthetic oligonucleotide
ggtggttttgacaaccaaggcaacacaccatttgggaagggcactatgcgcccaaccaca

SEQ ID NO: 39583 - DNA, 60 bp, Artificial
  Synthetic oligonucleotide
ggagaggcaggatgaattccaaatgcaaggccccacatacgactttgacgctgaccggat

SEQ ID NO: 39584 - DNA, 60 bp, Artificial
  Synthetic oligonucleotide
gaattggcttcggtggtcgccaaggatctccttgcaccttctgagatggatgttggggac

SEQ ID NO: 39585 - DNA, 60 bp, Artificial
  Synthetic oligonucleotide
ggccttcgtgctgcaactcagcttggccaatatggtcttgagatcttcgcagtccttaag

SEQ ID NO: 39586 - DNA, 56 bp, Artificial
  Synthetic oligonucleotide
tgatgtgtcaagcttcatcgcatcacttttgcctgacatgcatttacaaggccctg

SEQ ID NO: 39587 - DNA, 60 bp, Artificial
  Synthetic oligonucleotide
ggcttcatgactgtgccaatgccattcagcagcaaggctagggcaccaagcacttcaggg

SEQ ID NO: 39588 - DNA, 60 bp, Artificial
  Synthetic oligonucleotide
cttgtctcaaaaccatttaaagatctccttggaaagctcaagcccctcaacgttctgaac

SEQ ID NO: 39589 - DNA, 60 bp, Artificial
  Synthetic oligonucleotide
gaagacacttaaggacatagaggcagcagtgattgatatggaagttatctcagccacagc

SEQ ID NO: 39590 - DNA, 60 bp, Artificial
  Synthetic oligonucleotide
aaccactaacgcccctggcccagcacctgtcgattttgttaacctgggaccggtgtgtcg

SEQ ID NO: 39591 - DNA, 60 bp, Artificial
  Synthetic oligonucleotide
cctgttgcctcaagagttcattggacatttcgtcagtgaacaagcccccgcaattggtga

SEQ ID NO: 39592 - DNA, 60 bp, Artificial
  Synthetic oligonucleotide
gtgctgcatgccattgaacccaattcatcttcctttgttccgcaccttggcagtgtttcc

SEQ ID NO: 39593 - DNA, 60 bp, Artificial
  Synthetic oligonucleotide
gcagctggttttcaaggcaggttggacaggggctccatcgagagacaactgtggtggacc

SEQ ID NO: 39594 - DNA, 60 bp, Artificial
  Synthetic oligonucleotide
cttcaactttctcttcctggtccccccgactgtggaacaaaagacacgcccttttagtgt

SEQ ID NO: 39595 - DNA, 60 bp, Artificial
  Synthetic oligonucleotide
ggttcaccatttctagcctttgaggccccagcccctgctggattccccgaccttggaaag

SEQ ID NO: 39596 - DNA, 60 bp, Artificial
  Synthetic oligonucleotide
gacccatcccgcttaacccaggtgcttaaagagtatggtcttcggcccacacgccctgac

SEQ ID NO: 39597 - DNA, 60 bp, Artificial
  Synthetic oligonucleotide
ccccactagagaacaccaatgtagagcccacgtcgccaaggccaatggaggtggccctat

SEQ ID NO: 39598 - DNA, 60 bp, Artificial
  Synthetic oligonucleotide
gagaagagaagaatggcaactacagcatacaggagtaccttgaggacaggcaacgctatg

SEQ ID NO: 39599 - DNA, 60 bp, Artificial
  Synthetic oligonucleotide
cctatgtgagactgaggaggaagaggacactcaggaggttaaagtttgtctgcccacggc

SEQ ID NO: 39600 - DNA, 60 bp, Artificial
  Synthetic oligonucleotide
ccgtcaagaagaacgccaccagttaggccttgtgactggcagtgacattagaaagaggaa

SEQ ID NO: 39601 - DNA, 60 bp, Artificial
  Synthetic oligonucleotide
gggcttttgggttagccctacagtgtttatcacaaccacccatgtcatcccatcaggagc

SEQ ID NO: 39602 - DNA, 60 bp, Artificial
  Synthetic oligonucleotide
cccttgtacttctcaagtcaatagcataaaccactggctcatcactctctgtgcactctc

SEQ ID NO: 39603 - DNA, 60 bp, Artificial
  Synthetic oligonucleotide
ggccgctgagtatctagccaagcgcctggccaatgagattagaccaggtgggaaggttgg

SEQ ID NO: 39604 - DNA, 60 bp, Artificial
  Synthetic oligonucleotide
tccaataatttgcttgctaagaatcttaatactcgctattcattgctccaggccggcggc

SEQ ID NO: 39605 - DNA, 60 bp, Artificial
  Synthetic oligonucleotide
acatgcagaccctcatgtggtgtccacaaccaatgccctcattgcacgcatatcattggc

SEQ ID NO: 39606 - DNA, 60 bp, Artificial
  Synthetic oligonucleotide
gcgcgtggacttcctcgtttattgttcagctccagacgtggaacagacccgccgcaccaa

SEQ ID NO: 39607 - DNA, 60 bp, Artificial
  Synthetic oligonucleotide
gtggtggacccgcggcccaaatcatgatgacccaaatgaaaccctgataccccacccaca

SEQ ID NO: 39608 - DNA, 60 bp, Artificial
  Synthetic oligonucleotide
cccttttcaccgtgatgcccttcaaactgtatgggtaacaccaccgggttcaacttcttc

SEQ ID NO: 39609 - DNA, 59 bp, Artificial
  Synthetic oligonucleotide
cctagcacacatgatcgtggcagggaagagggtcctctagggcaccaagtgaagtggac

SEQ ID NO: 39610 - DNA, 60 bp, Artificial
  Synthetic oligonucleotide
gggaaaatctattggggtccattcaccacaagccgcattcaccatagccagaataaccat

SEQ ID NO: 39611 - DNA, 60 bp, Artificial
  Synthetic oligonucleotide
cagcaggccatgggttgggtggaacaaccactggaccagaacctaccaacctgggaagag

SEQ ID NO: 39612 - DNA, 60 bp, Artificial
  Synthetic oligonucleotide
cttcaatgaagatacaggggcgactagtccatggtcaatctggtatgttgctcactgggg

SEQ ID NO: 39613 - DNA, 60 bp, Artificial
  Synthetic oligonucleotide
tcggcccacacgccctgacaaaagtgaaggaccaatagtgttgagaaggcagatcgatgg

SEQ ID NO: 39614 - DNA, 60 bp, Artificial
  Synthetic oligonucleotide
ccctggtcatatgctgatgcttgtcagtctcttgataaaaccaccagttctggccatccc

SEQ ID NO: 39615 - DNA, 60 bp, Artificial
  Synthetic oligonucleotide
attaccaccaggcgtgtacgagccagcctaccttggaggtcgtgaccctagggtgaaagg

SEQ ID NO: 39616 - DNA, 60 bp, Artificial
  Synthetic oligonucleotide
accttcaggacagagacaagtattatgaggaggtggccatcgccagggcgaccgaagagg

SEQ ID NO: 39617 - DNA, 60 bp, Artificial
  Synthetic oligonucleotide
ggaataccttcaggacagagacaagtattatgaggaggtggccatcgccagggcgaccga

SEQ ID NO: 39618 - DNA, 60 bp, Artificial
  Synthetic oligonucleotide
ggagtaccttcaggacagagacaagtattatgaggaggtggccatcgccagggcgaccga

SEQ ID NO: 39619 - DNA, 60 bp, Artificial
  Synthetic oligonucleotide
ctccatagaggaataccttcaggacagagacaagtattatgaggaggtggccatcgccag

SEQ ID NO: 39620 - DNA, 60 bp, Artificial
  Synthetic oligonucleotide
agaaaaggcatgctactgcaaatcctatggtgagcactggtttgaggctgccaaacaaaa

SEQ ID NO: 39621 - DNA, 60 bp, Artificial
  Synthetic oligonucleotide
ggaaaaggcatgctactgcaaatcctatggtgaccagtggtttgacgctgccaaggaaaa

SEQ ID NO: 39622 - DNA, 60 bp, Artificial
  Synthetic oligonucleotide
caattggcaaagcacaacaaattgaattagacaaggctgctcttggtcaacagcgcgaat

SEQ ID NO: 39623 - DNA, 60 bp, Artificial
  Synthetic oligonucleotide
gcaacaggcattggaacttgaatggcagcacatatggctggtcaagccctcggtttgccg

SEQ ID NO: 39624 - DNA, 60 bp, Artificial
  Synthetic oligonucleotide
ctatgagttaggttttgccactggggcaccaggcaacctccagcccaccaccaacacttc

SEQ ID NO: 39625 - DNA, 60 bp, Artificial
  Synthetic oligonucleotide
ttctacgtgcaacaggcattggaacttgaatggcagcacatatggctggtcaagccctcg

SEQ ID NO: 39626 - DNA, 60 bp, Artificial
  Synthetic oligonucleotide
tgcaacaggcattggaacttgaatggcagcacatatggctggtcaagccctcggtttgcc

SEQ ID NO: 39627 - DNA, 60 bp, Artificial
  Synthetic oligonucleotide
ccatgcatggtgaaaagtattacaggactgtggcttcccgggtctccaaggaggccgccc

SEQ ID NO: 39628 - DNA, 60 bp, Artificial
  Synthetic oligonucleotide
tggtgaaaagtattacaggactgtggcttcccgggtctccaaggaggccgcccacagtgg

SEQ ID NO: 39629 - DNA, 60 bp, Artificial
  Synthetic oligonucleotide
ggtgaaaagtattacaggactgtggcttcccgggtctccaaggaggccgcccatagtggg

SEQ ID NO: 39630 - DNA, 60 bp, Artificial
  Synthetic oligonucleotide
gggaccaccctattgttatgcccgctaatgggtacttcaggtttgaggcatgggttaacc

SEQ ID NO: 39631 - DNA, 60 bp, Artificial
  Synthetic oligonucleotide
aatttggacggctcacccgtcgacccgacagatgaagtcccagcccctttgggaacacca

SEQ ID NO: 39632 - DNA, 60 bp, Artificial
  Synthetic oligonucleotide
tccgctgagccggaactggcccaggtagttgccgaagacctccttgcacccagccgtctt

SEQ ID NO: 39633 - DNA, 60 bp, Artificial
  Synthetic oligonucleotide
tgtccccaatgttccccggcgagcagattctcttcttccgctcgttcatgccaggtgcta

SEQ ID NO: 39634 - DNA, 60 bp, Artificial
  Synthetic oligonucleotide
caggaagaatgaacactggaacggggaatctttcactgggcctcttgcagatcaagcctc

SEQ ID NO: 39635 - DNA, 60 bp, Artificial
  Synthetic oligonucleotide
gaggctgttgtggggatctgatctgggaacaatgctgaggtgcgctcgggcatttggagg

SEQ ID NO: 39636 - DNA, 60 bp, Artificial
  Synthetic oligonucleotide
agtttcttgcagggttctgacccgcccatcaccagactttgaatttaatttccttgtccc

SEQ ID NO: 39637 - DNA, 60 bp, Artificial
  Synthetic oligonucleotide
ggcctcgtcccaactaggccagacaaaactgagggcccacttgtaattacccaggatttg

SEQ ID NO: 39638 - DNA, 60 bp, Artificial
  Synthetic oligonucleotide
gcagacttctctcatctcaagctcacactggccccgcaaggtggttttgacaagaacggc

SEQ ID NO: 39639 - DNA, 60 bp, Artificial
  Synthetic oligonucleotide
cgtgggtgatttcgtcatctccgttcaagaaggtcttccatcgggtgtcccctgcacgtc

SEQ ID NO: 39640 - DNA, 60 bp, Artificial
  Synthetic oligonucleotide
ctcagtgctatgtccgaggtctctggtctttcacctgaggttgtgcaagccaactcctgc

SEQ ID NO: 39641 - DNA, 60 bp, Artificial
  Synthetic oligonucleotide
cacagaatggtagggtgacacttgatggagagctacagggcacaaccacactacaaccgg

SEQ ID NO: 39642 - DNA, 59 bp, Artificial
  Synthetic oligonucleotide
gagaacaacagcatactctggtaatttcacctcacaaggagttaagcagcccacaccta

SEQ ID NO: 39643 - DNA, 60 bp, Artificial
  Synthetic oligonucleotide
acaaccaatttggccaaccccgccccgcttgactatgtcaactttgaggcttgttcccgc

SEQ ID NO: 39644 - DNA, 60 bp, Artificial
  Synthetic oligonucleotide
cgtcttcatcaggaacagtctcaaccgtccctagagaaattttggactcctggactcctg

SEQ ID NO: 39645 - DNA, 60 bp, Artificial
  Synthetic oligonucleotide
ggcttaaccgcagatcaataactagaacaactggtttcttcaagccttatcagtcctgga

SEQ ID NO: 39646 - DNA, 60 bp, Artificial
  Synthetic oligonucleotide
gcctcatccctcgcaatggggttgatcactgggatgcctacaggggagaacgagtcgtct

SEQ ID NO: 39647 - DNA, 60 bp, Artificial
  Synthetic oligonucleotide
cctagcgtctggtcaagaatcgtcccgcttgggactggctggggattttgggtctcatcc

SEQ ID NO: 39648 - DNA, 60 bp, Artificial
  Synthetic oligonucleotide
gcagaggaaggaggaacgtggggttctgggactcgtcacaggagcagacatcaggaaacg

SEQ ID NO: 39649 - DNA, 60 bp, Artificial
  Synthetic oligonucleotide
tcgcctgacatcgtgggcaccattaatgctatactagccagaatcgccgcggctaggtct

SEQ ID NO: 39650 - DNA, 60 bp, Artificial
  Synthetic oligonucleotide
ctgagggaagagaaacagggccgctacacaatagaagagtacctccaggatagagatcgg

SEQ ID NO: 39651 - DNA, 60 bp, Artificial
  Synthetic oligonucleotide
ccaaatggtgaagatgtgatttactataatagcaaagatgacactgtgcatggcctgcca

SEQ ID NO: 39652 - DNA, 60 bp, Artificial
  Synthetic oligonucleotide
cccagctgcaatcagccttgccaccatcgagctcacacctatatcgctttactggaggcc

SEQ ID NO: 39653 - DNA, 60 bp, Artificial
  Synthetic oligonucleotide
gtccataaatcaggtgaattttgcagattcaggttcccaaagccagtgaggcccgatgtc

SEQ ID NO: 39654 - DNA, 60 bp, Artificial
  Synthetic oligonucleotide
gctggcctcgtaccagagatcaaccatgaggtcatggccatagaacctgttgcaggggcc

SEQ ID NO: 39655 - DNA, 60 bp, Artificial
  Synthetic oligonucleotide
ggagccaacgctaagaatatggatttaggtaccggtcccggggattgtggttgcccgtac

SEQ ID NO: 39656 - DNA, 60 bp, Artificial
  Synthetic oligonucleotide
tgggcatgcaggtggtatggaggtgcagatagtgcttgctgggaatgcgttcacagcggg

SEQ ID NO: 39657 - DNA, 60 bp, Artificial
  Synthetic oligonucleotide
gagaggaccacggcacctactgtggagccccaatactggcccctggtaaagcgccgaagc

SEQ ID NO: 39658 - DNA, 60 bp, Artificial
  Synthetic oligonucleotide
gaggcaacacggtcatctgtgcaacccaagggcctgatggtgaggcggtgttagaagggg

SEQ ID NO: 39659 - DNA, 60 bp, Artificial
  Synthetic oligonucleotide
attccccactcccagagagcaacccagctaatggccctccttggggaagcctcgttgcat

SEQ ID NO: 39660 - DNA, 60 bp, Artificial
  Synthetic oligonucleotide
aatgcccagatcaatgccacaaccaaattgcagagggacatgatcgccatcaagcagggg

SEQ ID NO: 39661 - DNA, 60 bp, Artificial
  Synthetic oligonucleotide
ggccgcgactgcgcaaacagacgtggctctgatcagatttgtgaatcccgacacaggcag

SEQ ID NO: 39662 - DNA, 56 bp, Artificial
  Synthetic oligonucleotide
ccccgacgtgtcgaacttcatcgcgtcactcatcggagactttgaattgcagggcc

SEQ ID NO: 39663 - DNA, 60 bp, Artificial
  Synthetic oligonucleotide
cagacatccgcaataccttcttccattacaatcagagcaacgggccaaaacttaggttag

SEQ ID NO: 39664 - DNA, 60 bp, Artificial
  Synthetic oligonucleotide
agtgacaatgccaccagggcacatgaggccagggtcaacaccaacgatcccaccttcgca

SEQ ID NO: 39665 - DNA, 60 bp, Artificial
  Synthetic oligonucleotide
acctcaccgccctgctgaaagacagggacagcctcctgacctacatgaagaccctagacc

SEQ ID NO: 39666 - DNA, 60 bp, Artificial
  Synthetic oligonucleotide
cgagaccaactcaaacccttcacagagcccaggggcaagccacctagaccgtcagtactg

SEQ ID NO: 39667 - DNA, 60 bp, Artificial
  Synthetic oligonucleotide
gggaacgatgggtcaaggctccagagacagatgaacccacaccaagtaacgataagcccg

SEQ ID NO: 39668 - DNA, 60 bp, Artificial
  Synthetic oligonucleotide
cccagggttccctcacagcaagagtggccggacttgtgcatgaaaggaaagatgagtttc

SEQ ID NO: 39669 - DNA, 60 bp, Artificial
  Synthetic oligonucleotide
cggttgcggcaaggtcagcatagagaaactggcagataacaactcccaaacaaccagaga

SEQ ID NO: 39670 - DNA, 60 bp, Artificial
  Synthetic oligonucleotide
aaggggaagaacaagaaaggcaggggacgcaaacacactgcattctccagcaaagggctt

SEQ ID NO: 39671 - DNA, 60 bp, Artificial
  Synthetic oligonucleotide
tgaagatggcgtctaacgacgctaccgctgccgctggcaactttaacattgccaacaaca

SEQ ID NO: 39672 - DNA, 59 bp, Artificial
  Synthetic oligonucleotide
cgttaaataaccaagtagagcagtttaacaaaattcttgagcaaagggtacaaggcccc

SEQ ID NO: 39673 - DNA, 60 bp, Artificial
  Synthetic oligonucleotide
ttgctaacagcaacaacgacaccgcaaaatcttcaagtgacggagtgctttctagcatgg

SEQ ID NO: 39674 - DNA, 60 bp, Artificial
  Synthetic oligonucleotide
ttgccaacagcaacaacgacaccgcaaaatcttcaagtgacggagtgctttctagcatgg

SEQ ID NO: 39675 - DNA, 60 bp, Artificial
  Synthetic oligonucleotide
gtcaagcgctgaataatcaagtagaccagtttaacaaaattcttgagcaaagggtacaag

SEQ ID NO: 39676 - DNA, 60 bp, Artificial
  Synthetic oligonucleotide
ggaccgccaagccttaaacaaccaagttgagcagtttaacaaaattcttgagcaaagggt

SEQ ID NO: 39677 - DNA, 60 bp, Artificial
  Synthetic oligonucleotide
ggccccatgggaacagtggccgggccgttaggttcttagaataatgtcttggtttactgg

SEQ ID NO: 39678 - DNA, 60 bp, Artificial
  Synthetic oligonucleotide
acgaactccggccaaaagacaaggtcgcagtcgggaagcgtaggctaatctggggttgcg

SEQ ID NO: 39679 - DNA, 60 bp, Artificial
  Synthetic oligonucleotide
ggccaaaagacaaggtcgcagtcgggaagcgtaggctaatctggggttgcgatgttggcg

SEQ ID NO: 39680 - DNA, 60 bp, Artificial
  Synthetic oligonucleotide
cccttggccttaaagacgagcttcgaccaaaagacaaggtcgcagtcgggaagcgtagac

SEQ ID NO: 39681 - DNA, 60 bp, Artificial
  Synthetic oligonucleotide
ctgcgctaacgtgcttaaatactatgattgggatccccactttaggttgatcatcaatcc

SEQ ID NO: 39682 - DNA, 60 bp, Artificial
  Synthetic oligonucleotide
gcgctaacgtgcttaaatactatgattgggatccccactttaagttgattatcaacccca

SEQ ID NO: 39683 - DNA, 60 bp, Artificial
  Synthetic oligonucleotide
acccattctggtacgccattgctgcgatactctgcttcttgatcacaggagcgataccac

SEQ ID NO: 39684 - DNA, 60 bp, Artificial
  Synthetic oligonucleotide
cacttgacttcaccaacccattctggtacgccattgctgcgatactctgcttcttgatca

SEQ ID NO: 39685 - DNA, 60 bp, Artificial
  Synthetic oligonucleotide
cggcctgcgcaacactaaaatcaaacccaattggcatcttcaacggtgttgcattcaagg

SEQ ID NO: 39686 - DNA, 60 bp, Artificial
  Synthetic oligonucleotide
cccattctggtacgccattgctgcgatactctgctttctaatcacaggggccatcccaca

SEQ ID NO: 39687 - DNA, 60 bp, Artificial
  Synthetic oligonucleotide
cctggccaacccagcaccactggactatgtcaactttgaagcatgctcgaggcgcatcga

SEQ ID NO: 39688 - DNA, 60 bp, Artificial
  Synthetic oligonucleotide
ggtgaaaagtattacaggactgtggcttcccgggtctctaaggaggccgcccatagtggg

SEQ ID NO: 39689 - DNA, 60 bp, Artificial
  Synthetic oligonucleotide
ggtgaaaagtattacaggactgtggcttcccgtgtctccaaggaggccgcccaaagtggg

SEQ ID NO: 39690 - DNA, 60 bp, Artificial
  Synthetic oligonucleotide
catgcatggtgaaaagtattacaggactgtggcttcccgtgtttccaaggaggccgccca

SEQ ID NO: 39691 - DNA, 60 bp, Artificial
  Synthetic oligonucleotide
ggtgaaaagtattacaggactgtggcttcccgtgtttccaaggaggccgcccaaagtggg

SEQ ID NO: 39692 - DNA, 60 bp, Artificial
  Synthetic oligonucleotide
agtcatgaagtggttcttcccaaagaaagaggaaacaaatgaactggctatggtgagatc

SEQ ID NO: 39693 - DNA, 60 bp, Artificial
  Synthetic oligonucleotide
agtcatgaagtggttcttcccaaagaaagaggaagcaaatgaacttgctatggtgagatc

SEQ ID NO: 39694 - DNA, 60 bp, Artificial
  Synthetic oligonucleotide
atagagatggtggtcccacgccaccggtctgttctgcgctgggtgcgctttggaacaatg

SEQ ID NO: 39695 - DNA, 60 bp, Artificial
  Synthetic oligonucleotide
atagagatggtggtcccacgccaccggtctgttctgcgctgggtgcgctttggaacgatg

SEQ ID NO: 39696 - DNA, 60 bp, Artificial
  Synthetic oligonucleotide
acgtgcttcccacatgtcatgtgtgatgtgcgcaccctggagcccattcaactccctctt

SEQ ID NO: 39697 - DNA, 60 bp, Artificial
  Synthetic oligonucleotide
acatgcttcccacatgtcatgtgtgatgtgcgcaccctggagcccattcaacttcccctt

SEQ ID NO: 39698 - DNA, 60 bp, Artificial
  Synthetic oligonucleotide
tctatgcgcctggtttgcatgctgtacacgccactccgcacaaacagcccgggtgatgag

SEQ ID NO: 39699 - DNA, 60 bp, Artificial
  Synthetic oligonucleotide
ggcgatcgcaatctggctcccagttttgtgaatgaagatggcgtcgaatgacgccgctcc

SEQ ID NO: 39700 - DNA, 60 bp, Artificial
  Synthetic oligonucleotide
cacgcacaatgcgtgcggaggcttgtccttcttgtgctagttatgacacttgtcctaact

SEQ ID NO: 39701 - DNA, 59 bp, Artificial
  Synthetic oligonucleotide
cacgcacaatgcgtgcggaggcttgtccttcttgtgctagttatgacacttgtcctaac

SEQ ID NO: 39702 - DNA, 60 bp, Artificial
  Synthetic oligonucleotide
attaggagctcaatgattaaattatgaattcaattctaggcttaattgatacagtaacaa

SEQ ID NO: 39703 - DNA, 60 bp, Artificial
  Synthetic oligonucleotide
gggagggcgatcgcaatctggctcccagttttgtgaatgaagatggcgtcgaatgacgcc

SEQ ID NO: 39704 - DNA, 60 bp, Artificial
  Synthetic oligonucleotide
ccatgggaactggcaatgggcgcagaaggatgcagtaatggctggagcttttatagcagg

SEQ ID NO: 39705 - DNA, 60 bp, Artificial
  Synthetic oligonucleotide
atttggccctcgggccagggctcaatccctaccttgcccacctctcagccatgtacaccg

SEQ ID NO: 39706 - DNA, 60 bp, Artificial
  Synthetic oligonucleotide
gctcgggcttgctctcccacacgagtatgcccttggcctcaaagatgaacttcgaccaaa

SEQ ID NO: 39707 - DNA, 57 bp, Artificial
  Synthetic oligonucleotide
tgttgaagatctcttcaaaaggctcgaacgaccaaagcacgatcggtattgtgttga

SEQ ID NO: 39708 - DNA, 60 bp, Artificial
  Synthetic oligonucleotide
atctgggctttgggtcacaacgtgatccgtgctggaggcgtcactgccacacccactggt

SEQ ID NO: 39709 - DNA, 60 bp, Artificial
  Synthetic oligonucleotide
ggcgatcgcaatctggctcccagttttgtgaatgaagatggcgtcgaatgacgctgctcc

SEQ ID NO: 39710 - DNA, 60 bp, Artificial
  Synthetic oligonucleotide
ggcctgtgggaaatgctagtgttggccgccgccttcctcgccttgatggcttctgagttt

SEQ ID NO: 39711 - DNA, 60 bp, Artificial
  Synthetic oligonucleotide
gcggcctgtgggaaatgctagtgttggccgccgtcttccccgtcttgatggcttctgaat

SEQ ID NO: 39712 - DNA, 60 bp, Artificial
  Synthetic oligonucleotide
atttctgccggggcccaggctgctttgcaggaccaggcttaccggcagagtttggaattg

SEQ ID NO: 39713 - DNA, 60 bp, Artificial
  Synthetic oligonucleotide
atttctgccggggcccaggctgctttgcaggaccaggcttaccggcagagcttggagttg

SEQ ID NO: 39714 - DNA, 60 bp, Artificial
  Synthetic oligonucleotide
aggggcctgattcgcgcatgaggctcatggggatgctctacacccctttgcgtgccaact

SEQ ID NO: 39715 - DNA, 60 bp, Artificial
  Synthetic oligonucleotide
cccctatttggcccaccttcgtcgcatgtataatggatggaccggatccatgcgcgtgcg

SEQ ID NO: 39716 - DNA, 50 bp, Artificial
  Synthetic oligonucleotide
caccgttaatcttggcgcctcggaccaggcgaccctgcccgtggatggga

SEQ ID NO: 39717 - DNA, 60 bp, Artificial
  Synthetic oligonucleotide
gcctgcttccccaggaatggattacccattttgtttctgagcgtgccgcccttcagagtg

SEQ ID NO: 39718 - DNA, 60 bp, Artificial
  Synthetic oligonucleotide
tcttcccagcggtcctcccgctcctctgcttcttctgtggctagcagcgcttcctatact

SEQ ID NO: 39719 - DNA, 60 bp, Artificial
  Synthetic oligonucleotide
tttcctcccagcggtcctcccgctcctctgcttcctctgtggctagtagtgcctcctata

SEQ ID NO: 39720 - DNA, 60 bp, Artificial
  Synthetic oligonucleotide
tgacagcgctgaacgccctggtgtcccagccaatgcgggagctgatcaacatcatcaagc

SEQ ID NO: 39721 - DNA, 60 bp, Artificial
  Synthetic oligonucleotide
gtaaggtcatcaatggccagactgggatgctcctcactggctccaacgccaagggcatgg

SEQ ID NO: 39722 - DNA, 60 bp, Artificial
  Synthetic oligonucleotide
actcaagcccacccgcccagacaaaactgagggtcccattgagcttcgccgtcaggttga

SEQ ID NO: 39723 - DNA, 60 bp, Artificial
  Synthetic oligonucleotide
tcaaacccacccgcccagacaaaactgagggtcctattgagctccgccgtcaggttgacg

SEQ ID NO: 39724 - DNA, 60 bp, Artificial
  Synthetic oligonucleotide
ggtcccctagccgcaaaagctagtgatccagattctaccttcgctaaactcaaagcgaag

SEQ ID NO: 39725 - DNA, 60 bp, Artificial
  Synthetic oligonucleotide
ccatgtttgcttggatgagatttcatgatttgtctttgtgggaaggtagtcgcgacaccc

SEQ ID NO: 39726 - DNA, 60 bp, Artificial
  Synthetic oligonucleotide
ccatgtttgcttggatgagatttcatgatttgtcattgtgggaaggtagtcgcgacaccc

SEQ ID NO: 39727 - DNA, 60 bp, Artificial
  Synthetic oligonucleotide
gccgaccagttaggtaggttaggttttaatccaaatgaagttaagaatgtgattgtgggt

SEQ ID NO: 39728 - DNA, 60 bp, Artificial
  Synthetic oligonucleotide
ccgaccaattaggtaggttaggttttaatccaaatgaagttaagaatgtgattgtaggta

SEQ ID NO: 39729 - DNA, 60 bp, Artificial
  Synthetic oligonucleotide
ccagttaggtaggttaggttttaatccaaatgaagttaagaatgtgattgtaggtaatgg

SEQ ID NO: 39730 - DNA, 60 bp, Artificial
  Synthetic oligonucleotide
cttgtgcttggactactcaaagtgggactccaccatgtcaccgtgtgttgtcaggctagc

SEQ ID NO: 39731 - DNA, 60 bp, Artificial
  Synthetic oligonucleotide
tgtgcttggactactcaaagtgggactccaccatgtcaccgtgtgttgtcaggctagcca

SEQ ID NO: 39732 - DNA, 54 bp, Artificial
  Synthetic oligonucleotide
cgtctcggtagtacctgacgacgaatttgtgaatgttatggagggcaaagcccg

SEQ ID NO: 39733 - DNA, 60 bp, Artificial
  Synthetic oligonucleotide
tttcgtttggcagttaacctttgcatctggtttcatggagattggtttaagtgtggacgg

SEQ ID NO: 39734 - DNA, 60 bp, Artificial
  Synthetic oligonucleotide
gagctagccaagaagattgcatcaaccctgtcgggcgaccaaaggattggactggtgccc

SEQ ID NO: 39735 - DNA, 60 bp, Artificial
  Synthetic oligonucleotide
gaaccacaccagatcttaaaacgagccaggcccccaaattcacacccagcagtgggtctt

SEQ ID NO: 39736 - DNA, 60 bp, Artificial
  Synthetic oligonucleotide
ctcacagtgtccgaaaggactttgtgcactccgtcaaggtaacacttgctcggaggcgcg

SEQ ID NO: 39737 - DNA, 60 bp, Artificial
  Synthetic oligonucleotide
ctcacagtgtccgaaaggactttgtgcactctgtcaagttaacacttgcacggaggcgcg

SEQ ID NO: 39738 - DNA, 60 bp, Artificial
  Synthetic oligonucleotide
cagcccgggtgatgagtcttttgtggtctctggccgccttctttctaagccggcacctga

SEQ ID NO: 39739 - DNA, 60 bp, Artificial
  Synthetic oligonucleotide
agcccgggtgatgagtcttttgtggtctctggccgccttctttctaagccggcggctgat

SEQ ID NO: 39740 - DNA, 60 bp, Artificial
  Synthetic oligonucleotide
gcccgggtgatgagtcttttgtggtctctggccgccttctttctaagccagcagctgatt

SEQ ID NO: 39741 - DNA, 60 bp, Artificial
  Synthetic oligonucleotide
gcccgggtgatgagtcttttgtggtctctggccgccttctttctaagccggcggctgatt

SEQ ID NO: 39742 - DNA, 60 bp, Artificial
  Synthetic oligonucleotide
cagtccgggtgatgagtcttttgtggtctctggccgccttctttctaagccggcagctga

SEQ ID NO: 39743 - DNA, 60 bp, Artificial
  Synthetic oligonucleotide
cagcccgggtgatgagtcttttgtggtctctggccgccttctttctaagccggcagctga

SEQ ID NO: 39744 - DNA, 60 bp, Artificial
  Synthetic oligonucleotide
tctccgaccctcttcatcaccgcaacgcatgtcatccctgaagggtgctctgaggccttc

SEQ ID NO: 39745 - DNA, 60 bp, Artificial
  Synthetic oligonucleotide
caagcccctcaatgttctatccatcctatctcattgtgactggacgttcaccggcattgt

SEQ ID NO: 39746 - DNA, 60 bp, Artificial
  Synthetic oligonucleotide
ggtccttttcaccatccgagccagccttggaacacagcagtcccagagttccaccaagat

SEQ ID NO: 39747 - DNA, 60 bp, Artificial
  Synthetic oligonucleotide
gccccacactgcccagggaccctcgtggaatgggtgtccgctgccgccagtggagcaacg

SEQ ID NO: 39748 - DNA, 60 bp, Artificial
  Synthetic oligonucleotide
tcatccaccgggcggttcagcggatccgggccccatccacccagctggaatcccacaact

SEQ ID NO: 39749 - DNA, 60 bp, Artificial
  Synthetic oligonucleotide
cagggaagaacggggcggcaactactccatccaggagtaccttgaggatcgtgagcgcta

SEQ ID NO: 39750 - DNA, 60 bp, Artificial
  Synthetic oligonucleotide
cgactggaatccaaccgggccatcctgggctgatgatgagcgggaggtggactacaatga

SEQ ID NO: 39751 - DNA, 60 bp, Artificial
  Synthetic oligonucleotide
agagatgtccaatcgagtgcgccctgttgtcatcatgttaagcgggccccctggcatcgg

SEQ ID NO: 39752 - DNA, 60 bp, Artificial
  Synthetic oligonucleotide
ggtagttagggaccgccaatccacactggcctacatcaagacccttgacatggaggagga

SEQ ID NO: 39753 - DNA, 60 bp, Artificial
  Synthetic oligonucleotide
taggcttcaccaaggacagggccacaaaactcttgaagtcggccgcggatggcctccggg

SEQ ID NO: 39754 - DNA, 60 bp, Artificial
  Synthetic oligonucleotide
acacccccctgcgcgccaattccggcgcggatcctttcgttgtcaccggtcgtgtcctca

SEQ ID NO: 39755 - DNA, 60 bp, Artificial
  Synthetic oligonucleotide
ggggcactcggcgagcaggccaaccatgcaaacaatatgtaccgtcaaggcaagagtcag

SEQ ID NO: 39756 - DNA, 60 bp, Artificial
  Synthetic oligonucleotide
tgaattggaacttggtcctgatttgaatccctatttagcccatcttcgccgcatgtataa

SEQ ID NO: 39757 - DNA, 60 bp, Artificial
  Synthetic oligonucleotide
atcatgcgccatagccttgatatcatgaccaagcttactgcagagcctgagctcgcccgc

SEQ ID NO: 39758 - DNA, 60 bp, Artificial
  Synthetic oligonucleotide
ggccgacctctcgaccgtgatccgggcggccatggcctttgggcccttctgcgacgccat

SEQ ID NO: 39759 - DNA, 60 bp, Artificial
  Synthetic oligonucleotide
gcttcccgtgcacttcccaggtaaattccatcaaccattggatcttgaccctgtgcgcac

SEQ ID NO: 39760 - DNA, 60 bp, Artificial
  Synthetic oligonucleotide
tctcttgggcacgaccccatcatccccttccgatttgggcgcttttgtgggcctgattgc

SEQ ID NO: 39761 - DNA, 60 bp, Artificial
  Synthetic oligonucleotide
tacagacggtttgggttactcctcctgggtccacagccacctcccaggtttcttcccagc

SEQ ID NO: 39762 - DNA, 60 bp, Artificial
  Synthetic oligonucleotide
tcgagaaccatcgccggcagagacccggagacacccagggcctgaaccagctgttcaaaa

SEQ ID NO: 39763 - DNA, 60 bp, Artificial
  Synthetic oligonucleotide
ttcacccagttccgctttccccggccgatacggccagatgtgagtgggctgattcttgag

SEQ ID NO: 39764 - DNA, 60 bp, Artificial
  Synthetic oligonucleotide
gtgatggaccagccgaagccttggagctaccaagacgcctgcatgtctctggacaagacc

SEQ ID NO: 39765 - DNA, 60 bp, Artificial
  Synthetic oligonucleotide
taattggccaggggtcggcccccaagttgtcgaccaagaccaagttctggcggtcctccc

SEQ ID NO: 39766 - DNA, 60 bp, Artificial
  Synthetic oligonucleotide
agtgcagggcaaagtcatcaatggccagactgggatgctcctcaccggctccaacgccaa

SEQ ID NO: 39767 - DNA, 59 bp, Artificial
  Synthetic oligonucleotide
tctctaacttttgtggttgctagcgcgacgaccgttggagagcgcactgtgaatacccg

SEQ ID NO: 39768 - DNA, 60 bp, Artificial
  Synthetic oligonucleotide
gacaatgggctcggtatgctctctgccatgagggtggctaacaaactgaaaaatgtgact

SEQ ID NO: 39769 - DNA, 60 bp, Artificial
  Synthetic oligonucleotide
gcccctgcttgcttccccaagaatggattactcattttgtttctgagcgtgccgcccttc

SEQ ID NO: 39770 - DNA, 59 bp, Artificial
  Synthetic oligonucleotide
actgggacggctacaagggccaggaagtaatgctgtgggacgactacggcatggccaac

SEQ ID NO: 39771 - DNA, 60 bp, Artificial
  Synthetic oligonucleotide
agctgaagtgctcggttctgagtttgcaccctctgtttctgccccaggtgttggtgaaac

SEQ ID NO: 39772 - DNA, 60 bp, Artificial
  Synthetic oligonucleotide
aatgcccctgggcctgctcccttggaccacatgaatctggggccagtgtgccggcgagtt

SEQ ID NO: 39773 - DNA, 60 bp, Artificial
  Synthetic oligonucleotide
aggttgacggcctggtcttccttcggcgcacaatctcgcacgatgccaaggggttccaag

SEQ ID NO: 39774 - DNA, 60 bp, Artificial
  Synthetic oligonucleotide
cggcagctttactggactcgtgggcctaaccatgatgacccgagcgaaaccctggtcccc

SEQ ID NO: 39775 - DNA, 60 bp, Artificial
  Synthetic oligonucleotide
cagcaaccggaaagttcagttgctctgcctcctcggtgaagctgccctccacggtgagaa

SEQ ID NO: 39776 - DNA, 60 bp, Artificial
  Synthetic oligonucleotide
aggcgcggtctgaccagatcgattcgagtggcatgaccgccctacactgtgatgtgttcg

SEQ ID NO: 39777 - DNA, 60 bp, Artificial
  Synthetic oligonucleotide
ggggccaatgcaattaatcagaaggtagagtatgatttcaacaaacaactccaattggca

SEQ ID NO: 39778 - DNA, 60 bp, Artificial
  Synthetic oligonucleotide
ttggtggtgtgattgcagagcctagtgcccaaatgtcaactgcagctgatatggccacag

SEQ ID NO: 39779 - DNA, 60 bp, Artificial
  Synthetic oligonucleotide
aaccgtttgtgcagctgcgttcaaaggcgtcagtgatgcaattacagcgaaccaccagta

SEQ ID NO: 39780 - DNA, 60 bp, Artificial
  Synthetic oligonucleotide
catctttctttggctaggcgtggagccgaatgctggtgcaaggagtatgttctggacccc

SEQ ID NO: 39781 - DNA, 60 bp, Artificial
  Synthetic oligonucleotide
acaaggccctatccaatctgtgcgcttggcgcgcgcggcaggattcagggttgaccctta

SEQ ID NO: 39782 - DNA, 60 bp, Artificial
  Synthetic oligonucleotide
tcgagacccttggggatcacccgtggcaaccgagtggaagccgaaagcctacaccactac

SEQ ID NO: 39783 - DNA, 60 bp, Artificial
  Synthetic oligonucleotide
ctggtcaacgttgctgctcacattcgcaaggcgctatccgctcagtcccacccggcaaat

SEQ ID NO: 39784 - DNA, 60 bp, Artificial
  Synthetic oligonucleotide
aagattggcaaagcaaccaaattctacagccaagttaaggcgctgttcactgggattaga

SEQ ID NO: 39785 - DNA, 60 bp, Artificial
  Synthetic oligonucleotide
cctgatctaaggagcactctgtaccaccttatgtctgacactgataccacatccctcgta

SEQ ID NO: 39786 - DNA, 60 bp, Artificial
  Synthetic oligonucleotide
ataacacccggtggagtggtgatccttgagtcgtgtggtggtgcacgcatctgggctctg

SEQ ID NO: 39787 - DNA, 60 bp, Artificial
  Synthetic oligonucleotide
ctgatgccgtcaagtttagatcatggtggaattcaagatcccgattggctgatgactacg

SEQ ID NO: 39788 - DNA, 60 bp, Artificial
  Synthetic oligonucleotide
ttggttacacaggaattggagaggaagcgattggagctgacagggacagggtcgtgcgca

SEQ ID NO: 39789 - DNA, 60 bp, Artificial
  Synthetic oligonucleotide
ggcattggaacaatacaacaaccagttcagcggtgtggaggcgcggtccgatcagatcag

SEQ ID NO: 39790 - DNA, 60 bp, Artificial
  Synthetic oligonucleotide
gcgggccaacaaaatgtaattgacccctggattagaaataattttgtacaagcccctggt

SEQ ID NO: 39791 - DNA, 60 bp, Artificial
  Synthetic oligonucleotide
ggtccacagccaacctcgtcccagaggtcaacaatgaggttatggctttggagcccgttg

SEQ ID NO: 39792 - DNA, 60 bp, Artificial
  Synthetic oligonucleotide
ctcaaaattggaacaattatgacccaacagaagaaatcccagcccctctggggaccccag

SEQ ID NO: 39793 - DNA, 57 bp, Artificial
  Synthetic oligonucleotide
ccccaatggctactttagatttgattcctgggtcaaccagttctacacacttgcccc

SEQ ID NO: 39794 - DNA, 60 bp, Artificial
  Synthetic oligonucleotide
ctggtaccagtgtctcgagtctcccgtcaactgcaaggactaggagctgggttgaggatc

SEQ ID NO: 39795 - DNA, 60 bp, Artificial
  Synthetic oligonucleotide
ggagcggaacaaggtactgggctcctgatgccaggaccacaacatacaatgcaggccgct

SEQ ID NO: 39796 - DNA, 60 bp, Artificial
  Synthetic oligonucleotide
ctctagccaaggcacagtctcaaccgtgcctaaagaagttttggactcctggactggcgc

SEQ ID NO: 39797 - DNA, 60 bp, Artificial
  Synthetic oligonucleotide
gtcacccctccatctagtagatcctctagccaaggcacagtctcaaccgtgcctaaagaa

SEQ ID NO: 39798 - DNA, 52 bp, Artificial
  Synthetic oligonucleotide
atggctgtcacttttaaacgagccctcggggcgcggcataaacagcctcccc

SEQ ID NO: 39799 - DNA, 60 bp, Artificial
  Synthetic oligonucleotide
cagcaacaacgacaccgcaaaatcttcaagtgacggaatgctttctagcatggctgtcac

SEQ ID NO: 39800 - DNA, 60 bp, Artificial
  Synthetic oligonucleotide
gccaacagcaacaacgacaccgcaaaatcttcaagtgacggagtgctttctagcatggct

SEQ ID NO: 39801 - DNA, 59 bp, Artificial
  Synthetic oligonucleotide
gcaacaacgacaccgcaaaatcttcaagtgacggaatgctttctagcatggctgtcact

SEQ ID NO: 39802 - DNA, 55 bp, Artificial
  Synthetic oligonucleotide
tctagcatggctgtcacttttaaacgagccctcggggcgcggcctaaacagcccc

SEQ ID NO: 39803 - DNA, 60 bp, Artificial
  Synthetic oligonucleotide
cagcaacaacgacaccgcaaaatcttcaagtgacggagtgctttctagcatggctgtcac

SEQ ID NO: 39804 - DNA, 60 bp, Artificial
  Synthetic oligonucleotide
cagcaacgacgacaccgcaaaatcttcaagtgacggagtgctttctagcatggctgtcac

SEQ ID NO: 39805 - DNA, 60 bp, Artificial
  Synthetic oligonucleotide
agcaacaacgacaccgcaaaatcttcaagtgacggagtgctttctagcatggctgtcact

SEQ ID NO: 39806 - DNA, 60 bp, Artificial
  Synthetic oligonucleotide
gaacagaggatgtggcaaactcgttctggtacatggcagcagcggttttatgttacctga

SEQ ID NO: 39807 - DNA, 60 bp, Artificial
  Synthetic oligonucleotide
tggaggtggcctgatgggcataattggcaattccatctcaacagttcagaaccttcaggc

SEQ ID NO: 39808 - DNA, 60 bp, Artificial
  Synthetic oligonucleotide
ggtctgtcctgcgctgggtgcgctttggaacaatggatgctgagaccccgcaggaacgct

SEQ ID NO: 39809 - DNA, 60 bp, Artificial
  Synthetic oligonucleotide
gatctgttctgcgctgggtgcgctttggaacaatggatgctgagaccccgcaggaacgct

SEQ ID NO: 39810 - DNA, 60 bp, Artificial
  Synthetic oligonucleotide
cagccccagtggactttgtcaacctcgggcctgtttgccgaagggtggacttccttgtgt

SEQ ID NO: 39811 - DNA, 60 bp, Artificial
  Synthetic oligonucleotide
ggcgcaccatttcccgtgatgcggcagggttccaaggcaggttagatagggcttcgattg

SEQ ID NO: 39812 - DNA, 60 bp, Artificial
  Synthetic oligonucleotide
tcacgaggatggcccgagccaacgggttgggtctcatatccatggcctccctaggcaaaa

SEQ ID NO: 39813 - DNA, 60 bp, Artificial
  Synthetic oligonucleotide
aagaatgctgttgatggacttcgtgcggcaacccagctcggtcaatatggcctagaaata

SEQ ID NO: 39814 - DNA, 60 bp, Artificial
  Synthetic oligonucleotide
ttggacgttcatgggggtcgtggagatggtggtcctccttttagaactctttggaatctt

SEQ ID NO: 39815 - DNA, 60 bp, Artificial
  Synthetic oligonucleotide
tccaacaagacagcaagttagagatggttagggatgcagtgctagccgctataaatgggt

SEQ ID NO: 39816 - DNA, 60 bp, Artificial
  Synthetic oligonucleotide
ggccgtatgccgcagtcacgaacaactgcttcgaattttgttgccaggtcatgtgcttgg

SEQ ID NO: 39817 - DNA, 60 bp, Artificial
  Synthetic oligonucleotide
cctctggccggttttaccacccgacccaagattggtcccgagacactccagaattccaac

SEQ ID NO: 39818 - DNA, 60 bp, Artificial
  Synthetic oligonucleotide
cagcttggtggcgagtctgttatgtcccacaaccaaaacagaggctcacatacgaccaac

SEQ ID NO: 39819 - DNA, 60 bp, Artificial
  Synthetic oligonucleotide
ccagcgccaaaggccacatccgtcgatgtccctaaacaacagagggatagaccaccacgg

SEQ ID NO: 39820 - DNA, 60 bp, Artificial
  Synthetic oligonucleotide
tcattatgctatatacataggtcaaggcaagacggtgggtgtacactcccctcaagcagc

SEQ ID NO: 39821 - DNA, 60 bp, Artificial
  Synthetic oligonucleotide
cgttggactgagagaccacaagaccagaatgttaagacgtgggatgagcttgaccacaca

SEQ ID NO: 39822 - DNA, 60 bp, Artificial
  Synthetic oligonucleotide
gagagggcgaaaccgcactagaaggtggagacaaggggcattatgccggccacgagattg

SEQ ID NO: 39823 - DNA, 60 bp, Artificial
  Synthetic oligonucleotide
ctactatggggcgccgatctcggaacagtggtcagggccgcccgggcttttggcccattt

SEQ ID NO: 39824 - DNA, 60 bp, Artificial
  Synthetic oligonucleotide
caaagaaaatgcgccctgacttgacaggtatggtccttgaagaaggttgccctgaaggga

SEQ ID NO: 39825 - DNA, 60 bp, Artificial
  Synthetic oligonucleotide
gactcaaagcagctagggctgtggcatacgcttcatgtttccagtccgccataactacca

SEQ ID NO: 39826 - DNA, 60 bp, Artificial
  Synthetic oligonucleotide
acgtccacaagcgcgggaatgactgggttgtgtgtggagtccacgctgcagccacaaagt

SEQ ID NO: 39827 - DNA, 60 bp, Artificial
  Synthetic oligonucleotide
cagggtcggcttgtccatggccaatcagggatgttactgacaggggccaatgcaaagggg

SEQ ID NO: 39828 - DNA, 60 bp, Artificial
  Synthetic oligonucleotide
aaggggatggatcttggcactataccaggagactgcggggcaccatacgtccacaagcgc

SEQ ID NO: 39829 - DNA, 60 bp, Artificial
  Synthetic oligonucleotide
ggttgggttggtaacatgagagtcaggattatgctagctggtaatgcctttactgcgggg

SEQ ID NO: 39830 - DNA, 60 bp, Artificial
  Synthetic oligonucleotide
cccctaacactcaattgtgaccgaatagaaaacaagggaatgcaatttgtgtctgatgct

SEQ ID NO: 39831 - DNA, 60 bp, Artificial
  Synthetic oligonucleotide
ctggtggattggaaatgtatgtcccaggatggcaggccatgttccgctggatgcgcttcc

SEQ ID NO: 39832 - DNA, 60 bp, Artificial
  Synthetic oligonucleotide
cggaggttaatgcttctgaccctcttgcaatggatcctgtagcaggttcttcgacagcag

SEQ ID NO: 39833 - DNA, 60 bp, Artificial
  Synthetic oligonucleotide
cacggagaggaagtgatgctgtgggacgactatggaatgacaaagatacaggaagactgt

SEQ ID NO: 39834 - DNA, 60 bp, Artificial
  Synthetic oligonucleotide
ggaaatctttctccataccacgcggaggctctcaatacagtgtggttgactccacccggt

SEQ ID NO: 39835 - DNA, 60 bp, Artificial
  Synthetic oligonucleotide
cccacacgtagtatcctctaccaatgctctcatatcccggatctcaatggctagggctgc

SEQ ID NO: 39836 - DNA, 60 bp, Artificial
  Synthetic oligonucleotide
ggcaccaccttcgttggagagctcggtgagcaagctgcacacgccaacaatatgtatgag

SEQ ID NO: 39837 - DNA, 59 bp, Artificial
  Synthetic oligonucleotide
ctggcctactggaggctgcggttgagactgtaacatccatgttagaacagacaatggat

SEQ ID NO: 39838 - DNA, 60 bp, Artificial
  Synthetic oligonucleotide
tgaacaagcccctactgtaggtgaggctgccctgctccactatgttgaccctgataccgg

SEQ ID NO: 39839 - DNA, 60 bp, Artificial
  Synthetic oligonucleotide
gatggtttcctcacttgtgtccccaatggggctagctcgggtccacaacagctgccgatc

SEQ ID NO: 39840 - DNA, 60 bp, Artificial
  Synthetic oligonucleotide
atccccaattatgggtcaagtattacggaggcaacacatctagccccttctgtatacccc

SEQ ID NO: 39841 - DNA, 60 bp, Artificial
  Synthetic oligonucleotide
gtgcccgctaccaccagttgaccaaaggagcacgacacctgcaactgagcccacaattgg

SEQ ID NO: 39842 - DNA, 60 bp, Artificial
  Synthetic oligonucleotide
gtgtctgctcccgagtcctctgctaccacattgagatccggtggcttcatgtcagttccc

SEQ ID NO: 39843 - DNA, 60 bp, Artificial
  Synthetic oligonucleotide
acaacagatacttgatgaacacgctgagtggtttgatgccggtggcttaggtccaagtac

SEQ ID NO: 39844 - DNA, 60 bp, Artificial
  Synthetic oligonucleotide
cgccgataatggcccaagccataattggtgcaattgctgcttccacagcaggtagtgctc

SEQ ID NO: 39845 - DNA, 60 bp, Artificial
  Synthetic oligonucleotide
tcagggtcaaagaggggctgccatctggattcccatgtacttcccaggtgaacagcataa

SEQ ID NO: 39846 - DNA, 60 bp, Artificial
  Synthetic oligonucleotide
tggagttggctccccaagggggctttgataaccaagggaataccccgtttggtaagggtg

SEQ ID NO: 39847 - DNA, 60 bp, Artificial
  Synthetic oligonucleotide
gaaggccaccaggtaaagtggtcggctagggaaggtgtagaccttggcatatccgggctc

SEQ ID NO: 39848 - DNA, 60 bp, Artificial
  Synthetic oligonucleotide
atatccgggctcacgacggtgtctgggcctgagtggaatatgtgcccgctaccaccagtt

SEQ ID NO: 39849 - DNA, 60 bp, Artificial
  Synthetic oligonucleotide
gatcaggatggggcttttgggtcagcccgacagtgttcatcacaaccacacatgtagtgc

SEQ ID NO: 39850 - DNA, 60 bp, Artificial
  Synthetic oligonucleotide
gagattgtgtcaactgacatagattttgacccagcccgcctcactcaaattctcaaggaa

SEQ ID NO: 39851 - DNA, 60 bp, Artificial
  Synthetic oligonucleotide
ggtcaagcgtatgtttggtacccgtacagcagccatggcattagaaggacctgggaaaga

SEQ ID NO: 39852 - DNA, 60 bp, Artificial
  Synthetic oligonucleotide
gtgatgccgtcccagaaggaaagaacaaaggcaagaccaaaaagggacgtggtcgcaaaa

SEQ ID NO: 39853 - DNA, 60 bp, Artificial
  Synthetic oligonucleotide
ggtctagtgactggatcagacatcagaaaacgtaagcccattgactggaccccgccaaag

SEQ ID NO: 39854 - DNA, 60 bp, Artificial
  Synthetic oligonucleotide
tatgacacagtttggccattctagccagacccagtatgatgtagacaccacccctgacac

SEQ ID NO: 39855 - DNA, 60 bp, Artificial
  Synthetic oligonucleotide
tgtaatcaaccttactgaattggatggcacaccctttcacccttttgagggccctgcccc

SEQ ID NO: 39856 - DNA, 60 bp, Artificial
  Synthetic oligonucleotide
cggtgtactctggatggccgcctggttggcaccaccccagtttcattgtcacatgttgcc

SEQ ID NO: 39857 - DNA, 60 bp, Artificial
  Synthetic oligonucleotide
ccctcctacggtggagcagaaaaccaggcccttcacactcccaaatctgccattgagttc

SEQ ID NO: 39858 - DNA, 60 bp, Artificial
  Synthetic oligonucleotide
ggcccaatcattcagatccatcagagactctagtgccacacactcaaagaaaaatacagt

SEQ ID NO: 39859 - DNA, 60 bp, Artificial
  Synthetic oligonucleotide
ataatgatagaaatcaacaaaccatgcgccttgtgtgcatgctgtacacccccctccgca

SEQ ID NO: 39860 - DNA, 60 bp, Artificial
  Synthetic oligonucleotide
ggaccttccctgcagcaagtcatgagggatcagttgaaacctttcacggaacccaggggc

SEQ ID NO: 39861 - DNA, 60 bp, Artificial
  Synthetic oligonucleotide
ggaccccagagtcaagggtggcccttcattgcagcaagtcatgagggatcagttgaaacc

SEQ ID NO: 39862 - DNA, 60 bp, Artificial
  Synthetic oligonucleotide
ctgcctcctacatgggaattcaattggcaaaaattcggcttgcctctaacattaggagct

SEQ ID NO: 39863 - DNA, 60 bp, Artificial
  Synthetic oligonucleotide
ggcgatcgcaatctggctcccagttttgtgaatgaagatggcgtcgagtgacgccgctcc

SEQ ID NO: 39864 - DNA, 60 bp, Artificial
  Synthetic oligonucleotide
gggagggcgatcgcaatctggctcccagttttgtgaatgaagatggcgtcgagtgacgcc

SEQ ID NO: 39865 - DNA, 60 bp, Artificial
  Synthetic oligonucleotide
cgcagagttgaaggaaggtggcatggatttttacgtgccaagacaagagccaatgttcag

SEQ ID NO: 39866 - DNA, 60 bp, Artificial
  Synthetic oligonucleotide
ctggtacaaggcagccccagtgaagagaccaccaaattagtgtttgaaatggagggtgta

SEQ ID NO: 39867 - DNA, 60 bp, Artificial
  Synthetic oligonucleotide
cgactttttgtgcttggactactcaaagtgggactccaccatgtcaccgtgcgttgttag

SEQ ID NO: 39868 - DNA, 60 bp, Artificial
  Synthetic oligonucleotide
tttgcttgcaacgcaaattcaggcccagaaggatctcactctgatggggcagcaattcaa

SEQ ID NO: 39869 - DNA, 60 bp, Artificial
  Synthetic oligonucleotide
ttgatctggccctcgggccagggctcaacccctaccttgcccacctctcagccatgtata

SEQ ID NO: 39870 - DNA, 60 bp, Artificial
  Synthetic oligonucleotide
gcatgtgctcaacctgcgctaacgtgcttaaatactatgactgggatccccatttcaggc

SEQ ID NO: 39871 - DNA, 60 bp, Artificial
  Synthetic oligonucleotide
gctcggctgttgtcaaggctctcgaggactctggcgtgcaagtgacttggaacatcttcg

SEQ ID NO: 39872 - DNA, 57 bp, Artificial
  Synthetic oligonucleotide
cacgtagtgaccgttcacaccgtgtacgatatggcctgggctcttcggagacacctg

SEQ ID NO: 39873 - DNA, 60 bp, Artificial
  Synthetic oligonucleotide
ggtaacccagttcatatctcctggaggaaccatcatcctcgagtcctgctatggcgcacg

SEQ ID NO: 39874 - DNA, 60 bp, Artificial
  Synthetic oligonucleotide
aaacggacggacccaacggcaacgaacccgaattcatcgctgaagcttgccccagttgcg

SEQ ID NO: 39875 - DNA, 60 bp, Artificial
  Synthetic oligonucleotide
ctgtcgtgccgccttcaaacgcgtctcagaatcaatcatggcaaaccacgctctcggctt

SEQ ID NO: 39876 - DNA, 60 bp, Artificial
  Synthetic oligonucleotide
cccgaattcatcgctgaagcttgccccagttgtgtactgtacgacacatgtccgaattgc

SEQ ID NO: 39877 - DNA, 60 bp, Artificial
  Synthetic oligonucleotide
gaactacccgccaatcaacacgtggtgaccgttcacaccgtgtacgatatggcctgggct

SEQ ID NO: 39878 - DNA, 60 bp, Artificial
  Synthetic oligonucleotide
gaactacccgctaatcaacacgtagtgaccgttcacaccgtgtacgatatggcctgggct

SEQ ID NO: 39879 - DNA, 57 bp, Artificial
  Synthetic oligonucleotide
cacgtggtgaccgttcacaccgtgtacgatatggcctgggctcttcggagacacctg

SEQ ID NO: 39880 - DNA, 60 bp, Artificial
  Synthetic oligonucleotide
cggacgatgagtacgatgagtggaggcagtacaaggctgaaaagaaactcgaccttacgg

SEQ ID NO: 39881 - DNA, 60 bp, Artificial
  Synthetic oligonucleotide
tctggacacccccagatgtgtctgcgatgatcgcccccttactaggtgactacgaactgc

SEQ ID NO: 39882 - DNA, 60 bp, Artificial
  Synthetic oligonucleotide
cagtttggcctgaaaccgacccggaccgacaaaacggacgctgagataacgccaatcccc

SEQ ID NO: 39883 - DNA, 60 bp, Artificial
  Synthetic oligonucleotide
cgaagctgccgctgcaaatctgcactctttctatagcttctacaaaacggactagttcca

SEQ ID NO: 39884 - DNA, 60 bp, Artificial
  Synthetic oligonucleotide
aaggtggacacgagcgtgaacttcgtgttccgggctgaatcggatggtcccagtaacccc

SEQ ID NO: 39885 - DNA, 60 bp, Artificial
  Synthetic oligonucleotide
tcgaaggaacccaccactactacgccacaaaacccggtgaagtggtgagcgggatcctcg

SEQ ID NO: 39886 - DNA, 66 bp, Artificial
  Synthetic oligonucleotide
ggactagttccaatctgcttaacaatttctctatcctttagtacatgatttacttccttttatcag

SEQ ID NO: 39887 - DNA, 60 bp, Artificial
  Synthetic oligonucleotide
gggtctggcggtgacaagtgcccatcgcgaaaactcatcgtgccctatgtcaaggtggac

SEQ ID NO: 39888 - DNA, 60 bp, Artificial
  Synthetic oligonucleotide
agtggacacaggtgcaaactttgtgttcagggctgaatcggatggtcccagtaaccccga

SEQ ID NO: 39889 - DNA, 60 bp, Artificial
  Synthetic oligonucleotide
gtcatgccgaaagtctttgcaaacctaaaacagtttggcctgaaaccgacccggaccgac

SEQ ID NO: 39890 - DNA, 60 bp, Artificial
  Synthetic oligonucleotide
tcgagggaacccaccactactacgccacaaaaccaggcaaggtggtgagtgggatcctgt

SEQ ID NO: 39891 - DNA, 60 bp, Artificial
  Synthetic oligonucleotide
acagtggggcggctcgggccgggcatgaacccctacacccagcacatcgctgcaatgtac

SEQ ID NO: 39892 - DNA, 59 bp, Artificial
  Synthetic oligonucleotide
ggggtgcttggtattctcgggttaccatcaaacccatctgtcaaccgagtctacgacgt

SEQ ID NO: 39893 - DNA, 60 bp, Artificial
  Synthetic oligonucleotide
gcgcttcggcacgggagtgcttggcatccttgggttaccatcaaacccatctgtcaaccg

SEQ ID NO: 39894 - DNA, 60 bp, Artificial
  Synthetic oligonucleotide
attccaccaggcgtggacccggagagtgtcaacgtgctgcgcatgccccacgtgctcatt

SEQ ID NO: 39895 - DNA, 60 bp, Artificial
  Synthetic oligonucleotide
attccaccaggcgtggacccggagagtgtcaatgtgctgcgcatgccgcatgtgctcatt

SEQ ID NO: 39896 - DNA, 60 bp, Artificial
  Synthetic oligonucleotide
ccgccattccaccaggcgtggacccggagagtgtcaacgtgctgcgcatgccccacgtgc

SEQ ID NO: 39897 - DNA, 60 bp, Artificial
  Synthetic oligonucleotide
tacaggcgatgccctatcagtgagcggcctgtccgtcaggtccaaccactttgggtcagg

SEQ ID NO: 39898 - DNA, 60 bp, Artificial
  Synthetic oligonucleotide
cctcacagtggggcggctcgggccgggcatgaacccctacacccagcacatcgctgcaat

SEQ ID NO: 39899 - DNA, 60 bp, Artificial
  Synthetic oligonucleotide
tgagtgacaacaaaagtatcccagagcaacagcatgagtcatcgcgtgcgatggacgctg

SEQ ID NO: 39900 - DNA, 60 bp, Artificial
  Synthetic oligonucleotide
gaaggaaacatgagtgacaacaaaagcaccccagagcaacagcatgagtcatcgcgtgcg

SEQ ID NO: 39901 - DNA, 60 bp, Artificial
  Synthetic oligonucleotide
ccctgaacggttcaaccaagtgtactttattaacctcgccgatgaggaagccgtgagtgc

SEQ ID NO: 39902 - DNA, 60 bp, Artificial
  Synthetic oligonucleotide
accaccgcacgtgctgtgcaagtcatgcaagggtacgtcccgcgggctgaacacatcatc

SEQ ID NO: 39903 - DNA, 60 bp, Artificial
  Synthetic oligonucleotide
tatgcaggggtacgtcccgcgggctgaacacatcatccggcccgctgggtttgccggcgt

SEQ ID NO: 39904 - DNA, 60 bp, Artificial
  Synthetic oligonucleotide
tgtgaatgaagatggcgtcgaatgacgccgctccatctaatgatggtgcagccggtctcg

SEQ ID NO: 39905 - DNA, 60 bp, Artificial
  Synthetic oligonucleotide
ggaaagttgaggcctcttaacatccttaacatcttggcctcatgtgattggacttttgca

SEQ ID NO: 39906 - DNA, 60 bp, Artificial
  Synthetic oligonucleotide
ctgcccgtggaggaaacactgtcatatgtgccacccaggggagcgagggagaagccacac

SEQ ID NO: 39907 - DNA, 60 bp, Artificial
  Synthetic oligonucleotide
cccaacatgtaccatccaactggtgaccctggccttgttcccacactagtccttagtgtt

SEQ ID NO: 39908 - DNA, 60 bp, Artificial
  Synthetic oligonucleotide
taaaattggtcatgaagtggttcttcccaaagaaagaggaagcaaatgagttggctatgg

SEQ ID NO: 39909 - DNA, 60 bp, Artificial
  Synthetic oligonucleotide
cggactggaaatcctaaaattggtcatgaagtggttcttcccaaagaaagaggaagcaaa

SEQ ID NO: 39910 - DNA, 60 bp, Artificial
  Synthetic oligonucleotide
ggaaatcctaaagttagtcatgaagtggttcttcccaaagaaagaggaaacaaatgaact

SEQ ID NO: 39911 - DNA, 60 bp, Artificial
  Synthetic oligonucleotide
ggtgcatacggactggaaatcttaaaattggtcatgaagtggttcttcccaaagaaagag

SEQ ID NO: 39912 - DNA, 60 bp, Artificial
  Synthetic oligonucleotide
acggattggaaatcctaaaattggtcatgaagtggttcttcccaaagaaagaggaagcaa

SEQ ID NO: 39913 - DNA, 60 bp, Artificial
  Synthetic oligonucleotide
cgggctggaaatcctaaaattagtcatgaagtggttcttcccaaagaaagaggaagcaaa

SEQ ID NO: 39914 - DNA, 60 bp, Artificial
  Synthetic oligonucleotide
ggcggttcgtgtccttcccgaaaatcgggagtagcagggcataggttggaagagaaacct

SEQ ID NO: 39915 - DNA, 60 bp, Artificial
  Synthetic oligonucleotide
caggcagcgcgtgacaggaaagacttcatgaagaacctcaggctcgccttggacaatcgg

SEQ ID NO: 39916 - DNA, 60 bp, Artificial
  Synthetic oligonucleotide
ccttcggtctcaaagatgaacttcgaccaaaagacaaggttgcagccgggaagcgtaggc

SEQ ID NO: 39917 - DNA, 51 bp, Artificial
  Synthetic oligonucleotide
ggcctgaaaccgacccggaccgacaaaacggacgctgagataacgcctatc

SEQ ID NO: 39918 - DNA, 60 bp, Artificial
  Synthetic oligonucleotide
ggtcctcgccggcaatgcctttactgctggcaaggtggttgttgcccttgtaccacccta

SEQ ID NO: 39919 - DNA, 60 bp, Artificial
  Synthetic oligonucleotide
gtcctcgccggcaacgcctttactgctggcaaggtggttgttgcccttgtaccaccctat

SEQ ID NO: 39920 - DNA, 59 bp, Artificial
  Synthetic oligonucleotide
ttgttcctgccgccgttgaacaggccgtccccattcagcccgtggctggcgcggctctt

SEQ ID NO: 39921 - DNA, 60 bp, Artificial
  Synthetic oligonucleotide
tcaacatgacaaagagatgctccaagcacaaattgaggccactaaaaagttacagcaggg

SEQ ID NO: 39922 - DNA, 60 bp, Artificial
  Synthetic oligonucleotide
ccccaatgaagagaccaccaaattagtgtttgaaatggagggcaatggcctaccccaggc

SEQ ID NO: 39923 - DNA, 60 bp, Artificial
  Synthetic oligonucleotide
caggcgctcctcatgtggaaacagtactttgtcatgtatggttgtgtggcaagacttgcg

SEQ ID NO: 39924 - DNA, 60 bp, Artificial
  Synthetic oligonucleotide
cagttttgtgaatgaagatggcgtcgaatgacgccgctccatctactgatggtgcagccg

SEQ ID NO: 39925 - DNA, 60 bp, Artificial
  Synthetic oligonucleotide
gcgcgcaatcctggtcacatattgcggcgtcattactccaccgattcgctcaccgcccta

SEQ ID NO: 39926 - DNA, 60 bp, Artificial
  Synthetic oligonucleotide
cagcccgggtgatgagtcttttgtggtctctggccgtcttctttctaagccggcagctga

SEQ ID NO: 39927 - DNA, 60 bp, Artificial
  Synthetic oligonucleotide
cagcccgggtgatgagtcttttgtggtctctggtcgccttctttctaagccggcagctga

SEQ ID NO: 39928 - DNA, 60 bp, Artificial
  Synthetic oligonucleotide
atcaagtagaccagtttaacaaaattcttgagcaaagggtacaaggccctatccagtctg

SEQ ID NO: 39929 - DNA, 60 bp, Artificial
  Synthetic oligonucleotide
agtttaacaaaattcttgagcaaagggtacaaggcccaatccaatccgttcgccttgcac

SEQ ID NO: 39930 - DNA, 60 bp, Artificial
  Synthetic oligonucleotide
ccaatggcctttcttatgtctgaattcatcggattgggacttgcaggtgccggcgttctg

SEQ ID NO: 39931 - DNA, 60 bp, Artificial
  Synthetic oligonucleotide
acagctgaccccatacctattgaccctgtggctggctcctctacagcccttgccacagca

SEQ ID NO: 39932 - DNA, 60 bp, Artificial
  Synthetic oligonucleotide
tttgtcaatcttggcccagtgtgtcggcgggtagatttcttggtttactgcaccgcgccc

SEQ ID NO: 39933 - DNA, 60 bp, Artificial
  Synthetic oligonucleotide
tggtcaatctgggatgctgctcactggggctaacgctaaggggatggatttaggtaccct

SEQ ID NO: 39934 - DNA, 60 bp, Artificial
  Synthetic oligonucleotide
aatggttgggtgggcaacatgcgagtgcgtgttgtcttggctggtaatgctttcacggct

SEQ ID NO: 39935 - DNA, 60 bp, Artificial
  Synthetic oligonucleotide
ggtcgtgacccaagggtaaaaggtggaccttccctacaacaagtcctgcgtgatcagttg

SEQ ID NO: 39936 - DNA, 60 bp, Artificial
  Synthetic oligonucleotide
caagaccacaagttcgggacacccataccataaaaggaaaaatgatgattggaatggaac

SEQ ID NO: 39937 - DNA, 60 bp, Artificial
  Synthetic oligonucleotide
gaggcttctctggggtgctgatctctcaacagttataagggctgctagagcctttggacc

SEQ ID NO: 39938 - DNA, 60 bp, Artificial
  Synthetic oligonucleotide
actatattggcactatacaatggacctcacctccttctgattctggcggggccaatacaa

SEQ ID NO: 39939 - DNA, 60 bp, Artificial
  Synthetic oligonucleotide
agtttaggggtaggattacatctggacagagagtgctcaacttgacagagttggatggtt

SEQ ID NO: 39940 - DNA, 60 bp, Artificial
  Synthetic oligonucleotide
gggcgtggactcggttcatggcctcaagaatgcattatcaggctataccataaccccttg

SEQ ID NO: 39941 - DNA, 60 bp, Artificial
  Synthetic oligonucleotide
cacctcagcccaaactcaacgccagcagtcaattgacacagctgccctagcactcactag

SEQ ID NO: 39942 - DNA, 60 bp, Artificial
  Synthetic oligonucleotide
ggtttccgcctttactagtttagcaagagccaatggtctgggcctcattagcatggcctc

SEQ ID NO: 39943 - DNA, 60 bp, Artificial
  Synthetic oligonucleotide
cagaactccagccggtcttggtctccataccataggcaagcccttcagactgtgtgggtg

SEQ ID NO: 39944 - DNA, 60 bp, Artificial
  Synthetic oligonucleotide
cgtgtccacgactaatgctttgatctcacgtatttcactggctcgctccgcacttgctaa

SEQ ID NO: 39945 - DNA, 60 bp, Artificial
  Synthetic oligonucleotide
cggaccggctagaggtaggcttggtgtccgtagataatggcccaagccattataggagcc

SEQ ID NO: 39946 - DNA, 60 bp, Artificial
  Synthetic oligonucleotide
ggcctggtgtcaaagccctttaaagatctcctaaataaacttaagccactcaacgtgctc

SEQ ID NO: 39947 - DNA, 60 bp, Artificial
  Synthetic oligonucleotide
actcatggaattgtttgggattttctggaacccccctgatgtgtccagctttatagcctc

SEQ ID NO: 39948 - DNA, 60 bp, Artificial
  Synthetic oligonucleotide
cttgaagggccgccaagagaacatcggtgtagggctcatttggccaaggctgcaggtggt

SEQ ID NO: 39949 - DNA, 60 bp, Artificial
  Synthetic oligonucleotide
catggaggtcatctcaacaactgctgtcacgcaactggttagggacaaacaggctgcccg

SEQ ID NO: 39950 - DNA, 60 bp, Artificial
  Synthetic oligonucleotide
caaggaaatactccatttggtaaagggaccatgcggcccaccacattaaaccgtctcctc

SEQ ID NO: 39951 - DNA, 60 bp, Artificial
  Synthetic oligonucleotide
tgagactttaatcccacaccctcagaggaaagttcagcttatatccctccttggcgaggc

SEQ ID NO: 39952 - DNA, 60 bp, Artificial
  Synthetic oligonucleotide
acccgctattctcttctccaggcgggtggcctctcatcctctgatgcggctagggctgta

SEQ ID NO: 39953 - DNA, 60 bp, Artificial
  Synthetic oligonucleotide
gcctctattcgcaaacttgaggcgttaatgttgtaataagattagtgagcatcctattca

SEQ ID NO: 39954 - DNA, 60 bp, Artificial
  Synthetic oligonucleotide
gagactgaggaggaaggcaccagcgaggagatgaatgtggagcttcccaccgccacttct

SEQ ID NO: 39955 - DNA, 60 bp, Artificial
  Synthetic oligonucleotide
gcactaaccctggagacactggagcccttaaggattgtttcaaaagtgacttctctcatc

SEQ ID NO: 39956 - DNA, 57 bp, Artificial
  Synthetic oligonucleotide
gatgttaggacccttgaccctgtagaagtgccccttgaagatgttaggaatgtgttg

SEQ ID NO: 39957 - DNA, 60 bp, Artificial
  Synthetic oligonucleotide
gggccctgactttaacttcttattcctagtccctcccacagtcgagcaaaagacccgccc

SEQ ID NO: 39958 - DNA, 60 bp, Artificial
  Synthetic oligonucleotide
ctggtgggactgattcttttgtggtggctgggcgtgtactcacttgtccgggccctgact

SEQ ID NO: 39959 - DNA, 60 bp, Artificial
  Synthetic oligonucleotide
gacccgcccttttactgtgcctaatatccctttgaagtacctgtctaattccaggatccc

SEQ ID NO: 39960 - DNA, 60 bp, Artificial
  Synthetic oligonucleotide
ggctcaatagaaaggcagctctggtggactcgaggccctaaccatgatgatcctagtgag

SEQ ID NO: 39961 - DNA, 60 bp, Artificial
  Synthetic oligonucleotide
ccagacccaaaatgttcaattccagaatggtaggtgtacaattgacggtcaaccccttgg

SEQ ID NO: 39962 - DNA, 54 bp, Artificial
  Synthetic oligonucleotide
ccccgcccgcctcactcaagtgcttaaggaatatggattgagacccacccggcc

SEQ ID NO: 39963 - DNA, 60 bp, Artificial
  Synthetic oligonucleotide
ggcctgtcacctgatgtcatacaatctcagtcttacttttctttctatggtgatgatgag

SEQ ID NO: 39964 - DNA, 60 bp, Artificial
  Synthetic oligonucleotide
tcggcctgggattccacacaaaatagacagatcatgactgagtcctttgcaatcatgtgc

SEQ ID NO: 39965 - DNA, 60 bp, Artificial
  Synthetic oligonucleotide
ggttagaacgccgtttggtcacatctggtcgttttaaccacccagcacaagactggtcca

SEQ ID NO: 39966 - DNA, 60 bp, Artificial
  Synthetic oligonucleotide
gcaggccatagccgacacagccccactcaccttgaattgtgatcggattgagaagaaagg

SEQ ID NO: 39967 - DNA, 60 bp, Artificial
  Synthetic oligonucleotide
tgtgttctattcttatcaagcgtgactctggtgagctgctaccccttgctgtccgaatgg

SEQ ID NO: 39968 - DNA, 60 bp, Artificial
  Synthetic oligonucleotide
cccggatctgactggaatggtgttggaggaaggctgtcctgagggtgtcgtgtgttctat

SEQ ID NO: 39969 - DNA, 60 bp, Artificial
  Synthetic oligonucleotide
caagctggtggagatggaggcattggtgagacagaaatggagattcgacacaagatcttc

SEQ ID NO: 39970 - DNA, 60 bp, Artificial
  Synthetic oligonucleotide
tgaaaaactcagttttgaagccccaccaaccctctggagtcgagtcgtgagatttggctc

SEQ ID NO: 39971 - DNA, 60 bp, Artificial
  Synthetic oligonucleotide
gtggccgaaactcaacaagcaatgggatggattgacccccccgtggatcagaatctacca

SEQ ID NO: 39972 - DNA, 60 bp, Artificial
  Synthetic oligonucleotide
ggagcgccaggatgagttccagatgcaaggccaagtgtatgattttgatgctgacagggt

SEQ ID NO: 39973 - DNA, 60 bp, Artificial
  Synthetic oligonucleotide
ttaaccactgtgccaggcccagcatggaatctatgccccatgccaccaattgatcagcgt

SEQ ID NO: 39974 - DNA, 60 bp, Artificial
  Synthetic oligonucleotide
gccactcccagctcagccaaaacagaagccccttgccagtgaaggttattctaaccctgc

SEQ ID NO: 39975 - DNA, 60 bp, Artificial
  Synthetic oligonucleotide
ggtccactcacctcaagcggccttttcaatagccagaataactatacaccccattgctgc

SEQ ID NO: 39976 - DNA, 60 bp, Artificial
  Synthetic oligonucleotide
ccaactggggtgcgtgaattctttggggagcccattgaatctatagcaatccatcgtgct

SEQ ID NO: 39977 - DNA, 60 bp, Artificial
  Synthetic oligonucleotide
ccttgctaagagattggccaatgagatacggcctggaggaaaagttggcctcgtgccacg

SEQ ID NO: 39978 - DNA, 60 bp, Artificial
  Synthetic oligonucleotide
gcatctatacctggtcccaatcagtctgggtctcctaatttagtgccatgcctgctcccc

SEQ ID NO: 39979 - DNA, 60 bp, Artificial
  Synthetic oligonucleotide
gtttgagcatgtgctcaacctgcgctaacgtgcttaaatactatgactgggaccctcact

SEQ ID NO: 39980 - DNA, 56 bp, Artificial
  Synthetic oligonucleotide
gtttgagcatgtgctcaacctgcgctaacgtgcttaaatactacgattgggacccc

SEQ ID NO: 39981 - DNA, 56 bp, Artificial
  Synthetic oligonucleotide
gtttgagcatgtgctcaacctgcgctaacgtgcttaaatattataattgggacccc

SEQ ID NO: 39982 - DNA, 56 bp, Artificial
  Synthetic oligonucleotide
gtttgagcatgtgctcaacctgcgctaacgtgcttaaatactatgattgggatccc

SEQ ID NO: 39983 - DNA, 50 bp, Artificial
  Synthetic oligonucleotide
gcatgtgctcaacctgcgctaacgtgcttaaatattacaattgggacccc

SEQ ID NO: 39984 - DNA, 60 bp, Artificial
  Synthetic oligonucleotide
gtgttcgaagtttgagcatgtgctcaacctgcgctaacgtgcttaaatactatgactggg

SEQ ID NO: 39985 - DNA, 57 bp, Artificial
  Synthetic oligonucleotide
gccaaccttggcctcgttaccgggtctgagatcagaaagaggaacccagatgacttc

SEQ ID NO: 39986 - DNA, 60 bp, Artificial
  Synthetic oligonucleotide
gcctgggctcttcgccgacacctgacactaactggacagtttcaagcgatcagagccgca

SEQ ID NO: 39987 - DNA, 60 bp, Artificial
  Synthetic oligonucleotide
ggcctgggctcttcgccgtcaccttacactaactggacagtttcaagcgatcagagccgc

SEQ ID NO: 39988 - DNA, 60 bp, Artificial
  Synthetic oligonucleotide
taggcaagtgacatcccgccctgtggacacatcccctctaccggtctcgggtggacgctt

SEQ ID NO: 39989 - DNA, 60 bp, Artificial
  Synthetic oligonucleotide
gccgagtgttgcatcatcctcccacaagtccaattccacagcatcaacccagctcggctc

SEQ ID NO: 39990 - DNA, 60 bp, Artificial
  Synthetic oligonucleotide
gacctccacgaccatgtactctggtggttttacaggccaaccagtgcataggccgacgcc

SEQ ID NO: 39991 - DNA, 60 bp, Artificial
  Synthetic oligonucleotide
tctccagcaagggcctcagtgatgaagagtacgatgagtacaagagaatcagggaggaga

SEQ ID NO: 39992 - DNA, 60 bp, Artificial
  Synthetic oligonucleotide
gtctacaactcgatggcttacgacctcgactcaaacggatcagggagagtcaacgttaaa

SEQ ID NO: 39993 - DNA, 60 bp, Artificial
  Synthetic oligonucleotide
gttcaagagatggtgtactctctcctccagatcgctggtgcggccttcgtcacttcaagg

SEQ ID NO: 39994 - DNA, 60 bp, Artificial
  Synthetic oligonucleotide
aatggcaggagcatttatagcaggattggctggtgacattgtcacaaatggggtggggtc

SEQ ID NO: 39995 - DNA, 60 bp, Artificial
  Synthetic oligonucleotide
acctgcggacgcggcaaggggatcagtcaatgcacccatgacaaaggtccttgattgggg

SEQ ID NO: 39996 - DNA, 60 bp, Artificial
  Synthetic oligonucleotide
tggatgagttcgacctacagggacctgagctgcctgtgtacaactttgaccacaacaggg

SEQ ID NO: 39997 - DNA, 60 bp, Artificial
  Synthetic oligonucleotide
ccaccaaggatgaggcaaacgagatggacatggtgagggcaatagaggatgctgtgctcg

SEQ ID NO: 39998 - DNA, 60 bp, Artificial
  Synthetic oligonucleotide
ctgtgtgccatatcagaagtctcagggttgtcaccagatgtagtacaatcaaactcctgc

SEQ ID NO: 39999 - DNA, 60 bp, Artificial
  Synthetic oligonucleotide
aacaagctgaaagagtacgggctgatcccaacaagaccagataagacagagggaccactc

SEQ ID NO: 40000 - DNA, 60 bp, Artificial
  Synthetic oligonucleotide
ccaatcctcgatcatgagacaactgttctggaccaagggacccaatcatgatgaccccaa

SEQ ID NO: 40001 - DNA, 60 bp, Artificial
  Synthetic oligonucleotide
cggggttgtggaggctctcatactgcttgcagaactctttgggatcttttggacaccacc

SEQ ID NO: 40002 - DNA, 60 bp, Artificial
  Synthetic oligonucleotide
tgcagggccctgaggatatcgcggttgaggtcgtgccggtgatcctcggtggcataggta

SEQ ID NO: 40003 - DNA, 60 bp, Artificial
  Synthetic oligonucleotide
ctctactaggggaggcagcactgcacggaccagccttctacaagaaagtcagcaaattgg

SEQ ID NO: 40004 - DNA, 60 bp, Artificial
  Synthetic oligonucleotide
ccggggactgtggctgtccttatgtgtacaagagaggcaatgattgggtggttatagggg

SEQ ID NO: 40005 - DNA, 60 bp, Artificial
  Synthetic oligonucleotide
gggacttactgtggtgcaccaatacttggaccagggaatgcaccaaaactcagcaccaag

SEQ ID NO: 40006 - DNA, 60 bp, Artificial
  Synthetic oligonucleotide
ctctgcagcaagtcatgagggatcaactcaagcccttcaccgctccccgggggaggccac

SEQ ID NO: 40007 - DNA, 60 bp, Artificial
  Synthetic oligonucleotide
ggctctgtgtcgtctggttcgtccagatccagcgtctccactgcaactagctcactccca

SEQ ID NO: 40008 - DNA, 60 bp, Artificial
  Synthetic oligonucleotide
gaacgaacccaggatgcggttagtggccatgctctacacacccttgagatcaaacggatc

SEQ ID NO: 40009 - DNA, 60 bp, Artificial
  Synthetic oligonucleotide
ggttatggcactggagccagttgctggaggagctatcgcagcccctctcactggacaaac

SEQ ID NO: 40010 - DNA, 58 bp, Artificial
  Synthetic oligonucleotide
gagttgaaccctttcttggctcacctctccagaatgtacaatggttttgcaggtggta

SEQ ID NO: 40011 - DNA, 58 bp, Artificial
  Synthetic oligonucleotide
atgttaattttgaagcttgctcccgccgtatcgatttccttgtttacgctgattcccc

SEQ ID NO: 40012 - DNA, 60 bp, Artificial
  Synthetic oligonucleotide
cctgtttgagggaaagttgcataggcagggattcataaccattgcaaagtcaggagatgg

SEQ ID NO: 40013 - DNA, 60 bp, Artificial
  Synthetic oligonucleotide
gggccttgcaccagcggtcttcccaactttccctggtgagcagattcttttcttcagatc

SEQ ID NO: 40014 - DNA, 60 bp, Artificial
  Synthetic oligonucleotide
ggtaccataaatgcccttctagccagaattgccgctgctaggtccctagtccacaaggcc

SEQ ID NO: 40015 - DNA, 60 bp, Artificial
  Synthetic oligonucleotide
agccatcgactgccttctcccgcaagagtggatacagcacttctaccaggagtctgcccc

SEQ ID NO: 40016 - DNA, 60 bp, Artificial
  Synthetic oligonucleotide
gcaaccctgtgaccgatgcactgcgacttcaggagctagctgacacgtgtcccctaacac

SEQ ID NO: 40017 - DNA, 60 bp, Artificial
  Synthetic oligonucleotide
cctctcaggcgatcagagggtggggctcgtaccgagaaatggtgttgaccattgggatgc

SEQ ID NO: 40018 - DNA, 60 bp, Artificial
  Synthetic oligonucleotide
cgagggaacagtggtgaccatcctgatcaagagaacaactggtgaactcatgccactggc

SEQ ID NO: 40019 - DNA, 60 bp, Artificial
  Synthetic oligonucleotide
cgattcttggctcaataggaagtatgtatcaaggaccacgggtttctacaggccctacca

SEQ ID NO: 40020 - DNA, 60 bp, Artificial
  Synthetic oligonucleotide
agcagaacagagagctggaaccgcacatgcccggatcgctgaggacggcctttgtcacac

SEQ ID NO: 40021 - DNA, 60 bp, Artificial
  Synthetic oligonucleotide
ccttggtgtgcacaaacctccagctgccataagttttgcacgcatagaactcactcctct

SEQ ID NO: 40022 - DNA, 60 bp, Artificial
  Synthetic oligonucleotide
tatgatgctgactactctaggtgggactcaacccaacagaggcacatcttgggagctgcc

SEQ ID NO: 40023 - DNA, 60 bp, Artificial
  Synthetic oligonucleotide
taggcagaggatcttccgccccaccaggaaacaacgtaaggaggagagagcaactctggg

SEQ ID NO: 40024 - DNA, 60 bp, Artificial
  Synthetic oligonucleotide
ggaacccagatgatttcaagccaaagggaaaactgtgggctgacgacgaccgcagtgtga

SEQ ID NO: 40025 - DNA, 60 bp, Artificial
  Synthetic oligonucleotide
ggctcagatttgggcacaatgattcgctgtgctaggggttttggtggtcttatggatgaa

SEQ ID NO: 40026 - DNA, 60 bp, Artificial
  Synthetic oligonucleotide
aggtggccaatgtgctcctgtgtggcctctctgggctcttcactaggcccatcaaggatc

SEQ ID NO: 40027 - DNA, 60 bp, Artificial
  Synthetic oligonucleotide
gctgaccaagcttccaaggcaaacctcatgtacgaacagggaaaacacatgcagcctgtg

SEQ ID NO: 40028 - DNA, 60 bp, Artificial
  Synthetic oligonucleotide
cggctgcgtcttcgctcagagcatgcagggagatcggtaactacgggattgaggtggtga

SEQ ID NO: 40029 - DNA, 60 bp, Artificial
  Synthetic oligonucleotide
tgcctgcaccccttggaacccctgacttcaaagccaagatattcggggtcatatctcaaa

SEQ ID NO: 40030 - DNA, 60 bp, Artificial
  Synthetic oligonucleotide
gtgtgcatttagaggtaaaatcacagcaaggatcgttgatcaggcagcacaccagtggca

SEQ ID NO: 40031 - DNA, 60 bp, Artificial
  Synthetic oligonucleotide
gagatgacaaattcacgcttccccgcacccatagatatgctttacactagccccaatggt

SEQ ID NO: 40032 - DNA, 60 bp, Artificial
  Synthetic oligonucleotide
ggtgcccccaactgtggagtcaagaacaaaacccttcaccttacctgtcctcacaattgg

SEQ ID NO: 40033 - DNA, 60 bp, Artificial
  Synthetic oligonucleotide
cgcctacagtgtacctcccttggacctaagagagaaggttgacgcaaaggaacccctgac

SEQ ID NO: 40034 - DNA, 60 bp, Artificial
  Synthetic oligonucleotide
gggtaagaacacacccatcatgttcgcgtctgttgtcaggcgcaccggtgacgtcaacgc

SEQ ID NO: 40035 - DNA, 60 bp, Artificial
  Synthetic oligonucleotide
cccattttccagtagataatttgagccccggtcagatcaccatgtttccccatgtgatta

SEQ ID NO: 40036 - DNA, 60 bp, Artificial
  Synthetic oligonucleotide
ccatcctacaaattgccggcgccgcgttcgtcaccacacgtattgcacgccgcatgaaca

SEQ ID NO: 40037 - DNA, 60 bp, Artificial
  Synthetic oligonucleotide
gcgggagcttcaatcgctgcccctttaactggtcaaaacaatgtgatagacccctggatt

SEQ ID NO: 40038 - DNA, 60 bp, Artificial
  Synthetic oligonucleotide
gataccccactctcaaagacccatacagctcatggcactgcttggtgaggcctcccttca

SEQ ID NO: 40039 - DNA, 60 bp, Artificial
  Synthetic oligonucleotide
agccttgcaacctacatgaaaacactggatctagaggaagagaaagctagaaaattgtcc

SEQ ID NO: 40040 - DNA, 60 bp, Artificial
  Synthetic oligonucleotide
cacgggaaaggagtgatgaagaccctcaccaccggttctctgattgcccgtgcgtcaggt

SEQ ID NO: 40041 - DNA, 60 bp, Artificial
  Synthetic oligonucleotide
ctgcgatgatcgctcccttacttggcgagtacgagttgcaagggccagaagacatcgccg

SEQ ID NO: 40042 - DNA, 60 bp, Artificial
  Synthetic oligonucleotide
acctctgttcagaccaacaacgaactggccggagccctgcatcacctcagaagtgctcga

SEQ ID NO: 40043 - DNA, 60 bp, Artificial
  Synthetic oligonucleotide
ctggcctgcccgagctcacgacagttccccaaccagatgtgaccaatacggcattcagtg

SEQ ID NO: 40044 - DNA, 60 bp, Artificial
  Synthetic oligonucleotide
cctggtgtacgccgatgcgccagaagtggaaaaggcaaaacgggacttccctggtcaacc

SEQ ID NO: 40045 - DNA, 60 bp, Artificial
  Synthetic oligonucleotide
gggtgcaaaatcaaaacagaatgctggagccatatcttagagggtcgttgcaaacagcct

SEQ ID NO: 40046 - DNA, 60 bp, Artificial
  Synthetic oligonucleotide
cccctactgatgctgcaaggggtgcagtcaacgcaccaatgacccaagtgttggactgga

SEQ ID NO: 40047 - DNA, 60 bp, Artificial
  Synthetic oligonucleotide
gtgtgcacaaaccacccgcagctataagcatggcaaaagtggaaatgacaccgctgtcgc

SEQ ID NO: 40048 - DNA, 60 bp, Artificial
  Synthetic oligonucleotide
cttaatgactcatggctcagcagaagaatggtgcaaagaacaacaggcttcttcagaccc

SEQ ID NO: 40049 - DNA, 60 bp, Artificial
  Synthetic oligonucleotide
ctccatcacacactggctgctgactctctgtgctttgtctgaagtcactaacctgtctcc

SEQ ID NO: 40050 - DNA, 60 bp, Artificial
  Synthetic oligonucleotide
gacttttctgggcaaatatttggggtggttagtcaaagggacacaggcaccaaccccgca

SEQ ID NO: 40051 - DNA, 60 bp, Artificial
  Synthetic oligonucleotide
cctcaatgagctgaccaactctcgctttcccgtcccgattgatgctatgtacaccagccc

SEQ ID NO: 40052 - DNA, 60 bp, Artificial
  Synthetic oligonucleotide
tatagaggagtatcttcaagacagggacaggtattatgaggagctcgccatcgccaaggc

SEQ ID NO: 40053 - DNA, 60 bp, Artificial
  Synthetic oligonucleotide
gggatgcatacaaaggtgagagggtcgtgttgtgggacgactacggcatgagcaacccca

SEQ ID NO: 40054 - DNA, 60 bp, Artificial
  Synthetic oligonucleotide
cccccccaagcatatggtctaggattgtgagctttggttcaggttggggcttctgggtgt

SEQ ID NO: 40055 - DNA, 60 bp, Artificial
  Synthetic oligonucleotide
gggcataacagaggcatttggagtccccatcaaacaagttcaagtccacaaatcgggcga

SEQ ID NO: 40056 - DNA, 60 bp, Artificial
  Synthetic oligonucleotide
gcagattactcccgctgggactcaacacaacagagggctgttctagcagcggccttggaa

SEQ ID NO: 40057 - DNA, 60 bp, Artificial
  Synthetic oligonucleotide
gcctttagacaattggctgctgaaaacaaatatgggctggtggacgccatgagagttggc

SEQ ID NO: 40058 - DNA, 60 bp, Artificial
  Synthetic oligonucleotide
gactcaacgtgcacctggctcctgctgtatccccactcttccccggggagagattgctgt

SEQ ID NO: 40059 - DNA, 60 bp, Artificial
  Synthetic oligonucleotide
ccagacacaggtcgcaccctatttgaggccaaattacacaaggaagggtttatcaccgtc

SEQ ID NO: 40060 - DNA, 60 bp, Artificial
  Synthetic oligonucleotide
tggaacggtgagacctttattggcaagttggcagaccaagcatcaaaagcaaacctaatg

SEQ ID NO: 40061 - DNA, 60 bp, Artificial
  Synthetic oligonucleotide
ttgcttactggctcaaatgctaagggtatggatctggggacaactcctggtgaccgtggc

SEQ ID NO: 40062 - DNA, 60 bp, Artificial
  Synthetic oligonucleotide
caaaaccaaattttggaggtcatcaaacacgccccttccaccagggacatatgaggccgc

SEQ ID NO: 40063 - DNA, 60 bp, Artificial
  Synthetic oligonucleotide
ccccaccggagaactcatgcccctcgcagccagaatgggaacacacgcaaccatgagaat

SEQ ID NO: 40064 - DNA, 60 bp, Artificial
  Synthetic oligonucleotide
acgcatgtgggccacaggccagcgcctcatccgcgctggtggactcacagaggccggtgg

SEQ ID NO: 40065 - DNA, 60 bp, Artificial
  Synthetic oligonucleotide
acgcatgtgggccacaggccagcgcctcatccgcgctggtggactcacggaggctggtgg

SEQ ID NO: 40066 - DNA, 60 bp, Artificial
  Synthetic oligonucleotide
acgtatgtgggccacaggccagcgcctcatccgcgctggtggactcactgaggctggtgg

SEQ ID NO: 40067 - DNA, 60 bp, Artificial
  Synthetic oligonucleotide
ggtgctcccacatccaggtgataatgacaatttctggagactcaccccggtcgtccgcgg

SEQ ID NO: 40068 - DNA, 59 bp, Artificial
  Synthetic oligonucleotide
gggctcactgagctccgtgcgcaccaaccccttttcctccgttagctcggggtccgtgg

SEQ ID NO: 40069 - DNA, 60 bp, Artificial
  Synthetic oligonucleotide
aaacctccttcacctacatgtcaggccccgtgttcttgaagcgccgcatcgtcctcacgc

SEQ ID NO: 40070 - DNA, 60 bp, Artificial
  Synthetic oligonucleotide
tgctcattgacgctcgcggcggcgtcccacttgaggtgacgttagaggacatccgaacat

SEQ ID NO: 40071 - DNA, 60 bp, Artificial
  Synthetic oligonucleotide
tttacgtgggcgctttcccaggagtggaaccccatgcccgtcaccacagccttcaccttt

SEQ ID NO: 40072 - DNA, 60 bp, Artificial
  Synthetic oligonucleotide
gctgtgtgtccgcctgggtcaatcggctgaaccgccatgaccattgccttgagttggact

SEQ ID NO: 40073 - DNA, 60 bp, Artificial
  Synthetic oligonucleotide
cacaaccaaccataacccacttattaacccaacccacactcgtgccgccgcactggctcg

SEQ ID NO: 40074 - DNA, 60 bp, Artificial
  Synthetic oligonucleotide
gcggtgcaggcattgccgccgacattgcatcaatagtcactgagcagcaaagattggcac

SEQ ID NO: 40075 - DNA, 60 bp, Artificial
  Synthetic oligonucleotide
tggatctgtcaacctcggccggtgccctcgctcctgggaagaccaaaagagatctgtgtg

SEQ ID NO: 40076 - DNA, 60 bp, Artificial
  Synthetic oligonucleotide
cgactggctacttgaagaagaccctgctacggacggcccctcggaatttgacctcacgca

SEQ ID NO: 40077 - DNA, 60 bp, Artificial
  Synthetic oligonucleotide
tggggtgcctgaaaggatggtgctggtagcccctgacaaaggtaccgcacggtttgtcga

SEQ ID NO: 40078 - DNA, 60 bp, Artificial
  Synthetic oligonucleotide
agcggggcagacgacctggtgcctgtctggggacccaccctggtgcacactgcctcccta

SEQ ID NO: 40079 - DNA, 60 bp, Artificial
  Synthetic oligonucleotide
taaacctaaaacaccaaagccccaccgaccagcccctccccacaggtgcactaccaggtg

SEQ ID NO: 40080 - DNA, 60 bp, Artificial
  Synthetic oligonucleotide
gggactcgttgcctggttggagtgaggtggaggcgtacttcaaagctttcttcgctggca

SEQ ID NO: 40081 - DNA, 60 bp, Artificial
  Synthetic oligonucleotide
acacagcttaccaacttgggcgcgagggcaacaactgtgatgacatcccactgcacccgg

SEQ ID NO: 40082 - DNA, 60 bp, Artificial
  Synthetic oligonucleotide
tgccggtccctaatcccaccgttgttatcaatgacccttcacccacccgccttgcccttg

SEQ ID NO: 40083 - DNA, 60 bp, Artificial
  Synthetic oligonucleotide
taccatcatgtggcgtgggcttgagtgcgcccgctccgacattgtaacgcacctgcccca

SEQ ID NO: 40084 - DNA, 59 bp, Artificial
  Synthetic oligonucleotide
ggggccgcccgagtttctccatccctggtgtgctcctggccaccttcctgtctgcaatc

SEQ ID NO: 40085 - DNA, 60 bp, Artificial
  Synthetic oligonucleotide
gccccatccaatcagtacgtcttgcgcgtgctgctggatttagggttgacccttactctt

SEQ ID NO: 40086 - DNA, 59 bp, Artificial
  Synthetic oligonucleotide
gttatgacgtatgtcctaactgcacttctagtaacattcccgatgatgggtcatcgaca

SEQ ID NO: 40087 - DNA, 60 bp, Artificial
  Synthetic oligonucleotide
tatgggtctagtctccagatgtcactcaccttgcacctgctgtgttcccccaggctttgg

SEQ ID NO: 40088 - DNA, 60 bp, Artificial
  Synthetic oligonucleotide
cgcggtccgcattggccaaggctcaagctgaaatgaccagtcgaatgaggccagtcgtca

SEQ ID NO: 40089 - DNA, 60 bp, Artificial
  Synthetic oligonucleotide
ggagaccagactgaacggaccctcaaaggcattgaagcagcagtaatagacatggaggtg

SEQ ID NO: 40090 - DNA, 60 bp, Artificial
  Synthetic oligonucleotide
ggttccagttattcttggtggtatagggctagccattgggttcaccagagacaaggtcac

SEQ ID NO: 40091 - DNA, 60 bp, Artificial
  Synthetic oligonucleotide
gcagagtccaccaggctaaagccgcagggaaagggcccattggccatgatgatatggttg

SEQ ID NO: 40092 - DNA, 60 bp, Artificial
  Synthetic oligonucleotide
gtatggtttggggtggactgaaaggcccatggaccaaaatgtcaagtcatgggaggagct

SEQ ID NO: 40093 - DNA, 60 bp, Artificial
  Synthetic oligonucleotide
tatcactactccatatacattgggcagggtaagacagttggtgtgcattccccacaggcg

SEQ ID NO: 40094 - DNA, 60 bp, Artificial
  Synthetic oligonucleotide
gcctcagtggtagcgcaagacctgcttgcaccctcagaaatggacgttggtgactacgtc

SEQ ID NO: 40095 - DNA, 60 bp, Artificial
  Synthetic oligonucleotide
tttgtggttgcgggcagggtgctcacgtgccccgcccctgatttcagctttctgtttctc

SEQ ID NO: 40096 - DNA, 60 bp, Artificial
  Synthetic oligonucleotide
gggaaaccacgcttgaaggaggtgacaaaggccactatgccggacatgagatagtcaaac

SEQ ID NO: 40097 - DNA, 60 bp, Artificial
  Synthetic oligonucleotide
acacgctgccgctactaaatcaggcaacacagtagtgtgcgccgtccaagccagtgaggg

SEQ ID NO: 40098 - DNA, 60 bp, Artificial
  Synthetic oligonucleotide
gccgcagtgaatggcctagtttcacaacccttcaagaatttcctaggtaagctcaagccc

SEQ ID NO: 40099 - DNA, 60 bp, Artificial
  Synthetic oligonucleotide
gcggctaatcacatcgggcagatttcatcacccatcccagtcttggtcacagcaaacccc

SEQ ID NO: 40100 - DNA, 60 bp, Artificial
  Synthetic oligonucleotide
cagggtcgccttgtccatgggcagtctggtatgttgctcactggggctaatgctaagggc

SEQ ID NO: 40101 - DNA, 60 bp, Artificial
  Synthetic oligonucleotide
agagtttgacccagcaaagttgacacaagtcctcaaagaatacggcctcaaacctacccg

SEQ ID NO: 40102 - DNA, 60 bp, Artificial
  Synthetic oligonucleotide
gtccagaaggcacggtgtgctcagtgctaataaagagggattccggcgagctactaccac

SEQ ID NO: 40103 - DNA, 60 bp, Artificial
  Synthetic oligonucleotide
gcagtggctggtgctcctgtcacccgtatagtggactggaatggcacgcggattgcagcg

SEQ ID NO: 40104 - DNA, 60 bp, Artificial
  Synthetic oligonucleotide
cgctgccagatcgatggtcaactccagggcactacccctgtctcgctcagtcaactttgc

SEQ ID NO: 40105 - DNA, 60 bp, Artificial
  Synthetic oligonucleotide
agcggctagaaggcttggactgcggcgcatataatgggcccagctgtcatcggtgccata

SEQ ID NO: 40106 - DNA, 60 bp, Artificial
  Synthetic oligonucleotide
gatctgtttctccttttcacagtgatgctctgagaaccgtgtgggtcacaccaccaggtt

SEQ ID NO: 40107 - DNA, 60 bp, Artificial
  Synthetic oligonucleotide
ccaggctcagaatcaggacccatctcaaagtgtgacctttgcaactaatgatgctagctt

SEQ ID NO: 40108 - DNA, 60 bp, Artificial
  Synthetic oligonucleotide
caaagtggggctggtgccacgtgaggctgttgaccactgggatggctatcatggtgagga

SEQ ID NO: 40109 - DNA, 60 bp, Artificial
  Synthetic oligonucleotide
aatgaacaggctcccatcgctggggaagctgctctcctccattacgtggaccctgacacg

SEQ ID NO: 40110 - DNA, 60 bp, Artificial
  Synthetic oligonucleotide
cctggtttactgctccgccccagaggtagaacagataaggaaagtcagccctggtgacac

SEQ ID NO: 40111 - DNA, 60 bp, Artificial
  Synthetic oligonucleotide
cagggaaacacaccatttggcaagggcgttatgaagccaacaaccatcaataggctactc

SEQ ID NO: 40112 - DNA, 60 bp, Artificial
  Synthetic oligonucleotide
gggaagatgtatgacttcgacgatgatcgagtgtcagcattcaccaccatggcacgcgac

SEQ ID NO: 40113 - DNA, 60 bp, Artificial
  Synthetic oligonucleotide
ggcgtcacatcgatggaaggtctgaagaacgccttgaaggggcacaaaattggcatgtgc

SEQ ID NO: 40114 - DNA, 60 bp, Artificial
  Synthetic oligonucleotide
gaggtggatggcacaccctttatccctcttgagtctccagcaccagttggttttcccgac

SEQ ID NO: 40115 - DNA, 60 bp, Artificial
  Synthetic oligonucleotide
ggacaccccagtgccgtggagttacagcgatgcgtgccaatccctcgataaaaccaccag

SEQ ID NO: 40116 - DNA, 60 bp, Artificial
  Synthetic oligonucleotide
cctgatgggttcatgacctgtgtccccaatagtgttagtagtggccctcaaacccttcct

SEQ ID NO: 40117 - DNA, 60 bp, Artificial
  Synthetic oligonucleotide
ggaatggcaccgccttcattagggaactaggagaacaagcagcgcacgctaacaacatgt

SEQ ID NO: 40118 - DNA, 60 bp, Artificial
  Synthetic oligonucleotide
ggtcagtgcgtgatggagttaatcttggggtgaatcgcctcacaacggtgagtggtcctg

SEQ ID NO: 40119 - DNA, 60 bp, Artificial
  Synthetic oligonucleotide
ggtggccgggatccaagggtgagtggtggtccttcgctccaacaggtgttacgggatcag

SEQ ID NO: 40120 - DNA, 60 bp, Artificial
  Synthetic oligonucleotide
ataccaaccagtgcaaaggaattctttggcgagccccttgccagtatagccatccacagg

SEQ ID NO: 40121 - DNA, 60 bp, Artificial
  Synthetic oligonucleotide
caatgagaggatcaactttgaagcgccccccaccttgtggagccgggtcacaaagtttgg

SEQ ID NO: 40122 - DNA, 60 bp, Artificial
  Synthetic oligonucleotide
gggaagagaagggtggcaactacagcatccaggagtacctagaggataggcaaaggtacg

SEQ ID NO: 40123 - DNA, 60 bp, Artificial
  Synthetic oligonucleotide
tggacagtcataaagagtggtttgatgccggcggcttaggcccatgcacaatgccctcaa

SEQ ID NO: 40124 - DNA, 60 bp, Artificial
  Synthetic oligonucleotide
gctgcctcggctcttgtggtcaacagggctgtgaaaagaatgtttggcacacgcactgct

SEQ ID NO: 40125 - DNA, 58 bp, Artificial
  Synthetic oligonucleotide
ggggcggacctaggaacagtgatccgggctgcacgagcttttggcccattttgtgatg

SEQ ID NO: 40126 - DNA, 60 bp, Artificial
  Synthetic oligonucleotide
acaacagtcagtgtgcgctgcttccatcgcactcacccgcctgcgggctgcgcgtgcggt

SEQ ID NO: 40127 - DNA, 60 bp, Artificial
  Synthetic oligonucleotide
gggtttaattggcaagacaacccaagaggtggcagggaccagtgacctaccacccaaaca

SEQ ID NO: 40128 - DNA, 60 bp, Artificial
  Synthetic oligonucleotide
aagagatcaagacagggggccttgaaatgtacgtaccagggtggcaagccatgttccgct

SEQ ID NO: 40129 - DNA, 60 bp, Artificial
  Synthetic oligonucleotide
ggaccagagggcccaaccactcagacccttttgaaaccttagtgccccaccagcaaagaa

SEQ ID NO: 40130 - DNA, 60 bp, Artificial
  Synthetic oligonucleotide
gacccatggattttcaataacttcgtccaggcaccccaaggagaatttactatttcccct

SEQ ID NO: 40131 - DNA, 60 bp, Artificial
  Synthetic oligonucleotide
ggggattttcatgcaggtgacatcataggcagccttggctggatttcagccccgtctgac

SEQ ID NO: 40132 - DNA, 60 bp, Artificial
  Synthetic oligonucleotide
ccatttctagcccacctctcacaaatgtataatggttgggtcggcaatatgcgtgtacgt

SEQ ID NO: 40133 - DNA, 60 bp, Artificial
  Synthetic oligonucleotide
gtcgtggtggaactcaaggtcaaaattggctgatgactttgaggatgtcacagtaattgg

SEQ ID NO: 40134 - DNA, 60 bp, Artificial
  Synthetic oligonucleotide
gcccctcagccccaacaaatcacactggaacaattagcccaaaagatggttgttcagcac

SEQ ID NO: 40135 - DNA, 60 bp, Artificial
  Synthetic oligonucleotide
cgagactggatcacacccggctaatgttgactactccaaggaccaactccaaggcttgct

SEQ ID NO: 40136 - DNA, 60 bp, Artificial
  Synthetic oligonucleotide
ggctttcgagactggatcacacccggctaatgttgactactccagggatcaactccaagg

SEQ ID NO: 40137 - DNA, 60 bp, Artificial
  Synthetic oligonucleotide
aacatcccaatcaattgatattctcaggcatttcactgacaaatctccaattgttgattc

SEQ ID NO: 40138 - DNA, 60 bp, Artificial
  Synthetic oligonucleotide
gtgttgactactcaaaatgggactctacccaaccaccaaaagtaacatcccaatcaattg

SEQ ID NO: 40139 - DNA, 60 bp, Artificial
  Synthetic oligonucleotide
aggaactaccatgatttggaagatgtcaccataattggccgtggtggcgtgaaacgtgaa

SEQ ID NO: 40140 - DNA, 60 bp, Artificial
  Synthetic oligonucleotide
tgatattctcaggcatttcactgacaaatctccaattgttgattcggcttgtgcaacact

SEQ ID NO: 40141 - DNA, 60 bp, Artificial
  Synthetic oligonucleotide
tcccaatcaattgacatcctcaggcatttcactgacaaatctccaattgttgattcggca

SEQ ID NO: 40142 - DNA, 60 bp, Artificial
  Synthetic oligonucleotide
cggaggcgcgatcttcagtatttctataacaggctctcacgctctttgcgtgtagaagct

SEQ ID NO: 40143 - DNA, 50 bp, Artificial
  Synthetic oligonucleotide
ggggcacagccaatggcttttcttatgtctgaattcatcggattgggact

SEQ ID NO: 40144 - DNA, 60 bp, Artificial
  Synthetic oligonucleotide
gtcatcctcaccagacatcgtcggcactatcaacgccatactggctagaatagcagccgc

SEQ ID NO: 40145 - DNA, 60 bp, Artificial
  Synthetic oligonucleotide
aaagctatcgacgaagtcatcctcaccagacatcgtcggcactatcaacgccatactggc

SEQ ID NO: 40146 - DNA, 60 bp, Artificial
  Synthetic oligonucleotide
ccagcgactgggttagaggacagaatgaaaggcttagcccgttcatggatggtgctctcc

SEQ ID NO: 40147 - DNA, 60 bp, Artificial
  Synthetic oligonucleotide
caaatcatcctcgccggacatcgtcggcactatcaacgccatactggctagaatagctgc

SEQ ID NO: 40148 - DNA, 60 bp, Artificial
  Synthetic oligonucleotide
gccaacctcgtaccagaggccaacaatgaggttatggcacttgaaccggtggtgggagcc

SEQ ID NO: 40149 - DNA, 60 bp, Artificial
  Synthetic oligonucleotide
ggccaacaatgaggttatggcacttgaaccggtggtaggagcctcaatcgcagctcctgt

SEQ ID NO: 40150 - DNA, 60 bp, Artificial
  Synthetic oligonucleotide
ccagacaagaggccatgtttaggtggatgagattctctgacctcagcacatgggagggcg

SEQ ID NO: 40151 - DNA, 60 bp, Artificial
  Synthetic oligonucleotide
caagaggccatgtttaggtggatgagattctctgacctcagcacatgggagggcgatcgc

SEQ ID NO: 40152 - DNA, 60 bp, Artificial
  Synthetic oligonucleotide
gagatcaagagtggtggtctggagttttatgtgcccagacaagaggccatgtttaggtgg

SEQ ID NO: 40153 - DNA, 60 bp, Artificial
  Synthetic oligonucleotide
gcagttgcccgagcaacagaggaggacttctgtgaagaggaagaggccaagataaggcaa

SEQ ID NO: 40154 - DNA, 60 bp, Artificial
  Synthetic oligonucleotide
actctggaagattcacaccaaccgccccagtgaggcaggccgacttccagcacacccaaa

SEQ ID NO: 40155 - DNA, 60 bp, Artificial
  Synthetic oligonucleotide
ggatggggagctccaaggaacaacacaactccaagtcagtggtatttgtgctttcaaggg

SEQ ID NO: 40156 - DNA, 60 bp, Artificial
  Synthetic oligonucleotide
ggcacagcctcatcaaactcgactcgcagcacaaacctctcccaatcaacggtctctagg

SEQ ID NO: 40157 - DNA, 60 bp, Artificial
  Synthetic oligonucleotide
ttataccccccttaggtctaatggttcaggtgatgatgtgtttacagtctcctgcagggt

SEQ ID NO: 40158 - DNA, 60 bp, Artificial
  Synthetic oligonucleotide
ccttatgtgccctttctgaagttacagacctctctcctgacattgtgcaggccaactccc

SEQ ID NO: 40159 - DNA, 60 bp, Artificial
  Synthetic oligonucleotide
ctgaatggcctgactttcctgaggagaaccgtcactcgcgaccctgcaggatggtttggc

SEQ ID NO: 40160 - DNA, 60 bp, Artificial
  Synthetic oligonucleotide
ttggagttcacacagcagccgctcgtggcggaaacactgtcatctgcgccacacagggta

SEQ ID NO: 40161 - DNA, 60 bp, Artificial
  Synthetic oligonucleotide
cgcgcgttccttagttcatagggccaaggaggagctctctagcagaccaagaccggtcgt

SEQ ID NO: 40162 - DNA, 60 bp, Artificial
  Synthetic oligonucleotide
gggccatctctgcaacaagttatgcgagaccaactgaagccattcaccgaaccccgtggt

SEQ ID NO: 40163 - DNA, 60 bp, Artificial
  Synthetic oligonucleotide
cgtagttgacgtgggcgacttcaaaatttccatcaacgaaggattgccgtcgggtgtccc

SEQ ID NO: 40164 - DNA, 60 bp, Artificial
  Synthetic oligonucleotide
taatcaaaagaattccccccccaccacccaatgatggggacgaaccaaccgtgatgttta

SEQ ID NO: 40165 - DNA, 60 bp, Artificial
  Synthetic oligonucleotide
gtgtctgcaatgatcgcacccctcctcggtgactacgagctacaaggccccgaagacatc

SEQ ID NO: 40166 - DNA, 60 bp, Artificial
  Synthetic oligonucleotide
gtggccggggcaagaaacacacggcattctcaagcaaaggtctcagtgatgaggagtacg

SEQ ID NO: 40167 - DNA, 60 bp, Artificial
  Synthetic oligonucleotide
gagccattgaagacgctgtattagacctggaggccattgagaacaaccatatgaccactc

SEQ ID NO: 40168 - DNA, 60 bp, Artificial
  Synthetic oligonucleotide
agtcgagaaggcaaagcgggacttccctggtcaaccggacatgtggaaggacgcctatcg

SEQ ID NO: 40169 - DNA, 60 bp, Artificial
  Synthetic oligonucleotide
tgagagagtggtgctctgggatgactacgggatgagcaaccccatccacgatgcgctgag

SEQ ID NO: 40170 - DNA, 60 bp, Artificial
  Synthetic oligonucleotide
ctcccagagacccatacaactcatgtcactcttgggcgaagcagcactgcatgaaccatc

SEQ ID NO: 40171 - DNA, 60 bp, Artificial
  Synthetic oligonucleotide
agaatgtacaacgggtatgccggtgggatggaggtgcaggtcatgttggctgggaacgcg

SEQ ID NO: 40172 - DNA, 60 bp, Artificial
  Synthetic oligonucleotide
gtccaggcccctaatggtgaatttacagtctctccccgtaatgcccctggtgaagtgcta

SEQ ID NO: 40173 - DNA, 60 bp, Artificial
  Synthetic oligonucleotide
gacctgtgtacacgcctcagtaccttatatcccctgacaccttgaggaaactccatggtg

SEQ ID NO: 40174 - DNA, 60 bp, Artificial
  Synthetic oligonucleotide
agaagggttcaataatggctggagcttttgtagctggtcttgcaggggacgtgctcagca

SEQ ID NO: 40175 - DNA, 60 bp, Artificial
  Synthetic oligonucleotide
gtgctctaaaccttaacacaaaccttgccccttctgttgctccagtatttccaggggagc

SEQ ID NO: 40176 - DNA, 60 bp, Artificial
  Synthetic oligonucleotide
caaaagaaccactggagagctgatgcctctcgcagcaagaatgggcacccacgcgaccat

SEQ ID NO: 40177 - DNA, 60 bp, Artificial
  Synthetic oligonucleotide
gtgtcacctagcctcttcataacatcaacacatgtcatacctcaaggcataactgaggcc

SEQ ID NO: 40178 - DNA, 60 bp, Artificial
  Synthetic oligonucleotide
tcaggccaacaagaaaacaacgcaaggaagaaagagccaaccttggcctcgttaccgggt

SEQ ID NO: 40179 - DNA, 60 bp, Artificial
  Synthetic oligonucleotide
tgacctggctaccatggtgcggtgcgcgcgctcctttggcggtttgatggacgaactcaa

SEQ ID NO: 40180 - DNA, 60 bp, Artificial
  Synthetic oligonucleotide
ggccactaaccgaagatgcagatgaggccactatgaaagaggggtgccccaaacctaggg

SEQ ID NO: 40181 - DNA, 60 bp, Artificial
  Synthetic oligonucleotide
acttacacgcttgagtctgacggcaagggtaaggttgtggttgagagggtgcagagcgcc

SEQ ID NO: 40182 - DNA, 60 bp, Artificial
  Synthetic oligonucleotide
cgcccctctcaaccttcaactttgaccgcaacaaaattgcagcgttcaggcaactcgccg

SEQ ID NO: 40183 - DNA, 60 bp, Artificial
  Synthetic oligonucleotide
aagtattacaaaccacgcgggaagtggtgggacggttactcgggaaatgacgtagtcgtc

SEQ ID NO: 40184 - DNA, 60 bp, Artificial
  Synthetic oligonucleotide
ccacgcgggaagtggtgggacggttactcgggaaatgacgtagtcgtcatggacgacttt

SEQ ID NO: 40185 - DNA, 60 bp, Artificial
  Synthetic oligonucleotide
tttccgcgggctggctgaacttttgaaagtgagcgggaaaatgcagaagcgtgattggaa

SEQ ID NO: 40186 - DNA, 60 bp, Artificial
  Synthetic oligonucleotide
acaatccacggaggtacccgaaggccgatttgaagcagcggacccaccctgtgccctttt

SEQ ID NO: 40187 - DNA, 60 bp, Artificial
  Synthetic oligonucleotide
agatcagcagaataaagaatactgcagtaaagaaggcaacttactgattgagtgtggagc

SEQ ID NO: 40188 - DNA, 60 bp, Artificial
  Synthetic oligonucleotide
tgatcagcagaataaagaatactgcagtaaagaaggcaacttactgattgagtgtggagc

SEQ ID NO: 40189 - DNA, 60 bp, Artificial
  Synthetic oligonucleotide
caatccacggaggaagggggccagttcgtcaccctttcccccccatgccctgaatttcca

SEQ ID NO: 40190 - DNA, 60 bp, Artificial
  Synthetic oligonucleotide
gtacacgtcattgtggggccacctgggtgtggtaaaagcaaatgggctgctaattttgca

SEQ ID NO: 40191 - DNA, 50 bp, Artificial
  Synthetic oligonucleotide
tgggtgcccgctgccacatcgagaaagcgaaaggaacagatcagcagaat

SEQ ID NO: 40192 - DNA, 58 bp, Artificial
  Synthetic oligonucleotide
aaatcttcgtcttggtcgtccgatacgtagccttcgtcttctgaatctcctacgtaga

SEQ ID NO: 40193 - DNA, 60 bp, Artificial
  Synthetic oligonucleotide
cgagacttcagtgagatatacgtcaagtatgggcgtggcttgcgcgacctgaagctgctg

SEQ ID NO: 40194 - DNA, 60 bp, Artificial
  Synthetic oligonucleotide
gagactaaaggtggaactgtaccttttttggcccgcagtattctgattaccagcaatcag

SEQ ID NO: 40195 - DNA, 60 bp, Artificial
  Synthetic oligonucleotide
aagactaaaggtggaactgtaccttttttggcccgcagtattctgattaccagcaatcag

SEQ ID NO: 40196 - DNA, 60 bp, Artificial
  Synthetic oligonucleotide
ctaaaggtggaactgtaccttttttggcccgcagtattctgattaccagcaatcagaccc

SEQ ID NO: 40197 - DNA, 60 bp, Artificial
  Synthetic oligonucleotide
aagccaccccaggagtggtacaaggaggactgtgacccgaagccactgttccggagattc

SEQ ID NO: 40198 - DNA, 60 bp, Artificial
  Synthetic oligonucleotide
aagccccccgagacttggtacaaggaggactgtgacccgaagccactgttccggagattc

SEQ ID NO: 40199 - DNA, 60 bp, Artificial
  Synthetic oligonucleotide
gggtgcccgctgccacatcgagaaagcgaaaggaacagatcagcagaataaagaatactg

SEQ ID NO: 40200 - DNA, 60 bp, Artificial
  Synthetic oligonucleotide
ggtgcccgctgccacatcgagaaagcgaaaggaacagatcagcagaataaagaatactgc

SEQ ID NO: 40201 - DNA, 60 bp, Artificial
  Synthetic oligonucleotide
accggccacttggagccacggagccccttgcagctatgcctccgcaaaagagggaagcag

SEQ ID NO: 40202 - DNA, 60 bp, Artificial
  Synthetic oligonucleotide
cagaaaccgcgagatttcaaaaccgaatttatcgttgtcaccggtccgtcgggcgtgggc

SEQ ID NO: 40203 - DNA, 60 bp, Artificial
  Synthetic oligonucleotide
cttgtctgtacatgcggacaaacttgaatcggtatactctgttagttctgtgaccacgcc

SEQ ID NO: 40204 - DNA, 60 bp, Artificial
  Synthetic oligonucleotide
gccggcgcattcttgtctgtacatgcggacaaacttgaatcggtatactctgttagttct

SEQ ID NO: 40205 - DNA, 60 bp, Artificial
  Synthetic oligonucleotide
gcgtctcctagcaacctgtatgaaagagccaatcacgagctgtcacgtaaccgtggctcc

SEQ ID NO: 40206 - DNA, 60 bp, Artificial
  Synthetic oligonucleotide
cgcctgtgtctgtcggcgtctcctagcaacctgtatgaaagagccaatcacgagctgtca

SEQ ID NO: 40207 - DNA, 60 bp, Artificial
  Synthetic oligonucleotide
gcctccaattaattgttccccagtcgaggaagtcgtccagcattatgttgaggccgtcgg

SEQ ID NO: 40208 - DNA, 60 bp, Artificial
  Synthetic oligonucleotide
cttcgaatggtagcctccaattaattgttccccagtcgaggaagtcgtccagcattatgt

SEQ ID NO: 40209 - DNA, 60 bp, Artificial
  Synthetic oligonucleotide
ggccgtcggtagcccatttcagggtagtgtcacctgagccggcgcattcttgtctgtaca

SEQ ID NO: 40210 - DNA, 60 bp, Artificial
  Synthetic oligonucleotide
agcattatgttgaggccgtcggtagcccatttcagggtagtgtcacctgagccggcgcat

SEQ ID NO: 40211 - DNA, 60 bp, Artificial
  Synthetic oligonucleotide
caccggattgtatgaagaagtaccctataaactattgatttcgccccctccctcatagtg

SEQ ID NO: 40212 - DNA, 60 bp, Artificial
  Synthetic oligonucleotide
gtggctgacgtggaatgccatccggttcgaggatgcaccggattgtatgaagaagtaccc

SEQ ID NO: 40213 - DNA, 60 bp, Artificial
  Synthetic oligonucleotide
tcggcggataaataagtggctgacgtggaatgccatccggttcgaggatgcaccggattg

SEQ ID NO: 40214 - DNA, 60 bp, Artificial
  Synthetic oligonucleotide
caccccgactcgtggtacaatgaagagaagtgctatctacccgcgttgtttcggcggata

SEQ ID NO: 40215 - DNA, 60 bp, Artificial
  Synthetic oligonucleotide
gtgagttactgcgtctcactgataggtatccacataaggttcctgtgaaaggatcgtatg

SEQ ID NO: 40216 - DNA, 60 bp, Artificial
  Synthetic oligonucleotide
ctttttgtgagttactgcgtctcactgataggtatccacataaggttcctgtgaaaggat

SEQ ID NO: 40217 - DNA, 60 bp, Artificial
  Synthetic oligonucleotide
taagatgaaaggggactggtgggacggctactctaacgaggatgttgtcgttattgacga

SEQ ID NO: 40218 - DNA, 60 bp, Artificial
  Synthetic oligonucleotide
gcactaagttttataagatgaaaggggactggtgggacggctactctaacgaggatgttg

SEQ ID NO: 40219 - DNA, 60 bp, Artificial
  Synthetic oligonucleotide
gctaagcactctgaaaaaattacttagccgtgcccattgggagaaagctcgcggttcgga

SEQ ID NO: 40220 - DNA, 60 bp, Artificial
  Synthetic oligonucleotide
agggaagcagccgctaagaggtggtgcttcacgctgaataactacaccgatgaagaggtg

SEQ ID NO: 40221 - DNA, 60 bp, Artificial
  Synthetic oligonucleotide
tagggtttgcgaggtgggttaggttcatttgtctgaactctacatatatcgtcacttttg

SEQ ID NO: 40222 - DNA, 60 bp, Artificial
  Synthetic oligonucleotide
ttggagccacggagccccttgcagctatgcctccgcaaaagagggaagcagccgctaaga

SEQ ID NO: 40223 - DNA, 60 bp, Artificial
  Synthetic oligonucleotide
aatggtacgccgcatttgcagggctacattcatctaaagaagaaggctcggctaagcact

SEQ ID NO: 40224 - DNA, 60 bp, Artificial
  Synthetic oligonucleotide
gccgctaagaggtggtgcttcacgctgaataactacaccgatgaagaggtgtccgccgtg

SEQ ID NO: 40225 - DNA, 60 bp, Artificial
  Synthetic oligonucleotide
ggtacgccgcatttgcagggctacattcatctaaagaagaaggctcggctaagcactctg

SEQ ID NO: 40226 - DNA, 60 bp, Artificial
  Synthetic oligonucleotide
ccgccgtgaaagccggaagtcgaatggtggatatcgcgcgagagttcagtgaagtctacg

SEQ ID NO: 40227 - DNA, 60 bp, Artificial
  Synthetic oligonucleotide
gcgacaacgaggcgtactgtacgaaagatggggacgtgatacttaccctgggcatgccgg

SEQ ID NO: 40228 - DNA, 60 bp, Artificial
  Synthetic oligonucleotide
caccggtccgtcgggcgtgggcaagagccgttatgctaatgagtatcctggcactaagtt

SEQ ID NO: 40229 - DNA, 60 bp, Artificial
  Synthetic oligonucleotide
atacttaccctgggcatgccggtggaagggaaccgtagcgatctctccggagctgttgcc

SEQ ID NO: 40230 - DNA, 60 bp, Artificial
  Synthetic oligonucleotide
ctcctttcttcatcagaggtatccatgcggatctggggttggttagccatagcgctgcag

SEQ ID NO: 40231 - DNA, 60 bp, Artificial
  Synthetic oligonucleotide
gggttggttagccatagcgctgcagtaacgtttcccgcgtcggtgtccgtaatggaaatt

SEQ ID NO: 40232 - DNA, 60 bp, Artificial
  Synthetic oligonucleotide
tagcgctgcagtaacgtttcccgcgtcggtgtccgtaatggaaatttggggtcggggtcg

SEQ ID NO: 40233 - DNA, 60 bp, Artificial
  Synthetic oligonucleotide
aatggaaatttggggtcggggtcggaaaagacgcttgaatcctttgcggaggtcccactg

SEQ ID NO: 40234 - DNA, 60 bp, Artificial
  Synthetic oligonucleotide
aactctacatatatcgtcacttttgcatggaatagtatagcatcgtggggctggggccaa

SEQ ID NO: 40235 - DNA, 60 bp, Artificial
  Synthetic oligonucleotide
gtcacttttgcatggaatagtatagcatcgtggggctggggccaactgatggcgaggccg

SEQ ID NO: 40236 - DNA, 60 bp, Artificial
  Synthetic oligonucleotide
ctggggccaactgatggcgaggccgtagtgctttactctagagcccgagctgggtaagtt

SEQ ID NO: 40237 - DNA, 60 bp, Artificial
  Synthetic oligonucleotide
tgggtaagttttggtctcctttcttcatcagaggtatccatgcggatctggggttggtta

SEQ ID NO: 40238 - DNA, 60 bp, Artificial
  Synthetic oligonucleotide
acgtcaagtatgggcgtggcttacgtgaactggcgcttctgattggacagaaaccgcgag

SEQ ID NO: 40239 - DNA, 60 bp, Artificial
  Synthetic oligonucleotide
cttctgattggacagaaaccgcgagatttcaaaaccgaatttatcgttgtcaccggtccg

SEQ ID NO: 40240 - DNA, 60 bp, Artificial
  Synthetic oligonucleotide
agctgttgccgccgtgaaagccggaagtcgaatggtggatatcgcgcgagagttcagtga

SEQ ID NO: 40241 - DNA, 60 bp, Artificial
  Synthetic oligonucleotide
tgtctgtactttatttagggtttgcgaggtgggttaggttcatttgtctgaactctacat

SEQ ID NO: 40242 - DNA, 60 bp, Artificial
  Synthetic oligonucleotide
atttggggtcggggtcggaaaagacgcttgaatcctttgcggaggtcccactgtctggcg

SEQ ID NO: 40243 - DNA, 60 bp, Artificial
  Synthetic oligonucleotide
caaggtggttgtcttgaatgggcacattgtgccctataccatgccatgatccccagttct

SEQ ID NO: 40244 - DNA, 60 bp, Artificial
  Synthetic oligonucleotide
aaaattacttagccgtgcccattgggagaaagctcgcggttcggacagcgacaacgaggc

SEQ ID NO: 40245 - DNA, 60 bp, Artificial
  Synthetic oligonucleotide
gcggttcggacagcgacaacgaggcgtactgtacgaaagatggggacgtgatacttaccc

SEQ ID NO: 40246 - DNA, 60 bp, Artificial
  Synthetic oligonucleotide
cccgctgccacatcgagaaagcgaaaggaactgatcagcagaataaagaatattgtagta

SEQ ID NO: 40247 - DNA, 60 bp, Artificial
  Synthetic oligonucleotide
ttggtgtttcacccttaacaaccctacagacggcgagatcgaattcgtccgttctctcgg

SEQ ID NO: 40248 - DNA, 60 bp, Artificial
  Synthetic oligonucleotide
atatacgtcaagtatgggcgtggcttgcgcgacctgaagctgctgattggtcagcagccc

SEQ ID NO: 40249 - DNA, 60 bp, Artificial
  Synthetic oligonucleotide
gatatacgtcaagtatgggcgtggcttgcgcgacctgaagctgctgattggtcagcagcc

SEQ ID NO: 40250 - DNA, 60 bp, Artificial
  Synthetic oligonucleotide
aggaaccgaccagcagaataaagaatactgcagtaaagaaggccacatacttatcgagtg

SEQ ID NO: 40251 - DNA, 60 bp, Artificial
  Synthetic oligonucleotide
tgcccgcctacgacgataatatagactccgcggtctcgcgcgatacagcggcatgatggg

SEQ ID NO: 40252 - DNA, 60 bp, Artificial
  Synthetic oligonucleotide
cgggctggctgaacttttgaaagtgagcgggaaaatgcagaagcgtgattggaagacgaa

SEQ ID NO: 40253 - DNA, 60 bp, Artificial
  Synthetic oligonucleotide
cgggctggctgaacttttgaaagtgagcgggaaaatgcagaagcgtgattggaagaccaa

SEQ ID NO: 40254 - DNA, 60 bp, Artificial
  Synthetic oligonucleotide
gtaaccagcctgatctactgctattcagccacattgatgctgaaaagttagaggctgtca

SEQ ID NO: 40255 - DNA, 60 bp, Artificial
  Synthetic oligonucleotide
aattggccaatgagatggaagggtctaagttctacaagatgaaaggtgattggtgggatg

SEQ ID NO: 40256 - DNA, 60 bp, Artificial
  Synthetic oligonucleotide
gaggctgtcatatctgatatggttagttgaggctttgggcgtaccagcctcttaaaccct

SEQ ID NO: 40257 - DNA, 60 bp, Artificial
  Synthetic oligonucleotide
gatatggttagttgaggctttgggcgtaccagcctcttaaaccctctgaccaagttccac

SEQ ID NO: 40258 - DNA, 60 bp, Artificial
  Synthetic oligonucleotide
agtgaagtctacgtcaagtatgggcggggcctccgtgatctccggttgctgattggttgc

SEQ ID NO: 40259 - DNA, 56 bp, Artificial
  Synthetic oligonucleotide
gattggttgcccgccccgcgatttcaaaacagaagtcatcgttctgattggcccac

SEQ ID NO: 40260 - DNA, 60 bp, Artificial
  Synthetic oligonucleotide
tctgaccaagttccacgccctcgccccgtcccagttagccagtgggtcttgcgtttgatc

SEQ ID NO: 40261 - DNA, 60 bp, Artificial
  Synthetic oligonucleotide
ctctggcgtcctgaactgggactgtgtacccccagccccttgcaattgttgttgtgacac

SEQ ID NO: 40262 - DNA, 60 bp, Artificial
  Synthetic oligonucleotide
catggcagcacggcgagacagcggagcccgtcgctggtgctttactctgaataactacac

SEQ ID NO: 40263 - DNA, 60 bp, Artificial
  Synthetic oligonucleotide
gtgctttactctgaataactacactcccgaggaagaggagaccgctcgcaatctgattca

SEQ ID NO: 40264 - DNA, 60 bp, Artificial
  Synthetic oligonucleotide
accgtgtgcctgtgaaaggtgcctacgtggaattcaccagcaagaagattgtgtttacca

SEQ ID NO: 40265 - DNA, 60 bp, Artificial
  Synthetic oligonucleotide
cggttggctgccgtactgtgagtgcctacgtctgtgtgaccggtaccctcaccgtgtgcc

SEQ ID NO: 40266 - DNA, 60 bp, Artificial
  Synthetic oligonucleotide
ctgtgagtgcctacgtctgtgtgaccggtaccctcaccgtgtgcctgtgaaaggtgccta

SEQ ID NO: 40267 - DNA, 60 bp, Artificial
  Synthetic oligonucleotide
gcactactcttgtaccgtccctctgggtccctgctggcatttgtaaaggtaaccagcctg

SEQ ID NO: 40268 - DNA, 60 bp, Artificial
  Synthetic oligonucleotide
atcctcgaacggccatgctgccggtattccctcttgacctataaagtcattcaggttgaa

SEQ ID NO: 40269 - DNA, 60 bp, Artificial
  Synthetic oligonucleotide
ctctgaataactacactcccgaggaagaggagaccgctcgcaatctgattcatgatgcag

SEQ ID NO: 40270 - DNA, 60 bp, Artificial
  Synthetic oligonucleotide
ggccaatgagatggaagggtctaagttctacaagatgaaaggtgattggtgggatggtta

SEQ ID NO: 40271 - DNA, 60 bp, Artificial
  Synthetic oligonucleotide
tgaagtctacgtcaagtatgggcggggcctccgtgatctccggttgctgattggttgccc

SEQ ID NO: 40272 - DNA, 60 bp, Artificial
  Synthetic oligonucleotide
cttaaaccctctgaccaagttccacgccctcgccccgtcccagttagccagtgggtcttg

SEQ ID NO: 40273 - DNA, 60 bp, Artificial
  Synthetic oligonucleotide
cagtctgtgccctcttcggttcctgggcaacctgtgacgtctgcgcactcgtctgtgaaa

SEQ ID NO: 40274 - DNA, 56 bp, Artificial
  Synthetic oligonucleotide
accggcgggccggggccatggggccatctggcccctggccaagcatgcgcagtagt

SEQ ID NO: 40275 - DNA, 60 bp, Artificial
  Synthetic oligonucleotide
gtctgtgaaaccgccttctccggaaaccgcgagtaacacgcctccttctggttgctgagc

SEQ ID NO: 40276 - DNA, 60 bp, Artificial
  Synthetic oligonucleotide
gacaatcaagatattgtcataatcgatgacttctacggttggctgccgtactgtgagtgc

SEQ ID NO: 40277 - DNA, 60 bp, Artificial
  Synthetic oligonucleotide
ggcctcagcaccactttagctaaatttatcctgtaatcctcgaacggccatgctgccggt

SEQ ID NO: 40278 - DNA, 60 bp, Artificial
  Synthetic oligonucleotide
gttgtgacaccttcaggcctcagcaccactttagctaaatttatcctgtaatcctcgaac

SEQ ID NO: 40279 - DNA, 59 bp, Artificial
  Synthetic oligonucleotide
cccacttttgtgggtcagtcttggatgggaagtccactgtgaattgccgtctaaatctg

SEQ ID NO: 40280 - DNA, 60 bp, Artificial
  Synthetic oligonucleotide
tatttgcgaagcatcatggcagcacggcgagacagcggagcccgtcgctggtgctttact

SEQ ID NO: 40281 - DNA, 60 bp, Artificial
  Synthetic oligonucleotide
atctgattcatgatgcagataagtacgcgtttgcgataatcggcaaagaagttggcgaaa

SEQ ID NO: 40282 - DNA, 56 bp, Artificial
  Synthetic oligonucleotide
gttgctgagcgacgtacctaaaaatagaatggccccacggcccgccgtatagtatt

SEQ ID NO: 40283 - DNA, 60 bp, Artificial
  Synthetic oligonucleotide
cgccttctccggaaaccgcgagtaacacgcctccttctggttgctgagcgacgtacctaa

SEQ ID NO: 40284 - DNA, 59 bp, Artificial
  Synthetic oligonucleotide
ttttcctcgcgcgcattttgagaaagctcgcggcagtgatcagcagaatgctgattatt

SEQ ID NO: 40285 - DNA, 60 bp, Artificial
  Synthetic oligonucleotide
ccgctctaaagaaactttttcctcgcgcgcattttgagaaagctcgcggcagtgatcagc

SEQ ID NO: 40286 - DNA, 60 bp, Artificial
  Synthetic oligonucleotide
cagataagtacgcgtttgcgataatcggcaaagaagttggcgaaagcggtactcctcatc

SEQ ID NO: 40287 - DNA, 60 bp, Artificial
  Synthetic oligonucleotide
atatatctcagtgcctgtccaggtgaaggccaagagaatgccagcccgtagtgcactact

SEQ ID NO: 40288 - DNA, 60 bp, Artificial
  Synthetic oligonucleotide
actgcctgaatgttacatatatagttatttctgcaatatatctcagtgcctgtccaggtg

SEQ ID NO: 40289 - DNA, 60 bp, Artificial
  Synthetic oligonucleotide
catgatcggtactccgagtgataataatccgagtgatcttgcgggagctgttgccgctgt

SEQ ID NO: 40290 - DNA, 60 bp, Artificial
  Synthetic oligonucleotide
gcagaatgctgattattgtggtaaagacggcgaaatacttaccatgatcggtactccgag

SEQ ID NO: 40291 - DNA, 60 bp, Artificial
  Synthetic oligonucleotide
ttgccgctgtgaaacgcggaagtcaaatgagtgaaatcgcgcgagagttcagtgaagtct

SEQ ID NO: 40292 - DNA, 60 bp, Artificial
  Synthetic oligonucleotide
cgagtgataataatccgagtgatcttgcgggagctgttgccgctgtgaaacgcggaagtc

SEQ ID NO: 40293 - DNA, 60 bp, Artificial
  Synthetic oligonucleotide
ccgacggatcaatgtgtacaagttttatgagactggtgaattcaaggacatgcccggaca

SEQ ID NO: 40294 - DNA, 60 bp, Artificial
  Synthetic oligonucleotide
gaagagtgccttctaccgacggatcaatgtgtacaagttttatgagactggtgaattcaa

SEQ ID NO: 40295 - DNA, 60 bp, Artificial
  Synthetic oligonucleotide
cgccatgtggatgggtggtggaaaggtgaaattgagaagagtgccttctaccgacggatc

SEQ ID NO: 40296 - DNA, 60 bp, Artificial
  Synthetic oligonucleotide
gtgtttaccagcaatcgccatgtggatgggtggtggaaaggtgaaattgagaagagtgcc

SEQ ID NO: 40297 - DNA, 60 bp, Artificial
  Synthetic oligonucleotide
acattatctgagcgaactgcctgaatgttacatatatagttatttctgcaatatatctca

SEQ ID NO: 40298 - DNA, 57 bp, Artificial
  Synthetic oligonucleotide
ttgtcgacgaccgacgcgcgtagcgcggagggaggagaccacttgctttgaatttaa

SEQ ID NO: 40299 - DNA, 60 bp, Artificial
  Synthetic oligonucleotide
taggcgcgagatgaaaacacccccctcgggatgacagtcgttttcatctcgcgcccccga

SEQ ID NO: 40300 - DNA, 60 bp, Artificial
  Synthetic oligonucleotide
gtgaattcaaggacatgcccggacacatgctcccgcacccaatcaattattaggcgcgag

SEQ ID NO: 40301 - DNA, 60 bp, Artificial
  Synthetic oligonucleotide
cctgtccaggtgaaggccaagagaatgccagcccgtagtgcactactcttgtaccgtccc

SEQ ID NO: 40302 - DNA, 60 bp, Artificial
  Synthetic oligonucleotide
tggtgggatggttatgacaatcaagatattgtcataatcgatgacttctacggttggctg

SEQ ID NO: 40303 - DNA, 60 bp, Artificial
  Synthetic oligonucleotide
cacgtctcgcgtgataatagtgaccagcaacagtctccccgatgcctggtacagcgagga

SEQ ID NO: 40304 - DNA, 60 bp, Artificial
  Synthetic oligonucleotide
gaagtgaagtggtatttgggtgcccgctgccacatcgagaaagcgaaaggaacagatcag

SEQ ID NO: 40305 - DNA, 60 bp, Artificial
  Synthetic oligonucleotide
ctggcgagtctggcgggtccggagcggagcgaccgcgaatgcgggagcgaagcgactaca

SEQ ID NO: 40306 - DNA, 60 bp, Artificial
  Synthetic oligonucleotide
ctggcgagtctggcgggtccggagcggagcgaccgcgaatgcgggagcggagcgactaca

SEQ ID NO: 40307 - DNA, 60 bp, Artificial
  Synthetic oligonucleotide
ggtccggagcggagcgaccgcgaatgcgggagcgaagcgactacactcgaaaatgaattt

SEQ ID NO: 40308 - DNA, 60 bp, Artificial
  Synthetic oligonucleotide
tctggcgggtccggagcggagcgaccgcgaatgcgggagcgaagcgactacactcgaaaa

SEQ ID NO: 40309 - DNA, 60 bp, Artificial
  Synthetic oligonucleotide
ctggcgggtccggagcggagcgaccgcgaatgcgggagcggagcgactacactcgaaaat

SEQ ID NO: 40310 - DNA, 60 bp, Artificial
  Synthetic oligonucleotide
gtgagatatacgtcaagtatgggcgtggcttgcgcgacctgaagctgctgattggtcagc

SEQ ID NO: 40311 - DNA, 60 bp, Artificial
  Synthetic oligonucleotide
gtagtgccggactttcgctcccgctgagttgggtcctccttgtagtgggatccagccggt

SEQ ID NO: 40312 - DNA, 60 bp, Artificial
  Synthetic oligonucleotide
tgacttttgctcctgctgcgttgggtcctccttgtagtgggatccagccggttctggcac

SEQ ID NO: 40313 - DNA, 60 bp, Artificial
  Synthetic oligonucleotide
gttgggtcctccttgtagtgggatccagccggttctggcgctgtttagccacaatgctgc

SEQ ID NO: 40314 - DNA, 60 bp, Artificial
  Synthetic oligonucleotide
tcgttcccgctgagttgggtcctccttgtagtgggatccagccggttctggcgctgttta

SEQ ID NO: 40315 - DNA, 60 bp, Artificial
  Synthetic oligonucleotide
tcgctcccgctgagttgggtcctccttgtagtgggatccagccggttctggcgctgttta

SEQ ID NO: 40316 - DNA, 60 bp, Artificial
  Synthetic oligonucleotide
ttcgctcctgctgagttgggtcctccttgtagtgggatccagccggttctggcgctgttt

SEQ ID NO: 40317 - DNA, 60 bp, Artificial
  Synthetic oligonucleotide
gcgctaacgggagcgatgcggataatgagaagtattgcagtaaagagggggacgttatac

SEQ ID NO: 40318 - DNA, 60 bp, Artificial
  Synthetic oligonucleotide
tgtaccttttttggcccgcagtattctgattaccagcaatcagaccccgttggaatggta

SEQ ID NO: 40319 - DNA, 60 bp, Artificial
  Synthetic oligonucleotide
cccgctgccacatcgagaaagcgaaaggaactgatcagcagaataaagaatactgtagta

SEQ ID NO: 40320 - DNA, 60 bp, Artificial
  Synthetic oligonucleotide
tggctgccctcctacgacgataatatagactccgcggtctcgcgcgatacagcggcatga

SEQ ID NO: 40321 - DNA, 60 bp, Artificial
  Synthetic oligonucleotide
agcggcatgatgggcagtggcttcctgtgggcggggacaaaaccgttacaggcgccgtat

SEQ ID NO: 40322 - DNA, 60 bp, Artificial
  Synthetic oligonucleotide
ggcatgatgggcagtggcttcctgtgggcggggacaaaaccgttacaggcgccgtatata

SEQ ID NO: 40323 - DNA, 60 bp, Artificial
  Synthetic oligonucleotide
ggcatgatgggcagtggcttcctgtgggcggggacagaaaccgttacaggcgccgtatat

SEQ ID NO: 40324 - DNA, 60 bp, Artificial
  Synthetic oligonucleotide
gcatgatgggcagtggcttcctgtgggcggggacagaaaccgttacaggcgccgtatata

SEQ ID NO: 40325 - DNA, 60 bp, Artificial
  Synthetic oligonucleotide
gcacacctcacctgcagggattcctgagtctgcgaaagaatgcgaaagctgctgcgcttg

SEQ ID NO: 40326 - DNA, 60 bp, Artificial
  Synthetic oligonucleotide
ggacacctcacctgcagggattcctgagtctgcgaaagaatgcgaaagcggctgcgcttg

SEQ ID NO: 40327 - DNA, 60 bp, Artificial
  Synthetic oligonucleotide
agaagggacacctcacctgcagggattcctgagtctgcgaaagaatgcgaaagctgctgc

SEQ ID NO: 40328 - DNA, 60 bp, Artificial
  Synthetic oligonucleotide
agaaggcacacctcacctgcagggattcctgagtctgcgaaagaatgcgaaagctgctgc

SEQ ID NO: 40329 - DNA, 60 bp, Artificial
  Synthetic oligonucleotide
gaagggacacctcacctgcagggattcctgagtctgcgaaagaatgcgaaagctgctgcg

SEQ ID NO: 40330 - DNA, 60 bp, Artificial
  Synthetic oligonucleotide
agggacacctcacctgcagggattcctgagtctgcgaaagaatgcgaaagcggctgcgct

SEQ ID NO: 40331 - DNA, 60 bp, Artificial
  Synthetic oligonucleotide
ggagagaaagaaggcacacctcacctgcagggattcctgagtctgcgaaagaatgcgaaa

SEQ ID NO: 40332 - DNA, 60 bp, Artificial
  Synthetic oligonucleotide
gccgataactgacgtggcccggaagtacccgacgacttatgtaatgtttgggcggggctt

SEQ ID NO: 40333 - DNA, 60 bp, Artificial
  Synthetic oligonucleotide
taccttcgagtcggtgaaccaaaccgaaaaggtcgctccagtgatctctccgacgcggca

SEQ ID NO: 40334 - DNA, 59 bp, Artificial
  Synthetic oligonucleotide
gcgaaagaatgcgaaagctgctgcgcttgaagagaagctgggaggaagagcctggctgt

SEQ ID NO: 40335 - DNA, 60 bp, Artificial
  Synthetic oligonucleotide
ggacacctcacctgcagggattcctgagtctgcgaaagaatgcgaaagctgctgcgcttg

SEQ ID NO: 40336 - DNA, 60 bp, Artificial
  Synthetic oligonucleotide
gtctcgcgcgatacagcggcatgatgggcagtggcttcctgtgggcggggacagaaaccg

SEQ ID NO: 40337 - DNA, 60 bp, Artificial
  Synthetic oligonucleotide
cgtggcccggaagtacccgacgacttatgtaatgtttgggcggggcttagagcgtctacg

SEQ ID NO: 40338 - DNA, 60 bp, Artificial
  Synthetic oligonucleotide
ctgcggttggctgccctcctacgacgataatatagactccgcggtctcgcgcgatacagc

SEQ ID NO: 40339 - DNA, 60 bp, Artificial
  Synthetic oligonucleotide
tctccggttggctgccctcctacgacgataatatagactccgcggtctcgcgcgatacag

SEQ ID NO: 40340 - DNA, 60 bp, Artificial
  Synthetic oligonucleotide
tgccctcctacgacgataatatagactccgcggtctcgcgcgatacagcggcatgatggg

SEQ ID NO: 40341 - DNA, 60 bp, Artificial
  Synthetic oligonucleotide
atacagcggcatgatgggcagtggcttcctgtgggcggggacagaaaccgttacaggcgc

SEQ ID NO: 40342 - DNA, 60 bp, Artificial
  Synthetic oligonucleotide
gcgatacagcggcatgatgggcagtggcttcctgtgggcggggacaaaaccgttacaggc

SEQ ID NO: 40343 - DNA, 60 bp, Artificial
  Synthetic oligonucleotide
cgcgatacagcggcatgatgggcagtggcttcctgtgggcggggacaacatcgttacagg

SEQ ID NO: 40344 - DNA, 60 bp, Artificial
  Synthetic oligonucleotide
cgcgatacagcggcatgatgggcagtggcttcctgtgggcggggacaatatcgttacagg

SEQ ID NO: 40345 - DNA, 60 bp, Artificial
  Synthetic oligonucleotide
tcgcgcgatacagcggcatgatgggcagtggcttcctgtgggcggggacaaaaccgttac

SEQ ID NO: 40346 - DNA, 60 bp, Artificial
  Synthetic oligonucleotide
ctcgcgcgatacagcggcatgatgggcagtggcttcctgtgggcggggacagaaaccgtt

SEQ ID NO: 40347 - DNA, 60 bp, Artificial
  Synthetic oligonucleotide
ggcccggaagtacccgacgacttatgtaatgtttgggcggggcttagagcgtctgcgtca

SEQ ID NO: 40348 - DNA, 60 bp, Artificial
  Synthetic oligonucleotide
gactccgcggtctcgcgcgatacagcggcatgatgggcagtggcttcctgtgggcgggga

SEQ ID NO: 40349 - DNA, 60 bp, Artificial
  Synthetic oligonucleotide
taactgacgtggcccggaagtacccgacgacttatgtaatgtttgggcggggcttagagc

SEQ ID NO: 40350 - DNA, 60 bp, Artificial
  Synthetic oligonucleotide
gccgataactgacgtggcccggaagtacccgactacttatgtaatgtttgggcggggctt

SEQ ID NO: 40351 - DNA, 60 bp, Artificial
  Synthetic oligonucleotide
gagacttggtacaaggaggactgtgacccgaagccactgtttcggagattcactcgtgtt

SEQ ID NO: 40352 - DNA, 60 bp, Artificial
  Synthetic oligonucleotide
tcacgagcaataagccccccgagacctggtacaaggaggactgtgacccgaagccactgt

SEQ ID NO: 40353 - DNA, 60 bp, Artificial
  Synthetic oligonucleotide
cattgtggggccacctgggtgtggtaaaagcaaatgggctgctaattttgcagacccgga

SEQ ID NO: 40354 - DNA, 60 bp, Artificial
  Synthetic oligonucleotide
gtttgtcagaaatttccgcgggctggctgaacttttggaagtgagcgggaaaatgcagaa

SEQ ID NO: 40355 - DNA, 60 bp, Artificial
  Synthetic oligonucleotide
gagacctggtgcaaggaggactgtgacccgaagccactgttccggaggttcacacgtgtt

SEQ ID NO: 40356 - DNA, 60 bp, Artificial
  Synthetic oligonucleotide
ggtgcaaggaggactgtgacccgaagccactgttccggaggttcacacgtgtttggtggt

SEQ ID NO: 40357 - DNA, 60 bp, Artificial
  Synthetic oligonucleotide
ggagtttggtgaccgttgcagagcagcaccctgtaacgtttgtcagaaatttccgcgggc

SEQ ID NO: 40358 - DNA, 60 bp, Artificial
  Synthetic oligonucleotide
ggagtccggtgaccgttgcagagcagcaccctgtaacgtttgtcagaaatttccgcgggc

SEQ ID NO: 40359 - DNA, 60 bp, Artificial
  Synthetic oligonucleotide
gcagtctggtgaccgttgcagagcagcaccctgtaacgtttgtcagaaatttccgcgggc

SEQ ID NO: 40360 - DNA, 60 bp, Artificial
  Synthetic oligonucleotide
gaacctgccccttcttgttccctcccctttccaataaactactgagaccacgttgttgtt

SEQ ID NO: 40361 - DNA, 60 bp, Artificial
  Synthetic oligonucleotide
gacgtgatacttaccctgggcattgtggcgagagatggtcaccgcgctttcggcggagct

SEQ ID NO: 40362 - DNA, 54 bp, Artificial
  Synthetic oligonucleotide
gcccggagggcctcgtctgtgtcggggggggggccccggggggtccccccgaca

SEQ ID NO: 40363 - DNA, 60 bp, Artificial
  Synthetic oligonucleotide
cggttgcgtcagctgatcgtggagaccgctcgtgattggaagacggaggtcatcgttctg

SEQ ID NO: 40364 - DNA, 60 bp, Artificial
  Synthetic oligonucleotide
agtattgcagtaaagagggagacgtggtacttaccctgggcattgtggcgagagacggtc

SEQ ID NO: 40365 - DNA, 60 bp, Artificial
  Synthetic oligonucleotide
accgcgctttcgatggagctgttgctgccgtgatgtccggacgcaaaatggaggaagtcg

SEQ ID NO: 40366 - DNA, 60 bp, Artificial
  Synthetic oligonucleotide
gagctgttgctgccgtgatgtccggacgcaaaatgaaggaagtcgcgcgagagttcccag

SEQ ID NO: 40367 - DNA, 60 bp, Artificial
  Synthetic oligonucleotide
gctgttgctgccgtgatgtccggacgcaaaatgaaggaagtcgcgcgagagttcccggat

SEQ ID NO: 40368 - DNA, 60 bp, Artificial
  Synthetic oligonucleotide
ttcgacggagctgttgctgccgtgatgtccggacgcaaaatgaaggaagtcgcgcgagag

SEQ ID NO: 40369 - DNA, 60 bp, Artificial
  Synthetic oligonucleotide
cggcggagctgttgctgccgtgatgtccggacgcaaaatgaaggaagtcgcgcgagagtt

SEQ ID NO: 40370 - DNA, 60 bp, Artificial
  Synthetic oligonucleotide
cgacggagctgttgctgccgtgatgtccggacgcaaaatgaaggaagtcgcgcgagagtt

SEQ ID NO: 40371 - DNA, 60 bp, Artificial
  Synthetic oligonucleotide
tggagctgttgctgccgtgatgtccggacgcaaaatgaaggaagtcgcgcgagagttccc

SEQ ID NO: 40372 - DNA, 60 bp, Artificial
  Synthetic oligonucleotide
gcttttgaatttcccgcgcgtgaaaagtattataaatctcgcgggaagtggtgggacggc

SEQ ID NO: 40373 - DNA, 60 bp, Artificial
  Synthetic oligonucleotide
gcgtttgaatttcccgcgcgcgaaaagtattataaatctcgcgggaagtggtgggacggc

SEQ ID NO: 40374 - DNA, 60 bp, Artificial
  Synthetic oligonucleotide
cggtgaaccaaatcgaaaaggtcgctccagtgatctctccgacgcggcatccgacgtgct

SEQ ID NO: 40375 - DNA, 60 bp, Artificial
  Synthetic oligonucleotide
gaggtgggtctttactattaataaccctacctttgaagattattgttctgttgtagagtt

SEQ ID NO: 40376 - DNA, 60 bp, Artificial
  Synthetic oligonucleotide
gcccgtgaaaggggcctttgtggagttcacgtctcgcgtgataatagtgaccagcaacag

SEQ ID NO: 40377 - DNA, 60 bp, Artificial
  Synthetic oligonucleotide
ggcctttgttgagttcacgtctcgcgtgataatagtgaccagcaacagtccccccgatgc

SEQ ID NO: 40378 - DNA, 60 bp, Artificial
  Synthetic oligonucleotide
ggcctttgtggagttcacgtctcgcgtgataatagtgaccagcaacagtccccccgatgc

SEQ ID NO: 40379 - DNA, 60 bp, Artificial
  Synthetic oligonucleotide
gaggtcgcgcgagacttcagtgagatatacgtcaagtatgggcgtggcttgcgcgacctg

SEQ ID NO: 40380 - DNA, 60 bp, Artificial
  Synthetic oligonucleotide
ccggtacccgcataaggtgcccgtgaaaggggcctttgtggagttcacgtctcgcgtgat

SEQ ID NO: 40381 - DNA, 60 bp, Artificial
  Synthetic oligonucleotide
ccgcataaggtgcccgtgaaaggggcctttgtggagttcacgtctcgcgtgataatagtg

SEQ ID NO: 40382 - DNA, 60 bp, Artificial
  Synthetic oligonucleotide
ttgtggagttcacgtctcgcgtgataatagtgaccagcaacagtccccccgatgcctggt

SEQ ID NO: 40383 - DNA, 60 bp, Artificial
  Synthetic oligonucleotide
gcgatctcagcgaggctgttgccgcggtgaaagccggaagagcaatgacggaagtcgcgc

SEQ ID NO: 40384 - DNA, 60 bp, Artificial
  Synthetic oligonucleotide
cagcgaggctgttgccgcggtgaaagccggaagagcaatgacggaagtcgcgcgagactt

SEQ ID NO: 40385 - DNA, 60 bp, Artificial
  Synthetic oligonucleotide
gaggtcgcgcgagacttcagtgagatatacgtcaagtatgggcgtggcttgcgcgacctc

SEQ ID NO: 40386 - DNA, 60 bp, Artificial
  Synthetic oligonucleotide
gaagtcgcgcgagacttcagtgagatatacgtcaagtatgggcgtggcttgcgcgacttg

SEQ ID NO: 40387 - DNA, 60 bp, Artificial
  Synthetic oligonucleotide
accctgggcattcctgcgaagggaaaccggagcgatctcagcgaggctgttgccgcggtg

SEQ ID NO: 40388 - DNA, 60 bp, Artificial
  Synthetic oligonucleotide
tacttaccctgggcattcctgcgaagggaaaccggagcgatctcagcgaggctgttgccg

SEQ ID NO: 40389 - DNA, 60 bp, Artificial
  Synthetic oligonucleotide
tgctacttaccctgggcattcctgcgaagggaaaccggagcgatctcagcgaggctgttg

SEQ ID NO: 40390 - DNA, 60 bp, Artificial
  Synthetic oligonucleotide
ttctactcaccctgggcattcctgcgaagggaaaccggagcgatctcagcgaggctgttg

SEQ ID NO: 40391 - DNA, 60 bp, Artificial
  Synthetic oligonucleotide
taccttcgagtcggtgaaccaaaccgtaaaggtcgctccagtgatctctccgacgcggca

SEQ ID NO: 40392 - DNA, 52 bp, Artificial
  Synthetic oligonucleotide
cggtgaaccaaaccgaaaaggtcgctccagtgatctctccgacgcggcatcc

SEQ ID NO: 40393 - DNA, 60 bp, Artificial
  Synthetic oligonucleotide
taccttcgagtcggtgaaccaaatcgaaaaggtcgctccagtgatctctccgacgcggca

SEQ ID NO: 40394 - DNA, 60 bp, Artificial
  Synthetic oligonucleotide
cggtgaaccaaaccgaaaaggtcgctccagtgatctctccgacgcggcatccgacgtgct

SEQ ID NO: 40395 - DNA, 60 bp, Artificial
  Synthetic oligonucleotide
aagccccccgcagactggtacaaggaggactgtgacccgaagccactgttccggagattc

SEQ ID NO: 40396 - DNA, 60 bp, Artificial
  Synthetic oligonucleotide
agccccccgcagactggtacaaggaggactgtgacccgaagccactgttccggagattca

SEQ ID NO: 40397 - DNA, 60 bp, Artificial
  Synthetic oligonucleotide
gataatagtgaccagcaacagtccccccgatgcctggtacagcgaggaaaggtgctgtgt

SEQ ID NO: 40398 - DNA, 60 bp, Artificial
  Synthetic oligonucleotide
ctacagaacaatccacggaggaagggggccagttcgtcaccctttcccccccatgccctg

SEQ ID NO: 40399 - DNA, 60 bp, Artificial
  Synthetic oligonucleotide
ctgtaccttttttggcccgcagtattttgattaccagcaatcagaccccgttggaatggt

SEQ ID NO: 40400 - DNA, 60 bp, Artificial
  Synthetic oligonucleotide
ctgtaccttttttggcccgcagtattctgattaccagcaatcagaccccgttgaaatggt

SEQ ID NO: 40401 - DNA, 60 bp, Artificial
  Synthetic oligonucleotide
gtgaacactcgacagggatatacacttgggcagctgggttaaggttaggacaggaccacg

SEQ ID NO: 40402 - DNA, 60 bp, Artificial
  Synthetic oligonucleotide
ccctacctttgaagattatgttcatgttttagagttcagcacgctcgacaattgcaagtt

SEQ ID NO: 40403 - DNA, 60 bp, Artificial
  Synthetic oligonucleotide
gacgacttttatggttgggtaccttacgatgacctgcttcgcatcactgaccgttacccg

SEQ ID NO: 40404 - DNA, 60 bp, Artificial
  Synthetic oligonucleotide
cgtcttcgtcgcctgatcgttgaaacgcaacgtgattggaagacagaagtcatcgtcctg

SEQ ID NO: 40405 - DNA, 60 bp, Artificial
  Synthetic oligonucleotide
aagggatatacacttgggcagctggttatggtgaacactcgaaagggatatacacttggg

SEQ ID NO: 40406 - DNA, 60 bp, Artificial
  Synthetic oligonucleotide
tacacttgggcagctggttatggtgaacactcgaaagggatatacacttgggcagctggt

SEQ ID NO: 40407 - DNA, 60 bp, Artificial
  Synthetic oligonucleotide
acctgagagttggtgaaccaggcggtaagggtcgatcctcccagctcgccgatgcgacat

SEQ ID NO: 40408 - DNA, 60 bp, Artificial
  Synthetic oligonucleotide
tgaagattatgttcatgttttagagttcagcacgctcgacaattgcaagttcgcaatcgt

SEQ ID NO: 40409 - DNA, 60 bp, Artificial
  Synthetic oligonucleotide
gacatacctgagagttggtgaaccaggcggtaagggtcgatcctcccagctcgccgatgc

SEQ ID NO: 40410 - DNA, 60 bp, Artificial
  Synthetic oligonucleotide
ggcagctggttatggtgaacactcgacagggatatacacttgggcagctgggttaaggtt

SEQ ID NO: 40411 - DNA, 60 bp, Artificial
  Synthetic oligonucleotide
tggtccagttccggatccgaaaaatccaaatacggtatgtctggtgactttgagcgtcac

SEQ ID NO: 40412 - DNA, 60 bp, Artificial
  Synthetic oligonucleotide
gcatgtagctattcgtgtctccaaacattgcccatctcatgttcagtccacagatgttgt

SEQ ID NO: 40413 - DNA, 60 bp, Artificial
  Synthetic oligonucleotide
gtagctattcgtgtctccaaacattgcccatctcatgttcagtccacagatgttgtttcc

SEQ ID NO: 40414 - DNA, 60 bp, Artificial
  Synthetic oligonucleotide
ccgaaaaatccaaatacggtatgtctggtgactttgaacgtcactactgaaaatcttcgt

SEQ ID NO: 40415 - DNA, 58 bp, Artificial
  Synthetic oligonucleotide
gctaagagtggcaactactcctacaaaaggtgggtctttacaattaataaccctacct

SEQ ID NO: 40416 - DNA, 60 bp, Artificial
  Synthetic oligonucleotide
cacgatatgcacgccgataggtgctgcgtcgcatctgcagtgtgggcagtgacttcctgt

SEQ ID NO: 40417 - DNA, 50 bp, Artificial
  Synthetic oligonucleotide
gtgacttcctgtaatgtataaaaagaccgcacaagcgccgttatattatt

SEQ ID NO: 40418 - DNA, 60 bp, Artificial
  Synthetic oligonucleotide
cacctgatcgttgaaacgcaacgtgattggaagacagaagtcatcgtcttgattggtccg

SEQ ID NO: 40419 - DNA, 60 bp, Artificial
  Synthetic oligonucleotide
tcgtcggagaggaaaagggcgcgaacggtacacctcaccttcagggattcctgaatctcc

SEQ ID NO: 40420 - DNA, 60 bp, Artificial
  Synthetic oligonucleotide
ttcctgaatgtccgaagcaatgcgagagctgccgcccttgaagagtcgctgggaggagga

SEQ ID NO: 40421 - DNA, 60 bp, Artificial
  Synthetic oligonucleotide
caccttcagggattcctgaatctccgaagcaatgcgagagctgccgcccttgaagagtcg

SEQ ID NO: 40422 - DNA, 60 bp, Artificial
  Synthetic oligonucleotide
cgcaatcgtcggagaggaaaagggcgcgaacggtacacctcaccttcagggattcctgaa

SEQ ID NO: 40423 - DNA, 60 bp, Artificial
  Synthetic oligonucleotide
attgcaagttcgcaatcgtcggagaggaaaagggcgcgaacggtacacctcaccttcagg

SEQ ID NO: 40424 - DNA, 57 bp, Artificial
  Synthetic oligonucleotide
atagaagtgagttcgatctgtccgccttatatcggcgcattaataagtatcttgtct

SEQ ID NO: 40425 - DNA, 60 bp, Artificial
  Synthetic oligonucleotide
ggttaaggttaggacaggaccacgtttatgcctagaacccggtgaactgaccaaacttga

SEQ ID NO: 40426 - DNA, 60 bp, Artificial
  Synthetic oligonucleotide
gtatcgtctgtggattctcgatgggtcccatgttctccggctgcttgttgatccgtacgg

SEQ ID NO: 40427 - DNA, 60 bp, Artificial
  Synthetic oligonucleotide
aatgtaccacttggtcttgactgcaatttatccaggtgaagtttttacctcctaggaaaa

SEQ ID NO: 40428 - DNA, 60 bp, Artificial
  Synthetic oligonucleotide
gatcacaactagcaacaaagagccccgtgattggtatagaagtgagttcgatctgtccgc

SEQ ID NO: 40429 - DNA, 60 bp, Artificial
  Synthetic oligonucleotide
ggcagctggttatggtgaacactcgaaagggatatacacttgggcagctgggttaaggtt

SEQ ID NO: 40430 - DNA, 60 bp, Artificial
  Synthetic oligonucleotide
tccggctgcttgttgatccgtacgggtcaatggcccatcctgtagttgatgtcctcacga

SEQ ID NO: 40431 - DNA, 60 bp, Artificial
  Synthetic oligonucleotide
gatccgtacgggtcaatggcccatcctgtagttgatgtcctcacgatttgcccgtccttg

SEQ ID NO: 40432 - DNA, 60 bp, Artificial
  Synthetic oligonucleotide
ccccgcttgctccctcccctttccaataaactactgagacaaagttgtcgttttatgtct

SEQ ID NO: 40433 - DNA, 60 bp, Artificial
  Synthetic oligonucleotide
gaacctgcccccgcttgttccctcccctttccaataaactactgagacaaagttgtcgtt

SEQ ID NO: 40434 - DNA, 60 bp, Artificial
  Synthetic oligonucleotide
tgttgctaagacgttgatcataactagcaacaaagagccccgtgattggtatagaagtga

SEQ ID NO: 40435 - DNA, 60 bp, Artificial
  Synthetic oligonucleotide
cattggggttccttcaaagggtaaccggagtgaccttgccggagctgttgccgccgtgaa

SEQ ID NO: 40436 - DNA, 60 bp, Artificial
  Synthetic oligonucleotide
caccattggggagccagttcaaggcaaccggagtgaccttgccggagctgttgccgccgt

SEQ ID NO: 40437 - DNA, 60 bp, Artificial
  Synthetic oligonucleotide
tcgagaaagcgaaaggaaccgaccagcagaataaagaatactgcagtaaagaaggccaca

SEQ ID NO: 40438 - DNA, 60 bp, Artificial
  Synthetic oligonucleotide
gttaagtggggggtctttaagattaaattctctgaattgtacatacatggttacacggat

SEQ ID NO: 40439 - DNA, 60 bp, Artificial
  Synthetic oligonucleotide
cgtggcccggaagtacccgacgacttatgtaatgtttgggcggggcttagagcgattgcg

SEQ ID NO: 40440 - DNA, 60 bp, Artificial
  Synthetic oligonucleotide
cccggaagtacccgacgacttatgtaatgtttgggcggggcttagagcggttgcgtcagc

SEQ ID NO: 40441 - DNA, 60 bp, Artificial
  Synthetic oligonucleotide
aacgtttgtcagaaatttccgcgggctggctgaacttttgaaagtgagcgggaaaatgca

SEQ ID NO: 40442 - DNA, 60 bp, Artificial
  Synthetic oligonucleotide
gcccgctgccacatcgagaaagcgaaaggaacagatcagcagaataaagaatactgcagc

SEQ ID NO: 40443 - DNA, 60 bp, Artificial
  Synthetic oligonucleotide
ggagtctggtgaccgttgcagagcagcaccctgtaacgtttgtcagaaatttccgcgggc

SEQ ID NO: 40444 - DNA, 60 bp, Artificial
  Synthetic oligonucleotide
gggagtctggtgaccgttgcagagcagcaccctgtaacgtttgtcagaaatttccgcggg

SEQ ID NO: 40445 - DNA, 60 bp, Artificial
  Synthetic oligonucleotide
cgtagtcgtcatggacgacttttatggttgggtaccttacgatgatctgcttcggatcac

SEQ ID NO: 40446 - DNA, 60 bp, Artificial
  Synthetic oligonucleotide
cgtagtcgtcatggacgacttttatggttgggtaccttacgatgacctgcttcgcatcac

SEQ ID NO: 40447 - DNA, 60 bp, Artificial
  Synthetic oligonucleotide
cgtagtcgtcatggacgacttttatggttggttgccttatgatgatttgctgagaattac

SEQ ID NO: 40448 - DNA, 60 bp, Artificial
  Synthetic oligonucleotide
ctacagaacagtccacggaggaagggggccagttcgtcaccctttcccccccatgccctg

SEQ ID NO: 40449 - DNA, 60 bp, Artificial
  Synthetic oligonucleotide
ctatgggtggctgcccttctgtgaaatgttgagattaatggacaggtatccacataaagt

SEQ ID NO: 40450 - DNA, 60 bp, Artificial
  Synthetic oligonucleotide
ggatcgaagttctacaagatgaaaggtgactggtgggatgggtattccaatgaggatata

SEQ ID NO: 40451 - DNA, 60 bp, Artificial
  Synthetic oligonucleotide
agcgagatctacgtcaagtatgggcgtggtctgagggatttggccctgatgattggacag

SEQ ID NO: 40452 - DNA, 60 bp, Artificial
  Synthetic oligonucleotide
cctggtgagttccactttgcaatatgtgggaaggaacggggggagcagggaactcctcat

SEQ ID NO: 40453 - DNA, 60 bp, Artificial
  Synthetic oligonucleotide
aactcctcatttgcagggctttctacattttaaaaagaagcagcgacttagtgccctgaa

SEQ ID NO: 40454 - DNA, 60 bp, Artificial
  Synthetic oligonucleotide
ggagccaaaggtcgtcgtctcctagcaacctggttaaaggttaaccacatccgggttaat

SEQ ID NO: 40455 - DNA, 60 bp, Artificial
  Synthetic oligonucleotide
ttgccgccgtgaaggccggaaggagaatggtggatatcgcgcgagagttcagcgagatct

SEQ ID NO: 40456 - DNA, 60 bp, Artificial
  Synthetic oligonucleotide
gccgtgaaggccggaaggagaatggtggatatcgcgcgagagttcagcgagatctacgtc

SEQ ID NO: 40457 - DNA, 60 bp, Artificial
  Synthetic oligonucleotide
gtgccctgaagaaactacttgcccgagctcactgggaaaaggcccgtggctcagatcatg

SEQ ID NO: 40458 - DNA, 60 bp, Artificial
  Synthetic oligonucleotide
gtcaagtatgggcgtggtctgagggatttggccctgatgattggacagaaaccccgtgac

SEQ ID NO: 40459 - DNA, 60 bp, Artificial
  Synthetic oligonucleotide
tccaattgatagtaccccaatccagaaagtcatccagtataatgttgattccatcagttc

SEQ ID NO: 40460 - DNA, 60 bp, Artificial
  Synthetic oligonucleotide
gattggacagaaaccccgtgacttcaagacggaagtcgtcgttatcacggggccttccgg

SEQ ID NO: 40461 - DNA, 60 bp, Artificial
  Synthetic oligonucleotide
accggccacttggagccacggagccaccacaatggcacctgttagagctgctgctgcaaa

SEQ ID NO: 40462 - DNA, 60 bp, Artificial
  Synthetic oligonucleotide
tgctaacctgattctataatcttcaaaaggtaacctccaattgatagtaccccaatccag

SEQ ID NO: 40463 - DNA, 60 bp, Artificial
  Synthetic oligonucleotide
tgtggagttcacgtctaagaagattgtcataacgagcaacacgcacccggaaagttggta

SEQ ID NO: 40464 - DNA, 58 bp, Artificial
  Synthetic oligonucleotide
gattggacagaaaccccgtgacttcaagacggaagtcgtcgttatcacggggccttcc

SEQ ID NO: 40465 - DNA, 60 bp, Artificial
  Synthetic oligonucleotide
gaggagtattgtagtaaggaaaacgacgtgatactcaccattggggagccagttcaaggc

SEQ ID NO: 40466 - DNA, 60 bp, Artificial
  Synthetic oligonucleotide
attggggagccagttcaaggcaaccggagtgaccttgccggagctgttgccgccgtgaag

SEQ ID NO: 40467 - DNA, 60 bp, Artificial
  Synthetic oligonucleotide
agtaccccaatccagaaagtcatccagtataatgttgattccatcagttccaaatgacag

SEQ ID NO: 40468 - DNA, 60 bp, Artificial
  Synthetic oligonucleotide
tctcatttccacttttgctaacctgattctataatcttcaaaaggtaacctccaattgat

SEQ ID NO: 40469 - DNA, 60 bp, Artificial
  Synthetic oligonucleotide
tcagatcatgataacgaggagtattgtagtaaggaaaacgacgtgatactcaccattggg

SEQ ID NO: 40470 - DNA, 60 bp, Artificial
  Synthetic oligonucleotide
ggagccacggagccaccacaatggcacctgttagagctgctgctgcaaagagatggtgct

SEQ ID NO: 40471 - DNA, 60 bp, Artificial
  Synthetic oligonucleotide
cacgtctaagaagattgtcataacgagcaacacgcacccggaaagttggtactgtcccga

SEQ ID NO: 40472 - DNA, 60 bp, Artificial
  Synthetic oligonucleotide
ccttgacctggtagtccatctggttgggggtgggttctggccaactgaaggctaacccgt

SEQ ID NO: 40473 - DNA, 60 bp, Artificial
  Synthetic oligonucleotide
gccgaaggccccgaagaaagctattttgtaccccccatcaaataaaaagacttcagacaa

SEQ ID NO: 40474 - DNA, 60 bp, Artificial
  Synthetic oligonucleotide
aggccgaaggccgaagccgcctgagaccgcgcgaagcgcggccaggcgcgagcgacagcg

SEQ ID NO: 40475 - DNA, 53 bp, Artificial
  Synthetic oligonucleotide
aaagttggtactgtcccgataagtgctatctgcctgctttgttcaggagaatc

SEQ ID NO: 40476 - DNA, 60 bp, Artificial
  Synthetic oligonucleotide
ccatttacgggccccgtcccagttcgctagggggtcagcatcaagtcttgtctttttgaa

SEQ ID NO: 40477 - DNA, 60 bp, Artificial
  Synthetic oligonucleotide
ggtttaaatagccttttgaagccttttctgagatcccatttacgggccccgtcccagttc

SEQ ID NO: 40478 - DNA, 60 bp, Artificial
  Synthetic oligonucleotide
cttagttgtggtcttggtttaaatagccttttgaagccttttctgagatcccatttacgg

SEQ ID NO: 40479 - DNA, 60 bp, Artificial
  Synthetic oligonucleotide
gctaacccgtagtgtttgaccctggttccggagctgggaaggttctggtcacttttcttc

SEQ ID NO: 40480 - DNA, 60 bp, Artificial
  Synthetic oligonucleotide
gtgcccgaaccctttccactcctcccagctttcattgaggggtctcatttccacttttgc

SEQ ID NO: 40481 - DNA, 60 bp, Artificial
  Synthetic oligonucleotide
ggtacattgtgcccgaaccctttccactcctcccagctttcattgaggggtctcatttcc

SEQ ID NO: 40482 - DNA, 60 bp, Artificial
  Synthetic oligonucleotide
taatgcgcgagctgccgcccttgaggagtcgctgggaggaagagcctggctctctcgtgc

SEQ ID NO: 40483 - DNA, 60 bp, Artificial
  Synthetic oligonucleotide
agtaatgcgcgagctgccgcccttgaggagtcgctgggaggaagagcctggctctctcgt

SEQ ID NO: 40484 - DNA, 60 bp, Artificial
  Synthetic oligonucleotide
aaagagggagacgtggtacttaccctgggcattgtggcgagagacggtcaccgcgctttc

SEQ ID NO: 40485 - DNA, 60 bp, Artificial
  Synthetic oligonucleotide
gatacttaccctgggcattgtggcgagagacggtcaccgcgctttcgatggagctgttgc

SEQ ID NO: 40486 - DNA, 60 bp, Artificial
  Synthetic oligonucleotide
gacgttatactcaccctgggcattgtggcgagagacggtcaccgcgcgttcgacggagct

SEQ ID NO: 40487 - DNA, 60 bp, Artificial
  Synthetic oligonucleotide
tacttaccctgggcattgtggcgagagacggtcaccgcgctttcgatggagctgttgctg

SEQ ID NO: 40488 - DNA, 60 bp, Artificial
  Synthetic oligonucleotide
tacttaccctgggcattgtggcgagagacggtcaccgcgctttcgatcgagctgttgctg

SEQ ID NO: 40489 - DNA, 60 bp, Artificial
  Synthetic oligonucleotide
ttatacttaccctgggcattgtggcgagagacggtcaccgcgcgttcgacggagctgttg

SEQ ID NO: 40490 - DNA, 60 bp, Artificial
  Synthetic oligonucleotide
ttatactcaccctgggcattgtggcgagagacggtcaccgcgcgttcgacggagctgttg

SEQ ID NO: 40491 - DNA, 60 bp, Artificial
  Synthetic oligonucleotide
atacttaccctgggcattgtggcgagagacggtcaccgcgcgttcgatggagctgttgct

SEQ ID NO: 40492 - DNA, 60 bp, Artificial
  Synthetic oligonucleotide
atacttaccctgggcattgtggcgagagacggtcaccgcgctttcgacggagctgttgct

SEQ ID NO: 40493 - DNA, 50 bp, Artificial
  Synthetic oligonucleotide
atggtattttggtgcccgctgccacatcgagaaagcgaaagggactgatc

SEQ ID NO: 40494 - DNA, 60 bp, Artificial
  Synthetic oligonucleotide
ctggtgaccgttgcagagcagcaccctgtaacgtttgtcagaaatttccgcgggctggct

SEQ ID NO: 40495 - DNA, 60 bp, Artificial
  Synthetic oligonucleotide
tggtgaccgttgcagagcagcaccctgtaacgtttgtcagaaatttccgcgggctggctg

SEQ ID NO: 40496 - DNA, 60 bp, Artificial
  Synthetic oligonucleotide
gaagtcgcgcgagacttcagtgagatatacgtcaaatatgggcgtggcttgcgcgacctg

SEQ ID NO: 40497 - DNA, 60 bp, Artificial
  Synthetic oligonucleotide
gcggtgaaagccggaagagcaatggccgaggtcgcgcgagacttcagtgagatatacgtc

SEQ ID NO: 40498 - DNA, 60 bp, Artificial
  Synthetic oligonucleotide
ttcctgcgaagggaaaccggagcgatctcagcgaggctgttgccgcggtgaaagccggaa

SEQ ID NO: 40499 - DNA, 60 bp, Artificial
  Synthetic oligonucleotide
gaggtcgcgcgagacttcagtgagatatacgtcaagtatgggcgtggcttgcgtgacctc

SEQ ID NO: 40500 - DNA, 60 bp, Artificial
  Synthetic oligonucleotide
gaggtcgcgcgagacttcagtgagatatacgtcaaatatgggcgtggcttgcgcgacctg

SEQ ID NO: 40501 - DNA, 60 bp, Artificial
  Synthetic oligonucleotide
cgacggagctgttgctgccgtgatgtccggacgtaaaatgaaggaagtcgcgcgagagtt

SEQ ID NO: 40502 - DNA, 60 bp, Artificial
  Synthetic oligonucleotide
cgacggagctgttgctgccgtgatgtccggacgcaaaatgacggaagtcgcgcgagagtt

SEQ ID NO: 40503 - DNA, 60 bp, Artificial
  Synthetic oligonucleotide
cgctttcgatggagctgttgctgccgtgatgtccggacgcaaaatgaaggaagtcgcgcg

SEQ ID NO: 40504 - DNA, 60 bp, Artificial
  Synthetic oligonucleotide
accgcgctttcgacggagctgttgctgccgtgatgtccggacgcaaaatgaaggaagtcg

SEQ ID NO: 40505 - DNA, 60 bp, Artificial
  Synthetic oligonucleotide
agagacggtcaccgcgctttcgatggagctgttgctgccgtgatgtccggacgcaaaatg

SEQ ID NO: 40506 - DNA, 60 bp, Artificial
  Synthetic oligonucleotide
tggcgagagacggtcaccgcgctttcgacggagctgttgctgccgtgatgtccggacgca

SEQ ID NO: 40507 - DNA, 60 bp, Artificial
  Synthetic oligonucleotide
ccgcgggctggctgaacttttgaaagtgagcgggaagatgcagcagcgtgattggaagac

SEQ ID NO: 40508 - DNA, 60 bp, Artificial
  Synthetic oligonucleotide
agttcagtgaagtctacgtcaagtatgggcgtggcttacgtgaactggcgcttctgattg

SEQ ID NO: 40509 - DNA, 60 bp, Artificial
  Synthetic oligonucleotide
ttgttggagagcgggagtctggtgaccgttgcagagcagcaccctgtaacctttgtcaga

SEQ ID NO: 40510 - DNA, 60 bp, Artificial
  Synthetic oligonucleotide
ttggtgcccgctgccacatcgagaaagcgaaaggaacagatcagcagaataaagaatact

SEQ ID NO: 40511 - DNA, 60 bp, Artificial
  Synthetic oligonucleotide
tgggtgcccgctgccacatcgagaaagcgaaaggaacagatcagcagaataaagaatact

SEQ ID NO: 40512 - DNA, 60 bp, Artificial
  Synthetic oligonucleotide
gggctggctgaacttttgaaagtgagcgggaaaatgcagaagcgtgattggaagactaat

SEQ ID NO: 40513 - DNA, 55 bp, Artificial
  Synthetic oligonucleotide
ttttggcccgcagtattttgattaccagcaatcagaccccgttggaatggtactc

SEQ ID NO: 40514 - DNA, 50 bp, Artificial
  Synthetic oligonucleotide
gggcccgcctggttgcgggaagagccgttgggcagctgactaccccggaa

SEQ ID NO: 40515 - DNA, 60 bp, Artificial
  Synthetic oligonucleotide
gcatgatgggcagtggcttcctgtgggcggggacaaaaccgttacaggcgccgtatatat

SEQ ID NO: 40516 - DNA, 53 bp, Artificial
  Synthetic oligonucleotide
tggctgccctcctacgacgataatatagactccgcggtctcgcgcgatacagc

SEQ ID NO: 40517 - DNA, 60 bp, Artificial
  Synthetic oligonucleotide
cgcagactggtacaaggaggactgtgacccgaagccactgttccggagattcacccgtgt

SEQ ID NO: 40518 - DNA, 60 bp, Artificial
  Synthetic oligonucleotide
tgccggagctgttgccgccgtgaaagccggaagaggtatggccgaagtcgcgcgagagtt

SEQ ID NO: 40519 - DNA, 60 bp, Artificial
  Synthetic oligonucleotide
ccgcgggctggctgaacttttgaaagtgagcgggagaatgcagaagcgtgattggaagac

SEQ ID NO: 40520 - DNA, 60 bp, Artificial
  Synthetic oligonucleotide
ccgcgggctggctgaacttttgaaagtgagcgggagaatgcagaagcgggattggaagac

SEQ ID NO: 40521 - DNA, 60 bp, Artificial
  Synthetic oligonucleotide
ccgcgggctggctgaacttttgaaagtgagcggggaaatgcagaagcgtgattggaagac

SEQ ID NO: 40522 - DNA, 60 bp, Artificial
  Synthetic oligonucleotide
ccgcgggctggctgaacttttgaaagtgagcgggaaaatgcagaagcgtgattggaaggc

SEQ ID NO: 40523 - DNA, 60 bp, Artificial
  Synthetic oligonucleotide
cgcgggctggctgaacttttgaaagtgagcgggaaaatgcagaagcgtgattggaagacc

SEQ ID NO: 40524 - DNA, 60 bp, Artificial
  Synthetic oligonucleotide
ccgtgggctggctgaacttttgaaagtgagcgggaaaatgcagaagcgtgattggaagac

SEQ ID NO: 40525 - DNA, 60 bp, Artificial
  Synthetic oligonucleotide
ccgcgggctggctgaacttttgaaagtgagcgggaaaatgcagaagcgtgattggaagac

SEQ ID NO: 40526 - DNA, 60 bp, Artificial
  Synthetic oligonucleotide
tccgcgggctggctgaacttttgaaagtgagcgggaaaatgcagaagcgtgattggaaga

SEQ ID NO: 40527 - DNA, 60 bp, Artificial
  Synthetic oligonucleotide
gcccgctgccacatcgagaaagcgaaaggaaccgaccaccagaataaagaatactgcagt

SEQ ID NO: 40528 - DNA, 60 bp, Artificial
  Synthetic oligonucleotide
ttggtgcccgctgccacatcgagaaagcgaaaggaacagaccagcagaataaagaatact

SEQ ID NO: 40529 - DNA, 60 bp, Artificial
  Synthetic oligonucleotide
tgggtgcccgctgccacatcgagaaagcgaaaggaacggatcagcagaataaagaatact

SEQ ID NO: 40530 - DNA, 60 bp, Artificial
  Synthetic oligonucleotide
ggctggctgaacttttgaaagtgagcgggaaaatgcagaagcgtgattggaagactaatg

SEQ ID NO: 40531 - DNA, 58 bp, Artificial
  Synthetic oligonucleotide
gcgctaaagggagcgatgcggataatgagaagtattgcagtaaagagggggacgttat

SEQ ID NO: 40532 - DNA, 60 bp, Artificial
  Synthetic oligonucleotide
gcgctaaagggagcgatgcggataatgagaagtattgcagtaaagagggggacgttatac

SEQ ID NO: 40533 - DNA, 60 bp, Artificial
  Synthetic oligonucleotide
gctacagaacaatccacggaggaagggggccagttcgtcaccctttcccccccatgcccg

SEQ ID NO: 40534 - DNA, 60 bp, Artificial
  Synthetic oligonucleotide
gcgtttgaatttcccgcccgcgaaaagtactataaatctcgcgggaagtggtgggatggc

SEQ ID NO: 40535 - DNA, 60 bp, Artificial
  Synthetic oligonucleotide
gcgtttgaatttcccgcccgcgaaaagtactataaatctcgcgggaagtggtgggatggg

SEQ ID NO: 40536 - DNA, 60 bp, Artificial
  Synthetic oligonucleotide
tggctgcgggggcgggtccttcttctgcggtaacgcctccttggatacgtcatagctgaa

SEQ ID NO: 40537 - DNA, 60 bp, Artificial
  Synthetic oligonucleotide
ccgcgggctggctgaacttttgaaagtgagcgggaaaatgcagaggcgtgattggaagac

SEQ ID NO: 40538 - DNA, 60 bp, Artificial
  Synthetic oligonucleotide
ccgcgggctggctgaacttttgaaagtgagcgggaaaatgcaggagcgtgattggaagac

SEQ ID NO: 40539 - DNA, 60 bp, Artificial
  Synthetic oligonucleotide
ccgcgggctggctgaacttttgaaagtgagcgggaaaatgcaaaagcgtgattggaaaac

SEQ ID NO: 40540 - DNA, 60 bp, Artificial
  Synthetic oligonucleotide
agcagaataaagaatactgcagtaaagaaggcaacttacttatacagtgtggagctccta

SEQ ID NO: 40541 - DNA, 60 bp, Artificial
  Synthetic oligonucleotide
aaacggcaactactcttacaagaggtgggtcttcactattaataaccctacctttgaaga

SEQ ID NO: 40542 - DNA, 55 bp, Artificial
  Synthetic oligonucleotide
gtttgtcagaaatttccgcgggctggctgaacttttgaaagtgagcgggaaaatg

SEQ ID NO: 40543 - DNA, 60 bp, Artificial
  Synthetic oligonucleotide
gtttgtcagaaatttccgcgggctggctgaacttttgaaagcgagcgggaaaatgcagaa

SEQ ID NO: 40544 - DNA, 60 bp, Artificial
  Synthetic oligonucleotide
gtttgtcagaaatttccgcgggctggctgaacttttgaaagtgagcggggaaatgcagaa

SEQ ID NO: 40545 - DNA, 60 bp, Artificial
  Synthetic oligonucleotide
gtttgtcagaaatttccgcgggctggctgaacttttgaaagtgagcgggagaatgcagaa

SEQ ID NO: 40546 - DNA, 60 bp, Artificial
  Synthetic oligonucleotide
ggtacaaggaggactgtgacccgaagccactgttccggagattcacacgtgtttggtggt

SEQ ID NO: 40547 - DNA, 60 bp, Artificial
  Synthetic oligonucleotide
gagacgtggtacaaggaggactgtgacccgaagccactgttccggagattcacacgtgtt

SEQ ID NO: 40548 - DNA, 60 bp, Artificial
  Synthetic oligonucleotide
ggtacaaggaggactgtgacccgaagccactgttccggagattcactcgtgtttggtggt

SEQ ID NO: 40549 - DNA, 60 bp, Artificial
  Synthetic oligonucleotide
gagacctggtacaaggaggactgtgacccgaagccactgttccggagattcactcgtgtt

SEQ ID NO: 40550 - DNA, 60 bp, Artificial
  Synthetic oligonucleotide
aggaaccgaccagcagaataaagaatactgcagtaaagaaggtcacatacttatcgagtg

SEQ ID NO: 40551 - DNA, 57 bp, Artificial
  Synthetic oligonucleotide
gctaagagtggcaactactcctacaaaaggtgggtctttactattaataaccctacc

SEQ ID NO: 40552 - DNA, 60 bp, Artificial
  Synthetic oligonucleotide
gctaagagtggcaactactcctacaaaaggtgggtctttactattaataaccctaccttt

SEQ ID NO: 40553 - DNA, 60 bp, Artificial
  Synthetic oligonucleotide
acggtatgtctggtgactttgaacgtcactactgaaaatcttcgtcttggtcgtccgata

SEQ ID NO: 40554 - DNA, 60 bp, Artificial
  Synthetic oligonucleotide
gtgaagtggtatttgggtgcccgctgccacatcgagaaagcgaaaggaaccgaccagcag

SEQ ID NO: 40555 - DNA, 60 bp, Artificial
  Synthetic oligonucleotide
aacaaggtgaagtggtatttgggtgcccgctgccacatcgagaaagcgaaaggaaccgac

SEQ ID NO: 40556 - DNA, 60 bp, Artificial
  Synthetic oligonucleotide
tgatgcagcccacggactcttgccggttctttaatcaccctaagcaaatgaccctgcaag

SEQ ID NO: 40557 - DNA, 60 bp, Artificial
  Synthetic oligonucleotide
tgggacacatatatgagctttgcaacactcacagcgctcggtgcacaatggtctttccct

SEQ ID NO: 40558 - DNA, 60 bp, Artificial
  Synthetic oligonucleotide
cttaatgatgatgcagcccacggactcttgccggttctttaatcaccctaagcagatgac

SEQ ID NO: 40559 - DNA, 52 bp, Artificial
  Synthetic oligonucleotide
tttcacaacccccgccccggtacgtatagtgtgaggctgccgaacccccaat

SEQ ID NO: 40560 - DNA, 60 bp, Artificial
  Synthetic oligonucleotide
tgggccttaatgatgatgcagcccacggactcttgccggttctttaatcaccctaagcag

SEQ ID NO: 40561 - DNA, 60 bp, Artificial
  Synthetic oligonucleotide
tgcgaccgggaaaatgagacccgacgagcaacagtaccctgctatgcccccagacccccc

SEQ ID NO: 40562 - DNA, 60 bp, Artificial
  Synthetic oligonucleotide
ctacagcgcaaggcacgcaagtccgctgcatgaatagcacgcaagcttggtggtcatggg

SEQ ID NO: 40563 - DNA, 60 bp, Artificial
  Synthetic oligonucleotide
actccacccggaccatcaacggtgttcaggccaccaacaagttcacggccgttggaaacc

SEQ ID NO: 40564 - DNA, 60 bp, Artificial
  Synthetic oligonucleotide
aatcggcgcttagccgagaggggcaacctgggcccagcggagccgcgcaggggcaagtaa

SEQ ID NO: 40565 - DNA, 60 bp, Artificial
  Synthetic oligonucleotide
cgagaggggcaacctgggcccagcggagccgcgcaggggcaagtaatttcaaatgaacgc

SEQ ID NO: 40566 - DNA, 60 bp, Artificial
  Synthetic oligonucleotide
gctgggggcagtgaatcggcgcttagccgagaggggcaacctgggcccagcggagccgcg

SEQ ID NO: 40567 - DNA, 60 bp, Artificial
  Synthetic oligonucleotide
tcaacggtgttcaggccaccaacaagttcacggccgttggaaacccctcactgcagagag

SEQ ID NO: 40568 - DNA, 60 bp, Artificial
  Synthetic oligonucleotide
tatacgcaaggcggtccgggtggatgcacgggaacggcggacaaccggccgctgggggca

SEQ ID NO: 40569 - DNA, 60 bp, Artificial
  Synthetic oligonucleotide
accggtcggcagtaggtatacgcaaggcggtccgggtggatgcacgggaacggcggacaa

SEQ ID NO: 40570 - DNA, 60 bp, Artificial
  Synthetic oligonucleotide
tctccaagaagatactccacccggaccatcaacggtgttcaggccaccaacaagttcacg

SEQ ID NO: 40571 - DNA, 60 bp, Artificial
  Synthetic oligonucleotide
gaagatactccacccggaccatcaacggtgttcaggccaccaacaagttcacggccgttg

SEQ ID NO: 40572 - DNA, 60 bp, Artificial
  Synthetic oligonucleotide
gcggtccgggtggatgcacgggaacggcggacaaccggccgctgggggcagtgaatcggc

SEQ ID NO: 40573 - DNA, 60 bp, Artificial
  Synthetic oligonucleotide
ccgggtggatgcacgggaacggcggacaaccggccgctgggggcagtgaatcggcgctta

SEQ ID NO: 40574 - DNA, 60 bp, Artificial
  Synthetic oligonucleotide
gaccatcaacggtgttcaggccaccaacaagttcacggccgttggaaacccctcactgca

SEQ ID NO: 40575 - DNA, 60 bp, Artificial
  Synthetic oligonucleotide
atccttcagccccgtggcgagtcttctctcccagggagagtacctcacgcgtcgggacga

SEQ ID NO: 40576 - DNA, 60 bp, Artificial
  Synthetic oligonucleotide
ttttcctccagggcaacgttcagtttctagacggtccttcaaccaccacaaagcgagagg

SEQ ID NO: 40577 - DNA, 60 bp, Artificial
  Synthetic oligonucleotide
tgcaacactcacagcactcggtgcacaatggtctttccctccagggcaacgttcagtttc

SEQ ID NO: 40578 - DNA, 60 bp, Artificial
  Synthetic oligonucleotide
cggtatcgtagacgagcttttaggaaggcctttcacaacccccgccccggtacgtatagt

SEQ ID NO: 40579 - DNA, 60 bp, Artificial
  Synthetic oligonucleotide
ggtcttttcctccagggcaacgttcagtttctagacggtccttcaaccaccacaaggcga

SEQ ID NO: 40580 - DNA, 60 bp, Artificial
  Synthetic oligonucleotide
cagcactcggtgcacaatggtcttttcctccagggcaacgttcagtttctagacggtcct

SEQ ID NO: 40581 - DNA, 60 bp, Artificial
  Synthetic oligonucleotide
gcaagtaatttcaaatgaacgctctccaagaagatactccacccggaccatcaacggtgt

SEQ ID NO: 40582 - DNA, 60 bp, Artificial
  Synthetic oligonucleotide
ggggcattgcttatgcgaccgggaaaatgagacccgacgagcaacagtaccctgctatgc

SEQ ID NO: 40583 - DNA, 60 bp, Artificial
  Synthetic oligonucleotide
gagctttgcaacactcacagcactcggtgcacaatggtctttccctccagggcaacgttc

SEQ ID NO: 40584 - DNA, 60 bp, Artificial
  Synthetic oligonucleotide
tcaaatgaacgctctccaagaagatactccacccggaccatcaacggtgttcaggccacc

SEQ ID NO: 40585 - DNA, 60 bp, Artificial
  Synthetic oligonucleotide
cctgggcccagcggagccgcgcaggggcaagtaatttcaaatgaacgctctccaagaaga

SEQ ID NO: 40586 - DNA, 60 bp, Artificial
  Synthetic oligonucleotide
gccgcgcaggggcaagtaatttcaaatgaacgctctccaagaagatactccacccggacc

SEQ ID NO: 40587 - DNA, 60 bp, Artificial
  Synthetic oligonucleotide
acccgctttcagctccttgccactaagaatgagggatccttcagccccgtggcgagtctt

SEQ ID NO: 40588 - DNA, 60 bp, Artificial
  Synthetic oligonucleotide
ctccttgccactaagaatgagggatccttcagccccgtggcgagtcttctctcccaggga

SEQ ID NO: 40589 - DNA, 60 bp, Artificial
  Synthetic oligonucleotide
ggcgaacaaccgatgacggggggtattgcttatgcgaccgggaaaatgagacccgacgag

SEQ ID NO: 40590 - DNA, 60 bp, Artificial
  Synthetic oligonucleotide
tgaacgctctccaagaagatactccacccggaccatcaacggtgttcaggccaccaacaa

SEQ ID NO: 40591 - DNA, 60 bp, Artificial
  Synthetic oligonucleotide
aagaggcgttcccgtacaggggggtacgtcacgcgtacaggggggtacgtcacagccaat

SEQ ID NO: 40592 - DNA, 60 bp, Artificial
  Synthetic oligonucleotide
gaaggcggggggccggaggccccccggtggcccccctccagcgagtggagcatgtacagg

SEQ ID NO: 40593 - DNA, 60 bp, Artificial
  Synthetic oligonucleotide
gggtacgtcacaaaaaggcgttcccgtacaggggggtacgtcacgcgtacaggggggtac

SEQ ID NO: 40594 - DNA, 60 bp, Artificial
  Synthetic oligonucleotide
cgttcccgtacaggggggtacgtcacgcgtacaggggggtacgtcacagccaatcagaag

SEQ ID NO: 40595 - DNA, 60 bp, Artificial
  Synthetic oligonucleotide
ggacaaccggccgctgggggcagtgaatcggcgcttagccgagaggggcaacctgggccc

SEQ ID NO: 40596 - DNA, 60 bp, Artificial
  Synthetic oligonucleotide
acaggggggtacgtcacgcgtacaggggggtacgtcacagccaatcagaagctgccacgt

SEQ ID NO: 40597 - DNA, 60 bp, Artificial
  Synthetic oligonucleotide
acgggaacggcggacaaccggccgctgggggcagtgaatcggcgcttagccgagaggggc

SEQ ID NO: 40598 - DNA, 60 bp, Artificial
  Synthetic oligonucleotide
cgcacataccggtcggcagtaggtatacgcaaggcggtccgggtggatgcacgggaacgg

SEQ ID NO: 40599 - DNA, 60 bp, Artificial
  Synthetic oligonucleotide
ctccctcgaagaagcgatcctgcgacccctccgagtacagggtaagcgagctaaaagaaa

SEQ ID NO: 40600 - DNA, 54 bp, Artificial
  Synthetic oligonucleotide
gaattacaatcactctatcgctgtgtggctgcgcgaatgctcgcgctcccacgc

SEQ ID NO: 40601 - DNA, 60 bp, Artificial
  Synthetic oligonucleotide
cagggtaagcgagctaaaagaaagcttgattaccactactcccagccgaccccgaaccgc

SEQ ID NO: 40602 - DNA, 60 bp, Artificial
  Synthetic oligonucleotide
gacccctccgagtacagggtaagcgagctaaaagaaagcttgattaccactactcccagc

SEQ ID NO: 40603 - DNA, 60 bp, Artificial
  Synthetic oligonucleotide
gtcaagatggacgaatcgctcgacttcgctcgcgattcgtcgaaggcggggggccggagg

SEQ ID NO: 40604 - DNA, 60 bp, Artificial
  Synthetic oligonucleotide
atattgagcgcacataccggtcggcagtaggtatacgcaaggcggtccgggtggatgcac

SEQ ID NO: 40605 - DNA, 60 bp, Artificial
  Synthetic oligonucleotide
cttcgctcgcgattcgtcgaaggcggggggccggaggccccccggtggcccccccccaac

SEQ ID NO: 40606 - DNA, 60 bp, Artificial
  Synthetic oligonucleotide
tagtgcttgactttcgctcctgccgcgttgggtcctccttgtagtgggatccagccggtt

SEQ ID NO: 40607 - DNA, 60 bp, Artificial
  Synthetic oligonucleotide
cgagaaagcgaaaggaaccgaccagcagaataaagaatactgcagtaaagaaggccacat

SEQ ID NO: 40608 - DNA, 60 bp, Artificial
  Synthetic oligonucleotide
tctccggttggttgcccgcctacgacgataatatagactccgcggtctcgcgcgatacag

SEQ ID NO: 40609 - DNA, 60 bp, Artificial
  Synthetic oligonucleotide
tctgcggttggttgcccgcctacgacgagaatatagactccgcggtctcgcgcgatacag

SEQ ID NO: 40610 - DNA, 60 bp, Artificial
  Synthetic oligonucleotide
tccaagatggctgcgggggcgggtccttcttctgcggtaacgcctccgtggccacgtcat

SEQ ID NO: 40611 - DNA, 60 bp, Artificial
  Synthetic oligonucleotide
gacgttatacttaccctgggcattgtggcgagagacggtcaccgcgctttcgacggagct

SEQ ID NO: 40612 - DNA, 60 bp, Artificial
  Synthetic oligonucleotide
gacgttatacttaccctgggcattgtggcgagagacggtcaccgcgctttcgatcgagct

SEQ ID NO: 40613 - DNA, 60 bp, Artificial
  Synthetic oligonucleotide
gacgttatacttaccctgggcattgtggcgagagacggtcaccgcgcgttcgacggagct

SEQ ID NO: 40614 - DNA, 60 bp, Artificial
  Synthetic oligonucleotide
gacgttatacttaccctgggcattgtggcgagagacggtcaccgcgcgttcgatggagct

SEQ ID NO: 40615 - DNA, 60 bp, Artificial
  Synthetic oligonucleotide
gatgttatacttaccctgggcattgtggcgagagacggtcaccgcgctttcgacggagct

SEQ ID NO: 40616 - DNA, 60 bp, Artificial
  Synthetic oligonucleotide
gggacgtaatacttaccctgggcattgtggcgagagacggtcaccgcgctttcgacggag

SEQ ID NO: 40617 - DNA, 60 bp, Artificial
  Synthetic oligonucleotide
gacgtcatacttaccctgggcattgtggcgagagacggtcaccgcgctttcgatggagct

SEQ ID NO: 40618 - DNA, 60 bp, Artificial
  Synthetic oligonucleotide
gacgtgatacttaccctgggcattgtggcgagagacggtcaccgcgctttcgacggagct

SEQ ID NO: 40619 - DNA, 60 bp, Artificial
  Synthetic oligonucleotide
taaagagggggacgtgatacttaccctgggcattgtggcgagagacggtcaccgcgcttt

SEQ ID NO: 40620 - DNA, 60 bp, Artificial
  Synthetic oligonucleotide
aagagggggacgtgatacttaccctgggcattgtggcgagagacggtcaccgcgctttcg

SEQ ID NO: 40621 - DNA, 60 bp, Artificial
  Synthetic oligonucleotide
ctgtaccctttttggcccgcagtattctgattaccagcaatcagaccccgttggaatggt

SEQ ID NO: 40622 - DNA, 55 bp, Artificial
  Synthetic oligonucleotide
ttttggcccgcagtattctgattaccagcaatcagaccccgttggaatggtaccc

SEQ ID NO: 40623 - DNA, 54 bp, Artificial
  Synthetic oligonucleotide
ttttggcccgcagtattctgattaccagcaatcagaccccgttggaatggtact

SEQ ID NO: 40624 - DNA, 60 bp, Artificial
  Synthetic oligonucleotide
gcagaataaagaatactgcagtaaagaaggcaacttacttatcgagtgtggagctcctag

SEQ ID NO: 40625 - DNA, 60 bp, Artificial
  Synthetic oligonucleotide
cgtcattgtggggccacctgggtgtggtaaaagcaaatgggctgctaattttgcagaccc

SEQ ID NO: 40626 - DNA, 60 bp, Artificial
  Synthetic oligonucleotide
gccgttggtgtttcacccttaacaaccctacagacggcgagatcgaattcgtccgttctc

SEQ ID NO: 40627 - DNA, 60 bp, Artificial
  Synthetic oligonucleotide
gccgttggtgtttcacccttaacaaccctacagacggcgagatcgaattcgtccgtactc

SEQ ID NO: 40628 - DNA, 60 bp, Artificial
  Synthetic oligonucleotide
tgtcgccgttggtgtttcacccttaacaaccctacagacggcgagatcgaattcgtccgt

SEQ ID NO: 40629 - DNA, 60 bp, Artificial
  Synthetic oligonucleotide
gtagtgcttgactttcgttcctgccgcgtcgggtcctccttgtagtgggatccagccggt

SEQ ID NO: 40630 - DNA, 60 bp, Artificial
  Synthetic oligonucleotide
tgcttgactttcgttcctgccgcgtcgggtcctccttgtagtgggatccagccggttctt

SEQ ID NO: 40631 - DNA, 60 bp, Artificial
  Synthetic oligonucleotide
tagtgcttgacgttcgctcctgccgcattgggtcctccttgtagtgggatccagccggtt

SEQ ID NO: 40632 - DNA, 60 bp, Artificial
  Synthetic oligonucleotide
gtagtgcttgacgttcgctcctgccgcattgggtcctccttgtagtgggatccagccggt

SEQ ID NO: 40633 - DNA, 60 bp, Artificial
  Synthetic oligonucleotide
tgcctgacttttgctcctgctgcgttgggtcctccttgtagtgggatccagccggttctg

SEQ ID NO: 40634 - DNA, 60 bp, Artificial
  Synthetic oligonucleotide
cacggaggaagggggccagttcgtcaccctttcccccccatgccctgaatttccatatga

SEQ ID NO: 40635 - DNA, 60 bp, Artificial
  Synthetic oligonucleotide
accaatgtacacgtcattgtggggccacctgggtgtggtaaaagcaaatgggctgctaat

SEQ ID NO: 40636 - DNA, 60 bp, Artificial
  Synthetic oligonucleotide
gtatttgggtgcccgctgccacatcgagaaagcgaaaggaacagatcagcagaataaaga

SEQ ID NO: 40637 - DNA, 60 bp, Artificial
  Synthetic oligonucleotide
gtgaagtggtattttggtgcccgctgccacatcgagaaagcgaaaggaaccgaccagcag

SEQ ID NO: 40638 - DNA, 60 bp, Artificial
  Synthetic oligonucleotide
ccccgagacttggtacaaggaggactgtgacccgaagccactgttccggagattcacacg

SEQ ID NO: 40639 - DNA, 53 bp, Artificial
  Synthetic oligonucleotide
ccccgagacttggtacaaggaggactgtgacccgaagccactgttccggagat

SEQ ID NO: 40640 - DNA, 60 bp, Artificial
  Synthetic oligonucleotide
acgacttatgtaatgtttgggcggggcttagagcgattgcgtcagctgatcgttgagacc

SEQ ID NO: 40641 - DNA, 60 bp, Artificial
  Synthetic oligonucleotide
gctgttgctgccgtgatggccggacgcaaaatgaaggaagtcgcgcgagagttcccagat

SEQ ID NO: 40642 - DNA, 60 bp, Artificial
  Synthetic oligonucleotide
cggagctgttgctgccgtgatgtccggacgtaaaatgaaggaagtcgcgcgagagttccc

SEQ ID NO: 40643 - DNA, 60 bp, Artificial
  Synthetic oligonucleotide
tgtatgaaaaagtaccccatcaactattagccccccacccccatgacactagtaaaggga

SEQ ID NO: 40644 - DNA, 60 bp, Artificial
  Synthetic oligonucleotide
gtttgtcagaaatttccgcgggctggctgaacttttgaaagtgagcgggaaaatgcagag

SEQ ID NO: 40645 - DNA, 60 bp, Artificial
  Synthetic oligonucleotide
gtcagaaatttccgcgggctggctgaacttttgaaagtgagcgggaaaatgcagaagcgt

SEQ ID NO: 40646 - DNA, 60 bp, Artificial
  Synthetic oligonucleotide
cgtttgtcagaaatttccgcgggctggctgaacttttgaaagtgagcgggaaaatgcaga

SEQ ID NO: 40647 - DNA, 60 bp, Artificial
  Synthetic oligonucleotide
gtttgtcagaaatttccgcgggctggctgaacttttgaaagtgagcgggaaaatgcagaa

SEQ ID NO: 40648 - DNA, 60 bp, Artificial
  Synthetic oligonucleotide
gtttgtcagaaatttccgcgggctggctgaacttttgaaagtgagcgggaaaatgcagga

SEQ ID NO: 40649 - DNA, 60 bp, Artificial
  Synthetic oligonucleotide
gtttctcagaaatttccgcgggctggctgaacttttgaaagtgagcgggaaaatgcagaa

SEQ ID NO: 40650 - DNA, 59 bp, Artificial
  Synthetic oligonucleotide
ccccgagacctggtacaaggaggactgtgacccgaagccactgttccggaggttcacac

SEQ ID NO: 40651 - DNA, 60 bp, Artificial
  Synthetic oligonucleotide
tcttctgaatctcctgcgtagaccccgcctcttcctccgaccacgatatgcacgccgata

SEQ ID NO: 40652 - DNA, 60 bp, Artificial
  Synthetic oligonucleotide
acttactctgggcattcctgcgaagggaaaccggagcgaccttagcgaagctgttgccgc

SEQ ID NO: 40653 - DNA, 60 bp, Artificial
  Synthetic oligonucleotide
agagggtaatgttctacttaccctgggcattcctgcgaagggaaaccggagcgaccttag

SEQ ID NO: 40654 - DNA, 60 bp, Artificial
  Synthetic oligonucleotide
tctacttaccctgggcattcctgcgaagggaaaccggagcgaccttagcgaggctgttgc

SEQ ID NO: 40655 - DNA, 60 bp, Artificial
  Synthetic oligonucleotide
acttactctgggcattcctgcgaagggaaaccggagcgatctcagcgaagctgttgccgc

SEQ ID NO: 40656 - DNA, 60 bp, Artificial
  Synthetic oligonucleotide
tctactcaccctgggcattcctgcgaagggaaaccggagcgatctcagtgaggctgttgc

SEQ ID NO: 40657 - DNA, 60 bp, Artificial
  Synthetic oligonucleotide
gcgatctcagtgaggctgttgccgcggtgaaagccggaagagcaatgaccgaggtcgcgc

SEQ ID NO: 40658 - DNA, 60 bp, Artificial
  Synthetic oligonucleotide
gcgatctcagcgaagctgttgccgcggtgaaagccggaagagcaatgaccgaggtcgcgc

SEQ ID NO: 40659 - DNA, 60 bp, Artificial
  Synthetic oligonucleotide
tacttaccctgggcattcctgcgaagggaaaccggagcgatctcagtgaggctgttgccg

SEQ ID NO: 40660 - DNA, 60 bp, Artificial
  Synthetic oligonucleotide
agagggtaatgttctacttactctgggcattcctgcgaagggaaaccggagcgatctcag

SEQ ID NO: 40661 - DNA, 60 bp, Artificial
  Synthetic oligonucleotide
gtgaggctgttgccgcggtgaaagccggaagagcaatgacggaggtcgcgcgagacttca

SEQ ID NO: 40662 - DNA, 60 bp, Artificial
  Synthetic oligonucleotide
gctgttgccgcggtgaaagccggaagagcaatggccgaggtcgcgcgagacttcagtgag

SEQ ID NO: 40663 - DNA, 60 bp, Artificial
  Synthetic oligonucleotide
ctgttgccgcggtgaaagccggaagagcaatgaccgaggtcgcgcgagacttcagtgaga

SEQ ID NO: 40664 - DNA, 60 bp, Artificial
  Synthetic oligonucleotide
tgttgccgcggtgaaagccggaagagcaatgaccgaggtcgcgcgagacttcagtgagat

SEQ ID NO: 40665 - DNA, 60 bp, Artificial
  Synthetic oligonucleotide
gcgaccttagcgaggctgttgccgcggtgaaagccggaagagcaatgaccgaggtcgcgc

SEQ ID NO: 40666 - DNA, 60 bp, Artificial
  Synthetic oligonucleotide
gcgatctcagcgaggctgttgccgcggtgaaagccggaagagcaatgaccgaggtcgcgc

SEQ ID NO: 40667 - DNA, 60 bp, Artificial
  Synthetic oligonucleotide
gaccttagcgaagctgttgccgcggtgaaagccggaagagcaatgaccgaggtcgcgcga

SEQ ID NO: 40668 - DNA, 60 bp, Artificial
  Synthetic oligonucleotide
gtgaggctgttgccgcggtgaaagccggaagagcaatgaccgaggtcgcgcgagacttca

SEQ ID NO: 40669 - DNA, 60 bp, Artificial
  Synthetic oligonucleotide
cagatcatcagaataaagaatactgcagtaaagaaggcaacttactgatggagtgtggag

SEQ ID NO: 40670 - DNA, 60 bp, Artificial
  Synthetic oligonucleotide
caaggtgaagtggtattttggtgcccgctgccacatcgagaaagcgaaaggaaccgacca

SEQ ID NO: 40671 - DNA, 60 bp, Artificial
  Synthetic oligonucleotide
aacaaggtgaagtggtattttggtgcccgctgccacatcgagaaagcgaaaggaaccgac

SEQ ID NO: 40672 - DNA, 60 bp, Artificial
  Synthetic oligonucleotide
ggcctttgtggagttcacgtcgcgcgtgataatagtgaccagcaacagtccccccgatgc

SEQ ID NO: 40673 - DNA, 60 bp, Artificial
  Synthetic oligonucleotide
ttgtggagttcacgtctcgcgtgatcatagtgaccagcaacagtccccccgatgcctggt

SEQ ID NO: 40674 - DNA, 60 bp, Artificial
  Synthetic oligonucleotide
gtgaagtggtatttgggtgcccgctgccacatcgagaaagcgaaaggaacagatcagcag

SEQ ID NO: 40675 - DNA, 60 bp, Artificial
  Synthetic oligonucleotide
ccccgaacatcgcccatctcatgtttaagccgcatatattgttgccacgggccggtgggt

SEQ ID NO: 40676 - DNA, 60 bp, Artificial
  Synthetic oligonucleotide
ctcatgtttaagccgcatatattgttgccacgggccggtgggtctgtgtactgcgcgcca

SEQ ID NO: 40677 - DNA, 60 bp, Artificial
  Synthetic oligonucleotide
aaccgtcgtcggggtcttgcgattcgtagccttcgtcttctgaatctcctgcgtagaccc

SEQ ID NO: 40678 - DNA, 60 bp, Artificial
  Synthetic oligonucleotide
cacttggcagggtattacacttgggcagctcggttaaggttaggcacttggcagggatta

SEQ ID NO: 40679 - DNA, 60 bp, Artificial
  Synthetic oligonucleotide
gttgccacgggccggtgggtctgtgtattgtgcgccatcttctaagcttaagctttgcca

SEQ ID NO: 40680 - DNA, 60 bp, Artificial
  Synthetic oligonucleotide
ttcctccgaccacgatatgcacgccgataggtgcggccgcgcatcggcaacgtgggcagt

SEQ ID NO: 40681 - DNA, 60 bp, Artificial
  Synthetic oligonucleotide
ctgcgcgccatcttctaagcttaagctttgccatttgcctgccgctgtcggacctgtttg

SEQ ID NO: 40682 - DNA, 60 bp, Artificial
  Synthetic oligonucleotide
gcgattcgtagccttcgtcttctgaatctcctacgtagaccccgcctcttccgccgacca

SEQ ID NO: 40683 - DNA, 58 bp, Artificial
  Synthetic oligonucleotide
aaactactgagaccaatttgccgtgagtcgtttattaaggtaaacacttggcagggta

SEQ ID NO: 40684 - DNA, 60 bp, Artificial
  Synthetic oligonucleotide
taaacacttggcagggtattacacttgggcagctcggttaaggttaggcacttggcaggg

SEQ ID NO: 40685 - DNA, 60 bp, Artificial
  Synthetic oligonucleotide
attaaggtaaacacttggcagggtattacacttgggcagctcggttaaggttaggcactt

SEQ ID NO: 40686 - DNA, 60 bp, Artificial
  Synthetic oligonucleotide
agtcgtttattaaggtaaacacttggcagggattaaacacttgggcagctcggttaaggt

SEQ ID NO: 40687 - DNA, 60 bp, Artificial
  Synthetic oligonucleotide
gtggctaagaccttgatcataacaagtaaccgcgagcctcgtgattggtacaagagcgag

SEQ ID NO: 40688 - DNA, 60 bp, Artificial
  Synthetic oligonucleotide
tgatttgctgagaattaccgaccgttacccgttacgggttgaatttaaaggcggtatgac

SEQ ID NO: 40689 - DNA, 60 bp, Artificial
  Synthetic oligonucleotide
tgatctggccgaagcgacatccgctgtgatggctggcgtgccgctaactgaggtggcccg

SEQ ID NO: 40690 - DNA, 60 bp, Artificial
  Synthetic oligonucleotide
taccgaccgttacccgttgcgggttgaatttaaaggcggtatgactcagtttgtggctaa

SEQ ID NO: 40691 - DNA, 60 bp, Artificial
  Synthetic oligonucleotide
acgcctcaccttcagggattcctgaaccttcgaagtaatgcgcgagctgccgcccttgag

SEQ ID NO: 40692 - DNA, 60 bp, Artificial
  Synthetic oligonucleotide
atcgtcggcgaggagaagggcgcgaatggtacgcctcaccttcagggattcctgaacctt

SEQ ID NO: 40693 - DNA, 60 bp, Artificial
  Synthetic oligonucleotide
aattgcaagtttgctatcgtcggcgaggagaagggcgcgaatggtacgcctcaccttcag

SEQ ID NO: 40694 - DNA, 60 bp, Artificial
  Synthetic oligonucleotide
tagagttttgcacgctcgacaattgcaagtttgctatcgtcggcgaggagaagggcgcga

SEQ ID NO: 40695 - DNA, 60 bp, Artificial
  Synthetic oligonucleotide
gcgaagagcggcaactactcatacaagaggtgggtgtttaccattaataaccctaccttt

SEQ ID NO: 40696 - DNA, 60 bp, Artificial
  Synthetic oligonucleotide
ccgtactccgcggccaacgggatagcaactgcaatggcgaagagcggcaactactcatac

SEQ ID NO: 40697 - DNA, 60 bp, Artificial
  Synthetic oligonucleotide
gtactccgtactccgggccaaggggatagcaactgcaatggcgaagagcggcaactactc

SEQ ID NO: 40698 - DNA, 60 bp, Artificial
  Synthetic oligonucleotide
cctccgaagtaatgcgcgagctgccgcccttgaggagtcgctgggaggaagagcctggct

SEQ ID NO: 40699 - DNA, 60 bp, Artificial
  Synthetic oligonucleotide
ggttaggcacttggcagggtattacacttgggcagctcggttaaggttaggcacttggca

SEQ ID NO: 40700 - DNA, 60 bp, Artificial
  Synthetic oligonucleotide
tatgtcactacggaaaaccgtcgtcggggtcttgcgattcgtagccttcgtcttctgaat

SEQ ID NO: 40701 - DNA, 60 bp, Artificial
  Synthetic oligonucleotide
ggcacttggcagggattaaacacttgggcagctcggttaaggttagaacaagatctcgtt

SEQ ID NO: 40702 - DNA, 60 bp, Artificial
  Synthetic oligonucleotide
ggcacttggcagggtattacacttgggcagctcggttaaggttaggcacttggcagggta

SEQ ID NO: 40703 - DNA, 60 bp, Artificial
  Synthetic oligonucleotide
gagcccgtcatgtagctgttcgtgtctccgaacatcgcccatctcatgtttaagccgcat

SEQ ID NO: 40704 - DNA, 60 bp, Artificial
  Synthetic oligonucleotide
tagaccccgcctcttcctccgaccacgatatgcacgccgataggtgcggccgcgcatcgg

SEQ ID NO: 40705 - DNA, 60 bp, Artificial
  Synthetic oligonucleotide
gccgcatatattgttgccacgggccggtgggtctgtgtactgcgcgccatcttctaagct

SEQ ID NO: 40706 - DNA, 60 bp, Artificial
  Synthetic oligonucleotide
tcttgtgtataacattgacaagtatgaacccgcccaggcatgtaccctcccgttcccaat

SEQ ID NO: 40707 - DNA, 60 bp, Artificial
  Synthetic oligonucleotide
aggcatgtaccctcccgttcccaataaactactgagacgaatttgccgtgagtcgtttat

SEQ ID NO: 40708 - DNA, 60 bp, Artificial
  Synthetic oligonucleotide
cagaattaacaagtatcttgtgtataacattgacaagtatgaacccgcccaggcatgtac

SEQ ID NO: 40709 - DNA, 60 bp, Artificial
  Synthetic oligonucleotide
gagcctcgtgattggtacaagagcgagtttgaccattcagctctgtaccgcagaattaac

SEQ ID NO: 40710 - DNA, 60 bp, Artificial
  Synthetic oligonucleotide
gggtcgatcctctgatctggccgaagcgacatccgctgtgatggctggcgtcccgctgac

SEQ ID NO: 40711 - DNA, 60 bp, Artificial
  Synthetic oligonucleotide
cgagttggtgaaccagtctccaagggtcgatcctctgatctggccgaagcgacatccgct

SEQ ID NO: 40712 - DNA, 60 bp, Artificial
  Synthetic oligonucleotide
gtcgacataccttcgagttggtgagccagtctccaagggtcgatcctctgatctggccga

SEQ ID NO: 40713 - DNA, 60 bp, Artificial
  Synthetic oligonucleotide
tattgcgccaaagagtcgacataccttcgagttggtgagccagtctccaagggtcgatcc

SEQ ID NO: 40714 - DNA, 60 bp, Artificial
  Synthetic oligonucleotide
accggcgcttgtactccgtactccgggccaacgggatagcaactgcaatggcgaagagcg

SEQ ID NO: 40715 - DNA, 60 bp, Artificial
  Synthetic oligonucleotide
tgtagctgttcgtgtccccgaacatcgcccatctcatgtttaagccgcatatattgttgc

SEQ ID NO: 40716 - DNA, 60 bp, Artificial
  Synthetic oligonucleotide
atcctctgatctggccgaagcgacatccgctgtgatggctggcgtcccgctgactgaggt

SEQ ID NO: 40717 - DNA, 58 bp, Artificial
  Synthetic oligonucleotide
aaaggcgggaattgaagatacccgtctttcggcgccatctgtaacggtttccgaaggc

SEQ ID NO: 40718 - DNA, 60 bp, Artificial
  Synthetic oligonucleotide
gtatccattgactgtagagactaaaggcggtactgttccttttttggcccgcagtatttt

SEQ ID NO: 40719 - DNA, 60 bp, Artificial
  Synthetic oligonucleotide
ggtgagtacaaattctgtagaaaggcgggaattgaagatacccgtctttcggcgccatct

SEQ ID NO: 40720 - DNA, 60 bp, Artificial
  Synthetic oligonucleotide
cccgctgccacatcgagaaagcgaaaggaactgatcagcagaataaagaatactgcagta

SEQ ID NO: 40721 - DNA, 54 bp, Artificial
  Synthetic oligonucleotide
ggaggaagagcctggctctctcgtgcccggggatctgacgaagataacgaagaa

SEQ ID NO: 40722 - DNA, 60 bp, Artificial
  Synthetic oligonucleotide
tgaagagtcgctgggaggaggagcctggctctctcgtgcccggggatctgacgaagataa

SEQ ID NO: 40723 - DNA, 54 bp, Artificial
  Synthetic oligonucleotide
ggaggaggagcctggctctctcgtgcccggggatctgacgaagataatgaagaa

SEQ ID NO: 40724 - DNA, 54 bp, Artificial
  Synthetic oligonucleotide
ggaggaagagcctggctctctcgtgcccggggatctgacgaagataatgaagaa

SEQ ID NO: 40725 - DNA, 60 bp, Artificial
  Synthetic oligonucleotide
tgaagagtcgctgggaggaagagcctggctctctcgtgcccggggatctgacgaagataa

SEQ ID NO: 40726 - DNA, 60 bp, Artificial
  Synthetic oligonucleotide
ggcctttgtggagttcacgtctcgcgtgataatagtgaccagcaatagtccccccgatgc

SEQ ID NO: 40727 - DNA, 53 bp, Artificial
  Synthetic oligonucleotide
ggcctttgtggagttcacgtctcgcgtgataatagtgaccagcaacagtcccc

SEQ ID NO: 40728 - DNA, 53 bp, Artificial
  Synthetic oligonucleotide
ggcctttgtggagttcacgtctcgcgtgataatagtgaccagcaatagtcccc

SEQ ID NO: 40729 - DNA, 60 bp, Artificial
  Synthetic oligonucleotide
ggcctttgtggagttcacgtctcgcgtgataatagtgaccagcaacagtctccccgatgc

SEQ ID NO: 40730 - DNA, 53 bp, Artificial
  Synthetic oligonucleotide
ggcctttgttgagttcacgtctcgcgtgataatagtgaccagcaacagtcccc

SEQ ID NO: 40731 - DNA, 60 bp, Artificial
  Synthetic oligonucleotide
gtatgtgagaaatttccgcgggctggctgaacttttgaaagtgagcgggaagatgcagca

SEQ ID NO: 40732 - DNA, 60 bp, Artificial
  Synthetic oligonucleotide
ggtacaaggaggactgtgacccgaagccactgttccggaggttcacacgtgtttggtggt

SEQ ID NO: 40733 - DNA, 60 bp, Artificial
  Synthetic oligonucleotide
gagacctggtacaaggaggactgtgacccgaagccactgttccggaggttcacacgtgtt

SEQ ID NO: 40734 - DNA, 60 bp, Artificial
  Synthetic oligonucleotide
ccgcgggctggctgaacttttgaaagtgagcgggaaaatgcagaagcgtaattggaagac

SEQ ID NO: 40735 - DNA, 60 bp, Artificial
  Synthetic oligonucleotide
ccgcgggctggctgaacttttgaaagtgagcgggaaaatgcagaagcgagattggaagac

SEQ ID NO: 40736 - DNA, 60 bp, Artificial
  Synthetic oligonucleotide
ccgcgggctggctgaacttttgaaagtgagcgggaaaatgcagaagcgcgattggaagac

SEQ ID NO: 40737 - DNA, 60 bp, Artificial
  Synthetic oligonucleotide
gtttgtcaaaaatttccgcgggctggctgaacttttgaaagtgagcgggaaaatgcaaaa

SEQ ID NO: 40738 - DNA, 60 bp, Artificial
  Synthetic oligonucleotide
gtttgtcaaaaatttccgcgggctggctgaacttttgaaagtgagcgggaaaatgcagaa

SEQ ID NO: 40739 - DNA, 55 bp, Artificial
  Synthetic oligonucleotide
ctgctccgcctctgtgaccgttacccacacaaggtgcccgttaagggcagctatg

SEQ ID NO: 40740 - DNA, 60 bp, Artificial
  Synthetic oligonucleotide
ctgctccgcctctgtgaccgttacccacacaaggtgcccgttaagggcagctatgtggag

SEQ ID NO: 40741 - DNA, 60 bp, Artificial
  Synthetic oligonucleotide
ttgactgtagagactaaaggtggaactgtaccttttttggcccgcagtattctgattacc

SEQ ID NO: 40742 - DNA, 60 bp, Artificial
  Synthetic oligonucleotide
ttcgtgtgaccgaccggtacccgcataaggtgcccgtgaaaggggcctttgtggagttca

SEQ ID NO: 40743 - DNA, 60 bp, Artificial
  Synthetic oligonucleotide
tgtgaccgaccggtacccgcataaggtgcccgtgaaaggggcctttgtggagttcacgtc

SEQ ID NO: 40744 - DNA, 60 bp, Artificial
  Synthetic oligonucleotide
tgaccgaccggtacccgcataaggtgcccgtgaaaggggcctttgttgagttcacgtctc

SEQ ID NO: 40745 - DNA, 60 bp, Artificial
  Synthetic oligonucleotide
tgaccgaccggtacccgcataaggtgcccgtgaaaggggcctttgtggagttcacgtctc

SEQ ID NO: 40746 - DNA, 60 bp, Artificial
  Synthetic oligonucleotide
gagctgcttcgtgtgaccgaccggtacccgcataaggtgcccgtgaaaggggcctttgtg

SEQ ID NO: 40747 - DNA, 60 bp, Artificial
  Synthetic oligonucleotide
gagctgcttcgtgtgaccgaccggtacccgcataaggtgcccgtgaaaggggcctttgtt

SEQ ID NO: 40748 - DNA, 60 bp, Artificial
  Synthetic oligonucleotide
gagctgctgcgtgtgaccgaccggtacccgcataaggtgcccgtgaaaggggcctttgtg

SEQ ID NO: 40749 - DNA, 60 bp, Artificial
  Synthetic oligonucleotide
gctgcgtgtgaccgaccggtacccgcataaggtgcccgtgaaaggggcctttgtggagtt

SEQ ID NO: 40750 - DNA, 60 bp, Artificial
  Synthetic oligonucleotide
tccaagatggctgcgggggcgggtccttcttctgcggtaacgcctccttggccacgtcat

SEQ ID NO: 40751 - DNA, 60 bp, Artificial
  Synthetic oligonucleotide
gtttccaagatggctgcgggggcgggtccttcttctgcggtaacgcctccttggccacgt

SEQ ID NO: 40752 - DNA, 60 bp, Artificial
  Synthetic oligonucleotide
tggctgaacttttgaaagtgagcgggaaaatgcagaagcgtgattggaagactaatgtac

SEQ ID NO: 40753 - DNA, 60 bp, Artificial
  Synthetic oligonucleotide
gtcgtctccggttggttgcccgcctacgacgataatatagactccgcggtctcgcgcgat

SEQ ID NO: 40754 - DNA, 60 bp, Artificial
  Synthetic oligonucleotide
tccaaagagtcgacataccttcgagtcggtgaaccaaaccgaaaaggtcgctcaagtgat

SEQ ID NO: 40755 - DNA, 60 bp, Artificial
  Synthetic oligonucleotide
tccaaagagtcgacataccttcgagtcggtgaaccaaaccgtaaaggtcgctccagtgat

SEQ ID NO: 40756 - DNA, 59 bp, Artificial
  Synthetic oligonucleotide
gcgaaagaatgcgaaagctgctgcgcttgaagtgaagctgggaggaagagcctggctgt

SEQ ID NO: 40757 - DNA, 60 bp, Artificial
  Synthetic oligonucleotide
tgcgaaagaatgcgaaagctgctgcgcttgaagagaacctgggaggaagagcctggctgt

SEQ ID NO: 40758 - DNA, 60 bp, Artificial
  Synthetic oligonucleotide
tccaaagagtcgacataccttcgagtcggtgaaccaaaccaaaaaggtcgctccagtgat

SEQ ID NO: 40759 - DNA, 60 bp, Artificial
  Synthetic oligonucleotide
tccaaagagtcgacataccttcgagtcggtgaaccaaaccgaaaaggtcgctccagtgat

SEQ ID NO: 40760 - DNA, 60 bp, Artificial
  Synthetic oligonucleotide
gggtctttactattaataaccctacctttgaagattattgttctgttgtagagttctgca

SEQ ID NO: 40761 - DNA, 60 bp, Artificial
  Synthetic oligonucleotide
gggtcttcactattaataaccctacctttgaagattattgttctgttgtagagttctgca

SEQ ID NO: 40762 - DNA, 60 bp, Artificial
  Synthetic oligonucleotide
ggtcttcactattaataaccctacctttgaagattattgttctgttgtagagttctgcaa

SEQ ID NO: 40763 - DNA, 60 bp, Artificial
  Synthetic oligonucleotide
aacagatcagcagaataaagaatactgcagtaaagaaggtaacttactgatggagtgtgg

SEQ ID NO: 40764 - DNA, 60 bp, Artificial
  Synthetic oligonucleotide
ggtgcccgctgccacatcgagaaagcgaaaggaacagatcagcagaatagagaatactgc

SEQ ID NO: 40765 - DNA, 60 bp, Artificial
  Synthetic oligonucleotide
aggaacagatcagcagaataaagaatactgcagtaaagaaggcaacttactgatggagtg

SEQ ID NO: 40766 - DNA, 60 bp, Artificial
  Synthetic oligonucleotide
ttctccggaggatgtttccaagatggctgcgggggcgggtccttcttctgcggtaacgcc

SEQ ID NO: 40767 - DNA, 60 bp, Artificial
  Synthetic oligonucleotide
agtgggatccagccggttctggcgctgtttagccacaatgctgcagactggttcgctgtg

SEQ ID NO: 40768 - DNA, 60 bp, Artificial
  Synthetic oligonucleotide
gcagaataaagaatactgcagtaaagaaggcaacttactgatggagtgtggagctcctag

SEQ ID NO: 40769 - DNA, 60 bp, Artificial
  Synthetic oligonucleotide
gtgaagtggtattttggtgcccgctgccacatcgagaaagcgaaaggaaccgaccaccag

SEQ ID NO: 40770 - DNA, 60 bp, Artificial
  Synthetic oligonucleotide
acccgcgacttggagccacggagccacatcgcgcagcgatatggctccgtgcaaaccgag

SEQ ID NO: 40771 - DNA, 60 bp, Artificial
  Synthetic oligonucleotide
ccaggagtggtacaaggaggactgtgacccgaagccactgttccggagattcacccgtgt

SEQ ID NO: 40772 - DNA, 60 bp, Artificial
  Synthetic oligonucleotide
cgaccaccagaataaagaatactgcagtaaagaaggccacatacttatcgagtgtggagc

SEQ ID NO: 40773 - DNA, 60 bp, Artificial
  Synthetic oligonucleotide
tcagcagaataaagaatactgcagtaaagaaggtaacttactgatggagtgtggagctcc

SEQ ID NO: 40774 - DNA, 60 bp, Artificial
  Synthetic oligonucleotide
ggcgaagagcggcaactactcatacaagaggtgggtcttcacccttaataaccctacctt

SEQ ID NO: 40775 - DNA, 60 bp, Artificial
  Synthetic oligonucleotide
ggcgaagagcggcaactactcatacaagaggtgggtctttaccattaataaccctacctt

SEQ ID NO: 40776 - DNA, 53 bp, Artificial
  Synthetic oligonucleotide
gcgaagagcggcaactactcatacaagaggtgggtctttaccattaataaccc

SEQ ID NO: 40777 - DNA, 60 bp, Artificial
  Synthetic oligonucleotide
ttgttggagagcgggagtctggtgaccgttgcagagcagcaccctgtaacgtttgtcaga

SEQ ID NO: 40778 - DNA, 60 bp, Artificial
  Synthetic oligonucleotide
ttgttggagagcgggagtctggtgaccgttgcagagcagcaccctgtaacgtttctcaga

SEQ ID NO: 40779 - DNA, 60 bp, Artificial
  Synthetic oligonucleotide
tttgttggagagcgggagtctggtgaccgttgcagagcagcaccctgtaacgtttgtcag

SEQ ID NO: 40780 - DNA, 60 bp, Artificial
  Synthetic oligonucleotide
ttgctggagagcgggagtctggtgaccgttgcagagcagcaccctgtaacgtttgtcaga

SEQ ID NO: 40781 - DNA, 60 bp, Artificial
  Synthetic oligonucleotide
ttgttggagagcgggagtctggtgaccgttgcagagcagcaccctgtaacgttagtcaga

SEQ ID NO: 40782 - DNA, 60 bp, Artificial
  Synthetic oligonucleotide
tggagagcgggagtctggtgaccgttgcagagcagcaccctgtaacgtttgtcagaaatt

SEQ ID NO: 40783 - DNA, 60 bp, Artificial
  Synthetic oligonucleotide
tgttggagagcgggagtctggtgaccgttgcagagcagcaccctgtaacgtttgtcaaaa

SEQ ID NO: 40784 - DNA, 60 bp, Artificial
  Synthetic oligonucleotide
gttggagagcgggagtctggtgaccgttgcagagcagcaccctgtaacgtttgtcagaaa

SEQ ID NO: 40785 - DNA, 60 bp, Artificial
  Synthetic oligonucleotide
gggcgccgtaggcgaccgaagcgtgtcccccgggccgaaggcccgggtctacactcgacc

SEQ ID NO: 40786 - DNA, 60 bp, Artificial
  Synthetic oligonucleotide
agagtcgggaccttcatcgtcctcaatgacattcatgagttccatgtggggtgggaggtc

SEQ ID NO: 40787 - DNA, 60 bp, Artificial
  Synthetic oligonucleotide
ccacccagttcgtggatgcaccggaagtgatgaagaagtatccgatcaactactgaccgg

SEQ ID NO: 40788 - DNA, 60 bp, Artificial
  Synthetic oligonucleotide
tatccgatcaactactgaccggaaacggaaatgacgtcaccggaaatgacgacactcgag

SEQ ID NO: 40789 - DNA, 60 bp, Artificial
  Synthetic oligonucleotide
tgaagacaagtgttatgtgcaagctctgtttagacgtataaacagatggcttgtgtggga

SEQ ID NO: 40790 - DNA, 60 bp, Artificial
  Synthetic oligonucleotide
ttgtgtgggatgccacccagttcgtggatgcaccggaagtgatgaagaagtatccgatca

SEQ ID NO: 40791 - DNA, 60 bp, Artificial
  Synthetic oligonucleotide
agggcgctccccccccggtgtcgtggacctttagccgtccacgaccgcgagggcgccgta

SEQ ID NO: 40792 - DNA, 55 bp, Artificial
  Synthetic oligonucleotide
tcgtggacctttagccgtccacgaccgcgagggcgccgtaggcgaccgaagcgtg

SEQ ID NO: 40793 - DNA, 60 bp, Artificial
  Synthetic oligonucleotide
ccgatcaactactgaccggaaacggaaatgacgtcaccggaaatgacgacactcgagatc

SEQ ID NO: 40794 - DNA, 60 bp, Artificial
  Synthetic oligonucleotide
cggggggtccgggggggagccccagccccccgcgaagcggggggctgatcagggcgctcc

SEQ ID NO: 40795 - DNA, 60 bp, Artificial
  Synthetic oligonucleotide
gtcttcaagagtaaaagtaaagacatcagtcccatatttaaaagagcctccctcgtcctt

SEQ ID NO: 40796 - DNA, 56 bp, Artificial
  Synthetic oligonucleotide
ggaagaggaatgagtgagatcgcgcgagagttcagtgagacttacgtcagatatgg

SEQ ID NO: 40797 - DNA, 60 bp, Artificial
  Synthetic oligonucleotide
cctcgtccttttgaagagtgactttgacagagtgccgaagtctaaagtaatagacacggt

SEQ ID NO: 40798 - DNA, 60 bp, Artificial
  Synthetic oligonucleotide
gagtgactttgacagagtgccgaagtctaaagtaatagacacggttggctctgtgccctc

SEQ ID NO: 40799 - DNA, 60 bp, Artificial
  Synthetic oligonucleotide
aaccccttcctctgatcccatttcagggccccatcccaattagctagggggtcgtcagcc

SEQ ID NO: 40800 - DNA, 60 bp, Artificial
  Synthetic oligonucleotide
taagtctggcatcagtgataggcactgtatgccctaaccccttccactcagtagagttct

SEQ ID NO: 40801 - DNA, 60 bp, Artificial
  Synthetic oligonucleotide
gtgataggcactgtatgccctaaccccttccactcagtagagttctcccctaggggtctc

SEQ ID NO: 40802 - DNA, 60 bp, Artificial
  Synthetic oligonucleotide
tagtcctcaaaaggtaatttgagactatcacccccagtggggttaagtacgtcttcaaga

SEQ ID NO: 40803 - DNA, 60 bp, Artificial
  Synthetic oligonucleotide
accggccacttggagccacggagccatcgtctcgaaatggctgtaaggggctctgccgct

SEQ ID NO: 40804 - DNA, 60 bp, Artificial
  Synthetic oligonucleotide
ctctgccgctaagagatggtgcttcaccctcaacaaccccacagaggaagagattgcagc

SEQ ID NO: 40805 - DNA, 60 bp, Artificial
  Synthetic oligonucleotide
ctgccgctaagagatggtgcttcaccctcaacaaccccacagaggaagagattgcagcag

SEQ ID NO: 40806 - DNA, 60 bp, Artificial
  Synthetic oligonucleotide
gtgagtaccactatgccattgtgggaaaagaaaaaggagagcaagggaccccccacctcc

SEQ ID NO: 40807 - DNA, 54 bp, Artificial
  Synthetic oligonucleotide
tccgtctccgcctcctgtagtgacgtctccgataacggggtcgaagtccgcgtc

SEQ ID NO: 40808 - DNA, 60 bp, Artificial
  Synthetic oligonucleotide
gaaatactgcagtaaagagggggacgtgatactcacgatcggcataccagtgaagggaaa

SEQ ID NO: 40809 - DNA, 56 bp, Artificial
  Synthetic oligonucleotide
ggggacgtgatactcacgatcggcataccagtgaagggaaaccggagcgaccttgc

SEQ ID NO: 40810 - DNA, 60 bp, Artificial
  Synthetic oligonucleotide
tgaagggaaaccggagcgaccttgccggagctgttgccgctgtgaaagccggaagaggaa

SEQ ID NO: 40811 - DNA, 60 bp, Artificial
  Synthetic oligonucleotide
ccccacctccaaggctttatccacttaaagaaaaaagtgagactcacaagccttaaaaaa

SEQ ID NO: 40812 - DNA, 51 bp, Artificial
  Synthetic oligonucleotide
agcaacatggttaataattaaccagtggctccaagtggccgtttcagtatt

SEQ ID NO: 40813 - DNA, 50 bp, Artificial
  Synthetic oligonucleotide
aaccccttcctctgatcccatttcagggccccatcccaattagctagggg

SEQ ID NO: 40814 - DNA, 60 bp, Artificial
  Synthetic oligonucleotide
ctggctgtttaaccatagagcagccgtttcattagcagtagataggtcagtaatcaccag

SEQ ID NO: 40815 - DNA, 60 bp, Artificial
  Synthetic oligonucleotide
ccactcatctggtgatggctgcaggtagctgaaagctatcccgtagtgtttcactttttt

SEQ ID NO: 40816 - DNA, 60 bp, Artificial
  Synthetic oligonucleotide
aatgccttctggctgtttaaccatagagcagccgtttcattagcagtagataggtcagta

SEQ ID NO: 40817 - DNA, 60 bp, Artificial
  Synthetic oligonucleotide
tcacttttttgggtttaatctgggcagcattcaactgcagggggatccaaaatgccttct

SEQ ID NO: 40818 - DNA, 60 bp, Artificial
  Synthetic oligonucleotide
gtgggaggtcggccattacattgggggttggggggtcactcagagcagtccatgcaaact

SEQ ID NO: 40819 - DNA, 60 bp, Artificial
  Synthetic oligonucleotide
cgggaccttcatcgtcctcaatgacattcatgagttccatgtggggtgggaggtcggcca

SEQ ID NO: 40820 - DNA, 60 bp, Artificial
  Synthetic oligonucleotide
aatttcatatagaaggttatattggcctggtaagcccactcatctggtgatggctgcagg

SEQ ID NO: 40821 - DNA, 60 bp, Artificial
  Synthetic oligonucleotide
catgcaaactgcctgaatttcatatagaaggttatattggcctggtaagcccactcatct

SEQ ID NO: 40822 - DNA, 60 bp, Artificial
  Synthetic oligonucleotide
cattaccagtaacaccccaccggactcgtggtataatgaagacaagtgttatgtgcaagc

SEQ ID NO: 40823 - DNA, 60 bp, Artificial
  Synthetic oligonucleotide
agcaagcagatcatcattaccagtaacaccccaccggactcgtggtataatgaagacaag

SEQ ID NO: 40824 - DNA, 60 bp, Artificial
  Synthetic oligonucleotide
tgaaaggtgattggtgggatggatactgcaatgaggatatagtaatcattgatgatttct

SEQ ID NO: 40825 - DNA, 60 bp, Artificial
  Synthetic oligonucleotide
atgaaaggtgattggtgggatggatactgcaatgaggatatagtaatcattgatgatttc

SEQ ID NO: 40826 - DNA, 60 bp, Artificial
  Synthetic oligonucleotide
acttcaagacggaagttaccgtgcttactggcccttcaggtgtgggcaagtcccggtggg

SEQ ID NO: 40827 - DNA, 60 bp, Artificial
  Synthetic oligonucleotide
agaagcaacgtgacttcaagacggaagttaccgtgcttactggcccttcaggtgtgggca

SEQ ID NO: 40828 - DNA, 60 bp, Artificial
  Synthetic oligonucleotide
aggtgcccgtcaaggggtcctatgtggagttcaacagcaagcagatcatcattaccagta

SEQ ID NO: 40829 - DNA, 60 bp, Artificial
  Synthetic oligonucleotide
atcgatacccacataaggtgcccgtcaaggggtcctatgtggagttcaacagcaagcaga

SEQ ID NO: 40830 - DNA, 60 bp, Artificial
  Synthetic oligonucleotide
ggtggatacccttctgtgagctgctgagactgtgtgatcgatacccacataaggtgcccg

SEQ ID NO: 40831 - DNA, 60 bp, Artificial
  Synthetic oligonucleotide
tgatgatttctatgggtggatacccttctgtgagctgctgagactgtgtgatcgataccc

SEQ ID NO: 40832 - DNA, 60 bp, Artificial
  Synthetic oligonucleotide
aaaccggagcgaccttgccggagctgttgccgctgtgaaagccggaagaggaatgagtga

SEQ ID NO: 40833 - DNA, 60 bp, Artificial
  Synthetic oligonucleotide
ccacggagccatcgtctcgaaatggctgtaaggggctctgccgctaagagatggtgcttc

SEQ ID NO: 40834 - DNA, 60 bp, Artificial
  Synthetic oligonucleotide
agtaaagacatcagtcccatatttaaaagagcctccctcgtccttttgaagagtgacttt

SEQ ID NO: 40835 - DNA, 60 bp, Artificial
  Synthetic oligonucleotide
aagtaccccatcaactattgaggacttcacctcccgcgtgttcaccgcgcgaagcgcggt

SEQ ID NO: 40836 - DNA, 59 bp, Artificial
  Synthetic oligonucleotide
agccctgtttcggaggatcaacagatggcttgtttgggacggtctgagatttgaagatg

SEQ ID NO: 40837 - DNA, 59 bp, Artificial
  Synthetic oligonucleotide
ttgcacccccaaagttgcctccttaggatcgaaggtcggccgaaggccgaccgagcaca

SEQ ID NO: 40838 - DNA, 60 bp, Artificial
  Synthetic oligonucleotide
acccccccagagttggccatgccttgcacccccaaagttgcctccttaggatcgaaggtc

SEQ ID NO: 40839 - DNA, 52 bp, Artificial
  Synthetic oligonucleotide
gtcggccgaaggccgaccgagcacactgaccttgggccatgccttgcacccc

SEQ ID NO: 40840 - DNA, 60 bp, Artificial
  Synthetic oligonucleotide
atcgaaggtcggccgaaggccgaccgagcacactgaccttgggccatgccttgcaccccc

SEQ ID NO: 40841 - DNA, 60 bp, Artificial
  Synthetic oligonucleotide
tgtgtgtcatgttcaattgtctgaattcaacataaatagtggctttgatctgcatctcaa

SEQ ID NO: 40842 - DNA, 58 bp, Artificial
  Synthetic oligonucleotide
gagcggttttctgacttagggttagggaaaggaatacggctatgcggatcgttcgtac

SEQ ID NO: 40843 - DNA, 60 bp, Artificial
  Synthetic oligonucleotide
gaggggtatccatgcccctctggggttgttcagccacagcgcggctgttgtgttagccgt

SEQ ID NO: 40844 - DNA, 60 bp, Artificial
  Synthetic oligonucleotide
tgtcatgttcaattgtctgaattcaacataaatagtggctttgatctgcatctcaaagtc

SEQ ID NO: 40845 - DNA, 60 bp, Artificial
  Synthetic oligonucleotide
ggccacgcctgttggcagggatccgcctcctgcggcgccagtgccgcctgcgcatgcgca

SEQ ID NO: 40846 - DNA, 60 bp, Artificial
  Synthetic oligonucleotide
ggtggccacgcctgttggcagggatccgcctcctgcggcgccagtgccgcctgcgcatgc

SEQ ID NO: 40847 - DNA, 60 bp, Artificial
  Synthetic oligonucleotide
aatgaaaggtgattggtgggacgggtattcaaacgaagacatggtcatcatagatgactt

SEQ ID NO: 40848 - DNA, 60 bp, Artificial
  Synthetic oligonucleotide
aactaagttttataaaatgaaaggtgattggtgggacgggtattcaaacgaagacatggt

SEQ ID NO: 40849 - DNA, 60 bp, Artificial
  Synthetic oligonucleotide
tagatgacttttatgggtggatcccgttctgtgaactgctccgcctctgtgaccgttacc

SEQ ID NO: 40850 - DNA, 60 bp, Artificial
  Synthetic oligonucleotide
aagacatggtcatcatagatgacttttatgggtggatcccgttctgtgaactgctccgcc

SEQ ID NO: 40851 - DNA, 60 bp, Artificial
  Synthetic oligonucleotide
cagaagccccgtgacttcaaaacggaagtcatagtgctgaccggccctagtgggtgtggc

SEQ ID NO: 40852 - DNA, 60 bp, Artificial
  Synthetic oligonucleotide
tgctgattggccagaagccccgtgacttcaaaacggaagtcatagtgctgaccggcccta

SEQ ID NO: 40853 - DNA, 60 bp, Artificial
  Synthetic oligonucleotide
gccctagtgggtgtggcaaatcccgctgggccaatgaacaagaaggaactaagttttata

SEQ ID NO: 40854 - DNA, 60 bp, Artificial
  Synthetic oligonucleotide
accggccctagtgggtgtggcaaatcccgctgggccaatgaacaagaaggaactaagttt

SEQ ID NO: 40855 - DNA, 60 bp, Artificial
  Synthetic oligonucleotide
cccacccagatcactggtacaatgaagagaaatgctacctgcaagccctgtttcggagga

SEQ ID NO: 40856 - DNA, 60 bp, Artificial
  Synthetic oligonucleotide
agcaacacccacccagatcactggtacaatgaagagaaatgctacctgcaagccctgttt

SEQ ID NO: 40857 - DNA, 60 bp, Artificial
  Synthetic oligonucleotide
aggattatagttaccccgtcagtgccgaacctgaaggccccggcattttcagccttgccg

SEQ ID NO: 40858 - DNA, 60 bp, Artificial
  Synthetic oligonucleotide
ggccccggcattttcagccttgccgagtatctgctggtactgtctgaccagctttatccg

SEQ ID NO: 40859 - DNA, 57 bp, Artificial
  Synthetic oligonucleotide
ctttggccagacggattctatagtcctcaaagggtagctccttcccttctgggaaaa

SEQ ID NO: 40860 - DNA, 60 bp, Artificial
  Synthetic oligonucleotide
gggaaaaagtctttgaggattatagttaccccgtcagtgccgaacctgaaggccccggca

SEQ ID NO: 40861 - DNA, 60 bp, Artificial
  Synthetic oligonucleotide
cttcccagtgcgtccaatcttcccggcggggtatgccttctactttggccagacggattc

SEQ ID NO: 40862 - DNA, 60 bp, Artificial
  Synthetic oligonucleotide
ctttggccagacggattctatagtcctcaaagggtagctccttcccttctgggaaaaagt

SEQ ID NO: 40863 - DNA, 60 bp, Artificial
  Synthetic oligonucleotide
ggtccactttctggcaccatcccagtttgcaagggggtcgaccgtcagccgggtcttctt

SEQ ID NO: 40864 - DNA, 60 bp, Artificial
  Synthetic oligonucleotide
ccccgccccttcccagtgcgtccaatcttcccggcggggtatgccttctactttggccag

SEQ ID NO: 40865 - DNA, 60 bp, Artificial
  Synthetic oligonucleotide
tatccatgcccctctggggttgttcagccacagcgcggctgttgtgttagccgtgtcagt

SEQ ID NO: 40866 - DNA, 53 bp, Artificial
  Synthetic oligonucleotide
tgttagccgtgtcagtgtccgtaacggacagctgtggtcgggggcgaaacagc

SEQ ID NO: 40867 - DNA, 60 bp, Artificial
  Synthetic oligonucleotide
accctggaaccaccatgccgaaacaagcgcgcgagagcccttgcaagcggtggtgcttta

SEQ ID NO: 40868 - DNA, 60 bp, Artificial
  Synthetic oligonucleotide
gcccttgcaagcggtggtgctttaccctcaacaacccgactgaggaggagatagagagag

SEQ ID NO: 40869 - DNA, 60 bp, Artificial
  Synthetic oligonucleotide
accggccacttggaaccctggaaccaccatgccgaaacaagcgcgcgagagcccttgcaa

SEQ ID NO: 40870 - DNA, 60 bp, Artificial
  Synthetic oligonucleotide
aaatgaaagagctgattccccgcgcgcatttcgagagagcccgtggttccgatgaggaca

SEQ ID NO: 40871 - DNA, 60 bp, Artificial
  Synthetic oligonucleotide
agctgattccccgcgcgcatttcgagagagcccgtggttccgatgaggacaatgagcagt

SEQ ID NO: 40872 - DNA, 58 bp, Artificial
  Synthetic oligonucleotide
atagagagagtgaaaaatctgtctccgagtgagtatcactatgcgatagtcgggaaag

SEQ ID NO: 40873 - DNA, 60 bp, Artificial
  Synthetic oligonucleotide
cccgcatttgcaagggttcctgcatctgaaaaagaagcagcggttgaagcaaatgaaaga

SEQ ID NO: 40874 - DNA, 60 bp, Artificial
  Synthetic oligonucleotide
gacgttatactcaccattggggttccttcaaagggtaaccggagtgaccttgccggagct

SEQ ID NO: 40875 - DNA, 60 bp, Artificial
  Synthetic oligonucleotide
cgccgtgaaagccggaagaggtatggccgaagtcgcgcgagagttcagtctagcctacgt

SEQ ID NO: 40876 - DNA, 60 bp, Artificial
  Synthetic oligonucleotide
tcaacaagtggctggtctggaaccatgacaagttcgaagatgctccggattgtatgaaaa

SEQ ID NO: 40877 - DNA, 60 bp, Artificial
  Synthetic oligonucleotide
gggcacatggttttgaactcactacccttcattattttgctaaagtgggacctgagcgta

SEQ ID NO: 40878 - DNA, 60 bp, Artificial
  Synthetic oligonucleotide
ggttgctcgctgtgtaccgttattgtcatcaaatgtgtttgcctttgtgtgtctgtgcta

SEQ ID NO: 40879 - DNA, 60 bp, Artificial
  Synthetic oligonucleotide
gcgttgctattaaaataactgaacattcgtggagcgcagatttgtatgccatgatgggtc

SEQ ID NO: 40880 - DNA, 60 bp, Artificial
  Synthetic oligonucleotide
ccgcacctaaattagtaacaccgtatgatgggttttatttgtcgtcatgtcagaacccgc

SEQ ID NO: 40881 - DNA, 60 bp, Artificial
  Synthetic oligonucleotide
gtccacttcttttgacgatcttacacctacccctacagcgcagcctattgtggattgggc

SEQ ID NO: 40882 - DNA, 60 bp, Artificial
  Synthetic oligonucleotide
gggatccacacgtgcagaggctaaagatttggagtcagatgttgacactaatgacgtggt

SEQ ID NO: 40883 - DNA, 60 bp, Artificial
  Synthetic oligonucleotide
gttaggcacttccttcttgcgaccagcgggtttcgtcctgtctgttagccctgcgtaggt

SEQ ID NO: 40884 - DNA, 60 bp, Artificial
  Synthetic oligonucleotide
gctccccttgtccagacaggaaaagcagatttgcgattcccacgcggagagggtgttccc

SEQ ID NO: 40885 - DNA, 60 bp, Artificial
  Synthetic oligonucleotide
agacagcaaaagatggaggtcgaggtgttagatggtgagtatgatgcgcctgtgacttta

SEQ ID NO: 40886 - DNA, 60 bp, Artificial
  Synthetic oligonucleotide
ttggcggtgcatcttgctgcttgtattgtaggtgccatattgagcatcctggtgcgagcg

SEQ ID NO: 40887 - DNA, 60 bp, Artificial
  Synthetic oligonucleotide
gtatgtctgtagctgctatgacgactggcgtgactttccaaacggttaagcccggtcagt

SEQ ID NO: 40888 - DNA, 60 bp, Artificial
  Synthetic oligonucleotide
gcaggcgttgtacacttcgttgttagtaggggctgtagcttcggcgggttttacttttgg

SEQ ID NO: 40889 - DNA, 60 bp, Artificial
  Synthetic oligonucleotide
cccacgtacgcctgcttactcttttatacgggtgagcactggtcaggctatgagtttgct

SEQ ID NO: 40890 - DNA, 60 bp, Artificial
  Synthetic oligonucleotide
ctcgtgcgtattctatagtagctggggatcactctggagccgtaggttcgggtgctgttc

SEQ ID NO: 40891 - DNA, 60 bp, Artificial
  Synthetic oligonucleotide
gtgattggagtaacagtaaggactatgtcttagccaacaccgccactgaacggttgaagc

SEQ ID NO: 40892 - DNA, 60 bp, Artificial
  Synthetic oligonucleotide
cgtatgatgcaggtgatgagttgtactgtgtgacggggtcctttacaccacaggtaggtg

SEQ ID NO: 40893 - DNA, 60 bp, Artificial
  Synthetic oligonucleotide
ttacctggtagtgtttattctaatagttgcctcgtaggtgtagatggaacccctggcagt

SEQ ID NO: 40894 - DNA, 60 bp, Artificial
  Synthetic oligonucleotide
tgacagtgctcttaacaagccaaatagagccagccttcgtcaattatacgatgtggcgcc

SEQ ID NO: 40895 - DNA, 60 bp, Artificial
  Synthetic oligonucleotide
gaagaagacccaccactggaaaccgccttggaaagtgtggaagctgaagtaggtgaaagc

SEQ ID NO: 40896 - DNA, 60 bp, Artificial
  Synthetic oligonucleotide
cctctttgcactaatggtaaagttgtgtctaccttgtttagacttaagggtggcatgcct

SEQ ID NO: 40897 - DNA, 64 bp, Artificial
  Synthetic oligonucleotide
cctggttttgtttacctagttatagtattgctactgttaattttaatgatgaccgcattctcac

SEQ ID NO: 40898 - DNA, 60 bp, Artificial
  Synthetic oligonucleotide
tgcgactttatttggtagtgttgcttgtgagcacgttactacaatgatgtcccagttttc

SEQ ID NO: 40899 - DNA, 60 bp, Artificial
  Synthetic oligonucleotide
aatactgggcgcaacgcctattttaagtttcaagagaatcgtccaccctttcctcctgag

SEQ ID NO: 40900 - DNA, 60 bp, Artificial
  Synthetic oligonucleotide
ggaataaagttgttaattggcctagtgtttcctatgctgggtctttgtgggatgttacag

SEQ ID NO: 40901 - DNA, 60 bp, Artificial
  Synthetic oligonucleotide
caggtgctatggacacggcttcttatagagaggcttgtgccgcacatttgtgtaaagctt

SEQ ID NO: 40902 - DNA, 60 bp, Artificial
  Synthetic oligonucleotide
cagcgtggacgcggaagaaaccctaagccacgacctgctcccaataacactgtctcctgg

SEQ ID NO: 40903 - DNA, 60 bp, Artificial
  Synthetic oligonucleotide
ggccaggaaaatttagctaggtcagcttgtgtttattattcccaagtcctatgcaagcct

SEQ ID NO: 40904 - DNA, 60 bp, Artificial
  Synthetic oligonucleotide
ggaggcgttgtctatgcttacatgggttgttgtgatggtactatgtattttgttcctcgt

SEQ ID NO: 40905 - DNA, 60 bp, Artificial
  Synthetic oligonucleotide
gctttgttgctagcttatgttgttacttttctaatcctatggactgctgaccgagttcgt

SEQ ID NO: 40906 - DNA, 60 bp, Artificial
  Synthetic oligonucleotide
atctgcatcagccctttgggatttgaggacaccatgttttagtgttgcagctcttacaac

SEQ ID NO: 40907 - DNA, 60 bp, Artificial
  Synthetic oligonucleotide
ccacctggtgaacaatttaaacacctcgtgccactaatgaataagggtgcgacttggcct

SEQ ID NO: 40908 - DNA, 60 bp, Artificial
  Synthetic oligonucleotide
gacccttctaggattttgtctgccggttgctttgttgatgatatcgttaagactgacggt

SEQ ID NO: 40909 - DNA, 60 bp, Artificial
  Synthetic oligonucleotide
gctgcccgtggacatgctggtgtggagtctgatgttgagacaactatggttgttgatgca

SEQ ID NO: 40910 - DNA, 56 bp, Artificial
  Synthetic oligonucleotide
cactggtgtctattctgtttcttcatatgaagcttcagctactggcacctttattg

SEQ ID NO: 40911 - DNA, 60 bp, Artificial
  Synthetic oligonucleotide
ggatgcagaaggtaatttaaatccattttgctatgaccctactgtactacctggtgcttc

SEQ ID NO: 40912 - DNA, 60 bp, Artificial
  Synthetic oligonucleotide
ggcaactgctagcgttcaggtaacccctttacgtgatgcatttgtccactcttgcacaga

SEQ ID NO: 40913 - DNA, 60 bp, Artificial
  Synthetic oligonucleotide
cttgcactctagctgttcccgccaatatgagagtcattcattttggtgctggttgtgaaa

SEQ ID NO: 40914 - DNA, 60 bp, Artificial
  Synthetic oligonucleotide
ggatggtatcgtctgggtttatgaagaaggtgccactgatgctccttcagtctttgggac

SEQ ID NO: 40915 - DNA, 60 bp, Artificial
  Synthetic oligonucleotide
ggaatcgtcttacacgtgttgaagcttccaccattgtctgtggtactaaacgtacgtttt

SEQ ID NO: 40916 - DNA, 60 bp, Artificial
  Synthetic oligonucleotide
ggcctaagaaacaaccaactgttgacgtcggtgttagcggtttaagaactgctggcgttg

SEQ ID NO: 40917 - DNA, 60 bp, Artificial
  Synthetic oligonucleotide
ggccattttacaggtgttgatggtgagttgcctgttgccgtagtcaatgacaagatcttc

SEQ ID NO: 40918 - DNA, 60 bp, Artificial
  Synthetic oligonucleotide
tgaaacttgtgtgtgtggtagtgtaaaacaccgtcaattggtggaacactcggcaccatg

SEQ ID NO: 40919 - DNA, 60 bp, Artificial
  Synthetic oligonucleotide
ggtgtagctttaccctttagtgatttagaagcgtgtagggcttatctgacctctagggcc

SEQ ID NO: 40920 - DNA, 60 bp, Artificial
  Synthetic oligonucleotide
gtgctcgacattatgtctaaggcaatgaagttgttgcacactaatgttttctgggcaggt

SEQ ID NO: 40921 - DNA, 60 bp, Artificial
  Synthetic oligonucleotide
ataatagccttgctgtgtgcgtgttgtgttgtggtctgcagcgtttaggcgccgggcttc

SEQ ID NO: 40922 - DNA, 60 bp, Artificial
  Synthetic oligonucleotide
cctcttggcatgttctttccatatgattcaagtttggagactggtgaacacacttttctc

SEQ ID NO: 40923 - DNA, 60 bp, Artificial
  Synthetic oligonucleotide
atttacatagaggccaactcttggggcatatagctgcaactgtacgtttgcaagctggtg

SEQ ID NO: 40924 - DNA, 60 bp, Artificial
  Synthetic oligonucleotide
agcgtgttgccaccaaaggtttcaatgtaactcaggcttttggtcttcgtggaccaggcc

SEQ ID NO: 40925 - DNA, 60 bp, Artificial
  Synthetic oligonucleotide
tgtcagtattgggttgggtatggttgtaattgtgacgcgttacgtaacaatacagtcccc

SEQ ID NO: 40926 - DNA, 60 bp, Artificial
  Synthetic oligonucleotide
ggaagctgcttacacatcttcactattaggtagtatagcaggtgccggatggacagctgg

SEQ ID NO: 40927 - DNA, 60 bp, Artificial
  Synthetic oligonucleotide
gcaagtcatgggtgttgtaatgcagagtggtgttaaacgtatatcatatggctttataca

SEQ ID NO: 40928 - DNA, 60 bp, Artificial
  Synthetic oligonucleotide
ctgtggctagatccatgttagggctaaccacgcagactgttgattcttcacagggctctg

SEQ ID NO: 40929 - DNA, 60 bp, Artificial
  Synthetic oligonucleotide
tataacaagtggccttggtacgtatggctaggttttattgcaggccttgttgccttatta

SEQ ID NO: 40930 - DNA, 60 bp, Artificial
  Synthetic oligonucleotide
gtgcttacctcacactcagtggcgacattgtcagcgccaacaatagtgaatcaagagagg

SEQ ID NO: 40931 - DNA, 60 bp, Artificial
  Synthetic oligonucleotide
taatggcaagcctacaggtgtctttacagttaatttacgccacaattctaccattaaagg

SEQ ID NO: 40932 - DNA, 60 bp, Artificial
  Synthetic oligonucleotide
gtggctagcgtactttgttcagagtataaggctatttatgcgcactggttcctggtggtc

SEQ ID NO: 40933 - DNA, 60 bp, Artificial
  Synthetic oligonucleotide
gcgccacgtaactcatgggaagctctaatacttaattttaaattgcttggtattggcggt

SEQ ID NO: 40934 - DNA, 60 bp, Artificial
  Synthetic oligonucleotide
ccgcttagccaatgagtgtgctcaagtgttaagtgagtatgtcctatgcggaggaggtta

SEQ ID NO: 40935 - DNA, 60 bp, Artificial
  Synthetic oligonucleotide
ctgaagcggctggtttatgtcattattttgatcctcgagagtttgctttaccttgcgctc

SEQ ID NO: 40936 - DNA, 60 bp, Artificial
  Synthetic oligonucleotide
tgcaacaactcataaaatggttctgtcagtttcaccttatgtctgtaacgcacctggttg

SEQ ID NO: 40937 - DNA, 60 bp, Artificial
  Synthetic oligonucleotide
gggtacgtggtgtaccgggaatgctatacagggctttgcttgtgattgtggtgctaatta

SEQ ID NO: 40938 - DNA, 60 bp, Artificial
  Synthetic oligonucleotide
gtatagtgctcaggctactgagtgtactaaagcatcagcaaaacaagatgcagctagact

SEQ ID NO: 40939 - DNA, 60 bp, Artificial
  Synthetic oligonucleotide
ccttgcgacgggcacgcttattgatggtgaccaggctcatgctaattacgtcttttggcg

SEQ ID NO: 40940 - DNA, 60 bp, Artificial
  Synthetic oligonucleotide
ctgttaatatgccggcgtcaacttattggctatcggtgtctagaaacgcagccccacctg

SEQ ID NO: 40941 - DNA, 60 bp, Artificial
  Synthetic oligonucleotide
gggccgttgtgacgtatcggaagctgggttgtgcatgtcgttacaacctcggtgggtcgt

SEQ ID NO: 40942 - DNA, 60 bp, Artificial
  Synthetic oligonucleotide
gaatagttcgtgcggtgccctacgtgacctgctgtcagcgcttttgagcaagttactcac

SEQ ID NO: 40943 - DNA, 60 bp, Artificial
  Synthetic oligonucleotide
gaggatgaacatacaccttatgatatagggcgccaaatgctgggtgttaaattgcagggt

SEQ ID NO: 40944 - DNA, 60 bp, Artificial
  Synthetic oligonucleotide
cctacggcgcatttgtgatagaccagcccttttgttaagaacagcattacacatggaggt

SEQ ID NO: 40945 - DNA, 60 bp, Artificial
  Synthetic oligonucleotide
ccacttaaggtggctgattgtgcggccgatgcaggtgatgagctattttgtgttactggc

SEQ ID NO: 40946 - DNA, 60 bp, Artificial
  Synthetic oligonucleotide
cacgtgtgttgtcaaaattgaacttagcagggtgcaatggcggctcgttttatgtgaacc

SEQ ID NO: 40947 - DNA, 60 bp, Artificial
  Synthetic oligonucleotide
gtttcggtactgctcttgttcataactgctttgctccagtggggttatccctcacggtgc

SEQ ID NO: 40948 - DNA, 60 bp, Artificial
  Synthetic oligonucleotide
agtcgtagaagcgccagacaaaggtacagcgttttggtatgcggtgagaaaggatggtgc

SEQ ID NO: 40949 - DNA, 60 bp, Artificial
  Synthetic oligonucleotide
gtgacgaccagtggctaggtgatgagtccccttccgaagacgttgaacagatcgctgctg

SEQ ID NO: 40950 - DNA, 60 bp, Artificial
  Synthetic oligonucleotide
ggttgagcgccctaaagaagtgcctgcttcggattccgctattttaaaggagaccacgcc

SEQ ID NO: 40951 - DNA, 60 bp, Artificial
  Synthetic oligonucleotide
gcggtagcatctgcaggttatacatttggcattacttctgtcggggttgtgccttttgcg

SEQ ID NO: 40952 - DNA, 60 bp, Artificial
  Synthetic oligonucleotide
ttttattggttgacaagcgtatggttggtgtcgtcggtgatgatgctaccattgccaagg

SEQ ID NO: 40953 - DNA, 60 bp, Artificial
  Synthetic oligonucleotide
cggcgtgtgtggatgcagaatccgctggtgcgataaagcctggttgtgtcatgctgttgg

SEQ ID NO: 40954 - DNA, 60 bp, Artificial
  Synthetic oligonucleotide
gcacgttgcggctagtaacgcattggcagataagcgcacagtgtgtatgtccgtagctgc

SEQ ID NO: 40955 - DNA, 60 bp, Artificial
  Synthetic oligonucleotide
gtgcgtgggatgttatgcaggtcgcagatgccgacggaaagcctgtaaatgcaactgaca

SEQ ID NO: 40956 - DNA, 60 bp, Artificial
  Synthetic oligonucleotide
gcgggtttggcacgtatggcgcacccatcggggttagtagaaccatgcattgtcaaagtg

SEQ ID NO: 40957 - DNA, 60 bp, Artificial
  Synthetic oligonucleotide
gcctctacaggcacggatcaggctgttgttaaagtctgggttaaggatgaaggtgcgcag

SEQ ID NO: 40958 - DNA, 60 bp, Artificial
  Synthetic oligonucleotide
cgcgacacctgctatatcaaccgtggacatacaacccaccgctgaagtggtacgtggtgt

SEQ ID NO: 40959 - DNA, 60 bp, Artificial
  Synthetic oligonucleotide
gttcggccgtgcagtgatggagggtgtgcctggtccatctaagcttagaagtatggtgac

SEQ ID NO: 40960 - DNA, 60 bp, Artificial
  Synthetic oligonucleotide
gggcacatggatttgaactcacaaccctgcattacttcgctaaagtgggaccagagcgta

SEQ ID NO: 40961 - DNA, 60 bp, Artificial
  Synthetic oligonucleotide
gctcccaagcctgaaaagcctaaggctgcccctccacagaatgtttcctggtttgccccg

SEQ ID NO: 40962 - DNA, 60 bp, Artificial
  Synthetic oligonucleotide
gacagttcttggtgatgttgttaccagggttgtcaggaagacggcagacttcgtgcgggg

SEQ ID NO: 40963 - DNA, 60 bp, Artificial
  Synthetic oligonucleotide
cctgggagacaggcaaaatgcgcccgcccctaaatcggaattatgtgttcactgggtttc

SEQ ID NO: 40964 - DNA, 60 bp, Artificial
  Synthetic oligonucleotide
cgaggaccctaatattgtagctcgcgccatgagtgtaaggaagatcgtccagcagtggcc

SEQ ID NO: 40965 - DNA, 60 bp, Artificial
  Synthetic oligonucleotide
cgagtgggagtatacagatttcttcgctgactccgaagacggtcaactcaacattgctgg

SEQ ID NO: 40966 - DNA, 60 bp, Artificial
  Synthetic oligonucleotide
cctgattttcctttgcctgtggccgctagtgttgcagagctctgtgtgcaaaccgatctg

SEQ ID NO: 40967 - DNA, 60 bp, Artificial
  Synthetic oligonucleotide
gcacgatgtcaggttttgagtgttttatgcctacaatcccacagtgtccagcagtgcttg

SEQ ID NO: 40968 - DNA, 60 bp, Artificial
  Synthetic oligonucleotide
gttactggtgtcatgaacacaagccacgtcttgcattcccgttgtgctctgctggtaatg

SEQ ID NO: 40969 - DNA, 60 bp, Artificial
  Synthetic oligonucleotide
ccccttataacagccagaattatgttgccagccgtttgctaggtttacaaattcagacag

SEQ ID NO: 40970 - DNA, 60 bp, Artificial
  Synthetic oligonucleotide
gacgtgaattggacagcacctcttgtccctgccgttgattctgtagtggagcctgttgtc

SEQ ID NO: 40971 - DNA, 60 bp, Artificial
  Synthetic oligonucleotide
agcgacttggctgctgggctatggctttgccctctaaccagcggtcttggtcttgcacac

SEQ ID NO: 40972 - DNA, 60 bp, Artificial
  Synthetic oligonucleotide
gtctctatgggtaccaggaactctcggacttctcccacacacaggttgtatggcaacacc

SEQ ID NO: 40973 - DNA, 60 bp, Artificial
  Synthetic oligonucleotide
ggtggttcactgtatgttaacaatcatgcattccacacaccggcttttgacaagcgtgct

SEQ ID NO: 40974 - DNA, 60 bp, Artificial
  Synthetic oligonucleotide
ccttcgtccaattggttaatctgtgcttcacttgtcaccggttgtgtaatagcgcagttt

SEQ ID NO: 40975 - DNA, 60 bp, Artificial
  Synthetic oligonucleotide
cgaatttgaccgtgaggcttctactcagcgtaagcttgatagaatggcggaacaggctgc

SEQ ID NO: 40976 - DNA, 60 bp, Artificial
  Synthetic oligonucleotide
ggttgctaatggcctacgtgcaccaactggaacacttgattcactactgttgtccgccaa

SEQ ID NO: 40977 - DNA, 60 bp, Artificial
  Synthetic oligonucleotide
ggcgctgtgattgacggcaacaccatgcatgccaattatatcttctggcgtaattccaca

SEQ ID NO: 40978 - DNA, 60 bp, Artificial
  Synthetic oligonucleotide
ggcggttcttttcaaaatttaatgttcaggcacctgccgtcgtcgttttgggtggttacc

SEQ ID NO: 40979 - DNA, 60 bp, Artificial
  Synthetic oligonucleotide
ttggtgctggctccgataagggtgttgcacctggcacggctgtcttacgacgttggttgc

SEQ ID NO: 40980 - DNA, 60 bp, Artificial
  Synthetic oligonucleotide
ctagtgttctgctgcatttccacgggttgttgtggatgctgcggttgctgcggtgcttgt

SEQ ID NO: 40981 - DNA, 60 bp, Artificial
  Synthetic oligonucleotide
gtcctatagttgttggtgtatcagacgaagctcgcactgttccaggtatcccagcaggtg

SEQ ID NO: 40982 - DNA, 60 bp, Artificial
  Synthetic oligonucleotide
aagcgcatgttcggtgatatgtctgttggcgttttcactgtcggtgcttgtactttgttg

SEQ ID NO: 40983 - DNA, 60 bp, Artificial
  Synthetic oligonucleotide
agcttttgagttgtatgccaagcgtaaggtaggactcacccctcccattacgatcctacg

SEQ ID NO: 40984 - DNA, 60 bp, Artificial
  Synthetic oligonucleotide
cgctagtggatttatgcaatgccgttttgtgtccctcgatctcgctgtcactcttgaggg

SEQ ID NO: 40985 - DNA, 60 bp, Artificial
  Synthetic oligonucleotide
gttcgtaaccttaacacgttgcgtaggggtgctgttcttggctacataggtgccactgta

SEQ ID NO: 40986 - DNA, 60 bp, Artificial
  Synthetic oligonucleotide
ccactcggcagtatcatcagaaacaccttaaatccatagttaatactaggggcgcttcgg

SEQ ID NO: 40987 - DNA, 60 bp, Artificial
  Synthetic oligonucleotide
gaccaacaaggaacttccattcagcgtattctttattgtgatgatcctgttagccaactc

SEQ ID NO: 40988 - DNA, 60 bp, Artificial
  Synthetic oligonucleotide
gccatcgcaagtgctgtgctgtcctctagttcctggttggcgttccgtcgccttctacat

SEQ ID NO: 40989 - DNA, 60 bp, Artificial
  Synthetic oligonucleotide
taaaggttaatcaaaacaatgtccacacgcctaagtacacctatcgcacagttagaccgg

SEQ ID NO: 40990 - DNA, 60 bp, Artificial
  Synthetic oligonucleotide
cgttttgtacttgagaatgacgtttgcaaggtttgtggttgttggctgtctaatggctgc

SEQ ID NO: 40991 - DNA, 60 bp, Artificial
  Synthetic oligonucleotide
gctttctatgagtgcaaccctgaaggtttgatgtccttaggtgctgacaagctggtgttg

SEQ ID NO: 40992 - DNA, 60 bp, Artificial
  Synthetic oligonucleotide
ggattggcattctggcgaattcttaaggtgcagtccaaagacgacctcgcttgctctggt

SEQ ID NO: 40993 - DNA, 60 bp, Artificial
  Synthetic oligonucleotide
gcttgtcaaggcaaaagctcgcggcccacgacaggcaggtatttgtgaagttcgctacac

SEQ ID NO: 40994 - DNA, 60 bp, Artificial
  Synthetic oligonucleotide
gggagtcctattgtactggtgatgttgctatgtttgtgcattggttgtactggcttactg

SEQ ID NO: 40995 - DNA, 60 bp, Artificial
  Synthetic oligonucleotide
ctgttctgtagtctgcggttgtggtactggtgaacgtatctatgagggttgtgcttttcg

SEQ ID NO: 40996 - DNA, 60 bp, Artificial
  Synthetic oligonucleotide
ctacattaaacccgtcagagctcgtgctccaccaggggaacaattcgcacaccttttgcc

SEQ ID NO: 40997 - DNA, 60 bp, Artificial
  Synthetic oligonucleotide
caatgctttgccagagtgtaatgcggacattgttgtggtggatgaagtttctatgtgcac

SEQ ID NO: 40998 - DNA, 60 bp, Artificial
  Synthetic oligonucleotide
ccttggtggtttacatctactaatttcgcaggtgcgtctggcctgtatgggtgtgcttaa

SEQ ID NO: 40999 - DNA, 60 bp, Artificial
  Synthetic oligonucleotide
ggaaggtggcactgatcctaatctgcccgtaatggtttctcagtggccgttgaatgatga

SEQ ID NO: 41000 - DNA, 60 bp, Artificial
  Synthetic oligonucleotide
cccggcttcatctggcactggttgggctttctatgtccggtcaaaacacggcgactattc

SEQ ID NO: 41001 - DNA, 60 bp, Artificial
  Synthetic oligonucleotide
gctgagtccctgtcatggcccctggtccttgggtgtctccgtattgttaagctccagaat

SEQ ID NO: 41002 - DNA, 60 bp, Artificial
  Synthetic oligonucleotide
tgaaccctgtacagctaattgcactggttacgctgccaatgtatttgccactgattccaa

SEQ ID NO: 41003 - DNA, 60 bp, Artificial
  Synthetic oligonucleotide
ggcacgcctaaaccacttgaaggtatcacagacgtttcttttatgactctggatgtgtgt

SEQ ID NO: 41004 - DNA, 60 bp, Artificial
  Synthetic oligonucleotide
tcttgtcaaggatagtatacctgtggtgtggcttgtacgtgatttcattgccctttcgga

SEQ ID NO: 41005 - DNA, 60 bp, Artificial
  Synthetic oligonucleotide
aatcctgacaggcataagcaacagcagaagcctaagcaggaaaagtctgacaacagcggc

SEQ ID NO: 41006 - DNA, 60 bp, Artificial
  Synthetic oligonucleotide
gctctgtggctgatctagtctgtgcgcagtattactctggtgtcatggtactacctggcg

SEQ ID NO: 41007 - DNA, 60 bp, Artificial
  Synthetic oligonucleotide
gggtgtcagaaaggcgtctgaaaagccaatcattccaaaattctctcaacagctccccag

SEQ ID NO: 41008 - DNA, 60 bp, Artificial
  Synthetic oligonucleotide
gcggatcttaacgcattcaaggctgttttgtattaccagaacaacgtcttcatgagcgcc

SEQ ID NO: 41009 - DNA, 60 bp, Artificial
  Synthetic oligonucleotide
cttggtggtctttcaatcctgaaactgacgcgcttctcactacttctgtgatgggccgac

SEQ ID NO: 41010 - DNA, 60 bp, Artificial
  Synthetic oligonucleotide
ccgactggacattctttcagccgatgttcaggttgatcgtctcatcaccggcagattatc

SEQ ID NO: 41011 - DNA, 60 bp, Artificial
  Synthetic oligonucleotide
agcaaattcttggccatacctcgttgacagatgagtttactacaggtgaagttgtacgtc

SEQ ID NO: 41012 - DNA, 60 bp, Artificial
  Synthetic oligonucleotide
cgttgttttccactaccatacctattacggcatttggacctttgtgtcgcaagtgctgga

SEQ ID NO: 41013 - DNA, 60 bp, Artificial
  Synthetic oligonucleotide
cggcacatacacatggcgcttctttaatacacctgcgagttctgtcacttatgtggtagc

SEQ ID NO: 41014 - DNA, 60 bp, Artificial
  Synthetic oligonucleotide
gaccatagaccaccaatatcgttccctttgtgtgcgaatggtcaggtgtttggtctctac

SEQ ID NO: 41015 - DNA, 57 bp, Artificial
  Synthetic oligonucleotide
ttttaacttaacaaaacggacttaaatacctacagctggtcctcataggtgttccat

SEQ ID NO: 41016 - DNA, 60 bp, Artificial
  Synthetic oligonucleotide
taacttaacaaaacggacttaaatacctacagctggtcctcataggtgttccattgcagg

SEQ ID NO: 41017 - DNA, 60 bp, Artificial
  Synthetic oligonucleotide
acccagaatcacgtgagtgtttcaaggttatagttaataatggtaattctgatgtaggac

SEQ ID NO: 41018 - DNA, 60 bp, Artificial
  Synthetic oligonucleotide
cgtcgtactcctagtggcgatgagtcagttgaggtttgttttggaccccgtggtggcacc

SEQ ID NO: 41019 - DNA, 60 bp, Artificial
  Synthetic oligonucleotide
aaaccgaccctgttatactccttgaacgatatgtgtctttagctatagatgcctaccctc

SEQ ID NO: 41020 - DNA, 65 bp, Artificial
  Synthetic oligonucleotide
gtgctttaagatttattgtagaggtaatgttcaggttgataatggttctagtattaacagacgac

SEQ ID NO: 41021 - DNA, 60 bp, Artificial
  Synthetic oligonucleotide
gtcagccgaagtaatctctatcttgccattcgtggtagtgctgagtcagatatccaactg

SEQ ID NO: 41022 - DNA, 60 bp, Artificial
  Synthetic oligonucleotide
ctatagatgagattttggccaacctacctaataatactgtgcctgatttgccacttgatg

SEQ ID NO: 41023 - DNA, 60 bp, Artificial
  Synthetic oligonucleotide
acaagtgtcgtgctgctccagggttcttggtgtgggttccgtctcacacttcacaccctc

SEQ ID NO: 41024 - DNA, 60 bp, Artificial
  Synthetic oligonucleotide
cccgttcgtgctcgagctccaccaggcgaccaatttacgcatttgttacctttgttgcgt

SEQ ID NO: 41025 - DNA, 60 bp, Artificial
  Synthetic oligonucleotide
cagcaagacgtcacgcaagatgaagtggaagctgtctgtgacttagttgttaaggccact

SEQ ID NO: 41026 - DNA, 60 bp, Artificial
  Synthetic oligonucleotide
ggtgatcgctggtggctcagttctgttagtgtaggtgtagatacttataatgagtgggcc

SEQ ID NO: 41027 - DNA, 60 bp, Artificial
  Synthetic oligonucleotide
gttggaggaagttgactttgtggagccaggtgttgatggcaagctcgtaattcttgatga

SEQ ID NO: 41028 - DNA, 60 bp, Artificial
  Synthetic oligonucleotide
ggttaatgcaagtgttcttaaggtggggttagatgatggtaactgcgtacatggtctccc

SEQ ID NO: 41029 - DNA, 60 bp, Artificial
  Synthetic oligonucleotide
gttggcacacctatatgcaagcggtatacagatggttacgcaaattccacattcgacaag

SEQ ID NO: 41030 - DNA, 60 bp, Artificial
  Synthetic oligonucleotide
tgctcaggttgacgcatacaagctcggcgatcccaagcctcagcgtaaagtcaaacgttc

SEQ ID NO: 41031 - DNA, 60 bp, Artificial
  Synthetic oligonucleotide
cctgttcaggttgttgttactcaagaccagcgtagttttcatactgtggaattgtcgact

SEQ ID NO: 41032 - DNA, 60 bp, Artificial
  Synthetic oligonucleotide
cctagcaagattaagcaacgtccaattaaggcagaaggtgagggtgttgtagcagatggt

SEQ ID NO: 41033 - DNA, 60 bp, Artificial
  Synthetic oligonucleotide
ttgactcaccacttaatgtgcctgggttttcctgtaacggcgccaatggttctagctcag

SEQ ID NO: 41034 - DNA, 60 bp, Artificial
  Synthetic oligonucleotide
gcaaagaacattccatccttaatgttgtgggaccacgcaaaggtaagcacgcagctgagt

SEQ ID NO: 41035 - DNA, 60 bp, Artificial
  Synthetic oligonucleotide
ccaggcttctattatcactctaatgacaccaccaattgcacctcaccaagacttgtttac

SEQ ID NO: 41036 - DNA, 60 bp, Artificial
  Synthetic oligonucleotide
gacctttgtgtaggaagtgttggattgatggggtgccgttggtgacaactgcaggctacc

SEQ ID NO: 41037 - DNA, 60 bp, Artificial
  Synthetic oligonucleotide
tctcggtcttagtgatgtcccagaggaggagtttagtgctgctgtttctgaggctcatcg

SEQ ID NO: 41038 - DNA, 60 bp, Artificial
  Synthetic oligonucleotide
gcacttgaacgcatcctctcattcgcaggacgtagcagggttttggactattgccgccac

SEQ ID NO: 41039 - DNA, 60 bp, Artificial
  Synthetic oligonucleotide
gcctacaaatgtggccttcgagctatatgccaagcgtaaagtaggtttgacgccaccctt

SEQ ID NO: 41040 - DNA, 60 bp, Artificial
  Synthetic oligonucleotide
gcgcatgtgtttggaaccttgcaatttgtacaattatggcagtggcctgaagttaccaga

SEQ ID NO: 41041 - DNA, 60 bp, Artificial
  Synthetic oligonucleotide
caccccaaaagctgttcctggggctgttgtcatcactaaagctggtattggtgcagggct

SEQ ID NO: 41042 - DNA, 60 bp, Artificial
  Synthetic oligonucleotide
ggttgtacagcttcttctggcatttgtgtgtcttgattgttgtgttgtttgtcgccacta

SEQ ID NO: 41043 - DNA, 60 bp, Artificial
  Synthetic oligonucleotide
gccaaattgggtactattgttgcccgtgccatgcttaagtgtgttaaatactgtgatgca

SEQ ID NO: 41044 - DNA, 59 bp, Artificial
  Synthetic oligonucleotide
gcttctgtaaaattccaacctcgtggtcgttccaagggacgtgttcctctgtctctttt

SEQ ID NO: 41045 - DNA, 60 bp, Artificial
  Synthetic oligonucleotide
gcacaagttttaacagaaatggtttattcaaacggtggcttttatgtcaaacctggtggt

SEQ ID NO: 41046 - DNA, 60 bp, Artificial
  Synthetic oligonucleotide
ggactgggaaaaggtccatatgtactcggcttcacttgtcggtggtatgaccttaggtgg

SEQ ID NO: 41047 - DNA, 60 bp, Artificial
  Synthetic oligonucleotide
gctgtcttggttttatctttcttgttcatgatcttaacatggctgctgggcattggaatc

SEQ ID NO: 41048 - DNA, 60 bp, Artificial
  Synthetic oligonucleotide
gcgcaagttgacagacttatcacaggtcggcttgcagctcttaatgcctttgttgcacag

SEQ ID NO: 41049 - DNA, 60 bp, Artificial
  Synthetic oligonucleotide
tgctaagacccagccaacaggccttggcgtacgtaagtcgtctgagaagccgttggttcc

SEQ ID NO: 41050 - DNA, 60 bp, Artificial
  Synthetic oligonucleotide
gcaggtaagtcttttgccaagattggagactatgttctcttgccttcagcacttgtccgt

SEQ ID NO: 41051 - DNA, 60 bp, Artificial
  Synthetic oligonucleotide
taccggcttgcatgctttgcacatctggctaaagctatgagtgattttgctaatgaccac

SEQ ID NO: 41052 - DNA, 60 bp, Artificial
  Synthetic oligonucleotide
cgacaatgacgccgttagctacaagtccacagcgacaacaaagttggtacccggtatggt

SEQ ID NO: 41053 - DNA, 60 bp, Artificial
  Synthetic oligonucleotide
tgaacttgagttggagccaatcttcgagtgtgatgccatcccaggctttccaaaagttgc

SEQ ID NO: 41054 - DNA, 60 bp, Artificial
  Synthetic oligonucleotide
cccaggctatgacttattgtcgtaccggtgaatgcatcgactcccaagctggtgtttgtg

SEQ ID NO: 41055 - DNA, 60 bp, Artificial
  Synthetic oligonucleotide
ggcgacgcacccattcttggtggtcctacaatcctgaaacggactctattctgtctgtct

SEQ ID NO: 41056 - DNA, 60 bp, Artificial
  Synthetic oligonucleotide
caccgcttaagactgcattccccatgggacgttgtttaatatgttctaagactcttatgc

SEQ ID NO: 41057 - DNA, 60 bp, Artificial
  Synthetic oligonucleotide
cctgttgatcaatttatgtgcggtgcagatggtgcccctgtcatccaggagggtgattgg

SEQ ID NO: 41058 - DNA, 60 bp, Artificial
  Synthetic oligonucleotide
ctatgtttggaacaccattggagccgtttcacacctggctggcaccttgtatgttcaaca

SEQ ID NO: 41059 - DNA, 60 bp, Artificial
  Synthetic oligonucleotide
gtcatacagagtgttgacagcggttatttaaacgagtgcggggctctagtgcagctcgac

SEQ ID NO: 41060 - DNA, 60 bp, Artificial
  Synthetic oligonucleotide
ggattaacaggttttgcaagctcacattgggttgctacgagtttaaagtcagcgccgcag

SEQ ID NO: 41061 - DNA, 60 bp, Artificial
  Synthetic oligonucleotide
ggtgttaagggtgtctttcttagctatgtgagttctgggcgtgggtttacgataggggtt

SEQ ID NO: 41062 - DNA, 60 bp, Artificial
  Synthetic oligonucleotide
actcatggccagttggatggcttgtgcctgttttggaattgcaatgtggacatgtaccca

SEQ ID NO: 41063 - DNA, 60 bp, Artificial
  Synthetic oligonucleotide
gctgctggtgtggccctcggataccaggacaacgtttggctcttacatttattgcctttt

SEQ ID NO: 41064 - DNA, 60 bp, Artificial
  Synthetic oligonucleotide
cgatagttctgtcctccagagcgttgcagccacatatgttaacttgccttcctatttggc

SEQ ID NO: 41065 - DNA, 60 bp, Artificial
  Synthetic oligonucleotide
cggtagtgctgcaggtgtttatggcgttaatatgcgtacaaactacactatcagaggttc

SEQ ID NO: 41066 - DNA, 60 bp, Artificial
  Synthetic oligonucleotide
aacagtgatttatgtcttggttcttttgttagggattgtgatggttatgttcaaggttca

SEQ ID NO: 41067 - DNA, 60 bp, Artificial
  Synthetic oligonucleotide
gccttgtgctagattttgtcttcggacaccaactcgaactaaacgaaatatttgtctttc

SEQ ID NO: 41068 - DNA, 60 bp, Artificial
  Synthetic oligonucleotide
gccttgtgctagatttgtcttcggacaccaactcgaactaaacgaaatatttgttcttct

SEQ ID NO: 41069 - DNA, 60 bp, Artificial
  Synthetic oligonucleotide
gctttgtgctagattttgtcttcggacaccaactcgaactaaacgaaatatttgtctttc

SEQ ID NO: 41070 - DNA, 60 bp, Artificial
  Synthetic oligonucleotide
gccttgtgctagatttgtcttcggacaccaactcgaactaaacgaaatatttgtctctct

SEQ ID NO: 41071 - DNA, 52 bp, Artificial
  Synthetic oligonucleotide
gttgatcaaagttatttaaacgagtgcggggttctagtgcagctcgactaga

SEQ ID NO: 41072 - DNA, 60 bp, Artificial
  Synthetic oligonucleotide
tacagcgtatgtgtctcgaacggtgtaatctctacaattatggtgcacaagtgaagttac

SEQ ID NO: 41073 - DNA, 60 bp, Artificial
  Synthetic oligonucleotide
ccgttatggaccatgagcaagtctgttataacgatcttaaagattctggtgctgttgctg

SEQ ID NO: 41074 - DNA, 60 bp, Artificial
  Synthetic oligonucleotide
cactgtacaaaatccagcgtatgtgtctcgaacggtgtaatctctacaattatggtgcac

SEQ ID NO: 41075 - DNA, 60 bp, Artificial
  Synthetic oligonucleotide
attactggtcatcgcgctgtctactcttgtacagaatggtaagcacgtgtaataggaggt

SEQ ID NO: 41076 - DNA, 60 bp, Artificial
  Synthetic oligonucleotide
ggctatagcatgcctacattgtacaaaatccagcgtatgtgtctcgaacggtgtaatctc

SEQ ID NO: 41077 - DNA, 52 bp, Artificial
  Synthetic oligonucleotide
gaccagcgtactgtctgtttctccattgcagctttgagtactggtattacat

SEQ ID NO: 41078 - DNA, 60 bp, Artificial
  Synthetic oligonucleotide
gccctgcacttttagatcagcgtactgtctgtttctccattgcagctttgagtactggtg

SEQ ID NO: 41079 - DNA, 60 bp, Artificial
  Synthetic oligonucleotide
gaccatgagcaagtctgttataacgatcttaaagattcaggtgcggttgctgaacatgac

SEQ ID NO: 41080 - DNA, 60 bp, Artificial
  Synthetic oligonucleotide
gaccatgagcaagtctgttataacgatcttaaagattctggtgctgttgctgagcatgac

SEQ ID NO: 41081 - DNA, 60 bp, Artificial
  Synthetic oligonucleotide
gttgtgctacgacacccataccatggttttgttatgatcgtgatcctattaataataatg

SEQ ID NO: 41082 - DNA, 60 bp, Artificial
  Synthetic oligonucleotide
ctctgaaaattttcgctgctgaaactgtgaaagcaaaggaggagtctgttaaagctgaat

SEQ ID NO: 41083 - DNA, 60 bp, Artificial
  Synthetic oligonucleotide
gtcaaggaatctctgaaaattttcgctgctgaaactgtgaaagctaaggaggagtctgtt

SEQ ID NO: 41084 - DNA, 60 bp, Artificial
  Synthetic oligonucleotide
gtcaaagaatctctgaaaattttcgctgctgaaactgtgaaagctaaggaggagtctgtt

SEQ ID NO: 41085 - DNA, 60 bp, Artificial
  Synthetic oligonucleotide
gtggtaatggaagacatgttctaaccataccgcaaaatgcacctaatggtatagtgttta

SEQ ID NO: 41086 - DNA, 60 bp, Artificial
  Synthetic oligonucleotide
gggacttgtagatacttcaataggcaataattttgagcctgtgaattctaaagcacctcc

SEQ ID NO: 41087 - DNA, 60 bp, Artificial
  Synthetic oligonucleotide
gtcacgcctgagggaattgtagatacttcaataggcaataattttgagcctgtcaactct

SEQ ID NO: 41088 - DNA, 60 bp, Artificial
  Synthetic oligonucleotide
ggtgcaaatgcttttgataagaattatttaaacgggtacggggtagcagtgaggctcggc

SEQ ID NO: 41089 - DNA, 60 bp, Artificial
  Synthetic oligonucleotide
gcgtgatgttgataatggttgtttgatgggatgggactatcctaagtgtgaccgtgcttt

SEQ ID NO: 41090 - DNA, 60 bp, Artificial
  Synthetic oligonucleotide
gcgtgacgttgataatggttgtttgatgggatgggactatcctaagtgtgaccgtgcttt

SEQ ID NO: 41091 - DNA, 60 bp, Artificial
  Synthetic oligonucleotide
catccaaaagtatggtcttgaggattatggttttgaacacgttgtatttggagatgtctc

SEQ ID NO: 41092 - DNA, 60 bp, Artificial
  Synthetic oligonucleotide
tctcgaggattatggttttgaacacgttgtatttggagatgtctctaaaactaccatcgg

SEQ ID NO: 41093 - DNA, 60 bp, Artificial
  Synthetic oligonucleotide
gttgtggttaatggttcaatgaagactgtttatgtccatgctaacggtactggtaaactc

SEQ ID NO: 41094 - DNA, 65 bp, Artificial
  Synthetic oligonucleotide
gtcattggattactaaggaagggtaagttgctcattagaaataatggtaagttactaaactttgg

SEQ ID NO: 41095 - DNA, 60 bp, Artificial
  Synthetic oligonucleotide
actactggtcatcgcgctgtctactcttgtacagaatggtaagcatgtgtaataggaggt

SEQ ID NO: 41096 - DNA, 60 bp, Artificial
  Synthetic oligonucleotide
gtcagcaggttttccattcaataagtttggtaaggcccgtctgtattatgaatctctcag

SEQ ID NO: 41097 - DNA, 60 bp, Artificial
  Synthetic oligonucleotide
gtcgttgtcatatagaacatcccggtgcaagtggcgtatgtaaatacaagggcaagtttg

SEQ ID NO: 41098 - DNA, 60 bp, Artificial
  Synthetic oligonucleotide
gtgttatgacacctcatgtgtcacgtgaacgccttactaagtatacaatggcggatttag

SEQ ID NO: 41099 - DNA, 60 bp, Artificial
  Synthetic oligonucleotide
agaaatacttgtgttacgtggttgttgtactgcagactatttcgacaagaaggactggta

SEQ ID NO: 41100 - DNA, 60 bp, Artificial
  Synthetic oligonucleotide
gggtgcacatgtggctagctgtgatgccataatgactaggtgtttagctatccatgactg

SEQ ID NO: 41101 - DNA, 60 bp, Artificial
  Synthetic oligonucleotide
cgtgtatgcagcagatcctgctatgcatgtagcggctagtaacgcattggctgataaacg

SEQ ID NO: 41102 - DNA, 60 bp, Artificial
  Synthetic oligonucleotide
gggcacatgggtttgaactcacgacccttcattacttcgctaaagtaggacctgaacgca

SEQ ID NO: 41103 - DNA, 60 bp, Artificial
  Synthetic oligonucleotide
gacggcggatgcctacaggcaagtcaggttgttgtagctaattatgataagtcagcaggt

SEQ ID NO: 41104 - DNA, 60 bp, Artificial
  Synthetic oligonucleotide
gcatgttatgtgttctagggatgagttagctaatcctgattaccctcgtttgtctatgcg

SEQ ID NO: 41105 - DNA, 60 bp, Artificial
  Synthetic oligonucleotide
cgtacagtgcaggtaggtgaccttgcttttcactcctttcaggatgcagctttgcagacg

SEQ ID NO: 41106 - DNA, 50 bp, Artificial
  Synthetic oligonucleotide
agctggcctgacacgtatggctcacccttcaggtttagtagagccgtgcg

SEQ ID NO: 41107 - DNA, 60 bp, Artificial
  Synthetic oligonucleotide
gcaagtgcctcaattagcggcgcctgattgtactataactgttaatgttttagcatggct

SEQ ID NO: 41108 - DNA, 60 bp, Artificial
  Synthetic oligonucleotide
cgtatgtactgcagtaggttggttgtataactgctggaccggtagtgctgatactgttgc

SEQ ID NO: 41109 - DNA, 60 bp, Artificial
  Synthetic oligonucleotide
ccctcgtttgtctatgcgagctgctaattatgattttcacgtgtctcaaaatggtcataa

SEQ ID NO: 41110 - DNA, 60 bp, Artificial
  Synthetic oligonucleotide
tgctatctgtgttacaacaattacgtgttgaatccagtagtaaattgtgggcactgtgtg

SEQ ID NO: 41111 - DNA, 60 bp, Artificial
  Synthetic oligonucleotide
cagtcaggtgtttactgtggtacaagtgcatttgatttatttatgaatatgctgctgcct

SEQ ID NO: 41112 - DNA, 60 bp, Artificial
  Synthetic oligonucleotide
ggccggcaggtgcgggtgttgccgtaatggatacttattattcattggctatgcccgttt

SEQ ID NO: 41113 - DNA, 60 bp, Artificial
  Synthetic oligonucleotide
gccgaaccattgagtccggcttatgcacctacttttgtgtccgtaaatgacaagttcaaa

SEQ ID NO: 41114 - DNA, 60 bp, Artificial
  Synthetic oligonucleotide
tttattagacacatatagtgtcatgttggctagtgataacgcttctaagtactgggaggt

SEQ ID NO: 41115 - DNA, 60 bp, Artificial
  Synthetic oligonucleotide
gtgtttatgtctgaatctaagtgttgggtagaaccagatataactaaaggtcctcatgag

SEQ ID NO: 41116 - DNA, 60 bp, Artificial
  Synthetic oligonucleotide
gctacttgcgattggagtaacagtaaagattatgtcttagctaatacagctacagagcgt

SEQ ID NO: 41117 - DNA, 60 bp, Artificial
  Synthetic oligonucleotide
gggactatcctaaatgtgatagagctatgcctaacctattgcgtatatttgctagcctta

SEQ ID NO: 41118 - DNA, 55 bp, Artificial
  Synthetic oligonucleotide
tgatgatccttagtgatgatggtgtggtctgctataatgcggactacgcacaaaa

SEQ ID NO: 41119 - DNA, 60 bp, Artificial
  Synthetic oligonucleotide
ttttaaacccgcagtggtttacaccttggtatataatgaggccaattgagtataatgtcg

SEQ ID NO: 41120 - DNA, 60 bp, Artificial
  Synthetic oligonucleotide
gcgtatgaatgtcgttgcgggtgtgagccaaactgcttgtgttactgatgctgtagctta

SEQ ID NO: 41121 - DNA, 60 bp, Artificial
  Synthetic oligonucleotide
tggagtactgtaaagtgggtcgttgtgacgtttctgaagccggattgtgcatgtcgctac

SEQ ID NO: 41122 - DNA, 60 bp, Artificial
  Synthetic oligonucleotide
acagttaatgcaacggatattacacgcgagaatagtgtaaacttggcatggccgttagta

SEQ ID NO: 41123 - DNA, 60 bp, Artificial
  Synthetic oligonucleotide
gcatgtcgctacaacctcggtgggtcgtcaacaatgcttattttagacaacagtcaggtg

SEQ ID NO: 41124 - DNA, 60 bp, Artificial
  Synthetic oligonucleotide
tacggccgctatgcaaactatgttgttcaacatgatacgtcgtcttgatagtgacgctct

SEQ ID NO: 41125 - DNA, 60 bp, Artificial
  Synthetic oligonucleotide
aacttggatgagttgtgtagtagcattttggaaaataattctgttctccaagctgttgct

SEQ ID NO: 41126 - DNA, 60 bp, Artificial
  Synthetic oligonucleotide
gcttttgtgttgaacgttatagtactgtgtttagagggtccttaccctatgttacccagt

SEQ ID NO: 41127 - DNA, 60 bp, Artificial
  Synthetic oligonucleotide
gtaaaccatgataatgtctgcgatgtccataagggtgcacatgtggctagctgtgatgcc

SEQ ID NO: 41128 - DNA, 60 bp, Artificial
  Synthetic oligonucleotide
gtggggcgtcatgctgtttgtactgtcgttgtcatatagaacatcccggtgcaagtggcg

SEQ ID NO: 41129 - DNA, 60 bp, Artificial
  Synthetic oligonucleotide
gggttggctattacagctaagcctgatgccaatatagaccaagagtcctttggtggggcg

SEQ ID NO: 41130 - DNA, 60 bp, Artificial
  Synthetic oligonucleotide
ccgctacgacgagccaacaatggaagagctaacgtctggatctagtgattgtttaaaatg

SEQ ID NO: 41131 - DNA, 60 bp, Artificial
  Synthetic oligonucleotide
ccgctatgacgagccaacaatggaagagctaacgtctggatctagtgattgtttaaaatg

SEQ ID NO: 41132 - DNA, 60 bp, Artificial
  Synthetic oligonucleotide
gctggcgatcactctggagccgtaggttcgtgtgatgtaacagctatgaacaaggagctc

SEQ ID NO: 41133 - DNA, 60 bp, Artificial
  Synthetic oligonucleotide
gggtaccacgttcttattccgtagtagcaggcgatcactctggagccgtaggttcgtgtg

SEQ ID NO: 41134 - DNA, 60 bp, Artificial
  Synthetic oligonucleotide
ccaaacgcaatgttctacccactattacacagatgaatttaaagtatgctataagtgcta

SEQ ID NO: 41135 - DNA, 60 bp, Artificial
  Synthetic oligonucleotide
gttgctagtgagtttagtaatttatcctcttatgtggattatgaaaatgctcagaaggct

SEQ ID NO: 41136 - DNA, 60 bp, Artificial
  Synthetic oligonucleotide
ccgcctcagtccactcttatacagaatggaatcctagtgtacagtggtataagtaagctg

SEQ ID NO: 41137 - DNA, 60 bp, Artificial
  Synthetic oligonucleotide
tgctataagtgctactacaagggtagtgtcactcatgactcatctagtgctattaataag

SEQ ID NO: 41138 - DNA, 60 bp, Artificial
  Synthetic oligonucleotide
attttgtgcttacatcgcattcggtgcaaccacttagttcacccactttgttacctcagg

SEQ ID NO: 41139 - DNA, 59 bp, Artificial
  Synthetic oligonucleotide
gggagcaggttgttttgtggatgacttactgaagactgatggtactcttatgatggaac

SEQ ID NO: 41140 - DNA, 60 bp, Artificial
  Synthetic oligonucleotide
tagatggtaataagatttacactacctatgtgcaggaactgcagaggcggttatacttgg

SEQ ID NO: 41141 - DNA, 60 bp, Artificial
  Synthetic oligonucleotide
ccaagtgatgtttatcaacaactagctggtgttaagctacagtcaaagcgcacaagagtt

SEQ ID NO: 41142 - DNA, 60 bp, Artificial
  Synthetic oligonucleotide
gttcctcacatccctatttggcacgtacacatggactactatgctgtcattggctactgc

SEQ ID NO: 41143 - DNA, 60 bp, Artificial
  Synthetic oligonucleotide
acgcatcggagaagttgggtagccctgagaggtcagaggaggatgggttttgcccctctg

SEQ ID NO: 41144 - DNA, 60 bp, Artificial
  Synthetic oligonucleotide
ttgtggttccttgactttcgttctctgccagtgacgtgtccattcggcgccagcagccca

SEQ ID NO: 41145 - DNA, 60 bp, Artificial
  Synthetic oligonucleotide
aagatttgtatggtcaatggtatgactttggagattttgtcaagacagtgcctggatgtg

SEQ ID NO: 41146 - DNA, 58 bp, Artificial
  Synthetic oligonucleotide
cgtgggccgagctaagttaccactatcaaagaaacacctacttcttccgctacgtaca

SEQ ID NO: 41147 - DNA, 60 bp, Artificial
  Synthetic oligonucleotide
cacccgactttaaggaggagttagataaatggtttaagaatcagacgtctattgcgcctg

SEQ ID NO: 41148 - DNA, 60 bp, Artificial
  Synthetic oligonucleotide
gcctcaactatgatggcattgcagttcggtagtgctgtcttggtcaagccatccaagcgc

SEQ ID NO: 41149 - DNA, 60 bp, Artificial
  Synthetic oligonucleotide
gcccgtcttgtaccctgtgccagtggcttggacactgatgttcaattaagggcatttgat

SEQ ID NO: 41150 - DNA, 60 bp, Artificial
  Synthetic oligonucleotide
acctagtgtcgtttgtgaaaataaatttaatgtgttgcctgttgatgtcagtgaacccac

SEQ ID NO: 41151 - DNA, 60 bp, Artificial
  Synthetic oligonucleotide
gtcaagctgtctccgccaatgtgtgctcgcttatggcatgcaatggacacaaaattgaag

SEQ ID NO: 41152 - DNA, 60 bp, Artificial
  Synthetic oligonucleotide
gcggatttggcagacagtgttgtacttgtgacgtgggctgccagctttgagctcacatgt

SEQ ID NO: 41153 - DNA, 60 bp, Artificial
  Synthetic oligonucleotide
acctgacatggccgaagaaattgctgctcttgttttggctaagcttggtaaagatgccgg

SEQ ID NO: 41154 - DNA, 60 bp, Artificial
  Synthetic oligonucleotide
ccaagcagtcatgaggctattcctactaggtttgcgcccggcacggtattgcctcagggc

SEQ ID NO: 41155 - DNA, 60 bp, Artificial
  Synthetic oligonucleotide
gcattcattcgtactttatcactgacgagaacagtggtagtagtgagagtgtgtgcactg

SEQ ID NO: 41156 - DNA, 60 bp, Artificial
  Synthetic oligonucleotide
cggtgacgatgttatcttcagccgtacagggagccttgaaccgagccattaccggagccc

SEQ ID NO: 41157 - DNA, 60 bp, Artificial
  Synthetic oligonucleotide
gtgctcgacgtaagtgtgctatagattctgatgttgagaccaagtctattaccaagtccg

SEQ ID NO: 41158 - DNA, 60 bp, Artificial
  Synthetic oligonucleotide
gctatgtataagatcttttgtctttgtagacatgttatgtatggatgtagtagaccaggt

SEQ ID NO: 41159 - DNA, 60 bp, Artificial
  Synthetic oligonucleotide
ccataataatggtaatgatgttctctatcagcctccaaccgcctctgttactacatcatt

SEQ ID NO: 41160 - DNA, 60 bp, Artificial
  Synthetic oligonucleotide
cctgtactcatgggttgggactatcctaaatgtgatcgtgctatgccaaacatactgcgt

SEQ ID NO: 41161 - DNA, 60 bp, Artificial
  Synthetic oligonucleotide
gtccatccttcttcgtaagggtggtaacaaagggtctgtgacatccggccatttccgccg

SEQ ID NO: 41162 - DNA, 60 bp, Artificial
  Synthetic oligonucleotide
gcatgatgttaaagtggccactaagtatgttaagaaggttactggcaaagtagcagtgcg

SEQ ID NO: 41163 - DNA, 60 bp, Artificial
  Synthetic oligonucleotide
gcgtgcattcttagacaaggtagacggtgttagcggttttgctgtttatgtgaagtccaa

SEQ ID NO: 41164 - DNA, 60 bp, Artificial
  Synthetic oligonucleotide
catccagatgttgatggattgtgcaaattacgcggcaagtttgtccaagtgcccttaggc

SEQ ID NO: 41165 - DNA, 60 bp, Artificial
  Synthetic oligonucleotide
cgcctgctatagagcgcactaattgttggctgcgttctactttgatagtaatgcagagtc

SEQ ID NO: 41166 - DNA, 60 bp, Artificial
  Synthetic oligonucleotide
gccagggcaagaagtttggttatgttcagaatggttcatttaaagtggcaagtgttagcc

SEQ ID NO: 41167 - DNA, 60 bp, Artificial
  Synthetic oligonucleotide
cgctgagttatatagtttaatggggaagtttgcgttttggacaatcttttgcaccaacgt

SEQ ID NO: 41168 - DNA, 60 bp, Artificial
  Synthetic oligonucleotide
gttgttatgcatttgcagtggcttgtcatgtatggtgctattatgcccttgtggttttgc

SEQ ID NO: 41169 - DNA, 60 bp, Artificial
  Synthetic oligonucleotide
gtagagttcctttaaaggcttggtgtagcaaccagggtaaatttgcagcgcagtttactc

SEQ ID NO: 41170 - DNA, 60 bp, Artificial
  Synthetic oligonucleotide
attaagtacctttactttgtgaaggggtgtaatacactggccagaggctgggttgttggc

SEQ ID NO: 41171 - DNA, 60 bp, Artificial
  Synthetic oligonucleotide
atagcatcaggttgtttatcaggactggtagctggtggagcttcaaccccgaaacaaaca

SEQ ID NO: 41172 - DNA, 60 bp, Artificial
  Synthetic oligonucleotide
gaagtcgatgattatgtgctagctaatgaatgcaccgaacgccttaaattgtttgccgca

SEQ ID NO: 41173 - DNA, 60 bp, Artificial
  Synthetic oligonucleotide
gcgttctcttgatagagcgctttgtaagtcttgcaattgatgcttatcctttagtatacc

SEQ ID NO: 41174 - DNA, 60 bp, Artificial
  Synthetic oligonucleotide
ggcatctgctagtgcactgcttgatttgcgcacatgttgttttagcgttgcagctatcac

SEQ ID NO: 41175 - DNA, 60 bp, Artificial
  Synthetic oligonucleotide
ggtggcgatttagccgtttgccttaatgttgctgattctgctgtcacttattcgcggctt

SEQ ID NO: 41176 - DNA, 60 bp, Artificial
  Synthetic oligonucleotide
atgtgtgagagaagttagcaaggtcctacgtctaaccataagaacggcgataggcgcccc

SEQ ID NO: 41177 - DNA, 60 bp, Artificial
  Synthetic oligonucleotide
gtgctgttataggtgagaaagtcattgccaagattcaaaatgaggatgtcgtggtcttca

SEQ ID NO: 41178 - DNA, 60 bp, Artificial
  Synthetic oligonucleotide
gctgaggattatcgtgagtaccttgagtcttacaatacggcaaccacagcgggttttacc

SEQ ID NO: 41179 - DNA, 60 bp, Artificial
  Synthetic oligonucleotide
gcagttaagggttgtgtacctttgaatgcaataccatcattgacttcgaacactctgact

SEQ ID NO: 41180 - DNA, 60 bp, Artificial
  Synthetic oligonucleotide
gctgttgggaattggtggtgtgccagtcattgaagtatctcaaattcaatcaagactcac

SEQ ID NO: 41181 - DNA, 60 bp, Artificial
  Synthetic oligonucleotide
gggccagactacacatgagagttctagtgctgttaatatgcagcaaatacatttaattag

SEQ ID NO: 41182 - DNA, 60 bp, Artificial
  Synthetic oligonucleotide
cttaagcagtatacttctgcttgtaaaactattgaagacgccttaagaaatagcgccagg

SEQ ID NO: 41183 - DNA, 60 bp, Artificial
  Synthetic oligonucleotide
tacttaagcagtatacttctgcttgtaaaactattgaagatgccttacgacttagtgctc

SEQ ID NO: 41184 - DNA, 60 bp, Artificial
  Synthetic oligonucleotide
ctggtattctaatagatatggtagttatgttaactcacgtagttgtcctatggtagtggg

SEQ ID NO: 41185 - DNA, 60 bp, Artificial
  Synthetic oligonucleotide
cttgaagaaagctatgaatgtagctaagagtgtgctggataaagatgttgccactacccg

SEQ ID NO: 41186 - DNA, 55 bp, Artificial
  Synthetic oligonucleotide
aaatggcctggccatgttttggaattgcaatgtggattgttatccacacaacgca

SEQ ID NO: 41187 - DNA, 60 bp, Artificial
  Synthetic oligonucleotide
actggcgtaaactttgtagttacgcctagtggttatatagatacagaatctggttctaga

SEQ ID NO: 41188 - DNA, 60 bp, Artificial
  Synthetic oligonucleotide
gaacgagtcactttgtgtacattttgacacaacggaattgcaaatgccttataatagact

SEQ ID NO: 41189 - DNA, 58 bp, Artificial
  Synthetic oligonucleotide
gtggcaggtgtttctatagcatctactatgacaaatagacaatttcatcaaaagatgc

SEQ ID NO: 41190 - DNA, 60 bp, Artificial
  Synthetic oligonucleotide
tgtgtttatgtctgaatctaagtgttgggtagaaccggatataactaaaggtcctcatga

SEQ ID NO: 41191 - DNA, 60 bp, Artificial
  Synthetic oligonucleotide
gtgaagttggtcttgtcaataagagtgttgtgttactacctagcttttacacgcatacca

SEQ ID NO: 41192 - DNA, 60 bp, Artificial
  Synthetic oligonucleotide
ggcaccactattgatcagagttatttaaacgagtgcggggttctagtgcagctcgactag

SEQ ID NO: 41193 - DNA, 60 bp, Artificial
  Synthetic oligonucleotide
ctatgcagagttctactgttgatcagagttatttaaacgagtgcggggttctagtgcagc

SEQ ID NO: 41194 - DNA, 60 bp, Artificial
  Synthetic oligonucleotide
ccttaattttactacagatgtacaatctggcatgggtgctacagtattttcactgaatac

SEQ ID NO: 41195 - DNA, 60 bp, Artificial
  Synthetic oligonucleotide
gtgaagtaagtgcacaggctgctgttattgatggtgccatagttggagctatgacttcca

SEQ ID NO: 41196 - DNA, 60 bp, Artificial
  Synthetic oligonucleotide
gtgacgccatgtgatgtaagcgcacaagcggctgttattgatggtgccatagttggagct

SEQ ID NO: 41197 - DNA, 60 bp, Artificial
  Synthetic oligonucleotide
aatttcactgcagatgtacaatctggtatgggtgctacagtattttcactgaatacaaca

SEQ ID NO: 41198 - DNA, 60 bp, Artificial
  Synthetic oligonucleotide
ccttaatttcactgcagatgtacaatctggtatgggtgctacagtattttcactgaatac

SEQ ID NO: 41199 - DNA, 60 bp, Artificial
  Synthetic oligonucleotide
cgaatgagttattacaggtcttgtatggacattgtcaaatctattgacacatccgtagac

SEQ ID NO: 41200 - DNA, 60 bp, Artificial
  Synthetic oligonucleotide
tccttaagaactaaacgaatgagttattacaggtcttgtatggacattgtcaaatctatt

SEQ ID NO: 41201 - DNA, 60 bp, Artificial
  Synthetic oligonucleotide
cagtgctattaccaacagcttatgaaactgtaacggcttggtcaggtatttgtgcgtcag

SEQ ID NO: 41202 - DNA, 60 bp, Artificial
  Synthetic oligonucleotide
cacatttgttttcacttgcaaatgcggcaccaaatggcatgattttctttcatacagtgc

SEQ ID NO: 41203 - DNA, 60 bp, Artificial
  Synthetic oligonucleotide
acaggtcttgtatggacattgtcaaatctattgacacatccgtagacgctgtacttgacg

SEQ ID NO: 41204 - DNA, 60 bp, Artificial
  Synthetic oligonucleotide
acaggtcttgtatggacattgtcaaatctattgacatattcgtagacgctgtacttgacg

SEQ ID NO: 41205 - DNA, 60 bp, Artificial
  Synthetic oligonucleotide
ccgtagtacaaactttaagacgtgtgtcggtatcttaatgtttaagattgtatcaatgac

SEQ ID NO: 41206 - DNA, 60 bp, Artificial
  Synthetic oligonucleotide
ctttaagacgtgtgtcggcatcttaatgtttaagattgtatcaatgacacttgtagggcc

SEQ ID NO: 41207 - DNA, 52 bp, Artificial
  Synthetic oligonucleotide
ggaaatgtctaatctgtctacttagtagcctggaaacgaacggtagaccctt

SEQ ID NO: 41208 - DNA, 53 bp, Artificial
  Synthetic oligonucleotide
gggaaatgtctaatctgtctacttagtagcctggaaacgaacggtagaccctt

SEQ ID NO: 41209 - DNA, 60 bp, Artificial
  Synthetic oligonucleotide
ctatcgccagggaaatgtctaatttgtctacttagtagcctggaaacgaacggtagaccc

SEQ ID NO: 41210 - DNA, 60 bp, Artificial
  Synthetic oligonucleotide
cacatttgttttcactagcaaatgcagcaccaaatggcatgattttctttcatacagtac

SEQ ID NO: 41211 - DNA, 60 bp, Artificial
  Synthetic oligonucleotide
gatgttcaattaagggcatttgatatttgtaatgctaatcgagctggcattggtttgtat

SEQ ID NO: 41212 - DNA, 60 bp, Artificial
  Synthetic oligonucleotide
ggtatggccattactgttaaacccgatgctaccactaatcaggattcatatggtggtgcg

SEQ ID NO: 41213 - DNA, 60 bp, Artificial
  Synthetic oligonucleotide
caggctttacagagtgaatttgttaatatggctagcttcgttgaatatgaagttgctaag

SEQ ID NO: 41214 - DNA, 60 bp, Artificial
  Synthetic oligonucleotide
gcgacaatactgtcttgcaagccttacagagtgaatttgttaatatggctagcttcgttg

SEQ ID NO: 41215 - DNA, 60 bp, Artificial
  Synthetic oligonucleotide
gcgacaatactgttttgcaagctttacagagtgaatttgttaatatggctagcttcgttg

SEQ ID NO: 41216 - DNA, 60 bp, Artificial
  Synthetic oligonucleotide
ggagtagcccgtctagtacccctaggttctggtgtagaaccagatattgtattaagggct

SEQ ID NO: 41217 - DNA, 60 bp, Artificial
  Synthetic oligonucleotide
ggagtagcccgtctagtacccctaggttctggtgtccaaccagatatagtattaagggct

SEQ ID NO: 41218 - DNA, 60 bp, Artificial
  Synthetic oligonucleotide
actctatcaggagctttctcagaatatgcttatggactactcttttgtcatggatattga

SEQ ID NO: 41219 - DNA, 60 bp, Artificial
  Synthetic oligonucleotide
ggcttatatggatactttcctattgccaacattgattacagttattattggagtttgtgc

SEQ ID NO: 41220 - DNA, 60 bp, Artificial
  Synthetic oligonucleotide
caagattgtgcatggtggacaatgttttgtactgcagtgaatgcttcttcttcagaagca

SEQ ID NO: 41221 - DNA, 60 bp, Artificial
  Synthetic oligonucleotide
caggattgtgcatggtggacaatgttttgtacagcagtgaatgcctcttcttcagaagca

SEQ ID NO: 41222 - DNA, 60 bp, Artificial
  Synthetic oligonucleotide
cagcaggcgtgcctagctttgaggacgttgtggatgccattttccccgattcagaggcat

SEQ ID NO: 41223 - DNA, 60 bp, Artificial
  Synthetic oligonucleotide
tcgccaccaaaggatacaatgtagtccaggctttcggaatgagaggtcctggtccgctgc

SEQ ID NO: 41224 - DNA, 60 bp, Artificial
  Synthetic oligonucleotide
gagcgcatggctgaacaggctatgacgtcaatgtataagcaagcacgtgccgaggacaag

SEQ ID NO: 41225 - DNA, 60 bp, Artificial
  Synthetic oligonucleotide
gacgcccacgtcgcagtcggccggtcctgactatacagcatttaacgtctttcaaggtgt

SEQ ID NO: 41226 - DNA, 60 bp, Artificial
  Synthetic oligonucleotide
acaaggtcactttactggtgtcgaaggtgagttgcccgttgctgtggttaacgacaaaat

SEQ ID NO: 41227 - DNA, 60 bp, Artificial
  Synthetic oligonucleotide
gacccctcaagaatactgtctgccggttgcttcgtcgatgatatcgtcaagactgacggt

SEQ ID NO: 41228 - DNA, 60 bp, Artificial
  Synthetic oligonucleotide
gaattgcgttcctatttgggcatccattctctttgtgacggtatggttgaagcgtatcgg

SEQ ID NO: 41229 - DNA, 60 bp, Artificial
  Synthetic oligonucleotide
ggacgactcgatggatttggacttagactgcgttatagcacagccttcgagcacaatcgt

SEQ ID NO: 41230 - DNA, 60 bp, Artificial
  Synthetic oligonucleotide
catgccttccacacacctgcatatgatgctagtgcattccgtgatctgaaacctttgccc

SEQ ID NO: 41231 - DNA, 60 bp, Artificial
  Synthetic oligonucleotide
atcacccaaattgtgtgaactgtactgatgaccgttgtgtgctacattgtgcaaatttca

SEQ ID NO: 41232 - DNA, 60 bp, Artificial
  Synthetic oligonucleotide
tggtagtgatgtcctcttccagccacccaattgcagtgtcacctcaagcgtgttgcagag

SEQ ID NO: 41233 - DNA, 60 bp, Artificial
  Synthetic oligonucleotide
cccgtgcaatgtttgtcaattttggataggacatggttgtaattgtgatgctcttcgtgg

SEQ ID NO: 41234 - DNA, 60 bp, Artificial
  Synthetic oligonucleotide
caagactttagcaatcccacgtgtagagtgctcgctactgttccaaccaatcttactaca

SEQ ID NO: 41235 - DNA, 60 bp, Artificial
  Synthetic oligonucleotide
gccacgcaactcttgggaggcccttcgtcttaacatgaaattgattggcattggcggtac

SEQ ID NO: 41236 - DNA, 60 bp, Artificial
  Synthetic oligonucleotide
cccgtttaatgtgcaacttgggaccagatatctttctgagtgtttgctatcggtgtcctg

SEQ ID NO: 41237 - DNA, 60 bp, Artificial
  Synthetic oligonucleotide
ggctttgggcacttcggttgagcggatgaggtcgacgagtgagtggactgttgttgagac

SEQ ID NO: 41238 - DNA, 60 bp, Artificial
  Synthetic oligonucleotide
cgcgtgcgcagaagggtattctttgcgtcatgacttctcaagcactcttcgattcgctcg

SEQ ID NO: 41239 - DNA, 60 bp, Artificial
  Synthetic oligonucleotide
cgcaattttcacgcatgaccaaaactaatttgcccgcgcgtacaactcctggaccattgc

SEQ ID NO: 41240 - DNA, 60 bp, Artificial
  Synthetic oligonucleotide
ccgcttccgtgatgctccttgggattacaactggactccctactctgatcttatggacgc

SEQ ID NO: 41241 - DNA, 60 bp, Artificial
  Synthetic oligonucleotide
cctgtgtcgtaacgcaacgttcgaaaaggtccgagactacttaacacctcgtggctggat

SEQ ID NO: 41242 - DNA, 60 bp, Artificial
  Synthetic oligonucleotide
ctctgcacagatggaaagatcgtgcctactttgttcagactcaaaggtggtgcgcctccc

SEQ ID NO: 41243 - DNA, 60 bp, Artificial
  Synthetic oligonucleotide
cctggctatatgcaaggctatgatgaatgtatgcagcaaggtcctcagtcagctcgagac

SEQ ID NO: 41244 - DNA, 60 bp, Artificial
  Synthetic oligonucleotide
cagcatcgttcaaagcggtctgttcggttattgatttaaagcttgacgacttcgttgaca

SEQ ID NO: 41245 - DNA, 60 bp, Artificial
  Synthetic oligonucleotide
atgctgtactggctgtggtactagctgtttggggaaactaaaatgtaatcgttgttgtga

SEQ ID NO: 41246 - DNA, 60 bp, Artificial
  Synthetic oligonucleotide
aatgaccttgctgcaccaaaacctccgactggattaacttattcacacgagggttggcgt

SEQ ID NO: 41247 - DNA, 60 bp, Artificial
  Synthetic oligonucleotide
gcatcagatggagttatcaaatggtactcacactggttgcgcttttgacggtgtcatgta

SEQ ID NO: 41248 - DNA, 60 bp, Artificial
  Synthetic oligonucleotide
tctccgatagtgggtgcgtcttagcatctgaatgcacattgttcagggatgcagagggta

SEQ ID NO: 41249 - DNA, 60 bp, Artificial
  Synthetic oligonucleotide
ggtatcgggaacacctttatctgtgaagaagttgcaaatgacctcactaccagcctacgg

SEQ ID NO: 41250 - DNA, 60 bp, Artificial
  Synthetic oligonucleotide
ctgttgccggtgtttcgatccttagcacaatgactaatcgtcaataccaccagaaaatgc

SEQ ID NO: 41251 - DNA, 60 bp, Artificial
  Synthetic oligonucleotide
tgataattctaagccagtgtcaaagaaactcacgtattccttcttcccggatttcgaggg

SEQ ID NO: 41252 - DNA, 60 bp, Artificial
  Synthetic oligonucleotide
gtcattcctcgcagcatccgaagtcctttcaatgacagaaaagcctgggctgcattctac

SEQ ID NO: 41253 - DNA, 60 bp, Artificial
  Synthetic oligonucleotide
gctaccaaactctcgggaggtgcacccaaatggcttttgaaactccgtgacttcacgtgg

SEQ ID NO: 41254 - DNA, 60 bp, Artificial
  Synthetic oligonucleotide
caaacgaaatggattttgcggaactggcacacatattgtttcatttgccattaatgcccc

SEQ ID NO: 41255 - DNA, 60 bp, Artificial
  Synthetic oligonucleotide
ggtctctctcttttccagcctgtcacctatttccaacttagtacttcgttggctttgggt

SEQ ID NO: 41256 - DNA, 60 bp, Artificial
  Synthetic oligonucleotide
cgtgcctttcaatagccgcgattcagtacctcttcacataatcgcacccagcgtgcttac

SEQ ID NO: 41257 - DNA, 60 bp, Artificial
  Synthetic oligonucleotide
cgccctcctcccggtgaacaatttaagcatttggtgcctcttatgaataaaggagccgcc

SEQ ID NO: 41258 - DNA, 60 bp, Artificial
  Synthetic oligonucleotide
cgcagggcaagcttattattcgcgacaatgatacgctcagtgttagtactgatgtgctcg

SEQ ID NO: 41259 - DNA, 60 bp, Artificial
  Synthetic oligonucleotide
atttgcggctgagacacttagagcaactgaagaagcctctaaacagtcgtacgctattgc

SEQ ID NO: 41260 - DNA, 60 bp, Artificial
  Synthetic oligonucleotide
ggctacgctgcaactcaccaagtttactatctggaactacttgtttgaggcgatacccct

SEQ ID NO: 41261 - DNA, 60 bp, Artificial
  Synthetic oligonucleotide
gcacacgcgctgcaagttctgctgtaacgctgcaaaataatgagatcaggccatctggtc

SEQ ID NO: 41262 - DNA, 60 bp, Artificial
  Synthetic oligonucleotide
gcaattcggtgcacatcatgtctttcgtggctggtgtggctcctcaaggtgcgaggggca

SEQ ID NO: 41263 - DNA, 60 bp, Artificial
  Synthetic oligonucleotide
ggaggccgcccattatacaagaccaagaactcgcactgctaagggcttaattgctctagt

SEQ ID NO: 41264 - DNA, 60 bp, Artificial
  Synthetic oligonucleotide
cagcgtacgtcgattgcacgagctgtggtaaaggtagttggctgactggcaatgctgtgc

SEQ ID NO: 41265 - DNA, 60 bp, Artificial
  Synthetic oligonucleotide
cttgtgtgttggaagcctctcaagtagctaacgcggctgaggttgaatcatgtgaggcag

SEQ ID NO: 41266 - DNA, 60 bp, Artificial
  Synthetic oligonucleotide
gctatgcccgtttgtttacaggtaatagctattgatggtgagaaagttgatggtcgatcg

SEQ ID NO: 41267 - DNA, 60 bp, Artificial
  Synthetic oligonucleotide
gcaactcactaaccttgtcttctcctcatgccagagcgcagttgcagcctttgtacaggc

SEQ ID NO: 41268 - DNA, 60 bp, Artificial
  Synthetic oligonucleotide
cgtggttccagacgcttagcacagcagaagattaatgaatgtgtcaagtcacaatctaat

SEQ ID NO: 41269 - DNA, 60 bp, Artificial
  Synthetic oligonucleotide
tcctggtagtggtaagtcacattgttccattggacttggattgtactacccaggtgcgcg

SEQ ID NO: 41270 - DNA, 60 bp, Artificial
  Synthetic oligonucleotide
tagggactataaacttgctaatgatgttaaagatacacttagactctttgcggctgaaac

SEQ ID NO: 41271 - DNA, 60 bp, Artificial
  Synthetic oligonucleotide
gctcatgttggttctgattttactggtagtgtttatggtaattttgatgaccaacctagt

SEQ ID NO: 41272 - DNA, 60 bp, Artificial
  Synthetic oligonucleotide
ctggttgtgttgagagatgtgtggttcgcgtctgttatggtagtactgtgcttaatggag

SEQ ID NO: 41273 - DNA, 60 bp, Artificial
  Synthetic oligonucleotide
ggttgctaatggacttcatgcaccacatggaccttttgatgcactttggttatcattcaa

SEQ ID NO: 41274 - DNA, 60 bp, Artificial
  Synthetic oligonucleotide
gtacacaggttctcttataggtggcatggtgctcggaggtcttacatcagcagccgccat

SEQ ID NO: 41275 - DNA, 60 bp, Artificial
  Synthetic oligonucleotide
atgaaggttctgaacttacattaaaacatttcttcttcgcacagaatggtgatgctgctg

SEQ ID NO: 41276 - DNA, 60 bp, Artificial
  Synthetic oligonucleotide
cctccctactatgacacagctgaatcttaagtatgctattagtggtaaagaacgtgctag

SEQ ID NO: 41277 - DNA, 60 bp, Artificial
  Synthetic oligonucleotide
agtactccaatagttgttgattgtgctacttatgtgtgtaatggtaaccctcgctgtaag

SEQ ID NO: 41278 - DNA, 60 bp, Artificial
  Synthetic oligonucleotide
cacgagcaatccatgtataacctacttaacttttctggtgctttggctgagcatgatttc

SEQ ID NO: 41279 - DNA, 60 bp, Artificial
  Synthetic oligonucleotide
gtgcttgtgaccgtacaactattcaaagtgttgacatttcttatttaaacgagcaagggg

SEQ ID NO: 41280 - DNA, 60 bp, Artificial
  Synthetic oligonucleotide
gcgttgctctatgtgatgcgatggttgctaaaggtgttgttggtgttttaacattagata

SEQ ID NO: 41281 - DNA, 60 bp, Artificial
  Synthetic oligonucleotide
taacattcatagaaacgagcatgatgcctctggtgatgctgttatgacacgttgtttggc

SEQ ID NO: 41282 - DNA, 60 bp, Artificial
  Synthetic oligonucleotide
aggactgttataatatttgggagcaattctgcattgataattgtggtgagccatggtttt

SEQ ID NO: 41283 - DNA, 60 bp, Artificial
  Synthetic oligonucleotide
ctgattatttgtccaatttgtctgacattcttgtctttgttttgtgggcaggtagtttgg

SEQ ID NO: 41284 - DNA, 60 bp, Artificial
  Synthetic oligonucleotide
aacctgaagataagttgtccgtttatgatattgcttgttgtatgcgtgccggttctaagg

SEQ ID NO: 41285 - DNA, 58 bp, Artificial
  Synthetic oligonucleotide
gtcgctctgttaatgaaacaagccagactggttgggcattctacgtccgtgctaaaca

SEQ ID NO: 41286 - DNA, 60 bp, Artificial
  Synthetic oligonucleotide
cacccaaggtaggaatttatcagactttacaccaagaagtgatatggagtatgattttct

SEQ ID NO: 41287 - DNA, 60 bp, Artificial
  Synthetic oligonucleotide
agggtgttttactggtgttgatggtgagttacctgttgcagttgttaacgacaaagtttt

SEQ ID NO: 41288 - DNA, 60 bp, Artificial
  Synthetic oligonucleotide
cactcagctttgtcaatacctaaatagcactacaatgtgcgtacctcataatatgcgtgt

SEQ ID NO: 41289 - DNA, 64 bp, Artificial
  Synthetic oligonucleotide
ctgcacgtctgttaatacatcctcttcagaagcttttcttattggtattaattatttaggtgac

SEQ ID NO: 41290 - DNA, 60 bp, Artificial
  Synthetic oligonucleotide
taccaccaactcatgcacacactttcttgtcgttgtcagatcagtttaagactacaggtg

SEQ ID NO: 41291 - DNA, 60 bp, Artificial
  Synthetic oligonucleotide
ctgcaaattttcttgatgataatgttttgcctgagacttatgttgcactccccatttatt

SEQ ID NO: 41292 - DNA, 60 bp, Artificial
  Synthetic oligonucleotide
acatgatacgtatgatttcagccatggtgttgggttctaagcatgttaattgttgtactg

SEQ ID NO: 41293 - DNA, 60 bp, Artificial
  Synthetic oligonucleotide
ctcatgttgctcagaacacagtacttaatgcttctattccagaatctaaaccattggctg

SEQ ID NO: 41294 - DNA, 60 bp, Artificial
  Synthetic oligonucleotide
cttctaaatgttgggttgaagaagatttaactaagggaccacatgagttttgttcccagc

SEQ ID NO: 41295 - DNA, 60 bp, Artificial
  Synthetic oligonucleotide
ctcgttggaagcgtgttcctaccagagaggaaaatgttattcagtgctttggtcctcgtg

SEQ ID NO: 41296 - DNA, 60 bp, Artificial
  Synthetic oligonucleotide
gctggcttatgtgttgtttgtggttcacaaactgttcttcgttgtggtgattgtctgcgt

SEQ ID NO: 41297 - DNA, 60 bp, Artificial
  Synthetic oligonucleotide
cacgttattgtagagttggtgaatgccgtgactcacgtaaaggtgtttgttttggttttg

SEQ ID NO: 41298 - DNA, 60 bp, Artificial
  Synthetic oligonucleotide
cttttgagagtgctgctgcaggtacatttgttcttgacatgcgttcttatgaaaggctga

SEQ ID NO: 41299 - DNA, 60 bp, Artificial
  Synthetic oligonucleotide
cgcacctatagcgaagccgctgcacaaggttttcaggcatgccgttttgttgcttttggc

SEQ ID NO: 41300 - DNA, 60 bp, Artificial
  Synthetic oligonucleotide
tgtaccccttcgcgctagtagttgtgttacccgttgtaatataggtggtgctgtttgttc

SEQ ID NO: 41301 - DNA, 60 bp, Artificial
  Synthetic oligonucleotide
ccttacgtagaggtgccgttcttggttttataggtgccacaattcgtctacaagctggta

SEQ ID NO: 41302 - DNA, 60 bp, Artificial
  Synthetic oligonucleotide
gtttgttttgtacacgtgactttgctattcgtaatgtgcgtggttggttgggtatggatg

SEQ ID NO: 41303 - DNA, 60 bp, Artificial
  Synthetic oligonucleotide
ggtgtctttcgtgtaacttccagggtcatgtttcaacctcgcctacctgttttgtctgat

SEQ ID NO: 41304 - DNA, 60 bp, Artificial
  Synthetic oligonucleotide
tattatgctggagttgtttggacacttaatgatgttaaagacaatgatggtagacccgtt

SEQ ID NO: 41305 - DNA, 60 bp, Artificial
  Synthetic oligonucleotide
tcgtgctagcagtcgttcttcaactcgtaacaactcacgagactcttttcgtagcacttc

SEQ ID NO: 41306 - DNA, 60 bp, Artificial
  Synthetic oligonucleotide
ggtgtgtctttatggcgtgttacagctgttcattctgatggaatgtttgtggcatcatct

SEQ ID NO: 41307 - DNA, 51 bp, Artificial
  Synthetic oligonucleotide
ctgatgatgttatagtccatgatgttgaacctacccataaagtcaagctca

SEQ ID NO: 41308 - DNA, 61 bp, Artificial
  Synthetic oligonucleotide
ctgttagacctatatgttcatctgtatatttaggtgttaagggttctggtcattatcaaac

SEQ ID NO: 41309 - DNA, 60 bp, Artificial
  Synthetic oligonucleotide
ctaagtcacttggtaaacaattgggtgttgtgagtgatggtgttgactcttttgaaggtg

SEQ ID NO: 41310 - DNA, 60 bp, Artificial
  Synthetic oligonucleotide
cctgttccagctgaagtactaaatgtctaaactaaacgatgtctaatagtagtgtgcctc

SEQ ID NO: 41311 - DNA, 60 bp, Artificial
  Synthetic oligonucleotide
gttctgatggtgttgtttgggttgctaaggaaggtgctaaaactgttaataccagtcttg

SEQ ID NO: 41312 - DNA, 60 bp, Artificial
  Synthetic oligonucleotide
tatttgtttctcaaccgtcgaagtgcctggtagttgtaattttccacttgaagccacctg

SEQ ID NO: 41313 - DNA, 60 bp, Artificial
  Synthetic oligonucleotide
ggtgccatgaccgctgttaatgagtctagatatggcttgcaaaacttactacagttacct

SEQ ID NO: 41314 - DNA, 60 bp, Artificial
  Synthetic oligonucleotide
gaatttgaaaaggtccacgttcaataatgcctttcggtggcctatttcaacttactcttg

SEQ ID NO: 41315 - DNA, 60 bp, Artificial
  Synthetic oligonucleotide
gagagcattcattatcttggcactacaggtcatactttgaagtctggttgcaaactcatt

SEQ ID NO: 41316 - DNA, 60 bp, Artificial
  Synthetic oligonucleotide
cacaatggagtctgggtgaccttgtctatgccatttggcttggtgaccaggcgtatcttg

SEQ ID NO: 41317 - DNA, 60 bp, Artificial
  Synthetic oligonucleotide
ggatttgtgtgttgcaggaggtgattttggctgtgattgccctcgttgtgatggcacatt

SEQ ID NO: 41318 - DNA, 60 bp, Artificial
  Synthetic oligonucleotide
gtggtggtgactttacagtgtttggtgaggatttctgcttaaaggccaagtctatggttg

SEQ ID NO: 41319 - DNA, 60 bp, Artificial
  Synthetic oligonucleotide
gtttgggacctgtcaactcacctgcaagatgatagttctgatgatttggagttaccattt

SEQ ID NO: 41320 - DNA, 60 bp, Artificial
  Synthetic oligonucleotide
gccgggcaagacaggtgtcctgaagtttacagggaaggggactttaacgtcgtgttatga

SEQ ID NO: 41321 - DNA, 60 bp, Artificial
  Synthetic oligonucleotide
gaatataacagttccagttcaagctgtacagagcatttggtcagaacagtacgcctctga

SEQ ID NO: 41322 - DNA, 60 bp, Artificial
  Synthetic oligonucleotide
gcccaccatacgggcagttttcagaccgcagtgtcttgtcagggaggtccagccttgact

SEQ ID NO: 41323 - DNA, 60 bp, Artificial
  Synthetic oligonucleotide
ccacgtaagcagtatagttgttgggatgagggtgttggtggttggattgaacttaagacc

SEQ ID NO: 41324 - DNA, 60 bp, Artificial
  Synthetic oligonucleotide
gtcatcgactccctttggagtgagacttacgagtaccaattcgcctattttggccatcca

SEQ ID NO: 41325 - DNA, 60 bp, Artificial
  Synthetic oligonucleotide
gaatccagcagtttctgtttgtgaggagtgttacgtgcccctgcccctttgtgcttattg

SEQ ID NO: 41326 - DNA, 60 bp, Artificial
  Synthetic oligonucleotide
gcgagttgtaggtgcaagtgtgaaacccctccctttgtattccgttgttgtgggcttagg

SEQ ID NO: 41327 - DNA, 60 bp, Artificial
  Synthetic oligonucleotide
cggccctatatggccaatggtgtgtgtacccgtgttttgtcgaccacccagtctccaggc

SEQ ID NO: 41328 - DNA, 60 bp, Artificial
  Synthetic oligonucleotide
agagtgggctatgattgcttagcacgtctacaacaggttgctttggggtcttgtagggag

SEQ ID NO: 41329 - DNA, 60 bp, Artificial
  Synthetic oligonucleotide
cagcggtaacccttccaccagatttgaaggttccagttgtacaaaaggttactaaacggc

SEQ ID NO: 41330 - DNA, 60 bp, Artificial
  Synthetic oligonucleotide
caattaccaacaactggatatttgggccagacagtttcccaaggacgcatgctgaacctt

SEQ ID NO: 41331 - DNA, 60 bp, Artificial
  Synthetic oligonucleotide
gttagccagcccagtgaggtgttgaccacgagcatgtctatagagtgtccagttttagaa

SEQ ID NO: 41332 - DNA, 60 bp, Artificial
  Synthetic oligonucleotide
cccaaggcatctaccctctcaactattgggtctgtactatcatctggtctctctattgct

SEQ ID NO: 41333 - DNA, 60 bp, Artificial
  Synthetic oligonucleotide
tggctaaacctctgacccacctccagtttactgcaggccttttggactaaacgggttcag

SEQ ID NO: 41334 - DNA, 60 bp, Artificial
  Synthetic oligonucleotide
ttcgttaccgccaccataaccaaggtaataacccatcacattatgaagcattgtggttgt

SEQ ID NO: 41335 - DNA, 60 bp, Artificial
  Synthetic oligonucleotide
cagagtgttttctcaaaggttgtgtcaccctttaccctacatgctagaccacctatgccc

SEQ ID NO: 41336 - DNA, 60 bp, Artificial
  Synthetic oligonucleotide
tcacgattacgcagtttgtagggttgtggagcctaggacagccgctgtaacaactagggg

SEQ ID NO: 41337 - DNA, 59 bp, Artificial
  Synthetic oligonucleotide
atatgttgccctttgaggttgagcattcaacgcatacacgactctgttatgttactggg

SEQ ID NO: 41338 - DNA, 60 bp, Artificial
  Synthetic oligonucleotide
gaggtgcagatagaaaagcttcgtgttgtcttggatggcatgcagttgggtactagtgag

SEQ ID NO: 41339 - DNA, 60 bp, Artificial
  Synthetic oligonucleotide
gatacttattggttttcatggtcaattcctatcacatgttccaacatcttgggctcagtt

SEQ ID NO: 41340 - DNA, 60 bp, Artificial
  Synthetic oligonucleotide
cactagtccttagaaaggttcagcagtaccttgaggttgaagaggggtaccaacggccag

SEQ ID NO: 41341 - DNA, 60 bp, Artificial
  Synthetic oligonucleotide
gatggcatgctgttgaataaacccggagggacatcctcaggtgatgccacaactgcacac

SEQ ID NO: 41342 - DNA, 60 bp, Artificial
  Synthetic oligonucleotide
ggagtcatttagaacacttgttgcgcgggcaaaacagttgacagcaacaggacgcaccaa

SEQ ID NO: 41343 - DNA, 60 bp, Artificial
  Synthetic oligonucleotide
gctgtgccatttcagccgtcccctcaggttgtcgccatacctatgcagtacccatcaggt

SEQ ID NO: 41344 - DNA, 60 bp, Artificial
  Synthetic oligonucleotide
tcttgctaagtggtcaccaataacccaggatgttgagtgttggtttaaggatttgagggg

SEQ ID NO: 41345 - DNA, 60 bp, Artificial
  Synthetic oligonucleotide
gccaaaagagctgcaatgcagattgtctccggtcatgccaccgttgagatttccaatggt

SEQ ID NO: 41346 - DNA, 60 bp, Artificial
  Synthetic oligonucleotide
acatgaggtagagagtgtggagcctcaggatttgccagtgtttagtcaacagccacaagt

SEQ ID NO: 41347 - DNA, 60 bp, Artificial
  Synthetic oligonucleotide
ctcttcgagggttgcctaaggatgtgtttgtaccacctaattgggtttggatgagaaagc

SEQ ID NO: 41348 - DNA, 60 bp, Artificial
  Synthetic oligonucleotide
ctgtgggtgtgtggttgggttacctaccctcggttgaagagtgtgttattgcacaacgca

SEQ ID NO: 41349 - DNA, 60 bp, Artificial
  Synthetic oligonucleotide
gcggcacttcagtcagttacacctcaatgattagggagtttgtggattgttctagacggg

SEQ ID NO: 41350 - DNA, 60 bp, Artificial
  Synthetic oligonucleotide
ttgattcctcccaggggactactgctgctaaccatctcttagtgttgtttggggcatcta

SEQ ID NO: 41351 - DNA, 60 bp, Artificial
  Synthetic oligonucleotide
ggattttcggtgtgctgatggaagctcggattcacctagtgcatgtgttgaggaccctca

SEQ ID NO: 41352 - DNA, 60 bp, Artificial
  Synthetic oligonucleotide
cctctatgatgttggcttgtgccaagaacttactgatgcgggtgtggactgtggggaggc

SEQ ID NO: 41353 - DNA, 60 bp, Artificial
  Synthetic oligonucleotide
gtaccctatcccctcctaagtgtcattctaagtgtgaaccttttgagaatttggcagagg

SEQ ID NO: 41354 - DNA, 60 bp, Artificial
  Synthetic oligonucleotide
ccactacatactcatggtatccaggacttcaaaccccacacacaatttatcgctcataca

SEQ ID NO: 41355 - DNA, 60 bp, Artificial
  Synthetic oligonucleotide
ccattaacagctgctcaggttgctgcgttgcggatttgtgttggcggacaatggtttgct

SEQ ID NO: 41356 - DNA, 60 bp, Artificial
  Synthetic oligonucleotide
gccattggtgctgattttacagctttaccatctcggccacctttgcctttgcatttgtca

SEQ ID NO: 41357 - DNA, 60 bp, Artificial
  Synthetic oligonucleotide
ggaggtgccgttgttgtgtcaaatgaaacattagtggtttgtgagccagtatcctaccct

SEQ ID NO: 41358 - DNA, 60 bp, Artificial
  Synthetic oligonucleotide
ccgctggtgtttatatgcatcctatggttgaacattgggttactcttttgacacaaactc

SEQ ID NO: 41359 - DNA, 60 bp, Artificial
  Synthetic oligonucleotide
gatcagtacattgaggctttgggtgttgtggagagttttcaaagtgcacatggtttacca

SEQ ID NO: 41360 - DNA, 60 bp, Artificial
  Synthetic oligonucleotide
cagaccaaggcgccgtcgtgttgcatatagggtgccgcgggatactatttcacaggatgc

SEQ ID NO: 41361 - DNA, 60 bp, Artificial
  Synthetic oligonucleotide
gtggtgattccggtgctcccttggtttggcgcgattctgtaattggtgtgcatcagggtc

SEQ ID NO: 41362 - DNA, 60 bp, Artificial
  Synthetic oligonucleotide
ccccttcattactttcatgtaccctcattttggcagccgtttaagaagcagtctgtttcg

SEQ ID NO: 41363 - DNA, 60 bp, Artificial
  Synthetic oligonucleotide
gtgtggtccgtcatcacatgcagattcaatgttgttgtcatggtatgctttcttacatgg

SEQ ID NO: 41364 - DNA, 60 bp, Artificial
  Synthetic oligonucleotide
gctgatgaggctgtgcgtgcatcaaggtccttgctaggacggttttgtacacctgtgggt

SEQ ID NO: 41365 - DNA, 60 bp, Artificial
  Synthetic oligonucleotide
caagaaattctttaatatggcatgttggtgcggcagggattgatggctgttcgcctggtg

SEQ ID NO: 41366 - DNA, 60 bp, Artificial
  Synthetic oligonucleotide
gcgggtggcatgaacatcgacaatttaccaaaatacgtaatggttgcattacctagtaga

SEQ ID NO: 41367 - DNA, 60 bp, Artificial
  Synthetic oligonucleotide
ctatgtatcagcctagagttgcaactagttctgactttgttcaaattgaagggtgcgatg

SEQ ID NO: 41368 - DNA, 60 bp, Artificial
  Synthetic oligonucleotide
ccttcagcagattaatgcctatgctcgtccatcagaagtggcaaaagaacagaggctacg

SEQ ID NO: 41369 - DNA, 51 bp, Artificial
  Synthetic oligonucleotide
gcctacaggctgtatgatgaatgttgctaagtacactcaattatgtcagta

SEQ ID NO: 41370 - DNA, 56 bp, Artificial
  Synthetic oligonucleotide
ataatacaagccacatctgctaatgttgcgcgtcttttgagtgttataacgcgtga

SEQ ID NO: 41371 - DNA, 60 bp, Artificial
  Synthetic oligonucleotide
caagtgtattaaacacagaagtatttgacccctttgactattgttattacagaggaggta

SEQ ID NO: 41372 - DNA, 60 bp, Artificial
  Synthetic oligonucleotide
ctggtagtgagcaagattacttgcaagcttgtcgtgcatggttagcttatgctttggacc

SEQ ID NO: 41373 - DNA, 60 bp, Artificial
  Synthetic oligonucleotide
ggatgtaacatgtgaagtgtgcaagagagttgcacgcagcaacaggcaagaggttagcgt

SEQ ID NO: 41374 - DNA, 60 bp, Artificial
  Synthetic oligonucleotide
gagcacatgtcgcatggtggtggcgttgcaaaggcaattgcagacttttgtggaccggac

SEQ ID NO: 41375 - DNA, 60 bp, Artificial
  Synthetic oligonucleotide
gctgagtacgaccgagggtacagcactaggacgcccattaggggaagagctaaattttag

SEQ ID NO: 41376 - DNA, 60 bp, Artificial
  Synthetic oligonucleotide
ggtgattttatttatgtattttcacaggagcccgtagtcggtgtttacaatgcagccttt

SEQ ID NO: 41377 - DNA, 60 bp, Artificial
  Synthetic oligonucleotide
gcaccgcctggtgatcagtttaaacatttgataccacttatgcgtaagggcgagccttgg

SEQ ID NO: 41378 - DNA, 56 bp, Artificial
  Synthetic oligonucleotide
ggtatctaaggcaccacctggtgatcagtttaaacatttgataccacttatgcgta

SEQ ID NO: 41379 - DNA, 60 bp, Artificial
  Synthetic oligonucleotide
ggcatattcttgctggagtcaccatagacacataggaggcgcagactttgtctacaaccc

SEQ ID NO: 41380 - DNA, 60 bp, Artificial
  Synthetic oligonucleotide
gagctgcaccgtttatgagaagttctcacagctctatttatgtcacattgtatggtggca

SEQ ID NO: 41381 - DNA, 60 bp, Artificial
  Synthetic oligonucleotide
gagctgcaccgtttaagagaagttctcacagctctatttatgtcacattatatggtggca

SEQ ID NO: 41382 - DNA, 60 bp, Artificial
  Synthetic oligonucleotide
gagctacaccgtttaagagaagttctcacagctctatttatgtcacattgtatggtggca

SEQ ID NO: 41383 - DNA, 60 bp, Artificial
  Synthetic oligonucleotide
gagctgcaccgtttatgagaagttctcacagctctatttatgtcacattgtacggtggta

SEQ ID NO: 41384 - DNA, 60 bp, Artificial
  Synthetic oligonucleotide
gagctgcaccgtttaagagaagttctcacagctctatttatgtcacattgtatggtggca

SEQ ID NO: 41385 - DNA, 60 bp, Artificial
  Synthetic oligonucleotide
agaacgtatggctgaacaagctatgacatctatgtataagcaagcacgtgccgaggataa

SEQ ID NO: 41386 - DNA, 60 bp, Artificial
  Synthetic oligonucleotide
acctcttaaattatttgcggctgagacacttagagctacagaagaagcttctaaacagtc

SEQ ID NO: 41387 - DNA, 60 bp, Artificial
  Synthetic oligonucleotide
ctgcatgtcaaactattgagcaagcacttgcaatgggtgccagacttgaaaacatggaag

SEQ ID NO: 41388 - DNA, 60 bp, Artificial
  Synthetic oligonucleotide
gtaagttgtgcattcgctatgtttaggtttagaatgtagtttagtgctagctggttagag

SEQ ID NO: 41389 - DNA, 60 bp, Artificial
  Synthetic oligonucleotide
gagaccagttcaaagatggactagctatgttttggaattgcaatgtggattgttatccac

SEQ ID NO: 41390 - DNA, 53 bp, Artificial
  Synthetic oligonucleotide
cagatggtactcttatgatggagcggtatgtgtcacttgctattgatgcatac

SEQ ID NO: 41391 - DNA, 60 bp, Artificial
  Synthetic oligonucleotide
gctaagtgttgggtagaaccggatataactaaagggcctcatgaattttgctctcagcat

SEQ ID NO: 41392 - DNA, 60 bp, Artificial
  Synthetic oligonucleotide
gagcgtaagtgctttatgtgtcctaaacgtgcaaccttatttagtagtgtttatggggca

SEQ ID NO: 41393 - DNA, 60 bp, Artificial
  Synthetic oligonucleotide
gaacgcaaatgttttatgtgtcctaggcgtgcaaccttatttagtagtgtttatggggca

SEQ ID NO: 41394 - DNA, 60 bp, Artificial
  Synthetic oligonucleotide
gtgcattcgctatgtttaggtttagaatgtagtttagtgctagctgattagagtgtgtta

SEQ ID NO: 41395 - DNA, 52 bp, Artificial
  Synthetic oligonucleotide
agagtgtgttaaagacttgtagagcgccttagggaagagctaatcagtaata

SEQ ID NO: 41396 - DNA, 60 bp, Artificial
  Synthetic oligonucleotide
tagatggtaataagatttacactacttatgttcaggaattgcagaggcggttatacttgg

SEQ ID NO: 41397 - DNA, 60 bp, Artificial
  Synthetic oligonucleotide
gctttcagcattgaaagttttgctatctactggattttgtggccgtactattatgggctc

SEQ ID NO: 41398 - DNA, 60 bp, Artificial
  Synthetic oligonucleotide
gatctttcaaagtttactatgttagatctttgctatgcattgcgtcattttgaccgcaat

SEQ ID NO: 41399 - DNA, 60 bp, Artificial
  Synthetic oligonucleotide
cctctcaaagtatactatgttagatctttgctatgcattgcgccattttgattgtaatga

SEQ ID NO: 41400 - DNA, 51 bp, Artificial
  Synthetic oligonucleotide
catccaaaagtatggccttgaggattatggttttgaacacgttgtatttgg

SEQ ID NO: 41401 - DNA, 60 bp, Artificial
  Synthetic oligonucleotide
gaaagagctcagccccagatggtatttctattacctaggaactggcccagaagcttcact

SEQ ID NO: 41402 - DNA, 60 bp, Artificial
  Synthetic oligonucleotide
cagcatggacgtgtggttataatatgcctgaactctataaagtccagaattgtgttatgg

SEQ ID NO: 41403 - DNA, 60 bp, Artificial
  Synthetic oligonucleotide
atgggttgggattatcctaagtgtgatagagcaatgcctaatttgttgcgtatagcagca

SEQ ID NO: 41404 - DNA, 54 bp, Artificial
  Synthetic oligonucleotide
cctagcgttgggctacgttctcgcataaggtcggctatacgacgtttgtagggg

SEQ ID NO: 41405 - DNA, 60 bp, Artificial
  Synthetic oligonucleotide
aatgtggtgtgaagcaagagcagcgcaaaggtgttgacgctgttatgcattttggtacgt

SEQ ID NO: 41406 - DNA, 60 bp, Artificial
  Synthetic oligonucleotide
gtggtgtaaagcaagagcagcgcaaaggtgttgacgctgttatgcattttggtacgttgg

SEQ ID NO: 41407 - DNA, 56 bp, Artificial
  Synthetic oligonucleotide
tacgcatatttgcgtaagcacttctccatgatgattctttctgatgatgccgttgt

SEQ ID NO: 41408 - DNA, 60 bp, Artificial
  Synthetic oligonucleotide
gcatatttgcgtaagcacttctccatgatgattctttctgatgatgccgttgtgtgctac

SEQ ID NO: 41409 - DNA, 60 bp, Artificial
  Synthetic oligonucleotide
gctatatcactatcaggagtgtgttagaggtacgactgtactactaaaagaaccttgccc

SEQ ID NO: 41410 - DNA, 53 bp, Artificial
  Synthetic oligonucleotide
tttacgatacatagtctactcttgtgcagaatgaattctcgtaactaaacagc

SEQ ID NO: 41411 - DNA, 51 bp, Artificial
  Synthetic oligonucleotide
tacgatacatagtctactcttgtgcagaatgaattctcgtagctaaacagc

SEQ ID NO: 41412 - DNA, 60 bp, Artificial
  Synthetic oligonucleotide
aggcaggcaacaattcaataacaagaaggatgacagtgtagaacaagctgttcttgccgc

SEQ ID NO: 41413 - DNA, 60 bp, Artificial
  Synthetic oligonucleotide
aggcaggcaacaatccaataacaagaaggatgacagtgtagaacaagctgttcttgccgc

SEQ ID NO: 41414 - DNA, 60 bp, Artificial
  Synthetic oligonucleotide
gagcccgtagtcggtgtttacaatgcagccttttctcaggcggttctaaacgaaattgac

SEQ ID NO: 41415 - DNA, 60 bp, Artificial
  Synthetic oligonucleotide
ctcaatctagaggcaggcaacaatccaataacaagaaggatgacagtgtagaacaagctg

SEQ ID NO: 41416 - DNA, 60 bp, Artificial
  Synthetic oligonucleotide
cgcaggagcccgtagtcggtgtttacaatgcagccttttctcaggcggttctaaacgaaa

SEQ ID NO: 41417 - DNA, 60 bp, Artificial
  Synthetic oligonucleotide
ttccttcagcagattaatgcctatgctcgtccatcagaagtggcaaaagaacagagaaaa

SEQ ID NO: 41418 - DNA, 60 bp, Artificial
  Synthetic oligonucleotide
gcaacaatccaataacaagaaggatgacagtgtagaacaagctgttcttgctgcactcaa

SEQ ID NO: 41419 - DNA, 60 bp, Artificial
  Synthetic oligonucleotide
tttcccaggaattactggtcatcgcgctgtctactcttgtacagaatggtaagcacgtgt

SEQ ID NO: 41420 - DNA, 53 bp, Artificial
  Synthetic oligonucleotide
ggtttgtaatggaattcgcacttgcttacgtcttgtacacttcaacctttaac

SEQ ID NO: 41421 - DNA, 60 bp, Artificial
  Synthetic oligonucleotide
gactgggtgtggtttgtaatggaattcgcacttgcttacgtcttgtacacttcaaccttt

SEQ ID NO: 41422 - DNA, 60 bp, Artificial
  Synthetic oligonucleotide
ccatgcaaggagccactattgatcagagttatttaaacgagtgcggggttctagtgcagc

SEQ ID NO: 41423 - DNA, 60 bp, Artificial
  Synthetic oligonucleotide
aattcagagtttgcgtccaagggttatattgctaatataagtgcctttcaacaggtatta

SEQ ID NO: 41424 - DNA, 60 bp, Artificial
  Synthetic oligonucleotide
ccttttacaagaacatgtatttaagaagtgcagttatgcagagtgttggagcttgcgtgg

SEQ ID NO: 41425 - DNA, 60 bp, Artificial
  Synthetic oligonucleotide
ccttttacaagaacatgtatttaagaagtgcagtcatgcagagtgttggagcttgcgtgg

SEQ ID NO: 41426 - DNA, 60 bp, Artificial
  Synthetic oligonucleotide
ccagacaagcagaggttagggctagtagacaacttgccaaagacaaggttaatgaatgtg

SEQ ID NO: 41427 - DNA, 60 bp, Artificial
  Synthetic oligonucleotide
gcgttaggtctcaatcccagagatttggcttctgtggtaatggtacacatttgttttcac

SEQ ID NO: 41428 - DNA, 60 bp, Artificial
  Synthetic oligonucleotide
gcgttaggtctcagtctcagagattcggattctgtggtaatggtacacatttgttttcac

SEQ ID NO: 41429 - DNA, 60 bp, Artificial
  Synthetic oligonucleotide
gtgttaggtctcagtctcagagattcggattctgtggtaatggtacacatttgttttcac

SEQ ID NO: 41430 - DNA, 60 bp, Artificial
  Synthetic oligonucleotide
ggtgccatagttggagctatgacttccattaacagtgaactgttaggtctaacacattgg

SEQ ID NO: 41431 - DNA, 60 bp, Artificial
  Synthetic oligonucleotide
gacgacggttcatgtgaggttgttcacgatcaagttaactatgttcctttgagagccact

SEQ ID NO: 41432 - DNA, 60 bp, Artificial
  Synthetic oligonucleotide
caagacgtgaaagatggcactgttaccttcaacttgctagcgtatacactaatgagcctc

SEQ ID NO: 41433 - DNA, 60 bp, Artificial
  Synthetic oligonucleotide
ctgcaaatggctgttctactattgcgcaagccgtccgccgttatagcgaggccgctagca

SEQ ID NO: 41434 - DNA, 60 bp, Artificial
  Synthetic oligonucleotide
cttagcagcgtcatacctagcttgcccacaagtggtagtagagtggctggtcgcagtgcc

SEQ ID NO: 41435 - DNA, 60 bp, Artificial
  Synthetic oligonucleotide
tgttgtaattggcgatgtggcgtactttgttagtgacggctacttccgtcttatggccag

SEQ ID NO: 41436 - DNA, 60 bp, Artificial
  Synthetic oligonucleotide
gggcggtcgcactgtgcagagtcatattatgcgtgctgctattaaattgtacaaccctaa

SEQ ID NO: 41437 - DNA, 60 bp, Artificial
  Synthetic oligonucleotide
gttaatacgtcatcatcagaagcctttgttgtcggaattaactatcttggtgatttcgca

SEQ ID NO: 41438 - DNA, 60 bp, Artificial
  Synthetic oligonucleotide
gggctggcggtttagagttgaccactatgcgttattttgttaagattggagctgttaaac

SEQ ID NO: 41439 - DNA, 60 bp, Artificial
  Synthetic oligonucleotide
gcccgttatgatttctgaatggcctctttctgttcaacaagctcaacaagaagctacttt

SEQ ID NO: 41440 - DNA, 60 bp, Artificial
  Synthetic oligonucleotide
gcagagtttgtagaaccaggctgtggtggtattttggcagtaatagatgagcacgtcttt

SEQ ID NO: 41441 - DNA, 60 bp, Artificial
  Synthetic oligonucleotide
gttgtcgccacatataagtttgtcttgtgggattatgaagctgagcgtcccttgacaagc

SEQ ID NO: 41442 - DNA, 60 bp, Artificial
  Synthetic oligonucleotide
gctcatggtggaggacttgccaaagctttagatgtgtacactaaaggtaaacttcaacgt

SEQ ID NO: 41443 - DNA, 60 bp, Artificial
  Synthetic oligonucleotide
gcttgaagaatcgggagctgttttgttttgtacgcccactaagaaggcgtttccttatgg

SEQ ID NO: 41444 - DNA, 60 bp, Artificial
  Synthetic oligonucleotide
cttcggtgactttgtattgtgtcctcctggaatgggaataccctactgcacgtcatacta

SEQ ID NO: 41445 - DNA, 60 bp, Artificial
  Synthetic oligonucleotide
ctgattaccgttgcgcttgttatgcctatttagcaaaagcaatgttggacttttcgcgtg

SEQ ID NO: 41446 - DNA, 60 bp, Artificial
  Synthetic oligonucleotide
gtttgtaaagtttgtggttgttggcttaatcatggctgtacatgtgaccggactgctatc

SEQ ID NO: 41447 - DNA, 60 bp, Artificial
  Synthetic oligonucleotide
ctaattggactatccgtggttcatttattaatggtgcgtgtggttcccctggctacaatc

SEQ ID NO: 41448 - DNA, 60 bp, Artificial
  Synthetic oligonucleotide
cccagctgcagcctatcttgatgctgttaaacaaggcgcaaaacctgttggcaattgtgt

SEQ ID NO: 41449 - DNA, 60 bp, Artificial
  Synthetic oligonucleotide
atgtgctggagtaatcaaagatcgcattgacgagccaacaatggaagagccagtcatttg

SEQ ID NO: 41450 - DNA, 60 bp, Artificial
  Synthetic oligonucleotide
gagcgtgttgaaggtgtcgtctgggttgctgttgatggtgctaaaactgaacctacaggt

SEQ ID NO: 41451 - DNA, 66 bp, Artificial
  Synthetic oligonucleotide
cagattgtattcctgtgaaacattttggcgttacaactttgatataactgaaagcaagtattcttg

SEQ ID NO: 41452 - DNA, 60 bp, Artificial
  Synthetic oligonucleotide
gccatttggatgttgtgtggaagcatataacagaccctttgtttagtaatatgcaacctt

SEQ ID NO: 41453 - DNA, 60 bp, Artificial
  Synthetic oligonucleotide
ggcgtgttgtatgcgtgcaggtgctaaggttgttaatgccaatgttctgacaaaggacca

SEQ ID NO: 41454 - DNA, 60 bp, Artificial
  Synthetic oligonucleotide
gctccaacaggcattactgtgaccttgctgagcggcgtgctttacgttgacggacataga

SEQ ID NO: 41455 - DNA, 60 bp, Artificial
  Synthetic oligonucleotide
gggcatcttaaaggcagaggagtttgtggcagcatctgacataacactcaaatgttgtac

SEQ ID NO: 41456 - DNA, 60 bp, Artificial
  Synthetic oligonucleotide
gccgacacaatataaggatgttgaagcgtggtctgggttgtgcgttgatggtacaaacgg

SEQ ID NO: 41457 - DNA, 60 bp, Artificial
  Synthetic oligonucleotide
cgttgacttcaaacctcagagtggcggtggcaagtgctttaactgttatcctgctggtgt

SEQ ID NO: 41458 - DNA, 60 bp, Artificial
  Synthetic oligonucleotide
ctacgcaatggttctgttcttgaaatggctaaggaagtgaagacatctagtaaagttgtg

SEQ ID NO: 41459 - DNA, 60 bp, Artificial
  Synthetic oligonucleotide
tggaacgctatgtttctctggctatagatgcctacccattgtctaagcatcctaaacctg

SEQ ID NO: 41460 - DNA, 60 bp, Artificial
  Synthetic oligonucleotide
tcagcctttgttgcttaattgcttatggtctgtttctggcttgcggtttactactggttt

SEQ ID NO: 41461 - DNA, 60 bp, Artificial
  Synthetic oligonucleotide
ctgcttcaatgtacgcaatagtgttactgatgagtgtcgtctggccatgttgggtgctga

SEQ ID NO: 41462 - DNA, 60 bp, Artificial
  Synthetic oligonucleotide
gcacgtaaccctattgatttaccaccaagtcatgccactacttatttgtcattgtctgat

SEQ ID NO: 41463 - DNA, 60 bp, Artificial
  Synthetic oligonucleotide
gtagctaccagaaatgccaccgttgttatcggcactaccaagttttatggcgggtgggat

SEQ ID NO: 41464 - DNA, 60 bp, Artificial
  Synthetic oligonucleotide
gtattgcactacagtattcgaaaccccattttatttcacaaggtcttgatgctgcgtgga

SEQ ID NO: 41465 - DNA, 60 bp, Artificial
  Synthetic oligonucleotide
gcaaaagagtcactaaggttgtttgcagctgaaacggtcaaggctaaagaggaaagtgtt

SEQ ID NO: 41466 - DNA, 60 bp, Artificial
  Synthetic oligonucleotide
ccctggagcgaggatcgtgttcaccgcttgttctcacgctgctgttgattcgctctgtgc

SEQ ID NO: 41467 - DNA, 60 bp, Artificial
  Synthetic oligonucleotide
gacctactatgctggatattggacaagctcgcgtagcatatcaagtggcagctcgctatt

SEQ ID NO: 41468 - DNA, 60 bp, Artificial
  Synthetic oligonucleotide
ggtagagctattatagtcagtgtcgaacagcttgaaccgtgtgctcagtctagacttttg

SEQ ID NO: 41469 - DNA, 60 bp, Artificial
  Synthetic oligonucleotide
gtccagccgaatttaagtatatggttgctaatggtttgaatgcaccaaatggcccttttg

SEQ ID NO: 41470 - DNA, 60 bp, Artificial
  Synthetic oligonucleotide
gccaccaaatactgccgcgtaggtgaatgtgttgaatccaatgcaggtgtgtgttttggc

SEQ ID NO: 41471 - DNA, 60 bp, Artificial
  Synthetic oligonucleotide
ccctagtgcactagaattcaacccatctcaaacttcacctgcaactgctgaaccagtgcg

SEQ ID NO: 41472 - DNA, 60 bp, Artificial
  Synthetic oligonucleotide
gccatattgtatttctttgctactagaagcttacgctatgcatggatttggtgtgctgca

SEQ ID NO: 41473 - DNA, 60 bp, Artificial
  Synthetic oligonucleotide
ccctggttttcttactccgtttatgattttgcttgttgctttgtcactctgtcttacatt

SEQ ID NO: 41474 - DNA, 60 bp, Artificial
  Synthetic oligonucleotide
gggttttaaagatgttactaagggcaccatctactctatcactccttgtaacccaccaga

SEQ ID NO: 41475 - DNA, 60 bp, Artificial
  Synthetic oligonucleotide
cacaatgttttggccccagagaccttgaccacaactttggaagtgcaggtgttgtggcca

SEQ ID NO: 41476 - DNA, 60 bp, Artificial
  Synthetic oligonucleotide
ctttggatgaccgtggtttagctctagacaatgcacttagtggtgtgcttagtgctgcta

SEQ ID NO: 41477 - DNA, 60 bp, Artificial
  Synthetic oligonucleotide
gtgctccttcccggtctcagtcgaggtcgcagagtcgcggtcgtggtgaatccaaacctc

SEQ ID NO: 41478 - DNA, 60 bp, Artificial
  Synthetic oligonucleotide
tatggcacgtaatggtgttgtccctctttccgttatccctgctacttctgcagccaggct

SEQ ID NO: 41479 - DNA, 60 bp, Artificial
  Synthetic oligonucleotide
taacacatgttgtaaatatttccttcttatagtttgaacgaacctactatgtctggacgg

SEQ ID NO: 41480 - DNA, 60 bp, Artificial
  Synthetic oligonucleotide
tagcttgattacctacatgtctatcgccagggaaatgtctaatctgtctacttagtagcc

SEQ ID NO: 41481 - DNA, 60 bp, Artificial
  Synthetic oligonucleotide
ccgtttatagctacttgtggctatcattctaaggaacttggtgttattatgaatcaagat

SEQ ID NO: 41482 - DNA, 56 bp, Artificial
  Synthetic oligonucleotide
tggacgttgtcaatttaaaggttcttttgtgcaaatacctactacggagaaagacc

SEQ ID NO: 41483 - DNA, 60 bp, Artificial
  Synthetic oligonucleotide
gtgtgggtgacctaacggtagtgattgccaaagcattggatgagtttaaagagttctgca

SEQ ID NO: 41484 - DNA, 60 bp, Artificial
  Synthetic oligonucleotide
gactgttgtgatagccaaagcattggatgagtttaaagagttctgccttgtaaacgccgc

SEQ ID NO: 41485 - DNA, 60 bp, Artificial
  Synthetic oligonucleotide
gccaaagcattggatgagtttaaagagttctgcattgtaaacgctgcaaatgagcacatg

SEQ ID NO: 41486 - DNA, 60 bp, Artificial
  Synthetic oligonucleotide
tagatggacgctgtcaatttaaaggttcttttgtgcaaatacctactacggagaaagacc

SEQ ID NO: 41487 - DNA, 60 bp, Artificial
  Synthetic oligonucleotide
tagatggacgctgtcaatttaaaggttcttttgtgcaaatacctactacggagaaagatc

SEQ ID NO: 41488 - DNA, 60 bp, Artificial
  Synthetic oligonucleotide
agatggacgttgtcaatttaaaggttcttttgtgcaaatacctactacggagaaagaccc

SEQ ID NO: 41489 - DNA, 60 bp, Artificial
  Synthetic oligonucleotide
ggggctagtgattctggacgtgttgtacctggtgtcgcatctgatgtttatttgcttggt

SEQ ID NO: 41490 - DNA, 60 bp, Artificial
  Synthetic oligonucleotide
agtgaagttgaataccctgtagcactttacactgttgttcataatatgtcagtatgcccc

SEQ ID NO: 41491 - DNA, 60 bp, Artificial
  Synthetic oligonucleotide
gtgcgatgagatggttactaaaggtgttgttggcgttttaacattggacaaccaggacct

SEQ ID NO: 41492 - DNA, 60 bp, Artificial
  Synthetic oligonucleotide
aaatcctgatgcgccacgaactggtgtttgtattacttacactattgagaaggtcacgtt

SEQ ID NO: 41493 - DNA, 58 bp, Artificial
  Synthetic oligonucleotide
gtgtcaactcctttcagccatacagagacttgctactggccttggtggtaaaacgatt

SEQ ID NO: 41494 - DNA, 60 bp, Artificial
  Synthetic oligonucleotide
cttggtgttgtaggtgctgttatgcaaggtgctaatcttgttattactgtgtcacaggct

SEQ ID NO: 41495 - DNA, 60 bp, Artificial
  Synthetic oligonucleotide
gagccttgctataatgttattgggtttcggctgtagagaatggtatgttggcactgccgc

SEQ ID NO: 41496 - DNA, 60 bp, Artificial
  Synthetic oligonucleotide
cccagatgtataaagatgctcgtgctgtggaccgtaagtctaaagttgttagtgctatgc

SEQ ID NO: 41497 - DNA, 60 bp, Artificial
  Synthetic oligonucleotide
catgccttccacacacctgcatacgacaagcgtgcctttgctaagcttaagcccatgcca

SEQ ID NO: 41498 - DNA, 60 bp, Artificial
  Synthetic oligonucleotide
cgactctttgcggctgaaactattaaagctagggaggagagtgttaagtcctcttatgcg

SEQ ID NO: 41499 - DNA, 60 bp, Artificial
  Synthetic oligonucleotide
gctttatatgggatgtcagttatgttgttgcctattgcttgttggctccatggtggttgc

SEQ ID NO: 41500 - DNA, 60 bp, Artificial
  Synthetic oligonucleotide
gccgtacccagaccctagccgtattcttagtgctggtgtctttgtggatgacattgtcaa

SEQ ID NO: 41501 - DNA, 60 bp, Artificial
  Synthetic oligonucleotide
ctggtcctcacgcagatgctcctttcaggaaacggattcagggtgtgcattgggttgctg

SEQ ID NO: 41502 - DNA, 60 bp, Artificial
  Synthetic oligonucleotide
gatgtggtgattgtctacgccgtcctttgttatgtacaaaatgtgcttatgaccatgttg

SEQ ID NO: 41503 - DNA, 60 bp, Artificial
  Synthetic oligonucleotide
ccagcgtatgtgtggtgtaggacctgatgtgttcttgcacaagtgttaccggtgccctgc

SEQ ID NO: 41504 - DNA, 60 bp, Artificial
  Synthetic oligonucleotide
gttgctttgcttgtcatggcactcgttattatcgtgtgtgtggtattgttggctctgcaa

SEQ ID NO: 41505 - DNA, 60 bp, Artificial
  Synthetic oligonucleotide
cctaataacactatcaccgttaaaaccacaccaggtctttgtgagagtgatgaattaggt

SEQ ID NO: 41506 - DNA, 60 bp, Artificial
  Synthetic oligonucleotide
caatttgttactgatcctggcttacttatagcttcatctcctgccttagttgaccagcgt

SEQ ID NO: 41507 - DNA, 60 bp, Artificial
  Synthetic oligonucleotide
gcgctggatgctttggtgcaaagactccaaggtggctactttctacccacagttgcagtc

SEQ ID NO: 41508 - DNA, 60 bp, Artificial
  Synthetic oligonucleotide
ccgcttgacgagcctatatggaagagccgtcacacctcgtatgtatgttgctgctagtag

SEQ ID NO: 41509 - DNA, 60 bp, Artificial
  Synthetic oligonucleotide
gttgatgcgtatttaggtcctgagattgtacgagctgttgatggtggtcgtttgtggcgt

SEQ ID NO: 41510 - DNA, 60 bp, Artificial
  Synthetic oligonucleotide
cctgttgatggttactactcacagggtcgtaatgctagtacattcttgccacgttctcag

SEQ ID NO: 41511 - DNA, 60 bp, Artificial
  Synthetic oligonucleotide
ccggcagttcctagcgaacagtggtcttttgttgagcactttgatgatgatacagatgag

SEQ ID NO: 41512 - DNA, 60 bp, Artificial
  Synthetic oligonucleotide
gttgtgcttttgggttgtcttactaacatgaatatcgcagctaatagtagagaatggtct

SEQ ID NO: 41513 - DNA, 60 bp, Artificial
  Synthetic oligonucleotide
cctccgcatcacacggttttaaggattgccgttttgtagccgtggggctgcaggacattg

SEQ ID NO: 41514 - DNA, 60 bp, Artificial
  Synthetic oligonucleotide
tagatgtgtatttgagatttcgttccaggttgccagccttgtgtaacaagtgtcgtgctt

SEQ ID NO: 41515 - DNA, 60 bp, Artificial
  Synthetic oligonucleotide
gccaaaccagcagagaaattgtcctcttttgacttggcacattgtatgcgcagtggtgct

SEQ ID NO: 41516 - DNA, 60 bp, Artificial
  Synthetic oligonucleotide
aagttgcaggattccttttggctagttcaacttgtcccttttgacatctttggcgatgag

SEQ ID NO: 41517 - DNA, 60 bp, Artificial
  Synthetic oligonucleotide
gttgggaggatttgtggaataagttacgttcaggtgatgtcgctggttttgttcaccttc

SEQ ID NO: 41518 - DNA, 60 bp, Artificial
  Synthetic oligonucleotide
tgaagtctgtaaggtttgtggctgttggcttaacaatggttgctcgtgtgataggtctag

SEQ ID NO: 41519 - DNA, 60 bp, Artificial
  Synthetic oligonucleotide
gtttgaatattggaccctgttttgtaccagtgtcaacacgtcatcttctgaggctttcct

SEQ ID NO: 41520 - DNA, 60 bp, Artificial
  Synthetic oligonucleotide
gtgcgtacccaggctactacatactgccgtgttggtgaatgtgtggattcaaaagctggt

SEQ ID NO: 41521 - DNA, 60 bp, Artificial
  Synthetic oligonucleotide
cctggtaagcttaagcagcgtgctgttaaggcggaaggtgatggcttttctactgatgct

SEQ ID NO: 41522 - DNA, 60 bp, Artificial
  Synthetic oligonucleotide
gcacagttgggaccttctgctaatggtgttgaatcacttgttggtgttgttcccactcca

SEQ ID NO: 41523 - DNA, 60 bp, Artificial
  Synthetic oligonucleotide
ccgtggggtgctaatgctaacgtcactgtgcgattgtgcagatggtggcagaagttttcc

SEQ ID NO: 41524 - DNA, 60 bp, Artificial
  Synthetic oligonucleotide
gcagaacgcgaacgttttgggcatttaaccccgaaacagacgccattgctgtcatttcag

SEQ ID NO: 41525 - DNA, 60 bp, Artificial
  Synthetic oligonucleotide
ggttttgaccttaaagactcacttagggcgttcttggctgcatgtggtgataggcacgtt

SEQ ID NO: 41526 - DNA, 60 bp, Artificial
  Synthetic oligonucleotide
gttgcatttgagctgtatgctaagcgcaaaattggtcttacaccgccacttaccattctg

SEQ ID NO: 41527 - DNA, 60 bp, Artificial
  Synthetic oligonucleotide
ctacactttgctttgtcaacggtgctgtgtgtctctacgctaggattactaaggtggcag

SEQ ID NO: 41528 - DNA, 60 bp, Artificial
  Synthetic oligonucleotide
cctaaatgtgatagagctatgcctagtatgatacgaatgcttgctgctatggttctcggt

SEQ ID NO: 41529 - DNA, 60 bp, Artificial
  Synthetic oligonucleotide
ttaatgccacctacgctcctaatgatactatggtgaactgtactaaccctcttggtgacg

SEQ ID NO: 41530 - DNA, 60 bp, Artificial
  Synthetic oligonucleotide
gttgctgggcgcatgttgggtttacagacacaaactgtggactctgcgcaaggtagcgag

SEQ ID NO: 41531 - DNA, 60 bp, Artificial
  Synthetic oligonucleotide
gtggtaatgaccttaatttggatgtcatgatctctgaatggcctttgcaggttgacgagg

SEQ ID NO: 41532 - DNA, 60 bp, Artificial
  Synthetic oligonucleotide
gtgtgattttgttgaacctgctagtcatggtgtgcttgtcgtatcggatgattatggctt

SEQ ID NO: 41533 - DNA, 60 bp, Artificial
  Synthetic oligonucleotide
acctaatttccattccctgttttgcacacgtgatttcgcgatgcgtaacgttagaggctg

SEQ ID NO: 41534 - DNA, 60 bp, Artificial
  Synthetic oligonucleotide
ccactattgctgctaagacaagctctattacgcctactacagatcgcttcaatgtgtcgc

SEQ ID NO: 41535 - DNA, 60 bp, Artificial
  Synthetic oligonucleotide
ctcctgcaccagcccctaaaccggctcgtaagcagatggataaacctgaatggaagcgcg

SEQ ID NO: 41536 - DNA, 60 bp, Artificial
  Synthetic oligonucleotide
ccgtgaatgctttactgctctttgtgatgatatcgttgtgttcggtgtcaagtgcaaagc

SEQ ID NO: 41537 - DNA, 60 bp, Artificial
  Synthetic oligonucleotide
ctcctggtagtggcaaatcgcattgtgttattggtctaggtttgtattaccctagtgcac

SEQ ID NO: 41538 - DNA, 60 bp, Artificial
  Synthetic oligonucleotide
gcggtagcttgttaaacggaccttatgtgtatggtgatgcttatgtggcttttagtggta

SEQ ID NO: 41539 - DNA, 60 bp, Artificial
  Synthetic oligonucleotide
aaatacctacagctggtcctcataggtgttccattgcagtgcactttagtgccctggatg

SEQ ID NO: 41540 - DNA, 60 bp, Artificial
  Synthetic oligonucleotide
gcctcgcgctagatttccaacttaacaaaacggacttaaatacctacagctggtcctcat

SEQ ID NO: 41541 - DNA, 60 bp, Artificial
  Synthetic oligonucleotide
gccttgcgctagatttccaacttaacaaaacggacttaaatacctacagctggtcctcat

SEQ ID NO: 41542 - DNA, 60 bp, Artificial
  Synthetic oligonucleotide
ctgttggaaacaaacctgtcacatggtatatctatgtgcgcaagaacggtgagtacgtcg

SEQ ID NO: 41543 - DNA, 60 bp, Artificial
  Synthetic oligonucleotide
attacgggtcatcgcgctgcctactcttgtacagaatggtaagcacgtgtaataggaggt

SEQ ID NO: 41544 - DNA, 60 bp, Artificial
  Synthetic oligonucleotide
gattgctatttggaatcttgacgttataataagttcaatagtgagacaattatttaagcc

SEQ ID NO: 41545 - DNA, 60 bp, Artificial
  Synthetic oligonucleotide
tattgcgtcttggttcacagctctcactcagcatggcaaggaggaacttagattccctcg

SEQ ID NO: 41546 - DNA, 60 bp, Artificial
  Synthetic oligonucleotide
gtattcttgctagttacactagccatccttactgcgcttcgattgtgtgcgtactgctgc

SEQ ID NO: 41547 - DNA, 60 bp, Artificial
  Synthetic oligonucleotide
ggggacaattgtgaccagaccgctcatggaaagtgaacttgtcattggtgctgtgatcat

SEQ ID NO: 41548 - DNA, 60 bp, Artificial
  Synthetic oligonucleotide
gaaagagctcagccccagatggtacttctattacctaggaactggcccagaagcttcact

SEQ ID NO: 41549 - DNA, 60 bp, Artificial
  Synthetic oligonucleotide
caatgctgccatcgtgctacaacttcctcaaggaacaacattgccaaaaggcttctacgc

SEQ ID NO: 41550 - DNA, 52 bp, Artificial
  Synthetic oligonucleotide
agatgaccaaattggctactacagaagagctacccgacgagttcgtggtggt

SEQ ID NO: 41551 - DNA, 60 bp, Artificial
  Synthetic oligonucleotide
gagctcagccccagatggtacttctattacctaggaactggcccagaagcttcacttccc

SEQ ID NO: 41552 - DNA, 60 bp, Artificial
  Synthetic oligonucleotide
gtgctacaacttcctcaaggaacaacattgccaaaaggcttctacgcagaagggagcagg

SEQ ID NO: 41553 - DNA, 56 bp, Artificial
  Synthetic oligonucleotide
caaattgcacaatttgctccaagtgcctctgcattcttcggaatgtcacgcattgg

SEQ ID NO: 41554 - DNA, 60 bp, Artificial
  Synthetic oligonucleotide
atgatgaccacacaaggcagatgggctatgtaaacgttttcgcaattccgtttacgatac

SEQ ID NO: 41555 - DNA, 60 bp, Artificial
  Synthetic oligonucleotide
agcttctgctgattcaactcaggcataaacactcatgatgaccacacaaggcagatgggc

SEQ ID NO: 41556 - DNA, 55 bp, Artificial
  Synthetic oligonucleotide
agttggatgacaaagatccacaattcaaagacaacgtcatactgctgaacaagca

SEQ ID NO: 41557 - DNA, 60 bp, Artificial
  Synthetic oligonucleotide
gcttctgctgattcaactcaggcataaacactcatgatgaccacacaaggcagatgggct

SEQ ID NO: 41558 - DNA, 60 bp, Artificial
  Synthetic oligonucleotide
ggagccattaaattggatgacaaagatccacaattcaaagacaacgtcatactgctgaac

SEQ ID NO: 41559 - DNA, 60 bp, Artificial
  Synthetic oligonucleotide
ggagccatcaaattggatgacaaagatccacaattcaaagacaacgtcatactgctgaac

SEQ ID NO: 41560 - DNA, 54 bp, Artificial
  Synthetic oligonucleotide
aattggatgacaaagatccacaattcaaagacaacgtcatactgctgaacaagc

SEQ ID NO: 41561 - DNA, 55 bp, Artificial
  Synthetic oligonucleotide
aattggatgacaaagatccacaattcaaagacaacgtcatactgctgaacaagca

SEQ ID NO: 41562 - DNA, 60 bp, Artificial
  Synthetic oligonucleotide
ggtattcttgctagttacactagccatccttactgcgcttcgattgtgtgcgtactgctg

SEQ ID NO: 41563 - DNA, 60 bp, Artificial
  Synthetic oligonucleotide
ggtattcttgctagtcacactagccatccttactgcgcttcgattgtgtgcgtactgctg

SEQ ID NO: 41564 - DNA, 60 bp, Artificial
  Synthetic oligonucleotide
ggtattcttgctagtcatactagccatccttactgcgcttcgattgtgtgcgtactgctg

SEQ ID NO: 41565 - DNA, 60 bp, Artificial
  Synthetic oligonucleotide
gagccgacgacgactactagcgtgcctttgtaagcacaagaaagtgagtacgaacttatg

SEQ ID NO: 41566 - DNA, 60 bp, Artificial
  Synthetic oligonucleotide
gatgagccgacgacgactactagcgtgcccttgtaagcacaagaaagtgagtacgaactt

SEQ ID NO: 41567 - DNA, 60 bp, Artificial
  Synthetic oligonucleotide
gatgagccgacgacgactactagcgtgcctttgtaagcacaagaaagtgagtacgaactt

SEQ ID NO: 41568 - DNA, 55 bp, Artificial
  Synthetic oligonucleotide
gatgcatcaacgtttttaaacgggtttgcggtgtaagtgcagcccgtcttacacc

SEQ ID NO: 41569 - DNA, 60 bp, Artificial
  Synthetic oligonucleotide
gctatttccatgtgggccttagttatttctgtaacctctaactattctggtgtcgttacg

SEQ ID NO: 41570 - DNA, 57 bp, Artificial
  Synthetic oligonucleotide
tatgtaaacgttttcgcaattccgtttacgatacatagtctactcttgtgcagaatg

SEQ ID NO: 41571 - DNA, 60 bp, Artificial
  Synthetic oligonucleotide
cacacaaggcagatgggctatgtaaacgttttcgcaattccgtttacgatacatagtcta

SEQ ID NO: 41572 - DNA, 60 bp, Artificial
  Synthetic oligonucleotide
gtattcttgctagtcatactagccatccttactgcgcttcgattgtgtgcgtactgctgc

SEQ ID NO: 41573 - DNA, 60 bp, Artificial
  Synthetic oligonucleotide
gtattcttgctagtcacactagccatccttactgcgcttcgattgtgtgcgtactgctgc

SEQ ID NO: 41574 - DNA, 60 bp, Artificial
  Synthetic oligonucleotide
tgcacaatttgctccaagtgcctctgcattcttcggaatgtcacgcattggcatggaagt

SEQ ID NO: 41575 - DNA, 52 bp, Artificial
  Synthetic oligonucleotide
caaattgcacaatttgctccaagtgcctctgcattcttcggaatgtcacgca

SEQ ID NO: 41576 - DNA, 60 bp, Artificial
  Synthetic oligonucleotide
cctctgcattctttggaatgtcacgcattggcatggaagtcacaccttcgggaacatggc

SEQ ID NO: 41577 - DNA, 60 bp, Artificial
  Synthetic oligonucleotide
ccaagtgcctctgcattcttcggaatgtcacgcattggcatggaagtcacaccttcggga

SEQ ID NO: 41578 - DNA, 60 bp, Artificial
  Synthetic oligonucleotide
atgtcacgcattggcatggaagtcacaccttcgggaacatggctgacttatcatggagcc

SEQ ID NO: 41579 - DNA, 60 bp, Artificial
  Synthetic oligonucleotide
gaatgtcacgcattggcatggaagtcacaccttcgggaacatggctgacttatcatggag

SEQ ID NO: 41580 - DNA, 60 bp, Artificial
  Synthetic oligonucleotide
gtcacgcattggcatggaagtcacaccttcgggaacatggctgacttatcatggagccat

SEQ ID NO: 41581 - DNA, 60 bp, Artificial
  Synthetic oligonucleotide
tgtcacgcattagcatggaagtcacaccttcgggaacatggctgacttatcatggagcca

SEQ ID NO: 41582 - DNA, 60 bp, Artificial
  Synthetic oligonucleotide
caccttcgggaacatggctgacttatcatggagccattaaattggatgacaaagatccac

SEQ ID NO: 41583 - DNA, 60 bp, Artificial
  Synthetic oligonucleotide
cacgcattggcatggaagtcacaccttcgggaacatggctgacttatcatggagccatca

SEQ ID NO: 41584 - DNA, 60 bp, Artificial
  Synthetic oligonucleotide
gatgaccacacaaggcagatgggctatgtaaacgttttcgcaattccgtttacgatacat

SEQ ID NO: 41585 - DNA, 60 bp, Artificial
  Synthetic oligonucleotide
atgagtggagcttctgctgattcaactcaggcataaacactcatgatgaccacacaaggc

SEQ ID NO: 41586 - DNA, 60 bp, Artificial
  Synthetic oligonucleotide
agctatttccatgtgggccttagttatttctgtaacctctaactattctggtgtcgttac

SEQ ID NO: 41587 - DNA, 60 bp, Artificial
  Synthetic oligonucleotide
ccaggctgatgtcaataccccggctgacattctcgatcgggacccaagtagcgatgaggc

SEQ ID NO: 41588 - DNA, 60 bp, Artificial
  Synthetic oligonucleotide
ggctgtgtgctttcctctgcttgcactatgtttgcaatggccgatggtagtccacaacct

SEQ ID NO: 41589 - DNA, 60 bp, Artificial
  Synthetic oligonucleotide
ctgtctgattgtgttgtgctagttacatgggcagccaactttgagctcacttgtctccgc

SEQ ID NO: 41590 - DNA, 60 bp, Artificial
  Synthetic oligonucleotide
cgtcaatgtataagcaagcacgtgccgaggataagaaggccaagattgtaagtgctatgc

SEQ ID NO: 41591 - DNA, 60 bp, Artificial
  Synthetic oligonucleotide
gttgtcagattactgtacgtttgtttgttgggctcatggttttgaactcacgtctgcatc

SEQ ID NO: 41592 - DNA, 60 bp, Artificial
  Synthetic oligonucleotide
cgcccgtaatggtgttttaataacagaaggttcagtcaaaggtctaacaccttcaaaggg

SEQ ID NO: 41593 - DNA, 60 bp, Artificial
  Synthetic oligonucleotide
ctcattcagtagctaatttaagtgctcctacgcttgtgccgcaggagaattatagtagta

SEQ ID NO: 41594 - DNA, 60 bp, Artificial
  Synthetic oligonucleotide
tgtggacgattacatattggcaaatgaatgtacagagcgcttgaaattgtttgctgcaga

SEQ ID NO: 41595 - DNA, 60 bp, Artificial
  Synthetic oligonucleotide
cgcgctaagcattatgtttatattggtgaccctgctcaattgccagcaccacgtgtgtta

SEQ ID NO: 41596 - DNA, 60 bp, Artificial
  Synthetic oligonucleotide
gctgttttagtgttgcggctataacaagcggtgtaaaatttcaaacagttaaacctggta

SEQ ID NO: 41597 - DNA, 60 bp, Artificial
  Synthetic oligonucleotide
aattttgaataagccccgccagaagaggagccccaataaacaatgcactgttcagcagtg

SEQ ID NO: 41598 - DNA, 60 bp, Artificial
  Synthetic oligonucleotide
gtgggttttaagaatcagtattgtaatggaagtatcgcatgtcagttctgcttggcagga

SEQ ID NO: 41599 - DNA, 60 bp, Artificial
  Synthetic oligonucleotide
atgttaagagtttgtctatagttgatgtgtatgatatgtggcttacaggttgtaggtgtg

SEQ ID NO: 41600 - DNA, 60 bp, Artificial
  Synthetic oligonucleotide
gtggcaatattgtagcactttgcacaatgaaatacttgccacttctgatctgggtgttgc

SEQ ID NO: 41601 - DNA, 60 bp, Artificial
  Synthetic oligonucleotide
ccaagtgtttagctgattctgtcatgtctgctgtgtcggcaggtcttgaattgacggatg

SEQ ID NO: 41602 - DNA, 60 bp, Artificial
  Synthetic oligonucleotide
ccgcgcacgagttgaacacccagatgttgatgggttgtgcaaattacgcggcaagtttgt

SEQ ID NO: 41603 - DNA, 60 bp, Artificial
  Synthetic oligonucleotide
tgcaagtagctaatagtttaatgaatggtgtcactcttagcactaagcttaaagatggcg

SEQ ID NO: 41604 - DNA, 60 bp, Artificial
  Synthetic oligonucleotide
cgatgaaggagtggattgtaaaatacaaacagcgccgcacattagtcttgctatgctgga

SEQ ID NO: 41605 - DNA, 60 bp, Artificial
  Synthetic oligonucleotide
ggtggattgtcgccgacttcttaaacaagagtgttgtgtgcagtctagcctaatacgtga

SEQ ID NO: 41606 - DNA, 60 bp, Artificial
  Synthetic oligonucleotide
ggtgcaggtcaatttgtgggttgggttatacccttagcctttatgcctgtgcaatcccgg

SEQ ID NO: 41607 - DNA, 60 bp, Artificial
  Synthetic oligonucleotide
ttaccctgtatggccaaactgtagtctattttggaggttgtgtgtattggagtccagcac

SEQ ID NO: 41608 - DNA, 60 bp, Artificial
  Synthetic oligonucleotide
gcctgctaagttgaaaactcaggttgttaatagtggtccagatcagacttgtaacacacc

SEQ ID NO: 41609 - DNA, 60 bp, Artificial
  Synthetic oligonucleotide
cgagagtgttgaataatttaaatcttcctggctgtaatggaggtagtttgtatgttaaca

SEQ ID NO: 41610 - DNA, 60 bp, Artificial
  Synthetic oligonucleotide
ggcatggcacgttgtgcgtgatccacgttatgttatgagactgcagagtgcttctactat

SEQ ID NO: 41611 - DNA, 60 bp, Artificial
  Synthetic oligonucleotide
ccaggggtagaagagctcaacccaagcaaactgctacttctcagcaaccatcaggaggga

SEQ ID NO: 41612 - DNA, 60 bp, Artificial
  Synthetic oligonucleotide
ggtcaagatgtcatcttcagccaattcgacagcctgggagtcagctctaaccagagccca

SEQ ID NO: 41613 - DNA, 60 bp, Artificial
  Synthetic oligonucleotide
gcgtggtttgctcttctcaaacatcattacgttgtggcagttgcatcagaaagcctcttc

SEQ ID NO: 41614 - DNA, 60 bp, Artificial
  Synthetic oligonucleotide
tgtgtggtggctgttattatgttaagcctggtggcactagtagtggtgatgcaactactg

SEQ ID NO: 41615 - DNA, 60 bp, Artificial
  Synthetic oligonucleotide
gtcgcatattaggagctggatgctttgtggatgatttgttaaagactgatagtgttcttt

SEQ ID NO: 41616 - DNA, 60 bp, Artificial
  Synthetic oligonucleotide
atagagccctagttagcgctactgagtttgcggacaaattggtggaggtaggcttagtag

SEQ ID NO: 41617 - DNA, 60 bp, Artificial
  Synthetic oligonucleotide
ggggctgggttgttggtacaatttcttctacagttagattgcaagctggaactgctactg

SEQ ID NO: 41618 - DNA, 60 bp, Artificial
  Synthetic oligonucleotide
gtgtgcaagtgtggtgagtctatggtacttattgatgttgatgtgccatttacagcccac

SEQ ID NO: 41619 - DNA, 66 bp, Artificial
  Synthetic oligonucleotide
catcaagtgattttattgtattgtttgatcgtttaagccttacagtgatgtcttatcaaatgcagg

SEQ ID NO: 41620 - DNA, 59 bp, Artificial
  Synthetic oligonucleotide
actgctgttgagggcactaagaaattggcagagcgtctttcttttaatgtcggacgctc

SEQ ID NO: 41621 - DNA, 60 bp, Artificial
  Synthetic oligonucleotide
caagggcgtcagattatgggtagttgctcctttgaggatgaattgacacctagcgatgtc

SEQ ID NO: 41622 - DNA, 60 bp, Artificial
  Synthetic oligonucleotide
cgctgttatgcattttggtacattgagtcgtgaagatcttgagattggttacaccgtgga

SEQ ID NO: 41623 - DNA, 60 bp, Artificial
  Synthetic oligonucleotide
taataagtattttaagcactggagtatgccataccatcctaacacggttgattgtcagga

SEQ ID NO: 41624 - DNA, 60 bp, Artificial
  Synthetic oligonucleotide
ccaatggaaagagttagtctctggaattatgggaagccggttactttgcctacaggctgt

SEQ ID NO: 41625 - DNA, 56 bp, Artificial
  Synthetic oligonucleotide
tggaaggcgtgttacatttaaggaacagcctacagtaaatgagattgcaagcacac

SEQ ID NO: 41626 - DNA, 60 bp, Artificial
  Synthetic oligonucleotide
ctctcaggcagtaaaatttatgaagttgagcgtggcttgttacattcatctcaattgcca

SEQ ID NO: 41627 - DNA, 60 bp, Artificial
  Synthetic oligonucleotide
ggatgtgggactagttgttttaagaaatgtggtggttgttgtgatgattatactggacac

SEQ ID NO: 41628 - DNA, 60 bp, Artificial
  Synthetic oligonucleotide
tctacaggaattgattttgttgtggaagccactggtttgtttgctgatagagatggttac

SEQ ID NO: 41629 - DNA, 60 bp, Artificial
  Synthetic oligonucleotide
ggacccaagtagcgatgaggctattccgactaggtttccgcctggcacggtactccctca

SEQ ID NO: 41630 - DNA, 60 bp, Artificial
  Synthetic oligonucleotide
ttcttactgcagacagcttggtacttctgttcgtagtgatggtacatttgaagaaatggc

SEQ ID NO: 41631 - DNA, 60 bp, Artificial
  Synthetic oligonucleotide
gcagaaacagcgcattctgtaaatgttaatcgcttcaatgttgctattactcgagccaag

SEQ ID NO: 41632 - DNA, 60 bp, Artificial
  Synthetic oligonucleotide
cacctcagaaatataagagaatgaaccttatgtcggcacctggtggtaacccctcgcagg

SEQ ID NO: 41633 - DNA, 60 bp, Artificial
  Synthetic oligonucleotide
gagagatggaatgctatgagcgtgtaaaagattgtaagtttgtggctgaacacgatttct

SEQ ID NO: 41634 - DNA, 60 bp, Artificial
  Synthetic oligonucleotide
gcatgtagcttgattacctacatgtctatcgccagggaaatgtctaatctgtctacttag

SEQ ID NO: 41635 - DNA, 60 bp, Artificial
  Synthetic oligonucleotide
gcttagcacctacatgtctatcgccagggaaatgtctaatctgtctacttagtagcctgg

SEQ ID NO: 41636 - DNA, 60 bp, Artificial
  Synthetic oligonucleotide
ggccacgcggagtacgatcgagggtacagcactaggacgcccattaggggaagagctaaa

SEQ ID NO: 41637 - DNA, 60 bp, Artificial
  Synthetic oligonucleotide
gcggagtacgatcgagggtacagcactaggacgcccattaggggaagagctaaattttag

SEQ ID NO: 41638 - DNA, 60 bp, Artificial
  Synthetic oligonucleotide
ctggttttgataagaattatttaaacgggtacggggtagcagtgaggctcggctgatacc

SEQ ID NO: 41639 - DNA, 60 bp, Artificial
  Synthetic oligonucleotide
ctgattttgataagaattatttaaacgggtacggggtagcagtgaggctcggctgatacc

SEQ ID NO: 41640 - DNA, 60 bp, Artificial
  Synthetic oligonucleotide
ggacgacatgttctaaccataccgcaaaatgcacctaatggtatagtgtttatacacttt

SEQ ID NO: 41641 - DNA, 58 bp, Artificial
  Synthetic oligonucleotide
aattttgataagaattatttaaacgggtacggggtaacagtgaggctcggctgatacc

SEQ ID NO: 41642 - DNA, 60 bp, Artificial
  Synthetic oligonucleotide
gtgtaaagccagctaatgctagtcagtatgcaatagtgccctctaatggtaggggtattt

SEQ ID NO: 41643 - DNA, 60 bp, Artificial
  Synthetic oligonucleotide
gtgtaaagccagctaatgctagtcagtatgcaatagtgcccgctaatggtaggggtattt

SEQ ID NO: 41644 - DNA, 60 bp, Artificial
  Synthetic oligonucleotide
ccgtatggtgcagaaatatactggtgaccaaagcggaaataagaaaaggtttgctacgtt

SEQ ID NO: 41645 - DNA, 60 bp, Artificial
  Synthetic oligonucleotide
cgtaggttcaatactcctaactaatggtcaacaatgtaattttgctatagagagtgtgcc

SEQ ID NO: 41646 - DNA, 60 bp, Artificial
  Synthetic oligonucleotide
aggcatgtagcttagcacctacatgtctatcgccagggaaatgtctaatctgtctactta

SEQ ID NO: 41647 - DNA, 60 bp, Artificial
  Synthetic oligonucleotide
caagatgaatgaggaaggtattaaggatgggcgtgttacggcaatgctcaacctagtccc

SEQ ID NO: 41648 - DNA, 52 bp, Artificial
  Synthetic oligonucleotide
ccccacatacctctaagggcttttgagcctagcgttgggctacgttctcgca

SEQ ID NO: 41649 - DNA, 60 bp, Artificial
  Synthetic oligonucleotide
gcacctggttttgataagaattatttaaacgggtacggggtagcagtgaggctcggctga

SEQ ID NO: 41650 - DNA, 60 bp, Artificial
  Synthetic oligonucleotide
gtcacgcattggcatggaagtcacacctttgggaacatggctgacttatcatggagccat

SEQ ID NO: 41651 - DNA, 57 bp, Artificial
  Synthetic oligonucleotide
ctgagtaccaagtttccagatatgtaatgttcggctttagtgttgcaggtgcagttg

SEQ ID NO: 41652 - DNA, 60 bp, Artificial
  Synthetic oligonucleotide
ctctgagtacaaagtttccagatatgtaatgttcggctttagtgttgcaggtgcagttgt

SEQ ID NO: 41653 - DNA, 60 bp, Artificial
  Synthetic oligonucleotide
gaatggtgttctttattgtgagggtcagtggcttgctaagtgtgaaccagaccacttgcc

SEQ ID NO: 41654 - DNA, 60 bp, Artificial
  Synthetic oligonucleotide
gatgtagacaatggttgtttgatgggatgggactatcctaagtgtgatcgtgctttgcct

SEQ ID NO: 41655 - DNA, 60 bp, Artificial
  Synthetic oligonucleotide
ggccattggtcatatgcaggaaggttttagaagtacatctctagcattacaacaaattca

SEQ ID NO: 41656 - DNA, 50 bp, Artificial
  Synthetic oligonucleotide
cattcttcccagacttgaatggcgatgtagtggctattgactatagacac

SEQ ID NO: 41657 - DNA, 60 bp, Artificial
  Synthetic oligonucleotide
gctatctgtcacattcttcccagacttgaatggcgatgtagtggctattgactatagaca

SEQ ID NO: 41658 - DNA, 57 bp, Artificial
  Synthetic oligonucleotide
taaaagtatggtgactgtcacttttaagtggatagatcccaacattatgcccagcgt

SEQ ID NO: 41659 - DNA, 60 bp, Artificial
  Synthetic oligonucleotide
ggtgactgtcacttttaagtggatagatcccaatattatgcccagcgtcactggctggga

SEQ ID NO: 41660 - DNA, 60 bp, Artificial
  Synthetic oligonucleotide
cactcttgaacgaacttaaaattgcatcatacgtcacagtgggtttcgtctcgctgtgcg

SEQ ID NO: 41661 - DNA, 60 bp, Artificial
  Synthetic oligonucleotide
cactcttgaacgaacttaaaattgcatcatacgtcacagtgggtttcgttccgctgtgcg

SEQ ID NO: 41662 - DNA, 60 bp, Artificial
  Synthetic oligonucleotide
ataataaacgaacagcatgaatttgtatagactagtggttgatgcatatcaagcaccacc

SEQ ID NO: 41663 - DNA, 60 bp, Artificial
  Synthetic oligonucleotide
gtctggacggaataagccccgccccggcagtcaatcacctaaggtgacgttcaaacaaga

SEQ ID NO: 41664 - DNA, 60 bp, Artificial
  Synthetic oligonucleotide
gttgtcagtgacaccatatgtttgtaaccaccctagttgtgatgttgcagatgtaaccca

SEQ ID NO: 41665 - DNA, 60 bp, Artificial
  Synthetic oligonucleotide
ctgtgacaccatatgtttgtaaccaccctagttgtgatgtagcagatgtaactcagttgt

SEQ ID NO: 41666 - DNA, 60 bp, Artificial
  Synthetic oligonucleotide
gtctggacggaataagccccgccctggcaatcaatcacctaaggtgacgttcaaacaaga

SEQ ID NO: 41667 - DNA, 60 bp, Artificial
  Synthetic oligonucleotide
cttgtaggttattgcagcgtgttatgcttaaagctgccatgctatgtaatagatacaatt

SEQ ID NO: 41668 - DNA, 60 bp, Artificial
  Synthetic oligonucleotide
gtggcataaattatatgtttgtgaatgacctcacgttgcattttgtagaccctatgcttg

SEQ ID NO: 41669 - DNA, 60 bp, Artificial
  Synthetic oligonucleotide
gtggcataaattatatgtttgtggatgacctcacgttgcattttgtagaccctatgcttg

SEQ ID NO: 41670 - DNA, 60 bp, Artificial
  Synthetic oligonucleotide
cggtggtataaattatatgtttgtgaatgacctcacgttgcattttgtagaccctatgct

SEQ ID NO: 41671 - DNA, 60 bp, Artificial
  Synthetic oligonucleotide
tttgagcctagcgttgggctacgttctcgcataaggtcggctatacgacgtttgtagggg

SEQ ID NO: 41672 - DNA, 60 bp, Artificial
  Synthetic oligonucleotide
ccacatacctctaagggcttttgagcctagcgttgggctacgttctcgcacaaggtcggc

SEQ ID NO: 41673 - DNA, 60 bp, Artificial
  Synthetic oligonucleotide
cgtgataaagctgtagctcgcaaacttgaacgtatggcagacctagcacttactaacatg

SEQ ID NO: 41674 - DNA, 60 bp, Artificial
  Synthetic oligonucleotide
gaagttgtacttttgaagatgaattggcaccttctgacgtttatcaacaattggctggtg

SEQ ID NO: 41675 - DNA, 60 bp, Artificial
  Synthetic oligonucleotide
cagcccattctgttaatgttaatcgatttaatgttgccataactagagccaagaagggca

SEQ ID NO: 41676 - DNA, 60 bp, Artificial
  Synthetic oligonucleotide
caagaattgcgttatatgaatgctaatggcttacgtccaccccgtaatagttttgaggct

SEQ ID NO: 41677 - DNA, 60 bp, Artificial
  Synthetic oligonucleotide
ctcctctggaaatcgttcaggaatcctcaagaaaacttcttgggctgaccaatctgagcg

SEQ ID NO: 41678 - DNA, 60 bp, Artificial
  Synthetic oligonucleotide
ttgacttgtttgttaagcgtcgtgctgattttgcttgcaagtttgcagtttgtggagatg

SEQ ID NO: 41679 - DNA, 60 bp, Artificial
  Synthetic oligonucleotide
gcagtctgtatggcttgccaattgtgactttgatattgtagtggcttggcatgtagttcg

SEQ ID NO: 41680 - DNA, 60 bp, Artificial
  Synthetic oligonucleotide
cacgttgcatctgctagtgctctgcttgatttacgaacttgttgttttagtgtagctgcc

SEQ ID NO: 41681 - DNA, 60 bp, Artificial
  Synthetic oligonucleotide
ggtactagtgtgaatgcccggctagtaccctgtgctagtggtttatctactgatgttcaa

SEQ ID NO: 41682 - DNA, 60 bp, Artificial
  Synthetic oligonucleotide
gttattctgtcacaccatttggttcttgtatatattggtcgccgcgtcctggattgtgga

SEQ ID NO: 41683 - DNA, 60 bp, Artificial
  Synthetic oligonucleotide
ctatcagcacattggaatgaaacgttattgcactgtacaaggtcctcctggtacgggcaa

SEQ ID NO: 41684 - DNA, 60 bp, Artificial
  Synthetic oligonucleotide
ctaaagaaactgctgctatggttaaatctaagggtgtttgccaagtaggagattgttatg

SEQ ID NO: 41685 - DNA, 60 bp, Artificial
  Synthetic oligonucleotide
ggtatgaatttcgtgctggcagaccacatagattagttgctcttgttttagctaaaggtc

SEQ ID NO: 41686 - DNA, 60 bp, Artificial
  Synthetic oligonucleotide
tatgcatgccaactatttgttttggagaaatagtacaacatggaatggtggtgcctatag

SEQ ID NO: 41687 - DNA, 60 bp, Artificial
  Synthetic oligonucleotide
ggccgtgttattaaatttgagacagatgcatacaaacttttcttgagtggtgatgattgt

SEQ ID NO: 41688 - DNA, 58 bp, Artificial
  Synthetic oligonucleotide
ttgagttttggtttgctatgagaaaagatggtgacgatgttatcttcagccgtgcaga

SEQ ID NO: 41689 - DNA, 60 bp, Artificial
  Synthetic oligonucleotide
gtgggctttactgcctacatatagtgtttataagtctgatattcatttgcctgcttatgc

SEQ ID NO: 41690 - DNA, 60 bp, Artificial
  Synthetic oligonucleotide
ggcagttggtggagttttaatccagagaccaataatcttatgtgtattgatatgaaaggc

SEQ ID NO: 41691 - DNA, 60 bp, Artificial
  Synthetic oligonucleotide
gagtgtttcaccttatgtgtgtaatgcacctaactgtgatgtgagtgatgtcaccaaatt

SEQ ID NO: 41692 - DNA, 60 bp, Artificial
  Synthetic oligonucleotide
gcccaccttaactcaaatgaatttaaaatatgctatcagtgctaagaatagagctcgcac

SEQ ID NO: 41693 - DNA, 60 bp, Artificial
  Synthetic oligonucleotide
ctggttctattaggtttgatagtactttaccaggctttgagacaattatgaaagttcttg

SEQ ID NO: 41694 - DNA, 60 bp, Artificial
  Synthetic oligonucleotide
gtttccgcctggtacgattttgcctcaaggctattatgttgaaggctcaggaaggtctgc

SEQ ID NO: 41695 - DNA, 64 bp, Artificial
  Synthetic oligonucleotide
ggttttatgccatcttatgttcacaaatggtttcaattctgtaggttgtatattgaagagagtg

SEQ ID NO: 41696 - DNA, 60 bp, Artificial
  Synthetic oligonucleotide
cggaggagttggctagtcctatgaagtcagatgagggtgggttatgcccctctactggtc

SEQ ID NO: 41697 - DNA, 60 bp, Artificial
  Synthetic oligonucleotide
aatgtgatcgtgctatgccaaatattttgcgtattgttagtagtttagttttggcccgca

SEQ ID NO: 41698 - DNA, 60 bp, Artificial
  Synthetic oligonucleotide
ttcatctctctgccagtgacgtgttggttgtcctcagcgtccctcccataggtcgcaatg

SEQ ID NO: 41699 - DNA, 60 bp, Artificial
  Synthetic oligonucleotide
gtaaaatggatactgctgcctatagagaagcggcgtgttctcagttagctaaggctatgg

SEQ ID NO: 41700 - DNA, 59 bp, Artificial
  Synthetic oligonucleotide
atatatgcatcaattagagctcagtactggttgtcacactggcactgattttactggta

SEQ ID NO: 41701 - DNA, 60 bp, Artificial
  Synthetic oligonucleotide
cttcctggatgtaatggtggtagtttgtatgttaataaacatgcattccatactaatcct

SEQ ID NO: 41702 - DNA, 60 bp, Artificial
  Synthetic oligonucleotide
gcttctttgtatacatctttggttccacatacacgttatagccttgctaattctaatggt

SEQ ID NO: 41703 - DNA, 60 bp, Artificial
  Synthetic oligonucleotide
tggtttaataccatgttagatgctagtgcacctgctacaggctggcttctttaccaatta

SEQ ID NO: 41704 - DNA, 60 bp, Artificial
  Synthetic oligonucleotide
tcacctttgcatagcttgggtggttttcctaaagggtatgttatgggcttgttccgttca

SEQ ID NO: 41705 - DNA, 60 bp, Artificial
  Synthetic oligonucleotide
ccatgtgcaggtagaaaagttaattttaacgagaaacctgttgttatggagattccgtct

SEQ ID NO: 41706 - DNA, 60 bp, Artificial
  Synthetic oligonucleotide
ggtgtacctataattaattgtgttaaaatgctctgtgatcatgctggtactggtatggcc

SEQ ID NO: 41707 - DNA, 60 bp, Artificial
  Synthetic oligonucleotide
ggcctcttgttatcattgcgaacaggtataatgaagttgctaatgctgttatgcagaata

SEQ ID NO: 41708 - DNA, 60 bp, Artificial
  Synthetic oligonucleotide
gttatgtgtggcggttgctattatgttaagcctggtggtactagcagtggtgatgcaacc

SEQ ID NO: 41709 - DNA, 60 bp, Artificial
  Synthetic oligonucleotide
ggtcacctactattacacatactaactgttggttgcgttctgtgttacttgtaatgcaga

SEQ ID NO: 41710 - DNA, 60 bp, Artificial
  Synthetic oligonucleotide
ggctggtgatgaagcaatggcctctcgtatgtattgtacttttgctattgaggatgttga

SEQ ID NO: 41711 - DNA, 60 bp, Artificial
  Synthetic oligonucleotide
gaagactgacagtgttcttttgatagagcgctttgtaagtctagctatagatgcttaccc

SEQ ID NO: 41712 - DNA, 60 bp, Artificial
  Synthetic oligonucleotide
gaactggttattacggttgttggcgccatagttatacttgtgattatgtgtataacccgc

SEQ ID NO: 41713 - DNA, 60 bp, Artificial
  Synthetic oligonucleotide
gtctcatgtttgtaagtgtggacataatatgactctaatagcagcggacttaccttgtac

SEQ ID NO: 41714 - DNA, 60 bp, Artificial
  Synthetic oligonucleotide
gggatatgtatttgacaggttgtgattatgttgtttgggttgctaatgaattgtcacgcc

SEQ ID NO: 41715 - DNA, 60 bp, Artificial
  Synthetic oligonucleotide
gctgctatagaactttctaaagagcttaaacgacctgtaaacccaactgatgcttcacat

SEQ ID NO: 41716 - DNA, 59 bp, Artificial
  Synthetic oligonucleotide
ttgttgcagctaacatgtttatgggtgtaggtgtaggccattatacacatttgaaatgt

SEQ ID NO: 41717 - DNA, 60 bp, Artificial
  Synthetic oligonucleotide
gctctagcgcgttttactatctttactcagagtcgtgtattgtcaacctttgaacctcgc

SEQ ID NO: 41718 - DNA, 60 bp, Artificial
  Synthetic oligonucleotide
gattgttagtgatagagaagttattttgtgttgggagacaggtaaagttaaaccaccact

SEQ ID NO: 41719 - DNA, 60 bp, Artificial
  Synthetic oligonucleotide
caagatgaatgaggaaggtattaaggatgggcgtgttacagcaatgctcaacctagtccc

SEQ ID NO: 41720 - DNA, 60 bp, Artificial
  Synthetic oligonucleotide
caagatgaatgaggaaggtattaaggatgggcgcgttacagcaatgctcaacctagttcc

SEQ ID NO: 41721 - DNA, 60 bp, Artificial
  Synthetic oligonucleotide
caagatgaatgaggaaggtattaaggatgggcgtgttacagcaatgctcaaccttacacc

SEQ ID NO: 41722 - DNA, 60 bp, Artificial
  Synthetic oligonucleotide
gttgtctatgatataggcaaccctaaaggtataaaatgcgttagacgtggggatgtcaca

SEQ ID NO: 41723 - DNA, 60 bp, Artificial
  Synthetic oligonucleotide
acaacacacttgccaaacaaggtcttgtagcagatatttctggttttagagaaattctct

SEQ ID NO: 41724 - DNA, 60 bp, Artificial
  Synthetic oligonucleotide
tcgagtgcgaggaacctctggttcatctagcggtaggcgggtgtgtggaagtagcacttc

SEQ ID NO: 41725 - DNA, 60 bp, Artificial
  Synthetic oligonucleotide
gttgtctatgatataggcaaccctaaaggtataaaatgcgttagacgtggggatctcaca

SEQ ID NO: 41726 - DNA, 60 bp, Artificial
  Synthetic oligonucleotide
aacgttgtctatgatataggcaaccctaaaggtataaaatgtgttagacgtggagactta

SEQ ID NO: 41727 - DNA, 60 bp, Artificial
  Synthetic oligonucleotide
aacgttgtctatgatataggcaaccctaaaggtataaaatgtgttagacgtggagacttg

SEQ ID NO: 41728 - DNA, 58 bp, Artificial
  Synthetic oligonucleotide
taatgttgtctatgatataggcaaccctaaaggtattaaatgtgttaggcgtggggat

SEQ ID NO: 41729 - DNA, 60 bp, Artificial
  Synthetic oligonucleotide
gctttcgagctatatgcaaaacgcaaacttggactcacacctccattaacaatacttaga

SEQ ID NO: 41730 - DNA, 60 bp, Artificial
  Synthetic oligonucleotide
gtaagtactgttggaaataaacctgtcacatggtatatctatgtgcgcaagaatggtgag

SEQ ID NO: 41731 - DNA, 60 bp, Artificial
  Synthetic oligonucleotide
tcttcggacaccaactcgaactaaacgaaatatttgtctttctatgaaatcatagaggac

SEQ ID NO: 41732 - DNA, 60 bp, Artificial
  Synthetic oligonucleotide
gcaattggaaggtactaatgtcatgtcatcagataatgtggttgcattcctatatgccgc

SEQ ID NO: 41733 - DNA, 60 bp, Artificial
  Synthetic oligonucleotide
catgtacccagagttttcaattgtttgtagatttgatactcgcactcgctctaaactgtc

SEQ ID NO: 41734 - DNA, 60 bp, Artificial
  Synthetic oligonucleotide
gcagctcgactagaaccctgcaatggtactgatccagaccatgttagtagagcttttgac

SEQ ID NO: 41735 - DNA, 60 bp, Artificial
  Synthetic oligonucleotide
ggtggtgctgtctgcaagaagcatgctgctctttacagagcgtatgttgaggattacaac

SEQ ID NO: 41736 - DNA, 60 bp, Artificial
  Synthetic oligonucleotide
gtacacagcatcccttgcaggtggtataacattaggtgcacttggtggaggcgccgtggc

SEQ ID NO: 41737 - DNA, 60 bp, Artificial
  Synthetic oligonucleotide
tggctctatcacataactcagtcctagacactcctaaattcaagtgtcgttgtaacaacg

SEQ ID NO: 41738 - DNA, 60 bp, Artificial
  Synthetic oligonucleotide
cccgtacaagaaccaatgagcaggttgttagaagtttgtatgtaatatatgaagaaggag

SEQ ID NO: 41739 - DNA, 58 bp, Artificial
  Synthetic oligonucleotide
cgttgtggagactgtcttaggagaccacttttatgcacgaagtgtgcttacgaccatg

SEQ ID NO: 41740 - DNA, 60 bp, Artificial
  Synthetic oligonucleotide
gttgtgacattgttgtagttgatgaggtctctatgtgtactaattatgatcttagtgtca

SEQ ID NO: 41741 - DNA, 60 bp, Artificial
  Synthetic oligonucleotide
taatgtcttcatgtccacttctaagtgttgggtagaaccagatcttagcgttggaccaca

SEQ ID NO: 41742 - DNA, 60 bp, Artificial
  Synthetic oligonucleotide
gtcctcttaaagccacaattctagtcaaccaagaaaagtacaataccatatctaagctct

SEQ ID NO: 41743 - DNA, 60 bp, Artificial
  Synthetic oligonucleotide
gggtgggactatcctaagtgtgaccgtgctttacctaatatgattagaatggcttctgcc

SEQ ID NO: 41744 - DNA, 60 bp, Artificial
  Synthetic oligonucleotide
tgatcccgcttatgagaaagggtcaaccttggcacattgttagacgccgtatagtgcaga

SEQ ID NO: 41745 - DNA, 60 bp, Artificial
  Synthetic oligonucleotide
ggcaaaagtgcaagatgttgtcaacacacaagggcaagctttaagccacctaacagtaca

SEQ ID NO: 41746 - DNA, 60 bp, Artificial
  Synthetic oligonucleotide
acctgactggtgaaattgatgacttagaatttaggtcagaaaagctacataacactactg

SEQ ID NO: 41747 - DNA, 60 bp, Artificial
  Synthetic oligonucleotide
ccagacaagcggaggttagggctagtagacaacttgccaaagacaaggttaatgaatgcg

SEQ ID NO: 41748 - DNA, 60 bp, Artificial
  Synthetic oligonucleotide
cacgatgtgggtaatccaaaaggcatccgttgtgctacaacaccaataccatggttttgt

SEQ ID NO: 41749 - DNA, 60 bp, Artificial
  Synthetic oligonucleotide
gcaatggggctacacaggatctttgagcatgaatcatcatgaagtttgtaacattcatag

SEQ ID NO: 41750 - DNA, 60 bp, Artificial
  Synthetic oligonucleotide
ggtgcatctggtgttgctcctggtagtactgtgttacgaaggtggttaccagacgatgcc

SEQ ID NO: 41751 - DNA, 60 bp, Artificial
  Synthetic oligonucleotide
gccctgcacttttagaccagcgtactgtctgtttctccattgcagctttgagtactggta

SEQ ID NO: 41752 - DNA, 60 bp, Artificial
  Synthetic oligonucleotide
ccttctatccacaactccaatctgctgaatggaaccctggctatagcatgcctacattgt

SEQ ID NO: 41753 - DNA, 60 bp, Artificial
  Synthetic oligonucleotide
cgctgctgaaactgtgaaagctaaggaggagtctgttaaatctgaatatgcttatgctgt

SEQ ID NO: 41754 - DNA, 60 bp, Artificial
  Synthetic oligonucleotide
aagattgttcgaagagcgaacaatacataccacctgcttatgcaacgacatatatgagct

SEQ ID NO: 41755 - DNA, 60 bp, Artificial
  Synthetic oligonucleotide
gtacctgtcaacccagaatcaaagcagtgcttcaaaatgtttgtaaaaggtcaggttcag

SEQ ID NO: 41756 - DNA, 56 bp, Artificial
  Synthetic oligonucleotide
tgataatgatgcacttaacaacattatcaacaatgcgcgtgatggttgtgttccac

SEQ ID NO: 41757 - DNA, 60 bp, Artificial
  Synthetic oligonucleotide
atgatgcacttaacaacattatcaacaatgcacgtgatggttgtgtaccactcaacatca

SEQ ID NO: 41758 - DNA, 60 bp, Artificial
  Synthetic oligonucleotide
ggtactagtggagtagcccgtctagtacccctaggctctggtgttcaaccagatatagta

SEQ ID NO: 41759 - DNA, 60 bp, Artificial
  Synthetic oligonucleotide
cctactcttatacagaatggaatcctagtgtacagtggtataagtaagctgtgcattcgc

SEQ ID NO: 41760 - DNA, 60 bp, Artificial
  Synthetic oligonucleotide
tcagtagtgtttatggggcatattcatgctggagtcaccatagacatattggcggtgcag

SEQ ID NO: 41761 - DNA, 60 bp, Artificial
  Synthetic oligonucleotide
gtgtttatggggcatattcatgctggagtcaccatagacacattggcggcgcggactttg

SEQ ID NO: 41762 - DNA, 60 bp, Artificial
  Synthetic oligonucleotide
cctagtgtacagtggtataagtaagctgtgcattcgctatgtttaggtttaagatgtagt

SEQ ID NO: 41763 - DNA, 60 bp, Artificial
  Synthetic oligonucleotide
tacaggtaaaccatgataatgtctgcgatgtccataagggtgcacatgtggctagctgtg

SEQ ID NO: 41764 - DNA, 60 bp, Artificial
  Synthetic oligonucleotide
gtctatggggcatattcatgctggagtcaccatagacacataggaggtgcagactttgtg

SEQ ID NO: 41765 - DNA, 60 bp, Artificial
  Synthetic oligonucleotide
tacaggtaaaccatgataatgtctgcgatgtacataagggtgcacatgtggctagctgcg

SEQ ID NO: 41766 - DNA, 60 bp, Artificial
  Synthetic oligonucleotide
gcctgcgttgtctgtagttctcaaacatcattacgttgtggcagttgcatacgcaagcct

SEQ ID NO: 41767 - DNA, 60 bp, Artificial
  Synthetic oligonucleotide
cagagtgttggagcttgcgtggtctgctcttctcaaacatcattacgttgtggcagttgc

SEQ ID NO: 41768 - DNA, 60 bp, Artificial
  Synthetic oligonucleotide
ccagcggtcttggtcttgcacacaacggtaagccagtggtaatgtcagtgcaagaaggat

SEQ ID NO: 41769 - DNA, 60 bp, Artificial
  Synthetic oligonucleotide
tgcgacttaaagcatacaaccccgatggagcactccttgtttgaactaaacaaaatgaag

SEQ ID NO: 41770 - DNA, 60 bp, Artificial
  Synthetic oligonucleotide
gacaggctgatcacaggaagacttacagcacttaatgccttcgtgtctcagactctaact

SEQ ID NO: 41771 - DNA, 60 bp, Artificial
  Synthetic oligonucleotide
tgcgaattaaagcatacaaccccgatggagcactccttgtttgaactaaacaaaatgaag

SEQ ID NO: 41772 - DNA, 60 bp, Artificial
  Synthetic oligonucleotide
gccttgcgctagatttccaacttaacaaaacggacttaaatacctacagctggtccccat

SEQ ID NO: 41773 - DNA, 60 bp, Artificial
  Synthetic oligonucleotide
tctaacttaacaaaacggacttaaatacctacagctggtccctataggtgtttcattgcg

SEQ ID NO: 41774 - DNA, 56 bp, Artificial
  Synthetic oligonucleotide
ttgttgtttattttggtatacatgggtagtagttccaggagctaagggtacagcct

SEQ ID NO: 41775 - DNA, 60 bp, Artificial
  Synthetic oligonucleotide
gatgcttgttgtttattttggtatacatgggtagtacttcctggagctaagggtacagcc

SEQ ID NO: 41776 - DNA, 60 bp, Artificial
  Synthetic oligonucleotide
gatgcttgttgtttattttggtatacatgggtagtagttcctggagctaagggcgctgcc

SEQ ID NO: 41777 - DNA, 60 bp, Artificial
  Synthetic oligonucleotide
atccttttcgcggagcaatagcaagaaaagcgcgaatttatctgagagaaggattagagt

SEQ ID NO: 41778 - DNA, 60 bp, Artificial
  Synthetic oligonucleotide
aagataatccttttcgcggagcaatagcaagaaaagcgcgaatttatctgagagaaggat

SEQ ID NO: 41779 - DNA, 58 bp, Artificial
  Synthetic oligonucleotide
ttttccgaggaattactggtcatcgcgctgtctactcttgtacagaatggtaagcacg

SEQ ID NO: 41780 - DNA, 56 bp, Artificial
  Synthetic oligonucleotide
ttttccgaggaattactggtcatcgcgctgtctactcttgtacagaatggtaagca

SEQ ID NO: 41781 - DNA, 60 bp, Artificial
  Synthetic oligonucleotide
gcagctcgactagaaccctgtaatggtactgatccagaccatgttagtagagcttttgac

SEQ ID NO: 41782 - DNA, 60 bp, Artificial
  Synthetic oligonucleotide
gagactgtttgcaccactgattttgaaggcgaattgaatgacttcataagaccagagagt

SEQ ID NO: 41783 - DNA, 60 bp, Artificial
  Synthetic oligonucleotide
acccagtttggcaatcactcctaggaacggggttgagagaacggcgcaccagggttccgt

SEQ ID NO: 41784 - DNA, 60 bp, Artificial
  Synthetic oligonucleotide
cgcgtcaactggggagatgaaccttccaaaagacgtggtcgttctaactctcgtggtcgg

SEQ ID NO: 41785 - DNA, 60 bp, Artificial
  Synthetic oligonucleotide
gtactgtaggaaacaaacctgtcacatggtatatctatgtgcgcaaaagcggcgagtacg

SEQ ID NO: 41786 - DNA, 60 bp, Artificial
  Synthetic oligonucleotide
ggcagaccacaatttagctggctcgtttatggcattaaaatgctgatcatgtggctatta

SEQ ID NO: 41787 - DNA, 60 bp, Artificial
  Synthetic oligonucleotide
cctcctggtagcggtaagtctcattgtgttataggtttgggtttgtattatcctcaggca

SEQ ID NO: 41788 - DNA, 60 bp, Artificial
  Synthetic oligonucleotide
atcttgaaggggaaatgtatggcggttatgaagatcagcctagcatgcaattggagggta

SEQ ID NO: 41789 - DNA, 60 bp, Artificial
  Synthetic oligonucleotide
gggttaacagatttacatgcatgacgtgtggtgtttaccaattcactgtctcaccagcag

SEQ ID NO: 41790 - DNA, 60 bp, Artificial
  Synthetic oligonucleotide
ctgacagtagtctgcgtgtaaattgtttgcagcttttgaaaccagactgccttgatttta

SEQ ID NO: 41791 - DNA, 60 bp, Artificial
  Synthetic oligonucleotide
ctagtgcagctcgactagaaccctgtaatggtactgatccagaccacgttagtagggctt

SEQ ID NO: 41792 - DNA, 60 bp, Artificial
  Synthetic oligonucleotide
cacactattgagcaagcacttgcaatgggtgccagacttgaaaacatggaaatcgattcc

SEQ ID NO: 41793 - DNA, 60 bp, Artificial
  Synthetic oligonucleotide
ctgcatgtctaactattgagcaagcacttgcaatgggtgccagacttgaaaacatggaag

SEQ ID NO: 41794 - DNA, 55 bp, Artificial
  Synthetic oligonucleotide
acaacaattaacacagtgcgagctgtttcttagcacgaagatctcgatgtctaag

SEQ ID NO: 41795 - DNA, 60 bp, Artificial
  Synthetic oligonucleotide
gtcgtatgcacaaatgtggcagctgatgtacttccacaggagagacttgagactagcggc

SEQ ID NO: 41796 - DNA, 60 bp, Artificial
  Synthetic oligonucleotide
aggcaagtcgtatgcacaaatgtggcagctgatgtacttccacaggagagacttgagact

SEQ ID NO: 41797 - DNA, 60 bp, Artificial
  Synthetic oligonucleotide
gcatgtctaggcaagtcgtatgcacaaatgtggcagctgatgtacttccacaggagagac

SEQ ID NO: 41798 - DNA, 60 bp, Artificial
  Synthetic oligonucleotide
gcctgggcaagtcatatgcacaaatgtggcagctgatgtacttccacaggagagacctga

SEQ ID NO: 41799 - DNA, 60 bp, Artificial
  Synthetic oligonucleotide
gcacaaatgtggcagctgatgtacttccacaggagagacttgagactagcggctaatgct

SEQ ID NO: 41800 - DNA, 60 bp, Artificial
  Synthetic oligonucleotide
tgtggcagctgatgtacttccacaggagagacctaagactagcggctaatgctatctgtt

SEQ ID NO: 41801 - DNA, 60 bp, Artificial
  Synthetic oligonucleotide
ccgaaaagaggctagccatgcccttagtaggactagcaaaaggaggggactagcggtagc

SEQ ID NO: 41802 - DNA, 60 bp, Artificial
  Synthetic oligonucleotide
tgccaggacgaccgggtcctttcttggataaacccgctcaatgcctggagatttgggcgt

SEQ ID NO: 41803 - DNA, 60 bp, Artificial
  Synthetic oligonucleotide
cctggaagggagtgaagagactgacggttctaggagattctgcttgggacttccgctcag

SEQ ID NO: 41804 - DNA, 60 bp, Artificial
  Synthetic oligonucleotide
gagctgtccaacaacacattcatcgtggatggagcggaaaagaaggaatgctctgactcg

SEQ ID NO: 41805 - DNA, 60 bp, Artificial
  Synthetic oligonucleotide
gaggtcaaccccaaagtgcgagggaagaaacgactaaaaccagcagactcggctctgccc

SEQ ID NO: 41806 - DNA, 60 bp, Artificial
  Synthetic oligonucleotide
tgggagtaggggccgattctggctgcgggattgacatcgccaggatggagctgaaatgtg

SEQ ID NO: 41807 - DNA, 60 bp, Artificial
  Synthetic oligonucleotide
cccacatccaggagcagggaagaccagaaaggtcctgccagaattcatcagacaagcagt

SEQ ID NO: 41808 - DNA, 60 bp, Artificial
  Synthetic oligonucleotide
tgggaagagcacagacctctacatcgagaaagcctgtcaggtcgagtggagccacgaggc

SEQ ID NO: 41809 - DNA, 60 bp, Artificial
  Synthetic oligonucleotide
atatctgacgccagcagtgattcaacaacacacagggaaagagatcgtggacctcatgtg

SEQ ID NO: 41810 - DNA, 60 bp, Artificial
  Synthetic oligonucleotide
tacgagcgctggtggtgggcactaccccatcagtgattcttccgatcttggctgtcatgg

SEQ ID NO: 41811 - DNA, 60 bp, Artificial
  Synthetic oligonucleotide
tctctgaagaagcatggacctcccttgctagcgttgattggcaccttcacaggttggttc

SEQ ID NO: 41812 - DNA, 60 bp, Artificial
  Synthetic oligonucleotide
cacggaaaaggagaatggatgaccactgaggacatgctggacgtgtggaacagggtgtgg

SEQ ID NO: 41813 - DNA, 60 bp, Artificial
  Synthetic oligonucleotide
cgctgactatctcaaagcccaagggagatacagaaaagaggagactgaagggtttacagg

SEQ ID NO: 41814 - DNA, 60 bp, Artificial
  Synthetic oligonucleotide
gaggaggagctgacggagaaactctaggtgacaaatggaaagcccgcctgaatgccatgg

SEQ ID NO: 41815 - DNA, 60 bp, Artificial
  Synthetic oligonucleotide
ggagatatggacaagagctggggaacggaagactctaaagccaaaatggagtgatgccag

SEQ ID NO: 41816 - DNA, 60 bp, Artificial
  Synthetic oligonucleotide
ggcagcggccttcatgcgacaagacattataggatggagagaatgcgggatactggcttc

SEQ ID NO: 41817 - DNA, 60 bp, Artificial
  Synthetic oligonucleotide
gccagttcactctgcaacatcattagaggaagtcacttagcggccctcccattcctgttc

SEQ ID NO: 41818 - DNA, 60 bp, Artificial
  Synthetic oligonucleotide
cagccacaagccgatttacatcaactatggcagatgcctaaaaggaagagagaaccgcag

SEQ ID NO: 41819 - DNA, 60 bp, Artificial
  Synthetic oligonucleotide
ggatgtggtaggaatgctcccaagacacttctctgaaaaggggacagacgccttggacaa

SEQ ID NO: 41820 - DNA, 60 bp, Artificial
  Synthetic oligonucleotide
aagctgggctctgaggaacccagggttcgccctggttgcctgtgtgattggatggtcctt

SEQ ID NO: 41821 - DNA, 60 bp, Artificial
  Synthetic oligonucleotide
gatcgctggagttattatcctagtgttccttttgatggtcgtgctgattcccgagcccga

SEQ ID NO: 41822 - DNA, 60 bp, Artificial
  Synthetic oligonucleotide
cgtcggcaagcccggaggttgaagagagcagaaccctcaaagtgctggaacttgtggagc

SEQ ID NO: 41823 - DNA, 60 bp, Artificial
  Synthetic oligonucleotide
cagtgcaaaggaagccgtggaagacccggaattctggaggcaggtggacgaggagagaga

SEQ ID NO: 41824 - DNA, 60 bp, Artificial
  Synthetic oligonucleotide
ggccgtgttcaaagttcagccagcattcttggttggatttctggtcaggaatgcgtggac

SEQ ID NO: 41825 - DNA, 60 bp, Artificial
  Synthetic oligonucleotide
gagaccaagccaacaggatcagcttcatcaatggtcaacgcggtggtaaaactaatgtca

SEQ ID NO: 41826 - DNA, 60 bp, Artificial
  Synthetic oligonucleotide
cggagcctgagcaaggggcagcagatataatggagacagtggcccgatggtatcggaagg

SEQ ID NO: 41827 - DNA, 60 bp, Artificial
  Synthetic oligonucleotide
ctcaggggccggggttgaaggcattgggctccagaggctgggatatgtcttgagagacat

SEQ ID NO: 41828 - DNA, 60 bp, Artificial
  Synthetic oligonucleotide
ggaggactggtggcaactttttaccttccagagagagacaagtcagcagcgatagacgga

SEQ ID NO: 41829 - DNA, 60 bp, Artificial
  Synthetic oligonucleotide
ttcccatcaccattgcgcgatcgcccaacgacggggaaatggtcggaagaatggtgtcgg

SEQ ID NO: 41830 - DNA, 60 bp, Artificial
  Synthetic oligonucleotide
agaagttgacagagaacccgcaaggaaagccctcagggaaggcaacctccactcggggca

SEQ ID NO: 41831 - DNA, 60 bp, Artificial
  Synthetic oligonucleotide
gtgctggctttgggttcacaagaaggagcactgcactcagccttaggaggagccattcct

SEQ ID NO: 41832 - DNA, 60 bp, Artificial
  Synthetic oligonucleotide
ggacacctcaagtgcaggctgaagatggacaagttactgatcaagggcaccacgtatcac

SEQ ID NO: 41833 - DNA, 60 bp, Artificial
  Synthetic oligonucleotide
ctctacgctgtcaccaccaccattctaactccgttcatccaacaccacatcaccacacac

SEQ ID NO: 41834 - DNA, 60 bp, Artificial
  Synthetic oligonucleotide
gccaacagtgaagaagcctgcctctaccgaaccgggcgtttaccgaatcatggctgccag

SEQ ID NO: 41835 - DNA, 60 bp, Artificial
  Synthetic oligonucleotide
gatgaccgtgccagacaaagcatggagcacagggtatgagtgggtcacagactttgaggg

SEQ ID NO: 41836 - DNA, 60 bp, Artificial
  Synthetic oligonucleotide
agcgatggggagccagacacttcttgacggccggagcattcctacttgcggcaatgatat

SEQ ID NO: 41837 - DNA, 60 bp, Artificial
  Synthetic oligonucleotide
ggcagaaaggcattggaaagatggggctgggcttcattgtgttggtcgccactggtggct

SEQ ID NO: 41838 - DNA, 60 bp, Artificial
  Synthetic oligonucleotide
ggcaagacaatacctgattggtgctgcaggtcatgcactcttcctcctttgtcttatcac

SEQ ID NO: 41839 - DNA, 60 bp, Artificial
  Synthetic oligonucleotide
gtgcaaattacaccagggattttcaatacaacaaaaggtccagtgggggcagtgattctt

SEQ ID NO: 41840 - DNA, 60 bp, Artificial
  Synthetic oligonucleotide
gccgaacactcacacgctgtggagcgacggggtggaagacagcaaacttatcattccaag

SEQ ID NO: 41841 - DNA, 60 bp, Artificial
  Synthetic oligonucleotide
agctcacaactcagcatcctcagacccaaagcaagtttgcaagaaagggtacagtgacag

SEQ ID NO: 41842 - DNA, 60 bp, Artificial
  Synthetic oligonucleotide
tggctggaagagtttgggtgggacaggctgaggctcatggccatcagtggagacgattgc

SEQ ID NO: 41843 - DNA, 60 bp, Artificial
  Synthetic oligonucleotide
acatgggtcgacctcgtgctggagcatggagggtgcgtcaccgtcagagctgaagggaaa

SEQ ID NO: 41844 - DNA, 60 bp, Artificial
  Synthetic oligonucleotide
ccttaaaaccaacagcaggactggtcaaacgatggacaaagatgaaaccggcccctgctg

SEQ ID NO: 41845 - DNA, 60 bp, Artificial
  Synthetic oligonucleotide
ccagtggtcatcacagacggggaagagagaatcgtcatgaatggaccagccctcataact

SEQ ID NO: 41846 - DNA, 60 bp, Artificial
  Synthetic oligonucleotide
aaagaggcagcggacaggtggtgacctatgcactgaacacttttacaaatgcagtggtcc

SEQ ID NO: 41847 - DNA, 60 bp, Artificial
  Synthetic oligonucleotide
gcagtccatggcagtgtcccaagtgagaatgctggaaatgacacatcgcacgctgtgaag

SEQ ID NO: 41848 - DNA, 60 bp, Artificial
  Synthetic oligonucleotide
ggcagagagttggtcgtgccctgcagacaccaagacgaactggtaggaagggctagagtg

SEQ ID NO: 41849 - DNA, 60 bp, Artificial
  Synthetic oligonucleotide
ggactgggcggttccattgttggcattggggtgttggagcacgatgactccactggctct

SEQ ID NO: 41850 - DNA, 60 bp, Artificial
  Synthetic oligonucleotide
ggcgggccgtcttgatccaacatggggtgacgtaaaaggagatgtcatttcatacggagg

SEQ ID NO: 41851 - DNA, 60 bp, Artificial
  Synthetic oligonucleotide
gacggtttggaggaggtctggtcaggatcccactgtcaagaaacagcacccacgaaatgt

SEQ ID NO: 41852 - DNA, 60 bp, Artificial
  Synthetic oligonucleotide
ggaacgagggctgccactcttaaaaggaaggctgccgacatggaaaagatcgctggcagg

SEQ ID NO: 41853 - DNA, 60 bp, Artificial
  Synthetic oligonucleotide
tgaaaacggtttaaccaaccgctacgaatacagcctgatagggtgctgcagaggcccact

SEQ ID NO: 41854 - DNA, 60 bp, Artificial
  Synthetic oligonucleotide
gtgaaaacggtttaaccaaccgctacgaatacagcctgatagggtgctgcagaggcccac

SEQ ID NO: 41855 - DNA, 60 bp, Artificial
  Synthetic oligonucleotide
gctccttttctatcttcctcttggcacttctttcgtgcctgactgtccccgcttcggccg

SEQ ID NO: 41856 - DNA, 59 bp, Artificial
  Synthetic oligonucleotide
caacagggaatttacccggttgctctttctctatcttcctcttggcacttctttcgtgc

SEQ ID NO: 41857 - DNA, 60 bp, Artificial
  Synthetic oligonucleotide
atatgctgaaacgcgagagaaaccgcgtgtcgactgtgcaacagctgacaaagagattct

SEQ ID NO: 41858 - DNA, 60 bp, Artificial
  Synthetic oligonucleotide
ccctcccttacaaatcgcagcaacaatgggggcccaaggtgagatgaagctgtagtctca

SEQ ID NO: 41859 - DNA, 60 bp, Artificial
  Synthetic oligonucleotide
ggcctaacaaaaggaggaccaggacacgaagaacccatccccatgtcaacatatgggtgg

SEQ ID NO: 41860 - DNA, 60 bp, Artificial
  Synthetic oligonucleotide
ggccacaaaccatggaagctgtacgcatggcgtagtggactagcggttagaggagacccc

SEQ ID NO: 41861 - DNA, 60 bp, Artificial
  Synthetic oligonucleotide
ggcgtagtggactagcggttagaggagacccctcccttacaaatcgcagcaacaacgggg

SEQ ID NO: 41862 - DNA, 60 bp, Artificial
  Synthetic oligonucleotide
tcgttcgttgagcgattagcagagaactgaccagaatatgtctggtcgcaaagctcaggg

SEQ ID NO: 41863 - DNA, 60 bp, Artificial
  Synthetic oligonucleotide
ttgggaagatgttcgaggccactgccagaggtgcaaggcgcatggccatcttgggagaca

SEQ ID NO: 41864 - DNA, 60 bp, Artificial
  Synthetic oligonucleotide
tagggaagatgttcgaggccactgccagaggtgcaaggcgcatggccatcttgggagaca

SEQ ID NO: 41865 - DNA, 60 bp, Artificial
  Synthetic oligonucleotide
ggaagatgttcgaggccactgccagaggtgcaaggcgcatggccatcttgggagatacag

SEQ ID NO: 41866 - DNA, 60 bp, Artificial
  Synthetic oligonucleotide
gaagatgttcgaggccactgccagaggtgcaaggcgcatggccatcttgggagacacagc

SEQ ID NO: 41867 - DNA, 60 bp, Artificial
  Synthetic oligonucleotide
agatgttcgaggccactgccagaggtgcaaggcgcatggccatcttgggagacacagcct

SEQ ID NO: 41868 - DNA, 60 bp, Artificial
  Synthetic oligonucleotide
agatgttcgaggccactgccagaggtgcaaggcgcatggccatcttgggagacacagctt

SEQ ID NO: 41869 - DNA, 60 bp, Artificial
  Synthetic oligonucleotide
aaatgttcgaggccactgccagaggtgcaaggcgcatggccatcttgggagacacagcct

SEQ ID NO: 41870 - DNA, 60 bp, Artificial
  Synthetic oligonucleotide
agctgtatgaggatacacccgacgtctatagttggactagggaagacctctaacagcccc

SEQ ID NO: 41871 - DNA, 60 bp, Artificial
  Synthetic oligonucleotide
tcccggaccgtggaatgccggcccggacgtctaggtaggaacgtaggcgtttcggattgt

SEQ ID NO: 41872 - DNA, 60 bp, Artificial
  Synthetic oligonucleotide
gtagccattacctcttctgtccccacaaactggtttcccattggacgcacctcttggtca

SEQ ID NO: 41873 - DNA, 60 bp, Artificial
  Synthetic oligonucleotide
tggaatctttggcggtggtgttggcgcctggctgcgtgtgctacacatggacatcggaac

SEQ ID NO: 41874 - DNA, 60 bp, Artificial
  Synthetic oligonucleotide
cgggagcccagaatcctacaaaaccctcgccatgggaactggcatgacacaggagtggtg

SEQ ID NO: 41875 - DNA, 60 bp, Artificial
  Synthetic oligonucleotide
ttactcggctgcattccgtatgagcccggccctagtcagtgtgaacgacaccctatcccg

SEQ ID NO: 41876 - DNA, 60 bp, Artificial
  Synthetic oligonucleotide
ggcccggatcaggcgacacaatcgtacatgcaaagtcgactcattcaatcgcggttgggg

SEQ ID NO: 41877 - DNA, 60 bp, Artificial
  Synthetic oligonucleotide
tgactctggctgcccttgttgcacgattttctcggcacttggatagtatcgtcctgcccc

SEQ ID NO: 41878 - DNA, 60 bp, Artificial
  Synthetic oligonucleotide
ttggaagtgctgcggaagatcgaaactttgcaacagaagcacaagggtcgcctagtacgc

SEQ ID NO: 41879 - DNA, 60 bp, Artificial
  Synthetic oligonucleotide
tccagtttcagtacacagggtttcgacgggctttgtatggatccaatgtccaggtgaaag

SEQ ID NO: 41880 - DNA, 60 bp, Artificial
  Synthetic oligonucleotide
cattcgtgagggagtcaaagctggattggtacttcgtgaggccgtggattcttggcctgg

SEQ ID NO: 41881 - DNA, 60 bp, Artificial
  Synthetic oligonucleotide
cgggttgttgacctgggttgtggtagaggcggatggagtcagagagttgtcatggaggag

SEQ ID NO: 41882 - DNA, 60 bp, Artificial
  Synthetic oligonucleotide
tgggaacaaagctcatgtatctcagcgcgacccctccgggtcacacccctgactctggat

SEQ ID NO: 41883 - DNA, 60 bp, Artificial
  Synthetic oligonucleotide
tctcatcctctctcgagtaccttgagctgacgggaaagacgcggaagaacattccccaag

SEQ ID NO: 41884 - DNA, 60 bp, Artificial
  Synthetic oligonucleotide
cgcggtgtctcttcagttgatcggagcgaaaacacgggtttctacactgacgcgcctggt

SEQ ID NO: 41885 - DNA, 60 bp, Artificial
  Synthetic oligonucleotide
tatggtagtgggacggtcatggatgtggtgggacggcgagatcaacgaggctctgggcaa

SEQ ID NO: 41886 - DNA, 60 bp, Artificial
  Synthetic oligonucleotide
tttagcatggcttgggtgttctgcacccggtctcgatgggatgctggcctttgcaccctg

SEQ ID NO: 41887 - DNA, 60 bp, Artificial
  Synthetic oligonucleotide
gcagaaccggcagacgggaacctggaatgtacgtgtacccagtggacagtaggacagagg

SEQ ID NO: 41888 - DNA, 60 bp, Artificial
  Synthetic oligonucleotide
gttcctctcggattctgtgtcatcatctttcttgctatgttcattgtgtatccggtcctc

SEQ ID NO: 41889 - DNA, 60 bp, Artificial
  Synthetic oligonucleotide
tctttgcggccgcgcgacgtcctcatgaatctgtggatcattctacaaaccgggagctca

SEQ ID NO: 41890 - DNA, 60 bp, Artificial
  Synthetic oligonucleotide
aacagggaatttcccggggacgcgtaccccctccgtaatgtgaaaaagtatggggaaaag

SEQ ID NO: 41891 - DNA, 60 bp, Artificial
  Synthetic oligonucleotide
gctgtgtacgtgcggtcggtttctgctgacgtcggatgcggagtggacacaacaaggaag

SEQ ID NO: 41892 - DNA, 60 bp, Artificial
  Synthetic oligonucleotide
ggggagagggccacgatgttggactcgctgcaggtcttcttcttcgtaactgtgctaatg

SEQ ID NO: 41893 - DNA, 60 bp, Artificial
  Synthetic oligonucleotide
gcagctgttgcaatgcgttggccgatgtggagcgtagtgttgatcagcgtcctcacatgg

SEQ ID NO: 41894 - DNA, 60 bp, Artificial
  Synthetic oligonucleotide
gggaggatctgctgggaaacttgcggttctcatggtcttggttcccgagtagctggctgg

SEQ ID NO: 41895 - DNA, 60 bp, Artificial
  Synthetic oligonucleotide
catctcggcaactggaacctcgctgactcatgctcgtttgctctcgaatgaaatatactc

SEQ ID NO: 41896 - DNA, 60 bp, Artificial
  Synthetic oligonucleotide
ctttcacgtgcgaaatgatctttgacaacatctcgttcagcagtcttcccctgtgtgcgg

SEQ ID NO: 41897 - DNA, 60 bp, Artificial
  Synthetic oligonucleotide
gacggaaaaggagctctcaggctggaacgcgaggatggaagcattgtggacgtggctttt

SEQ ID NO: 41898 - DNA, 60 bp, Artificial
  Synthetic oligonucleotide
gagttgttcggaaaagtgaccttggttcgttatgaatagaggaagcttgaagaaggggcc

SEQ ID NO: 41899 - DNA, 60 bp, Artificial
  Synthetic oligonucleotide
acagtggtgccagtggagtgtctggttacacccgtaacccaggcgtggcggctattgtct

SEQ ID NO: 41900 - DNA, 60 bp, Artificial
  Synthetic oligonucleotide
ctgggctcgcgacatggagaacagcgttctgagtgtccgcaagatcctggactccgaaac

SEQ ID NO: 41901 - DNA, 60 bp, Artificial
  Synthetic oligonucleotide
ggcgtaatctaattgtgccgtgtcgacatgaagatgagatcgttgggcggagcaggctac

SEQ ID NO: 41902 - DNA, 60 bp, Artificial
  Synthetic oligonucleotide
cccggcctggggaggaccgatctcgaaagtcaaccacattcctgggtataagatgcagac

SEQ ID NO: 41903 - DNA, 60 bp, Artificial
  Synthetic oligonucleotide
gtgattgtcgtcctggtcggatgtgcgttaacctctgtatccttctttcttggagccttg

SEQ ID NO: 41904 - DNA, 60 bp, Artificial
  Synthetic oligonucleotide
cgtgtacccaatggagatacagcttggaactatgcctgagataccaaaacctaagccaaa

SEQ ID NO: 41905 - DNA, 60 bp, Artificial
  Synthetic oligonucleotide
cgtgcttccatctggtttcgccatagtcaccacatccagcttgtccagctcactcgtcgg

SEQ ID NO: 41906 - DNA, 60 bp, Artificial
  Synthetic oligonucleotide
aacgggtacagggactatggggcgagttcgtggttctggattgtctccttcgcgagcgct

SEQ ID NO: 41907 - DNA, 60 bp, Artificial
  Synthetic oligonucleotide
cactcccaccggaagtcttggtattttgcctcgtgatgggttggaagacgtccctggcca

SEQ ID NO: 41908 - DNA, 60 bp, Artificial
  Synthetic oligonucleotide
gttggatttcctgttctataagttcatccacatcgctgctcgtgggttgggcgggatgcc

SEQ ID NO: 41909 - DNA, 60 bp, Artificial
  Synthetic oligonucleotide
gcgaacgttcggaatgatgcggccataggatcatggagcaagaatgtaccgtggagagat

SEQ ID NO: 41910 - DNA, 60 bp, Artificial
  Synthetic oligonucleotide
gtcttggcggttatcgtggtcgtgtggatcctggggtttctggtagcaatgctcaagccc

SEQ ID NO: 41911 - DNA, 60 bp, Artificial
  Synthetic oligonucleotide
cacagttgcctgccacgcgaccttcaccaaattcgtcttgagccatggagtcaagaaggt

SEQ ID NO: 41912 - DNA, 60 bp, Artificial
  Synthetic oligonucleotide
tggtgggcaggcaattaacccgctcgtaagaaaaatcatgtggccttgggaagcgataac

SEQ ID NO: 41913 - DNA, 60 bp, Artificial
  Synthetic oligonucleotide
tctcattgaaaacgccatttgagcagggcacgaaagtgtcgggcctgacgcacccgctcc

SEQ ID NO: 41914 - DNA, 60 bp, Artificial
  Synthetic oligonucleotide
catcccaatatggttggcctggaactgggctgaagctggtgaccgacgccactccgcatt

SEQ ID NO: 41915 - DNA, 60 bp, Artificial
  Synthetic oligonucleotide
ctcaactgccgtagctcgcaaactttctatgacctgttcaagagtattgactgggctaac

SEQ ID NO: 41916 - DNA, 60 bp, Artificial
  Synthetic oligonucleotide
ggcaagacgcgccgggtcattgtcgaggaaaccaaacagaattacgcggccaacctgcga

SEQ ID NO: 41917 - DNA, 60 bp, Artificial
  Synthetic oligonucleotide
ggcggtccatggcaactcgagacccctaccgcaaccgatgacatagtcttgatggcttgt

SEQ ID NO: 41918 - DNA, 60 bp, Artificial
  Synthetic oligonucleotide
gccgtttcctcgaatttgaggctcttggtttccttaacgctgaccactgggtgagccggg

SEQ ID NO: 41919 - DNA, 60 bp, Artificial
  Synthetic oligonucleotide
ggtgagctccccaatggggtctatcgaatcacggtgaggagcctttttggaactcgacaa

SEQ ID NO: 41920 - DNA, 60 bp, Artificial
  Synthetic oligonucleotide
ccggtgcggtcccactgcatcgtgcaaatttctctgccaactatgcccaggccagtagtg

SEQ ID NO: 41921 - DNA, 60 bp, Artificial
  Synthetic oligonucleotide
gcccacaggacgtcaagttcccgggtggcggtcagatcgttggtggagtttacttgttgc

SEQ ID NO: 41922 - DNA, 60 bp, Artificial
  Synthetic oligonucleotide
cacaccttaaccctagcgggggtcgctagggtgaaatcacaccacgtgatgggagtacga

SEQ ID NO: 41923 - DNA, 60 bp, Artificial
  Synthetic oligonucleotide
ggccgaactgggctagccatgcccacagtaggactagcaaacggagggactagccgtagt

SEQ ID NO: 41924 - DNA, 60 bp, Artificial
  Synthetic oligonucleotide
ttcagctgggccttctggtgatgtttctggccacccaggaggtccttcgcaagaggtgga

SEQ ID NO: 41925 - DNA, 60 bp, Artificial
  Synthetic oligonucleotide
gcacgtcggcccgagggcaggacctgggctcagcccgggtacccttggcccctctatggc

SEQ ID NO: 41926 - DNA, 57 bp, Artificial
  Synthetic oligonucleotide
ccccgcacaacaacaaacagcatattgacgctgggagagaccagagatcctgctgtc

SEQ ID NO: 41927 - DNA, 60 bp, Artificial
  Synthetic oligonucleotide
ggaagttgagtagacggtgcggcctgcgactcaaccccaggaggactgggtgaacaaagc

SEQ ID NO: 41928 - DNA, 60 bp, Artificial
  Synthetic oligonucleotide
tgcgactcaaccccaggaggactgggtgaacaaagccgcgaagtgatccatgtaagccct

SEQ ID NO: 41929 - DNA, 60 bp, Artificial
  Synthetic oligonucleotide
cgggctgtcaatatgctaaaacgcggaatgccccgcgtgttgtccttgattggactgaag

SEQ ID NO: 41930 - DNA, 60 bp, Artificial
  Synthetic oligonucleotide
ggatgttgagtagacggtgctgcctgcgtctcaaccccaggaggactgggtgaacaaagc

SEQ ID NO: 41931 - DNA, 60 bp, Artificial
  Synthetic oligonucleotide
gccgggctgtcaatatgctaaaacgcggaatgccccgcgtgttgtccttgattggactga

SEQ ID NO: 41932 - DNA, 60 bp, Artificial
  Synthetic oligonucleotide
gcgactcaaccccaggaggactgggtgaacaaagccgcgaagtgatccatgtaagccctc

SEQ ID NO: 41933 - DNA, 60 bp, Artificial
  Synthetic oligonucleotide
ctgtacgcatggcgtagtggactagcggttagaggagacccctccctcacaaatcgcagc

SEQ ID NO: 41934 - DNA, 60 bp, Artificial
  Synthetic oligonucleotide
ctgtacgcatggcgtagtggactagcggttagaggagacccctcccttgcaaatcgcagc

SEQ ID NO: 41935 - DNA, 60 bp, Artificial
  Synthetic oligonucleotide
gtcattcagggagatgaactatgattggagcctttatgaagaggacagcctgatgataac

SEQ ID NO: 41936 - DNA, 60 bp, Artificial
  Synthetic oligonucleotide
ggagagcaaaggcatccagcctgggaggagtggacaaatgtggacatccagccagcacga

SEQ ID NO: 41937 - DNA, 60 bp, Artificial
  Synthetic oligonucleotide
agattggagtggggtatggagccaagggagtcctgcacaccatgtggcacgtcacaaggg

SEQ ID NO: 41938 - DNA, 60 bp, Artificial
  Synthetic oligonucleotide
gaggggactggggagtgtccacttgataaacgccgaacaggagtcttcacggtggcagag

SEQ ID NO: 41939 - DNA, 60 bp, Artificial
  Synthetic oligonucleotide
gaatccaggtagcagagcaatgcgcatggctgagagagatgcgccagaggcatttctgac

SEQ ID NO: 41940 - DNA, 60 bp, Artificial
  Synthetic oligonucleotide
cctcactgtgctgcagccagagccggggaaacagcgaagtagcgatgataatagactggc

SEQ ID NO: 41941 - DNA, 60 bp, Artificial
  Synthetic oligonucleotide
cggaacttccgctgagtgtgcaggggacaggctggatgtcaaaaggtcagattacggtgc

SEQ ID NO: 41942 - DNA, 60 bp, Artificial
  Synthetic oligonucleotide
atgctggtcagcggggatgattgtgttgtgagacctatcgacgaccgcttcgggaaggcc

SEQ ID NO: 41943 - DNA, 60 bp, Artificial
  Synthetic oligonucleotide
gtgaaagtggaaccccacacgggtgactatttggcagctaatgagtcccacagcaatcga

SEQ ID NO: 41944 - DNA, 60 bp, Artificial
  Synthetic oligonucleotide
gagggcttttctatgcagacgacacagcgggctgggacacaagaattaccaatgcagacc

SEQ ID NO: 41945 - DNA, 60 bp, Artificial
  Synthetic oligonucleotide
ctggggcctttctcctcctcatgatggtgctgggaacacggaagatgcagctcatcgcag

SEQ ID NO: 41946 - DNA, 60 bp, Artificial
  Synthetic oligonucleotide
acttggtgaattcggtgtcgccaaggggagccgcgccatctggtatatgtggttggggag

SEQ ID NO: 41947 - DNA, 60 bp, Artificial
  Synthetic oligonucleotide
acaccctcacgaacatcaaggtgcagctcatccgcatgatggagggagagggcgtgatcg

SEQ ID NO: 41948 - DNA, 60 bp, Artificial
  Synthetic oligonucleotide
atggcggtctggagcatgatcaagggtcaacgggaccagaagggactgtcctgggccaca

SEQ ID NO: 41949 - DNA, 60 bp, Artificial
  Synthetic oligonucleotide
acagcaaccccacccggccggggagatcctttcccggagtccaatggagccatcatgagt

SEQ ID NO: 41950 - DNA, 60 bp, Artificial
  Synthetic oligonucleotide
agcacgacagaaagcgggaaggccataccagaatggtgctgccgcacatgtgagctgcct

SEQ ID NO: 41951 - DNA, 60 bp, Artificial
  Synthetic oligonucleotide
ggtgagagcaacccagatcccttggtggaaggagagaggagtcgccgtgtcatcctccta

SEQ ID NO: 41952 - DNA, 60 bp, Artificial
  Synthetic oligonucleotide
aaggcgcttgctggcaagaaggtccgcttccactcacccgcggtagaagggcagagcaca

SEQ ID NO: 41953 - DNA, 60 bp, Artificial
  Synthetic oligonucleotide
gagggacggctaagctagcatggctagaagaacggggctatgcgaccttgaaaggtgagg

SEQ ID NO: 41954 - DNA, 60 bp, Artificial
  Synthetic oligonucleotide
agagcacgcttgggactttggttcggtgggtggtgtgctgtcatcagtggggaaggctct

SEQ ID NO: 41955 - DNA, 60 bp, Artificial
  Synthetic oligonucleotide
tgtgggaagccagttggcggcagaagcaggaggtcggtgtcgattccagtgcatgctcat

SEQ ID NO: 41956 - DNA, 60 bp, Artificial
  Synthetic oligonucleotide
ccgtgtgataggggcaacacggtaaggattgaaggagccccaacgacgaactgtggcagc

SEQ ID NO: 41957 - DNA, 60 bp, Artificial
  Synthetic oligonucleotide
cagtgaacatccagtccaggaagttgttagccagatttggagaccagcggggacctgcca

SEQ ID NO: 41958 - DNA, 60 bp, Artificial
  Synthetic oligonucleotide
atgccggtgtcgttgattcaaaactcttccttccagtaagcctggctggaccacggtcgc

SEQ ID NO: 41959 - DNA, 60 bp, Artificial
  Synthetic oligonucleotide
gcctacacgataggagggaaaggtcatgaggtcccaagactgatcacaagcctcgggtgg

SEQ ID NO: 41960 - DNA, 60 bp, Artificial
  Synthetic oligonucleotide
aagctcctgacgatggccttttgtgcagttgtgtggatggtcacagacagcttaccgaca

SEQ ID NO: 41961 - DNA, 60 bp, Artificial
  Synthetic oligonucleotide
ctcaagacaactggaacacgcagaggaggtgccgatggagaaactcttggggacatctgg

SEQ ID NO: 41962 - DNA, 60 bp, Artificial
  Synthetic oligonucleotide
aggtggagatgactggaaccagaaagatcacgacagcatcggcagctcaacgccggggca

SEQ ID NO: 41963 - DNA, 60 bp, Artificial
  Synthetic oligonucleotide
ggtggagccattgcaagaaccctgcgccagagaggcaaaagtgtgatctgtctcaatagc

SEQ ID NO: 41964 - DNA, 60 bp, Artificial
  Synthetic oligonucleotide
tcgtggtcctggagctagtcattaggagacgcccaacaactggcacctcagtggtgtggt

SEQ ID NO: 41965 - DNA, 60 bp, Artificial
  Synthetic oligonucleotide
tcagttggccttggaatgctagggaggatgtggtgcgcatggcaatgacagataccacgg

SEQ ID NO: 41966 - DNA, 60 bp, Artificial
  Synthetic oligonucleotide
gcacgcgagaagaattcatcgcaaaggtgcgctcaaacgctgcgctcggagcttggtcag

SEQ ID NO: 41967 - DNA, 60 bp, Artificial
  Synthetic oligonucleotide
ctgatgtggccgaaagaataactgctctcaaaacccaatatggtgactcctggcacgtgg

SEQ ID NO: 41968 - DNA, 60 bp, Artificial
  Synthetic oligonucleotide
gctcctcgtgctggagcttgggtttccagaggcctcactgagcaacatttggaagtgggc

SEQ ID NO: 41969 - DNA, 60 bp, Artificial
  Synthetic oligonucleotide
ttgatggggccgatggagatctagtgcggttcaaaacacctggcggctcagaacgtgtct

SEQ ID NO: 41970 - DNA, 60 bp, Artificial
  Synthetic oligonucleotide
agccttgagagccggtggaggggtgagaccgtccaggtgcacgcatttccaccagggaga

SEQ ID NO: 41971 - DNA, 60 bp, Artificial
  Synthetic oligonucleotide
tatggacattctttgagatgctgagctcggggcgaaggtctgaacttgtcttctctggac

SEQ ID NO: 41972 - DNA, 60 bp, Artificial
  Synthetic oligonucleotide
ttccacttggccatcgtcgcttcgggattggaagcagaactgacgcagagggcgcacaga

SEQ ID NO: 41973 - DNA, 60 bp, Artificial
  Synthetic oligonucleotide
ggtctgtgagggatcaaagtttgcttggaagaggccgccaaccgacagtgggcatgacac

SEQ ID NO: 41974 - DNA, 60 bp, Artificial
  Synthetic oligonucleotide
cttcttcggggtggccggtcatgtaattgccttgggtgtcacgtcacttgtgggtgccac

SEQ ID NO: 41975 - DNA, 60 bp, Artificial
  Synthetic oligonucleotide
ggtgtggctggagcgtcagggaaacagcatgtctctcaaaggcctacggacagatgtggc

SEQ ID NO: 41976 - DNA, 60 bp, Artificial
  Synthetic oligonucleotide
ctgggcttctcacatcaatcttgctggcctgcctggcgacactggtgatctccgcgacaa

SEQ ID NO: 41977 - DNA, 60 bp, Artificial
  Synthetic oligonucleotide
tgtgccccagaaccggcttgagatggccatgtggagacgtgtggaggctgtgctcaactt

SEQ ID NO: 41978 - DNA, 60 bp, Artificial
  Synthetic oligonucleotide
caaatggactggtgttgatgcgcatgatgggagtgttgtggcatatgatcgccgggacgg

SEQ ID NO: 41979 - DNA, 60 bp, Artificial
  Synthetic oligonucleotide
agggatcctagtgactacaggggaggcaaagtggggatcttaaagcggtcaggcaaggag

SEQ ID NO: 41980 - DNA, 60 bp, Artificial
  Synthetic oligonucleotide
ccagagtgatagaggatggggcaaccactgtggactgtttgggaagggcagcattgtggc

SEQ ID NO: 41981 - DNA, 60 bp, Artificial
  Synthetic oligonucleotide
ggctcgatgacatacaccaggagaacccggctaagacacgagagtattgtctccatgcca

SEQ ID NO: 41982 - DNA, 60 bp, Artificial
  Synthetic oligonucleotide
cctggtaggacgccgagaacgggcggaatgggcaaagaacatctggggatcagtggagaa

SEQ ID NO: 41983 - DNA, 60 bp, Artificial
  Synthetic oligonucleotide
ttctcaaccgaactgcggcctcaatgacagaggctggggctgttggtctagctgcgttgg

SEQ ID NO: 41984 - DNA, 60 bp, Artificial
  Synthetic oligonucleotide
gaagaggttcccttctgctctcaccatttccatgagctgacgatgaaggacggcagggtc

SEQ ID NO: 41985 - DNA, 60 bp, Artificial
  Synthetic oligonucleotide
aaggcttggcaggtgcaccgagactggtttgaagacctctccttgccatggcgacacgag

SEQ ID NO: 41986 - DNA, 57 bp, Artificial
  Synthetic oligonucleotide
cccctccgggagagcatagtggtctgcggaaccggtgagtacaccggaattgccagg

SEQ ID NO: 41987 - DNA, 60 bp, Artificial
  Synthetic oligonucleotide
ttttcagttgggccttctggtcgtgttcttggccacccaggaggtccttcgcaggaggtg

SEQ ID NO: 41988 - DNA, 60 bp, Artificial
  Synthetic oligonucleotide
ttacttgttgccgcgcaggggcccgagattgggtgtgcgcgcgacgaggaagacttccga

SEQ ID NO: 41989 - DNA, 60 bp, Artificial
  Synthetic oligonucleotide
aaccggtgagtacaccggaattgccaggacgaccgggtcctttcttggatcaacccgctc

SEQ ID NO: 41990 - DNA, 60 bp, Artificial
  Synthetic oligonucleotide
accggtgagtacaccggaattgccaggacgaccgggtcctttcttggatcaacccgctca

SEQ ID NO: 41991 - DNA, 60 bp, Artificial
  Synthetic oligonucleotide
ctgggagagaccagagatcctgctgtctctacagcatcattccaggcacagagcgccaga

SEQ ID NO: 41992 - DNA, 52 bp, Artificial
  Synthetic oligonucleotide
gtagaggaggtggaaggactagaggttagaggagaccccgcatctgcatcaa

SEQ ID NO: 41993 - DNA, 60 bp, Artificial
  Synthetic oligonucleotide
tcggaagcttgcttaacgtagtgctgacagttttttattagagagcagatctctgatgaa

SEQ ID NO: 41994 - DNA, 60 bp, Artificial
  Synthetic oligonucleotide
ggttcgacgccttggaataaaggtctcgagatgccacgtggacgagggcatgcccaaagc

SEQ ID NO: 41995 - DNA, 60 bp, Artificial
  Synthetic oligonucleotide
ggacatggcaaccgggataacctatgcatcatacgggtacttctgccaaatgcctcaacc

SEQ ID NO: 41996 - DNA, 60 bp, Artificial
  Synthetic oligonucleotide
aagggggcagtcgtccacctccaaaagacaggtggagaattcacgtgtgtcaccgcatca

SEQ ID NO: 41997 - DNA, 57 bp, Artificial
  Synthetic oligonucleotide
tggggtttactacaagggctgggaggccaaggaactatctgagaggacagcaggtag

SEQ ID NO: 41998 - DNA, 60 bp, Artificial
  Synthetic oligonucleotide
gtatggggtttactacaaaggttgggaggccaaggaactatctgagaggacagcaggcag

SEQ ID NO: 41999 - DNA, 60 bp, Artificial
  Synthetic oligonucleotide
ttggtcagggatctgaaggccgggagaaagataaaatattatgaaactgcaataccaaaa

SEQ ID NO: 42000 - DNA, 60 bp, Artificial
  Synthetic oligonucleotide
aagggggcctgccgtgtgtaagaagatcacagagcacgaaaaatgccacattaatatact

SEQ ID NO: 42001 - DNA, 60 bp, Artificial
  Synthetic oligonucleotide
gtggatcctaagggggcctgccgtgtgtaagaagatcacagaacacgagagatgccacat

SEQ ID NO: 42002 - DNA, 60 bp, Artificial
  Synthetic oligonucleotide
gacgagggcatgcccaaagcacatcttaacctgagcgggggtcgcccaggtaaaagcagt

SEQ ID NO: 42003 - DNA, 60 bp, Artificial
  Synthetic oligonucleotide
gcagccatggaaatcctgtcacaaaacccagtatcggtaggtatatctgtgatgttgggg

SEQ ID NO: 42004 - DNA, 54 bp, Artificial
  Synthetic oligonucleotide
gacaggctgatatccagcaaaactggccacttatacatacctgataaaggcttt

SEQ ID NO: 42005 - DNA, 60 bp, Artificial
  Synthetic oligonucleotide
ggacatggcaacggggataacctatgcatcatacgggtacttctgccaaatgccccaacc

SEQ ID NO: 42006 - DNA, 60 bp, Artificial
  Synthetic oligonucleotide
gggggacatggcaaccgggataacctatgcatcatacgggtacttctgccaaatgcctca

SEQ ID NO: 42007 - DNA, 52 bp, Artificial
  Synthetic oligonucleotide
gcactttagctggaaggaaaattcctgacgtccacagttggactaaggtaat

SEQ ID NO: 42008 - DNA, 60 bp, Artificial
  Synthetic oligonucleotide
gaggcccactgtattgctactgaaaatctctgctgtacatggcacatggagttgatcaca

SEQ ID NO: 42009 - DNA, 60 bp, Artificial
  Synthetic oligonucleotide
ccgactgttacgaatacagcctgatagggtgctgcagaggcccactgtattgctactaaa

SEQ ID NO: 42010 - DNA, 60 bp, Artificial
  Synthetic oligonucleotide
tcccgggagagccatagtggtctgcggaaccggtgagtacaccggaattgccaggatgac

SEQ ID NO: 42011 - DNA, 60 bp, Artificial
  Synthetic oligonucleotide
ctcccgggagagccatagtggtctgcggaaccggtgagtacaccggaattgccaggatga

SEQ ID NO: 42012 - DNA, 60 bp, Artificial
  Synthetic oligonucleotide
cacctggaattgccaggacgaccgggtcctttcttggatcaacccgctcaatgcctggag

SEQ ID NO: 42013 - DNA, 59 bp, Artificial
  Synthetic oligonucleotide
gatgaccgggtcctttcttggatcaacccgctcaatgcctggagatttgggcgtgcccc

SEQ ID NO: 42014 - DNA, 60 bp, Artificial
  Synthetic oligonucleotide
ggaggaccgggtcctttcttggatcaacccgctcaatgcctggagatttgggcgtgcccc

SEQ ID NO: 42015 - DNA, 60 bp, Artificial
  Synthetic oligonucleotide
tggacgttaagttcccgggtggtggccagatcgttggcggagtttacttgttgccgcgca

SEQ ID NO: 42016 - DNA, 60 bp, Artificial
  Synthetic oligonucleotide
tcacgcagaaagcgtctagccatggcgttagtatgagtgttgtacagcctccaggacccc

SEQ ID NO: 42017 - DNA, 60 bp, Artificial
  Synthetic oligonucleotide
tcacgcagaaagcgtctagccatggcgttagtatgagtgtcgaacagcctccaggacccc

SEQ ID NO: 42018 - DNA, 60 bp, Artificial
  Synthetic oligonucleotide
gtcatagccatcctcacagtggtggccgcaaccatggcaaacgagatggggttcctggaa

SEQ ID NO: 42019 - DNA, 60 bp, Artificial
  Synthetic oligonucleotide
cgttgtcatagccatcctcacagtggtggccgcaaccatggcaaacgagatgggtttcct

SEQ ID NO: 42020 - DNA, 60 bp, Artificial
  Synthetic oligonucleotide
gacctacgttgtcatagccatcctcacagtggtggccgcaaccatggcaaacgagatggg

SEQ ID NO: 42021 - DNA, 60 bp, Artificial
  Synthetic oligonucleotide
cgggatgaccgggtcctttcttggattaacccgctcaatgcccggaaatttgggcgtgcc

SEQ ID NO: 42022 - DNA, 60 bp, Artificial
  Synthetic oligonucleotide
tcccgggagagccatagtggtctgcggaaccggtgaagtcaccggaattgccaggacgac

SEQ ID NO: 42023 - DNA, 59 bp, Artificial
  Synthetic oligonucleotide
cccctcccgggagagccatagtgttctgcggaaccggtgagtacaccggaattgccagg

SEQ ID NO: 42024 - DNA, 57 bp, Artificial
  Synthetic oligonucleotide
cccctccccgggagagccatagtggtctgcggaaccggtgagtacaccggaattgcc

SEQ ID NO: 42025 - DNA, 60 bp, Artificial
  Synthetic oligonucleotide
aatctgggtaaggtcatcgacacccttacgtgcggcttcgccgacctcatggggtacata

SEQ ID NO: 42026 - DNA, 60 bp, Artificial
  Synthetic oligonucleotide
tggtctgcggaaccggtgagtacaccggaattgccaggacgaccgggtcctttcttggat

SEQ ID NO: 42027 - DNA, 60 bp, Artificial
  Synthetic oligonucleotide
ggtttaaccaaccgctacgaatacagcctgatagggtgctgcagaggcccactgtattgc

SEQ ID NO: 42028 - DNA, 60 bp, Artificial
  Synthetic oligonucleotide
cctaagggacaaatcctcctcagcgaaggccgaaaagaggctagccatgcccttagtagg

SEQ ID NO: 42029 - DNA, 60 bp, Artificial
  Synthetic oligonucleotide
cgtctagccatggcgttagtatgagtgtcgtgcagcctccaggatcccccctcccgggag

SEQ ID NO: 42030 - DNA, 60 bp, Artificial
  Synthetic oligonucleotide
gggtagagagttggatactcagaaacccaggattcgcgctcttggcaggatttatggcct

SEQ ID NO: 42031 - DNA, 60 bp, Artificial
  Synthetic oligonucleotide
ggtcaaatgcagccataggcgcagtctttcaggaagaacagggatggacatcagccagtg

SEQ ID NO: 42032 - DNA, 60 bp, Artificial
  Synthetic oligonucleotide
ccaggaagaacagggatggacatcagccagtgaagctgtgaatgacagccggttttggga

SEQ ID NO: 42033 - DNA, 60 bp, Artificial
  Synthetic oligonucleotide
tccatacagaacctgggcgtatcatggaagctatgaagctccttcgacaggctcagcatc

SEQ ID NO: 42034 - DNA, 60 bp, Artificial
  Synthetic oligonucleotide
tattgaagtcaggccacttgtgccacggcttgagcaaaccgtgctgcctgtagctccgcc

SEQ ID NO: 42035 - DNA, 60 bp, Artificial
  Synthetic oligonucleotide
ggaggcgtaaaattcccagggaggccatgcgccacggaagctgtacgcgtggtatattgg

SEQ ID NO: 42036 - DNA, 60 bp, Artificial
  Synthetic oligonucleotide
cgccacggaagctgtacgcgtggtttattggactagcggttagaggagacccctcccatc

SEQ ID NO: 42037 - DNA, 60 bp, Artificial
  Synthetic oligonucleotide
gggaaagaccagagatcctgctgtctctgcaacatcaatccaggcacagagcgccgcgag

SEQ ID NO: 42038 - DNA, 60 bp, Artificial
  Synthetic oligonucleotide
ccaacagaatggtttccaacaagcagaacaacatggtcaatccacgctcatcaccagtgg

SEQ ID NO: 42039 - DNA, 60 bp, Artificial
  Synthetic oligonucleotide
gggtgagcgcctacaaatctgatatgattgatccttttcagctgggccttctggtagtgt

SEQ ID NO: 42040 - DNA, 60 bp, Artificial
  Synthetic oligonucleotide
ccaacaggagggaaggcgattcgtcgccagcttattcatctccgctctggcaacctacac

SEQ ID NO: 42041 - DNA, 60 bp, Artificial
  Synthetic oligonucleotide
ggacaaaggggtagtggccagccagacagcagtgcaggcaacagcatgctaaatgtgtta

SEQ ID NO: 42042 - DNA, 60 bp, Artificial
  Synthetic oligonucleotide
caatgatcacagacatatataccatagaagatcaaagactagaggacacaacccacctcc

SEQ ID NO: 42043 - DNA, 60 bp, Artificial
  Synthetic oligonucleotide
catagaagatcaaagactagaggacacaacccacctccagtatgcacccaatgctatacg

SEQ ID NO: 42044 - DNA, 60 bp, Artificial
  Synthetic oligonucleotide
ggtttctcccatcgatcagagcagcaaatgtcatggccgcctctttgcggaaggccggga

SEQ ID NO: 42045 - DNA, 60 bp, Artificial
  Synthetic oligonucleotide
ggttatgggaaagcaacactggagtgtcaggtccagactgcagttgactttgggaacagt

SEQ ID NO: 42046 - DNA, 60 bp, Artificial
  Synthetic oligonucleotide
ccaggggtctgcgagcacagtttgctctagaagaagcagacctttggatgacaaaaccca

SEQ ID NO: 42047 - DNA, 60 bp, Artificial
  Synthetic oligonucleotide
ggttccttccatcgatcagagcagcaaatgtcatggcagcctcgctgcggaaagcgggga

SEQ ID NO: 42048 - DNA, 60 bp, Artificial
  Synthetic oligonucleotide
ctgcgagcacagtttgctctagaagaagcagacctttggatgacaaaacacaaaaccact

SEQ ID NO: 42049 - DNA, 60 bp, Artificial
  Synthetic oligonucleotide
cctagggaacaaatccctctcagcgaaggccgaaaagaggctagccatgcccttagtagg

SEQ ID NO: 42050 - DNA, 60 bp, Artificial
  Synthetic oligonucleotide
ggcgagctccctgggtggtctaagtcctgagtacaggacagtcgtcagtagttcgacgtg

SEQ ID NO: 42051 - DNA, 51 bp, Artificial
  Synthetic oligonucleotide
ctgggtggtctaagtcctgagtacaggacagtcgtcagtagttcgacgtga

SEQ ID NO: 42052 - DNA, 52 bp, Artificial
  Synthetic oligonucleotide
cctgggtggtctaagtcctgagtacaggacagtcgtcaatagttcgacgtga

SEQ ID NO: 42053 - DNA, 60 bp, Artificial
  Synthetic oligonucleotide
agggcacccctccagcgacggccgaactgggctagccatgcccacagtaggactagcaaa

SEQ ID NO: 42054 - DNA, 60 bp, Artificial
  Synthetic oligonucleotide
tccctccagcgacggccgaactgggctagccatgcccacagtaggactagcaaacggagg

SEQ ID NO: 42055 - DNA, 60 bp, Artificial
  Synthetic oligonucleotide
tccagcgacggccgaactgggctagccatgcccacagtaggactagcaaacggagggact

SEQ ID NO: 42056 - DNA, 60 bp, Artificial
  Synthetic oligonucleotide
cacccctccagcgacggccgaactgggctagccatgcccacagtaggactagcaaatgga

SEQ ID NO: 42057 - DNA, 60 bp, Artificial
  Synthetic oligonucleotide
ccctccagcgacggccgaactgggctagccatgcccacagtaggactagcaaacggaggg

SEQ ID NO: 42058 - DNA, 60 bp, Artificial
  Synthetic oligonucleotide
ccacaaatatgtgccactccgctggggagtgcggcctgcgcagccccaggaggactgggt

SEQ ID NO: 42059 - DNA, 60 bp, Artificial
  Synthetic oligonucleotide
agaactgatcatcaaacacaaagtgaggaatgaagtaatggtccactggtttgatgacga

SEQ ID NO: 42060 - DNA, 60 bp, Artificial
  Synthetic oligonucleotide
ggtggaaccgtcattaggaatcctctttccaggaattccactcatgaaatgtactacgtg

SEQ ID NO: 42061 - DNA, 54 bp, Artificial
  Synthetic oligonucleotide
tcctggttgctccttttctatcttcctcttggcacttctttcgtgccttaccac

SEQ ID NO: 42062 - DNA, 60 bp, Artificial
  Synthetic oligonucleotide
tccacgtaagccctcagaaccgtctcggaaggaggaccccacgtgctttagcctcaaagc

SEQ ID NO: 42063 - DNA, 60 bp, Artificial
  Synthetic oligonucleotide
acgtaagccctcagaaccgtctcggaaggaggaccccacgtgctttagcctcaaagccca

SEQ ID NO: 42064 - DNA, 60 bp, Artificial
  Synthetic oligonucleotide
gatgcaagtgagaagaccaactacacgtgttgcagacttcaacgccatgagtggaacaag

SEQ ID NO: 42065 - DNA, 53 bp, Artificial
  Synthetic oligonucleotide
cctgggctcagcccgggtacccttggcccctctatggcaatgagggcatggga

SEQ ID NO: 42066 - DNA, 60 bp, Artificial
  Synthetic oligonucleotide
ggaaaggatgcagcaactcaggtgcgtgtggagaatggcacctgtgtgatcctggctact

SEQ ID NO: 42067 - DNA, 60 bp, Artificial
  Synthetic oligonucleotide
attgaatttgatagtcaggccagggtaacctgccaccggaagttgagtagacggtgctgc

SEQ ID NO: 42068 - DNA, 60 bp, Artificial
  Synthetic oligonucleotide
ggaagtcaggccagattaatgctgccaccggaagttgagtagacggtgctgcctgcggct

SEQ ID NO: 42069 - DNA, 60 bp, Artificial
  Synthetic oligonucleotide
cagagtgcccaactataacctatttgtcatggatgaagctcatttcaccgacccagccag

SEQ ID NO: 42070 - DNA, 59 bp, Artificial
  Synthetic oligonucleotide
tttagagagatgaactatgattggagcctttatgaggaggacagtctgatgattacaca

SEQ ID NO: 42071 - DNA, 60 bp, Artificial
  Synthetic oligonucleotide
attgccaggacgaccgggtcctttcttggatcaacccgctcaatgcctggagatttgggc

SEQ ID NO: 42072 - DNA, 60 bp, Artificial
  Synthetic oligonucleotide
ctgggtggtctaagtcctgagtacaggacagtcgtcagtagttcgacgtgagcactagcc

SEQ ID NO: 42073 - DNA, 60 bp, Artificial
  Synthetic oligonucleotide
gatggtgaagtatacataagaaatggacaaaggggtagtggccagccagacacaagtgca

SEQ ID NO: 42074 - DNA, 60 bp, Artificial
  Synthetic oligonucleotide
atggtgaagtatacataagaaatggacaaaggggtagtggtcagccagacacaagtgcag

SEQ ID NO: 42075 - DNA, 60 bp, Artificial
  Synthetic oligonucleotide
agaaaaggggctgcaggctttctagagaagaagaatgttggagaagtactggactcagag

SEQ ID NO: 42076 - DNA, 60 bp, Artificial
  Synthetic oligonucleotide
ggaaaatttaatacaacacttctaaatgggccagccttccagatggtttgccccatagga

SEQ ID NO: 42077 - DNA, 60 bp, Artificial
  Synthetic oligonucleotide
cccttggtaaaaggaaaatttaatacaacacttctaaatgggccagccttccagatggtt

SEQ ID NO: 42078 - DNA, 60 bp, Artificial
  Synthetic oligonucleotide
gctggaaaacaagagtaagacatggtttggggcatatgcagcctctccctactgtgaggt

SEQ ID NO: 42079 - DNA, 60 bp, Artificial
  Synthetic oligonucleotide
gacgagggcatgcccacagcacatcttaacctggacaggggtcgttcaggtgaaaacggt

SEQ ID NO: 42080 - DNA, 60 bp, Artificial
  Synthetic oligonucleotide
gcctggctgaagctgtaggtcaggggaaggactagaggttagtggagaccccgtgccata

SEQ ID NO: 42081 - DNA, 60 bp, Artificial
  Synthetic oligonucleotide
cccggcagggacggtaaccacaacagggcagaagcacccaatagaggaatttatagcccc

SEQ ID NO: 42082 - DNA, 60 bp, Artificial
  Synthetic oligonucleotide
gccggtgagtggtatctacctgaagccagggccgatatactaccaagactacaaagatcc

SEQ ID NO: 42083 - DNA, 60 bp, Artificial
  Synthetic oligonucleotide
tacttgttaccgcgcaggggcccacgtttgggtgtgcgcgcgacgaggaagacttcggaa

SEQ ID NO: 42084 - DNA, 60 bp, Artificial
  Synthetic oligonucleotide
tacttattgccgcgcaggggcccacgtttgggtgtgcgcgcgacgaggaagacttctgaa

SEQ ID NO: 42085 - DNA, 60 bp, Artificial
  Synthetic oligonucleotide
ctgggaaagaccagagatcctgctgtctcctcagcatcattccaggcacagagcgccaga

SEQ ID NO: 42086 - DNA, 60 bp, Artificial
  Synthetic oligonucleotide
aaccagggagaagggactagaggttagaggagaccccgcgttaaaaagtgcacggcccaa

SEQ ID NO: 42087 - DNA, 60 bp, Artificial
  Synthetic oligonucleotide
ggcccggaagaaaccgggccatcaatatgctgaaacgcggattaccccgcgtattcccac

SEQ ID NO: 42088 - DNA, 60 bp, Artificial
  Synthetic oligonucleotide
gagggcagggcctgggctcagcccgggtacccttggcccctctatggcaatgagggcatg

SEQ ID NO: 42089 - DNA, 60 bp, Artificial
  Synthetic oligonucleotide
tcagttgggccttctggttgtgttcttggccacccaggaggtccttcgcaagaggtggac

SEQ ID NO: 42090 - DNA, 51 bp, Artificial
  Synthetic oligonucleotide
aggatgcaataggcgaggtgtaaggactagaggttagaggagaccccgtgg

SEQ ID NO: 42091 - DNA, 60 bp, Artificial
  Synthetic oligonucleotide
cgtctagggtgcaatagacgaggtgtaaggactagaggttagaggagaccccgtggaaac

SEQ ID NO: 42092 - DNA, 60 bp, Artificial
  Synthetic oligonucleotide
cctcgtctaggatgcaatagacgaggtgtaaggactagaggttagaggagaccccgtgga

SEQ ID NO: 42093 - DNA, 60 bp, Artificial
  Synthetic oligonucleotide
gcctcgtctaggatgcaatagacgaggtgtaaggactagaggttagaggagaccccgtgg

SEQ ID NO: 42094 - DNA, 60 bp, Artificial
  Synthetic oligonucleotide
gggtagacggtgctgcctgcgtctcagtcccaggaggactgggttaacaaatctgacaac

SEQ ID NO: 42095 - DNA, 60 bp, Artificial
  Synthetic oligonucleotide
cgttcttcaagtttacagcattagccccgaccaaggcgcttttaggccgatggaaagcag

SEQ ID NO: 42096 - DNA, 60 bp, Artificial
  Synthetic oligonucleotide
ggctctcatcacgttcttcaagtttacagcattagccccgaccaaggcgcttttaggccg

SEQ ID NO: 42097 - DNA, 60 bp, Artificial
  Synthetic oligonucleotide
agagattagtgcagtttaaacagttttttagaacggaagataaccatgactaaaaaacca

SEQ ID NO: 42098 - DNA, 60 bp, Artificial
  Synthetic oligonucleotide
aggacgttaagttcccgggtggcggccagatcgttggcggagtttacttgttgccgcgca

SEQ ID NO: 42099 - DNA, 60 bp, Artificial
  Synthetic oligonucleotide
gtctatgggatgcccaagctagtgagtgtagtgaaagcagcaacacttaaccggagcagg

SEQ ID NO: 42100 - DNA, 60 bp, Artificial
  Synthetic oligonucleotide
aatcccaggaagccgtatatctgttcccctctaaacagaaggaagggacgatcacagggg

SEQ ID NO: 42101 - DNA, 60 bp, Artificial
  Synthetic oligonucleotide
aaggcggaaccatggtgtcggcataccagcttgcacaggggaactggacgccaactagct

SEQ ID NO: 42102 - DNA, 60 bp, Artificial
  Synthetic oligonucleotide
cgctaaaatggataggcggtttagagttgcacgcacctgaattgccatcctacaggcccc

SEQ ID NO: 42103 - DNA, 60 bp, Artificial
  Synthetic oligonucleotide
cccaaccacaaaagcctgatcgagaggacctgcgcaaccgtgtgcaaggataagatatac

SEQ ID NO: 42104 - DNA, 60 bp, Artificial
  Synthetic oligonucleotide
gagtggtgcggctacgtgtttaagaagagagagggtctcccacactatccaattggtagg

SEQ ID NO: 42105 - DNA, 60 bp, Artificial
  Synthetic oligonucleotide
gcccgctgggacggtgaccactacagggcagaagcacccgatagaggaatttatagctcc

SEQ ID NO: 42106 - DNA, 60 bp, Artificial
  Synthetic oligonucleotide
cagaagcctgcacggtatttggcctgaaaagatatgtacaggagtgcccacgcacttggc

SEQ ID NO: 42107 - DNA, 60 bp, Artificial
  Synthetic oligonucleotide
ggtccggggaaatttgacaccaatgcggaggatggaaagatcttgcatgagatgaggggt

SEQ ID NO: 42108 - DNA, 60 bp, Artificial
  Synthetic oligonucleotide
cggagacaatgagtgtagtagcttattccaggacacagctctctacgtggtagatggagt

SEQ ID NO: 42109 - DNA, 60 bp, Artificial
  Synthetic oligonucleotide
tggccacgggtgcaggaaagactacagaattacctagggcggtgatagaagaaataggcc

SEQ ID NO: 42110 - DNA, 60 bp, Artificial
  Synthetic oligonucleotide
catggtttatgctttctgccgagccacaggcgtgccctacaaaagtttcaaaagggttgc

SEQ ID NO: 42111 - DNA, 60 bp, Artificial
  Synthetic oligonucleotide
ttgggacctatgccatgcagaccaaaagaagtcatatccagtgaaggaccggtcagcaag

SEQ ID NO: 42112 - DNA, 60 bp, Artificial
  Synthetic oligonucleotide
ttgaggacatagaattttgctctcacacccctgtgcctgtgaggtggtcagacaacacca

SEQ ID NO: 42113 - DNA, 60 bp, Artificial
  Synthetic oligonucleotide
ggaggagatgctgtcgaagtcagagacctaattaagaaaggggagatgctggtcgtagct

SEQ ID NO: 42114 - DNA, 60 bp, Artificial
  Synthetic oligonucleotide
gaactcgctgctacttatgatgcagttgaatgggaggaactggagacaggtatcaacagg

SEQ ID NO: 42115 - DNA, 60 bp, Artificial
  Synthetic oligonucleotide
gaagccgtcgagttgcttggcgtggacagcgagggaaagatgaggaggctgtcgggtaat

SEQ ID NO: 42116 - DNA, 60 bp, Artificial
  Synthetic oligonucleotide
ctggaggaggaagagggctcattcttctgcagaaacaaatttgggaggggagcacccaac

SEQ ID NO: 42117 - DNA, 60 bp, Artificial
  Synthetic oligonucleotide
cctaacggtgttggggttacagcctgatagggtgctgcagaggcccacgaataggctagt

SEQ ID NO: 42118 - DNA, 60 bp, Artificial
  Synthetic oligonucleotide
accatacacgtagtaggactagcagacgggaggactagccatcgtggtgagatccctgag

SEQ ID NO: 42119 - DNA, 60 bp, Artificial
  Synthetic oligonucleotide
gggccaccgattccacgagaatagttaaggaggtaggtgccagggtgtacaccatgaagc

SEQ ID NO: 42120 - DNA, 60 bp, Artificial
  Synthetic oligonucleotide
ggttactactacagtggagaggacccggctaacttgagagtagttacatcacagtcgccc

SEQ ID NO: 42121 - DNA, 60 bp, Artificial
  Synthetic oligonucleotide
ttggggaacaggcacagagaaggggccgggtaggcagggtcaagcccgggagatactata

SEQ ID NO: 42122 - DNA, 60 bp, Artificial
  Synthetic oligonucleotide
ggatgagccagtaaagaagtggatattgttcctctttcatgctatgaccaacaaccctgt

SEQ ID NO: 42123 - DNA, 60 bp, Artificial
  Synthetic oligonucleotide
ggaagaaggggaatacccgggccctgctgtaagcactgtcactgtgggtgaagctgttca

SEQ ID NO: 42124 - DNA, 60 bp, Artificial
  Synthetic oligonucleotide
accagttgctgtgaagaacattatggccagaacagaccaccctgaaccaattcaactggc

SEQ ID NO: 42125 - DNA, 60 bp, Artificial
  Synthetic oligonucleotide
acccgcagtctaccctgaaactaccacatgagagaggagtggcagaagtcgtaacgacac

SEQ ID NO: 42126 - DNA, 60 bp, Artificial
  Synthetic oligonucleotide
gatgtaggcagcaaggatggcaattggctggtaaacgcagataggccggagagcagaaaa

SEQ ID NO: 42127 - DNA, 60 bp, Artificial
  Synthetic oligonucleotide
atctctgctaagaatcaggagaggcctcgagactggatgggcgtacacacaccaaggagg

SEQ ID NO: 42128 - DNA, 60 bp, Artificial
  Synthetic oligonucleotide
cggaagtgcgttccaactaatatgcccttacggatgggtcggacgcgtggagtgcactac

SEQ ID NO: 42129 - DNA, 60 bp, Artificial
  Synthetic oligonucleotide
gggatctgaggtaggggacttggaacatcttggatggatcctgagaggtccggcggtgtg

SEQ ID NO: 42130 - DNA, 60 bp, Artificial
  Synthetic oligonucleotide
gaaggctgagggttatgatgatggccctggttggtagagggatgtgaaccatagctgagc

SEQ ID NO: 42131 - DNA, 60 bp, Artificial
  Synthetic oligonucleotide
caggcactcaaattgtttgctccaacgcgcctggagagtgtagtcatcctcagcacagcc

SEQ ID NO: 42132 - DNA, 60 bp, Artificial
  Synthetic oligonucleotide
cctgacgcaactatagtagtagaaggcataaaataccaggtaaagaagaaaggaaaggtg

SEQ ID NO: 42133 - DNA, 60 bp, Artificial
  Synthetic oligonucleotide
gagagtggatgacgtgataccatcttcagtatggaacctgggaaaatatgtctgtgttag

SEQ ID NO: 42134 - DNA, 60 bp, Artificial
  Synthetic oligonucleotide
gggccctgggtgcagagagcttgacaacgacctggactgactaccgaggaaacctagaac

SEQ ID NO: 42135 - DNA, 60 bp, Artificial
  Synthetic oligonucleotide
gattacaaggggcctgtataccatagagcaccactggaactttttgttgagacgcaattc

SEQ ID NO: 42136 - DNA, 60 bp, Artificial
  Synthetic oligonucleotide
ggggtagcttcgataatccagttgcagtgagctttgacactaaggcttgggacacacaag

SEQ ID NO: 42137 - DNA, 60 bp, Artificial
  Synthetic oligonucleotide
gagactgaatatggagtgaaaacggactcaggttgcccagagggtgctaggtgctacgtg

SEQ ID NO: 42138 - DNA, 60 bp, Artificial
  Synthetic oligonucleotide
tatctgttgggatagccgtgatgctgggtgtaggggccgtagcggcgcataatgccatag

SEQ ID NO: 42139 - DNA, 60 bp, Artificial
  Synthetic oligonucleotide
cccgggagacactgagacacaacaggagggccggaaattcgtggctagcttactagtctc

SEQ ID NO: 42140 - DNA, 60 bp, Artificial
  Synthetic oligonucleotide
agggaggtgattggccacaacttactagacctgaagaggacaggcttggagaaactggca

SEQ ID NO: 42141 - DNA, 60 bp, Artificial
  Synthetic oligonucleotide
cggaagatgaagacttggcagtggagctacttggtatggactggcccgacccgggaaacc

SEQ ID NO: 42142 - DNA, 60 bp, Artificial
  Synthetic oligonucleotide
gcagaggcaatggttgggtacgcacagcaaggggtgcaattcatcaaaacccaagccctg

SEQ ID NO: 42143 - DNA, 60 bp, Artificial
  Synthetic oligonucleotide
ccataggttggaagacacgacccatctgcagtttgcacccaacgcaattagaacggatgg

SEQ ID NO: 42144 - DNA, 55 bp, Artificial
  Synthetic oligonucleotide
gccagcccctaatggggcgacactccaccatgatcactcccctgtgaggagctac

SEQ ID NO: 42145 - DNA, 55 bp, Artificial
  Synthetic oligonucleotide
gccagcccctaatggggcgacactccaccatgatcactcccctgtgaggaactac

SEQ ID NO: 42146 - DNA, 55 bp, Artificial
  Synthetic oligonucleotide
gccagcccctaatggggcgacactccaccatgatcactcccctgtgaggaactat

SEQ ID NO: 42147 - DNA, 60 bp, Artificial
  Synthetic oligonucleotide
ggggacacatattggctaaatcccttggaggtcctgctgctggctacaattgtatgattc

SEQ ID NO: 42148 - DNA, 60 bp, Artificial
  Synthetic oligonucleotide
ttaatcactggaaatgtctcggtagtgttgaagcctcaaggaagggaagttctggtcaaa

SEQ ID NO: 42149 - DNA, 60 bp, Artificial
  Synthetic oligonucleotide
aaggatctgaacccccggctcccattaactattacttgacacctcaaaaattggcgacca

SEQ ID NO: 42150 - DNA, 60 bp, Artificial
  Synthetic oligonucleotide
ctcccaaaaggttccacattaattcgaaacccttggagcagaaattctaccttggaaatg

SEQ ID NO: 42151 - DNA, 60 bp, Artificial
  Synthetic oligonucleotide
ttgaagccataggagatctaaaaaggttgaattggtttaaagaaaatgtggattgtaaga

SEQ ID NO: 42152 - DNA, 60 bp, Artificial
  Synthetic oligonucleotide
gctgtcctcacttcagaacatactccaattgtgtgtagggattgcatagagaaatttgtt

SEQ ID NO: 42153 - DNA, 60 bp, Artificial
  Synthetic oligonucleotide
ttctcaattttatttggggttcaatgttatggatggatgacttactttgacatgccagcg

SEQ ID NO: 42154 - DNA, 60 bp, Artificial
  Synthetic oligonucleotide
ggggtattggactcagttgtacctaccaagaggaaatgggtgaacatgactaattgggct

SEQ ID NO: 42155 - DNA, 60 bp, Artificial
  Synthetic oligonucleotide
gagagagttaattaatgacttgaacttgccttggacagattttaaatacccctatgttac

SEQ ID NO: 42156 - DNA, 60 bp, Artificial
  Synthetic oligonucleotide
gagcactaattggagacaaaatgttgttctgcgaggcaaactgggttgattgtaacactc

SEQ ID NO: 42157 - DNA, 57 bp, Artificial
  Synthetic oligonucleotide
aaaacagctgaaatctcgatggactcagaatatgaggaatttgaagaccccaagaac

SEQ ID NO: 42158 - DNA, 60 bp, Artificial
  Synthetic oligonucleotide
gttcccatggaatagctaaaggaaggatgcaaaatggtgaatatctttggaccctgggca

SEQ ID NO: 42159 - DNA, 60 bp, Artificial
  Synthetic oligonucleotide
cgatggggaaggttaaagagcctttgatttggggcgaaccatggctggacagcatggaca

SEQ ID NO: 42160 - DNA, 60 bp, Artificial
  Synthetic oligonucleotide
gggttgggatagtggctgttttatatttggcaaaggagaagttgtcacttgtgcagcagt

SEQ ID NO: 42161 - DNA, 60 bp, Artificial
  Synthetic oligonucleotide
ggaaacagtttgtggtataacacagagggagaagtcaactggtgaagtcactcaactagt

SEQ ID NO: 42162 - DNA, 60 bp, Artificial
  Synthetic oligonucleotide
ccatatgttcgccactccttggacatggagcgtggttccacaattcacaccaatgagaga

SEQ ID NO: 42163 - DNA, 60 bp, Artificial
  Synthetic oligonucleotide
ccaactactgggtgtaaaacattcttactaggggctagtgtcaacactgaaagtagggcc

SEQ ID NO: 42164 - DNA, 60 bp, Artificial
  Synthetic oligonucleotide
ccaggctaaagcaatggctctatacttattgctgacttttcccatgaggagagatatcag

SEQ ID NO: 42165 - DNA, 60 bp, Artificial
  Synthetic oligonucleotide
atgaagcttacaatgtgctcaaggatgtagggactgtgggtatacaaacgtcaacatata

SEQ ID NO: 42166 - DNA, 60 bp, Artificial
  Synthetic oligonucleotide
tctggttaggaaaataacaggttggtatggaaattcatggattaaggtgccttgcagagt

SEQ ID NO: 42167 - DNA, 60 bp, Artificial
  Synthetic oligonucleotide
gaacataaaccttgcaaaattcaacctaaagatgagatctttgaagatgccgattccttt

SEQ ID NO: 42168 - DNA, 60 bp, Artificial
  Synthetic oligonucleotide
ggtccgtggtctttcccgaaattgcaagagggctcagaatttaccataatgatgagatgg

SEQ ID NO: 42169 - DNA, 60 bp, Artificial
  Synthetic oligonucleotide
cagttgctcaacacaaggggatgctgggaagaatttgttctaaagtgtggagctggaaaa

SEQ ID NO: 42170 - DNA, 60 bp, Artificial
  Synthetic oligonucleotide
ggactggatgatcaaatctacccttttccaaccccgaggttttgtagtcgatggaggttg

SEQ ID NO: 42171 - DNA, 60 bp, Artificial
  Synthetic oligonucleotide
ccagttgccaagatcctgggctataccattggaaaagataaacatcatacacctgatttg

SEQ ID NO: 42172 - DNA, 60 bp, Artificial
  Synthetic oligonucleotide
gaaattggttagttccatgatggcttcttttaaggatgtgactgaaaatgtcatgataca

SEQ ID NO: 42173 - DNA, 60 bp, Artificial
  Synthetic oligonucleotide
acttggagtctgtttgacagaccgccagtttacctttatttcacccttcatccagttatc

SEQ ID NO: 42174 - DNA, 60 bp, Artificial
  Synthetic oligonucleotide
gctatgagcatgaagcatttgatgataccccaatctatagtggcaattacagcagtagtt

SEQ ID NO: 42175 - DNA, 60 bp, Artificial
  Synthetic oligonucleotide
ctcaccacattgaatgggattggaagattaccatgccattgattccatcattaccttacc

SEQ ID NO: 42176 - DNA, 60 bp, Artificial
  Synthetic oligonucleotide
gtgggtgtcaataaacaggggcctgtagggaacatcatgttggcattgggattaatttgt

SEQ ID NO: 42177 - DNA, 60 bp, Artificial
  Synthetic oligonucleotide
ccgttcaccaacacccacttactcagtaatgtacttgacagccacaggttacacatccta

SEQ ID NO: 42178 - DNA, 60 bp, Artificial
  Synthetic oligonucleotide
ggaaccccatgatcaaattaacagatgattctggaacaagagacctgatcttgattggga

SEQ ID NO: 42179 - DNA, 60 bp, Artificial
  Synthetic oligonucleotide
cctgagaggaactggttcagatactactgagtgcaaattgaaagttgaagggaaaagtgc

SEQ ID NO: 42180 - DNA, 60 bp, Artificial
  Synthetic oligonucleotide
ctacctcgctgatgctgggcactgccacgatcctgagaaatttgacatcatagaagctgg

SEQ ID NO: 42181 - DNA, 60 bp, Artificial
  Synthetic oligonucleotide
gtcactcaacatttgcaagaagaattatgagaaagggaaagaggattctgagaaattggc

SEQ ID NO: 42182 - DNA, 60 bp, Artificial
  Synthetic oligonucleotide
cttgaaagactctacatggatgtggtcctgcaagggcctgttctgaagtgttcaggaaac

SEQ ID NO: 42183 - DNA, 60 bp, Artificial
  Synthetic oligonucleotide
cttggcaatcaggagccctaaaggagctgtggctataatgaaatggggtgtcggttacct

SEQ ID NO: 42184 - DNA, 60 bp, Artificial
  Synthetic oligonucleotide
gcctaagggctcaagactcatcatgtatctggacctggttgaaagattcttggaacacaa

SEQ ID NO: 42185 - DNA, 60 bp, Artificial
  Synthetic oligonucleotide
cagagacaacccatgagagctctggtggagaacattgggattatagtgaatacctcacag

SEQ ID NO: 42186 - DNA, 60 bp, Artificial
  Synthetic oligonucleotide
cagaaaatttgccctcaggagtgtctgctgttagtccttatgagtaccctaggatgattg

SEQ ID NO: 42187 - DNA, 60 bp, Artificial
  Synthetic oligonucleotide
ggctgcgaagaccatggaacagggtttgattttgactaccaatatcagtgaaatgggtgc

SEQ ID NO: 42188 - DNA, 50 bp, Artificial
  Synthetic oligonucleotide
ccccaactccactacactcctaaccactgcccgaagtgtactggtctcca

SEQ ID NO: 42189 - DNA, 60 bp, Artificial
  Synthetic oligonucleotide
gtttgcacaagggcttctaaaattcaaagaaggggcagagttggaaggtcaaaaccagga

SEQ ID NO: 42190 - DNA, 60 bp, Artificial
  Synthetic oligonucleotide
acacatcctatgattcaaactccaatttctttgtacacgaccatcctgtcgcatcgaaaa

SEQ ID NO: 42191 - DNA, 60 bp, Artificial
  Synthetic oligonucleotide
cactctcaccacccaataccacgtcacttgtggccgagatctttggtggaagggtaaaag

SEQ ID NO: 42192 - DNA, 64 bp, Artificial
  Synthetic oligonucleotide
ctgctatcgaagtttacagtaaatatgaattggagaatgaagatgaaattaccactactcaagg

SEQ ID NO: 42193 - DNA, 60 bp, Artificial
  Synthetic oligonucleotide
agcctctggaattgaagtggagattagagaagaaattagaatggcaaaatatgattaccc

SEQ ID NO: 42194 - DNA, 60 bp, Artificial
  Synthetic oligonucleotide
gagacaaatcgaaagggctaattccgatgccagaattggaagaagttcatgatccacctg

SEQ ID NO: 42195 - DNA, 60 bp, Artificial
  Synthetic oligonucleotide
gactctgctggaaatatcaaattggaattggctatgttcacaatggcactctcaccaccc

SEQ ID NO: 42196 - DNA, 60 bp, Artificial
  Synthetic oligonucleotide
cctgagaccctagctctccacaatcttttcatgcgtgatctccgttcaccaacacccact

SEQ ID NO: 42197 - DNA, 60 bp, Artificial
  Synthetic oligonucleotide
agcccacctcgagatgctatgtggacgagggcatgcccaagacacaccttaaccctagcg

SEQ ID NO: 42198 - DNA, 60 bp, Artificial
  Synthetic oligonucleotide
ggtggtctaagtcctgagtacaggacagtcgtcagtagttcgacgtgagcagaagcccac

SEQ ID NO: 42199 - DNA, 60 bp, Artificial
  Synthetic oligonucleotide
gtcctgagtacaggacagtcgtcagtagttcgacgtgagcagaagcccacctcgagatgc

SEQ ID NO: 42200 - DNA, 60 bp, Artificial
  Synthetic oligonucleotide
gtcctgagtacaggacagtcgtcagtagttcgacgtgagcagaagcccacctcgatatgc

SEQ ID NO: 42201 - DNA, 58 bp, Artificial
  Synthetic oligonucleotide
acctcgagatgctatgtggacgagggcatgcccaagacacaccttaaccctagcgggg

SEQ ID NO: 42202 - DNA, 60 bp, Artificial
  Synthetic oligonucleotide
agtcctgagtacaggacagtcgtcagtagttcgacgtgagcagaagcccacctcgagatg

SEQ ID NO: 42203 - DNA, 60 bp, Artificial
  Synthetic oligonucleotide
ccacctcgatatgctatgtggacgagggcatgcccaagacacaccttaaccctagcgggg

SEQ ID NO: 42204 - DNA, 60 bp, Artificial
  Synthetic oligonucleotide
acgtgagcatgagcccacctcgagatgctatgtggacgagggcatgcccaagacacacct

SEQ ID NO: 42205 - DNA, 60 bp, Artificial
  Synthetic oligonucleotide
agaagcccacctcgagatgctatgtggacgagggcatgcccaagacacaccttaacccta

SEQ ID NO: 42206 - DNA, 60 bp, Artificial
  Synthetic oligonucleotide
ggtctgcggaaccggtgagtacaccggaattgccaggacgaccgggtcctttcttggata

SEQ ID NO: 42207 - DNA, 60 bp, Artificial
  Synthetic oligonucleotide
tggtcgtgttcttggccacccaggaggtccttcgcaagaggtggacagccaagatcagca

SEQ ID NO: 42208 - DNA, 60 bp, Artificial
  Synthetic oligonucleotide
tctggtcgtgttcttggccacccaggaggtccttcgcaagaggtggacagccaagatcag

SEQ ID NO: 42209 - DNA, 60 bp, Artificial
  Synthetic oligonucleotide
caaaggcctgacaaaaggaggaccaggacacgaagaacccatccccatgtcaacatatgg

SEQ ID NO: 42210 - DNA, 60 bp, Artificial
  Synthetic oligonucleotide
gtcctgagtacaggacagtcgtcagtagttcgacgtgagcactagcccacctcgagatgc

SEQ ID NO: 42211 - DNA, 60 bp, Artificial
  Synthetic oligonucleotide
atcgtgttcttggccacccaggaggtccttcgcaagaggtggacggccaagatcagcatg

SEQ ID NO: 42212 - DNA, 60 bp, Artificial
  Synthetic oligonucleotide
tggagtaaccaacaccgtagaaaatgctaggcaaggggctgcaaaattgacatcctggct

SEQ ID NO: 42213 - DNA, 61 bp, Artificial
  Synthetic oligonucleotide
gtacatggcacatggaagtgataaagtttgaacttttatacaaaacaagtaaacaaaggcc

SEQ ID NO: 42214 - DNA, 54 bp, Artificial
  Synthetic oligonucleotide
gggattacagcctgatagggtgctgcagaggcccacgcataagctagtataaaa

SEQ ID NO: 42215 - DNA, 60 bp, Artificial
  Synthetic oligonucleotide
gaacaaagctgcgaagtgatccatgtaagccctcagaaccgtctcggaaggaggacccca

SEQ ID NO: 42216 - DNA, 60 bp, Artificial
  Synthetic oligonucleotide
gaacaaagccgtgaagtgatccatgtaagccctcagaaccgtctcggaaggaggacccca

SEQ ID NO: 42217 - DNA, 60 bp, Artificial
  Synthetic oligonucleotide
tgaacaaagccgcgaagtgatccatgtaagccctcagaaccgtctcggaaggaggacccc

SEQ ID NO: 42218 - DNA, 60 bp, Artificial
  Synthetic oligonucleotide
gaacaaagccgcgaagtgatccatgtaagccctcagaaccgtctcggaaggaggacccca

SEQ ID NO: 42219 - DNA, 60 bp, Artificial
  Synthetic oligonucleotide
ggtgaacaaagccgcgaagtgatccatgtaagccctcagaaccgtctcggaaggaggacc

SEQ ID NO: 42220 - DNA, 60 bp, Artificial
  Synthetic oligonucleotide
acaaagccgcgaagtgatccatgtaagccctcagaaccgtctcggaaggaggaccccaca

SEQ ID NO: 42221 - DNA, 60 bp, Artificial
  Synthetic oligonucleotide
gccgcgaagtgatccatgtaagccctcagaaccgtctcggaaggaggaccccacatgttg

SEQ ID NO: 42222 - DNA, 60 bp, Artificial
  Synthetic oligonucleotide
ccgcgaggtgatccatgtaagccctcagaaccgtctcggaaggaggaccccacatgttgt

SEQ ID NO: 42223 - DNA, 60 bp, Artificial
  Synthetic oligonucleotide
tgatccttttcagttgggccttctggtgatgtttctggccacccaggaggtcctgaggaa

SEQ ID NO: 42224 - DNA, 60 bp, Artificial
  Synthetic oligonucleotide
gcgaaaccgcgtgtcaactggttcacagttggcgaagagattctcaaaaggattgctttc

SEQ ID NO: 42225 - DNA, 60 bp, Artificial
  Synthetic oligonucleotide
ccgcgtgtcaactggttcacagttggcgaagagattctcaaaaggattgctctcaggcca

SEQ ID NO: 42226 - DNA, 60 bp, Artificial
  Synthetic oligonucleotide
ccgcgtgtcaactggttcacagttggcgaagagattctcaaaaggattgctttcgggcca

SEQ ID NO: 42227 - DNA, 60 bp, Artificial
  Synthetic oligonucleotide
caattaacacagtgcgggctgtttcttagcacgaagatctcgatgtctaagaaaccagga

SEQ ID NO: 42228 - DNA, 60 bp, Artificial
  Synthetic oligonucleotide
agggcagggcctgggctcagcccgggtacccttggcccctctatggcaatgagggcttgg

SEQ ID NO: 42229 - DNA, 52 bp, Artificial
  Synthetic oligonucleotide
cccctcccgggagagccatagtggtctgcggaaccggtgagtacaccggaat

SEQ ID NO: 42230 - DNA, 60 bp, Artificial
  Synthetic oligonucleotide
taacctgtccaagatagttgaaccggctttggccactctgccctatgccgccacagctct

SEQ ID NO: 42231 - DNA, 59 bp, Artificial
  Synthetic oligonucleotide
tcctgctgtctctacagcatcattccaggcacagaacgccagaaaatggaatggtgctg

SEQ ID NO: 42232 - DNA, 53 bp, Artificial
  Synthetic oligonucleotide
tgaggatacgcccgacgtctatagttggactagggaagacctctaacagcccc

SEQ ID NO: 42233 - DNA, 60 bp, Artificial
  Synthetic oligonucleotide
agcactttagctgtatgaggatacacccgacgtctatagttggactagggaagacctcta

SEQ ID NO: 42234 - DNA, 60 bp, Artificial
  Synthetic oligonucleotide
ttacttgttgccgcgcaggggccctaggttgggtgtgcgcgcgacgaggaagacttccga

SEQ ID NO: 42235 - DNA, 60 bp, Artificial
  Synthetic oligonucleotide
ggtcagccagacacaagtgcaggcaacagcatgctaaatgtgttaacaatgatgtatgcc

SEQ ID NO: 42236 - DNA, 60 bp, Artificial
  Synthetic oligonucleotide
cgaggtcatccaagagtccgagacagccgaaggggaggaaagtgtcttcaacgtggctct

SEQ ID NO: 42237 - DNA, 60 bp, Artificial
  Synthetic oligonucleotide
tgggtgcagccccagaaaccgacgcctatctaagtagacgcaatgactcggcgccgactc

SEQ ID NO: 42238 - DNA, 60 bp, Artificial
  Synthetic oligonucleotide
ttcgaggtggacacttcggtgttgggctgggtggtggccagtgtggtagcttgggccatt

SEQ ID NO: 42239 - DNA, 60 bp, Artificial
  Synthetic oligonucleotide
atgttagctgggcaaaagttcgcggcgtcaactggcccttcctggtgggtgttcagcgga

SEQ ID NO: 42240 - DNA, 58 bp, Artificial
  Synthetic oligonucleotide
ggggagtgcggcctgcgcagccccaggaggactgggttaacaaagccgttgaggcccc

SEQ ID NO: 42241 - DNA, 60 bp, Artificial
  Synthetic oligonucleotide
ccagtgggctcctcaaagacagaatgtgagaccaaccaagggctgggagggcaaccagct

SEQ ID NO: 42242 - DNA, 60 bp, Artificial
  Synthetic oligonucleotide
cctctctcaggagatttcctccccctataccaaattccccaggaatctggggggcggttc

SEQ ID NO: 42243 - DNA, 60 bp, Artificial
  Synthetic oligonucleotide
ccctcggcaaaagccgaaagtggttgcaaagaaatcgcggcagcgaccgactgctttgcc

SEQ ID NO: 42244 - DNA, 60 bp, Artificial
  Synthetic oligonucleotide
ggcatgacacagtggtgatggaggtgacctacacgggaactgtgaaaccctgcagaatac

SEQ ID NO: 42245 - DNA, 60 bp, Artificial
  Synthetic oligonucleotide
ggatttcttctggcgtatgtcttgggtggcatgctgacagcccgtgaggtggtggctgtg

SEQ ID NO: 42246 - DNA, 60 bp, Artificial
  Synthetic oligonucleotide
gcaaaagccgaaagtggttgcaaagaaatcgcgacagcgaccagctgctttgccaagagc

SEQ ID NO: 42247 - DNA, 60 bp, Artificial
  Synthetic oligonucleotide
aacgactgggccagcaaccctccctgaagagcaccagaagaacatggtgtgcaaaagaga

SEQ ID NO: 42248 - DNA, 60 bp, Artificial
  Synthetic oligonucleotide
taatgagcttggttggcttgagaggaccaaggctgacctgggccagctgctctggaggca

SEQ ID NO: 42249 - DNA, 60 bp, Artificial
  Synthetic oligonucleotide
ccccgccagtgagctcctcaaagacagaatgtgagaccaaccaagagctaggagggcagc

SEQ ID NO: 42250 - DNA, 60 bp, Artificial
  Synthetic oligonucleotide
cccagaactcttaaatgagggaggggaggtgaacttgacagtgcggcaggatgccatggg

SEQ ID NO: 42251 - DNA, 60 bp, Artificial
  Synthetic oligonucleotide
gggaagtgaacttgacagtgcggcaggatgccatgggcaacttacatctaaaagaggtgg

SEQ ID NO: 42252 - DNA, 60 bp, Artificial
  Synthetic oligonucleotide
agaaaccaggagggcccggaagaaaccgggccatcaatatgctgaaacgcggcatacccc

SEQ ID NO: 42253 - DNA, 60 bp, Artificial
  Synthetic oligonucleotide
aggagggcccggaagaaaccgggccatcaatatgctgaaacgcggcataccccgcgtatt

SEQ ID NO: 42254 - DNA, 60 bp, Artificial
  Synthetic oligonucleotide
gtctgcggaaccggtgagtacaccggaattgccaggacgaccgggtcctttcttggatca

SEQ ID NO: 42255 - DNA, 60 bp, Artificial
  Synthetic oligonucleotide
gtgtctgcggaaccggtgagtacaccggaattgccaggacgaccgggtcctttcttggat

SEQ ID NO: 42256 - DNA, 60 bp, Artificial
  Synthetic oligonucleotide
agatcgttggcggagtatacttgttgccgcgcaggggccccaggttgggtgtgcgcgcga

SEQ ID NO: 42257 - DNA, 60 bp, Artificial
  Synthetic oligonucleotide
tcgttggcggagtatacttgttgccgcgcaggggccccaggttgggtgtgcgcgcgacaa

SEQ ID NO: 42258 - DNA, 60 bp, Artificial
  Synthetic oligonucleotide
ggagagccatagtggtctgcggaaccggtgagtacaccggaattgccaggacgaccgggt

SEQ ID NO: 42259 - DNA, 60 bp, Artificial
  Synthetic oligonucleotide
cacagttactctccaggtgaaatcaatagggtggcttcatgcctcaggaaacttggggta

SEQ ID NO: 42260 - DNA, 60 bp, Artificial
  Synthetic oligonucleotide
aggagccatggtccacttacagaagactggaggagaattcacctgtgtgacagcatcagg

SEQ ID NO: 42261 - DNA, 60 bp, Artificial
  Synthetic oligonucleotide
aataccagggaaacctgaggaccaaacacatgttgaaccccggcaaggtggcagagcaac

SEQ ID NO: 42262 - DNA, 60 bp, Artificial
  Synthetic oligonucleotide
ttacttgttgccgcgcaggggccccaggttgggtgtgcgcgcgactaggaagacttccga

SEQ ID NO: 42263 - DNA, 60 bp, Artificial
  Synthetic oligonucleotide
gcaatcacaaccggcgtgaaggttacaaagtccagagccaggggccgtgggacgaagaag

SEQ ID NO: 42264 - DNA, 60 bp, Artificial
  Synthetic oligonucleotide
cgcagtgaacatgacgagtcaagtgctcatagggcgaatggagaagagaacatggcatgg

SEQ ID NO: 42265 - DNA, 60 bp, Artificial
  Synthetic oligonucleotide
cccctggcactcacgatccgttcccagacaccaatgcaccagttacagacatacaagctg

SEQ ID NO: 42266 - DNA, 60 bp, Artificial
  Synthetic oligonucleotide
gacacgatcgcagctcattggactgaagcaaagatcatgttagacaacatccacctccca

SEQ ID NO: 42267 - DNA, 60 bp, Artificial
  Synthetic oligonucleotide
gcgtgagctctactacttcatattggttttggaggatcgtgagattaacacagtgccggc

SEQ ID NO: 42268 - DNA, 60 bp, Artificial
  Synthetic oligonucleotide
tccaacccgtgtggtggctgcagaaatggctgaagctctcaagggccttccggtccgata

SEQ ID NO: 42269 - DNA, 60 bp, Artificial
  Synthetic oligonucleotide
cctggagtgccgtggaagatatgggtcatccgtatgacggcattgggattcgcagcctgg

SEQ ID NO: 42270 - DNA, 60 bp, Artificial
  Synthetic oligonucleotide
gacatcgtgggcttgtacgggaatggagtcatcttgggcaacggctcgtatgtcagtgcc

SEQ ID NO: 42271 - DNA, 60 bp, Artificial
  Synthetic oligonucleotide
ggatgccagggtctactccgaccatcaatcgctcaagtggttcaaggactttgcggctgg

SEQ ID NO: 42272 - DNA, 60 bp, Artificial
  Synthetic oligonucleotide
tcagtcgtggcgcttggttctcaggaaggtgctttgcaccaggccttggcaggagctgtt

SEQ ID NO: 42273 - DNA, 60 bp, Artificial
  Synthetic oligonucleotide
gttcaacctaccccgcggactccccttcacggagctggacttgacagtggtcttggtctt

SEQ ID NO: 42274 - DNA, 60 bp, Artificial
  Synthetic oligonucleotide
ctagccactgtctcagatgtttcaactgtctccaactgtccaacaactggggaggcccac

SEQ ID NO: 42275 - DNA, 60 bp, Artificial
  Synthetic oligonucleotide
cctcggttctgggaaatggtggacgaagaaagggagaaccatctgaaaggagagtgccac

SEQ ID NO: 42276 - DNA, 60 bp, Artificial
  Synthetic oligonucleotide
ccagagctgatcttgacaacgaggccaaggttttggagctgatggaaggtgagcacagac

SEQ ID NO: 42277 - DNA, 60 bp, Artificial
  Synthetic oligonucleotide
gatggcggccaccgatttggacctctctctcccaggaattctcaatgccactgccacagc

SEQ ID NO: 42278 - DNA, 60 bp, Artificial
  Synthetic oligonucleotide
attggaagcgtccagcccgtgtcaggccgcaaagcgccacttcgccaaggagtgcagcct

SEQ ID NO: 42279 - DNA, 60 bp, Artificial
  Synthetic oligonucleotide
gacatcccttacaccgggaagcgggaagacatatggtgtggaagcctgataggcacgcga

SEQ ID NO: 42280 - DNA, 60 bp, Artificial
  Synthetic oligonucleotide
gcccctggatgatcggtttgccaatgccctgcactttctcaattcgatgtccaaggtcag

SEQ ID NO: 42281 - DNA, 60 bp, Artificial
  Synthetic oligonucleotide
gcggagtcggcggtcgatcgcagtgcagacgcacggggagagtatgctggctaacaagaa

SEQ ID NO: 42282 - DNA, 60 bp, Artificial
  Synthetic oligonucleotide
gcaccaagatcgcaggaactctattgctggctctgctcatgatgatagtgttgatccctg

SEQ ID NO: 42283 - DNA, 60 bp, Artificial
  Synthetic oligonucleotide
ggcaaggtggttgacctaggttgtgggcgaggaggatggagttactatgcagccacgctc

SEQ ID NO: 42284 - DNA, 60 bp, Artificial
  Synthetic oligonucleotide
cctgactctctgggacaacggagccattgcagtatggaattccaccaccgcgaccggact

SEQ ID NO: 42285 - DNA, 60 bp, Artificial
  Synthetic oligonucleotide
catgcagactcgggatgtgcgatagacgtgggaaggagagagttgcgctgtggacaaggg

SEQ ID NO: 42286 - DNA, 60 bp, Artificial
  Synthetic oligonucleotide
ttcttcacaactaggagcatcacaagctgggcggtttaccatcactcccaactccccagc

SEQ ID NO: 42287 - DNA, 60 bp, Artificial
  Synthetic oligonucleotide
ctcaacgtgaccaccatggcgatgactgacaccactccgtttgggcagcagagggttttc

SEQ ID NO: 42288 - DNA, 60 bp, Artificial
  Synthetic oligonucleotide
gccaggtactactggggcgaatggatcgcacagtgtggagagggccaaagtatgaggaag

SEQ ID NO: 42289 - DNA, 60 bp, Artificial
  Synthetic oligonucleotide
gtgaacatgaccagccaggtactactggggcgaatggatcgcacagtgtggagagggcca

SEQ ID NO: 42290 - DNA, 60 bp, Artificial
  Synthetic oligonucleotide
gctgtgaacatgaccagccaggtactactggggcgaatggatcgcacagtgtggagaggg

SEQ ID NO: 42291 - DNA, 55 bp, Artificial
  Synthetic oligonucleotide
cccctccagcgacggccgaactgggctagccatgcccatagtaggactagcaaac

SEQ ID NO: 42292 - DNA, 60 bp, Artificial
  Synthetic oligonucleotide
agtttacttgttgccgcgcaggggccctcgtttgggtgtgcgcgcgacgaggaagacttc

SEQ ID NO: 42293 - DNA, 60 bp, Artificial
  Synthetic oligonucleotide
gacatggtgcacacttattacacagctgacccaaattcacggaactttaaacttgctgag

SEQ ID NO: 42294 - DNA, 60 bp, Artificial
  Synthetic oligonucleotide
gtggtttgtgccatcatacaatgcagctcagggaatctcaaaagccttgagagagagagg

SEQ ID NO: 42295 - DNA, 60 bp, Artificial
  Synthetic oligonucleotide
gaatgtccccttgctaaccgatcatggaacgctttcaaagtgtctgagttcggggctggc

SEQ ID NO: 42296 - DNA, 60 bp, Artificial
  Synthetic oligonucleotide
ttgacggcatggtacggaggagtgcctttgcctgttatctcaggtggagcgctggtctgc

SEQ ID NO: 42297 - DNA, 60 bp, Artificial
  Synthetic oligonucleotide
ggccatgtggaaagcacttgaggaggagataaactggtttctggaagatcagtcagttga

SEQ ID NO: 42298 - DNA, 60 bp, Artificial
  Synthetic oligonucleotide
ggtcttgagttgggcctaattccacttgattttccaccaggatcttctggctcaccaatc

SEQ ID NO: 42299 - DNA, 60 bp, Artificial
  Synthetic oligonucleotide
gatatcagttttcactcatcggccgtgtcaacgaagaccccaggatcacttgttgatgtc

SEQ ID NO: 42300 - DNA, 60 bp, Artificial
  Synthetic oligonucleotide
ggggataaccactctgatgaacatcctccggactctgctaaacggaatcttgggacgcaa

SEQ ID NO: 42301 - DNA, 58 bp, Artificial
  Synthetic oligonucleotide
aaaatgtgctgttgtgttgatgacggctacacctcctggagttgatgatccatgggca

SEQ ID NO: 42302 - DNA, 60 bp, Artificial
  Synthetic oligonucleotide
ttggtttcattgctagaatacgcccaaatgagaagatcaggggttctgctaggcttaccc

SEQ ID NO: 42303 - DNA, 60 bp, Artificial
  Synthetic oligonucleotide
ttccacaaaacaaactcaagtggctgggaaagaagagctgggaggaattctctatcatgg

SEQ ID NO: 42304 - DNA, 60 bp, Artificial
  Synthetic oligonucleotide
ggagctgcttggctctctttgggtttaggagacttgactttggcagtcggggcgttcaga

SEQ ID NO: 42305 - DNA, 60 bp, Artificial
  Synthetic oligonucleotide
ggctgaaagtgaaggtgtgctggatgaagatttcaatgatcacgggattgaaacttggct

SEQ ID NO: 42306 - DNA, 60 bp, Artificial
  Synthetic oligonucleotide
ggtggaagtgcaaccgttgcagggactgcgtgtctagccaaagcctatgcccaaatgtgg

SEQ ID NO: 42307 - DNA, 60 bp, Artificial
  Synthetic oligonucleotide
caaaggcattgaggatcgtggatggttaaacataggtcccaatcagcatttagtgtcaga

SEQ ID NO: 42308 - DNA, 60 bp, Artificial
  Synthetic oligonucleotide
agccagtggatttggactgcttttgccgtgacgttcagaatgtgtgggttaaatatccgc

SEQ ID NO: 42309 - DNA, 60 bp, Artificial
  Synthetic oligonucleotide
ttttctctatggtcactggcttcactttgactgctatcaatgttttcactcttcgcaaag

SEQ ID NO: 42310 - DNA, 60 bp, Artificial
  Synthetic oligonucleotide
gttggtactggactatgcattttctcttcactggatattggcgtgccatgcaacttgacc

SEQ ID NO: 42311 - DNA, 60 bp, Artificial
  Synthetic oligonucleotide
gggcttgtgttaccattagtgctcaggataaaccaagtgtggatctgtggctcgatgatg

SEQ ID NO: 42312 - DNA, 60 bp, Artificial
  Synthetic oligonucleotide
gctcagtcatggggagttctctctgtgatgttgctgttttacatgggctttctaccgaag

SEQ ID NO: 42313 - DNA, 60 bp, Artificial
  Synthetic oligonucleotide
tgcatggatctccctggatgtggatggacagctatgaagtcaatggcactctccagctac

SEQ ID NO: 42314 - DNA, 60 bp, Artificial
  Synthetic oligonucleotide
ggggctcttgttcttgaaagaggagagtgtcctggaacaaaagtccaaattctagaggat

SEQ ID NO: 42315 - DNA, 60 bp, Artificial
  Synthetic oligonucleotide
cgcattctccgaatgccgtttgacatgatatttggaggtgtaggatttctgggaaagctc

SEQ ID NO: 42316 - DNA, 60 bp, Artificial
  Synthetic oligonucleotide
gagagacaccactgtgaacgaaagtcctgtcttccattacacgtgggaatcactcatgga

SEQ ID NO: 42317 - DNA, 60 bp, Artificial
  Synthetic oligonucleotide
gccgctaataatgaggctgttgtgttccttgaattggaagctccgctaggtgtatcgacc

SEQ ID NO: 42318 - DNA, 60 bp, Artificial
  Synthetic oligonucleotide
ggcacggttgcaatggaagtcaaatataagggatccgatgctccatgtagaatacctgtt

SEQ ID NO: 42319 - DNA, 60 bp, Artificial
  Synthetic oligonucleotide
catggatggatgataagacaaacatcacaacatggaagaatgtggcctacctgcccagag

SEQ ID NO: 42320 - DNA, 60 bp, Artificial
  Synthetic oligonucleotide
gttactggacaacatggatagccgacaaagagcgacatgtcaattctatgaacctgaaca

SEQ ID NO: 42321 - DNA, 60 bp, Artificial
  Synthetic oligonucleotide
ctgatttcatactcaccactgacatttcggagatgggtgccaatttagatgttgataggg

SEQ ID NO: 42322 - DNA, 60 bp, Artificial
  Synthetic oligonucleotide
acaactggagtcatgggagaccacggatgcgcactagacacatacaggaaagaaatgcgg

SEQ ID NO: 42323 - DNA, 60 bp, Artificial
  Synthetic oligonucleotide
ggtgaaaaggatgtccgacggaagactggtcaacctctcaaaagacaaggagagtatgac

SEQ ID NO: 42324 - DNA, 59 bp, Artificial
  Synthetic oligonucleotide
atgcgtccattggagcatggagccaagagatgcagggatggagtgatgccaaggaagca

SEQ ID NO: 42325 - DNA, 60 bp, Artificial
  Synthetic oligonucleotide
ggtaaaagagaaaagaaaccaggtgagtttggatgtgccaagggtagccggaccatatgg

SEQ ID NO: 42326 - DNA, 60 bp, Artificial
  Synthetic oligonucleotide
tcggcttcttgaatgaggaacattgggcatcaagagagttgtctggaggaggggtagaga

SEQ ID NO: 42327 - DNA, 60 bp, Artificial
  Synthetic oligonucleotide
gagatggctaagaaacctggaaaactctatgctgatgacactgcaggatgggacactcgt

SEQ ID NO: 42328 - DNA, 60 bp, Artificial
  Synthetic oligonucleotide
cgtcaactaccttggagcaatgggacgctatgaatgtgatgatgtctcattccaactgta

SEQ ID NO: 42329 - DNA, 60 bp, Artificial
  Synthetic oligonucleotide
cttgatggccatatgttcaatgtgcatgaggactggctgagtgacttgccattgccctcc

SEQ ID NO: 42330 - DNA, 60 bp, Artificial
  Synthetic oligonucleotide
ctgaagaagtgaccaaaactagtaactcttaccatctcaccggaggacatgttgattgta

SEQ ID NO: 42331 - DNA, 58 bp, Artificial
  Synthetic oligonucleotide
agttccagcacatgtttggaggtggaataatcagggtcccgcattcacgaaactcaac

SEQ ID NO: 42332 - DNA, 60 bp, Artificial
  Synthetic oligonucleotide
tcatccatatcgcacatggcaataccatggaagctaccaaattcgggatgttggtacaaa

SEQ ID NO: 42333 - DNA, 60 bp, Artificial
  Synthetic oligonucleotide
ggaaggttggaattttggaagttgacagacccgatgctgtgatgaatttaaataaaggca

SEQ ID NO: 42334 - DNA, 60 bp, Artificial
  Synthetic oligonucleotide
ggtactggagctcatgagaaacctcgtctggtcgaaagcttaggttggaacctcatcacc

SEQ ID NO: 42335 - DNA, 60 bp, Artificial
  Synthetic oligonucleotide
catatgctactgaggccaaaaagacacttgaagtgattgagatggtcggaaattggatgc

SEQ ID NO: 42336 - DNA, 60 bp, Artificial
  Synthetic oligonucleotide
gtttgagctatgttacaaaaataaggtagccctttgtcccaggccaggaagacatggagg

SEQ ID NO: 42337 - DNA, 60 bp, Artificial
  Synthetic oligonucleotide
ccataccatgtggcacgtcacacgtggtgctgtattgaacatctgtgggaggaaaatcgt

SEQ ID NO: 42338 - DNA, 60 bp, Artificial
  Synthetic oligonucleotide
attacatgcatagaggccaaagagctactgattacacagccatactcggcattgttatgg

SEQ ID NO: 42339 - DNA, 60 bp, Artificial
  Synthetic oligonucleotide
tgctctagcacttggaggagtgatgctcttgatgtccattagtccaaagttcatgcaatc

SEQ ID NO: 42340 - DNA, 60 bp, Artificial
  Synthetic oligonucleotide
ggagtgggaatcagtttggaaagttttggattccttgggctttgttgtctatgggttctt

SEQ ID NO: 42341 - DNA, 60 bp, Artificial
  Synthetic oligonucleotide
gattgattgcagggattttctccgctacttgctggcggtgggaacaacctttgcgtggca

SEQ ID NO: 42342 - DNA, 60 bp, Artificial
  Synthetic oligonucleotide
cagggctttggaggacgggatcaattatgcaacagggaatctccccggttgctccttttc

SEQ ID NO: 42343 - DNA, 58 bp, Artificial
  Synthetic oligonucleotide
ttgacgctgggaaagaccagagatcctgctgtctctgcaacatcaatccaggcacaga

SEQ ID NO: 42344 - DNA, 59 bp, Artificial
  Synthetic oligonucleotide
ttgacgctgggaaagaccagagatcctgctgtctctgcaacatcaatccaggcacagag

SEQ ID NO: 42345 - DNA, 56 bp, Artificial
  Synthetic oligonucleotide
ttgacgctgggaaagaccagagatcctgctgtctctgcaacatcaatccaggcaca

SEQ ID NO: 42346 - DNA, 54 bp, Artificial
  Synthetic oligonucleotide
ttgacgctgggaaagaccagagatcctgctgtctctgcaacatcaatccaggca

SEQ ID NO: 42347 - DNA, 60 bp, Artificial
  Synthetic oligonucleotide
attgacgctgggaaagaccagagatcctgctgtctctgcaacatcaatccaggcacagaa

SEQ ID NO: 42348 - DNA, 60 bp, Artificial
  Synthetic oligonucleotide
aatataatggccaggactgaccacccagaaccaatccagctggcatataacagctacgaa

SEQ ID NO: 42349 - DNA, 60 bp, Artificial
  Synthetic oligonucleotide
aatataatggccaggactgaccacccagaaccaattcagctggcatacaacagctatgaa

SEQ ID NO: 42350 - DNA, 55 bp, Artificial
  Synthetic oligonucleotide
aaaatataatggccaggactgaccacccagaaccaattcaactggcgtacaacag

SEQ ID NO: 42351 - DNA, 55 bp, Artificial
  Synthetic oligonucleotide
aaaatataatggccaggactgaccacccagaaccaatccagctggcgtacaacag

SEQ ID NO: 42352 - DNA, 60 bp, Artificial
  Synthetic oligonucleotide
ggtggagcagagggaagcacccttggtgacatttggaagcagcggctgaactcatgcacc

SEQ ID NO: 42353 - DNA, 60 bp, Artificial
  Synthetic oligonucleotide
ggagagcaacaggagtgttcacagtggcagagtttggagtgggcctacgcacgaaagtgt

SEQ ID NO: 42354 - DNA, 60 bp, Artificial
  Synthetic oligonucleotide
caaaccgagaccaagctcgtgaattgcttcgccgaggtgagactaacatggggttggcag

SEQ ID NO: 42355 - DNA, 60 bp, Artificial
  Synthetic oligonucleotide
agcaaggtgtcctggaagagctggggcaagtcaatcttgtggagtgttcctgatagcccc

SEQ ID NO: 42356 - DNA, 60 bp, Artificial
  Synthetic oligonucleotide
ctcataaagttcaggagtgggatggatgtgttctcaatggcgaccacaagagcagacaca

SEQ ID NO: 42357 - DNA, 60 bp, Artificial
  Synthetic oligonucleotide
gacaaactgtgacttcacgccctggctcgcatggcacgtggctgcaaacactgcctgtgt

SEQ ID NO: 42358 - DNA, 60 bp, Artificial
  Synthetic oligonucleotide
cacggccgtcacaggaaatcttgttaattcagtcaatgtgctctcgcggaagctcctggc

SEQ ID NO: 42359 - DNA, 60 bp, Artificial
  Synthetic oligonucleotide
gggatggtttgggacgcatggacgaacatcgacatacagcctgcccgatcctggggaact

SEQ ID NO: 42360 - DNA, 60 bp, Artificial
  Synthetic oligonucleotide
agcgtagtggagaggataaccgactggccttcctgttgattggactggggagcgtggtgg

SEQ ID NO: 42361 - DNA, 60 bp, Artificial
  Synthetic oligonucleotide
ggacgtcagtcagcagaatggttctgggcaccctggtgttggcagtggctctcatcctgt

SEQ ID NO: 42362 - DNA, 60 bp, Artificial
  Synthetic oligonucleotide
gcagaggtttgggattcttgctggctgggctcatgacacaaagacacctagtcgctgtcc

SEQ ID NO: 42363 - DNA, 60 bp, Artificial
  Synthetic oligonucleotide
gccatggggaacttgcacttgacagaggtggaacgggaggagcgtcgtttggccttatgg

SEQ ID NO: 42364 - DNA, 60 bp, Artificial
  Synthetic oligonucleotide
aaacacaggacctggtatgttcctcacttgttgggagaaaggagagggcagaatgggcta

SEQ ID NO: 42365 - DNA, 60 bp, Artificial
  Synthetic oligonucleotide
ccgagtcgagggctggatgtggaagaacaagcttctaactgccgccattgtggccttggc

SEQ ID NO: 42366 - DNA, 60 bp, Artificial
  Synthetic oligonucleotide
agcgaaggtgaggtccaacgctgctctaggtgcatggtcggatgaacagaataagtggag

SEQ ID NO: 42367 - DNA, 60 bp, Artificial
  Synthetic oligonucleotide
accagagtgtccctagttttggaacttggaggctgcgtgaccatcacagctgagggcaag

SEQ ID NO: 42368 - DNA, 60 bp, Artificial
  Synthetic oligonucleotide
ggcgtacgggcagatgtggcttctcaactactttcatcgcagagaccttcgcacccttgg

SEQ ID NO: 42369 - DNA, 60 bp, Artificial
  Synthetic oligonucleotide
tggctgcaaatgagaccaattcaaacaggaaatcagcacagtttacggtggcatccgaga

SEQ ID NO: 42370 - DNA, 60 bp, Artificial
  Synthetic oligonucleotide
ggaactagtctcaactatctgggctggctgctaagagaacttggaatgaaagacggtggc

SEQ ID NO: 42371 - DNA, 60 bp, Artificial
  Synthetic oligonucleotide
cgtgatcacaaggagagaccagaggggatcaggacaggtcgtcacatacgccctcaacac

SEQ ID NO: 42372 - DNA, 60 bp, Artificial
  Synthetic oligonucleotide
tagtaagaaggccctggcccagtgcggcagcacactcagtgacgggaaagtggtcgctcc

SEQ ID NO: 42373 - DNA, 60 bp, Artificial
  Synthetic oligonucleotide
agaacagatgtgcactcgtgctgatgactgctaccccacctggcaagagcgaggcgttcc

SEQ ID NO: 42374 - DNA, 60 bp, Artificial
  Synthetic oligonucleotide
cgccggctcttgccacaagggagacagaactgggaggtggccataatggatgaggcacat

SEQ ID NO: 42375 - DNA, 60 bp, Artificial
  Synthetic oligonucleotide
atgatggagttttagactcccatcttttcttgccagtcacccttgctgggcccaggtcaa

SEQ ID NO: 42376 - DNA, 60 bp, Artificial
  Synthetic oligonucleotide
tcgaacagcctggtttgtgccatcgatagccaagggaggcgccatagcacggacactgag

SEQ ID NO: 42377 - DNA, 60 bp, Artificial
  Synthetic oligonucleotide
gcccctgggctcttctggggttaccgccagataggtgtgggatatggaacgaaaggagtc

SEQ ID NO: 42378 - DNA, 60 bp, Artificial
  Synthetic oligonucleotide
atgccattgatggtccaggcggcgaactggtcacgttcagaagccccaatggagcggaac

SEQ ID NO: 42379 - DNA, 60 bp, Artificial
  Synthetic oligonucleotide
ggcaagtgcaccgtgactggtttgaggacttggcgctgccctggaaacacaaggacaacc

SEQ ID NO: 42380 - DNA, 60 bp, Artificial
  Synthetic oligonucleotide
cctactccatgtgtgacaaagcaaagttcaaatggaagagagttcctgtggacagcggcc

SEQ ID NO: 42381 - DNA, 60 bp, Artificial
  Synthetic oligonucleotide
aggggagagatgtggcagacttcatccagtacgcttccggtcgtaggagtgccgtggaca

SEQ ID NO: 42382 - DNA, 60 bp, Artificial
  Synthetic oligonucleotide
cccgcaggggattggaaaggctctctgtggttggagaacatgcatgggactttggctcag

SEQ ID NO: 42383 - DNA, 60 bp, Artificial
  Synthetic oligonucleotide
acatgtcgtggcactcggtgtgacctctttggtaggagcgacgcccacctcccttgcatt

SEQ ID NO: 42384 - DNA, 60 bp, Artificial
  Synthetic oligonucleotide
cttgtgagtggagatgattgtgtcgtcaagcccatcgatgacaggttcggaaaggcgctg

SEQ ID NO: 42385 - DNA, 60 bp, Artificial
  Synthetic oligonucleotide
caggctaatatggtgtgcaagagagaccaaagcgaccgtggatggggaaaccactgcggg

SEQ ID NO: 42386 - DNA, 60 bp, Artificial
  Synthetic oligonucleotide
gttggtacgctatggaaatcaggccagtccattcgcagggcggcttggtgcgttccatgg

SEQ ID NO: 42387 - DNA, 60 bp, Artificial
  Synthetic oligonucleotide
gcagttggggtcactttccacttggaattgggaccagagaccatggttcttgtgatgctg

SEQ ID NO: 42388 - DNA, 60 bp, Artificial
  Synthetic oligonucleotide
caacgcagagggcgagttggaaggcatgaaggacgcacggacctctatgtgtattctggg

SEQ ID NO: 42389 - DNA, 60 bp, Artificial
  Synthetic oligonucleotide
cggaatggtatgacggctacgcctatcacccagaatcacctgacacgcttgcacaggctc

SEQ ID NO: 42390 - DNA, 60 bp, Artificial
  Synthetic oligonucleotide
cgtgtgtgcgggtgctttagtcagtgtccgcagcgttctgttgaacgtgagtgtgttgag

SEQ ID NO: 42391 - DNA, 60 bp, Artificial
  Synthetic oligonucleotide
gggaacttgatgcagagccttcacatgagagggcgtcgcaggtcaggtgtggactggact

SEQ ID NO: 42392 - DNA, 60 bp, Artificial
  Synthetic oligonucleotide
aagtgaagcccagggacgtggcggagcgcattggagccttgagggaacagtactcagagt

SEQ ID NO: 42393 - DNA, 60 bp, Artificial
  Synthetic oligonucleotide
atggcaaccaccatccaccgggacagggaaggatacatggttatgcgggccagtggaagg

SEQ ID NO: 42394 - DNA, 60 bp, Artificial
  Synthetic oligonucleotide
ctttgggacagttgctgaggcccgaagaggagagctggtggaccatgcccatggcttgcg

SEQ ID NO: 42395 - DNA, 60 bp, Artificial
  Synthetic oligonucleotide
gcgtcacgattgaccaggaggaagaacccgttgacgtggactgcttctgccgaggtgttg

SEQ ID NO: 42396 - DNA, 60 bp, Artificial
  Synthetic oligonucleotide
cacgggaggatgttaccagaatggccatgacagacacaacggcctttgggcagcagcgag

SEQ ID NO: 42397 - DNA, 60 bp, Artificial
  Synthetic oligonucleotide
gctccggaactcaacttggtgctgagtgagggagaagcaaacttgaccatcgtggtagac

SEQ ID NO: 42398 - DNA, 60 bp, Artificial
  Synthetic oligonucleotide
ttggcgccaacacgggtggtcctgaaggaaatggaaagggccttgcaggggaaacgtgtc

SEQ ID NO: 42399 - DNA, 58 bp, Artificial
  Synthetic oligonucleotide
ggggccacatcaggaccatactgggcggatgtgcgtgaagacgtggtctgctatgggg

SEQ ID NO: 42400 - DNA, 60 bp, Artificial
  Synthetic oligonucleotide
tccctccggacagtggacacaaaatccatcaatgccagccaggaaagctgaaccttgagg

SEQ ID NO: 42401 - DNA, 60 bp, Artificial
  Synthetic oligonucleotide
tggccgtggtcacatctgggctggaggctgaactgacccagagggcgcaccgggcatttt

SEQ ID NO: 42402 - DNA, 60 bp, Artificial
  Synthetic oligonucleotide
cttggtggtgcagcttataagaatggcagaagcagagtgcgtcctcacgcccgaagacct

SEQ ID NO: 42403 - DNA, 60 bp, Artificial
  Synthetic oligonucleotide
ctttgctcgcccttgggtgctggacccagataacaccctgtagtcttattctcgcatgcg

SEQ ID NO: 42404 - DNA, 60 bp, Artificial
  Synthetic oligonucleotide
agctgggaacttgaacgtgcttatctactagaatcaaaatcatgcagctggcccgcgacc

SEQ ID NO: 42405 - DNA, 60 bp, Artificial
  Synthetic oligonucleotide
agcgcgtgccatctttgaacttacctacaaacacaaagttgtgaaagtgatgagaccagg

SEQ ID NO: 42406 - DNA, 60 bp, Artificial
  Synthetic oligonucleotide
gtgccctgaagagaaaagatcatggaataatttcagaatcgaggacttcgggtttggcgt

SEQ ID NO: 42407 - DNA, 60 bp, Artificial
  Synthetic oligonucleotide
ttcaggaagcgcctcctcccaggtgaacggcgtggtcaagctgttgtcgaaaccatggga

SEQ ID NO: 42408 - DNA, 60 bp, Artificial
  Synthetic oligonucleotide
gtggagtcagatcagttggcaggttggaacatgaaatgtggagagccaatgctagggaga

SEQ ID NO: 42409 - DNA, 60 bp, Artificial
  Synthetic oligonucleotide
gatggctgttagtggagatgactgcgtggtggctgctcctgatgcaaggttcggtgcggc

SEQ ID NO: 42410 - DNA, 60 bp, Artificial
  Synthetic oligonucleotide
ggccgtgaagaaacggctccgaacagtgatcttggcccctacccgtgtggtggcttcaga

SEQ ID NO: 42411 - DNA, 60 bp, Artificial
  Synthetic oligonucleotide
atgtagtagttccccggctgtagaggctgaccgctccacaaaggtactggaattggcaga

SEQ ID NO: 42412 - DNA, 60 bp, Artificial
  Synthetic oligonucleotide
gacgaaagcagagagctgggcccttcgcaaccccggatacgctctggttgctgctgtatt

SEQ ID NO: 42413 - DNA, 60 bp, Artificial
  Synthetic oligonucleotide
accactgaggcttttcccccctctaattccccaatcatagatgaggaaacaagaatacca

SEQ ID NO: 42414 - DNA, 60 bp, Artificial
  Synthetic oligonucleotide
ggcagtgggaggagtccttgtgtttctcgctacttctgtgaacgcggattccggttgtgc

SEQ ID NO: 42415 - DNA, 60 bp, Artificial
  Synthetic oligonucleotide
gggcgaggattgtgaggacacgatgaagtatctctgcccagccatcgaaaacccttcaga

SEQ ID NO: 42416 - DNA, 60 bp, Artificial
  Synthetic oligonucleotide
gagatgggggcaaacttcaaagcggacagagtgatcgaccctagaaaaaccattaagccc

SEQ ID NO: 42417 - DNA, 60 bp, Artificial
  Synthetic oligonucleotide
tctttgggacatcccttccccgcgggaagcaaagccagccaaggttgaggacggagtcta

SEQ ID NO: 42418 - DNA, 60 bp, Artificial
  Synthetic oligonucleotide
ccaggcgacttgccgtgatcggtgatgacgcatgggacttcggctctgtgggaggaatat

SEQ ID NO: 42419 - DNA, 60 bp, Artificial
  Synthetic oligonucleotide
gcagaagtcactggagagagtgtcagctaccacgtgagcctagatgttcgaggagaccca

SEQ ID NO: 42420 - DNA, 60 bp, Artificial
  Synthetic oligonucleotide
ggcctggtggtagttctggttagaggaaaaggaccagggaagttggcgtttgggatggtt

SEQ ID NO: 42421 - DNA, 60 bp, Artificial
  Synthetic oligonucleotide
gggccatgcagggtgcccatatcaatgtctgtgagcctgagcaacatagagcccgttggt

SEQ ID NO: 42422 - DNA, 60 bp, Artificial
  Synthetic oligonucleotide
agaatcgggacttcattgaaggggtgtccggaggaacttgggtggacgtggtcctggagc

SEQ ID NO: 42423 - DNA, 60 bp, Artificial
  Synthetic oligonucleotide
aggagtcgacccagggaagatcgcagctgccgttatcctggtctttctgctgctcgtggt

SEQ ID NO: 42424 - DNA, 60 bp, Artificial
  Synthetic oligonucleotide
gcatgataaagttgtggacctgggctgtggaagaggcggttggtgctactactcagcgac

SEQ ID NO: 42425 - DNA, 60 bp, Artificial
  Synthetic oligonucleotide
ccgaaacagcaatccaagcaacaagagaggtggtggcatcggagaaacactaggagaaaa

SEQ ID NO: 42426 - DNA, 60 bp, Artificial
  Synthetic oligonucleotide
ccgatacagacggagccacatcatggaagttgaccgagagccagcgagagctgccctcaa

SEQ ID NO: 42427 - DNA, 60 bp, Artificial
  Synthetic oligonucleotide
atgaaacctgccactgcttggacactgtacgcgttggcaacaacgcttctcactcccctt

SEQ ID NO: 42428 - DNA, 60 bp, Artificial
  Synthetic oligonucleotide
ttaaggttgatgggaaatgccatatgctcggctgttccagttgattgggtcccgacgggg

SEQ ID NO: 42429 - DNA, 60 bp, Artificial
  Synthetic oligonucleotide
ccaaattaaaggaccatggcaccttaccccattggagatcaggtttgaaagttgcccagg

SEQ ID NO: 42430 - DNA, 60 bp, Artificial
  Synthetic oligonucleotide
catgatgggcaaacgtgaaaagaagaggggagaattcggaaaagcaaaaggaagcagagc

SEQ ID NO: 42431 - DNA, 60 bp, Artificial
  Synthetic oligonucleotide
cgtctgtgcaccaaggaagagtttgtcaggaaagttaggggcaatgcggcgctgggcccg

SEQ ID NO: 42432 - DNA, 60 bp, Artificial
  Synthetic oligonucleotide
ggggaggtggtgtcggcgacagtcgctcctactctccattggcgcagtcctagtgaattt

SEQ ID NO: 42433 - DNA, 60 bp, Artificial
  Synthetic oligonucleotide
gggccgtcaatatgctaaagcgcggtgcgtcccgcgcgcttggtccaatgatcaagctta

SEQ ID NO: 42434 - DNA, 60 bp, Artificial
  Synthetic oligonucleotide
aggccattgaaagaacgagaagagaccatggtaaagagccacgtgagtgccggcagaggg

SEQ ID NO: 42435 - DNA, 60 bp, Artificial
  Synthetic oligonucleotide
gtgttcaatgacgcggaagcatggtcccactcatatcgatatcatcccagtacacccaag

SEQ ID NO: 42436 - DNA, 60 bp, Artificial
  Synthetic oligonucleotide
ctgggtgtcagggtacaaaggaaacttgattggtgtcataaactcgacatcagcactgct

SEQ ID NO: 42437 - DNA, 60 bp, Artificial
  Synthetic oligonucleotide
ggggactcagttaccgtgatttgggaaggtacttggttttggttggcgccgccttcgctg

SEQ ID NO: 42438 - DNA, 60 bp, Artificial
  Synthetic oligonucleotide
gaggaggagttgaaggactcggaatccagaaactggggtacgtcatgagagagatcggag

SEQ ID NO: 42439 - DNA, 60 bp, Artificial
  Synthetic oligonucleotide
ggtaccagtgaacgtgatccgggttaagattggagggaacaagtatcaagactatctggg

SEQ ID NO: 42440 - DNA, 60 bp, Artificial
  Synthetic oligonucleotide
atgtgccctctttggagccctggcggaaactgaggttgacttggctggaccgttggccgc

SEQ ID NO: 42441 - DNA, 60 bp, Artificial
  Synthetic oligonucleotide
aggaagacggagcagagattgaggacaactggttcagaaaaagagagctgacggtccttg

SEQ ID NO: 42442 - DNA, 60 bp, Artificial
  Synthetic oligonucleotide
ctctcgaccttgactgcatggctggaacttctgggtctccaatcgtgaacaagaacgggg

SEQ ID NO: 42443 - DNA, 60 bp, Artificial
  Synthetic oligonucleotide
cccatgccaccaagcgagaagtgctagccctaggttcacaagaagggacattgcaagtgg

SEQ ID NO: 42444 - DNA, 60 bp, Artificial
  Synthetic oligonucleotide
acttcggtatcgctcccgctgctggcagctcttgccccggctggatgctacacggttttg

SEQ ID NO: 42445 - DNA, 60 bp, Artificial
  Synthetic oligonucleotide
gtgagaacaagcacggagccaagatatccattacagccacgggcccttcacgaacggctg

SEQ ID NO: 42446 - DNA, 60 bp, Artificial
  Synthetic oligonucleotide
gcgagttgggtgtgttgggatcggcagttggctcgaccctcattgaaggtagtgctggga

SEQ ID NO: 42447 - DNA, 60 bp, Artificial
  Synthetic oligonucleotide
gtccaaccatgggcgaagcgcacaattccaagtcaagcgacgctgcctacgtgtgcaaga

SEQ ID NO: 42448 - DNA, 60 bp, Artificial
  Synthetic oligonucleotide
cagccggcataatgaagaacgcagtggttgatggcatcgtggctacagacataccgcccc

SEQ ID NO: 42449 - DNA, 60 bp, Artificial
  Synthetic oligonucleotide
gttggacaacgtccatgttcaaggaggagtggtggcccaactgtatacgcctgaaaggga

SEQ ID NO: 42450 - DNA, 60 bp, Artificial
  Synthetic oligonucleotide
gttccaagtggcctcagcaaatgtcgagtaccatgacagaaagtggtgcttcgacggacc

SEQ ID NO: 42451 - DNA, 60 bp, Artificial
  Synthetic oligonucleotide
ggaatttgcatccgggaaaaggtcagccttgagcatccttgacttgattgcggtcctccc

SEQ ID NO: 42452 - DNA, 60 bp, Artificial
  Synthetic oligonucleotide
actaggaagacttccgagcggtcgcaacctcgtggaaggcgacagcctatccccaaggct

SEQ ID NO: 42453 - DNA, 60 bp, Artificial
  Synthetic oligonucleotide
ggtcacattaagccatagtacggaacaaactatgctacctgtgagccccgtccaaggacg

SEQ ID NO: 42454 - DNA, 60 bp, Artificial
  Synthetic oligonucleotide
ccgcgtgtcaactgtttcacagttggcgaagagattctcaaaaggattgctctcaggcca

SEQ ID NO: 42455 - DNA, 60 bp, Artificial
  Synthetic oligonucleotide
tgagcacgattcccaaacctcaaagaaaaaccaaacgtaacaccaaccgtcgcccacagg

SEQ ID NO: 42456 - DNA, 51 bp, Artificial
  Synthetic oligonucleotide
taaggtcatcgatacccttacgtgcggcttcgccgacctcatggggtacat

SEQ ID NO: 42457 - DNA, 53 bp, Artificial
  Synthetic oligonucleotide
actggaggaggttcccgccctccccgccccaggggtctccccgctgggtaaaa

SEQ ID NO: 42458 - DNA, 60 bp, Artificial
  Synthetic oligonucleotide
cgcactccatcgccagcacttatctcggttactgagagcagcccagatgagaagaccccg

SEQ ID NO: 42459 - DNA, 59 bp, Artificial
  Synthetic oligonucleotide
ccccgtactccatcgccagcacttatctcggttactgagagcagctcagatgagaagac

SEQ ID NO: 42460 - DNA, 58 bp, Artificial
  Synthetic oligonucleotide
ccccgcactccatcgccagcacttatctcggttactgagagcagctcagatgagaaga

SEQ ID NO: 42461 - DNA, 60 bp, Artificial
  Synthetic oligonucleotide
agtacaccctctctttgtggtagtagccgagagatgcctgtgtggggagaagacatcccc

SEQ ID NO: 42462 - DNA, 60 bp, Artificial
  Synthetic oligonucleotide
taaggactgttaggccacatgctgccatgggctggggatctaaggtgtcggtcaaggact

SEQ ID NO: 42463 - DNA, 60 bp, Artificial
  Synthetic oligonucleotide
gggtgcttggtgggcaatgaacttacctttgaatgtgataagtgtgaggctaggcaagag

SEQ ID NO: 42464 - DNA, 56 bp, Artificial
  Synthetic oligonucleotide
cttggtgggcaatgaacttacctttgaatgtgacaagtgtgaggctaggcaagaaa

SEQ ID NO: 42465 - DNA, 57 bp, Artificial
  Synthetic oligonucleotide
cttggtgggcaatgaacttacctttgaatgtgacaagtgtgaggccaggcaagaaac

SEQ ID NO: 42466 - DNA, 60 bp, Artificial
  Synthetic oligonucleotide
taaggccacatgctgccatgggctggggatctaaggtgtcggtcaaagacttggccaccc

SEQ ID NO: 42467 - DNA, 60 bp, Artificial
  Synthetic oligonucleotide
gactgtaaggccacatgctgccatgggctggggatctaaggtgtcagtcaaggatcttgc

SEQ ID NO: 42468 - DNA, 60 bp, Artificial
  Synthetic oligonucleotide
ggtgatgacagggttggtaggtcgtaaatcccggtcaccttggtagccactataggtggg

SEQ ID NO: 42469 - DNA, 60 bp, Artificial
  Synthetic oligonucleotide
gggttggtaggtcgtaaatcccggtcaccttggtagccactataggtgggtcttaagaga

SEQ ID NO: 42470 - DNA, 60 bp, Artificial
  Synthetic oligonucleotide
cgactcggcgaccggccaaaaggtggtggatgggtgatgacagggttggtaggtcgtaaa

SEQ ID NO: 42471 - DNA, 60 bp, Artificial
  Synthetic oligonucleotide
cgaccggccaaaaggtggtggatgggtgatgacagggttggtaggtcgtaaatcccggtc

SEQ ID NO: 42472 - DNA, 60 bp, Artificial
  Synthetic oligonucleotide
cgccgactcggcgaccggccaaaaggtggtggatgggtgatgacagggttggtaggtcgt

SEQ ID NO: 42473 - DNA, 60 bp, Artificial
  Synthetic oligonucleotide
tggtgactgatcatcaccggaggaggttcccgccctccccgccccaggggtctccccgct

SEQ ID NO: 42474 - DNA, 53 bp, Artificial
  Synthetic oligonucleotide
tcgggtgaactaaattcatctgttgcggcaaggtccagtgactgatcatcact

SEQ ID NO: 42475 - DNA, 60 bp, Artificial
  Synthetic oligonucleotide
gccctgctcatcgtggccctcttcgggtgaactaaattcatctgttgcggcaaggtctgg

SEQ ID NO: 42476 - DNA, 60 bp, Artificial
  Synthetic oligonucleotide
gccctgctcatcgtagccctcttcgggtgaactaaattcatctgttgcggcaaggtctgg

SEQ ID NO: 42477 - DNA, 58 bp, Artificial
  Synthetic oligonucleotide
cgtggccctccacggaccagcagcgttgagggttaccgcagacacaactaagacaaaa

SEQ ID NO: 42478 - DNA, 60 bp, Artificial
  Synthetic oligonucleotide
catcatcgtggccctccacggaccagcagcgttgagggttaccgcagacacaaccaaaac

SEQ ID NO: 42479 - DNA, 60 bp, Artificial
  Synthetic oligonucleotide
catcatcgtggccctccacggaccagcagcgttgagggttaccgcagacacaactaagac

SEQ ID NO: 42480 - DNA, 60 bp, Artificial
  Synthetic oligonucleotide
tgcctaacatcatcgtggccctccacggaccagcagcgttgagggttaccgcagacacaa

SEQ ID NO: 42481 - DNA, 60 bp, Artificial
  Synthetic oligonucleotide
tacaagtttccactggacaaactgcctaacatcatcgtggccctccacggaccagcagcg

SEQ ID NO: 42482 - DNA, 60 bp, Artificial
  Synthetic oligonucleotide
aaggccacatgctgccatgggctggggatctaaggtgtcggttaaggacttagccacccc

SEQ ID NO: 42483 - DNA, 57 bp, Artificial
  Synthetic oligonucleotide
aactggcccctcttggtgggtgttcagcggaccatgtgccgggaaacactgtctccc

SEQ ID NO: 42484 - DNA, 60 bp, Artificial
  Synthetic oligonucleotide
cccgccatggtctatggccctgggcaaagtgttaccattgacggggagcgctacaccctg

SEQ ID NO: 42485 - DNA, 60 bp, Artificial
  Synthetic oligonucleotide
atgcctgaacggcctgctgttcacgactttccatggggcttcatcccgaaccatcgccac

SEQ ID NO: 42486 - DNA, 60 bp, Artificial
  Synthetic oligonucleotide
gaggtgacccttgatcccaccattaccatctccctgcggacagtgcctgcttcggctgaa

SEQ ID NO: 42487 - DNA, 60 bp, Artificial
  Synthetic oligonucleotide
atgttagctgggcaaaagttcgcggcgtcaactggcccctcttggtgggtgttcagcgga

SEQ ID NO: 42488 - DNA, 60 bp, Artificial
  Synthetic oligonucleotide
tagctgggcaaaagttcgcggcgtcaactggcccctcttggtgggtgttcagcggaccat

SEQ ID NO: 42489 - DNA, 60 bp, Artificial
  Synthetic oligonucleotide
cacccagctccgcggcggcctgcagccggggtagcccaagaacccttcgggtgagggcgg

SEQ ID NO: 42490 - DNA, 60 bp, Artificial
  Synthetic oligonucleotide
acccagctccgcggcggcctgcagccggggtagcccaagaatccttcgggtgagggcggg

SEQ ID NO: 42491 - DNA, 60 bp, Artificial
  Synthetic oligonucleotide
gctccgcggcggcctgcagccggggtagcccaagaatccttcgggtgagggcgggtggca

SEQ ID NO: 42492 - DNA, 60 bp, Artificial
  Synthetic oligonucleotide
aacatgcttgaacggcctgctgttcacgaccttccatggggcttcatcccgaaccatcgc

SEQ ID NO: 42493 - DNA, 60 bp, Artificial
  Synthetic oligonucleotide
ggccacccagctccgcggcggcctgcagccggggtagcccaagaatccttcgggtgaggg

SEQ ID NO: 42494 - DNA, 60 bp, Artificial
  Synthetic oligonucleotide
aaatgcatggggccactcagctccgcggcggcctgcagccggggtagcccaagaatcctt

SEQ ID NO: 42495 - DNA, 60 bp, Artificial
  Synthetic oligonucleotide
cgacgcccacgtacggtccacgtcgcccttcaatgtctctcttgaccaataggcttagcc

SEQ ID NO: 42496 - DNA, 60 bp, Artificial
  Synthetic oligonucleotide
acgacgcccacgtacggtccacgtcgcccttcaatgtcgctcttgaccaataggcttagc

SEQ ID NO: 42497 - DNA, 60 bp, Artificial
  Synthetic oligonucleotide
ccgggaaatgcatggggccacccagctccgcggcggcctgcagccggggtagcccaagaa

SEQ ID NO: 42498 - DNA, 60 bp, Artificial
  Synthetic oligonucleotide
cgacgcccacgtacggtccacgtcgcccttcaatgtctctcttgaccaataggctaagcc

SEQ ID NO: 42499 - DNA, 60 bp, Artificial
  Synthetic oligonucleotide
gtgggtcttaagagaaggttaagattcctcttgtgcctgcggcgagaccgcgcacggtcc

SEQ ID NO: 42500 - DNA, 60 bp, Artificial
  Synthetic oligonucleotide
catcctggtagccactataggtgggtcttaagagaaggttaagattcctcttgtgcctgc

SEQ ID NO: 42501 - DNA, 60 bp, Artificial
  Synthetic oligonucleotide
acgacgcccacgtacggtccacgtcgcccttcaatgtctctcttgaccaataggcgtagc

SEQ ID NO: 42502 - DNA, 52 bp, Artificial
  Synthetic oligonucleotide
catcacccagacacagacagtctgacaaggaggtgatgtgtgactcggaaaa

SEQ ID NO: 42503 - DNA, 60 bp, Artificial
  Synthetic oligonucleotide
tgaaacagtacaggtccatgccttcccaccggggagggcgcatgaggtgcatcagtgcca

SEQ ID NO: 42504 - DNA, 60 bp, Artificial
  Synthetic oligonucleotide
cggtggtcagatcgttggtggagtttacctgttgccgcgcaggggccccaggttgggtgt

SEQ ID NO: 42505 - DNA, 60 bp, Artificial
  Synthetic oligonucleotide
tctgtgtggaccgacaaggacagttccaaatcggaagcttgcttaacacagttctaacag

SEQ ID NO: 42506 - DNA, 60 bp, Artificial
  Synthetic oligonucleotide
gttgttagtctgtgtggaccgacaaggacagttccaaatcggaagcttgcttaacacagt

SEQ ID NO: 42507 - DNA, 60 bp, Artificial
  Synthetic oligonucleotide
ctgtgtggaccgacaaggacagttccaaatcggaagcttgcttaacacagttctaacagt

SEQ ID NO: 42508 - DNA, 60 bp, Artificial
  Synthetic oligonucleotide
tctgtgtggaccgacgaggacagttccaaatcggaagcttgcttaacacagttctaacag

SEQ ID NO: 42509 - DNA, 60 bp, Artificial
  Synthetic oligonucleotide
ccctcagaaccgtctcggaaggaggaccccacatgttgtaacttcaaagcccaatgtcag

SEQ ID NO: 42510 - DNA, 60 bp, Artificial
  Synthetic oligonucleotide
tgtaagccctcagaaccgtctcggaaggaggaccccacatgttgtaacttcaaagcccaa

SEQ ID NO: 42511 - DNA, 60 bp, Artificial
  Synthetic oligonucleotide
gataccatcatcagtctggaatgttggcaaatatgtgtgtgttagaccagactggtggcc

SEQ ID NO: 42512 - DNA, 52 bp, Artificial
  Synthetic oligonucleotide
ccccacatgcggcttcgccgacctcatggggtacattccgctcgtcggcgcc

SEQ ID NO: 42513 - DNA, 60 bp, Artificial
  Synthetic oligonucleotide
ccaaccgctacgaatacagcctgatagggtgctgcagaggcccactgtattgctactgaa

SEQ ID NO: 42514 - DNA, 55 bp, Artificial
  Synthetic oligonucleotide
ccctcacatgcggcttcgccgacctcatggggtacatcccgctcgtcggcgcccc

SEQ ID NO: 42515 - DNA, 60 bp, Artificial
  Synthetic oligonucleotide
cttaacgtagttctaacagttttttattagagagcagatctctgatgaacaaccaacgaa

SEQ ID NO: 42516 - DNA, 60 bp, Artificial
  Synthetic oligonucleotide
actccgctggggagtgcggcctgcgcagccccaggaggactgggttaacaaagccgttga

SEQ ID NO: 42517 - DNA, 60 bp, Artificial
  Synthetic oligonucleotide
aggacgtcaagttcccgggcggcggccagatcgttggtggagtttacttgttgccgcgca

SEQ ID NO: 42518 - DNA, 60 bp, Artificial
  Synthetic oligonucleotide
gacagcgctaatggtaataggaatggccatgacaacggtgttttcaattccacatgacct

SEQ ID NO: 42519 - DNA, 51 bp, Artificial
  Synthetic oligonucleotide
aaaacagcatattgacgctgggaaagaccagagatcctgctgtctccccag

SEQ ID NO: 42520 - DNA, 50 bp, Artificial
  Synthetic oligonucleotide
atgctatgtggacgagggcatgcccaagacacaccttaaccctggcgggg

SEQ ID NO: 42521 - DNA, 60 bp, Artificial
  Synthetic oligonucleotide
atgctaagtggacgagggcatgcccaagacacaccttaaccctggcaggggtcgccaggg

SEQ ID NO: 42522 - DNA, 60 bp, Artificial
  Synthetic oligonucleotide
ggaacctgggtaaatatgtgtgtgttagaccagactggtggccatatgaaacaaccgtgg

SEQ ID NO: 42523 - DNA, 60 bp, Artificial
  Synthetic oligonucleotide
gaagttgagtagacggtgctgcctgcggctcaaccccaggaggactgggtgaacaaagcc

SEQ ID NO: 42524 - DNA, 60 bp, Artificial
  Synthetic oligonucleotide
cggcgtgaactatgcaacagggaatctgcccggttgctccttttctatcttcctcttggc

SEQ ID NO: 42525 - DNA, 60 bp, Artificial
  Synthetic oligonucleotide
ggctcacacaccgatggcaccagcctgggagcaccataggcaaggcgtttagagtgacaa

SEQ ID NO: 42526 - DNA, 60 bp, Artificial
  Synthetic oligonucleotide
agagttgttacggaaatgccttgagcggcggctgcggaccttagtgctggctccgaccaa

SEQ ID NO: 42527 - DNA, 60 bp, Artificial
  Synthetic oligonucleotide
tggaggatcagcggccaacagcgtggtttctgccatcgattcgctgtgcgaacgtgatgg

SEQ ID NO: 42528 - DNA, 60 bp, Artificial
  Synthetic oligonucleotide
ggaagtgataattatggatgaagcccatttcttggatccacatagtattgcggtgcgggg

SEQ ID NO: 42529 - DNA, 60 bp, Artificial
  Synthetic oligonucleotide
gaccgacaccacaccatttggacagcagagagttttcaaggagaaggtggacaccaagcc

SEQ ID NO: 42530 - DNA, 60 bp, Artificial
  Synthetic oligonucleotide
ggagcttgctagcataatacaggcaacgagtgagcgtggggcctgcggcctgaactcagt

SEQ ID NO: 42531 - DNA, 60 bp, Artificial
  Synthetic oligonucleotide
ggtgtcacatctggcaatggttgccgtcatggacctgagagcgggtttcgtcacgggcta

SEQ ID NO: 42532 - DNA, 60 bp, Artificial
  Synthetic oligonucleotide
ccccgaacccatgctcagtactatgtgtgtggcgtcagtcgcgtccatgaccatgggaat

SEQ ID NO: 42533 - DNA, 60 bp, Artificial
  Synthetic oligonucleotide
caaagtgctatgcccatacacgccgctcgtgatggaagaaatggcccgcctgcaaagggt

SEQ ID NO: 42534 - DNA, 60 bp, Artificial
  Synthetic oligonucleotide
caagaatatgtttgaggagcaccttgtgaaaagctgggtgtcggctgcagatggaaggcg

SEQ ID NO: 42535 - DNA, 60 bp, Artificial
  Synthetic oligonucleotide
cttgggtcttatatcacaaggggcggaggaacagctgcatcaatgctaaatggggtggtg

SEQ ID NO: 42536 - DNA, 60 bp, Artificial
  Synthetic oligonucleotide
gaataaggactttgtgtctgccatcgctcaggctgactcatgtgacctgcgtaccccaga

SEQ ID NO: 42537 - DNA, 60 bp, Artificial
  Synthetic oligonucleotide
agctttgcacaagaaaggaaaatgcaggacgtgcgtgtacaacatgatgggaaaaaggga

SEQ ID NO: 42538 - DNA, 60 bp, Artificial
  Synthetic oligonucleotide
ggctgggagtgaacgccagaaatggcacgttgacccttgtgctgctcataactggtggtg

SEQ ID NO: 42539 - DNA, 60 bp, Artificial
  Synthetic oligonucleotide
gccaacgtgttcacactccgcagcacactggccacaaccgaagctgtcgtcttgatcacc

SEQ ID NO: 42540 - DNA, 60 bp, Artificial
  Synthetic oligonucleotide
cggcaagaacacagaggctcgggacaggtggtcacttatgcattcaacaccattaccaac

SEQ ID NO: 42541 - DNA, 60 bp, Artificial
  Synthetic oligonucleotide
cctggagtttgaagccctaggtttcttgaatgaggaccactggattgccagacgccactc

SEQ ID NO: 42542 - DNA, 60 bp, Artificial
  Synthetic oligonucleotide
ctacgcagatgactcagcgggatgggacacaagaatcaccatagcggacctggaagacga

SEQ ID NO: 42543 - DNA, 60 bp, Artificial
  Synthetic oligonucleotide
cagtcgagatcacgagccacataacggaagggttgaacacccgccaggaaacgtgggcca

SEQ ID NO: 42544 - DNA, 60 bp, Artificial
  Synthetic oligonucleotide
cgtgaccaaaacgaatgccccgatagccaacgggtgtggaactctttcattctggaagag

SEQ ID NO: 42545 - DNA, 60 bp, Artificial
  Synthetic oligonucleotide
ccgacacactgcgctgctggctgagagaaaatgggatagatcgcctagagcggatggcag

SEQ ID NO: 42546 - DNA, 60 bp, Artificial
  Synthetic oligonucleotide
gaagcggagaccgaaggaacctctgaacgctttgacgtagctgtgaaccacaacggagag

SEQ ID NO: 42547 - DNA, 59 bp, Artificial
  Synthetic oligonucleotide
ggggaccaggaaggggctgtaaaacttgccatgagtggggccaccagactgcaactctc

SEQ ID NO: 42548 - DNA, 60 bp, Artificial
  Synthetic oligonucleotide
atatggttccgtggagcgcgtccaacccatctggagtgacgcccggatgtttgtggatgg

SEQ ID NO: 42549 - DNA, 60 bp, Artificial
  Synthetic oligonucleotide
tacaaacggctctctccccgaaagcatgtatggttggtgggtgtcctcttgctggtagcc

SEQ ID NO: 42550 - DNA, 60 bp, Artificial
  Synthetic oligonucleotide
ccctgttactgttcacaactacatcccgggctatgcgacgcagacccacggtgcttggca

SEQ ID NO: 42551 - DNA, 60 bp, Artificial
  Synthetic oligonucleotide
gttgtaaatgaaaatcttggaataaagtcaggccgcagcgtctaaaaccggagcctccgc

SEQ ID NO: 42552 - DNA, 60 bp, Artificial
  Synthetic oligonucleotide
tgggcaatgctcggactactagctctgaaccccatggggtcgaagttggttgcaaagaca

SEQ ID NO: 42553 - DNA, 60 bp, Artificial
  Synthetic oligonucleotide
cggtgacacaagtgaagacaactcagaccttgtgtgctggaaggaggccctcttgctgct

SEQ ID NO: 42554 - DNA, 60 bp, Artificial
  Synthetic oligonucleotide
ggcgcgaacctccctgtagaacgagtcatagacggaaggacatgcatgcgaccagtgtta

SEQ ID NO: 42555 - DNA, 60 bp, Artificial
  Synthetic oligonucleotide
aagtggatgtggaaacgaactgccagagacgcggagcctcagtgcgatcgaccacgcaga

SEQ ID NO: 42556 - DNA, 59 bp, Artificial
  Synthetic oligonucleotide
tcacgatgtccgacagcctgacagtgacaaagaaccaaggagtcatagtgaccacaaac

SEQ ID NO: 42557 - DNA, 60 bp, Artificial
  Synthetic oligonucleotide
gacagcgaaaaggagcatggactggacagatggaattactgtgctgggagttgtggccgc

SEQ ID NO: 42558 - DNA, 60 bp, Artificial
  Synthetic oligonucleotide
gacgctggatctagggacacgcctagtggaacacgagcttggtccgatcagcatggatgc

SEQ ID NO: 42559 - DNA, 60 bp, Artificial
  Synthetic oligonucleotide
ccatctgtggctagagaaaccagaaaattctcagggcaggtgccggatggggtgtatgcc

SEQ ID NO: 42560 - DNA, 60 bp, Artificial
  Synthetic oligonucleotide
caagcaaatgaggacaatgccagtgaacggctcatggatgtcttttgacctgcgaccagg

SEQ ID NO: 42561 - DNA, 60 bp, Artificial
  Synthetic oligonucleotide
agcggtcaagaaggtgctggcattcactctaggaacccaaggacatgaaaaacccctcat

SEQ ID NO: 42562 - DNA, 60 bp, Artificial
  Synthetic oligonucleotide
gccatttccttgcaaggcatcacccagagcgcagcagctttcttccaaatggacaaaggc

SEQ ID NO: 42563 - DNA, 60 bp, Artificial
  Synthetic oligonucleotide
gtggtgatcgggagccttcttctgctcattgctccggcttacagcactcactgcaccagc

SEQ ID NO: 42564 - DNA, 60 bp, Artificial
  Synthetic oligonucleotide
ctgtccccgttgactgggtcccgacaggaagaacgacatggtccttgcatggaaaaggtg

SEQ ID NO: 42565 - DNA, 60 bp, Artificial
  Synthetic oligonucleotide
ggtgtccagatagcacaacataccaatgccccaccctcactgaaaacgaacatccagaag

SEQ ID NO: 42566 - DNA, 60 bp, Artificial
  Synthetic oligonucleotide
gcaaggatatccccagggaatgggtggatggtgagggaaactgggccgctgagcaaagct

SEQ ID NO: 42567 - DNA, 60 bp, Artificial
  Synthetic oligonucleotide
ctgtgttccactggtccttggtcctgccagggctgcgcgcgaaattggcgaaaatggcat

SEQ ID NO: 42568 - DNA, 60 bp, Artificial
  Synthetic oligonucleotide
ccagtgtgaaaagtgatctgatcagctatggtggcaactggaaactcaattcacgatggg

SEQ ID NO: 42569 - DNA, 60 bp, Artificial
  Synthetic oligonucleotide
ctcagacgataaacccagcttggacatatggctagactcagtcactataaatggcccacc

SEQ ID NO: 42570 - DNA, 60 bp, Artificial
  Synthetic oligonucleotide
acttctagcccggaagcgtcgaagttccgccacgcacctatggcttctgttcacactcgg

SEQ ID NO: 42571 - DNA, 60 bp, Artificial
  Synthetic oligonucleotide
agcgaggcttcgtcaaactggcaggaacggttgtagacttgggatgtgggcgtggtggct

SEQ ID NO: 42572 - DNA, 60 bp, Artificial
  Synthetic oligonucleotide
agtaaattttgcgtgctagtcgcttggcgttagtccgtgaagtgagtttttggatacatt

SEQ ID NO: 42573 - DNA, 60 bp, Artificial
  Synthetic oligonucleotide
gcaaaatttgcatgcgcacacgacatgcaactgcatgaaattggccaggacaaggtgcac

SEQ ID NO: 42574 - DNA, 60 bp, Artificial
  Synthetic oligonucleotide
tctcatcagcactggccatgctctatggagtgtgcgaggcaatcgccgaggtggtggagg

SEQ ID NO: 42575 - DNA, 60 bp, Artificial
  Synthetic oligonucleotide
acccgggaagccccgggtcgtcaatatgctaaaacgcggcataccccgcgtattcccact

SEQ ID NO: 42576 - DNA, 60 bp, Artificial
  Synthetic oligonucleotide
aggtccttcgcaagaggtggacagccaagatcagcatgccagccatactgattgctctgc

SEQ ID NO: 42577 - DNA, 60 bp, Artificial
  Synthetic oligonucleotide
agtttacctgttgccgcgcaggggccccaggttgggtgtgcgcgcacctaggaagacttc

SEQ ID NO: 42578 - DNA, 60 bp, Artificial
  Synthetic oligonucleotide
ttacctgttgccgcgcaggggccccaggttgggtgtgcgcgcgactaggaaggcttccga

SEQ ID NO: 42579 - DNA, 60 bp, Artificial
  Synthetic oligonucleotide
ttacctgttgccgcgcaggggccccaggttgggtgtgcgcgcgatcaggaagacttccga

SEQ ID NO: 42580 - DNA, 60 bp, Artificial
  Synthetic oligonucleotide
ttacctgttgccgcgcaggggccccaggttgggtgtgcgtgcgactaggaaggcttccga

SEQ ID NO: 42581 - DNA, 60 bp, Artificial
  Synthetic oligonucleotide
ttacctgttgccgcgcaggggccccaggttgggtgtgcgcgcgcccaggaagacttccga

SEQ ID NO: 42582 - DNA, 60 bp, Artificial
  Synthetic oligonucleotide
ttacctgttgccgcgcaggggccccaggttgggtgtgcgcgcgctcaggaagacttccga

SEQ ID NO: 42583 - DNA, 60 bp, Artificial
  Synthetic oligonucleotide
ttacctgttgccgcgcaggggccccaggttgggtgtgcgcgcgaccaggaagacttccga

SEQ ID NO: 42584 - DNA, 60 bp, Artificial
  Synthetic oligonucleotide
ttacctgttgccgcgcaggggccccaggttgggtgtgcgcgcgactaggaaaacttccga

SEQ ID NO: 42585 - DNA, 52 bp, Artificial
  Synthetic oligonucleotide
ttacctgttgccgcgcaggggccccaggttgggtgtgcgcgcgactaggaag

SEQ ID NO: 42586 - DNA, 60 bp, Artificial
  Synthetic oligonucleotide
ttacctgttgccgcgcaggggccccaggttgggtgtgcgcgcgcctaggaagacttccga

SEQ ID NO: 42587 - DNA, 60 bp, Artificial
  Synthetic oligonucleotide
agtttacctgttgccgcgcaggggccccaggttgggtgtgcgcgcgcctaggaagacttc

SEQ ID NO: 42588 - DNA, 60 bp, Artificial
  Synthetic oligonucleotide
agtttacctgttgccgcgcaggggccccaggttgggtgtgcgtgcgactaggaagacttc

SEQ ID NO: 42589 - DNA, 60 bp, Artificial
  Synthetic oligonucleotide
aagaactgatcatcaaacacaaagtgaggaatgaagtgatggtccactggtttggcgacg

SEQ ID NO: 42590 - DNA, 60 bp, Artificial
  Synthetic oligonucleotide
ccatagtggtctgcggaaccggtgagtacaccggaattgccaggatgaccgggtcctttc

SEQ ID NO: 42591 - DNA, 60 bp, Artificial
  Synthetic oligonucleotide
catagtggtctgcggaaccggtgagtacaccggaattgccaggatgaccgggtcctttcc

SEQ ID NO: 42592 - DNA, 60 bp, Artificial
  Synthetic oligonucleotide
gagaaaccgcgtgtcaactgtttcacagttggcgaagagattctcaaaaggattgctttc

SEQ ID NO: 42593 - DNA, 50 bp, Artificial
  Synthetic oligonucleotide
agcgtctagccatggcgttagtatgagtgtcgtgcagcctccaggacccc

SEQ ID NO: 42594 - DNA, 60 bp, Artificial
  Synthetic oligonucleotide
gggtagacggtgctgtctgcgtctcagtcccaggaggactgggttaacaaatctgacaac

SEQ ID NO: 42595 - DNA, 60 bp, Artificial
  Synthetic oligonucleotide
gggtagacggtgctgtctgcgtcccagtcccaggaggactgggttaacaaatctgacaac

SEQ ID NO: 42596 - DNA, 60 bp, Artificial
  Synthetic oligonucleotide
ggtgtccgggttctggaggacagcgtgaactatgcaacagggaatctccccggttgctct

SEQ ID NO: 42597 - DNA, 60 bp, Artificial
  Synthetic oligonucleotide
catcgaggaccagagactagaagacaccacccacctccagtatgcacccaacgccataaa

SEQ ID NO: 42598 - DNA, 60 bp, Artificial
  Synthetic oligonucleotide
cttcaacgccatgagtggaacaagcatggttggtgcaactggtacaatattgaaccctgg

SEQ ID NO: 42599 - DNA, 60 bp, Artificial
  Synthetic oligonucleotide
caacgccatgagtggaacaagcatggttggtgcaactggtacaatattgagccttggatt

SEQ ID NO: 42600 - DNA, 60 bp, Artificial
  Synthetic oligonucleotide
gactggctgggcttacacacaccaaggcgggataagttcagtcgaccatgtaaccgccgg

SEQ ID NO: 42601 - DNA, 58 bp, Artificial
  Synthetic oligonucleotide
tcgtccacctccaaaagacaggtggggaattcacgtgtgtcaccgcatcaggcacacc

SEQ ID NO: 42602 - DNA, 60 bp, Artificial
  Synthetic oligonucleotide
caacgccatgagtggaacaagcatggttggtgcaactggtacaatatcgaaccttggatt

SEQ ID NO: 42603 - DNA, 60 bp, Artificial
  Synthetic oligonucleotide
gactgcctgggcttacacacaccaaggcgggataagttcagtcgaccatgtaaccgccgg

SEQ ID NO: 42604 - DNA, 60 bp, Artificial
  Synthetic oligonucleotide
ctgatgtattcctggaacccgcttgttaggaggatttgcctattggtcctctcgcagaga

SEQ ID NO: 42605 - DNA, 60 bp, Artificial
  Synthetic oligonucleotide
cggtagccttcagtttcttgctgatgtattcctggaacccgcttgttaggaggatttgcc

SEQ ID NO: 42606 - DNA, 59 bp, Artificial
  Synthetic oligonucleotide
tagaggaccagagactagaagacaccacccacctccagtatgcacccaacgctataaaa

SEQ ID NO: 42607 - DNA, 60 bp, Artificial
  Synthetic oligonucleotide
cacgtgttgcagacttcaacgccatgagtggaacaagcatggttggtgcaactggtacaa

SEQ ID NO: 42608 - DNA, 60 bp, Artificial
  Synthetic oligonucleotide
cacagatatatacaccatagaggaccagagactagaagacaccacccacctccagtatgc

SEQ ID NO: 42609 - DNA, 60 bp, Artificial
  Synthetic oligonucleotide
caatgataacagacatatataccatcgaggaccagagactagaagacaccacccacctcc

SEQ ID NO: 42610 - DNA, 60 bp, Artificial
  Synthetic oligonucleotide
cacgtgttgcagacttcaacgccatgaatggaacaagcatggttggtgcaactggtacaa

SEQ ID NO: 42611 - DNA, 59 bp, Artificial
  Synthetic oligonucleotide
ggggacatggcaactgggataacctatgcatcatacgggtacttctgccagatgcctca

SEQ ID NO: 42612 - DNA, 60 bp, Artificial
  Synthetic oligonucleotide
ataatggccaggactgatcacccagagccaatccaacttgcatacaacagctacgaggtc

SEQ ID NO: 42613 - DNA, 60 bp, Artificial
  Synthetic oligonucleotide
agtcgtcagtggttcgacgcctcggtataaaggtctcgagatgccacgtggacgagggca

SEQ ID NO: 42614 - DNA, 60 bp, Artificial
  Synthetic oligonucleotide
tgcaaacactccatggtagacagaggatggggaaatggatgtggattatttggaaaggga

SEQ ID NO: 42615 - DNA, 60 bp, Artificial
  Synthetic oligonucleotide
gaagttcccgccaccggaagttgagtagacggtgctgcctgcgactcaaccccaggagga

SEQ ID NO: 42616 - DNA, 60 bp, Artificial
  Synthetic oligonucleotide
aagttgagtagacggtgctgcctgcgactcaaccccaggaggactgggtgaacaaagccg

SEQ ID NO: 42617 - DNA, 60 bp, Artificial
  Synthetic oligonucleotide
ggaagttcccgccaccggaagttgagtagacggtgctgcctgcgactcaaccccaggagg

SEQ ID NO: 42618 - DNA, 60 bp, Artificial
  Synthetic oligonucleotide
cgcgagtgagaagaccaactacacgtgttgcaggttgcaaagacatgagtggaacaaaca

SEQ ID NO: 42619 - DNA, 60 bp, Artificial
  Synthetic oligonucleotide
cgcgagtgagaagaccaactacacgtgttgcaggttgcaaagacatgaatggaacaaaca

SEQ ID NO: 42620 - DNA, 60 bp, Artificial
  Synthetic oligonucleotide
gggtctagaggttagaggagaccctccagggaaattagtgggaccatattgacgcctggg

SEQ ID NO: 42621 - DNA, 60 bp, Artificial
  Synthetic oligonucleotide
gggtctagaggttagaggagaccctccagggaaattagtgggaccatattgacgccaggg

SEQ ID NO: 42622 - DNA, 60 bp, Artificial
  Synthetic oligonucleotide
taaatcctgtgtgctaattgaggtgcattggtctgcaaatcgagttgctaggcaataaac

SEQ ID NO: 42623 - DNA, 60 bp, Artificial
  Synthetic oligonucleotide
cacacttggacagaacagtacaaatttcaaccagagtccccagcgagactagcgtctgca

SEQ ID NO: 42624 - DNA, 60 bp, Artificial
  Synthetic oligonucleotide
gatgggtcaatggtgattcgtgctgaagggcgagatgctgcaacccaggttagagtggag

SEQ ID NO: 42625 - DNA, 60 bp, Artificial
  Synthetic oligonucleotide
ggaaggcccggttgaacagctgcacaaaagaggagttcttcgcctaccgcagagctggag

SEQ ID NO: 42626 - DNA, 60 bp, Artificial
  Synthetic oligonucleotide
actctggcactgcgtaagatcaagagaacggtgagcaccctcatggtaggcctgcaccgc

SEQ ID NO: 42627 - DNA, 60 bp, Artificial
  Synthetic oligonucleotide
gtcagtagttggcacgggctggacagccaagggacagatcacggtgttggatatgcaccc

SEQ ID NO: 42628 - DNA, 60 bp, Artificial
  Synthetic oligonucleotide
ggtgtgatgactcgttggcttacgaatgcgtgaccattgaccagggagaggaacccgttg

SEQ ID NO: 42629 - DNA, 60 bp, Artificial
  Synthetic oligonucleotide
cgtgctgattccgtcacacgcacagcgtgacctgaccgggcggggacaccaatggctcga

SEQ ID NO: 42630 - DNA, 60 bp, Artificial
  Synthetic oligonucleotide
ggagagtttgtggcagccaatgagactcactcagggaggaagtcagcctcgttcacagtg

SEQ ID NO: 42631 - DNA, 60 bp, Artificial
  Synthetic oligonucleotide
cgacggagctgcgccttgtgaaactttgtgagaccccttgcgtccagagaaggccgaact

SEQ ID NO: 42632 - DNA, 60 bp, Artificial
  Synthetic oligonucleotide
cgcgtcattgatggccggacaaacatcaaaccggaggaggtggacggcaggatcgaactc

SEQ ID NO: 42633 - DNA, 60 bp, Artificial
  Synthetic oligonucleotide
ggaaggtgagggtgtcattgaggtggcggactcccacaacccaagactgctacgtgtgga

SEQ ID NO: 42634 - DNA, 60 bp, Artificial
  Synthetic oligonucleotide
actcccttgccaaggaaaacagatgtgctttcgttctcatgacggcaacaccaccgggga

SEQ ID NO: 42635 - DNA, 60 bp, Artificial
  Synthetic oligonucleotide
gagggtaggacagcctggttcgttccgtcaattgccagaggaggagccatagcaagggct

SEQ ID NO: 42636 - DNA, 60 bp, Artificial
  Synthetic oligonucleotide
ctggcttccttgagtggtggtctgttttatgccgacgacactgctggctgggacacgagg

SEQ ID NO: 42637 - DNA, 60 bp, Artificial
  Synthetic oligonucleotide
tcctgagttctggagtcttgttgaggctgagagagagcgccacttgcaggggagatgcgc

SEQ ID NO: 42638 - DNA, 60 bp, Artificial
  Synthetic oligonucleotide
ggtgaatgactggctgcttgagcgactggtcaagaagagtcggccacgcatgtgctccag

SEQ ID NO: 42639 - DNA, 60 bp, Artificial
  Synthetic oligonucleotide
ccaggtgtttaggggcacacgcctgaggtaagcaagccccagggcgcattccggcagcac

SEQ ID NO: 42640 - DNA, 60 bp, Artificial
  Synthetic oligonucleotide
catgacgtccattgggagagccatgcacaccgtcctgggaggagcgtttaacaccctcct

SEQ ID NO: 42641 - DNA, 60 bp, Artificial
  Synthetic oligonucleotide
gcaagagagatcagagcgacaggggatggggtaaccattgtggactatttggcaaaggga

SEQ ID NO: 42642 - DNA, 60 bp, Artificial
  Synthetic oligonucleotide
gagcgaatggagctccgatgtggagaaggactggtggtatggagagaggtgtcagaatgg

SEQ ID NO: 42643 - DNA, 60 bp, Artificial
  Synthetic oligonucleotide
agcggagggtgaggcaaacctgactgttgtggtcgacaaggcagaccccagtgactacag

SEQ ID NO: 42644 - DNA, 60 bp, Artificial
  Synthetic oligonucleotide
ggattgttgcccaggattctcattgtggttgtggctctcgcattggcaccggcctacgcg

SEQ ID NO: 42645 - DNA, 60 bp, Artificial
  Synthetic oligonucleotide
agtggaaggaggtagagagtgcccctttgccagaaggaagacaggtgtgatgacggtggc

SEQ ID NO: 42646 - DNA, 60 bp, Artificial
  Synthetic oligonucleotide
gttgagctgattgtgacagacctgagaaactgcacttggccagctagccacaccattgac

SEQ ID NO: 42647 - DNA, 60 bp, Artificial
  Synthetic oligonucleotide
cttgcgcgtgcatgcgtgtgcttcagacagcccaggcagcgactgtgattgtggatattc

SEQ ID NO: 42648 - DNA, 60 bp, Artificial
  Synthetic oligonucleotide
gcagaggggaagacaggcattggtttgcttttggctgcattcatgacccagagtgacatg

SEQ ID NO: 42649 - DNA, 60 bp, Artificial
  Synthetic oligonucleotide
ggacatccagccggcaagatcatggggcacatatgttctggtggtatctttgttcacccc

SEQ ID NO: 42650 - DNA, 60 bp, Artificial
  Synthetic oligonucleotide
atcttcctgtgggccggaggtgttggctacgggaacatggctggggtggcactggtgttt

SEQ ID NO: 42651 - DNA, 60 bp, Artificial
  Synthetic oligonucleotide
ctcgacgagcgtcgaaagtggccccaaagaagacgcgtcagttgcgggtccaaatgccaa

SEQ ID NO: 42652 - DNA, 60 bp, Artificial
  Synthetic oligonucleotide
cctggagcatacatgcaagtggtgcctggatgacaaccgaagacatgctggaggtgtgga

SEQ ID NO: 42653 - DNA, 60 bp, Artificial
  Synthetic oligonucleotide
caccatggctggcctggcatgttgcggccaatgttgcttcagtgactgataggagctgga

SEQ ID NO: 42654 - DNA, 60 bp, Artificial
  Synthetic oligonucleotide
cgcgtcagacaagatgcccttggaaacttgcacctgactgaactggagaaggaggaacgc

SEQ ID NO: 42655 - DNA, 60 bp, Artificial
  Synthetic oligonucleotide
ccagcggttatgagtgtgagagcatacaccatcggtggaaagggacatgaatcaccacgc

SEQ ID NO: 42656 - DNA, 60 bp, Artificial
  Synthetic oligonucleotide
ctgggctgatgtgcgggaggatgtggtttgttatggaggcgcctggagtctggaaagcag

SEQ ID NO: 42657 - DNA, 60 bp, Artificial
  Synthetic oligonucleotide
gtgtgttcaaggtcttggctccttatcgtcccgaggtaatagaggcactgcacaggttcc

SEQ ID NO: 42658 - DNA, 60 bp, Artificial
  Synthetic oligonucleotide
ctctatgagaggaagctcagccttatcctggctttggtgttgtgcttggcctcggtggtc

SEQ ID NO: 42659 - DNA, 60 bp, Artificial
  Synthetic oligonucleotide
ttctggaagacgcagtgtgggagatgtgctcatgggaatgtctggggtgccagcgctcct

SEQ ID NO: 42660 - DNA, 60 bp, Artificial
  Synthetic oligonucleotide
cggctttccacctggccatagtggtgtcgggactggaggcagagttaacacaaagggctc

SEQ ID NO: 42661 - DNA, 60 bp, Artificial
  Synthetic oligonucleotide
gacagcggtcatgacaccgtggtcatggaggttggcttctcgggaactaggccttgcaga

SEQ ID NO: 42662 - DNA, 60 bp, Artificial
  Synthetic oligonucleotide
cggctggagtgtgcgggagacggcctgtctatcgaaggcttacggacaaatgtggctgtt

SEQ ID NO: 42663 - DNA, 60 bp, Artificial
  Synthetic oligonucleotide
cagtggaaagaggcccagatactcttggacaacatcacaacagcaagagggccggttgcc

SEQ ID NO: 42664 - DNA, 60 bp, Artificial
  Synthetic oligonucleotide
cctggaacccgagtgaccattgacaaggcatgtgacaagagaggggcgtcggtgagaagc

SEQ ID NO: 42665 - DNA, 60 bp, Artificial
  Synthetic oligonucleotide
gcccacagcatggcaggtgcatcgtgactggtttaatgatctggccctcccttggaagca

SEQ ID NO: 42666 - DNA, 60 bp, Artificial
  Synthetic oligonucleotide
gggagccctcaaccggattcgctagctgggaagaggtccccttttgctcacaccactttc

SEQ ID NO: 42667 - DNA, 60 bp, Artificial
  Synthetic oligonucleotide
gggcacggtgatctggggaggcattgccattctggctcttttggtgacgggactagtctc

SEQ ID NO: 42668 - DNA, 60 bp, Artificial
  Synthetic oligonucleotide
gccatggcgctggcggctttccttctactcatgctcacgcttggaactaggaaaatgcag

SEQ ID NO: 42669 - DNA, 60 bp, Artificial
  Synthetic oligonucleotide
ggggtcgtgaagcttctcagttggccatggaatgctagggaagatgtggtgcggatggca

SEQ ID NO: 42670 - DNA, 60 bp, Artificial
  Synthetic oligonucleotide
tgatccttttcagttgggccttctggtcgtgttcttggccacccaggaggtccttcgcaa

SEQ ID NO: 42671 - DNA, 60 bp, Artificial
  Synthetic oligonucleotide
tgacccttttcagttgggccttctggtcgtgttcttggccacccaggaggtccttcgcaa

SEQ ID NO: 42672 - DNA, 60 bp, Artificial
  Synthetic oligonucleotide
gattgatccttttcagttgggccttctggtcgtgttcttggccacccaggaggtccttcg

SEQ ID NO: 42673 - DNA, 60 bp, Artificial
  Synthetic oligonucleotide
tagcagactagtggttagaggagacccctcccaaaacacaacgcagcagcggggcccaac

SEQ ID NO: 42674 - DNA, 60 bp, Artificial
  Synthetic oligonucleotide
tagcagactagtggttagaggagacccctcccaagatacaacgcagcagcggggcccaac

SEQ ID NO: 42675 - DNA, 60 bp, Artificial
  Synthetic oligonucleotide
ggtagcagactagtggttagaggagacccctcccgaaatataacgcagcagcggggccca

SEQ ID NO: 42676 - DNA, 60 bp, Artificial
  Synthetic oligonucleotide
ggtagcagactagtggttagaggagacccctcccaaaacataacgcagcagcggggccca

SEQ ID NO: 42677 - DNA, 60 bp, Artificial
  Synthetic oligonucleotide
tagcagactagtggttagaggagacccctcccaagacataacgcagcagcggggcccaac

SEQ ID NO: 42678 - DNA, 60 bp, Artificial
  Synthetic oligonucleotide
aaaaggcgaggccacagaccatggaatgctgcggcagcgcgcgagagcgacggggaaatg

SEQ ID NO: 42679 - DNA, 60 bp, Artificial
  Synthetic oligonucleotide
accttggagatcaaactggggtgttgctaaagtcacttgctggggttcctgtggcgcaca

SEQ ID NO: 42680 - DNA, 60 bp, Artificial
  Synthetic oligonucleotide
ggctgagtgggccaagaacatttggggagcggtggaaaaggtcaggaagattgtggggcc

SEQ ID NO: 42681 - DNA, 60 bp, Artificial
  Synthetic oligonucleotide
gggcatcgagagactgacagtgataggagaacacgcctgggacttcggttccactggagg

SEQ ID NO: 42682 - DNA, 60 bp, Artificial
  Synthetic oligonucleotide
tgctgccggacatgcacactaccaccagtgacattccgcacggggactgactgctggtat

SEQ ID NO: 42683 - DNA, 60 bp, Artificial
  Synthetic oligonucleotide
gccagccagtcacaccatcgacaatgctgaggtcgtggattcggagcttttccttccagc

SEQ ID NO: 42684 - DNA, 60 bp, Artificial
  Synthetic oligonucleotide
cgttttgaaatccttctggaattcagttcctctgaaacaggccacggcagcactacggaa

SEQ ID NO: 42685 - DNA, 60 bp, Artificial
  Synthetic oligonucleotide
cgtggagaatggcacctgtgtgatactggccacggacatggggtcatggtgtgacgactc

SEQ ID NO: 42686 - DNA, 60 bp, Artificial
  Synthetic oligonucleotide
gtggcaatcatggacgaagcccattggacagatccgcacagcatagccgccaggggtcat

SEQ ID NO: 42687 - DNA, 60 bp, Artificial
  Synthetic oligonucleotide
tgtccacagtgctgtggagcgaacaggaggagccgcggtcatggggtgagtggacaaaca

SEQ ID NO: 42688 - DNA, 60 bp, Artificial
  Synthetic oligonucleotide
cggcaaaactggcctggctcgaggaacgcggctatgcaactctcaaaggggaagtggtag

SEQ ID NO: 42689 - DNA, 60 bp, Artificial
  Synthetic oligonucleotide
ccgcggctgcctgtgtgttcaaagtactggctccataccgcccagaggtgatagaagcac

SEQ ID NO: 42690 - DNA, 60 bp, Artificial
  Synthetic oligonucleotide
ggctgtggaagaccccgttttctggcagcttgtggacgaagagagagagagacaccttgc

SEQ ID NO: 42691 - DNA, 60 bp, Artificial
  Synthetic oligonucleotide
tggagtggctgtgtggaatggcacccggaactggtaaacgagggtggagaggtgagcttg

SEQ ID NO: 42692 - DNA, 60 bp, Artificial
  Synthetic oligonucleotide
ggatgaggagcagatcttgcgttacatggagggtgagcacagacagctggcggccacgat

SEQ ID NO: 42693 - DNA, 60 bp, Artificial
  Synthetic oligonucleotide
ggtagtgggtgttgggctggctgcatttcacttggccatcgtggtgtctggattggaggc

SEQ ID NO: 42694 - DNA, 60 bp, Artificial
  Synthetic oligonucleotide
ggcctggcaaccctgggtgtcatctggtgcttcgttgtccgaacttcgataagccgcatg

SEQ ID NO: 42695 - DNA, 60 bp, Artificial
  Synthetic oligonucleotide
ttggagtgggtgctgatgttggttgtgccgtggacaccgagcgaatggaactccgctgtg

SEQ ID NO: 42696 - DNA, 60 bp, Artificial
  Synthetic oligonucleotide
cgggacttggtgactgtgcactatggactcataatcttcctgggtgtggcttcggcttgc

SEQ ID NO: 42697 - DNA, 60 bp, Artificial
  Synthetic oligonucleotide
ggagggaggaaatgagtgcccattggagagaaggaagacaggcgtcttcacggtggcgga

SEQ ID NO: 42698 - DNA, 60 bp, Artificial
  Synthetic oligonucleotide
gacagcggtcgtgtggggaggcgttgtggttcttgcactgctcgtcaccggaatggtcaa

SEQ ID NO: 42699 - DNA, 60 bp, Artificial
  Synthetic oligonucleotide
ccgaatcaccgtggtggttgtgctcctctgcctggctccggtttatgcttcacgatgcac

SEQ ID NO: 42700 - DNA, 60 bp, Artificial
  Synthetic oligonucleotide
agcatcagagtggtacggtgtgcaagagggaccagagtgaccgaggctggggcaatcact

SEQ ID NO: 42701 - DNA, 60 bp, Artificial
  Synthetic oligonucleotide
cactcattgcgacttcacaccgtggttggcatggcatgttgcggcgaatgtgtccagtgt

SEQ ID NO: 42702 - DNA, 60 bp, Artificial
  Synthetic oligonucleotide
gtcggatatggcttcaagggtgttctgcacacgatgtggcatgtgacaagaggagcggcg

SEQ ID NO: 42703 - DNA, 60 bp, Artificial
  Synthetic oligonucleotide
aggtcgacacactgtggacaatgccagtggcctgtggcttgagcggtgtggttaggggca

SEQ ID NO: 42704 - DNA, 60 bp, Artificial
  Synthetic oligonucleotide
ccggccgcacaacctggagcattcatgccagtggagcttggatgaccacagaggacatgt

SEQ ID NO: 42705 - DNA, 60 bp, Artificial
  Synthetic oligonucleotide
aagccgacccaacctcccgcaggcagttgtgggcatggggtggacagcaaaaggccaaat

SEQ ID NO: 42706 - DNA, 60 bp, Artificial
  Synthetic oligonucleotide
tggtggtgccgtgccgagaccaggatgaactggttggaagggctcgtgtctcaccgggct

SEQ ID NO: 42707 - DNA, 60 bp, Artificial
  Synthetic oligonucleotide
gcgcatggctatgactgacaccacagctttcgggcagcagagggtgttcaaggagaaggt

SEQ ID NO: 42708 - DNA, 60 bp, Artificial
  Synthetic oligonucleotide
aaaagatgtgcaggagaggatcagagcgttgagggaacagtacggcgaaacttggcacgt

SEQ ID NO: 42709 - DNA, 53 bp, Artificial
  Synthetic oligonucleotide
cctgggctcagcccgggtacccttggcccctctatggcaatgagggcatgggg

SEQ ID NO: 42710 - DNA, 60 bp, Artificial
  Synthetic oligonucleotide
acaccggaattgccaggacgaccgggtcctttcttggatcaacccgctcaatgcctggag

SEQ ID NO: 42711 - DNA, 60 bp, Artificial
  Synthetic oligonucleotide
caccggaattgccaggacgaccgggtcctttcttggatcaacccgctcaatgcctggaga

SEQ ID NO: 42712 - DNA, 60 bp, Artificial
  Synthetic oligonucleotide
cctgcagaatacaagtgagagctgaggccaagggtgcccctggtgttgatgtggccaacc

SEQ ID NO: 42713 - DNA, 60 bp, Artificial
  Synthetic oligonucleotide
gagaggcagggtgggacgcaaggaaggaagaacggacaggtacgtgtactctggccaatg

SEQ ID NO: 42714 - DNA, 60 bp, Artificial
  Synthetic oligonucleotide
tgagagcgtgtgtgcaggagggagaccgggcaaagggactgttgttggctgcattgatgg

SEQ ID NO: 42715 - DNA, 60 bp, Artificial
  Synthetic oligonucleotide
caaggaccatgtacaaccagattccaggctatgctgtgcaactgtcagggccgtgggacc

SEQ ID NO: 42716 - DNA, 60 bp, Artificial
  Synthetic oligonucleotide
ctgcatggtttgtggcatcaattgcaagaggcgcggctatcgcacgaacactgagggcca

SEQ ID NO: 42717 - DNA, 60 bp, Artificial
  Synthetic oligonucleotide
cagggaggcctagtgaagtcaactgtggtggcaggcaatgtggagctaatgcaggagggg

SEQ ID NO: 42718 - DNA, 60 bp, Artificial
  Synthetic oligonucleotide
gtggatgtcatgtgccatgcaacctacgtgaaccggagactaagccccacagggaggcag

SEQ ID NO: 42719 - DNA, 60 bp, Artificial
  Synthetic oligonucleotide
ataccactggtccggcatcctggtagcaatggggctgtgggcactccttgagtacgcaac

SEQ ID NO: 42720 - DNA, 60 bp, Artificial
  Synthetic oligonucleotide
tacgtgagtggaattgcccagggaacgccagaggtcggtggacatgagatgccgttggct

SEQ ID NO: 42721 - DNA, 60 bp, Artificial
  Synthetic oligonucleotide
aacaaagtcttggtcctggccgtatccgcgctggtatgggtgatggttgagagcgtcccc

SEQ ID NO: 42722 - DNA, 60 bp, Artificial
  Synthetic oligonucleotide
gctgggggtgctggtgttgctcatctctttgtgtctcatgtgggccggcggcatgtccta

SEQ ID NO: 42723 - DNA, 60 bp, Artificial
  Synthetic oligonucleotide
aagcgtttctgaccctcattgaagtgctggtgcttgggctcgcaaccctggggctcctgt

SEQ ID NO: 42724 - DNA, 60 bp, Artificial
  Synthetic oligonucleotide
gcccattgacgacaggtttggcacggccctctacttcctgaacgacatggcgaaagtgag

SEQ ID NO: 42725 - DNA, 60 bp, Artificial
  Synthetic oligonucleotide
tgaggcgcggagagacgaacatggggctggctgtttcgcgtgggacatcaaagcttgcat

SEQ ID NO: 42726 - DNA, 60 bp, Artificial
  Synthetic oligonucleotide
tctgaactgctgatggggatgagtgaggtgccagggttgatgaggagtagggtgctgggg

SEQ ID NO: 42727 - DNA, 60 bp, Artificial
  Synthetic oligonucleotide
ggagagtgacccagatccagagaaggagggagagaggagccgcagggtgattcagctgat

SEQ ID NO: 42728 - DNA, 60 bp, Artificial
  Synthetic oligonucleotide
ggagagtttggttcggccaagggaagtagagcaatctggtacatgtggttgggcagccga

SEQ ID NO: 42729 - DNA, 60 bp, Artificial
  Synthetic oligonucleotide
gctcccgacgcatgtggaccagtgagaaatttgtgagactaaccatccctcaaggccgag

SEQ ID NO: 42730 - DNA, 60 bp, Artificial
  Synthetic oligonucleotide
ccagacgagaccagcgcggctcaggacaggtcgtgacctacgccttgaacacacttacaa

SEQ ID NO: 42731 - DNA, 60 bp, Artificial
  Synthetic oligonucleotide
tacgcagatgacacagctggctgggacacccgagtgaccaatgccgacctggaagatgag

SEQ ID NO: 42732 - DNA, 60 bp, Artificial
  Synthetic oligonucleotide
tgtgggagaacacgtgtgggacttcgggtccgtgggcggcttcttcgggtcaattggaaa

SEQ ID NO: 42733 - DNA, 60 bp, Artificial
  Synthetic oligonucleotide
gagtggacaggcgttgcagagtggaatccggagctcctgaatgagggaggggaagtgaac

SEQ ID NO: 42734 - DNA, 60 bp, Artificial
  Synthetic oligonucleotide
gctagtgtcaactgagggtgagttctggtggacaatgccggtggcgtgtggaatggcagg

SEQ ID NO: 42735 - DNA, 60 bp, Artificial
  Synthetic oligonucleotide
cggaccagggatgctctattgacagtgagaggatggagctcagatgtggggcgggattgg

SEQ ID NO: 42736 - DNA, 60 bp, Artificial
  Synthetic oligonucleotide
caaggataaggtggacaccaaggcccaagaaccacagccgggcaccagagtcatcatgcg

SEQ ID NO: 42737 - DNA, 60 bp, Artificial
  Synthetic oligonucleotide
caaagggtgggcggtgcacaaggactggttcaatgacctggcgctgccgtggaaacatca

SEQ ID NO: 42738 - DNA, 59 bp, Artificial
  Synthetic oligonucleotide
acccctggggtcctcaagaggaatgggaaagctgggcaggtgacatggagcagttgggg

SEQ ID NO: 42739 - DNA, 60 bp, Artificial
  Synthetic oligonucleotide
aacacagcagggccaatcgaccggagctggacctgggagggaccggagggcaatgccata

SEQ ID NO: 42740 - DNA, 60 bp, Artificial
  Synthetic oligonucleotide
ctgtccggactggaggcagagttctcgcagcgtgtgcacaaagccattttcgctggcatg

SEQ ID NO: 42741 - DNA, 60 bp, Artificial
  Synthetic oligonucleotide
atgcagctacccaggcacgtgtggggaatgggtcatgtgtgatcctggccacagacatgg

SEQ ID NO: 42742 - DNA, 60 bp, Artificial
  Synthetic oligonucleotide
agaggacgtggtgtgctatggaggcgcctggaatctaccgaccaagtgggagggtgaagt

SEQ ID NO: 42743 - DNA, 60 bp, Artificial
  Synthetic oligonucleotide
tggagaatcgtgccactgcagcaggcgcaggcagccttgaagcgtatccgcaaggtagta

SEQ ID NO: 42744 - DNA, 60 bp, Artificial
  Synthetic oligonucleotide
gctgctgagtaggttcggtgatgcggctggacccgtccttgttcctgagatagatctggg

SEQ ID NO: 42745 - DNA, 60 bp, Artificial
  Synthetic oligonucleotide
ccccacatgaaagacaagacgagagttgatgcatggagagacataccctaccttcccaag

SEQ ID NO: 42746 - DNA, 60 bp, Artificial
  Synthetic oligonucleotide
ggtgtccaacgaccggacctgcgacactctccgaggaacaccagaagaacatggtgtgca

SEQ ID NO: 42747 - DNA, 60 bp, Artificial
  Synthetic oligonucleotide
gggacagctacttccagcaatatatgcttaagggcgagtatcagtactggtttgacctgg

SEQ ID NO: 42748 - DNA, 60 bp, Artificial
  Synthetic oligonucleotide
ggggcagtcgtacacctccaaaagacaggtggggaattcacgtgtgtcactgcatcaggc

SEQ ID NO: 42749 - DNA, 60 bp, Artificial
  Synthetic oligonucleotide
tgagctgacaaacttagtagtgtttgtgaggattaacaacaattaacacggtgcgagctg

SEQ ID NO: 42750 - DNA, 60 bp, Artificial
  Synthetic oligonucleotide
ggatagactaggagatcttctgctctgcacaaccagccacacggcacagtgcgccgacaa

SEQ ID NO: 42751 - DNA, 60 bp, Artificial
  Synthetic oligonucleotide
tagtcaggccagggtaacctgccaccggaagttgagtagacggtgctgcctgcgactcaa

SEQ ID NO: 42752 - DNA, 60 bp, Artificial
  Synthetic oligonucleotide
cgagggcatgcccaagacacaccttaaccctggcaggggtcgccagggtgaaatcacact

SEQ ID NO: 42753 - DNA, 60 bp, Artificial
  Synthetic oligonucleotide
cacagcactttagctgtatgagggtacacccgacgtctatagttggactagggaagaccc

SEQ ID NO: 42754 - DNA, 60 bp, Artificial
  Synthetic oligonucleotide
ttcagctgggccttctggtagtgttcttggccacccaggaggtccttcgcaagaggtgga

SEQ ID NO: 42755 - DNA, 60 bp, Artificial
  Synthetic oligonucleotide
ctggccatcaccaaggtgatgtataagtgggtgaagcagaagccagtagttatacccggg

SEQ ID NO: 42756 - DNA, 60 bp, Artificial
  Synthetic oligonucleotide
tgtataagtgggtgaagcagaagccagtagttatacccgggtatgaagggaagacacctc

SEQ ID NO: 42757 - DNA, 60 bp, Artificial
  Synthetic oligonucleotide
catcaccaaggtgatgtataagtgggtgaagcagaagccagtagttatacccgggtatga

SEQ ID NO: 42758 - DNA, 60 bp, Artificial
  Synthetic oligonucleotide
aaatggatgacaactttgaatttggactctgcccatgcgatgccaaacccatagtaagag

SEQ ID NO: 42759 - DNA, 60 bp, Artificial
  Synthetic oligonucleotide
tggccaggacagatcacccagagccaatccaacttgcatacaacagctatgaagtccagg

SEQ ID NO: 42760 - DNA, 60 bp, Artificial
  Synthetic oligonucleotide
ccacctgcaactaagagcagtaaggggcacatggcatcagcttaccaattggcacagggc

SEQ ID NO: 42761 - DNA, 60 bp, Artificial
  Synthetic oligonucleotide
ggggaacacacacagcactatacaaaagcatagctgcaagactggggcatgaaacagcgt

SEQ ID NO: 42762 - DNA, 60 bp, Artificial
  Synthetic oligonucleotide
gagtttcaacagggtggcaaggatccatgtctgtggggatgatggcttcttaataactga

SEQ ID NO: 42763 - DNA, 60 bp, Artificial
  Synthetic oligonucleotide
gctgggaaagaccagagatcctgccgtctcctcagcatcattccaggcacagaacgccag

SEQ ID NO: 42764 - DNA, 53 bp, Artificial
  Synthetic oligonucleotide
ggggcggttcttgttctccctgagccaccatcacccagacacagacagtctga

SEQ ID NO: 42765 - DNA, 60 bp, Artificial
  Synthetic oligonucleotide
gggcggttcttgttctccctgagccaccatcacccagacacaggtagtctgacaaggagg

SEQ ID NO: 42766 - DNA, 60 bp, Artificial
  Synthetic oligonucleotide
gggcggttcttgttctccctgagccaccatcacccagacacaggcagtctaacaaggagg

SEQ ID NO: 42767 - DNA, 60 bp, Artificial
  Synthetic oligonucleotide
gggcggttcttgttctccctgagccaccatcacccagacacagatagtctgacaaggagg

SEQ ID NO: 42768 - DNA, 60 bp, Artificial
  Synthetic oligonucleotide
taatttggttcagggcctccctccagcgacggccgaactgggctagccatgcccatagta

SEQ ID NO: 42769 - DNA, 60 bp, Artificial
  Synthetic oligonucleotide
aatttggttcagggcctccctccagcgacggccgaactgggctagccatgcccacagtag

SEQ ID NO: 42770 - DNA, 60 bp, Artificial
  Synthetic oligonucleotide
ataatttggttcagggcctccctccagcgacggccgaactgggctagccatgcccatagt

SEQ ID NO: 42771 - DNA, 60 bp, Artificial
  Synthetic oligonucleotide
aatttgggtaaggtcatcgatacccttacgtgcggcttcgccgacctcatggggtacata

SEQ ID NO: 42772 - DNA, 60 bp, Artificial
  Synthetic oligonucleotide
aatttgggtaaggtcatcgatacccttacgtgcggcttcgccgacctcatggggtacatt

SEQ ID NO: 42773 - DNA, 52 bp, Artificial
  Synthetic oligonucleotide
gcactttagctggaaggaaaattcctgacgtccatagttggactaaggtaat

SEQ ID NO: 42774 - DNA, 60 bp, Artificial
  Synthetic oligonucleotide
ccggtgagtacaccggaattgccaggacgaccgggtcctttcttggatcaacccgctcaa

SEQ ID NO: 42775 - DNA, 60 bp, Artificial
  Synthetic oligonucleotide
ggtgaaatggttgacccttttcagctgggccttctggtgatgtttctggccacccaggag

SEQ ID NO: 42776 - DNA, 60 bp, Artificial
  Synthetic oligonucleotide
cccacactaccccataggtaagtgcattttggcaaatgagacaggttacagaatagtgga

SEQ ID NO: 42777 - DNA, 60 bp, Artificial
  Synthetic oligonucleotide
cccgcattaccccataggtaagtgcattttggcaaatgagacaggttacagaatagtaga

SEQ ID NO: 42778 - DNA, 60 bp, Artificial
  Synthetic oligonucleotide
tgtatacggagtcaggccagcaaaagctgccaccggatactgggtagacggtgctgcctg

SEQ ID NO: 42779 - DNA, 60 bp, Artificial
  Synthetic oligonucleotide
tgggcctctagagagtccagtggagctggagttgagggaataagcttgaactacctgggc

SEQ ID NO: 42780 - DNA, 60 bp, Artificial
  Synthetic oligonucleotide
gcgtcagtgccctggatgtcttctacacgcttatgcatgaggaacctggcagcagggcaa

SEQ ID NO: 42781 - DNA, 54 bp, Artificial
  Synthetic oligonucleotide
cgggaaaatggtcgatcccgacgtagggcactctgtaaaactttgtgagacccc

SEQ ID NO: 42782 - DNA, 60 bp, Artificial
  Synthetic oligonucleotide
cgggaaaatggtcgatcccgacgtagggcactctgtaaaactttgtgagaccccctgcat

SEQ ID NO: 42783 - DNA, 60 bp, Artificial
  Synthetic oligonucleotide
tgaaacagtgcaggtccatgccttcccaccggggagggcccatgaggtgcatcagtgcca

SEQ ID NO: 42784 - DNA, 60 bp, Artificial
  Synthetic oligonucleotide
gtgttagcgccctggatgtcttctacacgcttatgcatgaggaacctggcagccgggcaa

SEQ ID NO: 42785 - DNA, 60 bp, Artificial
  Synthetic oligonucleotide
aaggccaaatcacagtgctggacatgcacccaggctctgggaagacccacagagtcctcc

SEQ ID NO: 42786 - DNA, 60 bp, Artificial
  Synthetic oligonucleotide
agtttacttgttgccgcgcaggggccctagattgggtgtgcgcgcgacgaggaagacttc

SEQ ID NO: 42787 - DNA, 60 bp, Artificial
  Synthetic oligonucleotide
gccaggacgaccgggtcctttcttggatcaacccgctcaatgcctggagatttgggcgtg

SEQ ID NO: 42788 - DNA, 60 bp, Artificial
  Synthetic oligonucleotide
caggatgaccgggtcctttcttggatcaacccgctcaatgcctggagatttgggcgtgcc

SEQ ID NO: 42789 - DNA, 60 bp, Artificial
  Synthetic oligonucleotide
agcatagtggtctgcggaaccggtgagtacaccggaattgccaggacgaccgggtccttt

SEQ ID NO: 42790 - DNA, 60 bp, Artificial
  Synthetic oligonucleotide
tcggattaagccatagtacggaaaaaactatgctacctgtgagccccgtccaaggacgtt

SEQ ID NO: 42791 - DNA, 55 bp, Artificial
  Synthetic oligonucleotide
aaaaggcgagaaacacgcctttcaatatgctgaaacgcgagagaaaccgcgtgtc

SEQ ID NO: 42792 - DNA, 60 bp, Artificial
  Synthetic oligonucleotide
cggaagttgagtagacggtgctgcctgcgactcaaccccaggaggactgggtgaacaaag

SEQ ID NO: 42793 - DNA, 60 bp, Artificial
  Synthetic oligonucleotide
gaagttgagtggacggtgctgcctgcgactcaaccccaggaggactgggtgaacaaagct

SEQ ID NO: 42794 - DNA, 60 bp, Artificial
  Synthetic oligonucleotide
gaagttgagtagacggtgctgcctgcgactcaaccccaggaggactgggtgaacaaagcc

SEQ ID NO: 42795 - DNA, 60 bp, Artificial
  Synthetic oligonucleotide
ggaagttgagtagacggtgctgcctgcgactcaaccccaggaggactgggtgaacaaagc

SEQ ID NO: 42796 - DNA, 60 bp, Artificial
  Synthetic oligonucleotide
aggatgaccgggtcctttcttggattaacccgctcagtgcctggagatttgggcgtgccc

SEQ ID NO: 42797 - DNA, 55 bp, Artificial
  Synthetic oligonucleotide
cgagggtagggcctgggctcagcccgggtacccttggcccctctatggcaatgag

SEQ ID NO: 42798 - DNA, 60 bp, Artificial
  Synthetic oligonucleotide
ccgcgtgtcaactggttcacagttggcgaagagattctcaaaaggattgctttcaggcca

SEQ ID NO: 42799 - DNA, 60 bp, Artificial
  Synthetic oligonucleotide
aggacgaccgggtcctttcttggattaacccgctcaatgcctggagatttgggcgtgccc

SEQ ID NO: 42800 - DNA, 58 bp, Artificial
  Synthetic oligonucleotide
ccccgcacaacaacaaacagcatattgacgctgggagagaccagagatctgctgtctc

SEQ ID NO: 42801 - DNA, 52 bp, Artificial
  Synthetic oligonucleotide
ccccgcacaacaacaaacagcatattgacgctgggagagaccagagatcctg

SEQ ID NO: 42802 - DNA, 55 bp, Artificial
  Synthetic oligonucleotide
aaaatataatggccaggactgaccacccagaaccaattcagctggcgtacaacag

SEQ ID NO: 42803 - DNA, 60 bp, Artificial
  Synthetic oligonucleotide
tgaagctgggaagccccagaagatcactgaaggggacaaaatgaaagtagcctaccaatt

SEQ ID NO: 42804 - DNA, 55 bp, Artificial
  Synthetic oligonucleotide
aaaacataatggccaggactgaccacccagaaccaattcagctggcgtacaacag

SEQ ID NO: 42805 - DNA, 60 bp, Artificial
  Synthetic oligonucleotide
gcagggtcaaggtcgggaagaatgaggactctaaaccaaccaagcttatgagtggaatac

SEQ ID NO: 42806 - DNA, 60 bp, Artificial
  Synthetic oligonucleotide
cctcccgggagagccatagtggtctgcggaaccggtgagtacaccggaattgccaggacg

SEQ ID NO: 42807 - DNA, 60 bp, Artificial
  Synthetic oligonucleotide
ctcccgggagagccatagtggtctgcggaaccggtgagtacaccggaattgccaggacga

SEQ ID NO: 42808 - DNA, 52 bp, Artificial
  Synthetic oligonucleotide
ttttattagagagcagatctctgatgaacaaccaacggaaaaagacgggaaa

SEQ ID NO: 42809 - DNA, 60 bp, Artificial
  Synthetic oligonucleotide
ctgggagagaccagagatcctgctgtctctacagcatcattccaggcacagaacgccaga

SEQ ID NO: 42810 - DNA, 60 bp, Artificial
  Synthetic oligonucleotide
gggagagaccagagatcctgctgtctctacagcatcattccaggcacagaacgccagaaa

SEQ ID NO: 42811 - DNA, 60 bp, Artificial
  Synthetic oligonucleotide
ccgatggcagtaaaaaatataatggccaggactgaccacccagaaccaatccagctggca

SEQ ID NO: 42812 - DNA, 60 bp, Artificial
  Synthetic oligonucleotide
ttgggtagggtcatcgatacccttacgtgcggcttcgccgacctcatggggtacataccg

SEQ ID NO: 42813 - DNA, 60 bp, Artificial
  Synthetic oligonucleotide
aagcccacctcgagatgctacgtggacgagggcatgcccaagacacaccttaaccctagc

SEQ ID NO: 42814 - DNA, 60 bp, Artificial
  Synthetic oligonucleotide
actagcccacctcgagatgctacgtggacgagggcatgcccaagacacaccttaaccctg

SEQ ID NO: 42815 - DNA, 54 bp, Artificial
  Synthetic oligonucleotide
aaaagacagcttaggagaacaagagctggggatggtcaagaaggccatcctgaa

SEQ ID NO: 42816 - DNA, 51 bp, Artificial
  Synthetic oligonucleotide
aaaagacagcttaggagaacaagagctggggatggctgggaaagccatcct

SEQ ID NO: 42817 - DNA, 56 bp, Artificial
  Synthetic oligonucleotide
aaaagacagcttaggagaacaagagctggggatgggcaggaagaccatcctgaaag

SEQ ID NO: 42818 - DNA, 51 bp, Artificial
  Synthetic oligonucleotide
aggtccttcgcaagaggtggacagccaagatcagcatgccagccatactga

SEQ ID NO: 42819 - DNA, 60 bp, Artificial
  Synthetic oligonucleotide
ggtagtgttcttggccacccaggaggtcctccgcaagaggtggacagccaagatcagcat

SEQ ID NO: 42820 - DNA, 58 bp, Artificial
  Synthetic oligonucleotide
ctgggaaagaccagagatcctgctgtctcctcagcatcattccaggcacagaacgcca

SEQ ID NO: 42821 - DNA, 60 bp, Artificial
  Synthetic oligonucleotide
ggacaaatcctccttagcgaaggccgaaaagaggctagccatgcccttagtaggactagc

SEQ ID NO: 42822 - DNA, 60 bp, Artificial
  Synthetic oligonucleotide
cgcctgtgtgagctgacaaacttagtagtgtttgtgaggatttacgaggattaatacagt

SEQ ID NO: 42823 - DNA, 60 bp, Artificial
  Synthetic oligonucleotide
cgcctgtgtgagctgacaaacttagtagtgtttgtgaggattatgaacaattaacacagt

SEQ ID NO: 42824 - DNA, 60 bp, Artificial
  Synthetic oligonucleotide
cgtctgcgtgagctgacaaacttagtagtgtttgtgaggattatcaacaattaatacagt

SEQ ID NO: 42825 - DNA, 56 bp, Artificial
  Synthetic oligonucleotide
aaaactatgctacctgtgagccccgtccaaggacgttaaaagaagtcaggccatta

SEQ ID NO: 42826 - DNA, 51 bp, Artificial
  Synthetic oligonucleotide
aaaactatgctacctgtgagccccgtccaaggacgttaaaagaagtcaggc

SEQ ID NO: 42827 - DNA, 52 bp, Artificial
  Synthetic oligonucleotide
aaaactatgctacctgtgagccccgtccaaggacgttaaaagaagtcaggcc

SEQ ID NO: 42828 - DNA, 57 bp, Artificial
  Synthetic oligonucleotide
tattgctgccggactaatggtctgcaacccaaacaagaagagagggtggccagctac

SEQ ID NO: 42829 - DNA, 57 bp, Artificial
  Synthetic oligonucleotide
tatagctgccggactaatggtctgcaacccaaacaagaagagagggtggccagctac

SEQ ID NO: 42830 - DNA, 60 bp, Artificial
  Synthetic oligonucleotide
gctgccggactaatggtctgcaacccaaacaagaagagagggtggccagctaccgaggtt

SEQ ID NO: 42831 - DNA, 53 bp, Artificial
  Synthetic oligonucleotide
gctgccggactaatggtctgcaacccaaacaagaagagagggtggccagctac

SEQ ID NO: 42832 - DNA, 57 bp, Artificial
  Synthetic oligonucleotide
agagggtagtaatgagcttgttggacggcagagggccagtacgtttcgtgctggctc

SEQ ID NO: 42833 - DNA, 57 bp, Artificial
  Synthetic oligonucleotide
tatagctgccggactaatggtctgcaacccaaacaagaagagagggtggccagccac

SEQ ID NO: 42834 - DNA, 60 bp, Artificial
  Synthetic oligonucleotide
ccatagtggtctgcggaaccggtgagtacaccggaattgccgggaagactgggtcctttc

SEQ ID NO: 42835 - DNA, 60 bp, Artificial
  Synthetic oligonucleotide
gccaggacgaccgggtcctttcttggattaacccgctcaatgcctggagatttgggcgtg

SEQ ID NO: 42836 - DNA, 60 bp, Artificial
  Synthetic oligonucleotide
ctaaccgactgttacggatacagcctgatagggtgctgcagaggcccactgttctgctac

SEQ ID NO: 42837 - DNA, 60 bp, Artificial
  Synthetic oligonucleotide
taggcctgagggacaaatcctccttagcgaaggccgaaaagaggctagccatgcccttag

SEQ ID NO: 42838 - DNA, 53 bp, Artificial
  Synthetic oligonucleotide
atcctcacagtggtggccgcaaccatggcaaacgagatgggtttcctggaaaa

SEQ ID NO: 42839 - DNA, 60 bp, Artificial
  Synthetic oligonucleotide
caatgataacagacatatacaccatagaagatcaaagactagaggacacaacccacctcc

SEQ ID NO: 42840 - DNA, 60 bp, Artificial
  Synthetic oligonucleotide
cccaatgataacagacatatacaccatagaagatcaaagactagaggacacaacccacct

SEQ ID NO: 42841 - DNA, 60 bp, Artificial
  Synthetic oligonucleotide
ctggtggaaggactagaggttagaggagacccccccaacacaaaaacagcatattgacgc

SEQ ID NO: 42842 - DNA, 60 bp, Artificial
  Synthetic oligonucleotide
ggtggaaggactagaggttagaggagacccccccaacacaaaaacagcatattgacgctg

SEQ ID NO: 42843 - DNA, 60 bp, Artificial
  Synthetic oligonucleotide
cctctcgtgctgcaagacggtcgtgagatcattgctccgtgtcgtgaccaacacgagatc

SEQ ID NO: 42844 - DNA, 60 bp, Artificial
  Synthetic oligonucleotide
ccgcatgcgtgaggaaatcgagaacttccagccacagggcagatacctcttggcgcctga

SEQ ID NO: 42845 - DNA, 60 bp, Artificial
  Synthetic oligonucleotide
gttgcgatcggaaaggcccgcaagcaggagacacagttcatcgtgtcgacagacatcagc

SEQ ID NO: 42846 - DNA, 60 bp, Artificial
  Synthetic oligonucleotide
gaaagttggcatcacacaggcgtcagccatccagcgccgtggaagaacaggacgcagaga

SEQ ID NO: 42847 - DNA, 60 bp, Artificial
  Synthetic oligonucleotide
cgtcaggatctcctgtgcacgcgttggatggtcgtgtcgttggactgtacggttatggat

SEQ ID NO: 42848 - DNA, 60 bp, Artificial
  Synthetic oligonucleotide
cgagatgacatcaatgttcgggacaatgaaggcagtcgtaccgccagtggaagggtccta

SEQ ID NO: 42849 - DNA, 60 bp, Artificial
  Synthetic oligonucleotide
ggaggcatccagctcgctttgatttcctgggagacgatggtgccaatcgcttttgctggg

SEQ ID NO: 42850 - DNA, 60 bp, Artificial
  Synthetic oligonucleotide
cgcgcggccagaggttctagagttgcacatcacatctcttcctggagcgttggttgtgag

SEQ ID NO: 42851 - DNA, 60 bp, Artificial
  Synthetic oligonucleotide
tcccggtgaactggatccccacggggcggatatcgtggtcagtccaccaacacgctgaat

SEQ ID NO: 42852 - DNA, 60 bp, Artificial
  Synthetic oligonucleotide
aaggacagaatgcgacgagcttgaagatcaggacggaagccggtgaccacaagtacgctc

SEQ ID NO: 42853 - DNA, 60 bp, Artificial
  Synthetic oligonucleotide
cgtactcgcttgctgctgttccgaatggtacggctctgttggtgcatttctggctggcag

SEQ ID NO: 42854 - DNA, 60 bp, Artificial
  Synthetic oligonucleotide
gccatcgcaagggaggattttcctcgggtactgaccataccccgaccccagtccgatagg

SEQ ID NO: 42855 - DNA, 60 bp, Artificial
  Synthetic oligonucleotide
tactaacgacactccggccccagttcccagagccagggttttagctccacggtgctggaa

SEQ ID NO: 42856 - DNA, 60 bp, Artificial
  Synthetic oligonucleotide
ccgggcaaaagtgaagctgcaggaccagacaatcgttgcaggtcgcgtgaagaggttgcg

SEQ ID NO: 42857 - DNA, 60 bp, Artificial
  Synthetic oligonucleotide
gaactccactgcagaaatgtactacgtctcaggtccgcgagcgaacatcgtcggctcagt

SEQ ID NO: 42858 - DNA, 60 bp, Artificial
  Synthetic oligonucleotide
cgcaaggtgagggcgcacaggatagaatccaggtgactgacgccacctcccgaaatgtgt

SEQ ID NO: 42859 - DNA, 60 bp, Artificial
  Synthetic oligonucleotide
tttcacgcacagaccaacgcggctctgggcaagtgaccacctacgctctcaacaccgtga

SEQ ID NO: 42860 - DNA, 60 bp, Artificial
  Synthetic oligonucleotide
agaagctggaagtcagaagttcacggaagggttgcggatacttgggcgataccgagctcc

SEQ ID NO: 42861 - DNA, 60 bp, Artificial
  Synthetic oligonucleotide
tgacataggcgcgtacaccgatgggatgatgtggatgaaaagcaggaaggtgaacggaac

SEQ ID NO: 42862 - DNA, 60 bp, Artificial
  Synthetic oligonucleotide
tctgtggggctgacgtgccacggatgctacctccttgcgacgaagatggtgttcggacct

SEQ ID NO: 42863 - DNA, 60 bp, Artificial
  Synthetic oligonucleotide
ccaagcatgtggttgacaagtaccggaggtttggaactgctggagtgggaggcgtgtggc

SEQ ID NO: 42864 - DNA, 60 bp, Artificial
  Synthetic oligonucleotide
aagaaagcccatcttgtgacaaccgcgggtccgctgtgaaagttgaccctgccattgcca

SEQ ID NO: 42865 - DNA, 60 bp, Artificial
  Synthetic oligonucleotide
agggcagactgtcaacccgatgatgcgccgaataatgtggccgtgggatttcctctcccg

SEQ ID NO: 42866 - DNA, 60 bp, Artificial
  Synthetic oligonucleotide
gcccactcgagttgttaaggatgaggttgtgcgagcgattgctgaggcgtgccctggagt

SEQ ID NO: 42867 - DNA, 60 bp, Artificial
  Synthetic oligonucleotide
ctggaggacgagttgtggttcctgctggaccaagtgactgacccctaccacgcacagttg

SEQ ID NO: 42868 - DNA, 60 bp, Artificial
  Synthetic oligonucleotide
gcttgttggtggaacaaacgcgcccgagtggctacctcttacgtggctggagtatcggtc

SEQ ID NO: 42869 - DNA, 60 bp, Artificial
  Synthetic oligonucleotide
gaggaccattgggtagcgaggaagaactttccgtgcggagttggcggggtcggagtgaat

SEQ ID NO: 42870 - DNA, 60 bp, Artificial
  Synthetic oligonucleotide
tggaatgtgcttggcggggttgtacgtgctctcaacgtgtctcgagttgtatcagatgcc

SEQ ID NO: 42871 - DNA, 59 bp, Artificial
  Synthetic oligonucleotide
cacaatttccgcgcgaattaacagcatcgtgggtccgtgggcaagcgaatggcaagacg

SEQ ID NO: 42872 - DNA, 60 bp, Artificial
  Synthetic oligonucleotide
gaacttgacggacaacagtagagtgtcaacggggttgctggtttacgtcggctgcatggg

SEQ ID NO: 42873 - DNA, 60 bp, Artificial
  Synthetic oligonucleotide
cctgcagttgcgacggccatggtaacaggaggtgccctggtgatctattccattcgcgtg

SEQ ID NO: 42874 - DNA, 60 bp, Artificial
  Synthetic oligonucleotide
ccgaagacgaaggacataaattgtggaagtttgattggtgagcgggacagggcagcgtgg

SEQ ID NO: 42875 - DNA, 60 bp, Artificial
  Synthetic oligonucleotide
gcatgctgtcgtgagtgtggtggtgattgtgtttgcattcctcacatttcgtcgtcccaa

SEQ ID NO: 42876 - DNA, 60 bp, Artificial
  Synthetic oligonucleotide
tgtcggatcgtgaagtggctgttcggtggaaagacaactgcacaacaaagccccccgtac

SEQ ID NO: 42877 - DNA, 60 bp, Artificial
  Synthetic oligonucleotide
acaagtaccgatcccgaggagtgaacgagacagacaagggtgatttcgtctcgcggggcg

SEQ ID NO: 42878 - DNA, 60 bp, Artificial
  Synthetic oligonucleotide
cctccagagtatgagcaggaagcacagctaagcaacgacttcgggcacctgcccaacgga

SEQ ID NO: 42879 - DNA, 60 bp, Artificial
  Synthetic oligonucleotide
gtggctttccgtgacacgaacctagagcggcttggtacatcctaccgctcggcgattgag

SEQ ID NO: 42880 - DNA, 60 bp, Artificial
  Synthetic oligonucleotide
ccccggcctgaggtggagaagacaagaacgctgaaagtgctgacgatgctcgagaaatgg

SEQ ID NO: 42881 - DNA, 60 bp, Artificial
  Synthetic oligonucleotide
ctcatcgcgcgcaccagcaagaaagatctcgacgatgagataacaggacgagacggggtg

SEQ ID NO: 42882 - DNA, 60 bp, Artificial
  Synthetic oligonucleotide
gctgtagcgctaataacgtgcaccgggcttacactactgacaccgtcacgctcgttgtca

SEQ ID NO: 42883 - DNA, 60 bp, Artificial
  Synthetic oligonucleotide
ttgtggttcatcatggacggaattcactttgcgctaccatcgatgcgtgccaaagaagcg

SEQ ID NO: 42884 - DNA, 60 bp, Artificial
  Synthetic oligonucleotide
gccagccaatatggtgagttgagcagcgggttcttgagccgcaccaagatcgcggaaacc

SEQ ID NO: 42885 - DNA, 60 bp, Artificial
  Synthetic oligonucleotide
gggagaaacgtgcgcctacactctggtgatgtttaccgggacatggcttcgtatggtgga

SEQ ID NO: 42886 - DNA, 60 bp, Artificial
  Synthetic oligonucleotide
aacaggtcctagggccggaggtctactaggacgtttgggagctggctggggatcgattct

SEQ ID NO: 42887 - DNA, 60 bp, Artificial
  Synthetic oligonucleotide
ggcgccgtcgtcattgatatgcaggtctccacggtgaaagggacacagatcttcgagggg

SEQ ID NO: 42888 - DNA, 60 bp, Artificial
  Synthetic oligonucleotide
ggttgcggatttgaccctgagagaaaggttgtgtcctgcggatcaggagggttcgtctgg

SEQ ID NO: 42889 - DNA, 60 bp, Artificial
  Synthetic oligonucleotide
ctagtggaagggccggtttggaacggattgtggtctggggagacgccagggctaatgaag

SEQ ID NO: 42890 - DNA, 60 bp, Artificial
  Synthetic oligonucleotide
aaggtgtgtatcatttgtgaggacgtcttgcaatgcgccgccgctcgtagtgctgttggg

SEQ ID NO: 42891 - DNA, 60 bp, Artificial
  Synthetic oligonucleotide
gccacgtgtgttgagctgcattgcggagaggggtataacgtgtcgtcaatcgctaggtca

SEQ ID NO: 42892 - DNA, 60 bp, Artificial
  Synthetic oligonucleotide
acacactaaaagcggaaaagatgaccatgttgcagacaataatgcgaccggacgaaagct

SEQ ID NO: 42893 - DNA, 60 bp, Artificial
  Synthetic oligonucleotide
tggacgtcaagtttcccggtggcggtcagatcgttggcggagtttacttgttgccgcgca

SEQ ID NO: 42894 - DNA, 60 bp, Artificial
  Synthetic oligonucleotide
ttgtgggaaacaggagggctcacggacaagacgctcggtgctgatcccaacccatgccca

SEQ ID NO: 42895 - DNA, 60 bp, Artificial
  Synthetic oligonucleotide
ttactttcaccggcgtgacctgaggacacttgggttcgccatcagcccagcagtgcccgt

SEQ ID NO: 42896 - DNA, 60 bp, Artificial
  Synthetic oligonucleotide
ccaacagacagcgggcatgacacagtggttatggaagtcacattctccgggtcaaagcca

SEQ ID NO: 42897 - DNA, 60 bp, Artificial
  Synthetic oligonucleotide
gcccctccgagtcatcagagaggagtgtccaggaacgaccgtcaccataaacgccaagtg

SEQ ID NO: 42898 - DNA, 60 bp, Artificial
  Synthetic oligonucleotide
agcagcatcgctcagggagaggcggagaagagtcgacccaaccttccacaggcagttgtg

SEQ ID NO: 42899 - DNA, 60 bp, Artificial
  Synthetic oligonucleotide
gtggacgaggcaagcggggatctggtcactttcaggagcccgaatggagcggagagaacc

SEQ ID NO: 42900 - DNA, 60 bp, Artificial
  Synthetic oligonucleotide
tggcagtactggggcacgtcccgcacagcaccaactgggtcggcggcatcactgatcaat

SEQ ID NO: 42901 - DNA, 60 bp, Artificial
  Synthetic oligonucleotide
ccgagggatgatggacgccagcgagaagaccaactacacatgttgtaggctgcagaggca

SEQ ID NO: 42902 - DNA, 60 bp, Artificial
  Synthetic oligonucleotide
cctttgcaggtgtggttttagaaggcccatgcaactttaacgtctccgtggaggacatac

SEQ ID NO: 42903 - DNA, 60 bp, Artificial
  Synthetic oligonucleotide
ggcttgggaaacagttgggcataatgggaaagaagttggaacacaaaagcaaaacgtggt

SEQ ID NO: 42904 - DNA, 60 bp, Artificial
  Synthetic oligonucleotide
cgcacccgagacggcaagcaccttatacctgatactacacttcacaataccccagagcca

SEQ ID NO: 42905 - DNA, 60 bp, Artificial
  Synthetic oligonucleotide
ttaaaaacatcatggctaggacagaccaccccgaaccaatccaactagcttacaacagct

SEQ ID NO: 42906 - DNA, 58 bp, Artificial
  Synthetic oligonucleotide
tttgtaaagaattttctggatcaagcagccacggatgaactggtcaaagagagccccg

SEQ ID NO: 42907 - DNA, 60 bp, Artificial
  Synthetic oligonucleotide
gggcgtacactcatcaaggtggaattagttcagttgaccacgtcaccgctggaaaggacc

SEQ ID NO: 42908 - DNA, 60 bp, Artificial
  Synthetic oligonucleotide
ctgccttagcctgcctgccttatgcctcccaagctctcaagttgttctctccaacacggc

SEQ ID NO: 42909 - DNA, 60 bp, Artificial
  Synthetic oligonucleotide
ggcatcaaggcaatctcagaaccagaaacatattgaatcctggcaaagtagcggaacagc

SEQ ID NO: 42910 - DNA, 60 bp, Artificial
  Synthetic oligonucleotide
gaaggggtggtcgggactccccatatttgaagcttccagcggcagggtggttggtagagt

SEQ ID NO: 42911 - DNA, 60 bp, Artificial
  Synthetic oligonucleotide
gtgaggtgtacatcaggcgaggtcaaagaggtagtgggcagcccgatactagcgcaggca

SEQ ID NO: 42912 - DNA, 60 bp, Artificial
  Synthetic oligonucleotide
caatgaaactgagcagttgggcgtctctggttgacagcggatatggagacctccgcccct

SEQ ID NO: 42913 - DNA, 60 bp, Artificial
  Synthetic oligonucleotide
gcaagaggtcaccgtaggtgtcgccattctggctgttgatgcacgaccgaccctcctagt

SEQ ID NO: 42914 - DNA, 60 bp, Artificial
  Synthetic oligonucleotide
gagcggtcactaggtgcccttgtggctatcggatgaaggcagtgaagaactgtgcagggg

SEQ ID NO: 42915 - DNA, 60 bp, Artificial
  Synthetic oligonucleotide
cactcagcctgggcaagccaagagccaaggagatcacaaaagctgatgcacgtaggctac

SEQ ID NO: 42916 - DNA, 60 bp, Artificial
  Synthetic oligonucleotide
aagtgagaggcaagaatacgcaggatggtctgtaccacaataagaataagccacctgagt

SEQ ID NO: 42917 - DNA, 60 bp, Artificial
  Synthetic oligonucleotide
caaccgtggtcttgttgtgtgaggaggcagggcaagtaatcaaactggttctgagagcaa

SEQ ID NO: 42918 - DNA, 60 bp, Artificial
  Synthetic oligonucleotide
gggactgatatggctgttgttggtgacaggggctaatgggcagttttcatgcagagaagg

SEQ ID NO: 42919 - DNA, 60 bp, Artificial
  Synthetic oligonucleotide
ttgggctactcatgctaagcggggtggtcaggggcgacacagcagagacagttgaagcag

SEQ ID NO: 42920 - DNA, 60 bp, Artificial
  Synthetic oligonucleotide
gctgagttcattgttctggcggtggtggccttgctaggtgggagatatgttctgtggcta

SEQ ID NO: 42921 - DNA, 60 bp, Artificial
  Synthetic oligonucleotide
tagggcccctcccagcgacggccgaaccgggttagccatacccgtagtaggactagcaaa

SEQ ID NO: 42922 - DNA, 60 bp, Artificial
  Synthetic oligonucleotide
gcacagctgaatctgagcatgtccactcttggaatatggaccaggcatacgagtaagaga

SEQ ID NO: 42923 - DNA, 60 bp, Artificial
  Synthetic oligonucleotide
gttaccataggagaacaggcccagaggagaggcagagtaggtagggtcaagccagggagg

SEQ ID NO: 42924 - DNA, 60 bp, Artificial
  Synthetic oligonucleotide
ccggccaatttgagggtagttacatcacagtcaccctatgttgtcgtggcgaccaacgct

SEQ ID NO: 42925 - DNA, 60 bp, Artificial
  Synthetic oligonucleotide
atagggaagatccataggttctcggagcaactgcgggtggtggcaatgactgcaacaccc

SEQ ID NO: 42926 - DNA, 60 bp, Artificial
  Synthetic oligonucleotide
gtatgcccaacaaggtgtgcagtttatcaagtcccaagctttgaagatacaaggagaacc

SEQ ID NO: 42927 - DNA, 60 bp, Artificial
  Synthetic oligonucleotide
ctgagactgggagggcactaaaacaagtaactggcctgtcagcggctgaaaatgctctgc

SEQ ID NO: 42928 - DNA, 60 bp, Artificial
  Synthetic oligonucleotide
ccataggaataaactagaggagaaggacatccccgcagcaaccgtgacgacctggctggc

SEQ ID NO: 42929 - DNA, 60 bp, Artificial
  Synthetic oligonucleotide
gggacttagaacatctgggttggatattaagaggccccgccgtgtgcaagaagatcaccg

SEQ ID NO: 42930 - DNA, 60 bp, Artificial
  Synthetic oligonucleotide
agtcaggaacgaggttatggtccattggtttgaagaggaggaggtctacgggatgcccaa

SEQ ID NO: 42931 - DNA, 60 bp, Artificial
  Synthetic oligonucleotide
aaacataggcgaaattctgggtacggagaaacaccaagtagagagcataataagagacct

SEQ ID NO: 42932 - DNA, 60 bp, Artificial
  Synthetic oligonucleotide
cccagaagccaaggtgaggctggcgataacgaaggtgatgtacaaatgggtcaaacagaa

SEQ ID NO: 42933 - DNA, 60 bp, Artificial
  Synthetic oligonucleotide
aggggagagttcaagcagattaccctggccacgggagcaggaaagactacagaactacct

SEQ ID NO: 42934 - DNA, 60 bp, Artificial
  Synthetic oligonucleotide
cagcaagcaggatcagaggcccagcgctcaaatggacacacaacatcttggattgtccct

SEQ ID NO: 42935 - DNA, 60 bp, Artificial
  Synthetic oligonucleotide
ctcaaagcccgtagtcaaggggaagtacaacgccactctactcaacggtagtgcattcca

SEQ ID NO: 42936 - DNA, 60 bp, Artificial
  Synthetic oligonucleotide
cctcatctccactgcagtcgttaccagatggaatttagacatagccggtgcactcctaca

SEQ ID NO: 42937 - DNA, 60 bp, Artificial
  Synthetic oligonucleotide
gggtgaacccctatttggtgagataagtgagatacacccgcaatcgaccctaaagctgcc

SEQ ID NO: 42938 - DNA, 60 bp, Artificial
  Synthetic oligonucleotide
cccggttagtggcatatacatcaagccagggccagttttctaccaggattaccaggggcc

SEQ ID NO: 42939 - DNA, 60 bp, Artificial
  Synthetic oligonucleotide
aataaccgtggtggcactaaggactacctgggtcaacagcgggcctgggctggatgtagc

SEQ ID NO: 42940 - DNA, 60 bp, Artificial
  Synthetic oligonucleotide
ggcttgttgatgacactccatgcgataggggcggggtggtgattagtaagactggcacac

SEQ ID NO: 42941 - DNA, 60 bp, Artificial
  Synthetic oligonucleotide
cttcgcaagtggagtgttgggaaagaagcaagtgggcgttggcatctggaaacagggtgt

SEQ ID NO: 42942 - DNA, 60 bp, Artificial
  Synthetic oligonucleotide
ctcggaaagtgggagtgctctatgcagacgataccgccggatgggacacccgagtaactc

SEQ ID NO: 42943 - DNA, 60 bp, Artificial
  Synthetic oligonucleotide
gcgaggttcaggccaagtcgtgacttatgcactaaacaccctaacaaatatcaaggtgca

SEQ ID NO: 42944 - DNA, 60 bp, Artificial
  Synthetic oligonucleotide
gcttgcttggatgcatgagcgcggttacgttccactcaagggagttgtggtcgacttggg

SEQ ID NO: 42945 - DNA, 60 bp, Artificial
  Synthetic oligonucleotide
cgtcctctcgctgatgattaccgagggagtgtgggccattttggatggagtggggctggt

SEQ ID NO: 42946 - DNA, 60 bp, Artificial
  Synthetic oligonucleotide
gagacggaaggaagctgatcgtcccgtgccgggaccagcatgaattggttggacggtcaa

SEQ ID NO: 42947 - DNA, 60 bp, Artificial
  Synthetic oligonucleotide
gtttcagcaagcagactcatcacagagggtagcttacaagtggcttggattctcgttggc

SEQ ID NO: 42948 - DNA, 60 bp, Artificial
  Synthetic oligonucleotide
ggctgtgtatgctgagagatttgatgaaccctgtctatgggctatgactgtctccacagt

SEQ ID NO: 42949 - DNA, 60 bp, Artificial
  Synthetic oligonucleotide
cgggaggatggtgacagatggtggtgaagagctgggacttattccaattgatcatccgcc

SEQ ID NO: 42950 - DNA, 60 bp, Artificial
  Synthetic oligonucleotide
tccaagaccatccaccgtctgtcacactcaccaaaccatctcttctcaagcatgtgggag

SEQ ID NO: 42951 - DNA, 60 bp, Artificial
  Synthetic oligonucleotide
gggtagctgtgcctgtgacttttgccatcttagccctcagacagtggaacagaagcatcc

SEQ ID NO: 42952 - DNA, 60 bp, Artificial
  Synthetic oligonucleotide
gtcgcctcttgaaagcagcgatggtcatacttaacatcctgaagaacttggtgatggggc

SEQ ID NO: 42953 - DNA, 60 bp, Artificial
  Synthetic oligonucleotide
gggttccctcatggaagacaaagagaagcattgcggctacatgccagctaatcctctaga

SEQ ID NO: 42954 - DNA, 60 bp, Artificial
  Synthetic oligonucleotide
tcctgagggtgattggaagactggacatgattggataacagagtttgaagggaaaacagt

SEQ ID NO: 42955 - DNA, 60 bp, Artificial
  Synthetic oligonucleotide
gagcttgtcatcatggatgaagcacattggacagacccctctagcattgcggcccgagga

SEQ ID NO: 42956 - DNA, 60 bp, Artificial
  Synthetic oligonucleotide
ctgaagaacatcattatttccagagagctccccatgaatggcagaggaagaaaggtgatg

SEQ ID NO: 42957 - DNA, 60 bp, Artificial
  Synthetic oligonucleotide
ctctgactacgtgtgtaagcgaggtttcagtgacagaggttggggcaatggatgcggctt

SEQ ID NO: 42958 - DNA, 60 bp, Artificial
  Synthetic oligonucleotide
tttgcataaagatcttgtgtccttataatccggaagtcattgagcacttgagcaggtggc

SEQ ID NO: 42959 - DNA, 60 bp, Artificial
  Synthetic oligonucleotide
ggagtggcacactggtgctggttttacccaattcatgaggctgcactcaccatgaaagcg

SEQ ID NO: 42960 - DNA, 60 bp, Artificial
  Synthetic oligonucleotide
gaccggggtttgttggctcccgtggccaaggacgataacgccatccatagctcaaattgg

SEQ ID NO: 42961 - DNA, 60 bp, Artificial
  Synthetic oligonucleotide
tgtcatcgatcacagcggttacaacccaacttatgcgcagattcacccttgaggctgggc

SEQ ID NO: 42962 - DNA, 60 bp, Artificial
  Synthetic oligonucleotide
ctgtcgagctcactgggtatggtgtcctggaattcagttgtagggtggtagcaagcacgg

SEQ ID NO: 42963 - DNA, 60 bp, Artificial
  Synthetic oligonucleotide
gccgctgttgtcgctaatgaaatggggttcttggaacgaacaaagaaggacttccgagag

SEQ ID NO: 42964 - DNA, 60 bp, Artificial
  Synthetic oligonucleotide
catcaaaattggtgacattgatgtgcaatggaatcagccgggaatgactgtggggaagac

SEQ ID NO: 42965 - DNA, 60 bp, Artificial
  Synthetic oligonucleotide
cgcttccataggcgcctacctcagggaaatgggagaatggagtagtgccaaagaagccgt

SEQ ID NO: 42966 - DNA, 60 bp, Artificial
  Synthetic oligonucleotide
actgcctttggacagcagagagtgtttaaagagaaagttgacaccaaagcacccgaacct

SEQ ID NO: 42967 - DNA, 60 bp, Artificial
  Synthetic oligonucleotide
ccatggggtattatgggattgatagtcctgttgtacatgggcttctttccttctctgggc

SEQ ID NO: 42968 - DNA, 60 bp, Artificial
  Synthetic oligonucleotide
cccaaccagccttacagaacttggacttatcatggcagttacagcataagggatgttggc

SEQ ID NO: 42969 - DNA, 60 bp, Artificial
  Synthetic oligonucleotide
gagaaggaggaagcctgattgaggattggtgttgccgcacctgtacccttccacccctgc

SEQ ID NO: 42970 - DNA, 60 bp, Artificial
  Synthetic oligonucleotide
cctggagccatggagttgtgcgagtggaacgtggagaatgtcctggcacaaaagttgagg

SEQ ID NO: 42971 - DNA, 60 bp, Artificial
  Synthetic oligonucleotide
gcagttgtgatgaacgacggcggttggatctttcttaaacctacagtggctgacataggg

SEQ ID NO: 42972 - DNA, 60 bp, Artificial
  Synthetic oligonucleotide
gctccagcctgatagacaacccaaccagagcgcagtgggcaaaactactcaaaggggctg

SEQ ID NO: 42973 - DNA, 60 bp, Artificial
  Synthetic oligonucleotide
aagttgtattggtgaccgtggccttgctctatggatttgggaacaagctacaaacgtgga

SEQ ID NO: 42974 - DNA, 60 bp, Artificial
  Synthetic oligonucleotide
gacctcagaactcttggattcgctatcatgagctcagtgcccaaggactggtttcccact

SEQ ID NO: 42975 - DNA, 60 bp, Artificial
  Synthetic oligonucleotide
ttgagcgatgggagactggtcaacacagctaaggaaaataccaccaccactgatggactc

SEQ ID NO: 42976 - DNA, 60 bp, Artificial
  Synthetic oligonucleotide
ctggacgtggtgtacacctacatgagagccaacaaagaatcaagagcgtggaaaatggca

SEQ ID NO: 42977 - DNA, 60 bp, Artificial
  Synthetic oligonucleotide
tgctggctcagcggttctttggatgggtggagcagccccttgtgtcgtgggtgggagcct

SEQ ID NO: 42978 - DNA, 60 bp, Artificial
  Synthetic oligonucleotide
gttcctattgcttcagctgacgggtgggcccctcatagctgaatgggcagggtacgcgga

SEQ ID NO: 42979 - DNA, 60 bp, Artificial
  Synthetic oligonucleotide
gcctcacggaaacggagtggccaacgctcggtagacccaatagccattgtcgtgacgttg

SEQ ID NO: 42980 - DNA, 60 bp, Artificial
  Synthetic oligonucleotide
gagattgggtccagaaagcaggatacctgtgcgcgggataccaccaagttgtgtccagtc

SEQ ID NO: 42981 - DNA, 60 bp, Artificial
  Synthetic oligonucleotide
caaaacggccagtgtcttctatgagcctgagatcaccaaaatgcctgacacacctggcta

SEQ ID NO: 42982 - DNA, 60 bp, Artificial
  Synthetic oligonucleotide
ctcgtctcgtgcagtcctatggctggaacctggtgactttcaagaaggctgacgtgagga

SEQ ID NO: 42983 - DNA, 60 bp, Artificial
  Synthetic oligonucleotide
tgaaagagcggtaactcccgcctcagctgctcaaaggagaggaagagtggggcgtgagga

SEQ ID NO: 42984 - DNA, 60 bp, Artificial
  Synthetic oligonucleotide
gaaggagatggagcaggcactcagaggcaagcctgttagttttcattcttcagcagcgag

SEQ ID NO: 42985 - DNA, 60 bp, Artificial
  Synthetic oligonucleotide
tggggttgttggagagataggatgtatgattgatgtgggaaggagagagctgacttgtgg

SEQ ID NO: 42986 - DNA, 60 bp, Artificial
  Synthetic oligonucleotide
gctcaggccaatgtgccagcagaaaccgaacctgaagtgctgaaaaccaactggacatca

SEQ ID NO: 42987 - DNA, 60 bp, Artificial
  Synthetic oligonucleotide
aggtcaaccaacactctgcacactgccagttgtagccggattgggcaagatactgcgagg

SEQ ID NO: 42988 - DNA, 60 bp, Artificial
  Synthetic oligonucleotide
gatggaggacacttgagttgcaggatcggagtcaatggactgaagatggttggggctacc

SEQ ID NO: 42989 - DNA, 60 bp, Artificial
  Synthetic oligonucleotide
caggtgaaggagccccatgccgtataccattcagagttgaacgagtggacaagcctatgg

SEQ ID NO: 42990 - DNA, 60 bp, Artificial
  Synthetic oligonucleotide
cctgctgtagatgtctggcttgatgaagtgtcccagtcctctgtcattgctagccatgaa

SEQ ID NO: 42991 - DNA, 60 bp, Artificial
  Synthetic oligonucleotide
ggacgacagggtcctttcttggattaaccctctcaatgcctggagatttgggcgtgcccc

SEQ ID NO: 42992 - DNA, 60 bp, Artificial
  Synthetic oligonucleotide
gggagagtgtctccaggaaatggctggatgatcaaagagacagcttgccttagcaaggct

SEQ ID NO: 42993 - DNA, 60 bp, Artificial
  Synthetic oligonucleotide
ccaagcattgcatttaacctgaggataggggagatgaaggaaggggacatggccacaggg

SEQ ID NO: 42994 - DNA, 60 bp, Artificial
  Synthetic oligonucleotide
tccaagcattgcatttaacctgaggataggggagatgaaggaaggggacatggccacagg

SEQ ID NO: 42995 - DNA, 60 bp, Artificial
  Synthetic oligonucleotide
aagagagaaaagaaacccggggagtttggaaaagcgaaaggaagccgagccatatggttc

SEQ ID NO: 42996 - DNA, 60 bp, Artificial
  Synthetic oligonucleotide
agaaacccggggagtttggaaaagcgaaaggaagccgagccatatggttcatgtggctag

SEQ ID NO: 42997 - DNA, 56 bp, Artificial
  Synthetic oligonucleotide
aaaacctggtgaatttggaaaagcgaaaggaagccgagccatatggttcatgtggc

SEQ ID NO: 42998 - DNA, 60 bp, Artificial
  Synthetic oligonucleotide
gtagcaggtggcaaaccaaccgatgtcacggagagcttgaactgtgattcgaccaggcgg

SEQ ID NO: 42999 - DNA, 60 bp, Artificial
  Synthetic oligonucleotide
gtccccttggggttctgcgtcgtcataacactggctatgttcttggtgtacccagtattg

SEQ ID NO: 43000 - DNA, 60 bp, Artificial
  Synthetic oligonucleotide
tgttcccgaacatacgtagcgacctcatggagctcgtgaaagctgttaaggagcccgagg

SEQ ID NO: 43001 - DNA, 60 bp, Artificial
  Synthetic oligonucleotide
gagctttcaaaactggacggggcaacagggagaaatcccggggtagcgaacctcctccgt

SEQ ID NO: 43002 - DNA, 60 bp, Artificial
  Synthetic oligonucleotide
cggaccgtgatcttaacacccacccgggtagtcatggctgaggtcgttgaggccttgaat

SEQ ID NO: 43003 - DNA, 60 bp, Artificial
  Synthetic oligonucleotide
cgtcaacgcatcctattcgactgacgtgtgtcccggtggatcgcagctcaacatggcaga

SEQ ID NO: 43004 - DNA, 60 bp, Artificial
  Synthetic oligonucleotide
acaaatcacgcggggtaaatgagacggagcggggtgactatgtctctcgtggcggcctca

SEQ ID NO: 43005 - DNA, 60 bp, Artificial
  Synthetic oligonucleotide
ggcgcggtagcccccttcaaccagtttcgagctctggaaaagtcaacaacgatcggtctg

SEQ ID NO: 43006 - DNA, 60 bp, Artificial
  Synthetic oligonucleotide
caagttctcatcttatgttgcacatggacgcgctgagggtgatctggggcttctaccgac

SEQ ID NO: 43007 - DNA, 60 bp, Artificial
  Synthetic oligonucleotide
ggaccaatttcgcgagtgaatcacataatcgggtacaagacacaaactgactttccgtgg

SEQ ID NO: 43008 - DNA, 60 bp, Artificial
  Synthetic oligonucleotide
ggcacggcatggagaaagttgttgtgtggggagatgctaggtccaatgagattctagtaa

SEQ ID NO: 43009 - DNA, 60 bp, Artificial
  Synthetic oligonucleotide
gtgacgtgatgaatggagaagtgcgtgaccggtacacaactgagcgctcccttaccgtgg

SEQ ID NO: 43010 - DNA, 60 bp, Artificial
  Synthetic oligonucleotide
tggttggcgacataccgctcacatttaggtttgcgaaactcggaaacgcggcgatgacct

SEQ ID NO: 43011 - DNA, 60 bp, Artificial
  Synthetic oligonucleotide
gtgcttggtcgtagccgattgcaaaagggaggggtagtcagcatctcggagagtgcctgc

SEQ ID NO: 43012 - DNA, 60 bp, Artificial
  Synthetic oligonucleotide
cccgacgtgttaccgctcttgaatctcgccgaaccacaggaaatcccatgacgctagctt

SEQ ID NO: 43013 - DNA, 60 bp, Artificial
  Synthetic oligonucleotide
cacgcccaggtaattggaccgaatgacacggaatcttggtgttgccagtcatgcacaaga

SEQ ID NO: 43014 - DNA, 60 bp, Artificial
  Synthetic oligonucleotide
cgtggtggatcggtatcgacggtttggcgtgtctggtgttgcgggagtgtggcaggatct

SEQ ID NO: 43015 - DNA, 60 bp, Artificial
  Synthetic oligonucleotide
aagaaacaggacataacctgcggaagcctgatcggggtcaaggagcgcgcaacgtgggca

SEQ ID NO: 43016 - DNA, 55 bp, Artificial
  Synthetic oligonucleotide
ggggctatctgcgtgggtgttgctggtggcgtcctcatcggcgcaaccgcaagac

SEQ ID NO: 43017 - DNA, 60 bp, Artificial
  Synthetic oligonucleotide
ccacgtacctggcgggcgttgccgtaaagaatggccgaactgtcatcactgacggcatgt

SEQ ID NO: 43018 - DNA, 60 bp, Artificial
  Synthetic oligonucleotide
gggatctcgtcggaaaggaacgggccctccatctgcaagggaagtgtgaaatgtgtatct

SEQ ID NO: 43019 - DNA, 60 bp, Artificial
  Synthetic oligonucleotide
gccggttccttgaatttgaggctctcggctttcttaatgcggatcactgggtcagtaggg

SEQ ID NO: 43020 - DNA, 60 bp, Artificial
  Synthetic oligonucleotide
aacagggtgtgttcccttatggagcacgttcgagcagggcacattggtgtcgggcgtgac

SEQ ID NO: 43021 - DNA, 60 bp, Artificial
  Synthetic oligonucleotide
tctcgcagggaagaccacttctcgggcatttgtcaagtgcgggaaccatacaagcacctt

SEQ ID NO: 43022 - DNA, 60 bp, Artificial
  Synthetic oligonucleotide
gaccattttattcgtcccatcgcacaaccaagctaacaccctggctagtgctattcctgg

SEQ ID NO: 43023 - DNA, 60 bp, Artificial
  Synthetic oligonucleotide
gggcgcaggaaccggaaagatcatcgaaaaccgatttggcaaacaagagtatcgaccaca

SEQ ID NO: 43024 - DNA, 60 bp, Artificial
  Synthetic oligonucleotide
gcctgaagcccaaatgatcctggaccagctcggcatgacttttatgctagaggaagctgc

SEQ ID NO: 43025 - DNA, 59 bp, Artificial
  Synthetic oligonucleotide
acgggataaatattcctgacttaaaagggcgctatggagaggatgggatcgtcgtgggg

SEQ ID NO: 43026 - DNA, 60 bp, Artificial
  Synthetic oligonucleotide
gctagcaaccgatctgatgatctcttgggactcggcggacctgttgaaactgacctccag

SEQ ID NO: 43027 - DNA, 60 bp, Artificial
  Synthetic oligonucleotide
agttgtcgttcctcactctggtagcgccttgcgcgacgtggtgtcgtatggtggaccttg

SEQ ID NO: 43028 - DNA, 60 bp, Artificial
  Synthetic oligonucleotide
ggtcatccggattgtcgcatcgcggcccgatattcgccgactttgcggaaaagctgtctc

SEQ ID NO: 43029 - DNA, 60 bp, Artificial
  Synthetic oligonucleotide
cgaagggctttgcgaccccttgtggattctgccacgcgtgtgaagctggttgaaacgaac

SEQ ID NO: 43030 - DNA, 60 bp, Artificial
  Synthetic oligonucleotide
tgcacacggtctcctggagattttctccgagggtcattggtggtcggggctagcatgtgg

SEQ ID NO: 43031 - DNA, 60 bp, Artificial
  Synthetic oligonucleotide
ggggagtttgttgaaccgttatacacgctgaaagcggaacagatgaccatgctacagacc

SEQ ID NO: 43032 - DNA, 60 bp, Artificial
  Synthetic oligonucleotide
gctgtccttccctctggttttgccattgtcgcgattgctagcctcccaagcgtggtggtg

SEQ ID NO: 43033 - DNA, 60 bp, Artificial
  Synthetic oligonucleotide
ccccgaaagcggatttgctagctgaaatggagatcattgcgttcaagaccattcgcgaaa

SEQ ID NO: 43034 - DNA, 60 bp, Artificial
  Synthetic oligonucleotide
agaattcgtcgccaacgttcgaaatgacgcggctgtgggatcgtggagcagggatgtgcc

SEQ ID NO: 43035 - DNA, 60 bp, Artificial
  Synthetic oligonucleotide
gctcgcgaccagaggcatgatcgtcccactgaaatcactagtagagtgccactcgaaaac

SEQ ID NO: 43036 - DNA, 60 bp, Artificial
  Synthetic oligonucleotide
ggttgaacccggcaagaaatgaagaggaaggatttagaggcgcgaggaaaagcgccaggg

SEQ ID NO: 43037 - DNA, 60 bp, Artificial
  Synthetic oligonucleotide
ttgaagagatacgggaaggcgaacgcgcaatcggatttccggagggtgagccaacgtgca

SEQ ID NO: 43038 - DNA, 60 bp, Artificial
  Synthetic oligonucleotide
atttgggatgtgggcgcggaggctggagccaacgagctgtgatggaggaaacggtgtcct

SEQ ID NO: 43039 - DNA, 60 bp, Artificial
  Synthetic oligonucleotide
ccggacagactacttgcatctgctcaagttacccgctgatggttgctggagtggcatcct

SEQ ID NO: 43040 - DNA, 60 bp, Artificial
  Synthetic oligonucleotide
cctggagctcatggcttcggtggtcctgctgagcgcctacaagagcgtcctgcaggctct

SEQ ID NO: 43041 - DNA, 60 bp, Artificial
  Synthetic oligonucleotide
tcttctaacagccctcacggaagacccctaccacagagcgttgatggcggctaccatgcg

SEQ ID NO: 43042 - DNA, 60 bp, Artificial
  Synthetic oligonucleotide
gctacagagactctggcgcgaatttatggttttggactgtatccttggcgagcgctgggg

SEQ ID NO: 43043 - DNA, 60 bp, Artificial
  Synthetic oligonucleotide
tctccggggctaggtctaacgtggtgcgcaccacatacatgacgctggccgccttaatgg

SEQ ID NO: 43044 - DNA, 60 bp, Artificial
  Synthetic oligonucleotide
cgtagccctgcgcagagctgctttctctgctgttgggtcgatgggttctgaacgggtgta

SEQ ID NO: 43045 - DNA, 60 bp, Artificial
  Synthetic oligonucleotide
tgggagggcaagcggtgaaccccctcgttaggaagatcatgtggccatgggagactctca

SEQ ID NO: 43046 - DNA, 60 bp, Artificial
  Synthetic oligonucleotide
accattatgtgtgacatcggagagagtgatcccagcccaatcaaggaaaagaccagaact

SEQ ID NO: 43047 - DNA, 60 bp, Artificial
  Synthetic oligonucleotide
gagtgggcgtagggcaggaaaaagacaacgtgttggcctgctaggaaggctgggagttgg

SEQ ID NO: 43048 - DNA, 60 bp, Artificial
  Synthetic oligonucleotide
gtgccacggcttgagcaaaccgtgctgcctgtagctccgccaataacgggaggcgtaaaa

SEQ ID NO: 43049 - DNA, 60 bp, Artificial
  Synthetic oligonucleotide
aataatgggaggcgtaataatccccagggaggccatgcgccacggaagctgtacgcgtgg

SEQ ID NO: 43050 - DNA, 57 bp, Artificial
  Synthetic oligonucleotide
ggtggttagaccgcctttcaatatgctgaaacgcgagagaaaccgcgtatcaacccc

SEQ ID NO: 43051 - DNA, 60 bp, Artificial
  Synthetic oligonucleotide
ggttagaccacctttcaatatgctgaaacgcgagagaaaccgcgtatcaacccctcaagg

SEQ ID NO: 43052 - DNA, 53 bp, Artificial
  Synthetic oligonucleotide
ccacctttcaatatgctgaaacgcgagagaaaccgcgtatcaacccctcaagg

SEQ ID NO: 43053 - DNA, 60 bp, Artificial
  Synthetic oligonucleotide
aagtcaggccacttgtgccacggcttgagcaaaccgtgctgcctgtagctccgccaacaa

SEQ ID NO: 43054 - DNA, 60 bp, Artificial
  Synthetic oligonucleotide
agtcaggccacttgtgccacggcttgagcaaaccgtgctgcctgtagctccgccaataac

SEQ ID NO: 43055 - DNA, 60 bp, Artificial
  Synthetic oligonucleotide
agtcaggccacttgtgccacggcttgagcaaaccgtgctgcctgtagctccgccaacaat

SEQ ID NO: 43056 - DNA, 60 bp, Artificial
  Synthetic oligonucleotide
cttgtgccacggcttgagcaaaccgtgctgcctgtagctccgccaataatgggaggcgta

SEQ ID NO: 43057 - DNA, 60 bp, Artificial
  Synthetic oligonucleotide
gtgccacggcttgagcaaaccgtgctgcctgtagctccgccaataacgggaggcgttaaa

SEQ ID NO: 43058 - DNA, 58 bp, Artificial
  Synthetic oligonucleotide
aggtggttagaccacctttcaatatgctgaaacgcgagagaaaccgcgtatcaacccc

SEQ ID NO: 43059 - DNA, 60 bp, Artificial
  Synthetic oligonucleotide
aaaggtggctagaccgcctttcaatatgctgaaacgcgagagaaaccgcgtatcaacccc

SEQ ID NO: 43060 - DNA, 60 bp, Artificial
  Synthetic oligonucleotide
ccaacacaaaaacagcatattgacgctgggaaagaccagagatcctgctgtctctgcaac

SEQ ID NO: 43061 - DNA, 60 bp, Artificial
  Synthetic oligonucleotide
ccacggaagctgtacgcgtggcatattggactagcggttagaggagacccctcccatcac

SEQ ID NO: 43062 - DNA, 58 bp, Artificial
  Synthetic oligonucleotide
aaaatcccggggaggccatgcgccacggaagctgtacgcgtggcatattggactagtg

SEQ ID NO: 43063 - DNA, 60 bp, Artificial
  Synthetic oligonucleotide
aaaattcccagggaggccatgcgccacggaagctgtacgcgtggcatattggactagcgg

SEQ ID NO: 43064 - DNA, 60 bp, Artificial
  Synthetic oligonucleotide
tgcgccacggaagctgtacgcgtggcatattggactagcggttagaggagacccctccca

SEQ ID NO: 43065 - DNA, 60 bp, Artificial
  Synthetic oligonucleotide
aaatcccggggaggccatgcgccacggaagctgtacgcgtggcatattggactagcggtt

SEQ ID NO: 43066 - DNA, 60 bp, Artificial
  Synthetic oligonucleotide
aataacgggaggcgttaaaaatcccggggaggccatgcgccacggaagctgtacgcgtgg

SEQ ID NO: 43067 - DNA, 60 bp, Artificial
  Synthetic oligonucleotide
aataatgggaggcgtaaaattcccagggaggccatgcgccacggaagctgtacgcgtggc

SEQ ID NO: 43068 - DNA, 60 bp, Artificial
  Synthetic oligonucleotide
cgggaggcgttaaattcccagggaggccatgcgccacggaagctgtacgcgtggcatatt

SEQ ID NO: 43069 - DNA, 60 bp, Artificial
  Synthetic oligonucleotide
taacgggaggcgtaaaaatcccggggaggccatgcgccacggaagctgtacgcgtggcat

SEQ ID NO: 43070 - DNA, 60 bp, Artificial
  Synthetic oligonucleotide
taacgcagaaagcgtctagccatggcgttagtatgagtgttgtgcagcttccaggacccc

SEQ ID NO: 43071 - DNA, 60 bp, Artificial
  Synthetic oligonucleotide
ttgccgggcagcctccaggaccccccctcccgggagagccatagtggtctgcggaaccgg

SEQ ID NO: 43072 - DNA, 60 bp, Artificial
  Synthetic oligonucleotide
ggcgtccgggttctggaggacggcgtgaactatgcaacagggaatcttcctggttgctct

SEQ ID NO: 43073 - DNA, 60 bp, Artificial
  Synthetic oligonucleotide
gtcgcccacaggacgtcaagttcccgggtggcggtcagatcgttggtggagtttacttgt

SEQ ID NO: 43074 - DNA, 60 bp, Artificial
  Synthetic oligonucleotide
gtggaagctgtacgcacggtgtagcagactagcggttagaggagacccctcccatgacac

SEQ ID NO: 43075 - DNA, 60 bp, Artificial
  Synthetic oligonucleotide
agggtagggcctgggctcagcccgggtacccttggcccctctatgccaatgagggcatgg

SEQ ID NO: 43076 - DNA, 60 bp, Artificial
  Synthetic oligonucleotide
ttacttgttgccgcgcaggggccctagattgggtgtgcgcgcgactaggaagacttccga

SEQ ID NO: 43077 - DNA, 60 bp, Artificial
  Synthetic oligonucleotide
gggcccaaggtgagatgaagctgtagtctcactggaaggactagaggttagaggagaccc

SEQ ID NO: 43078 - DNA, 60 bp, Artificial
  Synthetic oligonucleotide
ggcccaaggtgagatgaagctgtagtctcactggaaggactagaggttagaggagacccc

SEQ ID NO: 43079 - DNA, 60 bp, Artificial
  Synthetic oligonucleotide
acgctgggagagaccagagatcctgctgtctctacagcatcattccaggcacagaacgcc

SEQ ID NO: 43080 - DNA, 60 bp, Artificial
  Synthetic oligonucleotide
ggctcggagcccgctttctggagttcgaggctctgggttttctcaatgaagaccactggc

SEQ ID NO: 43081 - DNA, 60 bp, Artificial
  Synthetic oligonucleotide
ccatggaagctgtacgcatggggtagcagactagtggttagaggagacccctcccaagac

SEQ ID NO: 43082 - DNA, 60 bp, Artificial
  Synthetic oligonucleotide
gtttatctgtgtgaacttcttggcttagtatcgttgagaagaatcgagagattagtgcag

SEQ ID NO: 43083 - DNA, 60 bp, Artificial
  Synthetic oligonucleotide
agaagtttatctgtgtgaacttcttggcttagtatcgttgagaagaatcgagagattagt

SEQ ID NO: 43084 - DNA, 59 bp, Artificial
  Synthetic oligonucleotide
caccggaagttgagtagacggtgctgcctgcgactcaaccccaggaggactgggtgaac

SEQ ID NO: 43085 - DNA, 60 bp, Artificial
  Synthetic oligonucleotide
tcccgccaccggaagttgagtagacggtgctgcctgcgactcaaccccaggaggactggg

SEQ ID NO: 43086 - DNA, 60 bp, Artificial
  Synthetic oligonucleotide
gttcccgccaccggaagttgagtagacggtgctgcctgcgactcaaccccaggaggactg

SEQ ID NO: 43087 - DNA, 60 bp, Artificial
  Synthetic oligonucleotide
aggacgtcaagttcccgggtggtggccagatcgttggtggagtttacctgttgccgcgca

SEQ ID NO: 43088 - DNA, 60 bp, Artificial
  Synthetic oligonucleotide
ctgctgtctccccagcatcattccaggcacagaacgccagaaaatggaatggtgctgttg

SEQ ID NO: 43089 - DNA, 60 bp, Artificial
  Synthetic oligonucleotide
ctgctgtttcctcagcatcattccaggcacagaacgccagaaaatggaatggtgctgttg

SEQ ID NO: 43090 - DNA, 60 bp, Artificial
  Synthetic oligonucleotide
acaaaaaacagcatattgacgatgggaaagaccagagatcctgctgtctcctcagcatca

SEQ ID NO: 43091 - DNA, 60 bp, Artificial
  Synthetic oligonucleotide
cgttcttcaagtttacagcattagccccgaccaaggcgcttttgggccgctggagagcag

SEQ ID NO: 43092 - DNA, 60 bp, Artificial
  Synthetic oligonucleotide
cgttcttcaagtttacagcattagccccgaccaaggcgcttttgggccgttggagagcag

SEQ ID NO: 43093 - DNA, 60 bp, Artificial
  Synthetic oligonucleotide
gttcttcaagtttacagcattagccccgaccaaggcgcttttgggccgctggagagcagt

SEQ ID NO: 43094 - DNA, 60 bp, Artificial
  Synthetic oligonucleotide
gttcttcaagtttacagcattagccccgaccaaggcgctttcaggccgatggaaagcagt

SEQ ID NO: 43095 - DNA, 60 bp, Artificial
  Synthetic oligonucleotide
cggagttagtagcttgttgaatgaaaagcggaaggccgcagagaagaagaaaggggccgt

SEQ ID NO: 43096 - DNA, 60 bp, Artificial
  Synthetic oligonucleotide
agtggcttcagccggagtccaatacaatgatagaaaatggtgctttgacggacctagatc

SEQ ID NO: 43097 - DNA, 60 bp, Artificial
  Synthetic oligonucleotide
tcgcccgatacttgattttagtaggagctgctttcatggagcataacaatggtggagacg

SEQ ID NO: 43098 - DNA, 60 bp, Artificial
  Synthetic oligonucleotide
gcctgacttactgaatgcagcggccatagcctggatgatcatacgagctctcgcaagacc

SEQ ID NO: 43099 - DNA, 60 bp, Artificial
  Synthetic oligonucleotide
gcgcggctacacgaaaggtggtgctggacacgaagaaccaatgctgatgcagagctacgg

SEQ ID NO: 43100 - DNA, 60 bp, Artificial
  Synthetic oligonucleotide
gggtcgcaggagggagcacttcatcaagcccttgcaggagccattccagtgcagatggat

SEQ ID NO: 43101 - DNA, 60 bp, Artificial
  Synthetic oligonucleotide
gaaggacgggagaagtttggtggtcccctgtcggggtcaagacgagttgataggaagggc

SEQ ID NO: 43102 - DNA, 60 bp, Artificial
  Synthetic oligonucleotide
cgtggacgtaccatggaagctatgaggtgaagccaactgggtcggcaagttctctagtca

SEQ ID NO: 43103 - DNA, 60 bp, Artificial
  Synthetic oligonucleotide
gcggtcagccatggggtttgtggaggtcctaggaagaatgccagaacacttcgctgggaa

SEQ ID NO: 43104 - DNA, 60 bp, Artificial
  Synthetic oligonucleotide
gcaaacccattcgtctcagccacaacagccaattctaaagtgcttgtcgaaatagaacct

SEQ ID NO: 43105 - DNA, 60 bp, Artificial
  Synthetic oligonucleotide
cagtggcagtccaggctcacggagaaagcacgctagtgaataagaaagaagcctggttgg

SEQ ID NO: 43106 - DNA, 60 bp, Artificial
  Synthetic oligonucleotide
gacaaggttacaaagtgcagctacagggtccttggaatgaggagcagatcacactggact

SEQ ID NO: 43107 - DNA, 60 bp, Artificial
  Synthetic oligonucleotide
gcgtgagtgccacctacgaggagaatgccggacctgcatatacaacatgatggggaagag

SEQ ID NO: 43108 - DNA, 60 bp, Artificial
  Synthetic oligonucleotide
acaaggactcgttgtgcggagtacggtcagtaacccgcctggagcaccagatgtgggaga

SEQ ID NO: 43109 - DNA, 60 bp, Artificial
  Synthetic oligonucleotide
gtgtgggagtctaattggaacgcgtccgcgctcaacatgggctgagaacatctatgcggc

SEQ ID NO: 43110 - DNA, 60 bp, Artificial
  Synthetic oligonucleotide
ggggatgagtaccactatggaggaggaacgagcgaagatgattccattctcgcccactgg

SEQ ID NO: 43111 - DNA, 60 bp, Artificial
  Synthetic oligonucleotide
tccaccggcgggacctgcgaatcatggccaacgcaatatgctcagccgtccctgtgaact

SEQ ID NO: 43112 - DNA, 60 bp, Artificial
  Synthetic oligonucleotide
ccactcgacgacaggttcgcaggagctttgcactttcttaatgccatgtccaaggttagg

SEQ ID NO: 43113 - DNA, 60 bp, Artificial
  Synthetic oligonucleotide
ctgaagttctcacagcggtgggactgatgtttgctatagtgggagggctggccgagcttg

SEQ ID NO: 43114 - DNA, 60 bp, Artificial
  Synthetic oligonucleotide
atgaagcaataagcatgaccaccagcatgttcaccctggacctccggccagccaccgcct

SEQ ID NO: 43115 - DNA, 60 bp, Artificial
  Synthetic oligonucleotide
gcgccgcagacataacctgggagcaggacgcagccatcacgggaactagtgaaagagttg

SEQ ID NO: 43116 - DNA, 60 bp, Artificial
  Synthetic oligonucleotide
gggacttcggttcaattggtggggtcttcaactccttgggtaaagccatgcaccaggtct

SEQ ID NO: 43117 - DNA, 60 bp, Artificial
  Synthetic oligonucleotide
attgtgcctagcaacgttttttctatggatggccgatgtgtcatgtacgaagatcgctgg

SEQ ID NO: 43118 - DNA, 60 bp, Artificial
  Synthetic oligonucleotide
gtatgcgaaaggagacaccacccctggcgtttataggataatggcaaaaggactcttagg

SEQ ID NO: 43119 - DNA, 60 bp, Artificial
  Synthetic oligonucleotide
gcggacacaggatgtgctcttgacattgggagaagagaattgcggtgcggcagtggtgtg

SEQ ID NO: 43120 - DNA, 60 bp, Artificial
  Synthetic oligonucleotide
caccacagcttctggatgttggtatggaatggaaatccggccaatgaagcatgacgagac

SEQ ID NO: 43121 - DNA, 60 bp, Artificial
  Synthetic oligonucleotide
ccaaggccccagaaccgccagcgggtgtgaaagaagtgatgaatgagacaacaaactggc

SEQ ID NO: 43122 - DNA, 60 bp, Artificial
  Synthetic oligonucleotide
cgaactcaccagtccaggacattccgaatgaggtgcctgatagggcttggagcagcggtt

SEQ ID NO: 43123 - DNA, 60 bp, Artificial
  Synthetic oligonucleotide
ggggacgaaggctggaggaaagatctacgcggatgacactgcaggctgggacacacgaat

SEQ ID NO: 43124 - DNA, 60 bp, Artificial
  Synthetic oligonucleotide
ggcaccaaccgatggcttatgctgatggtaactttggtggctatgggaggattagcagcc

SEQ ID NO: 43125 - DNA, 60 bp, Artificial
  Synthetic oligonucleotide
ctgtttgtcatggatgaggctcacttcactgatcccgctagcatcgccgctcgtggatac

SEQ ID NO: 43126 - DNA, 60 bp, Artificial
  Synthetic oligonucleotide
caacagtgtccaattgtccgaccactggagaagcacacaacacaaagcgggccgacccta

SEQ ID NO: 43127 - DNA, 60 bp, Artificial
  Synthetic oligonucleotide
agatgttcatctgtgtgaactttttgactcaggattgttggaagggattgaaagattaat

SEQ ID NO: 43128 - DNA, 60 bp, Artificial
  Synthetic oligonucleotide
aacatttaagcgaggctcggccggaggtcggacgctgggagaacagtggaaagacaggct

SEQ ID NO: 43129 - DNA, 60 bp, Artificial
  Synthetic oligonucleotide
agggcatccagtctcccgaggcactgcaaaattgcgatggctggtcgaacggcagttcct

SEQ ID NO: 43130 - DNA, 60 bp, Artificial
  Synthetic oligonucleotide
cagctgaacaggagatcgtatgacacagaatacccgaagtgcaagggtggagagtgggac

SEQ ID NO: 43131 - DNA, 60 bp, Artificial
  Synthetic oligonucleotide
ctccacccaagtaggtgcaaaccaagcagcaaagtttaccatatctccgaacgctccagc

SEQ ID NO: 43132 - DNA, 60 bp, Artificial
  Synthetic oligonucleotide
cccagctgacacaggccacggaacggtagtgttagaactcaagtatttgggagctgacgg

SEQ ID NO: 43133 - DNA, 60 bp, Artificial
  Synthetic oligonucleotide
ggaaagggccacgatatgaagaagatgtgaacttaggcagtggtacaagatccgtaggca

SEQ ID NO: 43134 - DNA, 60 bp, Artificial
  Synthetic oligonucleotide
tgagagattaggagtgtgagtcaggccagtgaaaactgccaccggatgttggtagacggt

SEQ ID NO: 43135 - DNA, 60 bp, Artificial
  Synthetic oligonucleotide
tcggaagtggaacggagtcgatgatgtccaaatgatcgtagtacagccaggaaagccggc

SEQ ID NO: 43136 - DNA, 54 bp, Artificial
  Synthetic oligonucleotide
agctgtaacgcgtgtggaaggactagaggttagaggagaccccgttgtggaaaa

SEQ ID NO: 43137 - DNA, 60 bp, Artificial
  Synthetic oligonucleotide
gccgacatgttaaggaagaggcagctgacagtccttgacctccaccccggagcgggaaaa

SEQ ID NO: 43138 - DNA, 60 bp, Artificial
  Synthetic oligonucleotide
ctagagagggcagtgtttggtgagatcaagacttgcacctggcccgaaacacacacgcta

SEQ ID NO: 43139 - DNA, 60 bp, Artificial
  Synthetic oligonucleotide
ttcgtgatcgacggtcccgaaaccagcgaatgtccgaacagccgccgtgcctggaacagc

SEQ ID NO: 43140 - DNA, 60 bp, Artificial
  Synthetic oligonucleotide
accgatgtgcctgagctggaacggactactcccatgatgcagaagcgcttggggcagatt

SEQ ID NO: 43141 - DNA, 60 bp, Artificial
  Synthetic oligonucleotide
agccatagtggtctgcggaaccggtgagtacaccggaattgccaggacgaccgggtcctt

SEQ ID NO: 43142 - DNA, 60 bp, Artificial
  Synthetic oligonucleotide
agtggtctgcggaaccggtgagtacaccggaattgccaggacgaccgggtcctttcttgg

SEQ ID NO: 43143 - DNA, 60 bp, Artificial
  Synthetic oligonucleotide
ccatagtggtctgcggaaccggtgagtacaccggaattgccaggacgaccgggtcctttc

SEQ ID NO: 43144 - DNA, 60 bp, Artificial
  Synthetic oligonucleotide
catagtggtctgcggaaccggtgagtacaccggaattgccaggacgaccgggtcctttct

SEQ ID NO: 43145 - DNA, 50 bp, Artificial
  Synthetic oligonucleotide
aaatctctgctgtacatggcacatggagttgaatcgttctgaacttttat

SEQ ID NO: 43146 - DNA, 60 bp, Artificial
  Synthetic oligonucleotide
aggagacccccccaaaacaaaaaacagcatattgacgctgggaaagaccagagatcctgc

SEQ ID NO: 43147 - DNA, 60 bp, Artificial
  Synthetic oligonucleotide
aaaaacagcatattgacgctgggaaagaccagagatcctgctgtctctgcaacatcaatc

SEQ ID NO: 43148 - DNA, 60 bp, Artificial
  Synthetic oligonucleotide
aggagacccccccagaacaaaaaacagcatattgacgctgggaaagaccagagatcctgc

SEQ ID NO: 43149 - DNA, 60 bp, Artificial
  Synthetic oligonucleotide
gaggagacccccccaaaacaaaaaacagcatattgacgctgggaaagaccagagatcctg

SEQ ID NO: 43150 - DNA, 60 bp, Artificial
  Synthetic oligonucleotide
tggtcagatcgtcggtggagtttacttgttgccgcgcaggggccccaggttgggtgtgcg

SEQ ID NO: 43151 - DNA, 60 bp, Artificial
  Synthetic oligonucleotide
agggcagggcctgggctcagcccgggtacccttggcccctctatggcaatgagggctgcg

SEQ ID NO: 43152 - DNA, 60 bp, Artificial
  Synthetic oligonucleotide
ggaagacaccacacacctacagtacgccccaaatgctatcaagacggaggggaaggagac

SEQ ID NO: 43153 - DNA, 60 bp, Artificial
  Synthetic oligonucleotide
ggaatacaccacacacctacagtacgccccaaatgctatcaagacggaggggaaggagac

SEQ ID NO: 43154 - DNA, 60 bp, Artificial
  Synthetic oligonucleotide
cattgctggactaaagataccagtagaggagatgaagagcaacatgctggtttttgtgcc

SEQ ID NO: 43155 - DNA, 60 bp, Artificial
  Synthetic oligonucleotide
agttgggccttctggttgtgttcttggccacccaggaggtccttcgcaagaggtggacag

SEQ ID NO: 43156 - DNA, 60 bp, Artificial
  Synthetic oligonucleotide
ctgggaaagaccagagatcctgctgtctcctcagcatcattccaggcacaggacgccaga

SEQ ID NO: 43157 - DNA, 50 bp, Artificial
  Synthetic oligonucleotide
gagagaccagagatcctgctgtctcctcagcatcattccaggcacagaac

SEQ ID NO: 43158 - DNA, 60 bp, Artificial
  Synthetic oligonucleotide
ccccgcataacaataaacagcatattgacgctgggagagaccagagatcctgctgtctct

SEQ ID NO: 43159 - DNA, 60 bp, Artificial
  Synthetic oligonucleotide
ccccgcataataataaacagcatattgacgctgggagagaccagagatcctgctgtctct

SEQ ID NO: 43160 - DNA, 58 bp, Artificial
  Synthetic oligonucleotide
acgcatggggtagcagactagtggttagaggagacccctcccaaaacacaacgcagca

SEQ ID NO: 43161 - DNA, 60 bp, Artificial
  Synthetic oligonucleotide
gctgtacgcatggggtagcagactagtggttagaggagacccctcccgaaacataacgca

SEQ ID NO: 43162 - DNA, 60 bp, Artificial
  Synthetic oligonucleotide
aatgaggtccacacctggacagagcaatacaaatttcaagcggactctcccaaaagactg

SEQ ID NO: 43163 - DNA, 60 bp, Artificial
  Synthetic oligonucleotide
gagccatagtagtctgcggaaccggtgagtacaccggaattgccaggatgaccgggtcct

SEQ ID NO: 43164 - DNA, 60 bp, Artificial
  Synthetic oligonucleotide
gaaacctgaggaccaaacacatgttgaaccccggaaaggtggcggagcaactgcacagag

SEQ ID NO: 43165 - DNA, 50 bp, Artificial
  Synthetic oligonucleotide
ccccgcataacaataaacagcatattgacgctgggagagaccagagatcc

SEQ ID NO: 43166 - DNA, 60 bp, Artificial
  Synthetic oligonucleotide
ggcactcgttccacatgtgggaatgggactggagacacgaactgaaacatggatgtcatc

SEQ ID NO: 43167 - DNA, 60 bp, Artificial
  Synthetic oligonucleotide
tccccgggagagccatagtggtctgcggaaccggtgagtacaccggaattgccaggacga

SEQ ID NO: 43168 - DNA, 60 bp, Artificial
  Synthetic oligonucleotide
ttcccgggagagccatagtggtctgcggaaccggtgagtacaccggaattgccaggacga

SEQ ID NO: 43169 - DNA, 60 bp, Artificial
  Synthetic oligonucleotide
catagtagtctgcggaaccggtgagtacaccggaattgccaggacgaccgggtcctttcc

SEQ ID NO: 43170 - DNA, 60 bp, Artificial
  Synthetic oligonucleotide
gggtgggaagcaaaagagttggcccaaaggacagccggcaggaatcttttcaccttgata

SEQ ID NO: 43171 - DNA, 60 bp, Artificial
  Synthetic oligonucleotide
aacccgagggcagggcctgggctcagcccgggtacccttggcccctctatggcaatgagg

SEQ ID NO: 43172 - DNA, 60 bp, Artificial
  Synthetic oligonucleotide
aggtggccggcttgtcatcagctgaaaatgccctgctcatagctttattcgggtatgtgg

SEQ ID NO: 43173 - DNA, 60 bp, Artificial
  Synthetic oligonucleotide
ggcttgcttgccaaggagaggtgactgtagatcaggtaacagcaaagggccggtgagtgg

SEQ ID NO: 43174 - DNA, 60 bp, Artificial
  Synthetic oligonucleotide
gagtccaacgggcgatgttccaaagaaacgtgagtaggagcctgcacgggatttggcctg

SEQ ID NO: 43175 - DNA, 60 bp, Artificial
  Synthetic oligonucleotide
ccctgcacccttcagttgtgactggacccctagtgatgagaggatcaggctgcccactga

SEQ ID NO: 43176 - DNA, 60 bp, Artificial
  Synthetic oligonucleotide
ggtttcaagggagcgtacctaggcgatgagcccaatcaccgtgatctagtagagagggac

SEQ ID NO: 43177 - DNA, 60 bp, Artificial
  Synthetic oligonucleotide
tggcttcagcttaccaactggctcaaggaaactgggagcctctcgattgtggggtgtacc

SEQ ID NO: 43178 - DNA, 60 bp, Artificial
  Synthetic oligonucleotide
ttgtctgacttcgccccggagactgctagtgtggcgtatttggctctgcattttggcata

SEQ ID NO: 43179 - DNA, 60 bp, Artificial
  Synthetic oligonucleotide
gatgaggctaaaggacacaatggtcaaggtttggtgcaaagaaggtcagttcacgcacta

SEQ ID NO: 43180 - DNA, 60 bp, Artificial
  Synthetic oligonucleotide
ctgggcatatacgcaccaaggaggcataagctcagtggaccatgtgactgctggtaagga

SEQ ID NO: 43181 - DNA, 60 bp, Artificial
  Synthetic oligonucleotide
ggctggaccttggacccgggttggacgcggctatgacagtcttgaccctaaccctactga

SEQ ID NO: 43182 - DNA, 60 bp, Artificial
  Synthetic oligonucleotide
gagggtcaacaccgtctacgacgtggatgaaagcggcgagggagtttatctattcccgtc

SEQ ID NO: 43183 - DNA, 60 bp, Artificial
  Synthetic oligonucleotide
cgaaaagagggatgtcagcgacgattggcaagcaggggacatggtgagtgaaaagaggcc

SEQ ID NO: 43184 - DNA, 60 bp, Artificial
  Synthetic oligonucleotide
atggctgttactgtgggtgagcaagcccagcgtaggggcagagtaggcagggtgaaacca

SEQ ID NO: 43185 - DNA, 60 bp, Artificial
  Synthetic oligonucleotide
gaggcaatcagggacaagatagataaagacgagaaccaacaaaaccaagaattacacggc

SEQ ID NO: 43186 - DNA, 60 bp, Artificial
  Synthetic oligonucleotide
ccggccagcagacccacaccctggttgaagaaatacacgagagggacagtaggccctttg

SEQ ID NO: 43187 - DNA, 60 bp, Artificial
  Synthetic oligonucleotide
ccagccctggcatacctcccatatgctaccagtgcattgaaaatgttcaccccaacaaga

SEQ ID NO: 43188 - DNA, 60 bp, Artificial
  Synthetic oligonucleotide
ccatcctagtgatagtggtggctctcctgggcggcaggtacgtactctggttactggtca

SEQ ID NO: 43189 - DNA, 60 bp, Artificial
  Synthetic oligonucleotide
ggcaggcaaaaccacggagctcccaaaagcagtaatagaagagataggacgacacaagcg

SEQ ID NO: 43190 - DNA, 59 bp, Artificial
  Synthetic oligonucleotide
ggccctttcacggcagccagagacagcgccatcatccaataccacttactactacagtg

SEQ ID NO: 43191 - DNA, 60 bp, Artificial
  Synthetic oligonucleotide
gggttgaagatccctgtggaggagatgaagggtaacatgctagttttcgtgcccacaaga

SEQ ID NO: 43192 - DNA, 60 bp, Artificial
  Synthetic oligonucleotide
gaaactgtcctaagtgcggacgccacgggaaacccataacatgcgggatgtcactagctg

SEQ ID NO: 43193 - DNA, 60 bp, Artificial
  Synthetic oligonucleotide
actgagaaagggttgggactaaggtttgccagcaaagggaagcagatcttacacgaggca

SEQ ID NO: 43194 - DNA, 60 bp, Artificial
  Synthetic oligonucleotide
tagtggtctgcggaaccggtgagtacaccggaattgccaggacgaccgggtcctttccat

SEQ ID NO: 43195 - DNA, 60 bp, Artificial
  Synthetic oligonucleotide
cacgcctgctgatgcgaaggatgaggcggcccacaggcaaagttaccttggaagctgatg

SEQ ID NO: 43196 - DNA, 60 bp, Artificial
  Synthetic oligonucleotide
atgttatcagggacttgtcagccaaagaaggtggagggttttatgctgatgacaccgccg

SEQ ID NO: 43197 - DNA, 60 bp, Artificial
  Synthetic oligonucleotide
aaagggccgctacgaatctcagcgtcatcggccgctcagaggagaggacgcattggacgc

SEQ ID NO: 43198 - DNA, 60 bp, Artificial
  Synthetic oligonucleotide
gctcatgggctttgggctgcgcacactgtggagtcctcgggagcgacttgtaatggcatt

SEQ ID NO: 43199 - DNA, 60 bp, Artificial
  Synthetic oligonucleotide
ccatcagcatgtgcaggagtgtggtgaaaatgtcttagagcggctcgaaacttggcttgc

SEQ ID NO: 43200 - DNA, 60 bp, Artificial
  Synthetic oligonucleotide
tcaccgactggagccactcaagtgtgaaactctcctctgtgacattggagaatcgtcccc

SEQ ID NO: 43201 - DNA, 60 bp, Artificial
  Synthetic oligonucleotide
agaggacaaagtgccctgggaccagatagtaatgacatccctagccctcgtgggagcagc

SEQ ID NO: 43202 - DNA, 60 bp, Artificial
  Synthetic oligonucleotide
attatcatggatgaggcgcacttcctggaccctgctagcatagcagcgagaggctgggcg

SEQ ID NO: 43203 - DNA, 60 bp, Artificial
  Synthetic oligonucleotide
aaccttgttttctcaccagggaggaagaacggcagcttcatcattgacgggaagtcacga

SEQ ID NO: 43204 - DNA, 60 bp, Artificial
  Synthetic oligonucleotide
ggcagggacttgctgtactgcggaaggtcaaaagagttgtagctagcttaatgagaggac

SEQ ID NO: 43205 - DNA, 60 bp, Artificial
  Synthetic oligonucleotide
aaaatgaaggagcctccgccaccaccctcccacggggtgttggaaagatggggtctagag

SEQ ID NO: 43206 - DNA, 60 bp, Artificial
  Synthetic oligonucleotide
ggccactgacacacactattggaacctcagtagaagaaagtgacatgttcatgccccggt

SEQ ID NO: 43207 - DNA, 60 bp, Artificial
  Synthetic oligonucleotide
ccatggagttggcctgacctggatctgaaacctggggcagcctggacagtctatgtggga

SEQ ID NO: 43208 - DNA, 60 bp, Artificial
  Synthetic oligonucleotide
aattagggtgctggccttgggcaatcaagaaggctccttgaagaccgctctcacaggcgc

SEQ ID NO: 43209 - DNA, 60 bp, Artificial
  Synthetic oligonucleotide
ggtggtgaatagatggttgtttcggcatctgtccagggagaagaaccctaggttgtgcac

SEQ ID NO: 43210 - DNA, 60 bp, Artificial
  Synthetic oligonucleotide
tcattgaggtggaccgagacatggcacgacgacacttggcagagggaaaggtggacacgg

SEQ ID NO: 43211 - DNA, 60 bp, Artificial
  Synthetic oligonucleotide
cagtaccctttgggctggtgagcatgatgattgccatggaggtggtgttgcgcagaaggc

SEQ ID NO: 43212 - DNA, 60 bp, Artificial
  Synthetic oligonucleotide
gctggctctttacctccttctggccctaagcctcatgtcagttgccatgtgcagaacccc

SEQ ID NO: 43213 - DNA, 60 bp, Artificial
  Synthetic oligonucleotide
tgggcttctgtgaaggaagatctggtggcttatggtggttcctggaaactagacgggaga

SEQ ID NO: 43214 - DNA, 60 bp, Artificial
  Synthetic oligonucleotide
ggcccctgacaaaccttctctagacatctcactacagacagtggcaatcgatggaccggc

SEQ ID NO: 43215 - DNA, 60 bp, Artificial
  Synthetic oligonucleotide
cactgatgtacttccacaagagggacatgaggctactttcatttgctgtttcctccgctg

SEQ ID NO: 43216 - DNA, 60 bp, Artificial
  Synthetic oligonucleotide
caaggatgtgctgtcaactttgggaaacgcgagctcaaatgcggagatggcatctttgtg

SEQ ID NO: 43217 - DNA, 60 bp, Artificial
  Synthetic oligonucleotide
aaggcagaagaggggctgctgagatgcttgtgatcctcacggagttgcccgatttcctgg

SEQ ID NO: 43218 - DNA, 60 bp, Artificial
  Synthetic oligonucleotide
atgatcagagaagggtctttagagagttggtgcgagggtgtgatttgccagtgtggttgg

SEQ ID NO: 43219 - DNA, 60 bp, Artificial
  Synthetic oligonucleotide
cgtctagccatggcgttagtatgagtgtcgtgcaacctccaggaccccccctcccgggag

SEQ ID NO: 43220 - DNA, 60 bp, Artificial
  Synthetic oligonucleotide
gtacgcatggcgtagtggactagcggttagaggagacccctcccttacagatcgcagcaa

SEQ ID NO: 43221 - DNA, 60 bp, Artificial
  Synthetic oligonucleotide
ggcgtagtggactagcggttagaggagacccctcccttacagatcgcagcaacaatgggg

SEQ ID NO: 43222 - DNA, 60 bp, Artificial
  Synthetic oligonucleotide
cgtggcaacggacgctctaatgacgggtttcaccggcgactttgactcagtgatcgactg

SEQ ID NO: 43223 - DNA, 60 bp, Artificial
  Synthetic oligonucleotide
gtggcaacagacgctctaatgacgggtttcaccggcgactttgactcagtgatcgactgt

SEQ ID NO: 43224 - DNA, 60 bp, Artificial
  Synthetic oligonucleotide
cgtctagccatggcgttagtatgagtgtcgtgcagcctccaggaccccccttcccgggag

SEQ ID NO: 43225 - DNA, 55 bp, Artificial
  Synthetic oligonucleotide
cccctcccgggagagccatagtggtctgcggaaccggtgagtacaccggaattgc

SEQ ID NO: 43226 - DNA, 60 bp, Artificial
  Synthetic oligonucleotide
tagcagactagtggttagaggagacccctcccgaaacataacgcagcagcggggcccaac

SEQ ID NO: 43227 - DNA, 60 bp, Artificial
  Synthetic oligonucleotide
tttgatagtcaggccagggcaacctgccaccggaagttgagtagacggtgctgcctgcga

SEQ ID NO: 43228 - DNA, 60 bp, Artificial
  Synthetic oligonucleotide
cgctgggaaagaccagagatcctgctgtctctgcaacatcaatccaggcacagagcgccg

SEQ ID NO: 43229 - DNA, 51 bp, Artificial
  Synthetic oligonucleotide
aagcgtctagccatggcgttagtatgagtgtcgtgcagcctccaggacccc

SEQ ID NO: 43230 - DNA, 60 bp, Artificial
  Synthetic oligonucleotide
tcccgggagagccatagtggtctgcggaaccggtgagtacaccggaattgccaggacgac

SEQ ID NO: 43231 - DNA, 60 bp, Artificial
  Synthetic oligonucleotide
ccacatgtgggaatgggactggagacgcgaactgaaacatggatgtcatcagaaggggct

SEQ ID NO: 43232 - DNA, 60 bp, Artificial
  Synthetic oligonucleotide
tgatccttttcagttaggccttctggtgatgtttctggccacccaggaggtcttgaggaa

SEQ ID NO: 43233 - DNA, 60 bp, Artificial
  Synthetic oligonucleotide
ggggtgtggaagaggaggctggtgctactacatggcgacacagaagcgagtccaagaggt

SEQ ID NO: 43234 - DNA, 60 bp, Artificial
  Synthetic oligonucleotide
acgaccgggtcctttcttggattaacccgctcaatgcctggagatttgggcgtgcccccg

SEQ ID NO: 43235 - DNA, 56 bp, Artificial
  Synthetic oligonucleotide
gaccgggtcctttcttggattaacccgctcaatgcctggagatttgggcgtgcccc

SEQ ID NO: 43236 - DNA, 60 bp, Artificial
  Synthetic oligonucleotide
ggatgaccgggtcctttcttggattaacccgctcaatgcctggagatttgggcgtgcccc

SEQ ID NO: 43237 - DNA, 58 bp, Artificial
  Synthetic oligonucleotide
acgaccgggtcctttcttggattaacccgctcaatgcctggagatttgggcgtgcccc

SEQ ID NO: 43238 - DNA, 56 bp, Artificial
  Synthetic oligonucleotide
aaaactatgctacctgtgagccccgtccaaggacgttaaaagaagtcaggccacta

SEQ ID NO: 43239 - DNA, 50 bp, Artificial
  Synthetic oligonucleotide
aaaactatgctacctgtgagccccgtccaaggacgttaaaagaagtcagg

SEQ ID NO: 43240 - DNA, 60 bp, Artificial
  Synthetic oligonucleotide
tggtgaaatggttgacccttttcagatgggccttctggtgatgtttctggccacccagga

SEQ ID NO: 43241 - DNA, 60 bp, Artificial
  Synthetic oligonucleotide
ggagtttacctgttgccgcgcaggggccccaggttgggtgtgcgcgcgactaggaagact

SEQ ID NO: 43242 - DNA, 60 bp, Artificial
  Synthetic oligonucleotide
gactagcaaatggagggactagccgtagtggcgagctccctgggtggtctaagtcctgag

SEQ ID NO: 43243 - DNA, 60 bp, Artificial
  Synthetic oligonucleotide
ggaggatttggtggcctatggtggatcttggaagctagatggaaagtgggatggtgagga

SEQ ID NO: 43244 - DNA, 60 bp, Artificial
  Synthetic oligonucleotide
agtttaggatggaacattgtgaccttcaaggacaagactgacatccacaggctagagcca

SEQ ID NO: 43245 - DNA, 60 bp, Artificial
  Synthetic oligonucleotide
gccgattgccgtgggtggaatactcatgatgctggtcagtgtggcagggaaagttgatgg

SEQ ID NO: 43246 - DNA, 60 bp, Artificial
  Synthetic oligonucleotide
gccatggtcgaagtggctttgggcgggatgatgggtggactgtggcagtacttgaatgcc

SEQ ID NO: 43247 - DNA, 60 bp, Artificial
  Synthetic oligonucleotide
ctggattaaagtggaatatggaaacctctcgctgtcaggaatagctcagtcagcctcagt

SEQ ID NO: 43248 - DNA, 60 bp, Artificial
  Synthetic oligonucleotide
accacgggcggagaaccggactccccacttccaaagcatcaataagaaaccgggataaaa

SEQ ID NO: 43249 - DNA, 60 bp, Artificial
  Synthetic oligonucleotide
gggatgacaaacagggccacatgggcctcacacatccacctggtgatccaccgaatccga

SEQ ID NO: 43250 - DNA, 60 bp, Artificial
  Synthetic oligonucleotide
cccatcatttccatgaacttgtgttgaaagatggaaggaaagttgtggtgccctgtagag

SEQ ID NO: 43251 - DNA, 60 bp, Artificial
  Synthetic oligonucleotide
tgacgctgagcgcaagctccatcaacaggggcggtgccagtcttgtgtctataacatgat

SEQ ID NO: 43252 - DNA, 60 bp, Artificial
  Synthetic oligonucleotide
gctgatttcatcaaatttgccgaaggtagaagaggggctgctgagatgcttgtggttctc

SEQ ID NO: 43253 - DNA, 60 bp, Artificial
  Synthetic oligonucleotide
cacgtcagtggggaaaggaattcacactgtgtttggctcagctttccaggggttgtttgg

SEQ ID NO: 43254 - DNA, 60 bp, Artificial
  Synthetic oligonucleotide
ggaatggtgattttcttcatgtcgcccaaaggtatgagtagaatgtctatggcaatgggg

SEQ ID NO: 43255 - DNA, 60 bp, Artificial
  Synthetic oligonucleotide
gaacaagggcatactggtcactgtcaaccccatagcatccacaaatgatgatgaagtcct

SEQ ID NO: 43256 - DNA, 60 bp, Artificial
  Synthetic oligonucleotide
gatatcaccgaggtggatcgcgacatggctagacgacatttggccgaggggaaggtggac

SEQ ID NO: 43257 - DNA, 60 bp, Artificial
  Synthetic oligonucleotide
gcaggcagaatgggtgagcggcaactccaaaagattgagcggtggctggtgagaaatccg

SEQ ID NO: 43258 - DNA, 60 bp, Artificial
  Synthetic oligonucleotide
gctgcatggtggtcatgtctcttgtagggtgaaactttcagctctaactcttaagggaac

SEQ ID NO: 43259 - DNA, 60 bp, Artificial
  Synthetic oligonucleotide
ccggacctggcactattgcggctcatacattaccaagacatcaggcagtgcagccagcat

SEQ ID NO: 43260 - DNA, 60 bp, Artificial
  Synthetic oligonucleotide
taaaatgatggagcctccgccaccacccacccacggggtggtggaaagatggggtctaga

SEQ ID NO: 43261 - DNA, 60 bp, Artificial
  Synthetic oligonucleotide
ccggggacaagtgtggtgctggacaccggctgtgatggacgtggcaaatcaaccagatca

SEQ ID NO: 43262 - DNA, 60 bp, Artificial
  Synthetic oligonucleotide
cctcagtggaagagagtgacatgttcatgccccgttccattggaggcccagtgagctccc

SEQ ID NO: 43263 - DNA, 60 bp, Artificial
  Synthetic oligonucleotide
ggccttgattgcgagcttttccattcgcccaggcttgctcataggttttggactgcgcac

SEQ ID NO: 43264 - DNA, 60 bp, Artificial
  Synthetic oligonucleotide
ctgtggactcccttgagcatgaaatgtggaggagtagagctgatgagatcaacgccatat

SEQ ID NO: 43265 - DNA, 60 bp, Artificial
  Synthetic oligonucleotide
ggaatgccctttctcaaacagagtgtggaactctttccagattgaggagtttggcatggg

SEQ ID NO: 43266 - DNA, 60 bp, Artificial
  Synthetic oligonucleotide
ggacgcatggcttgctgagaatggatgtgacagacttgcccggatggctgtgagtggaga

SEQ ID NO: 43267 - DNA, 60 bp, Artificial
  Synthetic oligonucleotide
agcaggagatcatgagctacatgaacgctgagcagaggaaactggcttgggcagtgatgg

SEQ ID NO: 43268 - DNA, 60 bp, Artificial
  Synthetic oligonucleotide
ccgaccagcaccaggaggcaaggctttcatggacatcatcagtaggagagatcaaagggg

SEQ ID NO: 43269 - DNA, 60 bp, Artificial
  Synthetic oligonucleotide
ccagagccaggacaacagaggtccatccaggacaaccaagtggcctatcttatcattgga

SEQ ID NO: 43270 - DNA, 60 bp, Artificial
  Synthetic oligonucleotide
ccagtagttgatggcaatccaaccgctgacattgaagaagcacctgaaatgcctgccttg

SEQ ID NO: 43271 - DNA, 60 bp, Artificial
  Synthetic oligonucleotide
acacaagcctgctgtggaatggtcctatggccgtttccatgactggggttatgcgcggca

SEQ ID NO: 43272 - DNA, 60 bp, Artificial
  Synthetic oligonucleotide
tggagctggcccgacttggatctgaaacctggggccgcttggactgtctatgtgggaatt

SEQ ID NO: 43273 - DNA, 60 bp, Artificial
  Synthetic oligonucleotide
gacttcaggccatgagtggatcctagccgacaagcgaccaacggcatggtttctcccatc

SEQ ID NO: 43274 - DNA, 60 bp, Artificial
  Synthetic oligonucleotide
gctgctgtgccaggaaaagccgttgtcaatgtgcaaaccaagccaagtgtgttcaaagtt

SEQ ID NO: 43275 - DNA, 60 bp, Artificial
  Synthetic oligonucleotide
gggagtgggaaagaagtcattgatgcaatgtgccacgctaccctcacgtacaggatgctg

SEQ ID NO: 43276 - DNA, 60 bp, Artificial
  Synthetic oligonucleotide
gctgaggtggttccacgagcgtggctatgtaaagctggaaggaagggtcatggatttggg

SEQ ID NO: 43277 - DNA, 60 bp, Artificial
  Synthetic oligonucleotide
aaatcgatggctgcttttgaatgtcacagctgaggacttgggaaagacgttctcggtggg

SEQ ID NO: 43278 - DNA, 60 bp, Artificial
  Synthetic oligonucleotide
cttaacgtagtactgacagttttttattagagagcagatctctgatgaacaaccaacgga

SEQ ID NO: 43279 - DNA, 52 bp, Artificial
  Synthetic oligonucleotide
ttattagagagcagatctctgatgaacaaccaacggaagaagacgggtcgac

SEQ ID NO: 43280 - DNA, 50 bp, Artificial
  Synthetic oligonucleotide
ttattagagagcagatctctgatgaacaaccaacggaagaagacgggaaa

SEQ ID NO: 43281 - DNA, 54 bp, Artificial
  Synthetic oligonucleotide
ttattagagagcagatctctgatgaacaaccaacggaagaagacgggtcgaccg

SEQ ID NO: 43282 - DNA, 60 bp, Artificial
  Synthetic oligonucleotide
ctgcggaaccggtgagtacaccggaattgccaggacgaccgggtcctttcttggatcaac

SEQ ID NO: 43283 - DNA, 60 bp, Artificial
  Synthetic oligonucleotide
aggacgaccgggtcctttcttagatcaacccgctcaatgcctggagatttgggcgtgccc

SEQ ID NO: 43284 - DNA, 53 bp, Artificial
  Synthetic oligonucleotide
cgggtcctttcttggattaacccgctcaatgcctggagatttgggcgtgcccc

SEQ ID NO: 43285 - DNA, 60 bp, Artificial
  Synthetic oligonucleotide
tgggtaaggtcatcgataccctcacgtgcggcttcgccgacctcatggggtacattccgc

SEQ ID NO: 43286 - DNA, 60 bp, Artificial
  Synthetic oligonucleotide
agggtagggcctgggctcagcccgggtacccttggcccctctatggcaacgagggcctgg

SEQ ID NO: 43287 - DNA, 60 bp, Artificial
  Synthetic oligonucleotide
aatgatccccgcgggaggtcccgcaatttgggtaaggtcatcgataccctaacctgcggc

SEQ ID NO: 43288 - DNA, 60 bp, Artificial
  Synthetic oligonucleotide
ttgatccttttcagctgggccttctggtcgtgttcttggccacccaggaggtccttcgca

SEQ ID NO: 43289 - DNA, 60 bp, Artificial
  Synthetic oligonucleotide
gattgacccttttcagttgggccttctggttgtgttcttggccacccaggaggtccttcg

SEQ ID NO: 43290 - DNA, 60 bp, Artificial
  Synthetic oligonucleotide
gggttgacgtgttctacaaacccactgagcaagtggacaccctgctctgtgatattgggg

SEQ ID NO: 43291 - DNA, 60 bp, Artificial
  Synthetic oligonucleotide
gggttgacgtgttctacaaacccactgagcaagtggacaccctgctctgtgatatcgggg

SEQ ID NO: 43292 - DNA, 60 bp, Artificial
  Synthetic oligonucleotide
tccattcaggggttgacgtgttctacaaacccactgagcaagtggacaccctgctctgtg

SEQ ID NO: 43293 - DNA, 60 bp, Artificial
  Synthetic oligonucleotide
tgcggaaccggtgagtacaccggaattgccaggacgaccgggtcctttcttggatcaacc

SEQ ID NO: 43294 - DNA, 60 bp, Artificial
  Synthetic oligonucleotide
ttttcagctgggccttctggtcgtgttcttggccacccaggaggtccttcgcaagaggtg

SEQ ID NO: 43295 - DNA, 60 bp, Artificial
  Synthetic oligonucleotide
ccatggtcttagcgcattttcactccacagttactctccaggtgagatcaatagggtggc

SEQ ID NO: 43296 - DNA, 60 bp, Artificial
  Synthetic oligonucleotide
tagtgcaaagttatggatggaacattgtcaccatgaagagtggagtggatgtgttttaca

SEQ ID NO: 43297 - DNA, 60 bp, Artificial
  Synthetic oligonucleotide
tagtgcaaagttatggatggaacattgtcaccatgaagagtggggtggatgtgttctaca

SEQ ID NO: 43298 - DNA, 60 bp, Artificial
  Synthetic oligonucleotide
gtgaacatgaccagccaggtattactggggcgaatggatcgcacagtgtggagagggcca

SEQ ID NO: 43299 - DNA, 60 bp, Artificial
  Synthetic oligonucleotide
gtcaacatgaccagccaagtgctgctagggcgaatggatcgcacagtgtggagagggcca

SEQ ID NO: 43300 - DNA, 60 bp, Artificial
  Synthetic oligonucleotide
cagggaatcttcctggttgctccttttctatcttcctcttggcacttctctcgtgcctca

SEQ ID NO: 43301 - DNA, 60 bp, Artificial
  Synthetic oligonucleotide
tggcaacctgtctctgtctggaatagcccagtcagcctcagtcctttctttcatggacaa

SEQ ID NO: 43302 - DNA, 60 bp, Artificial
  Synthetic oligonucleotide
gatctgcctgtctggctgtcctggcaagtggccaaggctggtttgaagacgaatgaccgg

SEQ ID NO: 43303 - DNA, 60 bp, Artificial
  Synthetic oligonucleotide
ggaattgtgacctgcccgtttggctttcgtggcaagtggccaaggctggtttgaagacga

SEQ ID NO: 43304 - DNA, 60 bp, Artificial
  Synthetic oligonucleotide
ggtccgattgcagttggaggaatcctgatgatgctggttagcgtggctgggagggtggat

SEQ ID NO: 43305 - DNA, 60 bp, Artificial
  Synthetic oligonucleotide
ccttgccgagaacaggatgagctcattgggagaggaagggtgtctccaggaaacggctgg

SEQ ID NO: 43306 - DNA, 56 bp, Artificial
  Synthetic oligonucleotide
ctgtgagcacagtttgctcaagaataagcagacctttggttgacaaacacaaaacc

SEQ ID NO: 43307 - DNA, 60 bp, Artificial
  Synthetic oligonucleotide
gaacttccttggtccgattgcagttggaggaatcctgatgatgctggttagcgtggctgg

SEQ ID NO: 43308 - DNA, 60 bp, Artificial
  Synthetic oligonucleotide
caggagatcttgaactacatgagcccacatcacaaaaaactggcacaagcagtgatggaa

SEQ ID NO: 43309 - DNA, 60 bp, Artificial
  Synthetic oligonucleotide
taaaacaccagtttcccctggtgaaatgagactgagggatgaccagaggaaagtcttcag

SEQ ID NO: 43310 - DNA, 60 bp, Artificial
  Synthetic oligonucleotide
ccttagcaaagcctatgccaacatgtggtcactgatgtactttcacaagagggacatgag

SEQ ID NO: 43311 - DNA, 60 bp, Artificial
  Synthetic oligonucleotide
ggcaagtggccaaggctggtttgaagacgaatgatcgcaagtggtgttttgaaggccctg

SEQ ID NO: 43312 - DNA, 60 bp, Artificial
  Synthetic oligonucleotide
gacatacccatgggacaggatagaggaggtcacaagaatggcaatgactgacacaacccc

SEQ ID NO: 43313 - DNA, 60 bp, Artificial
  Synthetic oligonucleotide
agtgcaggactcctggaggagcaaagaagcctctgcgcccaaggtggtgtgatgaaaggg

SEQ ID NO: 43314 - DNA, 60 bp, Artificial
  Synthetic oligonucleotide
caggactcctggaggagcaaagaagcctctgcgcccaaggtggtgtgatgaaagggtgtc

SEQ ID NO: 43315 - DNA, 60 bp, Artificial
  Synthetic oligonucleotide
ggcatcaacacaagaaacatgacaatgtccatgagcatgatcttggtaggagtgatcatg

SEQ ID NO: 43316 - DNA, 60 bp, Artificial
  Synthetic oligonucleotide
gctggcaggactggcttttcaggagatggagaacttccttggtccgattgcagttggagg

SEQ ID NO: 43317 - DNA, 60 bp, Artificial
  Synthetic oligonucleotide
gcccagtcagcctcagtcctttctttcatggacaagggaataccattcatgaagatgaac

SEQ ID NO: 43318 - DNA, 59 bp, Artificial
  Synthetic oligonucleotide
gccactgctaagctgtgaggcagtgcaggctgggacagccgacctccaggttgcgaaaa

SEQ ID NO: 43319 - DNA, 60 bp, Artificial
  Synthetic oligonucleotide
gaggggtgttccacacaatgtggcatgtcacaagaggagctttccttgtcagaaatggca

SEQ ID NO: 43320 - DNA, 60 bp, Artificial
  Synthetic oligonucleotide
tggagggatgtcccctatctgaccaagagacaagacaagctgtgcggatcactgattgga

SEQ ID NO: 43321 - DNA, 60 bp, Artificial
  Synthetic oligonucleotide
tcgtggcaagtggccaaggctggtttgaagacgaatgatcgaaagtggtgttttgaaggc

SEQ ID NO: 43322 - DNA, 60 bp, Artificial
  Synthetic oligonucleotide
gatgtcccttatctaaccaagagacaagacaagctgtgcggatcactgattggaatgacc

SEQ ID NO: 43323 - DNA, 60 bp, Artificial
  Synthetic oligonucleotide
tatctaaccaagagacaagacaagctgtgcggatcactgattggaatgaccaatagggcc

SEQ ID NO: 43324 - DNA, 60 bp, Artificial
  Synthetic oligonucleotide
aactccacacgagttttgccactgctaagctgtgaggcagtgcaggctgggacagccgac

SEQ ID NO: 43325 - DNA, 60 bp, Artificial
  Synthetic oligonucleotide
gggttccacaaggacgcacaacatggtcgattcatgggaaaggggagtggatgaccacgg

SEQ ID NO: 43326 - DNA, 60 bp, Artificial
  Synthetic oligonucleotide
ggatcaaagtcgaatatggcaacctgtctctgtctggaatagcccagtcagcctcagtcc

SEQ ID NO: 43327 - DNA, 60 bp, Artificial
  Synthetic oligonucleotide
ccactggatcaaggtcgagtatggcaacctgtctctgtctggaatagcccagtcagcctc

SEQ ID NO: 43328 - DNA, 60 bp, Artificial
  Synthetic oligonucleotide
ggcctctgcgcccaaggtggtgtgatgaaagggtgtcatctgatcagagtgcgcttgctg

SEQ ID NO: 43329 - DNA, 60 bp, Artificial
  Synthetic oligonucleotide
gaagcctctgcgcccaaggtggtgtgatgaaagggtgtcatctgaccagagtgcgctgtc

SEQ ID NO: 43330 - DNA, 60 bp, Artificial
  Synthetic oligonucleotide
gtgctggactgcaggacggcttttaagcctgtgcttgtggatgaagggaggaaggtggca

SEQ ID NO: 43331 - DNA, 60 bp, Artificial
  Synthetic oligonucleotide
ccttggaacacagggcatgattggatcctggctgacaaaaggcccacggcatggttcctt

SEQ ID NO: 43332 - DNA, 60 bp, Artificial
  Synthetic oligonucleotide
ccggaggagcaaagaagcctctgcgcccaaggtggtgtgatgaaagggtgtcatctgacc

SEQ ID NO: 43333 - DNA, 60 bp, Artificial
  Synthetic oligonucleotide
ggcacagggaggggtgttccatacaatgtggcatgtcacaagaggagctttccttgtcag

SEQ ID NO: 43334 - DNA, 60 bp, Artificial
  Synthetic oligonucleotide
ggagtgggagtggcacagggaggggtgttccacacaatgtggcatgtcacaagaggagct

SEQ ID NO: 43335 - DNA, 60 bp, Artificial
  Synthetic oligonucleotide
ccaggagatggagaacttccttggtccgattgcagttggaggaatcctgatgatgctggt

SEQ ID NO: 43336 - DNA, 60 bp, Artificial
  Synthetic oligonucleotide
ccgattgcagttggaggaatcctgatgatgctggttagcgtggctgggagggtggatggg

SEQ ID NO: 43337 - DNA, 60 bp, Artificial
  Synthetic oligonucleotide
cctgtctctgtctggaatagcccagtcagcctcagtcctttctttcatggacaaggggat

SEQ ID NO: 43338 - DNA, 60 bp, Artificial
  Synthetic oligonucleotide
gccatgggaccaggttgtgatgacctcgctggccttggttggagctgccattcatccatc

SEQ ID NO: 43339 - DNA, 60 bp, Artificial
  Synthetic oligonucleotide
tagtggtctgcggaaccggtgagtacaccggaattgccaggacgacagggccctttcttg

SEQ ID NO: 43340 - DNA, 60 bp, Artificial
  Synthetic oligonucleotide
agtatacttgttgccgcgcaggggccccaggttgggtgtgcgcgcgacaaggaagacttc

SEQ ID NO: 43341 - DNA, 60 bp, Artificial
  Synthetic oligonucleotide
agtttacttgctgccgcgcaggggccccaggttgggtgtgcgcgcgacaaggaagacttc

SEQ ID NO: 43342 - DNA, 60 bp, Artificial
  Synthetic oligonucleotide
aggacgaccgggtcctttcttggatcaacccgctcaatgcctggagatttgggcgtgccc

SEQ ID NO: 43343 - DNA, 60 bp, Artificial
  Synthetic oligonucleotide
aggatgaccgggtcctttcttggatcaacccgctcaatgcctggagatttgggcgtgccc

SEQ ID NO: 43344 - DNA, 60 bp, Artificial
  Synthetic oligonucleotide
aatttgggtaaggtcatcgataccctcacgtgcggcttcgccgacctcatggggtacata

SEQ ID NO: 43345 - DNA, 60 bp, Artificial
  Synthetic oligonucleotide
cccagtgtgactttactccatggctagcttggaatgttgcttctggcacgaaggggattg

SEQ ID NO: 43346 - DNA, 60 bp, Artificial
  Synthetic oligonucleotide
gttggctcccgtgtggctggacaccagactaaccagagaaaggaaagatttggctgggtt

SEQ ID NO: 43347 - DNA, 60 bp, Artificial
  Synthetic oligonucleotide
acgactagtggagaccctgggatggaatttgattacgttcaaggccaagacagatgtttt

SEQ ID NO: 43348 - DNA, 60 bp, Artificial
  Synthetic oligonucleotide
gcatgaaagatctctagttcgtcttgaaggatgtgtggtggatcttgggtgtggtcgagg

SEQ ID NO: 43349 - DNA, 60 bp, Artificial
  Synthetic oligonucleotide
gtggctagtgggctgagtgcattgttgagaaatgaatttcttggtctggtcccaattggt

SEQ ID NO: 43350 - DNA, 60 bp, Artificial
  Synthetic oligonucleotide
gtgtcgccggttgtttggccctcctaaacattgtgatgtgcaggaaaccatggacggttc

SEQ ID NO: 43351 - DNA, 60 bp, Artificial
  Synthetic oligonucleotide
cagactaggtttggtggaggtcttgtcagggttccattatctagaaattccactcatgaa

SEQ ID NO: 43352 - DNA, 60 bp, Artificial
  Synthetic oligonucleotide
ggtctgccaagacggtgtgggttctcttcagcatgttggctttgatggtggccatggaga

SEQ ID NO: 43353 - DNA, 60 bp, Artificial
  Synthetic oligonucleotide
aaaggagtgatgttggacggccagttcgagttagcacaggctactgcatgttctccgcta

SEQ ID NO: 43354 - DNA, 60 bp, Artificial
  Synthetic oligonucleotide
gtggctgatgacagaccaacagttgacatctggcttgacagaatcactcatgaatctccg

SEQ ID NO: 43355 - DNA, 60 bp, Artificial
  Synthetic oligonucleotide
caatgaatgtgtggggaacctatgttgcactggtgacggttgctcggccacaagcgctcc

SEQ ID NO: 43356 - DNA, 60 bp, Artificial
  Synthetic oligonucleotide
gcggcgccctacggctacccatcatggtacagttgcaatggaagtcacctaccaaggaac

SEQ ID NO: 43357 - DNA, 60 bp, Artificial
  Synthetic oligonucleotide
gcccagcatccaaccgaagctggaatgcatttaaagtggctgagtttggcgtgggcctgg

SEQ ID NO: 43358 - DNA, 60 bp, Artificial
  Synthetic oligonucleotide
cctgatggacactggcatgatttgggaaaactcatagccttcaaagaacctcatgcggta

SEQ ID NO: 43359 - DNA, 60 bp, Artificial
  Synthetic oligonucleotide
aggttattgtgaagggactgaagttgagatatccgaagactgtgaagaaaggggaccttg

SEQ ID NO: 43360 - DNA, 60 bp, Artificial
  Synthetic oligonucleotide
atcaacatgggcaacactagtgcctggggctgttatgaaagtgaggaatttgtttgggcc

SEQ ID NO: 43361 - DNA, 60 bp, Artificial
  Synthetic oligonucleotide
ctcatgtgggtctagtgtcagcacagaatgaaatgtctcccctggatgcccgatgctggg

SEQ ID NO: 43362 - DNA, 60 bp, Artificial
  Synthetic oligonucleotide
gggattagctcaatgggtgtgacgaccctacccttccgcatttgtaaataattgagccag

SEQ ID NO: 43363 - DNA, 60 bp, Artificial
  Synthetic oligonucleotide
gccaactgggttccaacaggacgaacgacctggtctcttcatgccactaaagattggatg

SEQ ID NO: 43364 - DNA, 60 bp, Artificial
  Synthetic oligonucleotide
gagaggacaaccatcaaagagagccaccgactacatgtcaattcttggggttgtcatggc

SEQ ID NO: 43365 - DNA, 60 bp, Artificial
  Synthetic oligonucleotide
cagaacggaggtaatgcaggaagtttgattacatcaaatccaatcatcacagcacaaggg

SEQ ID NO: 43366 - DNA, 60 bp, Artificial
  Synthetic oligonucleotide
gagggaccatggaagcaaggccatgaatggataactgaatttgaaggaaggaccgcctgg

SEQ ID NO: 43367 - DNA, 59 bp, Artificial
  Synthetic oligonucleotide
tgtgtgtgggcatgttggctctgattgtttggctggtgactagaacaaaggtggataga

SEQ ID NO: 43368 - DNA, 60 bp, Artificial
  Synthetic oligonucleotide
ccagagcagggaatgcagaggacccaaatagacaccacattggctacactggttttggct

SEQ ID NO: 43369 - DNA, 60 bp, Artificial
  Synthetic oligonucleotide
ggagtggtcgcaggaaaggagagtgcaatggaaagactcccgaccggtggagcttggatg

SEQ ID NO: 43370 - DNA, 60 bp, Artificial
  Synthetic oligonucleotide
tgtggcagtctctagaaaaggaattgaacctttacttggaagaccagaaaatagggtgga

SEQ ID NO: 43371 - DNA, 60 bp, Artificial
  Synthetic oligonucleotide
gcacattggacggacccatccagcatagcggctaggggatttattacaaccatgagtgaa

SEQ ID NO: 43372 - DNA, 60 bp, Artificial
  Synthetic oligonucleotide
ggggagtcaaacccaagctatgcagtggaagcgcagagaaccatcagggtcatagatctt

SEQ ID NO: 43373 - DNA, 60 bp, Artificial
  Synthetic oligonucleotide
cctttgcacgaagctgctgagagtgccaaggctcataaaatagtaacccaatctttgtca

SEQ ID NO: 43374 - DNA, 60 bp, Artificial
  Synthetic oligonucleotide
ctgtcagtcgtaagcttctacagcgaatgagtgcaaagggaggtagcagagtgattgaag

SEQ ID NO: 43375 - DNA, 60 bp, Artificial
  Synthetic oligonucleotide
tcagccgctcagcgaagaggaagagtggggagaactccgggaaagatggcacaatacatt

SEQ ID NO: 43376 - DNA, 60 bp, Artificial
  Synthetic oligonucleotide
gaatggaactgtgcaactacaaaagttgactctcacccacacagttgaatgtctctggcc

SEQ ID NO: 43377 - DNA, 60 bp, Artificial
  Synthetic oligonucleotide
ggaatcgttggctgtgggatggtggtgaccgctatgcactggattggaattccgttaacc

SEQ ID NO: 43378 - DNA, 60 bp, Artificial
  Synthetic oligonucleotide
atggatttggttatgggaatcatgcactttgccactcatattgcaatgggaatgaaggtc

SEQ ID NO: 43379 - DNA, 60 bp, Artificial
  Synthetic oligonucleotide
gggcatgactgaggaatgggtgatgagaaatacctggaaggcaacaattcttaccctggc

SEQ ID NO: 43380 - DNA, 60 bp, Artificial
  Synthetic oligonucleotide
acctccctggagggcatgttgattgccgagttagcctagtgaacctgaagctaaagggaa

SEQ ID NO: 43381 - DNA, 60 bp, Artificial
  Synthetic oligonucleotide
ccagtgtcgtgagtgctacattctcttctgaggctgaaaagcacagcatggaactggaag

SEQ ID NO: 43382 - DNA, 60 bp, Artificial
  Synthetic oligonucleotide
tggtaaggagagcctctgagcgtcgaatgcggacgttagtgctggctcctactagggtag

SEQ ID NO: 43383 - DNA, 60 bp, Artificial
  Synthetic oligonucleotide
gggcggcgtggatatatactccagccagaaaagactcagattgtctcatgactttctgac

SEQ ID NO: 43384 - DNA, 59 bp, Artificial
  Synthetic oligonucleotide
gtgctggggtttggtctcctagcgttcacaactggagtaatgggagatcaaggctgtgt

SEQ ID NO: 43385 - DNA, 60 bp, Artificial
  Synthetic oligonucleotide
gaagattacgtgtgcaagagaggtttcagtgataggggatggggtaatggctgtggcttg

SEQ ID NO: 43386 - DNA, 60 bp, Artificial
  Synthetic oligonucleotide
gtcgtcttgatgctatcactcaccaaaattcagaatgcgacaatcagactggctgttgga

SEQ ID NO: 43387 - DNA, 60 bp, Artificial
  Synthetic oligonucleotide
ccactattaaggttggtgcagcaaaacagcaatggagacaggatggcagttcaataggaa

SEQ ID NO: 43388 - DNA, 60 bp, Artificial
  Synthetic oligonucleotide
agcccaggctaaggaagtggtcaaagaagagacagtgaaggctgtggaaggagatgagtg

SEQ ID NO: 43389 - DNA, 60 bp, Artificial
  Synthetic oligonucleotide
atgggagaaccttggttgttccttgcagacatgaagttgagcttgtggggcgtgccagcg

SEQ ID NO: 43390 - DNA, 60 bp, Artificial
  Synthetic oligonucleotide
ggctggaagctagaaaagaaatggaagggagaagaagtacagttacatgcctttactcct

SEQ ID NO: 43391 - DNA, 60 bp, Artificial
  Synthetic oligonucleotide
gtgttgtgaacgcaattgatgagaggtttggtaagagtttggtttggttgaatgagatgc

SEQ ID NO: 43392 - DNA, 60 bp, Artificial
  Synthetic oligonucleotide
ggagtagcaaaaggaagtaggactatctggtacatgtggttgggaagtcgctttctagaa

SEQ ID NO: 43393 - DNA, 60 bp, Artificial
  Synthetic oligonucleotide
cacggcctttggacaacagagagtcttcaaggaaaaggtcgacactaaggctcctgaacc

SEQ ID NO: 43394 - DNA, 60 bp, Artificial
  Synthetic oligonucleotide
gaattgttgcattacttgttggctgttggttacacatttgtctggcaaacatctgagccc

SEQ ID NO: 43395 - DNA, 60 bp, Artificial
  Synthetic oligonucleotide
cgggtcgaccgtctttcaatatgctgaaacgcgcgagaaaccgcgtgtcaactggttcac

SEQ ID NO: 43396 - DNA, 60 bp, Artificial
  Synthetic oligonucleotide
cgggtcgaccgtctttcaatatgctgaaacgcgcgagaaaccgcgtgtcaactgtttcac

SEQ ID NO: 43397 - DNA, 54 bp, Artificial
  Synthetic oligonucleotide
ctgggagagaccagagatcctgctgtctctacagcatcattccaggcacagaac

SEQ ID NO: 43398 - DNA, 60 bp, Artificial
  Synthetic oligonucleotide
aacggaaaaagacgggtcgaccgtctttcaatatgctgaaacgcgcgagaaaccgcgtgt

SEQ ID NO: 43399 - DNA, 50 bp, Artificial
  Synthetic oligonucleotide
agacgggtcgaccgtctttcaatatgctgaaacgcgcgagaaaccgcgtg

SEQ ID NO: 43400 - DNA, 60 bp, Artificial
  Synthetic oligonucleotide
gacgggtcgaccgtctttcaatatgctgaaacgcgcgcgaaaccgcgtgtcaactggttc

SEQ ID NO: 43401 - DNA, 58 bp, Artificial
  Synthetic oligonucleotide
gccacaaggcacagtgcgccgatataggtggctggtggggaactagaccacaggatct

SEQ ID NO: 43402 - DNA, 60 bp, Artificial
  Synthetic oligonucleotide
aaacaggtggggaatttacatgtgtcactgcatcaggcactccagccttctttgacctga

SEQ ID NO: 43403 - DNA, 50 bp, Artificial
  Synthetic oligonucleotide
aattcacgtgtgtcactgcatcaggcactccagccttctttgacctaaaa

SEQ ID NO: 43404 - DNA, 60 bp, Artificial
  Synthetic oligonucleotide
ttcaacttggagggcactggttgggactggagtgactactggtggtgtgtggctggggtg

SEQ ID NO: 43405 - DNA, 60 bp, Artificial
  Synthetic oligonucleotide
acgttaaactgagacgtcccgaagagatcggaacgacgccccacgtatggcaacgccgct

SEQ ID NO: 43406 - DNA, 60 bp, Artificial
  Synthetic oligonucleotide
agttcgtggcagccccagcgccaagagggtggtccggatcaagcaatcatgttgctgtga

SEQ ID NO: 43407 - DNA, 60 bp, Artificial
  Synthetic oligonucleotide
tcttacctaccgaccgtggaggccgcgctggctcctgagctggtgtgtgctcccgtggtt

SEQ ID NO: 43408 - DNA, 60 bp, Artificial
  Synthetic oligonucleotide
ttgggtgattcagtcagtaacgccgcctgcttcgctggttccgacttgtggctcggggtc

SEQ ID NO: 43409 - DNA, 60 bp, Artificial
  Synthetic oligonucleotide
agctgtcggtatcctggagactgagtgtggctggggccccatggctgctagctacgccta

SEQ ID NO: 43410 - DNA, 60 bp, Artificial
  Synthetic oligonucleotide
actggcctttgctcgtgggtgtccagcggcagatgtgtgaggaggctgggtgtgggcccc

SEQ ID NO: 43411 - DNA, 60 bp, Artificial
  Synthetic oligonucleotide
cctcctcggcaggagcaacccacccatgtgagcaactggagcaaggaggaggaagctgag

SEQ ID NO: 43412 - DNA, 60 bp, Artificial
  Synthetic oligonucleotide
ccctggcttgctggccaccctagacaccatgttcacccagacgtgggaggccattttcac

SEQ ID NO: 43413 - DNA, 60 bp, Artificial
  Synthetic oligonucleotide
tcattccagaacctaacgtgactgaggtacccattgcaacactaccggacattgaggccc

SEQ ID NO: 43414 - DNA, 60 bp, Artificial
  Synthetic oligonucleotide
ttacacagcaggggtcttgggcctgggtgaaccattctccctcgctttctgtgcgggact

SEQ ID NO: 43415 - DNA, 60 bp, Artificial
  Synthetic oligonucleotide
ggacacaggttgccagttgcaagatacgccactgggagacacctgcttttctgccactca

SEQ ID NO: 43416 - DNA, 60 bp, Artificial
  Synthetic oligonucleotide
ggctttcctactacttttagtggtgggcgaggcacagggtggcatcttcgacaactgcca

SEQ ID NO: 43417 - DNA, 60 bp, Artificial
  Synthetic oligonucleotide
aaaagcgctggtggctgcctgggaggggaagaaacatccggctgcgataactgtggatgc

SEQ ID NO: 43418 - DNA, 60 bp, Artificial
  Synthetic oligonucleotide
gctgcacgacatggtctactccaccttcttctgctcacactacctgaggaagactgttcc

SEQ ID NO: 43419 - DNA, 60 bp, Artificial
  Synthetic oligonucleotide
caaggtgcgccgccgtgcggctgcaggttggggtagcaaggtgacagcaagcaccctcga

SEQ ID NO: 43420 - DNA, 60 bp, Artificial
  Synthetic oligonucleotide
ggccgaaaggcagccatggggccacccaggcggcgccgtgctacaggcggcaaggggaaa

SEQ ID NO: 43421 - DNA, 60 bp, Artificial
  Synthetic oligonucleotide
agctggtgtgcaggagagaagagactcagacctcatactcatacgtctggtcggggcaac

SEQ ID NO: 43422 - DNA, 60 bp, Artificial
  Synthetic oligonucleotide
cgatctggcgcggtcaacgcaaatatgacaaggagtactactcggtggtggacgaggccc

SEQ ID NO: 43423 - DNA, 60 bp, Artificial
  Synthetic oligonucleotide
cccttggataaagtggacactcggttggatcttggctttagtcgcggtgatgctgtgaac

SEQ ID NO: 43424 - DNA, 60 bp, Artificial
  Synthetic oligonucleotide
aaaatccctctgatggggtgcagcaaaggatgggccggaccctgggaagggaacggacat

SEQ ID NO: 43425 - DNA, 60 bp, Artificial
  Synthetic oligonucleotide
atagggtgcttgtccagcaggttcgacctcccacccgggttcgtgccgacggctcctgtc

SEQ ID NO: 43426 - DNA, 60 bp, Artificial
  Synthetic oligonucleotide
ccagctttgaggttgtctcgttgaccgagtctgaaccagaaactgtgatcgagggaggtt

SEQ ID NO: 43427 - DNA, 60 bp, Artificial
  Synthetic oligonucleotide
acgttaaccgcgtgtcgtcagtcttacggaagatgtcgttgtcacggtggatcctgactc

SEQ ID NO: 43428 - DNA, 60 bp, Artificial
  Synthetic oligonucleotide
caacttagtgcggttggctcagatgtttgattcccttgtgatggctggtgagcggttggg

SEQ ID NO: 43429 - DNA, 60 bp, Artificial
  Synthetic oligonucleotide
gagccagataggaggttattggcacgcccttcagtgtccatgtgattttacacctggtcc

SEQ ID NO: 43430 - DNA, 60 bp, Artificial
  Synthetic oligonucleotide
tctacagacctggagttgctacgcggcctggctcccagcccggagagcttcttgggaagt

SEQ ID NO: 43431 - DNA, 60 bp, Artificial
  Synthetic oligonucleotide
ctctttgcgctgcaacttcgactacagttatcctggcatttctgtggactttgattgggc

SEQ ID NO: 43432 - DNA, 60 bp, Artificial
  Synthetic oligonucleotide
cctcaccaggggcctcggtggcgggtgtcgcgctcggcgttctactctggagtgtcaaga

SEQ ID NO: 43433 - DNA, 57 bp, Artificial
  Synthetic oligonucleotide
tgcgcagactggattgaggcgttggtggtctctggcacggttacggtgacggcgtct

SEQ ID NO: 43434 - DNA, 60 bp, Artificial
  Synthetic oligonucleotide
attttggcaagatgcattgggccccgaagctctgcagtgggttgctgtggcgtgacggtg

SEQ ID NO: 43435 - DNA, 58 bp, Artificial
  Synthetic oligonucleotide
tgtggtgactgtgtccgcgactgcttcgagactggtggacctggcttcgaggagtgcg

SEQ ID NO: 43436 - DNA, 60 bp, Artificial
  Synthetic oligonucleotide
gtggggctccgcgtactgggtgtggaggtttggcgactgggtgccattgtatgatgagct

SEQ ID NO: 43437 - DNA, 60 bp, Artificial
  Synthetic oligonucleotide
tcgactgacggcgttagtgttctgggcatgggacgtgcccggttgctggcgaaagaatgt

SEQ ID NO: 43438 - DNA, 60 bp, Artificial
  Synthetic oligonucleotide
tgcagatctctagctcggatagagcgggtggcggcctaccgcccgatggcgtggtggtca

SEQ ID NO: 43439 - DNA, 60 bp, Artificial
  Synthetic oligonucleotide
aaagccagtccctgcttcgccggtgatttgcctgtctcttgggaggccccaatctgtagg

SEQ ID NO: 43440 - DNA, 60 bp, Artificial
  Synthetic oligonucleotide
tgcgggatctcggtatgaagagcctcgcttggcacaggcggcgggcggggaacgtccgta

SEQ ID NO: 43441 - DNA, 60 bp, Artificial
  Synthetic oligonucleotide
cgctgggtgtgtcggcagtgacttactacaggggcagggaaacagaaattccagccggtg

SEQ ID NO: 43442 - DNA, 60 bp, Artificial
  Synthetic oligonucleotide
ggtcgaggtcaccttggaccccaccataacaatttcactgcggacagtgccagcaccagc

SEQ ID NO: 43443 - DNA, 60 bp, Artificial
  Synthetic oligonucleotide
cctctgttctgtctggccatgtggtggtatgtgaacggggctctgaccgcttcgatcacc

SEQ ID NO: 43444 - DNA, 60 bp, Artificial
  Synthetic oligonucleotide
aacgacggcactgatccctgtgcccgccttaaggctgctttggctgactatggttacagg

SEQ ID NO: 43445 - DNA, 55 bp, Artificial
  Synthetic oligonucleotide
cctttgtgcaaactgtggctggtggcggcttggttttggcctgacattgctgctg

SEQ ID NO: 43446 - DNA, 60 bp, Artificial
  Synthetic oligonucleotide
cacccattacatcattacccggcttcaccatggccactccgtatgaacactccgaggagg

SEQ ID NO: 43447 - DNA, 60 bp, Artificial
  Synthetic oligonucleotide
aaagcgctggtggttgagtacggatatgcggaagccgctcgcgagggcgtcgtccgagta

SEQ ID NO: 43448 - DNA, 60 bp, Artificial
  Synthetic oligonucleotide
gcccctatacagctgctatcacggcgtctgtgggtgaagccattacgttcttctctgggc

SEQ ID NO: 43449 - DNA, 60 bp, Artificial
  Synthetic oligonucleotide
gtgcatgctttgtgcaggtactatgtcgagggccccatggtgtcaccggatggcgtgatg

SEQ ID NO: 43450 - DNA, 60 bp, Artificial
  Synthetic oligonucleotide
ttgcgggaatggggttttgccctagagcccgtcgctgtgaagccagaggactgtgccata

SEQ ID NO: 43451 - DNA, 60 bp, Artificial
  Synthetic oligonucleotide
agaaacgacggagcgctctgccatggcactctcgggaagactgttgagctggacctacca

SEQ ID NO: 43452 - DNA, 60 bp, Artificial
  Synthetic oligonucleotide
gtacgccaaggctggtcacaaggttttggtgttgaatccatcaattgcgacggtgcgcgc

SEQ ID NO: 43453 - DNA, 60 bp, Artificial
  Synthetic oligonucleotide
ttacttgttgccgcgcaggggccctagattgggtgtgcgcgcgacgaggaagacttccga

SEQ ID NO: 43454 - DNA, 60 bp, Artificial
  Synthetic oligonucleotide
agagattagtgcagtttaaacagttttttagaacggaagacaaccatgactaaaaaacca

SEQ ID NO: 43455 - DNA, 60 bp, Artificial
  Synthetic oligonucleotide
tggacgttaagttcccgggtggcggtcagatcgttggcggagtttacttgttgccgcgca

SEQ ID NO: 43456 - DNA, 60 bp, Artificial
  Synthetic oligonucleotide
ggggcagttgtccacctccaaaagactggtggggaattcacgtgtgtcactgcatcaggt

SEQ ID NO: 43457 - DNA, 56 bp, Artificial
  Synthetic oligonucleotide
cccactagtgggagtgaagagggtagtaatgagcttgttggacggcagagggccag

SEQ ID NO: 43458 - DNA, 60 bp, Artificial
  Synthetic oligonucleotide
gagctggtcatcaaacacaaagtgaggaatgaagtaatggtccgctggtttgaagatgaa

SEQ ID NO: 43459 - DNA, 60 bp, Artificial
  Synthetic oligonucleotide
ttaatgctgccaccggaagttgagtagacggtgctgcctgcggctcaaccccaggaggac

SEQ ID NO: 43460 - DNA, 60 bp, Artificial
  Synthetic oligonucleotide
gcgcgagaaaccgcgtgtcaactggttcacagttggcgaagagattctcaaaaggattgc

SEQ ID NO: 43461 - DNA, 60 bp, Artificial
  Synthetic oligonucleotide
gggaatttacccggttgctctttctctatcttcctcttggcacttctttcgtgcctcacc

SEQ ID NO: 43462 - DNA, 52 bp, Artificial
  Synthetic oligonucleotide
taccctgacctgcggcttcgccgacctcatggggtacatcccagtcgtcggc

SEQ ID NO: 43463 - DNA, 59 bp, Artificial
  Synthetic oligonucleotide
tcatcgataccctaacctgcggcttcgccgacctcatggggtacatccctgtcgttggc

SEQ ID NO: 43464 - DNA, 58 bp, Artificial
  Synthetic oligonucleotide
gacgaccgggtcctttcttggataacccgctcaatgcctggagatttgggcgtgcccc

SEQ ID NO: 43465 - DNA, 60 bp, Artificial
  Synthetic oligonucleotide
gatgaccgggtcctttcttggattaaccccgctcaatgcctggagatttgggcgtgcccc

SEQ ID NO: 43466 - DNA, 60 bp, Artificial
  Synthetic oligonucleotide
ggacgacagggtcctttcttggatcaaccctctcaatgcctggagatttgggcgtgcccc

SEQ ID NO: 43467 - DNA, 60 bp, Artificial
  Synthetic oligonucleotide
cagcctccaggaccccccctcccgggagagccatagtggtctgcggaaccggtgagtaca

SEQ ID NO: 43468 - DNA, 60 bp, Artificial
  Synthetic oligonucleotide
tttggttcagggcccccctccagcgacggccgaactgggctagccatgcccacagtagga

SEQ ID NO: 43469 - DNA, 60 bp, Artificial
  Synthetic oligonucleotide
ggggtgggaggcaaaagagttggcccaaaggacagccggtaggaaccttttcactttaat

SEQ ID NO: 43470 - DNA, 60 bp, Artificial
  Synthetic oligonucleotide
gggtgggaggcaaaagagttggcccaaaggacagccggtaggaaccttttcactttaata

SEQ ID NO: 43471 - DNA, 60 bp, Artificial
  Synthetic oligonucleotide
ggggtgggaggcaaaagagttggcccaaaggacagccggtaggaaccttttcactttgat

SEQ ID NO: 43472 - DNA, 60 bp, Artificial
  Synthetic oligonucleotide
gggagagccatagtggtctgcggaaccggtgagtacaccggaattaccggaaagactggg

SEQ ID NO: 43473 - DNA, 60 bp, Artificial
  Synthetic oligonucleotide
tcgggcagcctccaggaccccccctcccgggagagccatagtggtctgcggaaccggtga

SEQ ID NO: 43474 - DNA, 60 bp, Artificial
  Synthetic oligonucleotide
accccccgcataataataaacagcatattgacgctgggagagaccagagatcctgctgtc

SEQ ID NO: 43475 - DNA, 59 bp, Artificial
  Synthetic oligonucleotide
ggggtcgctagggtgaaatcacaccacgtgatgggagtacgacctgatagggtgctgca

SEQ ID NO: 43476 - DNA, 60 bp, Artificial
  Synthetic oligonucleotide
gtcgctagggtgaaatcacaccacgtgatgggagtacgacctgatagggtgctgcagagg

SEQ ID NO: 43477 - DNA, 60 bp, Artificial
  Synthetic oligonucleotide
ggttccaaagattaccattacgacctactgcaagcacagaggtacggtatagaagatggg

SEQ ID NO: 43478 - DNA, 60 bp, Artificial
  Synthetic oligonucleotide
ccgggatggaagagagataatggccccttgcagagaacaggatgagctgatcgggagggc

SEQ ID NO: 43479 - DNA, 60 bp, Artificial
  Synthetic oligonucleotide
acgatccgtggctttgacaaaccatgttgaagaaacattgaacacccgtggagagaggtg

SEQ ID NO: 43480 - DNA, 60 bp, Artificial
  Synthetic oligonucleotide
gagcggagtggaaggcgttgggctgcaatacctcggccatgttctgaaaacattggaaag

SEQ ID NO: 43481 - DNA, 60 bp, Artificial
  Synthetic oligonucleotide
gatgaccaacatatttgcaaacgtgggttctctgaccgaggctggggaaatggatgtggg

SEQ ID NO: 43482 - DNA, 60 bp, Artificial
  Synthetic oligonucleotide
caccgctgacccggaaagtctgctacaaggcaaccctctcagaacataagacagccaacc

SEQ ID NO: 43483 - DNA, 60 bp, Artificial
  Synthetic oligonucleotide
agggagcaacgtaggtcagagaatcattatatgcattctgctgttacttgtcgccccagc

SEQ ID NO: 43484 - DNA, 60 bp, Artificial
  Synthetic oligonucleotide
gcagagagtgtttaaagagaaagtggataccaaaccgccagaacccaacaagacagtgcg

SEQ ID NO: 43485 - DNA, 60 bp, Artificial
  Synthetic oligonucleotide
ctggggacgacatgcctgaaaagtttgagaaacaactaggaacctttgtgctcatcaccc

SEQ ID NO: 43486 - DNA, 60 bp, Artificial
  Synthetic oligonucleotide
gctggcttcataactggatactttcttgcgcgaccccttggaccgagagggaaatttctc

SEQ ID NO: 43487 - DNA, 60 bp, Artificial
  Synthetic oligonucleotide
agtaaattttgcgtgctagtcgctgagcgtcagaccgcaaagtgagtttttagtgatcta

SEQ ID NO: 43488 - DNA, 60 bp, Artificial
  Synthetic oligonucleotide
gctaaggttcgatcccacgctgccctcggagctttcgttccagagttggaaggttggagt

SEQ ID NO: 43489 - DNA, 60 bp, Artificial
  Synthetic oligonucleotide
ccgacaaccccttcatgaaccggaaaactttgatagggaagtggcaggacatcccgtaca

SEQ ID NO: 43490 - DNA, 60 bp, Artificial
  Synthetic oligonucleotide
tggaatgggccgactcattgggacttgtgctggcgctggcagatgccctctacacaatgc

SEQ ID NO: 43491 - DNA, 60 bp, Artificial
  Synthetic oligonucleotide
ttatggaatgcccaggcaaatcgcagaggtggcacaggatccggaatgaccccaggggag

SEQ ID NO: 43492 - DNA, 60 bp, Artificial
  Synthetic oligonucleotide
caagaagggagcacgatagggaaagcgttctcagagaccctaaaaggactcgaacgactc

SEQ ID NO: 43493 - DNA, 60 bp, Artificial
  Synthetic oligonucleotide
tcagagagagatgccacttcaaaggaatggaaaagagaaacagaattcaccatggcctct

SEQ ID NO: 43494 - DNA, 60 bp, Artificial
  Synthetic oligonucleotide
ggagccgaacaagcctgcgctgtctcatgggagagaagagagttcaaatgcggagatggc

SEQ ID NO: 43495 - DNA, 60 bp, Artificial
  Synthetic oligonucleotide
ctcaaatggcgcatgtgggctcaactctgtggatgagttagaacaccaaatgtggaaagg

SEQ ID NO: 43496 - DNA, 60 bp, Artificial
  Synthetic oligonucleotide
gcatccaggatctgggaaaacccgacaagtactgcccgctcttcttaggaaatgtgtgga

SEQ ID NO: 43497 - DNA, 60 bp, Artificial
  Synthetic oligonucleotide
ggagccctgatagacttgatgtgccatgctactctagcaaaccgcctcttggaaccaaca

SEQ ID NO: 43498 - DNA, 60 bp, Artificial
  Synthetic oligonucleotide
ggatgtccaagtgatagtgtgctctcccagagctgtgatcagaaacgtccagactactcc

SEQ ID NO: 43499 - DNA, 60 bp, Artificial
  Synthetic oligonucleotide
agaagggggtgtttggaccacagcaaaaaggagtaggggtaggaaaaagcggaaccttcc

SEQ ID NO: 43500 - DNA, 60 bp, Artificial
  Synthetic oligonucleotide
ctccatagcccaagcaagcgttgaggagactgccagtccaacacctgacatttctctgtc

SEQ ID NO: 43501 - DNA, 60 bp, Artificial
  Synthetic oligonucleotide
gccgagagtgaagaagtcctacctgacccgtcccaagaatggactccagaacacggaaac

SEQ ID NO: 43502 - DNA, 60 bp, Artificial
  Synthetic oligonucleotide
cagtctaataagctgtgtggcccttattgtcgccaacgaaaacggctacctggagaaaac

SEQ ID NO: 43503 - DNA, 60 bp, Artificial
  Synthetic oligonucleotide
gagactgaccaactccctttagtagaaaaggtcagggaagaacttgaggatgggtgtggc

SEQ ID NO: 43504 - DNA, 60 bp, Artificial
  Synthetic oligonucleotide
gactagagcaccgaatcctggccgaagctgtaatgaacctggcatacaaacacaaagtgg

SEQ ID NO: 43505 - DNA, 60 bp, Artificial
  Synthetic oligonucleotide
aaaacattatctcacccactttgatgagccacacgctacaacagtcaccgtcacgagcat

SEQ ID NO: 43506 - DNA, 60 bp, Artificial
  Synthetic oligonucleotide
ggaacaagaactgatgtggtgggcaccgtgtcaaatgtgtcgcggttgttgaccaggagg

SEQ ID NO: 43507 - DNA, 60 bp, Artificial
  Synthetic oligonucleotide
gggaaacgagagaagaaaccatctgaatttgggaaagccaaagggagccgagccatatgg

SEQ ID NO: 43508 - DNA, 60 bp, Artificial
  Synthetic oligonucleotide
ttgctgccaaaaggaatgtctcgcatgacactggctttcttcactatgttggtaacgggg

SEQ ID NO: 43509 - DNA, 60 bp, Artificial
  Synthetic oligonucleotide
acagagaatgaaaatcccgaagacattgactgctggtgctatggagtgcccaacgtgtat

SEQ ID NO: 43510 - DNA, 60 bp, Artificial
  Synthetic oligonucleotide
aggaaaaacatttgatatcatgaacggcacatgcacagtcatggcagtagacgtggggaa

SEQ ID NO: 43511 - DNA, 60 bp, Artificial
  Synthetic oligonucleotide
gacgtggcattacattggctcttacttgacaagaggaggaggaacagcggcatccatgac

SEQ ID NO: 43512 - DNA, 60 bp, Artificial
  Synthetic oligonucleotide
tggctgagccttgacttacagcctgccacttcctggacactctatgctgtaatagtgggg

SEQ ID NO: 43513 - DNA, 60 bp, Artificial
  Synthetic oligonucleotide
gcgaccttgaaacgagtccgcaacatcacaaccaatttactgactggactcatgaaacgg

SEQ ID NO: 43514 - DNA, 60 bp, Artificial
  Synthetic oligonucleotide
ccgacatacctgttaggaacagcggtgaaacatgccagggcagtccatggtgaccagaac

SEQ ID NO: 43515 - DNA, 59 bp, Artificial
  Synthetic oligonucleotide
ctaatcctgctgttagcgctcctaaccgtgttcggaggagtttccatgcgtgatcttgc

SEQ ID NO: 43516 - DNA, 60 bp, Artificial
  Synthetic oligonucleotide
gctggattggttctggccgctttcgcattctggtattatcagtacaccaagcaacgcagc

SEQ ID NO: 43517 - DNA, 60 bp, Artificial
  Synthetic oligonucleotide
cccgagagctgggaggacctgtcaccttacataaccatatcccaggttacgcgacacagg

SEQ ID NO: 43518 - DNA, 60 bp, Artificial
  Synthetic oligonucleotide
cctgctactttgctacgtgttcagcatgaagagtgacggattagaacttgaacgggttgc

SEQ ID NO: 43519 - DNA, 60 bp, Artificial
  Synthetic oligonucleotide
gcaagtaacaaagtgataccccattggtgttgtcgttcctgcaccatgccacccgtgacc

SEQ ID NO: 43520 - DNA, 60 bp, Artificial
  Synthetic oligonucleotide
cacagcaggactagggttcctatgtgctatgatacattgggctttggttttgcctggctt

SEQ ID NO: 43521 - DNA, 60 bp, Artificial
  Synthetic oligonucleotide
ccctggggacacactgttatgtgacattggagaaagttcaccgagcattgcagtggaaga

SEQ ID NO: 43522 - DNA, 60 bp, Artificial
  Synthetic oligonucleotide
gtgaggctaggaaagtcgagcacgttccaggggaataccgtttaaaaccagaagcaagga

SEQ ID NO: 43523 - DNA, 60 bp, Artificial
  Synthetic oligonucleotide
gggagaccagtgaagaaaatggagatttggtgtgctggaaagaagcgttgatgatcctgg

SEQ ID NO: 43524 - DNA, 60 bp, Artificial
  Synthetic oligonucleotide
atgggagcaaacctgcctgttgaaagagtgattgacccaaggacatgcatgcgtccagtg

SEQ ID NO: 43525 - DNA, 60 bp, Artificial
  Synthetic oligonucleotide
atgatccccggccaactgcgtggttcctgccttccatcaaagcaagtaacattatggctg

SEQ ID NO: 43526 - DNA, 59 bp, Artificial
  Synthetic oligonucleotide
gggttagtggaactagggatgctgcgagggtggatcctaggtctccttgttgggctgca

SEQ ID NO: 43527 - DNA, 60 bp, Artificial
  Synthetic oligonucleotide
aaacagtgataatgaaagttaaagtgtcaaaagccaccccgtgcagaatccctgtggcag

SEQ ID NO: 43528 - DNA, 60 bp, Artificial
  Synthetic oligonucleotide
cctgtttaccatacgcagcacaagccctcaagttgtttacaccaacacgattggaaagcg

SEQ ID NO: 43529 - DNA, 60 bp, Artificial
  Synthetic oligonucleotide
gactctagaccagtcgtgaagggcaatttcaataccaccttgatcaaccacagtgccttc

SEQ ID NO: 43530 - DNA, 60 bp, Artificial
  Synthetic oligonucleotide
tggagaaccggtgtttggggaaccgagccctatacacccgcaagcctctctagaactccc

SEQ ID NO: 43531 - DNA, 60 bp, Artificial
  Synthetic oligonucleotide
gagaacgaagcacatactgaatccaggtaagctctcggaacagttagctagggacggtgg

SEQ ID NO: 43532 - DNA, 60 bp, Artificial
  Synthetic oligonucleotide
ggccccgtctaccatagggccccattggaactcttcgaggaatccaccatgtgtgaggtg

SEQ ID NO: 43533 - DNA, 60 bp, Artificial
  Synthetic oligonucleotide
gatcttcaacaacctcagtagaccagaactcagagagacatacgatgaagtggattgggg

SEQ ID NO: 43534 - DNA, 60 bp, Artificial
  Synthetic oligonucleotide
taatcaagacagccagcagagcgcaacaaaaagtgctcaagtggaccaagaacaccctaa

SEQ ID NO: 43535 - DNA, 60 bp, Artificial
  Synthetic oligonucleotide
gtacactaacaactgcacgccggcttgccttcctggcaataccaagatcataggcccagg

SEQ ID NO: 43536 - DNA, 60 bp, Artificial
  Synthetic oligonucleotide
gacgtgatccccagctcagtctggaatatagggaagtacgtctgtgttagaccggactgg

SEQ ID NO: 43537 - DNA, 58 bp, Artificial
  Synthetic oligonucleotide
ttatcacatcccatttggttcacggatgccaggtaccagcgaccagagagaggaatgt

SEQ ID NO: 43538 - DNA, 60 bp, Artificial
  Synthetic oligonucleotide
ccgtaagatgggctgaccacaccagcagctacatggcagggaggaacacagccacaatcc

SEQ ID NO: 43539 - DNA, 60 bp, Artificial
  Synthetic oligonucleotide
gtaatagggcacaacctctatgagctaaagaggacagggtttgagaagctagctagtctg

SEQ ID NO: 43540 - DNA, 57 bp, Artificial
  Synthetic oligonucleotide
ggggactaatctggcctctagactgttagcagcattgatagaattgaactggacagt

SEQ ID NO: 43541 - DNA, 60 bp, Artificial
  Synthetic oligonucleotide
agatacaccggttttcagaccagctaagagtggtcgcaatgacggcgaccccagccggga

SEQ ID NO: 43542 - DNA, 60 bp, Artificial
  Synthetic oligonucleotide
gtgtggaggaacagggccaccaatcagctgcgggatgaccctagcggactttgaagagag

SEQ ID NO: 43543 - DNA, 60 bp, Artificial
  Synthetic oligonucleotide
cgtagtaaatggggaaggcgggagtaaagcaggggcaggaattgacttatacttcctcac

SEQ ID NO: 43544 - DNA, 60 bp, Artificial
  Synthetic oligonucleotide
gctggactcaagatcccaacagaggagatgaaaggcaacatgctagtcttcgtccccact

SEQ ID NO: 43545 - DNA, 60 bp, Artificial
  Synthetic oligonucleotide
gggtaaatagagccagcatatcccaggccgtggaagagagagataacagaccgtgggttc

SEQ ID NO: 43546 - DNA, 60 bp, Artificial
  Synthetic oligonucleotide
ggacatggctacgggcataacatacgcatcctatggatacttctgccagatgccccaacc

SEQ ID NO: 43547 - DNA, 60 bp, Artificial
  Synthetic oligonucleotide
tcgtggaggaaataggtaggcataagagggtactagtactgatcccactgagagcagccg

SEQ ID NO: 43548 - DNA, 60 bp, Artificial
  Synthetic oligonucleotide
gccaagctctactatctgaagatggtcaagacagatgtggaaaagacttggacggggaga

SEQ ID NO: 43549 - DNA, 60 bp, Artificial
  Synthetic oligonucleotide
tcaaaggtgcagatggaaagattgtaaaggtggaggaaaaagggtctttcttttgccgca

SEQ ID NO: 43550 - DNA, 60 bp, Artificial
  Synthetic oligonucleotide
ctattggcctgggcaattctcgcagtcttgttccagccagtagccggggagaacatcacc

SEQ ID NO: 43551 - DNA, 60 bp, Artificial
  Synthetic oligonucleotide
agcagccaacgtgatgggctccacagcagtcaaggaggtggcatcagaagtcaaagatta

SEQ ID NO: 43552 - DNA, 60 bp, Artificial
  Synthetic oligonucleotide
ctgatcacccaattggaggtcttaaacaatctcctcatatcagaagacctacccgctgca

SEQ ID NO: 43553 - DNA, 60 bp, Artificial
  Synthetic oligonucleotide
ccaggtaccagttatcacagcagatggagaggtgtatataagagaaggacaaaggggcag

SEQ ID NO: 43554 - DNA, 60 bp, Artificial
  Synthetic oligonucleotide
ggcataggcaacaccccgatgcgaaggccgaaaagggctaaccatgcccttagtaggact

SEQ ID NO: 43555 - DNA, 60 bp, Artificial
  Synthetic oligonucleotide
ccctggaagacatcctgttcaaagatgaagggtgcggtaatatgatgcaggatgcagcca

SEQ ID NO: 43556 - DNA, 60 bp, Artificial
  Synthetic oligonucleotide
gagacgtcaatgatgactgggaagcaggggacttagtgacagaaaagaaaccaagagtga

SEQ ID NO: 43557 - DNA, 60 bp, Artificial
  Synthetic oligonucleotide
cacgagattactgaagaaacacacaggcataggctttaatggagcttacttgggagagga

SEQ ID NO: 43558 - DNA, 60 bp, Artificial
  Synthetic oligonucleotide
ggcacgtcaggcatacaacacgccatgtatctcagaggggtgaacaggagcttacacgga

SEQ ID NO: 43559 - DNA, 60 bp, Artificial
  Synthetic oligonucleotide
ggataggcccactgggagcagaggatctagtgacaacgtggcatgactacaaatttgacc

SEQ ID NO: 43560 - DNA, 60 bp, Artificial
  Synthetic oligonucleotide
gaataagccacactttcctggagacaccgaaactcaacaagaaggcaggaggttcgttgc

SEQ ID NO: 43561 - DNA, 60 bp, Artificial
  Synthetic oligonucleotide
cggggtgaagtatcaagtcaagaagaagggtaaggtcaaaagcaagagtactgccgacgg

SEQ ID NO: 43562 - DNA, 60 bp, Artificial
  Synthetic oligonucleotide
ccacagtagtcaagaggtatacaagaacaacccctttccctatgcgggctgggtgcgtgg

SEQ ID NO: 43563 - DNA, 60 bp, Artificial
  Synthetic oligonucleotide
gagggttatgctgatggcttctatcggcagaggcatctgagcagtaagcagctcccaatg

SEQ ID NO: 43564 - DNA, 60 bp, Artificial
  Synthetic oligonucleotide
gggatcaattccaggaccctgtcgcggtgagtttcgacaccaaggcatgggatacccaag

SEQ ID NO: 43565 - DNA, 60 bp, Artificial
  Synthetic oligonucleotide
aacatagaaccctggatagcattgatgaacagaacccaagccaacttgacggaaggcccc

SEQ ID NO: 43566 - DNA, 60 bp, Artificial
  Synthetic oligonucleotide
aatgaaggggccaaaccgactaaactgatgagtgggatacaaacagtgtccaagagcacg

SEQ ID NO: 43567 - DNA, 60 bp, Artificial
  Synthetic oligonucleotide
gcagagctttaaagcaggtcatgggactatccacggctgagaatgctctactggtggcct

SEQ ID NO: 43568 - DNA, 60 bp, Artificial
  Synthetic oligonucleotide
ggatgtccagacggagccaggtgttatgtcttgaatccagaggcccctaatatttccggg

SEQ ID NO: 43569 - DNA, 60 bp, Artificial
  Synthetic oligonucleotide
ggggtactacaccaagagctcccgtgaggttccctaacgcccttctaaagatcagacggg

SEQ ID NO: 43570 - DNA, 60 bp, Artificial
  Synthetic oligonucleotide
ccacccaagaaccccaatcccagggtacacatggtttcggcataccagttggctcaaggc

SEQ ID NO: 43571 - DNA, 60 bp, Artificial
  Synthetic oligonucleotide
actgtggttgttggtgacctatttcgtgatcactgaacaagaggcgtcgggcttacagct

SEQ ID NO: 43572 - DNA, 60 bp, Artificial
  Synthetic oligonucleotide
ggggtgagcgctgccatggaaataatgtcccaaaacccagtgtcggtaggggtggcagtc

SEQ ID NO: 43573 - DNA, 60 bp, Artificial
  Synthetic oligonucleotide
ggatggccgttacaataggagagcaagcacagaggagagggcgtgtaggcagggtgaagc

SEQ ID NO: 43574 - DNA, 60 bp, Artificial
  Synthetic oligonucleotide
tatggagtcttctacaaaggatgggagacaaaggacctagcagagaggacagctggaagg

SEQ ID NO: 43575 - DNA, 60 bp, Artificial
  Synthetic oligonucleotide
cacaagtaaaggtatatgctgctgacaacaccttagggcctatgccttgcaaacccatgg

SEQ ID NO: 43576 - DNA, 60 bp, Artificial
  Synthetic oligonucleotide
ggttgatgagagagggccggttgctagtaatctccctaagggacacagacaagggcttac

SEQ ID NO: 43577 - DNA, 60 bp, Artificial
  Synthetic oligonucleotide
agatcactaaggctgaggtgagagagctgctatcgccgcccagtgaggacagcggactac

SEQ ID NO: 43578 - DNA, 60 bp, Artificial
  Synthetic oligonucleotide
agggtagggcctgggctcagcccgggtacccttggcccctctatggcaatgagggcatgg

SEQ ID NO: 43579 - DNA, 60 bp, Artificial
  Synthetic oligonucleotide
ggagcggacaagtggtaacctacgcgctaaacacgttcaccaacctggccgtgcaactgg

SEQ ID NO: 43580 - DNA, 60 bp, Artificial
  Synthetic oligonucleotide
ggtggttgagaagcagagtggcgtatataaatcagccccgaaacgcttggccgctaccag

SEQ ID NO: 43581 - DNA, 60 bp, Artificial
  Synthetic oligonucleotide
ggagaaagcactcttgccaacaaaaaaggagcctggatggacagcaccaaagcgacaagg

SEQ ID NO: 43582 - DNA, 60 bp, Artificial
  Synthetic oligonucleotide
gaactgagatgcgggagtggggtgttcattcacaatgacgtggaggcctggacggaccga

SEQ ID NO: 43583 - DNA, 60 bp, Artificial
  Synthetic oligonucleotide
gcggttcctatgactatcgcagggctcatgttcgcggcttttgtcatctcgggaaagtcc

SEQ ID NO: 43584 - DNA, 57 bp, Artificial
  Synthetic oligonucleotide
gtattggccctattggcattcttcaagttcacagcaatcgctccgactcgagcagtg

SEQ ID NO: 43585 - DNA, 60 bp, Artificial
  Synthetic oligonucleotide
ctgccaccccgccaggttcatccgaccctttcccagaatcaaacgctcccatttcagaca

SEQ ID NO: 43586 - DNA, 60 bp, Artificial
  Synthetic oligonucleotide
gttggctgctgctttctttcagatggcgtattatgatgcacggctcatgctcggttggga

SEQ ID NO: 43587 - DNA, 60 bp, Artificial
  Synthetic oligonucleotide
gaggaacagaaccagtggaaaagcgctagagaagctgtcgaggactccacgttttgggag

SEQ ID NO: 43588 - DNA, 60 bp, Artificial
  Synthetic oligonucleotide
gctggggcaaaagcctgggacaacggagagtctcggaatggctgatctattgcttgacct

SEQ ID NO: 43589 - DNA, 60 bp, Artificial
  Synthetic oligonucleotide
gggcagagccagaatctccccaggggcaggttggaatgttcgcgatacagcttgtcttgc

SEQ ID NO: 43590 - DNA, 60 bp, Artificial
  Synthetic oligonucleotide
gggaagacatctggtgtggaagcttgattggaacccggacccgcgccacatgggcagaaa

SEQ ID NO: 43591 - DNA, 60 bp, Artificial
  Synthetic oligonucleotide
cagcgtcggtatggaggtggccttgttagaaacccgctatcacgcaattccacacatgag

SEQ ID NO: 43592 - DNA, 60 bp, Artificial
  Synthetic oligonucleotide
ccggacctcagaagccagtgataccctgctttgtgacattggggagtcatcgtcaagtgc

SEQ ID NO: 43593 - DNA, 60 bp, Artificial
  Synthetic oligonucleotide
ggcagatgccctgcgtgggcttccgatacgataccaaacttcggccgttaacagggagca

SEQ ID NO: 43594 - DNA, 60 bp, Artificial
  Synthetic oligonucleotide
ggacagccaagatcagcattcctgctattctggtcgctcttgcagtcctagtgcttgggg

SEQ ID NO: 43595 - DNA, 60 bp, Artificial
  Synthetic oligonucleotide
tggcacggcttggaggaacagagaaacgttgatggaatttgaagaaccacatgccacgaa

SEQ ID NO: 43596 - DNA, 60 bp, Artificial
  Synthetic oligonucleotide
ccgaggtggatcgagcaccagccaagtatgccagaaaggaaggtaatgtcacaggtggcc

SEQ ID NO: 43597 - DNA, 60 bp, Artificial
  Synthetic oligonucleotide
gctgacacagggcatggcaccgtggtcttagagttgcaatacaccggaaccgatggtcct

SEQ ID NO: 43598 - DNA, 60 bp, Artificial
  Synthetic oligonucleotide
aagggagcgcaaaggttggcagctcttggagacaccgcctgggattttggatccgtggga

SEQ ID NO: 43599 - DNA, 60 bp, Artificial
  Synthetic oligonucleotide
cctggaaacttgaacgcgcagtgcttggtgaggtaaagtcctgcacctggccagagaccc

SEQ ID NO: 43600 - DNA, 60 bp, Artificial
  Synthetic oligonucleotide
ggacgcattggaagaaacccaacgcaagtcggagacgaatactgctacggagggcacacc

SEQ ID NO: 43601 - DNA, 60 bp, Artificial
  Synthetic oligonucleotide
tggagtcatcatgcccagtggatcttacatcagcgccattgtgcagggagagaggatgga

SEQ ID NO: 43602 - DNA, 60 bp, Artificial
  Synthetic oligonucleotide
gccggagtaggagtcatggtggagggagtgttccacactctatggcatacgaccaagggg

SEQ ID NO: 43603 - DNA, 60 bp, Artificial
  Synthetic oligonucleotide
gcagagaaaattcaggaggtggagtggaaggcttgggcttgcagaagctggggtacgtcc

SEQ ID NO: 43604 - DNA, 60 bp, Artificial
  Synthetic oligonucleotide
tcggcttccgttacgctgtgggagaacggagcaagttcagtctggaacgccacaacagcc

SEQ ID NO: 43605 - DNA, 60 bp, Artificial
  Synthetic oligonucleotide
cgactcggaaagaggtccccacgtgtcttaaccctaaggcccagttgtcagaccacacgc

SEQ ID NO: 43606 - DNA, 60 bp, Artificial
  Synthetic oligonucleotide
gcgagcagatccagcgtacttctgcaagcaaggtgttgtggacagaggatggggaaacgg

SEQ ID NO: 43607 - DNA, 60 bp, Artificial
  Synthetic oligonucleotide
acactacatttaatgcacacagcactttagctgtatgaggatacgcccgacgtctatagt

SEQ ID NO: 43608 - DNA, 60 bp, Artificial
  Synthetic oligonucleotide
ctggtgatgtttctggccacccaggaggtccttcgcaagaggtggacggccagattgaca

SEQ ID NO: 43609 - DNA, 60 bp, Artificial
  Synthetic oligonucleotide
gaggtctgcggaaccggtgagtacaccggaattgccaagacgaccgggtcctttcttgga

SEQ ID NO: 43610 - DNA, 60 bp, Artificial
  Synthetic oligonucleotide
ggtctgcggaaccggtgagtacaccggaattgccaggatgaccgggtcctttcttggatc

SEQ ID NO: 43611 - DNA, 60 bp, Artificial
  Synthetic oligonucleotide
gagccgggctgtcaatatgctaaaacgcggaatgccccgcgtgttgtccttgattggact

SEQ ID NO: 43612 - DNA, 60 bp, Artificial
  Synthetic oligonucleotide
accaggagggcccggcaagagccgggctgtcaatatgctaaaacgcggaatgccccgcgt

SEQ ID NO: 43613 - DNA, 60 bp, Artificial
  Synthetic oligonucleotide
ccggcaagagccgggctgtcaatatgctaaaacgcggaatgccccgcgtgttgtccttga

SEQ ID NO: 43614 - DNA, 60 bp, Artificial
  Synthetic oligonucleotide
tagtggtctgcggaaccggtgagtacaccggaattgccaggacgaccgggtcctttcttg

SEQ ID NO: 43615 - DNA, 56 bp, Artificial
  Synthetic oligonucleotide
ctcgagatgccacgtggacgagggcatgcccacagcacatcttaacctgagcgggg

SEQ ID NO: 43616 - DNA, 55 bp, Artificial
  Synthetic oligonucleotide
cccctcccgggagagccatagtggtctgcggaaccggtgagtacaccggaatcgc

SEQ ID NO: 43617 - DNA, 55 bp, Artificial
  Synthetic oligonucleotide
ccccttccgggagagccatagtggtctgcggaaccggtgagtacaccggaatcgc

SEQ ID NO: 43618 - DNA, 60 bp, Artificial
  Synthetic oligonucleotide
cccctccccgggagagccatagtggtctgcggaaccggtgagtacaccggaattgccagg

SEQ ID NO: 43619 - DNA, 60 bp, Artificial
  Synthetic oligonucleotide
tggtggagtttacttgttgccgcgcaggggccctagattgggtgtgcgcgcgacgaggaa

SEQ ID NO: 43620 - DNA, 60 bp, Artificial
  Synthetic oligonucleotide
cacttccttggatgttggttacgagtgtgactacaaaataggctatgactgtgtgacgtt

SEQ ID NO: 43621 - DNA, 60 bp, Artificial
  Synthetic oligonucleotide
atgacgcacccaccctctgcattcttgtaaatactttggccagtcattgtaaataggtta

SEQ ID NO: 43622 - DNA, 60 bp, Artificial
  Synthetic oligonucleotide
cggaaggactaaaggaaagaaggctgattacatttaccaaggtgagacaaatgctgatga

SEQ ID NO: 43623 - DNA, 60 bp, Artificial
  Synthetic oligonucleotide
gccttgggaatgaaagttaattcacggcttaaaaggttttggaagatgactccggccagc

SEQ ID NO: 43624 - DNA, 60 bp, Artificial
  Synthetic oligonucleotide
tgggtgctaacttggatgtggaaagagtcattgaccctagaacaacattgaagcctgttg

SEQ ID NO: 43625 - DNA, 60 bp, Artificial
  Synthetic oligonucleotide
aatctttgggtttgattggaagaccgttgtggtgctttgtctggcagctttggcactacc

SEQ ID NO: 43626 - DNA, 60 bp, Artificial
  Synthetic oligonucleotide
tgctgtggttttgatgacggcaacgccacctggtgttgaagacccatgggctgaaagtaa

SEQ ID NO: 43627 - DNA, 60 bp, Artificial
  Synthetic oligonucleotide
ctgtgttaaacgtgatttcaagatggctggaatacaatcaaggctgtgggttttgcgtca

SEQ ID NO: 43628 - DNA, 60 bp, Artificial
  Synthetic oligonucleotide
ctgtgcctggttcctgaggaagggcagcaaaggacccagattgacacaactctagccatg

SEQ ID NO: 43629 - DNA, 60 bp, Artificial
  Synthetic oligonucleotide
cctggtgttttgattctaatcacccttatcgcacgtggaactatcatggatcataccgtg

SEQ ID NO: 43630 - DNA, 60 bp, Artificial
  Synthetic oligonucleotide
gggagagtcattgtggcgccctgtcgtggccaaactgaattgatagcaagagggacagtc

SEQ ID NO: 43631 - DNA, 60 bp, Artificial
  Synthetic oligonucleotide
gggtgggtttacccctgacagttcttgtccttggcttgaggagatggattgtgaatggaa

SEQ ID NO: 43632 - DNA, 60 bp, Artificial
  Synthetic oligonucleotide
gtactggcaatgtcaatgacagacaccacagcgtttggacagcaaagggtgtttaaacaa

SEQ ID NO: 43633 - DNA, 60 bp, Artificial
  Synthetic oligonucleotide
cagggctggttctagccgcaatacactggctttggttttatcctatgcatgaggctagcc

SEQ ID NO: 43634 - DNA, 60 bp, Artificial
  Synthetic oligonucleotide
gcaacaaaagaccaggactgtgttgacagccggaatgatgacgttaaacacaccctactc

SEQ ID NO: 43635 - DNA, 60 bp, Artificial
  Synthetic oligonucleotide
gaccctggattgatgggtgctgccgcaaaagataggtacatggtgcacagctcaacttgg

SEQ ID NO: 43636 - DNA, 60 bp, Artificial
  Synthetic oligonucleotide
tagaggaagtgctctgcgagtgagagggagagtgctcgccccagaatgggctagtgtgga

SEQ ID NO: 43637 - DNA, 59 bp, Artificial
  Synthetic oligonucleotide
tccaacaggacgcaccacttggtccctcatggtgaaaggagaatggatgactgatgaag

SEQ ID NO: 43638 - DNA, 60 bp, Artificial
  Synthetic oligonucleotide
gggactactgctagggcagaatgggccaagttgcttccaggagccgttgagaaggtgagg

SEQ ID NO: 43639 - DNA, 60 bp, Artificial
  Synthetic oligonucleotide
gccggcaactcaacatactatgtgggaaatgttggagagaaagaatgtcctgatcatgac

SEQ ID NO: 43640 - DNA, 60 bp, Artificial
  Synthetic oligonucleotide
gggtggatgtgttcgagtaggaaggtggacagaatgatgctgggcactctgttgatagtg

SEQ ID NO: 43641 - DNA, 60 bp, Artificial
  Synthetic oligonucleotide
gtaaggactagaggttagtggagacccccggcttttgaagttagggcaacacagggagtg

SEQ ID NO: 43642 - DNA, 60 bp, Artificial
  Synthetic oligonucleotide
agaaagagcattgtggtacttatccagcaaacgccttggaactagcaatgtggcagaagc

SEQ ID NO: 43643 - DNA, 60 bp, Artificial
  Synthetic oligonucleotide
ggaagggaaggatgattatgtttgcaagaaaaccttcagtgacagaggatggggcaatgg

SEQ ID NO: 43644 - DNA, 60 bp, Artificial
  Synthetic oligonucleotide
aacaagctgtccagtatgtggttggcatagaggtacatagaggggaagtcatcaaagcaa

SEQ ID NO: 43645 - DNA, 60 bp, Artificial
  Synthetic oligonucleotide
attcttaaaggagtggaaggagtcacatggttcgaggtgcttttggaaaagactagctgc

SEQ ID NO: 43646 - DNA, 60 bp, Artificial
  Synthetic oligonucleotide
gatgtgccatgcgacttatgtaaacaggaaattaattcacatgccccagaaaaactacga

SEQ ID NO: 43647 - DNA, 60 bp, Artificial
  Synthetic oligonucleotide
ggagaggtggtcggcctgtatggcaatggagtcttgcatggcgatacctactgcagttct

SEQ ID NO: 43648 - DNA, 60 bp, Artificial
  Synthetic oligonucleotide
ccgggtagtgggaaaactcacaggattcttcctgaacttgtaaggagagcactgagccgc

SEQ ID NO: 43649 - DNA, 60 bp, Artificial
  Synthetic oligonucleotide
cctggaatttgaaagttttggatttctgaatgaagaacattgggcttcacgggagttgag

SEQ ID NO: 43650 - DNA, 60 bp, Artificial
  Synthetic oligonucleotide
ccgaaggagttcttggagcaacttttgaggacttcgggattgacagatggttgcaggaac

SEQ ID NO: 43651 - DNA, 60 bp, Artificial
  Synthetic oligonucleotide
ggctgagtctgcctggggctctgtacaatcagttcacggaagccatggacacgatctatg

SEQ ID NO: 43652 - DNA, 60 bp, Artificial
  Synthetic oligonucleotide
ccggccatgcggtctccagaggaacagcaaaactagcctggattgatgagaggggtggag

SEQ ID NO: 43653 - DNA, 57 bp, Artificial
  Synthetic oligonucleotide
agaggggtggagtggagttgaaaggaagtgtcgtggacctgggctgtggaagagggg

SEQ ID NO: 43654 - DNA, 60 bp, Artificial
  Synthetic oligonucleotide
ggagagcaggcttggctcagcctctgtcttttatggacctgagcaagtgaaaatgactga

SEQ ID NO: 43655 - DNA, 60 bp, Artificial
  Synthetic oligonucleotide
cacctgcttgctcaatgtgactttacaccatggttggcttggaaagtggcttcagatggc

SEQ ID NO: 43656 - DNA, 60 bp, Artificial
  Synthetic oligonucleotide
gcttcctgtcctgagtgggattggtgctttgattagaggggattactttggagtggcccc

SEQ ID NO: 43657 - DNA, 60 bp, Artificial
  Synthetic oligonucleotide
ctgtcattcttacaacaagccactattgaatggcggacagcctgggttctgctagattgc

SEQ ID NO: 43658 - DNA, 60 bp, Artificial
  Synthetic oligonucleotide
tgctatcggggcctggtcgtcagatatggaagggtggagctcagctgtggaggcagttga

SEQ ID NO: 43659 - DNA, 60 bp, Artificial
  Synthetic oligonucleotide
ggaccgaccaaagagggtctggccaagtagtgacttatgcactcaacaccctgaccaaca

SEQ ID NO: 43660 - DNA, 60 bp, Artificial
  Synthetic oligonucleotide
ggaggatgaaggcatgctgcttgacatgatgagcggagaacacaagaaactggcttcggc

SEQ ID NO: 43661 - DNA, 60 bp, Artificial
  Synthetic oligonucleotide
cctcctagctgtcatcaatgtggttgttgtccgtgaaccatgggcaatgcttgaagctgg

SEQ ID NO: 43662 - DNA, 60 bp, Artificial
  Synthetic oligonucleotide
ggtgacttttggaagtacatcgatctgaaacctttaagcatctggggcacctatgcaacc

SEQ ID NO: 43663 - DNA, 60 bp, Artificial
  Synthetic oligonucleotide
ggctatgcagagcaagacaagggcccatggaagaaaggaaggttgctggttgagaggggt

SEQ ID NO: 43664 - DNA, 60 bp, Artificial
  Synthetic oligonucleotide
ggtgttgccgtcactgcaaactgcctccccttaaattcaccatggaggaagagtgctggt

SEQ ID NO: 43665 - DNA, 60 bp, Artificial
  Synthetic oligonucleotide
gtggcgtttctaggagcaattctgtatggatctggattcttgacagccaatcttgtcatg

SEQ ID NO: 43666 - DNA, 60 bp, Artificial
  Synthetic oligonucleotide
gctttgggcatatatgatggaagtggtgtttgacttgagaccaggcatgctgcttggcct

SEQ ID NO: 43667 - DNA, 60 bp, Artificial
  Synthetic oligonucleotide
gtcaacaataaaagttggggacatcacataccaatggaatcagcaagggagtgtcattgg

SEQ ID NO: 43668 - DNA, 60 bp, Artificial
  Synthetic oligonucleotide
caatagcagtcacttctggaattgtgggttttggtcttctagctttcaccacaggagtga

SEQ ID NO: 43669 - DNA, 60 bp, Artificial
  Synthetic oligonucleotide
tgccgtgaaaatggtaatcatgggatatggagatcaaaggccggctgtgctaggggctct

SEQ ID NO: 43670 - DNA, 60 bp, Artificial
  Synthetic oligonucleotide
gccagtgctgcccaacggagaggtagagtgggcaggaatccaagtcaaataggagatgag

SEQ ID NO: 43671 - DNA, 60 bp, Artificial
  Synthetic oligonucleotide
attaagccatagtacggaaaaaactatgctacctgtgagccccgtccaaggacgttaaaa

SEQ ID NO: 43672 - DNA, 60 bp, Artificial
  Synthetic oligonucleotide
tcagttgggccttctggtcgtgttcttggctacccaggaggtccttcgcaagaggtggac

SEQ ID NO: 43673 - DNA, 56 bp, Artificial
  Synthetic oligonucleotide
cgcgcaggggccccaggttgggtgtgcgcgcgactaggaagacttccgagcggtcg

SEQ ID NO: 43674 - DNA, 60 bp, Artificial
  Synthetic oligonucleotide
gatcaactgctacgaatacagcctgatagggtgctgcagaggcccactgtattgctacta

SEQ ID NO: 43675 - DNA, 60 bp, Artificial
  Synthetic oligonucleotide
accagggaaacctgaggaccaaacacatgttgaaccccggcaaggtggcagagcaactgt

SEQ ID NO: 43676 - DNA, 60 bp, Artificial
  Synthetic oligonucleotide
cccaagcctcgtctaggatgcaatagacgaggtgtaaggactagaggttagaggagaccc

SEQ ID NO: 43677 - DNA, 60 bp, Artificial
  Synthetic oligonucleotide
caagcctcgtctaagatgcaatagactaggtgtaaggactagaggttagaggagaccccg

SEQ ID NO: 43678 - DNA, 60 bp, Artificial
  Synthetic oligonucleotide
ggggagagaatgaaagttgcctatagatttgaggacatagaattttgctctcacacacca

SEQ ID NO: 43679 - DNA, 60 bp, Artificial
  Synthetic oligonucleotide
gccttcccgcgatggaggctgcatcatggatgtcatcacgagaagagaccagaggggatc

SEQ ID NO: 43680 - DNA, 60 bp, Artificial
  Synthetic oligonucleotide
ccatcactaaagtaatgtacaagtgggtgaagcagaagccagtagttatacccggctatg

SEQ ID NO: 43681 - DNA, 60 bp, Artificial
  Synthetic oligonucleotide
aatggtgaaatggttgacccttttcagctgggccttctggtgatgtttctggccacccag

SEQ ID NO: 43682 - DNA, 60 bp, Artificial
  Synthetic oligonucleotide
aatggtggaatggttgacccttttcagctgggccttctggtgatgtttctggccacccag

SEQ ID NO: 43683 - DNA, 60 bp, Artificial
  Synthetic oligonucleotide
cccaaggcgagatgaagctgtagtctcgctggaaggactagaggttagaggagacccccc

SEQ ID NO: 43684 - DNA, 60 bp, Artificial
  Synthetic oligonucleotide
caagcatcgcatttaacctgaggataggggagatgaaggaaggggacatggccacaggga

SEQ ID NO: 43685 - DNA, 60 bp, Artificial
  Synthetic oligonucleotide
gtggtggatgggtgatgacagggttggtaggtcgtaaatcccggtcaccttggtagccac

SEQ ID NO: 43686 - DNA, 60 bp, Artificial
  Synthetic oligonucleotide
aagttcgcggcgtcaactggcccctcttggtgggtgttcagcggaccatgtgtcgggaaa

SEQ ID NO: 43687 - DNA, 60 bp, Artificial
  Synthetic oligonucleotide
tatggccctgggcaaagtgttaccattgacggggagcgctacaccctgccgcatcaactg

SEQ ID NO: 43688 - DNA, 60 bp, Artificial
  Synthetic oligonucleotide
aggacgtcaagttcccgggtggcggtcagatcgttggtggagtttacctgttgccgcgca

SEQ ID NO: 43689 - DNA, 60 bp, Artificial
  Synthetic oligonucleotide
cccaaccaaagctcagagctgctatggtagaatactcatacatattcttagatgaatacc

SEQ ID NO: 43690 - DNA, 55 bp, Artificial
  Synthetic oligonucleotide
acgacaattaacacagtgcgagctgtttcttagcacgaagatctcgatgtctaag

SEQ ID NO: 43691 - DNA, 60 bp, Artificial
  Synthetic oligonucleotide
ggcgagaaacacgcctttcaatatgctgaaacgcgagagaaaccgcgtgtcaactgtaca

SEQ ID NO: 43692 - DNA, 60 bp, Artificial
  Synthetic oligonucleotide
ataaccaacggaaaaaggcgagaaacacgcctttcaatatgctgaaacgcgagagaaacc

SEQ ID NO: 43693 - DNA, 60 bp, Artificial
  Synthetic oligonucleotide
aggcgagaaacacgcctttcaatatgctgaaacgcgagagaaaccgcgtgtcaactgtac

SEQ ID NO: 43694 - DNA, 60 bp, Artificial
  Synthetic oligonucleotide
tcgtcagtggttcgacgctttggaggacaagcctcgagatgccacgtggacgagggcatg

SEQ ID NO: 43695 - DNA, 60 bp, Artificial
  Synthetic oligonucleotide
taaccagggcgaagggactagaggttagaggagaccccgcggtttaaagtgcacggccca

SEQ ID NO: 43696 - DNA, 60 bp, Artificial
  Synthetic oligonucleotide
ggtctgcggaaccggtgagtacaccggaattgccaggacgaccgggtcctttcttggatt

SEQ ID NO: 43697 - DNA, 60 bp, Artificial
  Synthetic oligonucleotide
agccgtagtggcgagctccctgggtggtctaagtcctgagtacaggacagtcgtcagtag

SEQ ID NO: 43698 - DNA, 60 bp, Artificial
  Synthetic oligonucleotide
ggactagccatagtggcgagctccctgggtggtctaagtcctgagtacaggacagtcgtc

SEQ ID NO: 43699 - DNA, 60 bp, Artificial
  Synthetic oligonucleotide
aaacggagggactagccgtagtggcgagctccctgggtggtctaagtcctgagtacagga

SEQ ID NO: 43700 - DNA, 60 bp, Artificial
  Synthetic oligonucleotide
actagcaaacggagggactagccgtagtggcgagctccctgggtggtctaagtcctgagt

SEQ ID NO: 43701 - DNA, 60 bp, Artificial
  Synthetic oligonucleotide
tagcaaacggagggactagccgtagtggcgagctccctgggtggtctaagtcctgagtac

SEQ ID NO: 43702 - DNA, 60 bp, Artificial
  Synthetic oligonucleotide
agcaaacggagggactagccgtagtggcgagctccctgggtggtctaagtcctgagtaca

SEQ ID NO: 43703 - DNA, 60 bp, Artificial
  Synthetic oligonucleotide
ggcagagcctgggctcagcccgggtacccttggcccctctatggcaatgagggcatgggg

SEQ ID NO: 43704 - DNA, 60 bp, Artificial
  Synthetic oligonucleotide
gtggcactcgttccacatgtgggaatgggactggagacacgaactgaaacatggatgtca

SEQ ID NO: 43705 - DNA, 60 bp, Artificial
  Synthetic oligonucleotide
cccctcgaagctgtagaggaggtggaaggactagaggttagaggagaccccgcatttgca

SEQ ID NO: 43706 - DNA, 60 bp, Artificial
  Synthetic oligonucleotide
ctccctcgaagctgtagaggaggtggaaggactagaggttagaggagaccccgcatttgc

SEQ ID NO: 43707 - DNA, 60 bp, Artificial
  Synthetic oligonucleotide
gatcttctgctctatctcaacatcagctactaggcacagagcgccgaagtatgtagctgg

SEQ ID NO: 43708 - DNA, 51 bp, Artificial
  Synthetic oligonucleotide
tagaggaggtggaaggactagaggttagaggagaccccgcatttgcatcaa

SEQ ID NO: 43709 - DNA, 60 bp, Artificial
  Synthetic oligonucleotide
ggaatagactgggagatcttctgctctatctcaacatcagctactaggcacagagcgccg

SEQ ID NO: 43710 - DNA, 53 bp, Artificial
  Synthetic oligonucleotide
tgtagaggaggtggaaggactagaggttagaggagaccccgcatttgcatcaa

SEQ ID NO: 43711 - DNA, 52 bp, Artificial
  Synthetic oligonucleotide
gtagaggaggtggaaggactagaggttagaggagaccccgcatttgcatcaa

SEQ ID NO: 43712 - DNA, 60 bp, Artificial
  Synthetic oligonucleotide
cctcgaagctgtagaggaagtggaaggactagaggttagaggagaccccgcatttgcatc

SEQ ID NO: 43713 - DNA, 60 bp, Artificial
  Synthetic oligonucleotide
ccaagccccctcgaagctgtagaggaggtggaaggactagaggttagaggagaccccgca

SEQ ID NO: 43714 - DNA, 60 bp, Artificial
  Synthetic oligonucleotide
cctaaacctcaaagaaaaaccaaacgtaacaccaaccgccgcccacaggacgtcaagttc

SEQ ID NO: 43715 - DNA, 60 bp, Artificial
  Synthetic oligonucleotide
gatagaggctggggaaatggttgtggtttgtttggaaaaggcagcatcgttggatgtgct

SEQ ID NO: 43716 - DNA, 54 bp, Artificial
  Synthetic oligonucleotide
ccgggtcctttcttggataaccccgctcaatgcctggagatttgggcgtgcccc

SEQ ID NO: 43717 - DNA, 60 bp, Artificial
  Synthetic oligonucleotide
gcggcataccccgcgtattcccactagtgggagtgaagagggtagtaatgaacttgctag

SEQ ID NO: 43718 - DNA, 60 bp, Artificial
  Synthetic oligonucleotide
cgcggcataccccgcgtattcccactagtgggagtgaagagggtagtcatgggcttgttg

SEQ ID NO: 43719 - DNA, 60 bp, Artificial
  Synthetic oligonucleotide
cggggtaaattatgcaacagggaatcttcctggttgctccttttctatcttccttttggc

SEQ ID NO: 43720 - DNA, 50 bp, Artificial
  Synthetic oligonucleotide
cgtctagccatggcgttagtatgagtgtcgtgcagcctccaggactcccc

SEQ ID NO: 43721 - DNA, 60 bp, Artificial
  Synthetic oligonucleotide
acgcatggggtagcagactagtggttagaggagacccctcccaagacacaacgcagcagc

SEQ ID NO: 43722 - DNA, 60 bp, Artificial
  Synthetic oligonucleotide
ctcccgggagagccatagtggtctgcggaaccggtgagtacaccggaattgccgggaaga

SEQ ID NO: 43723 - DNA, 55 bp, Artificial
  Synthetic oligonucleotide
ccctcacatgcggcttcgccgacctcatggggtacattccgctcgtcggcgcccc

SEQ ID NO: 43724 - DNA, 60 bp, Artificial
  Synthetic oligonucleotide
gaacctgggttgatgtggtgctggagcatggaggctgcgtcacagtacgggttgaaggga

SEQ ID NO: 43725 - DNA, 60 bp, Artificial
  Synthetic oligonucleotide
agctacgcaggagttgaggggctagggctgcagagattgggttacgtcttgagagacata

SEQ ID NO: 43726 - DNA, 60 bp, Artificial
  Synthetic oligonucleotide
cacggaactgtggttttggacgtcagttatcaaggagatgatgcgccctgcaagatcccc

SEQ ID NO: 43727 - DNA, 60 bp, Artificial
  Synthetic oligonucleotide
tggcgggcgctatcatggccaaccgagagacttcaagccctcatgctctgctgctgacag

SEQ ID NO: 43728 - DNA, 60 bp, Artificial
  Synthetic oligonucleotide
gccccggtcatgaggagccacggatggtgcagagctatggctggaacattgtcaccttga

SEQ ID NO: 43729 - DNA, 60 bp, Artificial
  Synthetic oligonucleotide
catgcagtttccagaggaagcgcaaaattgcgttggatggttgaaagagctgcagtccgc

SEQ ID NO: 43730 - DNA, 60 bp, Artificial
  Synthetic oligonucleotide
ggtcggagacggaaggctcaagcagcattggttcaagaaagggagtgtaattggaggagc

SEQ ID NO: 43731 - DNA, 60 bp, Artificial
  Synthetic oligonucleotide
cacacgctagcagccgtacctttcatgttcaccatactgcggaacactggaaatacaggg

SEQ ID NO: 43732 - DNA, 60 bp, Artificial
  Synthetic oligonucleotide
gccttgctgatactacgagccatcatccaaacagacgtcagctctgtgacacttccagtg

SEQ ID NO: 43733 - DNA, 60 bp, Artificial
  Synthetic oligonucleotide
cagctgatcatccccaagtcattgggaggccccagatcgagacacaacatgcggagtggt

SEQ ID NO: 43734 - DNA, 60 bp, Artificial
  Synthetic oligonucleotide
caggagagacatgctggtacgccatggaaatcaggcctgtgagtgagagagaagaaaccc

SEQ ID NO: 43735 - DNA, 60 bp, Artificial
  Synthetic oligonucleotide
gattgtgcaactcactcgatgtgcagaggcagaaggtgtcctgatcccgtcaatgagaga

SEQ ID NO: 43736 - DNA, 60 bp, Artificial
  Synthetic oligonucleotide
gacacaggaaggcctgaggaaacgctgggctactcgccatatcatggtggcttcactgac

SEQ ID NO: 43737 - DNA, 60 bp, Artificial
  Synthetic oligonucleotide
gccatcatggaactcacgtacaggcacaaagtggtgaaagtcatgcgcccaggccctggg

SEQ ID NO: 43738 - DNA, 60 bp, Artificial
  Synthetic oligonucleotide
cggaggtgatgtgatgcacttggcattagtggcagtcttcaaagttcaacctggcttcct

SEQ ID NO: 43739 - DNA, 60 bp, Artificial
  Synthetic oligonucleotide
gtctacaacatgatgggaaaacgggaaaagaagcttggagaatttggaaaagcgaaggga

SEQ ID NO: 43740 - DNA, 60 bp, Artificial
  Synthetic oligonucleotide
gggcaaaatgcgtttaagaccagtggagaaagagctaaagtatggatggaagaagtgggg

SEQ ID NO: 43741 - DNA, 60 bp, Artificial
  Synthetic oligonucleotide
gatgtgggagtccatagcggatgagctgaatgccatcttggaagagaatgagcgcgagat

SEQ ID NO: 43742 - DNA, 60 bp, Artificial
  Synthetic oligonucleotide
cggtagtgctagctcccactagagtcgtggcagcggaaatggctgaggctctgaaaggga

SEQ ID NO: 43743 - DNA, 60 bp, Artificial
  Synthetic oligonucleotide
cattgaggcttggagagatgagtacgctttccaccccagtggtcctaaggccttggcagc

SEQ ID NO: 43744 - DNA, 60 bp, Artificial
  Synthetic oligonucleotide
catatggagggccatggaagttggaaggacgttgggatggcgtgtcagaagtgcaactga

SEQ ID NO: 43745 - DNA, 60 bp, Artificial
  Synthetic oligonucleotide
tcaggggaaaggaagaagctaaaacccagatggagtgacgccaggacgtattgtgaccat

SEQ ID NO: 43746 - DNA, 60 bp, Artificial
  Synthetic oligonucleotide
ggggaagtgattggcctttatggaaatgggctgatgatgggagacgcgtatgcaagttcc

SEQ ID NO: 43747 - DNA, 60 bp, Artificial
  Synthetic oligonucleotide
aagaccaggaagagagagtagtcctgagtggaccaacgccaatctctccggccagcgcag

SEQ ID NO: 43748 - DNA, 60 bp, Artificial
  Synthetic oligonucleotide
ggtctcatagctcaattgtatggccctgaacaagacaaatgtttcgccactgatggagaa

SEQ ID NO: 43749 - DNA, 58 bp, Artificial
  Synthetic oligonucleotide
ccccatcgagaggctatgcaagaaatgccggctgctctggaaactgtccttgtgtttt

SEQ ID NO: 43750 - DNA, 60 bp, Artificial
  Synthetic oligonucleotide
atgaggcgcatttcacagatccagccagcattgctgcacgagggtttattgcaacaaagg

SEQ ID NO: 43751 - DNA, 60 bp, Artificial
  Synthetic oligonucleotide
ggagcatcaatggcagacggccaaggaagcagtggaagatccagggttctgggctctggt

SEQ ID NO: 43752 - DNA, 60 bp, Artificial
  Synthetic oligonucleotide
gtggaggctattatcaaggcagaagaaaccaaggctttgcaccagggatgaattcaaggc

SEQ ID NO: 43753 - DNA, 60 bp, Artificial
  Synthetic oligonucleotide
gcagaagaggggtaaccaatagaggctggaacaatggctgtggtctgtttgggaaaggag

SEQ ID NO: 43754 - DNA, 60 bp, Artificial
  Synthetic oligonucleotide
gcaaggtcctcctacatagaatggaaaagaaatggataggccctaggtatgagaaggacg

SEQ ID NO: 43755 - DNA, 60 bp, Artificial
  Synthetic oligonucleotide
ttggagattacggcacactgggaatggattgtgaaccacagtcaggacttgattttggac

SEQ ID NO: 43756 - DNA, 60 bp, Artificial
  Synthetic oligonucleotide
gtggctccttgattggaagcagaaccagagctacttgggctgaaaacatctgggtggccg

SEQ ID NO: 43757 - DNA, 60 bp, Artificial
  Synthetic oligonucleotide
tcaaagttggagtgagtgcgccaccctatcagccgctgcagccgccacgctttgggaagg

SEQ ID NO: 43758 - DNA, 60 bp, Artificial
  Synthetic oligonucleotide
agtggagatgattgtgtggtgaagggagaggatgaaagattcgccactgcactgtacttc

SEQ ID NO: 43759 - DNA, 60 bp, Artificial
  Synthetic oligonucleotide
tgatgcatgaaggggtgtttcacaccatgtggcacgtcactagaggggccgctttgaaaa

SEQ ID NO: 43760 - DNA, 60 bp, Artificial
  Synthetic oligonucleotide
cccttttgtgctgctgcttggtatctccacgggaagtcagggagaagagctggagcgctg

SEQ ID NO: 43761 - DNA, 60 bp, Artificial
  Synthetic oligonucleotide
ggttgggcagattggcaggaggtgcccttttgctcccaccacttcaaagaactccagctg

SEQ ID NO: 43762 - DNA, 60 bp, Artificial
  Synthetic oligonucleotide
gacgcggaagtcagcggaagtagccccagggttgacgttgccttggatgagaatggtgat

SEQ ID NO: 43763 - DNA, 60 bp, Artificial
  Synthetic oligonucleotide
ccgcatggaccgtcagagaatcggctgggctggccaaagcttatgcgcaaatgtggaagt

SEQ ID NO: 43764 - DNA, 60 bp, Artificial
  Synthetic oligonucleotide
tagtaggagccctagggaatgtgcaaagtaccccactagcaggccctatggcggcgtgtg

SEQ ID NO: 43765 - DNA, 60 bp, Artificial
  Synthetic oligonucleotide
ggtggcagcagctctgggacaattcggaatggtgaatgcaacggcagccttagggacgct

SEQ ID NO: 43766 - DNA, 60 bp, Artificial
  Synthetic oligonucleotide
gcaagcaaggggactgggatttcgtggtcacaaccgacatctcggaaatgggagcgaact

SEQ ID NO: 43767 - DNA, 60 bp, Artificial
  Synthetic oligonucleotide
ccacagaattcacactcctgactcctccggatttaaggccagccacggcatggagcatat

SEQ ID NO: 43768 - DNA, 60 bp, Artificial
  Synthetic oligonucleotide
gctggatgttgttgcccgcagaaagacaaaaaataaaggaaaacgctccgttgagagcag

SEQ ID NO: 43769 - DNA, 60 bp, Artificial
  Synthetic oligonucleotide
atggcaggctggagctgccagggccgctcagcgtaggacggcagccgggatcatgaagaa

SEQ ID NO: 43770 - DNA, 60 bp, Artificial
  Synthetic oligonucleotide
gccattgtggtcggatgctggcaacaactaactcctgccacactgatgacggctttggtc

SEQ ID NO: 43771 - DNA, 60 bp, Artificial
  Synthetic oligonucleotide
tacccaagcgatcaagacggaatgctgtgtttccccagcacactgaaaatgtcctcgcaa

SEQ ID NO: 43772 - DNA, 57 bp, Artificial
  Synthetic oligonucleotide
cttcatgacagccacaccgcctggcagcgacaatccctttccagcttccaacgcccc

SEQ ID NO: 43773 - DNA, 60 bp, Artificial
  Synthetic oligonucleotide
aattgtggaggaaggggaccatcggcccggagcacgacggctagtggaaaagtgatagcc

SEQ ID NO: 43774 - DNA, 60 bp, Artificial
  Synthetic oligonucleotide
ccccaagctggcgcggcgctacacgcggcaagaggaagaaccttcgggtgacctctgggg

SEQ ID NO: 43775 - DNA, 60 bp, Artificial
  Synthetic oligonucleotide
ctggtggatgggaacccggccctgcgtgttggaacgtcgctaaaacccttaggggacaat

SEQ ID NO: 43776 - DNA, 60 bp, Artificial
  Synthetic oligonucleotide
gctctgccatggcacgctcggtcgtactgttgagctggatttgcctgctgagctctgtga

SEQ ID NO: 43777 - DNA, 60 bp, Artificial
  Synthetic oligonucleotide
accacggaagcacctgagcccggcggaagccccgtgggcacggtacacaggttgggccta

SEQ ID NO: 43778 - DNA, 60 bp, Artificial
  Synthetic oligonucleotide
tggaaggcccggaaccgaccctagggtggaacctggatgagggtgtggaagagactcccc

SEQ ID NO: 43779 - DNA, 60 bp, Artificial
  Synthetic oligonucleotide
atggtgagggatgcagcacgcacgctctcctgtggccagtcggtgcacggcaagccagta

SEQ ID NO: 43780 - DNA, 60 bp, Artificial
  Synthetic oligonucleotide
ttacgcccatgcgggacaggtgacccggcgaacggctgaacagctacgccagtggggttt

SEQ ID NO: 43781 - DNA, 60 bp, Artificial
  Synthetic oligonucleotide
tggtctgcgagcgacgacgtggccgtgtatccgctgcctgttggtgccaaatgcttagaa

SEQ ID NO: 43782 - DNA, 56 bp, Artificial
  Synthetic oligonucleotide
cccctgggttcgttcctactgcccctgtagttgtccaccaccacggaaagggcttc

SEQ ID NO: 43783 - DNA, 60 bp, Artificial
  Synthetic oligonucleotide
ggtgagaggcctaagtaccttggtcatcacggtcagggtgcttactatggggcggtctcc

SEQ ID NO: 43784 - DNA, 60 bp, Artificial
  Synthetic oligonucleotide
acgcgctcaagtgcccctgcgttgagtttccgtctggggacctgccacgtaggatacctg

SEQ ID NO: 43785 - DNA, 60 bp, Artificial
  Synthetic oligonucleotide
ccccttcactgcgtgggccccgggtggttggtatgcgccagttttcactaagtgtaactg

SEQ ID NO: 43786 - DNA, 60 bp, Artificial
  Synthetic oligonucleotide
gggtcatgcgttcctccccggcctggttgttgtctgacatggcttttgccctgttagtcc

SEQ ID NO: 43787 - DNA, 60 bp, Artificial
  Synthetic oligonucleotide
cacaccaacttgctccaatcagtcctcttcggtgggcgaagcgctgctggcagccctttg

SEQ ID NO: 43788 - DNA, 60 bp, Artificial
  Synthetic oligonucleotide
cgggtggctctaggcgttggtggctgagcacggatatgaggaagccgctcgcacgagcgg

SEQ ID NO: 43789 - DNA, 60 bp, Artificial
  Synthetic oligonucleotide
atatgacgggcgacctgctgcgggcttacgactcctgtccttacacgtcggccatcactg

SEQ ID NO: 43790 - DNA, 60 bp, Artificial
  Synthetic oligonucleotide
cactccaaggttgagtgtaacaggttggcctccgcactaacatcgtgtggtatctccgcc

SEQ ID NO: 43791 - DNA, 60 bp, Artificial
  Synthetic oligonucleotide
accatcacagtttccctgagaaccgtacccgctccggcggagttgcgctctcaacgacgt

SEQ ID NO: 43792 - DNA, 60 bp, Artificial
  Synthetic oligonucleotide
aactggcctttgcttgttggggtacaacggtacatgtgtgaggaggcggagtgtgggccc

SEQ ID NO: 43793 - DNA, 60 bp, Artificial
  Synthetic oligonucleotide
tgctacgagaccactgctgcggaactgcggcgagccgctcggactaggccatgcttctca

SEQ ID NO: 43794 - DNA, 60 bp, Artificial
  Synthetic oligonucleotide
ttcaaggccacttcatcccagagcccaacgtttcagaggtccctattgagccctcggtgc

SEQ ID NO: 43795 - DNA, 60 bp, Artificial
  Synthetic oligonucleotide
atgaggaggatctgcagaggaccaaggcggccgccatcgaggccatcgggaccggcttag

SEQ ID NO: 43796 - DNA, 60 bp, Artificial
  Synthetic oligonucleotide
ctgacatgccatcgttagagtctaccagttccagttccttcgaggtgatctctttgagcg

SEQ ID NO: 43797 - DNA, 60 bp, Artificial
  Synthetic oligonucleotide
gctgacacgctgggcgacataattctcagttgtgaaacccgcgaggaggctcaaatgtct

SEQ ID NO: 43798 - DNA, 60 bp, Artificial
  Synthetic oligonucleotide
ccaagtgcaaggcaacacttactcattcccgttgaaaatcctgcctcgtgtcctagtgtc

SEQ ID NO: 43799 - DNA, 60 bp, Artificial
  Synthetic oligonucleotide
tccgcgatttaggcatgaaaagcttgtcttggcaccgtcggcgtgccgggaacgtcagga

SEQ ID NO: 43800 - DNA, 60 bp, Artificial
  Synthetic oligonucleotide
gggttccgaaagtgtaggtcctctggagtgctgacgactagctcggctaacagcatcacg

SEQ ID NO: 43801 - DNA, 60 bp, Artificial
  Synthetic oligonucleotide
ggtgctcggtctcggtgagccgttttctcttgctcttgccggtgggaccctcacgacgcg

SEQ ID NO: 43802 - DNA, 60 bp, Artificial
  Synthetic oligonucleotide
ccccgcggatcacgccttgggtacgcgggaacggctctgtggagtgcacttgcccttttg

SEQ ID NO: 43803 - DNA, 60 bp, Artificial
  Synthetic oligonucleotide
tgtgtccgtctgaggtgcttggcaccgtggccgtgatgtgccggtggggttctgcatatt

SEQ ID NO: 43804 - DNA, 60 bp, Artificial
  Synthetic oligonucleotide
ttcttgcgtcgtggaccagaggcccgcctggtgcgggtcctgcgttcgcgattgttggga

SEQ ID NO: 43805 - DNA, 60 bp, Artificial
  Synthetic oligonucleotide
aacccgtcaatcgcgacggtgcgggctatggggccctatatggaacaactgactgggcaa

SEQ ID NO: 43806 - DNA, 60 bp, Artificial
  Synthetic oligonucleotide
tctcttgggtctcctgaatgtcatggcttatctcaacaccgtgggcagcgtgcgatgcgc

SEQ ID NO: 43807 - DNA, 60 bp, Artificial
  Synthetic oligonucleotide
ggtgattacctaccggccgtgcaggcagcccttgcccctgagtacgtcgcagctcccatc

SEQ ID NO: 43808 - DNA, 60 bp, Artificial
  Synthetic oligonucleotide
tgatgaaggtcacgcggtggggatgctgatttccgtgttgcacagaggctcgcgggttac

SEQ ID NO: 43809 - DNA, 60 bp, Artificial
  Synthetic oligonucleotide
ctcttgggattgggcagaccacctgtggttcgcatcctgggtgctctcttggggtttgct

SEQ ID NO: 43810 - DNA, 60 bp, Artificial
  Synthetic oligonucleotide
tcttggaagttgtactggtgtccagccccaacttggtgcgcttggcccgcgtgttggaca

SEQ ID NO: 43811 - DNA, 60 bp, Artificial
  Synthetic oligonucleotide
atgccactccactgaccccgtgtcgatacttggtatgggcagagctcggttgctggccaa

SEQ ID NO: 43812 - DNA, 60 bp, Artificial
  Synthetic oligonucleotide
ttggggtcggtgcgtcgttcctgctggggatgtcggctggccacagcgttcatgtgagac

SEQ ID NO: 43813 - DNA, 60 bp, Artificial
  Synthetic oligonucleotide
tttggacaccgcattcacccgggcgtgggacaccgtcttcacacatgggcgctcgttgct

SEQ ID NO: 43814 - DNA, 60 bp, Artificial
  Synthetic oligonucleotide
gacccgtgcccttgctttgccgctggggaaacaacctcccagaggccattgccccacacc

SEQ ID NO: 43815 - DNA, 60 bp, Artificial
  Synthetic oligonucleotide
aacagagaccttggagacggcctgtggttggggtccgtgctccgctagcttcgcctacat

SEQ ID NO: 43816 - DNA, 60 bp, Artificial
  Synthetic oligonucleotide
tttggtcaaccctcccttcagtagactcgcgaccagcgtatggtggctggcgtcctaccg

SEQ ID NO: 43817 - DNA, 60 bp, Artificial
  Synthetic oligonucleotide
ccactcgcaagcctcccaggttcattgtctatcctccacttgacttccggatagcagaga

SEQ ID NO: 43818 - DNA, 60 bp, Artificial
  Synthetic oligonucleotide
cccctgtaatcgccttaccaaatttccgcctggttactccatatgaacatcacgaggagg

SEQ ID NO: 43819 - DNA, 60 bp, Artificial
  Synthetic oligonucleotide
ttgagtggacgagcggaggccaaagacgcctggtgtatcatctcctgcctagcctcacct

SEQ ID NO: 43820 - DNA, 60 bp, Artificial
  Synthetic oligonucleotide
catgctcagccgccgactctctaccctgttcccgcgcattaaggttcctctgcttggatg

SEQ ID NO: 43821 - DNA, 60 bp, Artificial
  Synthetic oligonucleotide
gggcagtggtcaccttgaaactcggtgcttgtgtggttgtatcgtgactggtgaaatagt

SEQ ID NO: 43822 - DNA, 60 bp, Artificial
  Synthetic oligonucleotide
aaggtgtatgtgaccgaccctgaccgtgcagcggaacgggcggagaaagtcaccatttgg

SEQ ID NO: 43823 - DNA, 60 bp, Artificial
  Synthetic oligonucleotide
cggtcgatgccacctgtttcgactcgtctattgatgagcgggatatggaggttgaggcgg

SEQ ID NO: 43824 - DNA, 60 bp, Artificial
  Synthetic oligonucleotide
atggtggtctgcggaaccggtgagtacaccggaattgccaggacgaccgggtcctttctt

SEQ ID NO: 43825 - DNA, 60 bp, Artificial
  Synthetic oligonucleotide
tcgtcagtggttcgacgcttcggaggacaagcctcgagatgccacgtggacgagggcatg

SEQ ID NO: 43826 - DNA, 60 bp, Artificial
  Synthetic oligonucleotide
gggaaccttcccctcagcgaaggccgaaaagaggctagccatgcccttagtaggactagc

SEQ ID NO: 43827 - DNA, 60 bp, Artificial
  Synthetic oligonucleotide
cccctcgaagctgtagaggaggtggaaggactagaggttagaggagaccccgcaatttgc

SEQ ID NO: 43828 - DNA, 54 bp, Artificial
  Synthetic oligonucleotide
cccactagtgggagtgaagagggtagtaatgaacttgctagatggcagagggcc

SEQ ID NO: 43829 - DNA, 56 bp, Artificial
  Synthetic oligonucleotide
cccactagtgggagtgaagagggtagtaatgagcttgttggacggtagagggccag

SEQ ID NO: 43830 - DNA, 56 bp, Artificial
  Synthetic oligonucleotide
cccactagtgggagtgaagagggtagtaatgagcttgttggacggcagaggaccag

SEQ ID NO: 43831 - DNA, 60 bp, Artificial
  Synthetic oligonucleotide
agcatattgacgctgggaaagaccagagatcctgctgtctcctcagcatcattccaggca

SEQ ID NO: 43832 - DNA, 60 bp, Artificial
  Synthetic oligonucleotide
gtagggaatcttccccttagcgaaggccgaaaagaggctagccatgcccttagtaggact

SEQ ID NO: 43833 - DNA, 53 bp, Artificial
  Synthetic oligonucleotide
ctgggaaagaccagagatcctgctgtctcctcagcatcattccaggcacagaa

SEQ ID NO: 43834 - DNA, 54 bp, Artificial
  Synthetic oligonucleotide
ctgggaaagaccagagatcctgctgtctcctcagcatcattccaggcacagaac

SEQ ID NO: 43835 - DNA, 55 bp, Artificial
  Synthetic oligonucleotide
gtaggactagcaaacaaggagggtagcaacagtggtgagttcgttggatggctga

SEQ ID NO: 43836 - DNA, 60 bp, Artificial
  Synthetic oligonucleotide
gaaaggcctaacaaaaggaggaccaggacacgaagaacccatccccatgtcaacatatgg

SEQ ID NO: 43837 - DNA, 60 bp, Artificial
  Synthetic oligonucleotide
ctcctcagcatcattccaggcacagaacgccagaaaatggaatggtgctgttgaatcaac

SEQ ID NO: 43838 - DNA, 56 bp, Artificial
  Synthetic oligonucleotide
cagcatcattccaggcacagaacgccagaaaatggaatggtgctgttgaatcaaca

SEQ ID NO: 43839 - DNA, 60 bp, Artificial
  Synthetic oligonucleotide
gacgaccgggtcctttcttggattaaacccgctcaatgcctggagatttgggcgtgcccc

SEQ ID NO: 43840 - DNA, 58 bp, Artificial
  Synthetic oligonucleotide
cgaccgggtcctttcttggataaaacccgctcaatgcctggagatttgggcgtgcccc

SEQ ID NO: 43841 - DNA, 59 bp, Artificial
  Synthetic oligonucleotide
acgaccgggtcctttcttggataaaacccgctcaatgcctggagatttgggcgtgcccc

SEQ ID NO: 43842 - DNA, 51 bp, Artificial
  Synthetic oligonucleotide
ggtcctttcttggatcaacccgctcaatgcctggagatttgggcgtgcccc

SEQ ID NO: 43843 - DNA, 56 bp, Artificial
  Synthetic oligonucleotide
gaccgggtcctttcttggatcaacccgctcaatgcctggagatttgggcgtgcccc

SEQ ID NO: 43844 - DNA, 50 bp, Artificial
  Synthetic oligonucleotide
gtcctttcttggatcaacccgctcaatgcctggagatttgggcgtgcccc

SEQ ID NO: 43845 - DNA, 60 bp, Artificial
  Synthetic oligonucleotide
ttcagctgggcctcttggtagttttcctggccacccaggaggtcttgaggaagaggtgga

SEQ ID NO: 43846 - DNA, 60 bp, Artificial
  Synthetic oligonucleotide
caggaggtcttgaggaagaggtggacggccagaatgactattccagcagtagtagcggct

SEQ ID NO: 43847 - DNA, 60 bp, Artificial
  Synthetic oligonucleotide
tgctgcctgcgaccaaccccaggaggactgggttaccaaagctgattctccacggttgga

SEQ ID NO: 43848 - DNA, 60 bp, Artificial
  Synthetic oligonucleotide
ctggctaagaccatctttgagaaagcctaccatgccaaggttgtgaaagtggcccggccc

SEQ ID NO: 43849 - DNA, 60 bp, Artificial
  Synthetic oligonucleotide
gcgtcgttgtgggactgtacgggaacggcctgaagactaaagacacctatgtgagtggga

SEQ ID NO: 43850 - DNA, 60 bp, Artificial
  Synthetic oligonucleotide
ggcgtgacatccgagagtttgtccagtatgcaagttgccgcaggggagcgtctgaactgc

SEQ ID NO: 43851 - DNA, 60 bp, Artificial
  Synthetic oligonucleotide
atggatgagggacactggactgacccacacagcatagctgcccggggccacttgtacaca

SEQ ID NO: 43852 - DNA, 60 bp, Artificial
  Synthetic oligonucleotide
gagttcggttcggccaaggggagcagggcaatttggtacatgtggttaggcagccggttc

SEQ ID NO: 43853 - DNA, 60 bp, Artificial
  Synthetic oligonucleotide
gactagccaggggtcagagtgagaggaagttcttaagttggggagtgccaatggctgccc

SEQ ID NO: 43854 - DNA, 60 bp, Artificial
  Synthetic oligonucleotide
tggactgcccctggaaggttttgaacaggccctcaattggattgatgcggctgcggtggg

SEQ ID NO: 43855 - DNA, 60 bp, Artificial
  Synthetic oligonucleotide
gcagctgatccggtatgccatttcagtgggcataacattcgccctgcagcttggaccaga

SEQ ID NO: 43856 - DNA, 60 bp, Artificial
  Synthetic oligonucleotide
ggcaaccagcttttgaaggacacccttgcccatactggacgcaggcggcagcacaccatt

SEQ ID NO: 43857 - DNA, 60 bp, Artificial
  Synthetic oligonucleotide
gagagtgatccggacccagagaaggaaggggagagaagccgcagagtgatccagctcatg

SEQ ID NO: 43858 - DNA, 60 bp, Artificial
  Synthetic oligonucleotide
ctgcagcgctcgtggaggcagccaagaacaacgtgtgtggaatagtgccccaaaacaggc

SEQ ID NO: 43859 - DNA, 60 bp, Artificial
  Synthetic oligonucleotide
gagggctgactgggcacggcacatatggactggggtcatgaaggttcgagccatgatagg

SEQ ID NO: 43860 - DNA, 60 bp, Artificial
  Synthetic oligonucleotide
ccgactgctttgccaagagcattggtgctgtctcgtatgctggagatcgtatggcaggtc

SEQ ID NO: 43861 - DNA, 60 bp, Artificial
  Synthetic oligonucleotide
cgcagatcggctgtggattggacaggagcggtcacgatggtgattgtcctccctttgtgt

SEQ ID NO: 43862 - DNA, 60 bp, Artificial
  Synthetic oligonucleotide
tccatgtgtgaagaggggaagttcgcctggaagcggcctccaactgacagtgggcatgac

SEQ ID NO: 43863 - DNA, 60 bp, Artificial
  Synthetic oligonucleotide
agtgtatcaccatcgagcccaatgaagaacctgtggacgtggactgcttttgtcgaggtg

SEQ ID NO: 43864 - DNA, 60 bp, Artificial
  Synthetic oligonucleotide
gtgaaggcatacaccatcggagggaaaggacacgaggaaccccgtatggtcaccagcttg

SEQ ID NO: 43865 - DNA, 60 bp, Artificial
  Synthetic oligonucleotide
gggaactcttgagacgtggagagacaaacatggggttggccgtctcacgcggaactgcca

SEQ ID NO: 43866 - DNA, 60 bp, Artificial
  Synthetic oligonucleotide
ggcgttcacactccttgtcctgggattggtaattggaacagtggcagccaatgagcttgg

SEQ ID NO: 43867 - DNA, 60 bp, Artificial
  Synthetic oligonucleotide
agttttggtggacaatgccggtggcgtgcggaatggcaggactggcaagaggctgttggt

SEQ ID NO: 43868 - DNA, 60 bp, Artificial
  Synthetic oligonucleotide
gcgcagccattgcgcggacactgagagccaagggcaagtcggtgatttgcttgaacagca

SEQ ID NO: 43869 - DNA, 60 bp, Artificial
  Synthetic oligonucleotide
tcgctgaatggaacccagaactcttaaatgagggaggggaggtgaacttgacagtgcggc

SEQ ID NO: 43870 - DNA, 60 bp, Artificial
  Synthetic oligonucleotide
gacagaaagtcagttgagttcaccgcacagtcggaaaagaagaccatctccttggggagc

SEQ ID NO: 43871 - DNA, 60 bp, Artificial
  Synthetic oligonucleotide
gtgtgggctacgggagtcatggcgtgctccacaccatgtggcatgtgaccagaggagctg

SEQ ID NO: 43872 - DNA, 60 bp, Artificial
  Synthetic oligonucleotide
tcaaggacaaggtggacacgaaagcccaggagccgcagccgggcactagaatcatcatgc

SEQ ID NO: 43873 - DNA, 60 bp, Artificial
  Synthetic oligonucleotide
acctgtttctcccggtgacgctggctgggccgagaaccatgtacaaccagatcccaggat

SEQ ID NO: 43874 - DNA, 60 bp, Artificial
  Synthetic oligonucleotide
gagcatccctgaggcccagagaaggttctatgttggggtcctgaacgtgaatgagtgtcc

SEQ ID NO: 43875 - DNA, 60 bp, Artificial
  Synthetic oligonucleotide
ctggacccgtccttgttcctgaggtagatttgggaactggaactcgttgcgtggcactgg

SEQ ID NO: 43876 - DNA, 60 bp, Artificial
  Synthetic oligonucleotide
aagtcgaccgtggtagcctgcaacggagagctgatgcaggagggaggcatccccggaatg

SEQ ID NO: 43877 - DNA, 59 bp, Artificial
  Synthetic oligonucleotide
agagaagaggcagggtggggcgcaaggaaggaagaacggaccggtatgtgtactctggc

SEQ ID NO: 43878 - DNA, 60 bp, Artificial
  Synthetic oligonucleotide
gagacctcaggacactgggttttgcgatctgttcctcggtgccagtggattgggtgccca

SEQ ID NO: 43879 - DNA, 60 bp, Artificial
  Synthetic oligonucleotide
acgcaaggggatccagagactggcagcagttggagagcacgcatgggactttggttccgt

SEQ ID NO: 43880 - DNA, 60 bp, Artificial
  Synthetic oligonucleotide
gtggtgagacccattgatgacaggttcggcacggccctctacttcctgaatgacatggcg

SEQ ID NO: 43881 - DNA, 60 bp, Artificial
  Synthetic oligonucleotide
tactgcctgcatgccaaattgacggataccaaagtggcggcgaggtgcccaacgactggg

SEQ ID NO: 43882 - DNA, 60 bp, Artificial
  Synthetic oligonucleotide
caacagtgccgtggtgtcgggtggccagaccatccgtgagataggagggggagcaccttt

SEQ ID NO: 43883 - DNA, 60 bp, Artificial
  Synthetic oligonucleotide
aacacagcgggaccgattgaccgaagttggacttgggagggaccggagggcaacgctata

SEQ ID NO: 43884 - DNA, 60 bp, Artificial
  Synthetic oligonucleotide
ctcgccttggtgttgtcaggactggaggcggagttttcacagcgtgtgcacaaggccatc

SEQ ID NO: 43885 - DNA, 60 bp, Artificial
  Synthetic oligonucleotide
tttgtgacgggaacccaagggaccactgcggtgacgttagtgttggagctgggcgggtgt

SEQ ID NO: 43886 - DNA, 60 bp, Artificial
  Synthetic oligonucleotide
cggaagccgtgctctgaagatggctgaacgggatgcgccggaggcttttctcacccttat

SEQ ID NO: 43887 - DNA, 60 bp, Artificial
  Synthetic oligonucleotide
tactgctacgctgcttcggccacagagatatccagtagtgcggcttgccctacgatgggg

SEQ ID NO: 43888 - DNA, 60 bp, Artificial
  Synthetic oligonucleotide
cgataccagacttcggcagtcacacgggagcacacagggaatgagatagtcgacgtgatg

SEQ ID NO: 43889 - DNA, 60 bp, Artificial
  Synthetic oligonucleotide
cgggccatggaacggtggtgatggaactccaatacacaggaacggacggtccctgcaaga

SEQ ID NO: 43890 - DNA, 60 bp, Artificial
  Synthetic oligonucleotide
ccggctctgttacggagggccatggaagttgcaacggaagtggaacgggcttgacgaagt

SEQ ID NO: 43891 - DNA, 60 bp, Artificial
  Synthetic oligonucleotide
acggaggacacacgaacgaagatgattccaaccacgctcactggacggaggctagaatca

SEQ ID NO: 43892 - DNA, 60 bp, Artificial
  Synthetic oligonucleotide
cacgggaggaccaaagaggcagcgggcaagttgtgacctacgccctcaacacgttcacaa

SEQ ID NO: 43893 - DNA, 60 bp, Artificial
  Synthetic oligonucleotide
gccccgcgtgttgtccttaataggactgaagagggctatgctgagcctgattgacggaag

SEQ ID NO: 43894 - DNA, 60 bp, Artificial
  Synthetic oligonucleotide
atcgttttgattcctgagcctgagaaacagcgttcccagacagacaaccagctcgcggtg

SEQ ID NO: 43895 - DNA, 60 bp, Artificial
  Synthetic oligonucleotide
ttccagagcgacatgggctgagaacatccaggtggccatcaaccaggtccgcgcagtgat

SEQ ID NO: 43896 - DNA, 60 bp, Artificial
  Synthetic oligonucleotide
ccgagctggagcggacgacacccgtgatgcagaagaaggtcggacaaatcatgctgatcc

SEQ ID NO: 43897 - DNA, 60 bp, Artificial
  Synthetic oligonucleotide
ccgtccgccgacagagcgtggaacagtttggaagtggaagacttcggatttggacttacg

SEQ ID NO: 43898 - DNA, 60 bp, Artificial
  Synthetic oligonucleotide
actgctcatggtaggagtgggaagcttggtcaaggaaaggcggagtgcagtggcaaaaaa

SEQ ID NO: 43899 - DNA, 60 bp, Artificial
  Synthetic oligonucleotide
ctgttggcggagtcctgctcttcctttctgtgaacgtccacgctgacaccgggtgtgcaa

SEQ ID NO: 43900 - DNA, 60 bp, Artificial
  Synthetic oligonucleotide
cagaaccgtgcgcgtccttgagatggtggaagattggctgcaccgcggcccaaaagagtt

SEQ ID NO: 43901 - DNA, 60 bp, Artificial
  Synthetic oligonucleotide
tgcgctaccggactgaatcgggttgttggtatgggatggagatacgcccacttcgccacg

SEQ ID NO: 43902 - DNA, 60 bp, Artificial
  Synthetic oligonucleotide
ctacagaactcccaaaggcagtgatagaggagataggacgacacaagcgggtgctagtac

SEQ ID NO: 43903 - DNA, 60 bp, Artificial
  Synthetic oligonucleotide
cacagcactttagctgtatgagggtacacccgacgtccacggttggactagggaaaaccc

SEQ ID NO: 43904 - DNA, 60 bp, Artificial
  Synthetic oligonucleotide
ttcgacactccattagtcgaggagtctcgagatgccatgtggacgagggcatgcccacgg

SEQ ID NO: 43905 - DNA, 60 bp, Artificial
  Synthetic oligonucleotide
ggtcaccagctgctccgatgaagggagtaagggtgctacaagtaagaagcagcctaagcc

SEQ ID NO: 43906 - DNA, 60 bp, Artificial
  Synthetic oligonucleotide
gggtgaacaggagtctacatggaatttggccagagaaaatttgcaccggagtaccaactc

SEQ ID NO: 43907 - DNA, 60 bp, Artificial
  Synthetic oligonucleotide
atccagtacccggacgccaaggtgagactggccattgcaaaagtgatgtacaagtgggta

SEQ ID NO: 43908 - DNA, 60 bp, Artificial
  Synthetic oligonucleotide
ccagagaacttgagggtggtaacctcgcaatccccgtatgtggtagtagccaccaatgcc

SEQ ID NO: 43909 - DNA, 60 bp, Artificial
  Synthetic oligonucleotide
ggcacaaaaggagctatggtacatctccagaaaacggggggggagttcacatgtgtcact

SEQ ID NO: 43910 - DNA, 60 bp, Artificial
  Synthetic oligonucleotide
ttggaaagatacacaggtttgctgaaaatcttagagtggtagcaatgacagcaaccccag

SEQ ID NO: 43911 - DNA, 60 bp, Artificial
  Synthetic oligonucleotide
ctataggagtcaagaaacagcttcagggtcaaaagattaccattacgacctactgcaagc

SEQ ID NO: 43912 - DNA, 60 bp, Artificial
  Synthetic oligonucleotide
ccctcgggtgtggggtctatatgggaaccataccagctaggcgtctcaagatccaccctt

SEQ ID NO: 43913 - DNA, 60 bp, Artificial
  Synthetic oligonucleotide
ccccatccaagaacacaatatactactaccaaggggatcccatagctgcgtacagagaag

SEQ ID NO: 43914 - DNA, 60 bp, Artificial
  Synthetic oligonucleotide
ttgttcccatactcccgtgccagtcagatgggcagataacaccagtagttacatggcagg

SEQ ID NO: 43915 - DNA, 60 bp, Artificial
  Synthetic oligonucleotide
cagggatctgatgagccaaggaagaatattgacggttgctctaaaagagttggacccgga

SEQ ID NO: 43916 - DNA, 60 bp, Artificial
  Synthetic oligonucleotide
gagagaataagcctacctcataacaactacttaagggtagaaaccaggtgtccttgtggc

SEQ ID NO: 43917 - DNA, 60 bp, Artificial
  Synthetic oligonucleotide
ctaaagaacgtcaggacagacgtggaaaagaactggctcggcaaagtgaaatacagacag

SEQ ID NO: 43918 - DNA, 60 bp, Artificial
  Synthetic oligonucleotide
ggcccagacgtgatagatatgcctgatgactttgagtttggactctgcccttgtgactca

SEQ ID NO: 43919 - DNA, 60 bp, Artificial
  Synthetic oligonucleotide
tggggctaggacctatacgatgaaattgagcagctggagcacacaagttactaaaaaaca

SEQ ID NO: 43920 - DNA, 60 bp, Artificial
  Synthetic oligonucleotide
ggttgatagagccagaggttgaggaggaactaccagattggttccaagcggaagaacccc

SEQ ID NO: 43921 - DNA, 60 bp, Artificial
  Synthetic oligonucleotide
ggcttgaggacacaacccacctccagtttgccccaaacgctataaggaccgacggcaagg

SEQ ID NO: 43922 - DNA, 60 bp, Artificial
  Synthetic oligonucleotide
aaggaggagatcatcaggtatggactatggggagttcacacggcactctacaaaagcttg

SEQ ID NO: 43923 - DNA, 60 bp, Artificial
  Synthetic oligonucleotide
gtttacgacgtcaacgggcgcccactgtttggagagagcagtgacttgcacccgcagtca

SEQ ID NO: 43924 - DNA, 60 bp, Artificial
  Synthetic oligonucleotide
catagatgaggtgtcaggaggagcaaattttctgtcaagacttatagcagccatcataga

SEQ ID NO: 43925 - DNA, 60 bp, Artificial
  Synthetic oligonucleotide
gagcggtgagtggcatctatatcaaaccaggaccgatctactaccaggactatgcggggc

SEQ ID NO: 43926 - DNA, 60 bp, Artificial
  Synthetic oligonucleotide
acggtgaagtttacataaggaatggtcagaggggtagtggccaacccgacacaagtgctg

SEQ ID NO: 43927 - DNA, 60 bp, Artificial
  Synthetic oligonucleotide
cagaagacctacctgccgcagtgaagaacatcatggcccggaccgatcacccagaaccca

SEQ ID NO: 43928 - DNA, 60 bp, Artificial
  Synthetic oligonucleotide
tacctccaatgcactaagcactttagctgtgtgaggttaactcgacgtccacggttggac

SEQ ID NO: 43929 - DNA, 60 bp, Artificial
  Synthetic oligonucleotide
gcgcagaaattggcgacctggaacatctaggatgggtactgagagggccagccgtgtgca

SEQ ID NO: 43930 - DNA, 60 bp, Artificial
  Synthetic oligonucleotide
gaagccgtccacagatggtttggtgaggaggaaatatacggggcacccaaggtgatcact

SEQ ID NO: 43931 - DNA, 60 bp, Artificial
  Synthetic oligonucleotide
cggaactgccaagatccgtcatagaggagatagggaggcacaaaagggtcttagtcctga

SEQ ID NO: 43932 - DNA, 60 bp, Artificial
  Synthetic oligonucleotide
ctgattgcaggaaagactgggaagttttacatcccgagcactggtgtcactctgttggga

SEQ ID NO: 43933 - DNA, 60 bp, Artificial
  Synthetic oligonucleotide
cccgcaaagccacgttgatgtagacacatgcgacaagaaccagctgaatttaacggtagc

SEQ ID NO: 43934 - DNA, 60 bp, Artificial
  Synthetic oligonucleotide
caagtgggaggtggaccacgctttcctgaccagactagtaaagaagcacacaggggtagg

SEQ ID NO: 43935 - DNA, 60 bp, Artificial
  Synthetic oligonucleotide
ggtgcacatgcagcaagtccatactgcggagtggagaggaaggtcggttacgtctggtat

SEQ ID NO: 43936 - DNA, 60 bp, Artificial
  Synthetic oligonucleotide
ctggtgaccatagcaggttgaaagacggacctatcaagaagtgtaagtggtgtggctatg

SEQ ID NO: 43937 - DNA, 60 bp, Artificial
  Synthetic oligonucleotide
cgacctggattctgtagaccaccacaaagactacttctcagagttcataatcatagcagt

SEQ ID NO: 43938 - DNA, 60 bp, Artificial
  Synthetic oligonucleotide
ggctcaacaatggcctctgctggtattaggctggagaaactgccagtggtccgagcacaa

SEQ ID NO: 43939 - DNA, 58 bp, Artificial
  Synthetic oligonucleotide
cggggtgtactataaggggtgggaagcaaaagaactcgcagagaaaactgctggccgc

SEQ ID NO: 43940 - DNA, 60 bp, Artificial
  Synthetic oligonucleotide
gggctagagacgggatgggcttacacacaccaaggagggatcagctcggtagaccatgtc

SEQ ID NO: 43941 - DNA, 60 bp, Artificial
  Synthetic oligonucleotide
gcgacggcttgctaggtacaggcataagtgcagccatggagatcttaaaccaaaacccaa

SEQ ID NO: 43942 - DNA, 60 bp, Artificial
  Synthetic oligonucleotide
ctcatgggaacaattagaagccgggataaaccgtaagggagcggccggttacctagagag

SEQ ID NO: 43943 - DNA, 60 bp, Artificial
  Synthetic oligonucleotide
ggtcaaagagttgatcatcaaacacaaagtgaggaatgaagtagtggtccgctggtttgg

SEQ ID NO: 43944 - DNA, 60 bp, Artificial
  Synthetic oligonucleotide
cgtctagccatggcgttagtatgagtgtcgtacagcctccaggcccccccctcccgggag

SEQ ID NO: 43945 - DNA, 50 bp, Artificial
  Synthetic oligonucleotide
atgctacgtggacgagggcatgcccaagacacaccttaaccctagcgggg

SEQ ID NO: 43946 - DNA, 60 bp, Artificial
  Synthetic oligonucleotide
ccatagtggtctgcggaaccggtgagtacaccggaaatgccaagacgaccgggtcctttc

SEQ ID NO: 43947 - DNA, 60 bp, Artificial
  Synthetic oligonucleotide
ttgatccttttcagttgggccttctggtcgtgttcttggctacccaggaggtccttcgca

SEQ ID NO: 43948 - DNA, 51 bp, Artificial
  Synthetic oligonucleotide
cttagcacgaagatctcgatgtctaagaaaccaggagggcccggcaagagc

SEQ ID NO: 43949 - DNA, 60 bp, Artificial
  Synthetic oligonucleotide
cttagcacgaagatctcgatgtctaagaaaccaggagggcccggcaagagtcgggctgtc

SEQ ID NO: 43950 - DNA, 60 bp, Artificial
  Synthetic oligonucleotide
ttaacacagtgcgagctgtttcttagcacgaagatctcgatgtctaagaaaccaggaggg

SEQ ID NO: 43951 - DNA, 60 bp, Artificial
  Synthetic oligonucleotide
caattaacacagtgcgagctgtttcttagcacgaagatctcgatgtctaagaaaccagga

SEQ ID NO: 43952 - DNA, 54 bp, Artificial
  Synthetic oligonucleotide
cttagcacgaagatctcgatgtctaagaaaccaggagggcccggcaagagccgg

SEQ ID NO: 43953 - DNA, 60 bp, Artificial
  Synthetic oligonucleotide
cttagcacgaagatctcgatgtctaagaaaccaggagggcccggcaagagccgggctgtc

SEQ ID NO: 43954 - DNA, 60 bp, Artificial
  Synthetic oligonucleotide
cagttgtgggcacaggctggacttcgaagggaacgatcacagtgctggacatgcaccctg

SEQ ID NO: 43955 - DNA, 60 bp, Artificial
  Synthetic oligonucleotide
gaccctattgggcagatgtgaaggaggatgttgtgtgctacgggggagcctggagcctgg

SEQ ID NO: 43956 - DNA, 60 bp, Artificial
  Synthetic oligonucleotide
ggcgtcgatctggcacaaaccgttgttcttgagctcgacaagacagcagaacacctcccc

SEQ ID NO: 43957 - DNA, 60 bp, Artificial
  Synthetic oligonucleotide
gcacgcaggtctgacttagtcttctccggacagagcggctcagagcggggcagccagcct

SEQ ID NO: 43958 - DNA, 60 bp, Artificial
  Synthetic oligonucleotide
aaaaggccgagtgcaggactgacggttgtgtggggaggagtcgtggtcttggcgctgctt

SEQ ID NO: 43959 - DNA, 57 bp, Artificial
  Synthetic oligonucleotide
ttttgagctcaatcggaaaggcggtgcacactgtcctcggaggcgcattcaacagcg

SEQ ID NO: 43960 - DNA, 60 bp, Artificial
  Synthetic oligonucleotide
gctgtggtgaaggtttggtcgtgtggagagaggtgtcagaatggtatgataactatgctt

SEQ ID NO: 43961 - DNA, 60 bp, Artificial
  Synthetic oligonucleotide
atcaccagagaggagtgccccgggactaaggttgccatagatgccagctgcgataagcgg

SEQ ID NO: 43962 - DNA, 60 bp, Artificial
  Synthetic oligonucleotide
gactgctggtatgccatggagatacggccagttcatgatcaaggtggcctggtgcgctcg

SEQ ID NO: 43963 - DNA, 60 bp, Artificial
  Synthetic oligonucleotide
gcctggcagtgtcgagaggtacagcaaaacttgcctggcttgaggagcgcggttacgtga

SEQ ID NO: 43964 - DNA, 60 bp, Artificial
  Synthetic oligonucleotide
ttgcccgcatcagccagtcgtgaacgtgttgagaaaaagacagcttaggagaacaagagc

SEQ ID NO: 43965 - DNA, 60 bp, Artificial
  Synthetic oligonucleotide
gggcagtattgtcacctgtgtcaaggcgtcgtgtgaggcaaagaagaaagccacaggaca

SEQ ID NO: 43966 - DNA, 60 bp, Artificial
  Synthetic oligonucleotide
aagagggagacggcaccacagtcatcagagccgaaggaaaggacgcagctacccaggtac

SEQ ID NO: 43967 - DNA, 60 bp, Artificial
  Synthetic oligonucleotide
cccctcaaacaggcgatggcagcactccggaagataaagaaggcggtcagcaccctgatg

SEQ ID NO: 43968 - DNA, 60 bp, Artificial
  Synthetic oligonucleotide
gtggcttgactccatctatcaagaaaaccccgccaagacacgtgagtactgcctgcacgc

SEQ ID NO: 43969 - DNA, 60 bp, Artificial
  Synthetic oligonucleotide
ggtgaccatctattttctcctcttggtcctggaacttggtctgccgagcgcaaacctgga

SEQ ID NO: 43970 - DNA, 60 bp, Artificial
  Synthetic oligonucleotide
ccggtggcttgtgggctgagtggtgtggtcaggggaagcctatgggggtttctgcctctt

SEQ ID NO: 43971 - DNA, 60 bp, Artificial
  Synthetic oligonucleotide
gggcagcagagagtgttcaaggacaaagttgacaccaaggcacaggagccccagccaggt

SEQ ID NO: 43972 - DNA, 59 bp, Artificial
  Synthetic oligonucleotide
ctgggagctgtctggtgtctggttttgcggacttcaattagtcgcatgatgctaggcac

SEQ ID NO: 43973 - DNA, 60 bp, Artificial
  Synthetic oligonucleotide
cgtggcagtactggggtagctatcgcacagcgcccactggctctgcagcttcactgatta

SEQ ID NO: 43974 - DNA, 60 bp, Artificial
  Synthetic oligonucleotide
caacgtgacaagtcgaagctggacatgggaaggcccagaggaaaatgctgtggacgaggc

SEQ ID NO: 43975 - DNA, 60 bp, Artificial
  Synthetic oligonucleotide
ctggtcggacaacatggagcgttcacgccagtggagcctggatgactacagagaacatgc

SEQ ID NO: 43976 - DNA, 60 bp, Artificial
  Synthetic oligonucleotide
cgtgacataagagagttcgtggcatatgcttcgggacggcggagtcttggggacatgctg

SEQ ID NO: 43977 - DNA, 60 bp, Artificial
  Synthetic oligonucleotide
tgccatgccgagatcaggacgaactggtggggagggcacgcgtctcaccggggtgtggtt

SEQ ID NO: 43978 - DNA, 60 bp, Artificial
  Synthetic oligonucleotide
ggacgtcatcacaagacgggaccaacgaggatcaggccaagtggtcacatacgccctcaa

SEQ ID NO: 43979 - DNA, 60 bp, Artificial
  Synthetic oligonucleotide
tgcactggtcttgatgacagcaacgccgccgggaaagagtgagcccttcccagagtccaa

SEQ ID NO: 43980 - DNA, 60 bp, Artificial
  Synthetic oligonucleotide
aagttgaactcaccggaactagacgtgtgacaacggcctctgcagcccaacgccgaggga

SEQ ID NO: 43981 - DNA, 60 bp, Artificial
  Synthetic oligonucleotide
tgtggaatggcacccagacctggccgatgagggtggagaaatcagcttgcgagtccgaca

SEQ ID NO: 43982 - DNA, 60 bp, Artificial
  Synthetic oligonucleotide
ctggatagtcccactcgctggaaggcttggaggaaagggctctggaattaggctgctggc

SEQ ID NO: 43983 - DNA, 60 bp, Artificial
  Synthetic oligonucleotide
gaccagactggggtgctattaaaatcactcgccggagccccactggcgcacatcgaggga

SEQ ID NO: 43984 - DNA, 60 bp, Artificial
  Synthetic oligonucleotide
gcctggtctgatgagcaaaacaaatgggcaagtgcgaaggaagcagtggaagatcctgct

SEQ ID NO: 43985 - DNA, 60 bp, Artificial
  Synthetic oligonucleotide
ctcacccgagttgagggctgggtgtggaagaataaatcactcacgctggcagtggtagtc

SEQ ID NO: 43986 - DNA, 60 bp, Artificial
  Synthetic oligonucleotide
gaagctcggtatcagaactgaatcttgcgctggccgaaggagatgcaaacctcaccgtgg

SEQ ID NO: 43987 - DNA, 60 bp, Artificial
  Synthetic oligonucleotide
atacccgtcagggctgtggcacatggatccccagatgtggatgtggccatgctcataacg

SEQ ID NO: 43988 - DNA, 60 bp, Artificial
  Synthetic oligonucleotide
gaatcggaaccccactgcggcttgtgtctttaaagtgttggctccatatagaccggaggt

SEQ ID NO: 43989 - DNA, 60 bp, Artificial
  Synthetic oligonucleotide
agagctcaataatctaaccacagacaaccatagagcaaaagcaccatttcgtgagacccc

SEQ ID NO: 43990 - DNA, 60 bp, Artificial
  Synthetic oligonucleotide
gatactggcgatggtcctgtgtttcatgtctgtggttttgaaccgaacggtgcccgcagt

SEQ ID NO: 43991 - DNA, 60 bp, Artificial
  Synthetic oligonucleotide
ctagagagtccagtggagcaggggtggaggggataagtctcaactacctggggtggcatt

SEQ ID NO: 43992 - DNA, 60 bp, Artificial
  Synthetic oligonucleotide
cgtgaagagcccagagtgtggagcgagtggacaaacattgacatccagccagccaagtct

SEQ ID NO: 43993 - DNA, 60 bp, Artificial
  Synthetic oligonucleotide
ctgctacgagtggagaggtggctgcgtgaccacggagaagaacgccttggaagaatgctg

SEQ ID NO: 43994 - DNA, 60 bp, Artificial
  Synthetic oligonucleotide
cacctggccatcgtggtgtccggcctggaggctgagctgacccagagagcccacaaagtt

SEQ ID NO: 43995 - DNA, 60 bp, Artificial
  Synthetic oligonucleotide
gattatctacctcaagataacactacatttaatgcacacagcactttagctgtatgagga

SEQ ID NO: 43996 - DNA, 54 bp, Artificial
  Synthetic oligonucleotide
gcatcattccaggcacagaacgccagaaaatggaatggtgctgttgaatcaaca

SEQ ID NO: 43997 - DNA, 60 bp, Artificial
  Synthetic oligonucleotide
tcctcagcatcattccaggcacagaacgccagaaaatggaatggtgctgttgaatcaaca

SEQ ID NO: 43998 - DNA, 59 bp, Artificial
  Synthetic oligonucleotide
cctcagcatcattccaggcacagaacgccagaaaatggaatggtgctgttgaatcaaca

SEQ ID NO: 43999 - DNA, 58 bp, Artificial
  Synthetic oligonucleotide
ctcagcatcattccaggcacagaacgccagaaaatggaatggtgctgttgaatcaaca

SEQ ID NO: 44000 - DNA, 60 bp, Artificial
  Synthetic oligonucleotide
cagcatcattccaggcacagaacgccagaaaatggaatggtgctgttgaatcaacggatc

SEQ ID NO: 44001 - DNA, 60 bp, Artificial
  Synthetic oligonucleotide
tcgccccacgcggccataaccctggctatggtgttaaccagggagaagggactagaggtt

SEQ ID NO: 44002 - DNA, 60 bp, Artificial
  Synthetic oligonucleotide
aacatcgccccacgcggccgtaaccctggctatggtgttaaccagggagaagggactaga

SEQ ID NO: 44003 - DNA, 60 bp, Artificial
  Synthetic oligonucleotide
cccacgcggccacaaccctggcaatggtgttaaccagggagaagggactagaggttagag

SEQ ID NO: 44004 - DNA, 60 bp, Artificial
  Synthetic oligonucleotide
gccccacgcggccataaccctggctatggtgttaaccagggagaagggactagaggttag

SEQ ID NO: 44005 - DNA, 60 bp, Artificial
  Synthetic oligonucleotide
ccacgcggccacaaccctggctatggtgttaaccagggagaagggactagaggttagagg

SEQ ID NO: 44006 - DNA, 60 bp, Artificial
  Synthetic oligonucleotide
ccacgcggccacaaccctggcaatggtgttaaccagggagaagggactagaggttagagg

SEQ ID NO: 44007 - DNA, 60 bp, Artificial
  Synthetic oligonucleotide
ccctggctatggtgttaaccagggagaagggactagaggttagaggagaccccgcgtaaa

SEQ ID NO: 44008 - DNA, 60 bp, Artificial
  Synthetic oligonucleotide
ccatagtggtctgcggaaccggtgagtacaccgaaattgccaggacgaccgggtcctttc

SEQ ID NO: 44009 - DNA, 60 bp, Artificial
  Synthetic oligonucleotide
cagggaatctccccggttgctccttttctatcttccttttggcacttctctcgtgcctca

SEQ ID NO: 44010 - DNA, 52 bp, Artificial
  Synthetic oligonucleotide
cttatggcactgcggggaggggtggtccggagaatggttgttggacggccat

SEQ ID NO: 44011 - DNA, 60 bp, Artificial
  Synthetic oligonucleotide
ccaagcatcgcattcaacctgaggataggggagatgaaggaaggggacatggccacaggg

SEQ ID NO: 44012 - DNA, 51 bp, Artificial
  Synthetic oligonucleotide
aaaacagcatattgacgctgggaaagaccagagatcctgctgtctcctcag

SEQ ID NO: 44013 - DNA, 60 bp, Artificial
  Synthetic oligonucleotide
ttcagttgggccttctggtcgtgttcttggccacccaggaggtccttcgcaagaggtgga

SEQ ID NO: 44014 - DNA, 60 bp, Artificial
  Synthetic oligonucleotide
tcagttgggccttatggtcgtgttcttggccacccaggaggtccttcgcaagaggtggac

SEQ ID NO: 44015 - DNA, 51 bp, Artificial
  Synthetic oligonucleotide
gcaaggccgtcaaccacatcagctccgtgtggaaggacttgctggaagaca

SEQ ID NO: 44016 - DNA, 60 bp, Artificial
  Synthetic oligonucleotide
caaacttagtagtgtttgtgaggattaacaacaattaacacagtgcgagctgtttcttag

SEQ ID NO: 44017 - DNA, 60 bp, Artificial
  Synthetic oligonucleotide
agtgtttgtgaggattaacaacaattaacacagtgcgagctgtttcttagcacgaagatc

SEQ ID NO: 44018 - DNA, 60 bp, Artificial
  Synthetic oligonucleotide
cggccgaactgggctagccatgcccatagtaggactagcaaacggagggactagccatag

SEQ ID NO: 44019 - DNA, 60 bp, Artificial
  Synthetic oligonucleotide
tgagtacaccggaatcgccgggatgaccgggtcctttcttggaacaacccgctcaatgcc

SEQ ID NO: 44020 - DNA, 60 bp, Artificial
  Synthetic oligonucleotide
gagggcagggcctgggctcagcccgggtacccttggcccctctatggcaatgagggcctg

SEQ ID NO: 44021 - DNA, 60 bp, Artificial
  Synthetic oligonucleotide
aggacgtcaagttcccgggcggtggtcagatcgttggtggagtttacttgttgccgcgca

SEQ ID NO: 44022 - DNA, 60 bp, Artificial
  Synthetic oligonucleotide
ttttcagctgggccttctggtggtgtttctggccacccaggaggtccttcgcaagaggtg

SEQ ID NO: 44023 - DNA, 60 bp, Artificial
  Synthetic oligonucleotide
agtttacttgttaccgcgcaggggcccgagattgggtgtgcgcgcgacgaggaagacttc

SEQ ID NO: 44024 - DNA, 60 bp, Artificial
  Synthetic oligonucleotide
ggaatcttcctggttgctctttctctatcttccttctggccctgctctcttgcctgactg

SEQ ID NO: 44025 - DNA, 60 bp, Artificial
  Synthetic oligonucleotide
cgctagggtgaaatcacaccacgtgatgggagtacgacctgatagggtgctgcagaggcc

SEQ ID NO: 44026 - DNA, 60 bp, Artificial
  Synthetic oligonucleotide
gctagggtgaaatcacaccacgtgatgggagtacgacctgatagggtgctgcagaggccc

SEQ ID NO: 44027 - DNA, 60 bp, Artificial
  Synthetic oligonucleotide
cggcgtgaactatgcaacagggaatctgcccggttgctctttctctatcttcctcttggc

SEQ ID NO: 44028 - DNA, 60 bp, Artificial
  Synthetic oligonucleotide
aggacgttaagttcccgggcggcggccagatcgttggtggagtttacctgttgccgcgca

SEQ ID NO: 44029 - DNA, 60 bp, Artificial
  Synthetic oligonucleotide
cgtcatcagtctggaatgttggcaaatatgtgtgtgttagaccagactggtggccatatg

SEQ ID NO: 44030 - DNA, 60 bp, Artificial
  Synthetic oligonucleotide
aagaactgatcatcaaacacaaagtgaggaatgaagtaatggtccactggtttggtgacg

SEQ ID NO: 44031 - DNA, 56 bp, Artificial
  Synthetic oligonucleotide
cccctcccgggagagccatagtggtctgcggaaccggtgagtacaccggaattgcc

SEQ ID NO: 44032 - DNA, 60 bp, Artificial
  Synthetic oligonucleotide
ggatagactaggggatcttctgctctgcacaaccagccacacggcacagtgcgccgacat

SEQ ID NO: 44033 - DNA, 60 bp, Artificial
  Synthetic oligonucleotide
aggtccttcgcaagaggtggacagccaagatcagcatgccagctatactgattgctctgc

SEQ ID NO: 44034 - DNA, 60 bp, Artificial
  Synthetic oligonucleotide
gtacatggcacatggagttgattacaaatgaacttttatacaaaacatacaaacaaaaac

SEQ ID NO: 44035 - DNA, 60 bp, Artificial
  Synthetic oligonucleotide
taaataaaaacagcatattgacgctgggagagaccagagatcctgctgtctcctcagcat

SEQ ID NO: 44036 - DNA, 60 bp, Artificial
  Synthetic oligonucleotide
ccagggaaagaccggagtggttctctgcttttcctccaggggtctgcgagcacagtttgc

SEQ ID NO: 44037 - DNA, 60 bp, Artificial
  Synthetic oligonucleotide
cctgggaaagaccggagtggttctctgcttttcctccaggggtctgcgagcacagtttgc

SEQ ID NO: 44038 - DNA, 60 bp, Artificial
  Synthetic oligonucleotide
gagggtagggcctgggctcagcccgggtacccttggcccctctatggcaatgagggcatg

SEQ ID NO: 44039 - DNA, 60 bp, Artificial
  Synthetic oligonucleotide
gcgaaatggttgacccttttcagctgggccttctggtgatgtttctggccacccaggagg

SEQ ID NO: 44040 - DNA, 60 bp, Artificial
  Synthetic oligonucleotide
ggttgacccttttcagctgggccttctggtgatgtttctggccacccaggaggtctttcg

SEQ ID NO: 44041 - DNA, 57 bp, Artificial
  Synthetic oligonucleotide
cctgggctcagcccgggtacccttggcccctctatggcaatgagggctgcgggtggg

SEQ ID NO: 44042 - DNA, 60 bp, Artificial
  Synthetic oligonucleotide
tcccgggagagccatagtggtctgcggaaccggtgagtacaccggaattgccgggatgac

SEQ ID NO: 44043 - DNA, 60 bp, Artificial
  Synthetic oligonucleotide
ttctcacccatgtgaaaatcaatgacaaatgcccgagcaccggtgaggctcacctcgctg

SEQ ID NO: 44044 - DNA, 60 bp, Artificial
  Synthetic oligonucleotide
ttgaatgggtcttgccaccgctaagctgtgaggcggtgcgggctgggacagccgtttccc

SEQ ID NO: 44045 - DNA, 52 bp, Artificial
  Synthetic oligonucleotide
aaaactacgggtggagaaccggactccccacttgagaaatgtaaataagaaa

SEQ ID NO: 44046 - DNA, 57 bp, Artificial
  Synthetic oligonucleotide
cccctcccgggagagccatagtggtctgcggaaccggtgagtacaccggaattgcca

SEQ ID NO: 44047 - DNA, 60 bp, Artificial
  Synthetic oligonucleotide
ccctcccacgtggtggtagaaagacggagtctagaggttagaggagaccctccagggaac

SEQ ID NO: 44048 - DNA, 60 bp, Artificial
  Synthetic oligonucleotide
agaaaccaggagggcccggcaagaaccgggctgtcaatatgctaaaacgcggaatgcccc

SEQ ID NO: 44049 - DNA, 60 bp, Artificial
  Synthetic oligonucleotide
ccaatgaagttcacacctggacagagcaatacaaatttcaggccgactccccaaagagac

SEQ ID NO: 44050 - DNA, 60 bp, Artificial
  Synthetic oligonucleotide
tcgtcagtagttcgacgtgagcagaagcccacctcgagatgctacgtggacgagggcatg

SEQ ID NO: 44051 - DNA, 60 bp, Artificial
  Synthetic oligonucleotide
tggattagtgcaatggaaagaggcgcaaatacttcttgacaacataacaaccttgcgggg

SEQ ID NO: 44052 - DNA, 60 bp, Artificial
  Synthetic oligonucleotide
ccgtggccaccttctatggaccagaacaggacaagatgccggaggtggccggtcactttc

SEQ ID NO: 44053 - DNA, 60 bp, Artificial
  Synthetic oligonucleotide
ccaacggcgcggaagagttggtcggcaagacggacgaacagatgaatacatatactctgg

SEQ ID NO: 44054 - DNA, 60 bp, Artificial
  Synthetic oligonucleotide
ccaaatgccaaatggactggtgttgatgcgcatgatggggatcttgtggcatgctgtggc

SEQ ID NO: 44055 - DNA, 60 bp, Artificial
  Synthetic oligonucleotide
catcaaagagttcgtggcgtacgcgtctgggcgtcgcagcttcggagatgttctgacagg

SEQ ID NO: 44056 - DNA, 60 bp, Artificial
  Synthetic oligonucleotide
ttgtgggcaggtggcgtcggctatgggaacatggctggagtggctctcatcttttacacg

SEQ ID NO: 44057 - DNA, 60 bp, Artificial
  Synthetic oligonucleotide
ccgtggccaccttttatggccctgagcaggacaagatgccggaggtggccggtcactttc

SEQ ID NO: 44058 - DNA, 60 bp, Artificial
  Synthetic oligonucleotide
gagaaggacgtgacatcaaggaatttgtggcgtacgcgtctgggcgtcgcagcttcggag

SEQ ID NO: 44059 - DNA, 53 bp, Artificial
  Synthetic oligonucleotide
tggtgcgcaaccccatggtggatggggatgtcatcaacccattcggggagggg

SEQ ID NO: 44060 - DNA, 60 bp, Artificial
  Synthetic oligonucleotide
gctctatatgaaaggaaaatgagtctggtgttggccacagtgttgtgcctcatgtcggtg

SEQ ID NO: 44061 - DNA, 60 bp, Artificial
  Synthetic oligonucleotide
ttgtgttgatgcgcatgatggggatcttgtggcatgccgtagccggcaccgcgagaaacc

SEQ ID NO: 44062 - DNA, 60 bp, Artificial
  Synthetic oligonucleotide
cgccaacaaaatagtgtacacggtcaaagtcgaaccacacacgggagactatgttgccgc

SEQ ID NO: 44063 - DNA, 59 bp, Artificial
  Synthetic oligonucleotide
caacggcgcggaagagttggtcggcaagacggacgaacagatgaatacatatactctgg

SEQ ID NO: 44064 - DNA, 60 bp, Artificial
  Synthetic oligonucleotide
tgggaggacaaacatcaagcccgaggaggttgatgggaaagtcgagctcaccgggaccag

SEQ ID NO: 44065 - DNA, 60 bp, Artificial
  Synthetic oligonucleotide
ccctttccggagtccaatggagccattactagtgaggaaagacagattcctgatggggag

SEQ ID NO: 44066 - DNA, 60 bp, Artificial
  Synthetic oligonucleotide
caacaggctggaggggcaattgtcgatgtgatgtgtcatgcaacttatgtcaacagacgc

SEQ ID NO: 44067 - DNA, 60 bp, Artificial
  Synthetic oligonucleotide
tgatgggaaagtcgagctcaccgggaccaggcgagtgaccacggcttccgctgcccaacg

SEQ ID NO: 44068 - DNA, 60 bp, Artificial
  Synthetic oligonucleotide
gggcctggatgaccacagaagacatgctggacgtctggaaccgggtgtggatcctagaca

SEQ ID NO: 44069 - DNA, 60 bp, Artificial
  Synthetic oligonucleotide
agctcaccgggaccaggcgagtgaccacggcttccgctgcccaacggcgcggaagagttg

SEQ ID NO: 44070 - DNA, 60 bp, Artificial
  Synthetic oligonucleotide
ggaaagtcgagctcaccgggaccaggcgagtgaccacggcttccgctgcccaacggcgcg

SEQ ID NO: 44071 - DNA, 60 bp, Artificial
  Synthetic oligonucleotide
ggaaccccacaatgtccatgagctttctcttggctggaggtctggtcttggccatgactc

SEQ ID NO: 44072 - DNA, 60 bp, Artificial
  Synthetic oligonucleotide
gcgttgcgggagcaatacagcgaaacctggcatatggacgaggaacacccgtaccggaca

SEQ ID NO: 44073 - DNA, 60 bp, Artificial
  Synthetic oligonucleotide
aatcgaggaagctcctggctcggtttggagaccagagagggccaaccaaggtccctgaag

SEQ ID NO: 44074 - DNA, 60 bp, Artificial
  Synthetic oligonucleotide
tgacaagcctgggttggaacttgattaggttcagatcaggaatggacgtgttcagcatgc

SEQ ID NO: 44075 - DNA, 60 bp, Artificial
  Synthetic oligonucleotide
ctatatgaaaggaaaatgagtctggtgttggccatagtgctgtgtctcgtgtctgtggtc

SEQ ID NO: 44076 - DNA, 60 bp, Artificial
  Synthetic oligonucleotide
ggggcctggatgaccacagaagacatgctggacgtttggaaccgggtgtggattctggac

SEQ ID NO: 44077 - DNA, 59 bp, Artificial
  Synthetic oligonucleotide
gcgtgtacatcatgatgggcatgagagaaaagaaactgggagagttcggagtggcgaag

SEQ ID NO: 44078 - DNA, 60 bp, Artificial
  Synthetic oligonucleotide
gggtcaggttccactcaccagcagtcagtgaccaacaggctggaggggcaattgtcgatg

SEQ ID NO: 44079 - DNA, 60 bp, Artificial
  Synthetic oligonucleotide
ggttgaaccacacacgggagactatgttgccgccaatgagacgcacaaggggaggaagac

SEQ ID NO: 44080 - DNA, 60 bp, Artificial
  Synthetic oligonucleotide
cagcgaaacctggcatatggacgaggaacacccgtacagaacatggcagtactggggcac

SEQ ID NO: 44081 - DNA, 60 bp, Artificial
  Synthetic oligonucleotide
atgtccatgagctttctcttggctggaggtctggtcttggccatgacccttggagtgggg

SEQ ID NO: 44082 - DNA, 60 bp, Artificial
  Synthetic oligonucleotide
tttgcggaagcaatacagcgaaacctggcatatggacgaggaacacccgtacagaacatg

SEQ ID NO: 44083 - DNA, 60 bp, Artificial
  Synthetic oligonucleotide
tgcggaaccggtgagtacaccggaattgccaggacgaccgggtcctttcttggataaccc

SEQ ID NO: 44084 - DNA, 53 bp, Artificial
  Synthetic oligonucleotide
cgaagcgtctagccatggcgttagtatgagtgtcgtgcagcctccaggacccc

SEQ ID NO: 44085 - DNA, 60 bp, Artificial
  Synthetic oligonucleotide
gcatcattccaggcacagaacgccagaaaatggaatggtgctgttgaatcaacaggttct

SEQ ID NO: 44086 - DNA, 60 bp, Artificial
  Synthetic oligonucleotide
acaacaattaacacagtgcgagctgtttcttagcacgaagatttcgatgtctaagaaacc

SEQ ID NO: 44087 - DNA, 55 bp, Artificial
  Synthetic oligonucleotide
acaacaattaacacagtgcgagctgtttcttagcacgaagatttcgatgtctaag

SEQ ID NO: 44088 - DNA, 60 bp, Artificial
  Synthetic oligonucleotide
ccaaacatacaagtaaacgaataatccaggactgtgtaaccatcgggaaagaggaaggca

SEQ ID NO: 44089 - DNA, 60 bp, Artificial
  Synthetic oligonucleotide
ctgagttgtctgaactagttgatttcaaggggactttcttggacagggaagtcttggaag

SEQ ID NO: 44090 - DNA, 60 bp, Artificial
  Synthetic oligonucleotide
ccctgagttgtctgaactagttgatttcaaggggactttcttagacagggaagccttgga

SEQ ID NO: 44091 - DNA, 60 bp, Artificial
  Synthetic oligonucleotide
gactttatgtactacatgcacagaaaggttattgaagagatatcaggaggtaccaatgtg

SEQ ID NO: 44092 - DNA, 60 bp, Artificial
  Synthetic oligonucleotide
gctagacccttgataaggggaaaatttaatacaacacttctaaatgggccagccttccag

SEQ ID NO: 44093 - DNA, 60 bp, Artificial
  Synthetic oligonucleotide
ccgtgcgatgctaaacccttggtaaaaggaaaatttaatacaacacttctaaatgggcca

SEQ ID NO: 44094 - DNA, 60 bp, Artificial
  Synthetic oligonucleotide
cccgtgtgatgctaaacccttggtaaggggaaaatttaatacaacacttctaaatgggcc

SEQ ID NO: 44095 - DNA, 60 bp, Artificial
  Synthetic oligonucleotide
gagtaaggcatggtttggggcatatgcagcctctccctactgtgaggtaggacggaagct

SEQ ID NO: 44096 - DNA, 58 bp, Artificial
  Synthetic oligonucleotide
caaccggaaaccttcctggttgctccttttctatcttcctcttggcacttctctcgtg

SEQ ID NO: 44097 - DNA, 60 bp, Artificial
  Synthetic oligonucleotide
caacagggaaccttcctggttgctccttttctatcttcctcttggcacttctctcgtgcc

SEQ ID NO: 44098 - DNA, 60 bp, Artificial
  Synthetic oligonucleotide
ccatagtggtctgcggaaccggtgagtacaccggaattgccaggacgacagggtcctttc

SEQ ID NO: 44099 - DNA, 60 bp, Artificial
  Synthetic oligonucleotide
ccgcgtgtcaactgtttcacagttggcgaagagattctcaaaaggattgctttcaggcca

SEQ ID NO: 44100 - DNA, 60 bp, Artificial
  Synthetic oligonucleotide
aaaccgcgtgtcaactgtttcacagttggcgaagagattctcaaaaggattgctttcagg

SEQ ID NO: 44101 - DNA, 51 bp, Artificial
  Synthetic oligonucleotide
ctccgctttggcaacctacacatacaaaacttggaattacaacaacctctc

SEQ ID NO: 44102 - DNA, 58 bp, Artificial
  Synthetic oligonucleotide
acgaccgggtcctttcttggatcaacccgctcaatgcctggagatttgggcgtgcccc

SEQ ID NO: 44103 - DNA, 57 bp, Artificial
  Synthetic oligonucleotide
cgaccgggtcctttcttggatcaacccgctcaatgcctggagatttgggcgtgcccc

SEQ ID NO: 44104 - DNA, 54 bp, Artificial
  Synthetic oligonucleotide
gctgggccttctggtgatgtttctggccacccaggaggtccttcgcaagaggtg

SEQ ID NO: 44105 - DNA, 60 bp, Artificial
  Synthetic oligonucleotide
agggcagggcctgggctcagcccgggtacccttggcccctctatggcaatgagggcatgg

SEQ ID NO: 44106 - DNA, 60 bp, Artificial
  Synthetic oligonucleotide
aagctgcgaggtgatccacgtaagccctcagaaccgtctcggaaggaggaccccacgtgc

SEQ ID NO: 44107 - DNA, 60 bp, Artificial
  Synthetic oligonucleotide
tgggtgaccaaagctgcgaggtgatccacgtaagccctcagaaccgtctcggaaggagga

SEQ ID NO: 44108 - DNA, 60 bp, Artificial
  Synthetic oligonucleotide
cggcgtgaactatgcaacagggaacctgcccggttgctctttctctatcttcctcttggc

SEQ ID NO: 44109 - DNA, 60 bp, Artificial
  Synthetic oligonucleotide
gggaaaatcctcctcagcgaaggccgaaaagaggctagccatgcccttagtaggactagc

SEQ ID NO: 44110 - DNA, 60 bp, Artificial
  Synthetic oligonucleotide
tacaccggaattgccaggacgaccgggtcctttcttggattaacccgctcaatgcctgga

SEQ ID NO: 44111 - DNA, 56 bp, Artificial
  Synthetic oligonucleotide
cgcagaagcgtctagccatggcgttagtatgagtgtcgtgcagcctccaggacccc

SEQ ID NO: 44112 - DNA, 60 bp, Artificial
  Synthetic oligonucleotide
ggaaccggtgagtacaccggaattgccaggacgaccgggtcctttcttggattaacccgc

SEQ ID NO: 44113 - DNA, 60 bp, Artificial
  Synthetic oligonucleotide
ttacttgttgccgcgcaggggccccaggttgggtgtgcgcgcgacgaggaagacttcaga

SEQ ID NO: 44114 - DNA, 60 bp, Artificial
  Synthetic oligonucleotide
cccctcagcgaaggccgaaaagaggctagccatgcccttagtaggactagcataaagagg

SEQ ID NO: 44115 - DNA, 60 bp, Artificial
  Synthetic oligonucleotide
ccatggtcttagcgcattttcactccatagttactctccaggtgaaatcaatagggtggc

SEQ ID NO: 44116 - DNA, 60 bp, Artificial
  Synthetic oligonucleotide
ccatggccttagcgcattttcactccatagttactctccaggtgaaatcaatagggtggc

SEQ ID NO: 44117 - DNA, 60 bp, Artificial
  Synthetic oligonucleotide
ctggttggcaagcagaggctttgagggctgcacagaagcgcacagccgctggtatcatga

SEQ ID NO: 44118 - DNA, 60 bp, Artificial
  Synthetic oligonucleotide
agaaatcctggttacgcgctggtggccgttgtccttggctggatgctgggcagcaacact

SEQ ID NO: 44119 - DNA, 60 bp, Artificial
  Synthetic oligonucleotide
cgtaaactatggaaggtgcacacgtgctcgccattcaaagcgcagtcgtcgttccatcac

SEQ ID NO: 44120 - DNA, 60 bp, Artificial
  Synthetic oligonucleotide
cgttcatctgcgtgagcttccgatctcagtattgtttggaaggatcattgattaacgcgg

SEQ ID NO: 44121 - DNA, 60 bp, Artificial
  Synthetic oligonucleotide
actatggggtgatgcagtggaagaaacggagttgataatcccagtgactctcgccggccc

SEQ ID NO: 44122 - DNA, 60 bp, Artificial
  Synthetic oligonucleotide
cattgtggtaggcaggggagacaagcagatcaatcaccactggcataaggagggtagttc

SEQ ID NO: 44123 - DNA, 60 bp, Artificial
  Synthetic oligonucleotide
tcttgaggaagaggtggacggccagacttactctgccagcagcggttggggctctgctag

SEQ ID NO: 44124 - DNA, 60 bp, Artificial
  Synthetic oligonucleotide
cgtcacggactggtgttgtaggagctgcacgcttcctcctttaagatttaccacggccag

SEQ ID NO: 44125 - DNA, 60 bp, Artificial
  Synthetic oligonucleotide
ctggagggcgacagttgcatcaccatcatggccgctgacaaacccacccttgacataaga

SEQ ID NO: 44126 - DNA, 60 bp, Artificial
  Synthetic oligonucleotide
agcgtcaaatggcatccagtacaatgacaggaaatggtgttttgatggaccccgatccaa

SEQ ID NO: 44127 - DNA, 60 bp, Artificial
  Synthetic oligonucleotide
aagcgtagctgccatcactccaagggccattttgccatccgcgtttgggtattggctgac

SEQ ID NO: 44128 - DNA, 60 bp, Artificial
  Synthetic oligonucleotide
gtaggaggccacccagtgtcacgagggacagcgaaactcagatggttggttgaaagacgc

SEQ ID NO: 44129 - DNA, 60 bp, Artificial
  Synthetic oligonucleotide
gcagcaggccttatgatatgcaaccctaacaagaagagaggatggcccgccacagaggtg

SEQ ID NO: 44130 - DNA, 60 bp, Artificial
  Synthetic oligonucleotide
ggtcaaggtcatgcgcccggcagctggaggaaagactgtgatggatgtcatttcacgcga

SEQ ID NO: 44131 - DNA, 60 bp, Artificial
  Synthetic oligonucleotide
gtccagatgatagtggtggaaccaggaaagccagcaataaacgtgcagaccaagcccggg

SEQ ID NO: 44132 - DNA, 60 bp, Artificial
  Synthetic oligonucleotide
catgggagttatgaggtgaagccatcggggtcagccagcacgttggtaaatggagtggtg

SEQ ID NO: 44133 - DNA, 60 bp, Artificial
  Synthetic oligonucleotide
ttggacgaaggagagggaagagtcattctcagtgtgccgtcagccatcactagtgccagt

SEQ ID NO: 44134 - DNA, 60 bp, Artificial
  Synthetic oligonucleotide
ggccatctttatgacggccacccctccaggcacatctgacccattcccggacaccaattc

SEQ ID NO: 44135 - DNA, 60 bp, Artificial
  Synthetic oligonucleotide
tcatgatgcaaagaaaaggaattggtaaactgggactcggagcactcgtcttggtagtgg

SEQ ID NO: 44136 - DNA, 60 bp, Artificial
  Synthetic oligonucleotide
caagcagtcaggttcaccatttcaccaaacgctccagccatcacagcaaagatgggcgac

SEQ ID NO: 44137 - DNA, 60 bp, Artificial
  Synthetic oligonucleotide
ggaggaggtgatgcaaaccccggcgaaggactagaggttagaggagaccctgcggaagaa

SEQ ID NO: 44138 - DNA, 60 bp, Artificial
  Synthetic oligonucleotide
gacactggttgcgcgattgacatcaccaggagggagctcaagtgtggcagcggaatattc

SEQ ID NO: 44139 - DNA, 60 bp, Artificial
  Synthetic oligonucleotide
gggagccatgtttgaagagcaaaaccagtggaagaacgcacgagaagctgtggaagaccc

SEQ ID NO: 44140 - DNA, 60 bp, Artificial
  Synthetic oligonucleotide
catgggctgagaacatctacgccgccatcaaccaagtgaggtcagtcatagggaaagaaa

SEQ ID NO: 44141 - DNA, 60 bp, Artificial
  Synthetic oligonucleotide
tgcacagatgtggcttgtgttgtacttccatcgacgggatctgcgcctgatggccaacgc

SEQ ID NO: 44142 - DNA, 60 bp, Artificial
  Synthetic oligonucleotide
cggcgtaggtcgcgcaatttgggtaaggtcatcgataccctcacgtgcggcttcgccgac

SEQ ID NO: 44143 - DNA, 60 bp, Artificial
  Synthetic oligonucleotide
aagaactgatcatcaaacacaaagtgaggaatgaagtaatggtccgctggtttggtgacg

SEQ ID NO: 44144 - DNA, 60 bp, Artificial
  Synthetic oligonucleotide
aagaactgatcatcaaacacaaagtgaggaatgaagtaatggtccactggtttggcgacg

SEQ ID NO: 44145 - DNA, 60 bp, Artificial
  Synthetic oligonucleotide
gtgagccccgtccaaggacgttaaaagaagtcaggccattttgatgccatagcttgagca

SEQ ID NO: 44146 - DNA, 60 bp, Artificial
  Synthetic oligonucleotide
gtgagccccgtccaaggacgttaaaagaagtcaggccactttgatgccatagcttgagca

SEQ ID NO: 44147 - DNA, 60 bp, Artificial
  Synthetic oligonucleotide
ggaaccggtgagtacaccggaattgccaggacgaccgggtcctttcttggataaacccgc

SEQ ID NO: 44148 - DNA, 60 bp, Artificial
  Synthetic oligonucleotide
aaatttccgccaccggaagttgagtagacggtgctgcctgcggctcaaccccaggaggac

SEQ ID NO: 44149 - DNA, 60 bp, Artificial
  Synthetic oligonucleotide
gcattttcactccacagttactctccaggtgagatcaatagggtggcttcatgcctcagg

SEQ ID NO: 44150 - DNA, 60 bp, Artificial
  Synthetic oligonucleotide
tcagctgggccttctggtgatgtttctggccacccaggaggtctttcgcaagaggtggac

SEQ ID NO: 44151 - DNA, 60 bp, Artificial
  Synthetic oligonucleotide
tcagctgggccttctggtgatgtttctggccacccaggaggttcttcgcaagaggtggac

SEQ ID NO: 44152 - DNA, 60 bp, Artificial
  Synthetic oligonucleotide
agatcctgctgtctcctcagcatcattccaggcacagaacgccagaaaatggaatggtgc

SEQ ID NO: 44153 - DNA, 60 bp, Artificial
  Synthetic oligonucleotide
gagatcctgctgtctcctcagcatcattccaggcacagaacgccagaaaatggaatggtg

SEQ ID NO: 44154 - DNA, 60 bp, Artificial
  Synthetic oligonucleotide
ctgggaaagaccagagatcctgctgtctcctcagcatcattccaggcacagaacgccaga

SEQ ID NO: 44155 - DNA, 60 bp, Artificial
  Synthetic oligonucleotide
gagaccagagatcctgctgtctcctcagcatcattccaggcacagaacgccagaaaatgg

SEQ ID NO: 44156 - DNA, 60 bp, Artificial
  Synthetic oligonucleotide
acccgagggcagggcctgggctcagcccgggtacccttggcccctctatggcaatgaggg

SEQ ID NO: 44157 - DNA, 60 bp, Artificial
  Synthetic oligonucleotide
ggttagaggagaccctccagggaaattagtgggaccatattgacgccagggaaagaccgg

SEQ ID NO: 44158 - DNA, 60 bp, Artificial
  Synthetic oligonucleotide
ggtagaaaggtggggtctagaggttagaggagaccctccagggaacaattagtgggacca

SEQ ID NO: 44159 - DNA, 60 bp, Artificial
  Synthetic oligonucleotide
ggaccatattgacgccagggaaagaccggagtggttctctgcttttcctccagaggtctg

SEQ ID NO: 44160 - DNA, 60 bp, Artificial
  Synthetic oligonucleotide
cctcccacgtggtggtagaaagacggggtctagaggttagaggagaccctccagggaaca

SEQ ID NO: 44161 - DNA, 60 bp, Artificial
  Synthetic oligonucleotide
ttacctgttgccgcgcaggggccccaggttgggtgtgcgcgcgactaggaagacttccga

SEQ ID NO: 44162 - DNA, 60 bp, Artificial
  Synthetic oligonucleotide
agtcgtcagtggttcgacgcttcggaggacaagcctcgagatgccacgtggacgagggca

SEQ ID NO: 44163 - DNA, 59 bp, Artificial
  Synthetic oligonucleotide
acgcttaacatgataagcctcgagatgccacgtggacgagggcatgcccacagcacatc

SEQ ID NO: 44164 - DNA, 60 bp, Artificial
  Synthetic oligonucleotide
agaccagattggtggccttatgagacagccacggtcctaacgtttgaagaggtgggtcaa

SEQ ID NO: 44165 - DNA, 60 bp, Artificial
  Synthetic oligonucleotide
ggcagatggtgaggtatacataagaaatggacaaaggggtagtggccagccagacacaag

SEQ ID NO: 44166 - DNA, 60 bp, Artificial
  Synthetic oligonucleotide
ggttgcaaggatccatgtctgtggggatgacggcttcctaataacagagaaggggctggg

SEQ ID NO: 44167 - DNA, 60 bp, Artificial
  Synthetic oligonucleotide
cgccacggacgccctcatgacgggtttcaccggcgactttgactcagtgatagactgcaa

SEQ ID NO: 44168 - DNA, 60 bp, Artificial
  Synthetic oligonucleotide
gagagccatagtggtctgcggaaccggtgagtacaccggaattgccaggacgaccgggtc

SEQ ID NO: 44169 - DNA, 60 bp, Artificial
  Synthetic oligonucleotide
gtttgtgaggattaacaacaattaacacagtgcgagctgtttcttagcacgaagatctcg

SEQ ID NO: 44170 - DNA, 60 bp, Artificial
  Synthetic oligonucleotide
aggcctgacaaaaggaggaccaggacacgaagaacccatccccatgtcaacatatgggtg

SEQ ID NO: 44171 - DNA, 60 bp, Artificial
  Synthetic oligonucleotide
ggcctgacaaaaggaggaccaggacacgaagaacccatccccatgtcaacatatgggtgg

SEQ ID NO: 44172 - DNA, 60 bp, Artificial
  Synthetic oligonucleotide
gatcaaataccagggaaacctgaggaccaaacacatgttgaaccccggcaaggtggcaga

SEQ ID NO: 44173 - DNA, 60 bp, Artificial
  Synthetic oligonucleotide
aatcaaataccagggaaacctgaggaccaaacacatgttgaaccccggcaaggtggcaga

SEQ ID NO: 44174 - DNA, 60 bp, Artificial
  Synthetic oligonucleotide
ggtgacatagatttatctacctcaagctaacactacactcaatgcacacagcactttagc

SEQ ID NO: 44175 - DNA, 60 bp, Artificial
  Synthetic oligonucleotide
tgatatatagttatctacctcaagctaacactacactcaatgcacacagcactttagctg

SEQ ID NO: 44176 - DNA, 60 bp, Artificial
  Synthetic oligonucleotide
gtgatatatagttatctacctcaagtagacactacactcaatgcacacagcactttagct

SEQ ID NO: 44177 - DNA, 60 bp, Artificial
  Synthetic oligonucleotide
accggttgggcctacacacaccaaggtggcataagctcagtagaccatgtgaccgcaggc

SEQ ID NO: 44178 - DNA, 60 bp, Artificial
  Synthetic oligonucleotide
aaagtgaggcaccagggtaatctcaatacaaagaaaatcctcaaccctggaaagctatca

SEQ ID NO: 44179 - DNA, 60 bp, Artificial
  Synthetic oligonucleotide
ggcaccagggtaatctcaatacaaagaaaatcctcaaccctggaaagctatcagaacagc

SEQ ID NO: 44180 - DNA, 60 bp, Artificial
  Synthetic oligonucleotide
aacctcaatacaaagaaaatcctcaaccctggaaagctatcagagcagctagatagagaa

SEQ ID NO: 44181 - DNA, 60 bp, Artificial
  Synthetic oligonucleotide
tcaatacaaagaaaatcctcaaccctggaaagctatcagagcagctagatagagaagggc

SEQ ID NO: 44182 - DNA, 60 bp, Artificial
  Synthetic oligonucleotide
caatacaaagaaaatcctcaaccctggaaagctatcagagcagctagatagagaagggca

SEQ ID NO: 44183 - DNA, 60 bp, Artificial
  Synthetic oligonucleotide
gggttccatataagagtttcaatagggttgcaaggatccacgtctgtggggatgacggct

SEQ ID NO: 44184 - DNA, 59 bp, Artificial
  Synthetic oligonucleotide
aacagggttgcaaggatccacgtctgtggggatgacggcttcctaataacagagagggg

SEQ ID NO: 44185 - DNA, 60 bp, Artificial
  Synthetic oligonucleotide
gtaaacttactgttgaggaggttgaaagttctgcttatggcagctgtcggtgccagcagt

SEQ ID NO: 44186 - DNA, 60 bp, Artificial
  Synthetic oligonucleotide
gcaggcatattggtacaagggccttgcaactttgaaatagccgtaagtgatgtgctgttc

SEQ ID NO: 44187 - DNA, 60 bp, Artificial
  Synthetic oligonucleotide
atatggagtcaggccagcaaaagctgccaccggatactgggtagacggtgctgcctgcgt

SEQ ID NO: 44188 - DNA, 60 bp, Artificial
  Synthetic oligonucleotide
tgcatatggagtcaggccagcaaaagctgccaccggatactgggtagacggtgctgcctg

SEQ ID NO: 44189 - DNA, 60 bp, Artificial
  Synthetic oligonucleotide
ctcatacatattcttagatgaataccactgtgccactcctgaacaactggcaattatcgg

SEQ ID NO: 44190 - DNA, 60 bp, Artificial
  Synthetic oligonucleotide
accattgtgccactcctgaacaactggcaattatcggaaagatccacagattttcagaga

SEQ ID NO: 44191 - DNA, 60 bp, Artificial
  Synthetic oligonucleotide
gcacccaatagaggaattcatagcccccgaggtgatgaaaggggaggacctgggcagcca

SEQ ID NO: 44192 - DNA, 53 bp, Artificial
  Synthetic oligonucleotide
cgggtcctttcttggataaacccgctcaatgcctggagatttgggcgtgcccc

SEQ ID NO: 44193 - DNA, 51 bp, Artificial
  Synthetic oligonucleotide
ggtcctttcttggataaacccgctcaatgcctggagatttgggcgtgcccc

SEQ ID NO: 44194 - DNA, 58 bp, Artificial
  Synthetic oligonucleotide
acgaccgggtcctttcgtggataaacccgctcaatgcctggagatttgggcgtgcccc

SEQ ID NO: 44195 - DNA, 54 bp, Artificial
  Synthetic oligonucleotide
ccgggtcctttcttggataaacccgctcaatgcctggagatttgggcgtgcccc

SEQ ID NO: 44196 - DNA, 60 bp, Artificial
  Synthetic oligonucleotide
gaggagaccctccagggaacaaatagtgggaccatattgacgccagggaaagaccggagt

SEQ ID NO: 44197 - DNA, 60 bp, Artificial
  Synthetic oligonucleotide
ggagaccctccagggaacaaatagtgggaccatattgacgccagggaaagaccggagtgg

SEQ ID NO: 44198 - DNA, 56 bp, Artificial
  Synthetic oligonucleotide
gcagggtcagtaaccacaacaggacaaaagcacccaatagaggaattcatagcccc

SEQ ID NO: 44199 - DNA, 56 bp, Artificial
  Synthetic oligonucleotide
ccccggcggaggtcccgcaacctgggtaaggtcatcgataccctaacctgcggctt

SEQ ID NO: 44200 - DNA, 60 bp, Artificial
  Synthetic oligonucleotide
ggtcatcgataccctaacctgcggcttcgccgacctcatgggatacatcccgctcgtagg

SEQ ID NO: 44201 - DNA, 60 bp, Artificial
  Synthetic oligonucleotide
tcatcgataccctaacctgcggcttcgccgacctcatgggatacatcccgctcgtaggcg

SEQ ID NO: 44202 - DNA, 60 bp, Artificial
  Synthetic oligonucleotide
gagccatagtggtctgcggaaccggtgagtacaccggaattcccggaaagactgggtcct

SEQ ID NO: 44203 - DNA, 60 bp, Artificial
  Synthetic oligonucleotide
ccccgcacaacaacaaacagcatattgacgctgggagagaccagagatcctgctgtctct

SEQ ID NO: 44204 - DNA, 57 bp, Artificial
  Synthetic oligonucleotide
acaacaattaacacagtgcgagctgtttcttggcacgaagatctcgatgtctaagaa

SEQ ID NO: 44205 - DNA, 57 bp, Artificial
  Synthetic oligonucleotide
agaccggagtggttctctgcttttcctccagaggtctgtgagcacagtttgctcaag

SEQ ID NO: 44206 - DNA, 57 bp, Artificial
  Synthetic oligonucleotide
agaccggagtggttctctgcttttcctccaggggtctgtgagcacagtttgctcaag

SEQ ID NO: 44207 - DNA, 60 bp, Artificial
  Synthetic oligonucleotide
tcgtgcagcctccaggcccccccctcccgggagagccatagtggtctgcggaaccggtga

SEQ ID NO: 44208 - DNA, 60 bp, Artificial
  Synthetic oligonucleotide
gaagtcaggccagattaatgctgccaccggaagttgagtagacggtgctgcctgcggctc

SEQ ID NO: 44209 - DNA, 60 bp, Artificial
  Synthetic oligonucleotide
aatggacgtcaagttcccgggtggcggtcagatcgttggcggagtttacttgttgccgcg

SEQ ID NO: 44210 - DNA, 60 bp, Artificial
  Synthetic oligonucleotide
atgcatatggagtcaggccagcaaaagctgccaccggatactgggcagacggtgctgcct

SEQ ID NO: 44211 - DNA, 60 bp, Artificial
  Synthetic oligonucleotide
gtgcatgtggagtcaggccagcaaaagctgccaccggatactgagtagacggtgctgcct

SEQ ID NO: 44212 - DNA, 60 bp, Artificial
  Synthetic oligonucleotide
catatggagtcaggccagcaaaagctgccaccggatactgggtagacggtgctgtctgcg

SEQ ID NO: 44213 - DNA, 60 bp, Artificial
  Synthetic oligonucleotide
tcccatgacacaacgcagcagcggggcccgagcactgagggaagctgtacctccttgcaa

SEQ ID NO: 44214 - DNA, 60 bp, Artificial
  Synthetic oligonucleotide
ggagagtttggcaaagcaaaaggcagtagagctatatggtacatgtggttgggagccagg

SEQ ID NO: 44215 - DNA, 60 bp, Artificial
  Synthetic oligonucleotide
cccagccagtatagcggctagagggtacatatcaactcgtgtaggaatgggagaggcagc

SEQ ID NO: 44216 - DNA, 60 bp, Artificial
  Synthetic oligonucleotide
ccaaggaccaatgaaattggttatggcgttcatagctttcctcagatttctagccattcc

SEQ ID NO: 44217 - DNA, 60 bp, Artificial
  Synthetic oligonucleotide
gagccatagtggtctgcggaaccggtgagtacaccggaattgccaggacgaccgggtcct

SEQ ID NO: 44218 - DNA, 60 bp, Artificial
  Synthetic oligonucleotide
ccaccctcaatcgacgctaaagctcccacacaagagaggggaacgcaatgtccccaccag

SEQ ID NO: 44219 - DNA, 60 bp, Artificial
  Synthetic oligonucleotide
agtttacctgttgccgcgcaggggccccaggttgggtgtgcgcgcgactaggaagacttc

SEQ ID NO: 44220 - DNA, 60 bp, Artificial
  Synthetic oligonucleotide
taaccaacggaaaaaggcgagaagtacgcctttcaatatgctgaaacgcgagagaaaccg

SEQ ID NO: 44221 - DNA, 60 bp, Artificial
  Synthetic oligonucleotide
acgctgggaaagaccagagatcctgctgtctctgcaacatcaatccaggcacagagcgcc

SEQ ID NO: 44222 - DNA, 60 bp, Artificial
  Synthetic oligonucleotide
agtatacttgttgccgcgcaggggccccaggttgggtgtgcgcgcgacgaggaagacttc

SEQ ID NO: 44223 - DNA, 60 bp, Artificial
  Synthetic oligonucleotide
tcactccacagttactctccaggtgaaatcaatagggtggcttcatgcctcaggaagctt

SEQ ID NO: 44224 - DNA, 55 bp, Artificial
  Synthetic oligonucleotide
accgggtcctttcttggataaacccgctcaatgcctggagatttgggcgtgcccc

SEQ ID NO: 44225 - DNA, 56 bp, Artificial
  Synthetic oligonucleotide
gaccgggtcctttcttggataaacccgctcaatgcctggagatttgggcgtgcccc

SEQ ID NO: 44226 - DNA, 50 bp, Artificial
  Synthetic oligonucleotide
gaaggactagaggttagtggagaccccgtgccacaaaacaccacaacaaa

SEQ ID NO: 44227 - DNA, 54 bp, Artificial
  Synthetic oligonucleotide
aggggaaggactagaggttagtggagaccccgtgccacaaaacaccacaacaaa

SEQ ID NO: 44228 - DNA, 60 bp, Artificial
  Synthetic oligonucleotide
aagctgtaggtcaggggaaggactagaggttagtggagaccccgtgccacaaaacaccac

SEQ ID NO: 44229 - DNA, 56 bp, Artificial
  Synthetic oligonucleotide
tcaggggaaggactagaggttagtggagaccccgtgccacaaaacaccacaacaaa

SEQ ID NO: 44230 - DNA, 55 bp, Artificial
  Synthetic oligonucleotide
caggggaaggactagaggttagtggagaccccgtgccacaaaacaccacaacaaa

SEQ ID NO: 44231 - DNA, 60 bp, Artificial
  Synthetic oligonucleotide
taggtcaggggaaggactagaggttagtggagaccccgtgccacaaaacaccacaacaaa

SEQ ID NO: 44232 - DNA, 60 bp, Artificial
  Synthetic oligonucleotide
ctgtaggtcaggggaaggactagaggttagtggagaccccgtgccacaaaacaccacaac

SEQ ID NO: 44233 - DNA, 52 bp, Artificial
  Synthetic oligonucleotide
gggaaggactagaggttagtggagaccccgtgccacaaaacaccacaacaaa

SEQ ID NO: 44234 - DNA, 60 bp, Artificial
  Synthetic oligonucleotide
ctcctccgcgaaggccgaaaagaggctagccatgcccttagtaggactagcatagcgagg

SEQ ID NO: 44235 - DNA, 60 bp, Artificial
  Synthetic oligonucleotide
agggcagggcctgggctcagcccgggtacccttggcccctctatggcaatgagggcttag

SEQ ID NO: 44236 - DNA, 60 bp, Artificial
  Synthetic oligonucleotide
gtgagctgacaaacttagtagtgtttgtgaggattacaacaattaacacagtgcgagctg

SEQ ID NO: 44237 - DNA, 51 bp, Artificial
  Synthetic oligonucleotide
tgccggactaaagataccagtagaggagatgaagaacaatatgctagtttt

SEQ ID NO: 44238 - DNA, 60 bp, Artificial
  Synthetic oligonucleotide
gccatgcgccacgcaacactgacacagcgcctgctaacaccagcaaaagtgccgaactac

SEQ ID NO: 44239 - DNA, 60 bp, Artificial
  Synthetic oligonucleotide
aaagcccgcctccgaacggtcatactggttcccaccagagtcgtcgccgctgaaatggca

SEQ ID NO: 44240 - DNA, 60 bp, Artificial
  Synthetic oligonucleotide
ctgcaagcaaaaccatcatgttagaaggggccgacgtgcgatcaacattcctcaccacgg

SEQ ID NO: 44241 - DNA, 60 bp, Artificial
  Synthetic oligonucleotide
taacagccgtgggcatgactttcgctcttgcggggagtgttgccagactggacggaggga

SEQ ID NO: 44242 - DNA, 56 bp, Artificial
  Synthetic oligonucleotide
aaaggtcaacgagcaacggggaaactcatgcgactcagcggtgattggaacagccg

SEQ ID NO: 44243 - DNA, 60 bp, Artificial
  Synthetic oligonucleotide
ggagagagcagtccttggggaggtcaagtcgtgcacatggccggaaagccacacattgtg

SEQ ID NO: 44244 - DNA, 60 bp, Artificial
  Synthetic oligonucleotide
tgctaccaggccactgtcaccgactcgtcaactgaggccagatgccctaccatgggtgaa

SEQ ID NO: 44245 - DNA, 60 bp, Artificial
  Synthetic oligonucleotide
ccggggaaaactgctggtatggcgtggaagtcagacccaagcgcgagaatgaggaaaccc

SEQ ID NO: 44246 - DNA, 54 bp, Artificial
  Synthetic oligonucleotide
gctgcggccatcttcatgactgcaacaccgccgggaacgactgacccctttcca

SEQ ID NO: 44247 - DNA, 60 bp, Artificial
  Synthetic oligonucleotide
gctgaatgtccagggaccacagtgacccaggaagagagttgtggcggtagaggaccatca

SEQ ID NO: 44248 - DNA, 60 bp, Artificial
  Synthetic oligonucleotide
gaccctggagttccaatgtggatgtggacttgtagaatgggcctcatggcaatggcagca

SEQ ID NO: 44249 - DNA, 60 bp, Artificial
  Synthetic oligonucleotide
gggctttggacgtaggctacacttgcgcttatgacacaacttacgagtgccctcacctgg

SEQ ID NO: 44250 - DNA, 60 bp, Artificial
  Synthetic oligonucleotide
ggaagggacccgacccaatcaggggacgagtacttctacggaggaccaaccaccactgat

SEQ ID NO: 44251 - DNA, 60 bp, Artificial
  Synthetic oligonucleotide
catgtggttggaacgctgcgctgacatctcatggatcaatgaggctgagatcacagggac

SEQ ID NO: 44252 - DNA, 60 bp, Artificial
  Synthetic oligonucleotide
ctcacgccacgcggctttgccaaggtcattcagatgtcaaaggataaaggtgtctgcggc

SEQ ID NO: 44253 - DNA, 60 bp, Artificial
  Synthetic oligonucleotide
ggccctgctctggattaccatgatcacagcggtcgccggcctcaagatctcatcacacag

SEQ ID NO: 44254 - DNA, 60 bp, Artificial
  Synthetic oligonucleotide
ggagagttcgggaaggcaaagggaagcagagccatctggtacatgtggcttggagctaga

SEQ ID NO: 44255 - DNA, 60 bp, Artificial
  Synthetic oligonucleotide
gttgtcgtgaaaggccagacagggatttacaaacgtgcacccaaacgcctcaccgagacg

SEQ ID NO: 44256 - DNA, 60 bp, Artificial
  Synthetic oligonucleotide
cgaattgacctacaggcataaagtagtcaaggtcatgcggcctgcgcggggagggaagac

SEQ ID NO: 44257 - DNA, 60 bp, Artificial
  Synthetic oligonucleotide
tagtggaagcaggggtcttgacaacatcagccatggccactctcattgagggaaacgcca

SEQ ID NO: 44258 - DNA, 60 bp, Artificial
  Synthetic oligonucleotide
ggctggagcggctgaggaaagagttttcagcaacctggcacatcgaccttgaacatccgt

SEQ ID NO: 44259 - DNA, 56 bp, Artificial
  Synthetic oligonucleotide
ccaatggtgtggtagtctgattggaacccgacagagagcaacatgggcggagaata

SEQ ID NO: 44260 - DNA, 60 bp, Artificial
  Synthetic oligonucleotide
atggctgtcagtggagatgactgcgtggtgaaacccattgatgaccgattcgcgagcgcc

SEQ ID NO: 44261 - DNA, 60 bp, Artificial
  Synthetic oligonucleotide
ggtggcaggctgaggccatgcgtgcagcacaaaagagaacagcagctggcgtgatgaaga

SEQ ID NO: 44262 - DNA, 60 bp, Artificial
  Synthetic oligonucleotide
cgaaacagccaactccacattcattgtcgatggaccagaaagtaaagagtgcccaacatc

SEQ ID NO: 44263 - DNA, 60 bp, Artificial
  Synthetic oligonucleotide
ctcggctttgtttggtctgagcgcaggttacccctttgttgggattgacttggcggtggg

SEQ ID NO: 44264 - DNA, 60 bp, Artificial
  Synthetic oligonucleotide
agaacttcgtggaattcctcaggacaggtgacctcccagtgtggctgtcatacaaggttg

SEQ ID NO: 44265 - DNA, 60 bp, Artificial
  Synthetic oligonucleotide
gccctgacaactggcacgacttcgactcttgcaatgccgtttctggcagctctgtcccca

SEQ ID NO: 44266 - DNA, 60 bp, Artificial
  Synthetic oligonucleotide
ggacgcgacaaggggaaaaaaggattctgcgcccaagatggtcagatgcacgagtctact

SEQ ID NO: 44267 - DNA, 60 bp, Artificial
  Synthetic oligonucleotide
acggaccaataagcgcagccgcacacggcaactacaccgcccaattgacagggaagtacg

SEQ ID NO: 44268 - DNA, 60 bp, Artificial
  Synthetic oligonucleotide
gcgctcatagggtcattgacagtaggaagtgcgtgaaaccagtcattctggacggagatg

SEQ ID NO: 44269 - DNA, 60 bp, Artificial
  Synthetic oligonucleotide
gcatgtcacacagggagccgccttgcgaaatggtgaaggacgcctcaaccccacttgggg

SEQ ID NO: 44270 - DNA, 60 bp, Artificial
  Synthetic oligonucleotide
ggtggaccaggccacgaggaaccggtgatgatgcaaagttatggatggaacattgtcacc

SEQ ID NO: 44271 - DNA, 60 bp, Artificial
  Synthetic oligonucleotide
ggtattttatccttgtgggtgcggcctttgcagaggcaaacagcggtggggacgtcgttc

SEQ ID NO: 44272 - DNA, 60 bp, Artificial
  Synthetic oligonucleotide
gcatatgtcagcgccatcacacaaggagagcggcaggaagaggaaactccggaggcattc

SEQ ID NO: 44273 - DNA, 60 bp, Artificial
  Synthetic oligonucleotide
ccaatggcacaagactggcagcacaattggaaatgctctgaaaacgacttggaagggagc

SEQ ID NO: 44274 - DNA, 60 bp, Artificial
  Synthetic oligonucleotide
caagatgaactagtgggaagagcacgggtgtcacctggtagcggatggagcctgcgagag

SEQ ID NO: 44275 - DNA, 60 bp, Artificial
  Synthetic oligonucleotide
agtttctgcatcaaagtgttgtgcccatacaccccaaaggtcattgaacgcctggagcgc

SEQ ID NO: 44276 - DNA, 60 bp, Artificial
  Synthetic oligonucleotide
gggcgcggtgtttgatgagcagaaccagtggtcaacggctagagaagcagtggaagaccc

SEQ ID NO: 44277 - DNA, 60 bp, Artificial
  Synthetic oligonucleotide
tggaagtctcaagcacgactctcactttgaactctggacacctcaagtgcaggttgaagc

SEQ ID NO: 44278 - DNA, 60 bp, Artificial
  Synthetic oligonucleotide
gactccaatcggaagacttgtcacagtcaatccaataatcccaagctcggccaaatccca

SEQ ID NO: 44279 - DNA, 60 bp, Artificial
  Synthetic oligonucleotide
gcattcctgctgatgatcgtcctcatcccagaacccgaaaagcaaaggagccagacagat

SEQ ID NO: 44280 - DNA, 60 bp, Artificial
  Synthetic oligonucleotide
ggcgaagaactattcggagaatgctagatgtgagaggagcaccaagattgatcctagccc

SEQ ID NO: 44281 - DNA, 60 bp, Artificial
  Synthetic oligonucleotide
atcctcgaagtggacaggacacaggcgcggagagcacgccaaagtggaatcacaaccgga

SEQ ID NO: 44282 - DNA, 60 bp, Artificial
  Synthetic oligonucleotide
cagacaacctgtatgttctggccacagccaacaaaggagggcgagcccatcaagcggcac

SEQ ID NO: 44283 - DNA, 60 bp, Artificial
  Synthetic oligonucleotide
ggcaagactggactgggaaccctagtgctcgcgacggtcacggtcctcctatggatctca

SEQ ID NO: 44284 - DNA, 60 bp, Artificial
  Synthetic oligonucleotide
gctctcatgggagctcttctgctctggctcggcatcagtgctcgtgaaaggacggtgtct

SEQ ID NO: 44285 - DNA, 60 bp, Artificial
  Synthetic oligonucleotide
cgttcttctgttgattggggccgtttccgccaacgaaatggggtggcttgagacaaccaa

SEQ ID NO: 44286 - DNA, 60 bp, Artificial
  Synthetic oligonucleotide
agggtagggcctgggctcagcccgggtacccttggcccctctacggcaatgagggcatgg

SEQ ID NO: 44287 - DNA, 60 bp, Artificial
  Synthetic oligonucleotide
actaggaagacttccgagcggtcgcaacctcgtggaaggcgacaacctatccccaaggct

SEQ ID NO: 44288 - DNA, 60 bp, Artificial
  Synthetic oligonucleotide
cactacactcattttaacagcactttagctggaaggaaaattcctgacgtccacagttgg

SEQ ID NO: 44289 - DNA, 60 bp, Artificial
  Synthetic oligonucleotide
aggacgaccgggtcctttcttggataaccccgctcaatgcctggagatttgggcgtgccc

SEQ ID NO: 44290 - DNA, 60 bp, Artificial
  Synthetic oligonucleotide
cgtctagccatggcgttagtatgagtgtcgtacagcctccaggaccccccctcccgggag

SEQ ID NO: 44291 - DNA, 60 bp, Artificial
  Synthetic oligonucleotide
ctggccacggtaaacttgatcctcactagaacgcctttctccattgcagagttggtggtg

SEQ ID NO: 44292 - DNA, 60 bp, Artificial
  Synthetic oligonucleotide
gaaaggatgcaactcagatttggaggaggattggtgaggatcccattttcacgtaactcg

SEQ ID NO: 44293 - DNA, 60 bp, Artificial
  Synthetic oligonucleotide
ggagctgaagtgggttgttcactcaattggaaacagcgtgaggtgaaatgtggagatgga

SEQ ID NO: 44294 - DNA, 60 bp, Artificial
  Synthetic oligonucleotide
gagacagaccatgggacagctgtgatgcaggtgaaggtgacaaatggagctccatgcagg

SEQ ID NO: 44295 - DNA, 60 bp, Artificial
  Synthetic oligonucleotide
agatgggtatgctggaaaaaaccaagagagacatctttggcacaaccgtcgtggaagagg

SEQ ID NO: 44296 - DNA, 60 bp, Artificial
  Synthetic oligonucleotide
cgccatactgctgctaggaattggaccagcttattccacacattgccttggtatccccaa

SEQ ID NO: 44297 - DNA, 59 bp, Artificial
  Synthetic oligonucleotide
ctgcttacttgatgtctttgggaggtatgaacccagtgcaggtgtcctgtgtaatgctg

SEQ ID NO: 44298 - DNA, 60 bp, Artificial
  Synthetic oligonucleotide
gaatgccatgtccaagatcaggaaagacatagatgactggaaaccatcaactggctggga

SEQ ID NO: 44299 - DNA, 60 bp, Artificial
  Synthetic oligonucleotide
gggctgcaaggctttccaaaatacctgtcaggaagaatgaaagaggctgttgacacgctc

SEQ ID NO: 44300 - DNA, 60 bp, Artificial
  Synthetic oligonucleotide
gggcaaagctttagtggagagtgatgtcttccttcccacaggcaccaggagtgtcgcgag

SEQ ID NO: 44301 - DNA, 60 bp, Artificial
  Synthetic oligonucleotide
ggtgttggagtggttaaagatggagtgttccataccatgtggcatgtgacaaggggagcc

SEQ ID NO: 44302 - DNA, 60 bp, Artificial
  Synthetic oligonucleotide
caccatgccagctgaaccatgtgagacacttctttgtgacataggggaatcatcatcaaa

SEQ ID NO: 44303 - DNA, 60 bp, Artificial
  Synthetic oligonucleotide
aaactggcctgggcggtcaccgagctggcatacaagaacaaagttgtcaaagtcatgcga

SEQ ID NO: 44304 - DNA, 60 bp, Artificial
  Synthetic oligonucleotide
tatgggagatgtaaaggcggtgggtcccgcaggtctcggcgctcagctttgataacgcct

SEQ ID NO: 44305 - DNA, 60 bp, Artificial
  Synthetic oligonucleotide
cagagcacgtcatcacaagacatgatgtggaatcggtgagtccaagcaccttgcgcggcc

SEQ ID NO: 44306 - DNA, 60 bp, Artificial
  Synthetic oligonucleotide
gctggaatgggtttgaaagacatgaatgggatgctaggtccggttgcagtgggaggagtc

SEQ ID NO: 44307 - DNA, 60 bp, Artificial
  Synthetic oligonucleotide
cggctgggacgaagacgctgagataagtggagcctctcatagatatgatgttgagcagac

SEQ ID NO: 44308 - DNA, 60 bp, Artificial
  Synthetic oligonucleotide
gctaagctgtgaggccatgctggctgggatagccgcgaccacccgcgtaatggggttcct

SEQ ID NO: 44309 - DNA, 60 bp, Artificial
  Synthetic oligonucleotide
tccatgccatgttcggagggttgagctggatgaccaagattttgatcggtggcctcatgg

SEQ ID NO: 44310 - DNA, 60 bp, Artificial
  Synthetic oligonucleotide
cgcagtctagccgggcccgttagccgccacaatcacatacccggatacaaagtgcagtct

SEQ ID NO: 44311 - DNA, 60 bp, Artificial
  Synthetic oligonucleotide
ccctcccgagcactatagcggaccatattgacgcctgggaaagaccggagacactccttg

SEQ ID NO: 44312 - DNA, 60 bp, Artificial
  Synthetic oligonucleotide
cagaccaggagaggaagggctgcaggagttactcttggtgaagtgtggaaaaggcagcta

SEQ ID NO: 44313 - DNA, 60 bp, Artificial
  Synthetic oligonucleotide
gtcctcagtgaaatgaaggaagccatgcctaaaatgagcatcaaattccacacccaagca

SEQ ID NO: 44314 - DNA, 60 bp, Artificial
  Synthetic oligonucleotide
ccatcccggggctggcaaaacacgcgtctatctgccgcaaatactgaaagagtgcgaacg

SEQ ID NO: 44315 - DNA, 60 bp, Artificial
  Synthetic oligonucleotide
aagttgtgtgacaccggaatgctaggggctgccgcaaagggagatgcctctgtgcacgga

SEQ ID NO: 44316 - DNA, 60 bp, Artificial
  Synthetic oligonucleotide
tttccgccataacccaaagtgaaagctccctggaacaagacaatgaccaactacaagaca

SEQ ID NO: 44317 - DNA, 60 bp, Artificial
  Synthetic oligonucleotide
cccagctagcattgccgcaagaggatgggcagcacatagatcaagagcgagggaatgtgc

SEQ ID NO: 44318 - DNA, 60 bp, Artificial
  Synthetic oligonucleotide
ccatccagaaagaacggcacctttataattgacggaaagagcaaatcagaatgtcctttc

SEQ ID NO: 44319 - DNA, 60 bp, Artificial
  Synthetic oligonucleotide
gctgagtgcttggaatggaataacactgcttcccctgtttgcaggaatgggagctgcagc

SEQ ID NO: 44320 - DNA, 60 bp, Artificial
  Synthetic oligonucleotide
aatgacacctggacaataacatctctggaagccttgaattatcgtgagtgtgagtggcct

SEQ ID NO: 44321 - DNA, 60 bp, Artificial
  Synthetic oligonucleotide
gccgggttaattgcccaggcccacgaggaaggactatgtggactcaactcagttggagac

SEQ ID NO: 44322 - DNA, 60 bp, Artificial
  Synthetic oligonucleotide
cggttttggaagcttgtggatgaagaacggaaactccacctacaaggcaaatgcaggacc

SEQ ID NO: 44323 - DNA, 60 bp, Artificial
  Synthetic oligonucleotide
ccctcggttttctgaatgaagatcattgggtgtcaagaggcaactccggtggaggggttg

SEQ ID NO: 44324 - DNA, 58 bp, Artificial
  Synthetic oligonucleotide
gggttgtggcctccaagggcgatgttgatcctttctctttgggactcctcatgctttt

SEQ ID NO: 44325 - DNA, 60 bp, Artificial
  Synthetic oligonucleotide
cacctggctagagagatgcgacctaggatctgcacaaaagaagagttcatttccaaggtc

SEQ ID NO: 44326 - DNA, 60 bp, Artificial
  Synthetic oligonucleotide
agtgctcggaagccaagaaggtgcattgaggactgcattgtctggggccatggttgtgga

SEQ ID NO: 44327 - DNA, 60 bp, Artificial
  Synthetic oligonucleotide
atccatgccttgggacaagtttgaatccgtgacattactggctatgactgatacaacccc

SEQ ID NO: 44328 - DNA, 60 bp, Artificial
  Synthetic oligonucleotide
gtggtcgacacgccaacacttgtccggaaaatctgctatgaaagttcagtcacaggttca

SEQ ID NO: 44329 - DNA, 60 bp, Artificial
  Synthetic oligonucleotide
ggaagctaaatgggatggaacagaggaggtacaactaatagcagtggccccagggaagaa

SEQ ID NO: 44330 - DNA, 60 bp, Artificial
  Synthetic oligonucleotide
ccacaacaggaacatccacagtgacttttacaggttatggtaactttggccttgaatgtc

SEQ ID NO: 44331 - DNA, 60 bp, Artificial
  Synthetic oligonucleotide
cccctgtcactgagtggagagatgttccctacctgcccaagtctattgacaaaacctgca

SEQ ID NO: 44332 - DNA, 60 bp, Artificial
  Synthetic oligonucleotide
cgggtgcgggctggctttgttagcgtgctggccctaaaacaaatgtggagccctagagag

SEQ ID NO: 44333 - DNA, 60 bp, Artificial
  Synthetic oligonucleotide
ccatgccgggaccaagatgagctaataggaagagcccgtgtgtcaccaggaaatgggtgg

SEQ ID NO: 44334 - DNA, 60 bp, Artificial
  Synthetic oligonucleotide
ccgtccctgttgattgggtgcctactgggagaaccacttggtctatacatggaaaagggg

SEQ ID NO: 44335 - DNA, 60 bp, Artificial
  Synthetic oligonucleotide
gggctgtgatgctattctgttctgtggtcatttccgtgaccgtactgcaaaccgacagcg

SEQ ID NO: 44336 - DNA, 60 bp, Artificial
  Synthetic oligonucleotide
tgacatagccgagatgggtgctaatctgagagttgaaagggtcattgactgccgaacagc

SEQ ID NO: 44337 - DNA, 60 bp, Artificial
  Synthetic oligonucleotide
ccctcagaaccatggacgaaagggcatgaatggattcttgaagacaggagaccaacggct

SEQ ID NO: 44338 - DNA, 60 bp, Artificial
  Synthetic oligonucleotide
ggggatgacaaactgacctaccactggcaaagatcgggcagcacaattggtaatctcttc

SEQ ID NO: 44339 - DNA, 60 bp, Artificial
  Synthetic oligonucleotide
gcgattcaacaacagaggacaatggacactatgtttgctggacagaaggctctatgttgc

SEQ ID NO: 44340 - DNA, 60 bp, Artificial
  Synthetic oligonucleotide
agtatattctgcgtgctaatcgttcaacgttagtccgtggagtgagcttctgttaagttg

SEQ ID NO: 44341 - DNA, 58 bp, Artificial
  Synthetic oligonucleotide
gacgatgggaaagaccagagatcctgctgtctcctcagcatcattccaggcacagaac

SEQ ID NO: 44342 - DNA, 60 bp, Artificial
  Synthetic oligonucleotide
ccttctggtgatgtttctggccacccaggaggtccttcgcaagaggtggacggccagatt

SEQ ID NO: 44343 - DNA, 60 bp, Artificial
  Synthetic oligonucleotide
tttcaatttggttcagggcctccctccagcgacggccgaactgggctagccatgcccata

SEQ ID NO: 44344 - DNA, 60 bp, Artificial
  Synthetic oligonucleotide
ctccgcgttcaatccggccgcaggagttgtgggcgtcttgtcagcttgtgcaatgtttgc

SEQ ID NO: 44345 - DNA, 60 bp, Artificial
  Synthetic oligonucleotide
cgctttaggcagcctccacgcccaccacctcccagatagagcggcggcactgtagggaag

SEQ ID NO: 44346 - DNA, 60 bp, Artificial
  Synthetic oligonucleotide
gagtatcacgcctccggaagtagttgggcaagcccacctatatgtgttgggatggttggg

SEQ ID NO: 44347 - DNA, 60 bp, Artificial
  Synthetic oligonucleotide
ggggatctgggagtctcgtagaccgtagcacatgcctgttatttctactcaaacaagtcc

SEQ ID NO: 44348 - DNA, 60 bp, Artificial
  Synthetic oligonucleotide
tcctgtgtccattaaaacatctgttgaaaggggacaacgagcaaagcgcaaagtccagcg

SEQ ID NO: 44349 - DNA, 60 bp, Artificial
  Synthetic oligonucleotide
acctgacaatccctttgcatcatgcgtgtttgctttcattgcgggtattactaccccact

SEQ ID NO: 44350 - DNA, 60 bp, Artificial
  Synthetic oligonucleotide
gtaggtcttccggcgtctatactacctcaagttccaacagtttgacctgctggctgaagg

SEQ ID NO: 44351 - DNA, 60 bp, Artificial
  Synthetic oligonucleotide
tgcaggctacgttatgctgcccttttagggtttgtgcccatggctgcgggcttgccccta

SEQ ID NO: 44352 - DNA, 60 bp, Artificial
  Synthetic oligonucleotide
ccctttgttttgggcgcgcttctggttaccctttgcgtcctgtgctcccatcccagtcgt

SEQ ID NO: 44353 - DNA, 60 bp, Artificial
  Synthetic oligonucleotide
tatgaccctgtgaattccactctcctaccaccggagaggtgggctaggttgcccggtacc

SEQ ID NO: 44354 - DNA, 60 bp, Artificial
  Synthetic oligonucleotide
ggaaaatctgaagaaagggagacaccttatctttgaggctaccaaaaaacactgtgatga

SEQ ID NO: 44355 - DNA, 60 bp, Artificial
  Synthetic oligonucleotide
gccggcaaggtcgaggctgtcatcttcttgaccaaactggcttcacaagtaccatacgct

SEQ ID NO: 44356 - DNA, 60 bp, Artificial
  Synthetic oligonucleotide
gaggcaggtgagataccgagtcattatcggcaaactgtgatagttccaaaggaggaggtc

SEQ ID NO: 44357 - DNA, 60 bp, Artificial
  Synthetic oligonucleotide
tctccttccacttgcctacacgagcctggttgtgtgatctgcgcggacgagtgctgggtt

SEQ ID NO: 44358 - DNA, 60 bp, Artificial
  Synthetic oligonucleotide
ccctactttcaccatgggtgttcgtgtgtgcggggtctcagcaatagttaaaggccagcg

SEQ ID NO: 44359 - DNA, 60 bp, Artificial
  Synthetic oligonucleotide
gcggcgatgattgcaccgtaatttggaagagcgccggagcagatgcagacaaacaagcaa

SEQ ID NO: 44360 - DNA, 60 bp, Artificial
  Synthetic oligonucleotide
ggcccctggattggatcaggtatgctccaagcacgctgtccatgcggtgctgaactcatc

SEQ ID NO: 44361 - DNA, 60 bp, Artificial
  Synthetic oligonucleotide
aattactggagaggggctgttccagtcaacgctaggctgtgtgggtcggctagaccggac

SEQ ID NO: 44362 - DNA, 60 bp, Artificial
  Synthetic oligonucleotide
cagctcacacgccctctaagtctgctaagtcccacatcactggccttcggggcactgatg

SEQ ID NO: 44363 - DNA, 60 bp, Artificial
  Synthetic oligonucleotide
gagtgagttttcgtgcagcatgagctacacctggaccgacgtgattagcttcaaaactgc

SEQ ID NO: 44364 - DNA, 60 bp, Artificial
  Synthetic oligonucleotide
ggctccatacacccaataaccgttgacgcggctaatgaccaggacatctatcaaccacca

SEQ ID NO: 44365 - DNA, 60 bp, Artificial
  Synthetic oligonucleotide
ttatctaggtgagcccaaaactccttggacgacatctgcttgctgttacggtcctgacgg

SEQ ID NO: 44366 - DNA, 60 bp, Artificial
  Synthetic oligonucleotide
ctaccgatgcaaccaccgtgttgggcattggaaaggtcctaaccgaagctccatccaaaa

SEQ ID NO: 44367 - DNA, 60 bp, Artificial
  Synthetic oligonucleotide
gttgaagccttcgacgcagccaaggcatggtatggtttgtcatcaacagaagctcaaact

SEQ ID NO: 44368 - DNA, 60 bp, Artificial
  Synthetic oligonucleotide
tttcacattggaaaccgcccttgaaaaacttaacacctttcttgggcctcatgcagctac

SEQ ID NO: 44369 - DNA, 60 bp, Artificial
  Synthetic oligonucleotide
ccgatgcagtcggagccacatgcgatacagtgtgttttgacagtaccatcacacccgagg

SEQ ID NO: 44370 - DNA, 60 bp, Artificial
  Synthetic oligonucleotide
tgctctttgaggacaaacttcccgagactgtgacctttgactggtatgggaaaaattata

SEQ ID NO: 44371 - DNA, 60 bp, Artificial
  Synthetic oligonucleotide
cgaagaagaaatcgtggaggagtgtgcatcattcattcccttggaggccatggttgctgc

SEQ ID NO: 44372 - DNA, 60 bp, Artificial
  Synthetic oligonucleotide
gacgcctgtcctggcccagagcccagcgaggtgaccagataccaaatgtgcttcactgaa

SEQ ID NO: 44373 - DNA, 60 bp, Artificial
  Synthetic oligonucleotide
atggtttgcccgttgttgcgcgtctcggcgaccttgttttcgcagggttagctatgccgc

SEQ ID NO: 44374 - DNA, 60 bp, Artificial
  Synthetic oligonucleotide
gctgggttcccgccaatccgtacatctcacacccttccaattggactggcacggactcct

SEQ ID NO: 44375 - DNA, 58 bp, Artificial
  Synthetic oligonucleotide
ttgctcgcctttgatgataccatgtccttgccactcttatttgagtgagaatgtgtca

SEQ ID NO: 44376 - DNA, 60 bp, Artificial
  Synthetic oligonucleotide
ggctcgcttccttctctggcatgctacatctagacctctaccagatttggataagacgag

SEQ ID NO: 44377 - DNA, 60 bp, Artificial
  Synthetic oligonucleotide
gctgccgtattcgcaatgtgccatcgtactgcactatgggcactgatgcagtgtggaacg

SEQ ID NO: 44378 - DNA, 54 bp, Artificial
  Synthetic oligonucleotide
tagtacgcttgctggaggatggagtcaactgggctactggttggttcggtgtcc

SEQ ID NO: 44379 - DNA, 60 bp, Artificial
  Synthetic oligonucleotide
cgcagtgtccgctcttgttttcaaacaggagttgcggcgtacaaaccaattgcttgaggc

SEQ ID NO: 44380 - DNA, 60 bp, Artificial
  Synthetic oligonucleotide
ccctttggggtggattggtgatgttacaactcacacacctctagtaggcccgctggtggc

SEQ ID NO: 44381 - DNA, 60 bp, Artificial
  Synthetic oligonucleotide
caccgagctggcattcacaccattgcgaggcagttatacgctggaggaccgatgatcgct

SEQ ID NO: 44382 - DNA, 60 bp, Artificial
  Synthetic oligonucleotide
tcctgacgtagttaaagctgtcatgggagatgcgtacgggtttgtagatccacgtacccg

SEQ ID NO: 44383 - DNA, 60 bp, Artificial
  Synthetic oligonucleotide
caggagtgtcatgtcctgaaagcctgcaacgaagtgacccgttagaaggtccttcaaacc

SEQ ID NO: 44384 - DNA, 60 bp, Artificial
  Synthetic oligonucleotide
atggcttgcagacattggctcaggctgctttgccagctcatggttggggacgccaagacc

SEQ ID NO: 44385 - DNA, 60 bp, Artificial
  Synthetic oligonucleotide
gcaggagaagtatgaggtcttggtcctaaatcccagtgtggctacaacagcatcaatgcc

SEQ ID NO: 44386 - DNA, 60 bp, Artificial
  Synthetic oligonucleotide
cgttcatgatggccggggctgcgggaacagctcttggtacatggacatcggtgggttttg

SEQ ID NO: 44387 - DNA, 60 bp, Artificial
  Synthetic oligonucleotide
ggatgtgcaatgaccgaaacaggcggaggccctgatgatttacccagttaccctcccaaa

SEQ ID NO: 44388 - DNA, 60 bp, Artificial
  Synthetic oligonucleotide
gtcatgtctcgttttggcttctttgctcacttgttacctcgctgtgctttagttaactcc

SEQ ID NO: 44389 - DNA, 60 bp, Artificial
  Synthetic oligonucleotide
ttgggactgactctagggttagggcccatagaatgttggtgcgtctcggaaagtgtcatg

SEQ ID NO: 44390 - DNA, 60 bp, Artificial
  Synthetic oligonucleotide
cgctgctagaaattctggcggttcagtcagtcagattagggttaggccgttggtgtgtgc

SEQ ID NO: 44391 - DNA, 60 bp, Artificial
  Synthetic oligonucleotide
catatcagcttgcatccgttggctccacaccccgacggaggatgattgcggcctcattgc

SEQ ID NO: 44392 - DNA, 60 bp, Artificial
  Synthetic oligonucleotide
gaacgttacactaagaccggagaggtttctccttgtgctggtttgtttccccggtgcgac

SEQ ID NO: 44393 - DNA, 60 bp, Artificial
  Synthetic oligonucleotide
gcttgtaggtccttggcctctggtagcgcttttaaccctcttgcatttggctacgcctgc

SEQ ID NO: 44394 - DNA, 60 bp, Artificial
  Synthetic oligonucleotide
ccgcaagtcttatgacacggagtatcccaaatgcaagaatggagactgggattttgtgat

SEQ ID NO: 44395 - DNA, 60 bp, Artificial
  Synthetic oligonucleotide
ccgcaagtcctatgacacggagtatcccaaatgcaagaatggagactgggattttgtgat

SEQ ID NO: 44396 - DNA, 60 bp, Artificial
  Synthetic oligonucleotide
gaatattggcaaatatgtgtgtgttagaccagactggtggccgtatgaaactaaggtggc

SEQ ID NO: 44397 - DNA, 60 bp, Artificial
  Synthetic oligonucleotide
tggctcggagcccgctttctggagttcgaggctctgggttttctcaatgaagaccactgg

SEQ ID NO: 44398 - DNA, 60 bp, Artificial
  Synthetic oligonucleotide
gcccttagtaggactagcaaaataaggggggtagcaacagtggtgagttcgttggatggc

SEQ ID NO: 44399 - DNA, 51 bp, Artificial
  Synthetic oligonucleotide
caaataaaacagcatattgacgctgggagagaccagagatcctgctgtctc

SEQ ID NO: 44400 - DNA, 60 bp, Artificial
  Synthetic oligonucleotide
tgcccactgctccggtggtggtcatgcagcgaggtttggggttcttttcggtggtcaaga

SEQ ID NO: 44401 - DNA, 60 bp, Artificial
  Synthetic oligonucleotide
tgacctgggcgtggcgttggagcctgtgtccgtgacggcccgggattgctacatcgtgcg

SEQ ID NO: 44402 - DNA, 60 bp, Artificial
  Synthetic oligonucleotide
tgatggtagacctgtggaggcaaaagaagcacccgcgagccatcacggtggatgccacct

SEQ ID NO: 44403 - DNA, 60 bp, Artificial
  Synthetic oligonucleotide
gcgcaagcttgagttctactcgtactggtgccgctttcaccaggcggttcggatgaggct

SEQ ID NO: 44404 - DNA, 60 bp, Artificial
  Synthetic oligonucleotide
gacacagtgtccttggctttgaggtgtgtgtttcactggacgcagacgcttccccgtctg

SEQ ID NO: 44405 - DNA, 60 bp, Artificial
  Synthetic oligonucleotide
agtccatgcacggtcgtgggtctgtgatgtgcgtgtggggctctgcccactggtcttggc

SEQ ID NO: 44406 - DNA, 60 bp, Artificial
  Synthetic oligonucleotide
gctggggactagtacaactcgcagcatgggcacctgtgtcaacggggtgatgtacacgac

SEQ ID NO: 44407 - DNA, 60 bp, Artificial
  Synthetic oligonucleotide
ttgtgggagctagcagtgtgtaccacctgcacatcgatgagctgaggagggccatccgtg

SEQ ID NO: 44408 - DNA, 60 bp, Artificial
  Synthetic oligonucleotide
acctcacgcgtgcctttgtgcggcggttggagaggcgtggcgtgacgctgtttcagcact

SEQ ID NO: 44409 - DNA, 60 bp, Artificial
  Synthetic oligonucleotide
gtggcattttccctttacctactatgcagtggctgtttgctgcatctcgtgttggctgcc

SEQ ID NO: 44410 - DNA, 60 bp, Artificial
  Synthetic oligonucleotide
aacgatgctggggacacctagcgttggtctagcgatgtctggggcttactttgccggtgg

SEQ ID NO: 44411 - DNA, 60 bp, Artificial
  Synthetic oligonucleotide
gcttccccgggtgcgtctgtggctggtgttgctctgggcttgctgttgtggtcaatgaaa

SEQ ID NO: 44412 - DNA, 60 bp, Artificial
  Synthetic oligonucleotide
gcgtgagctggacttggaaaccccttgttcgtccatgctgtgggacctcatcgactggct

SEQ ID NO: 44413 - DNA, 60 bp, Artificial
  Synthetic oligonucleotide
ggacgtggaggagggcaagctggttgacgtccactactcgtctcgcctgtgttccaacta

SEQ ID NO: 44414 - DNA, 60 bp, Artificial
  Synthetic oligonucleotide
tgtcgtagacggcggcacggagtcaaagatcgtgacagatgtgggcgagcgaccgaggta

SEQ ID NO: 44415 - DNA, 60 bp, Artificial
  Synthetic oligonucleotide
ggtcgtggaggtaactttggatcccaccataaccatttctgtgagaacaacacctgcccc

SEQ ID NO: 44416 - DNA, 60 bp, Artificial
  Synthetic oligonucleotide
tttgccattcaaaggtggagtgcaacaggttacacgcggccttgtcaacagctggctgca

SEQ ID NO: 44417 - DNA, 60 bp, Artificial
  Synthetic oligonucleotide
aagtgcttgttcggactggtgtgcgccttcctgactgctctgttgtaagatggctcctgg

SEQ ID NO: 44418 - DNA, 60 bp, Artificial
  Synthetic oligonucleotide
actggggatgggccgggcgcggctgctcgctcgcgagtgcggtgtcagactcctcttgtt

SEQ ID NO: 44419 - DNA, 60 bp, Artificial
  Synthetic oligonucleotide
ggttaccgcggatagcactaagaccaagatggaagccggtgcagccctgagagaccttgg

SEQ ID NO: 44420 - DNA, 60 bp, Artificial
  Synthetic oligonucleotide
tgactctcccttggaggttgtgggtcggtttggtgggcatgtcattcgccctgatggtcg

SEQ ID NO: 44421 - DNA, 60 bp, Artificial
  Synthetic oligonucleotide
tttgggcagatgtactggttgcctgcgctgtgtgcgggcctcgcgtggcggaacggtgac

SEQ ID NO: 44422 - DNA, 60 bp, Artificial
  Synthetic oligonucleotide
tgctgctgctgggtttggctcaaaggtaactgtaggcaatatgacgacgcccgctgcgcg

SEQ ID NO: 44423 - DNA, 60 bp, Artificial
  Synthetic oligonucleotide
tactcggatcctgtgtcgtcagctctcgggacgatcctgatgtacccttggcaccccatc

SEQ ID NO: 44424 - DNA, 60 bp, Artificial
  Synthetic oligonucleotide
gcacccggcgaccgatgtcctgtcgacccacgggattccttgtgcttcctgtgtcgtcga

SEQ ID NO: 44425 - DNA, 60 bp, Artificial
  Synthetic oligonucleotide
ccgccctctataaaatcaatacctggcttcaagatggccacaccatacgagcaccacgag

SEQ ID NO: 44426 - DNA, 60 bp, Artificial
  Synthetic oligonucleotide
atgatgtggccgtctaccccttaccctctggagccagctgcttggaaccctgcaagtgtg

SEQ ID NO: 44427 - DNA, 60 bp, Artificial
  Synthetic oligonucleotide
tcgttgggatgatggtttccgtgctgcaccgaggggtgaaggttaccggggtgagatacg

SEQ ID NO: 44428 - DNA, 60 bp, Artificial
  Synthetic oligonucleotide
tggagtacaccaaggctggccacaaggtcctcgtgttgaacccgtcgatcgccacagtgc

SEQ ID NO: 44429 - DNA, 60 bp, Artificial
  Synthetic oligonucleotide
ctgcggacatgacaccacggcttactcccggacaactggatcacccctgacatattgcac

SEQ ID NO: 44430 - DNA, 60 bp, Artificial
  Synthetic oligonucleotide
cgacccgcgcctttgctctttctcttcccatcgctgctgtgacggccactctttcctttg

SEQ ID NO: 44431 - DNA, 60 bp, Artificial
  Synthetic oligonucleotide
tatcagactccgagccggaaaccatagttgagggtgggctgaagctggaagtcgtccgcc

SEQ ID NO: 44432 - DNA, 60 bp, Artificial
  Synthetic oligonucleotide
tgttccgatcggcatgatggaggttcaggttggcccgttgcgggatcaagcccgtgactt

SEQ ID NO: 44433 - DNA, 56 bp, Artificial
  Synthetic oligonucleotide
gaagtcagactcgctgtggcggtccttctgtgctaacaactactgcccgcctgggg

SEQ ID NO: 44434 - DNA, 60 bp, Artificial
  Synthetic oligonucleotide
agctccatatcaactgactgtgtgcgtcgagggcgagcagactccagctgacggcaagtg

SEQ ID NO: 44435 - DNA, 60 bp, Artificial
  Synthetic oligonucleotide
tgaccaatgtgggtgcctacctgccagtcgtggaggctgcggtcgggcctgagttcgtgt

SEQ ID NO: 44436 - DNA, 60 bp, Artificial
  Synthetic oligonucleotide
cctccgtcggtggcgccccatcattgggtggatgacctgcaggccaggttaggcgtcgct

SEQ ID NO: 44437 - DNA, 60 bp, Artificial
  Synthetic oligonucleotide
tgcagaggacaatgtgtcaggaggcgaatgtggcgggccccggtgatggaccggagtggg

SEQ ID NO: 44438 - DNA, 60 bp, Artificial
  Synthetic oligonucleotide
catgagagcattaaggaggtgcctctgggtgtcgacggagaggtggcgttctacgggcat

SEQ ID NO: 44439 - DNA, 60 bp, Artificial
  Synthetic oligonucleotide
tgtcctggcccactggactggatccctcgtggtggttacgagttggcgggtgaacggcaa

SEQ ID NO: 44440 - DNA, 60 bp, Artificial
  Synthetic oligonucleotide
ttcacggagtgcaactggcctagacggtctggtgttcgggtctgtgaggggtacgccttt

SEQ ID NO: 44441 - DNA, 60 bp, Artificial
  Synthetic oligonucleotide
cggatagctgaaaagatgattctgggcgacccgggtttggtggcaaaagggatacttggc

SEQ ID NO: 44442 - DNA, 60 bp, Artificial
  Synthetic oligonucleotide
ttgaaaccgaggtgttcgcggctgcgtccccgaacccagatctcgtcagagctcttgggt

SEQ ID NO: 44443 - DNA, 60 bp, Artificial
  Synthetic oligonucleotide
ttgggcgaacctttcagtgctgccgcacttcttgctgccctggctcgggtggagtggacc

SEQ ID NO: 44444 - DNA, 59 bp, Artificial
  Synthetic oligonucleotide
gcgcccatgacctggcctgccttgcccgtcccgacggtcgtgtgtccgactaaggccgg

SEQ ID NO: 44445 - DNA, 60 bp, Artificial
  Synthetic oligonucleotide
ttgcttgtgctcatgaagttggctgaggcgaggcttgtacctttggtggctgtggcactg

SEQ ID NO: 44446 - DNA, 60 bp, Artificial
  Synthetic oligonucleotide
attacctgctacatcaaggtgaaggctgctgcgcgggcggtaggtttggtggaccctgac

SEQ ID NO: 44447 - DNA, 60 bp, Artificial
  Synthetic oligonucleotide
ccataggcacacacatcacagcagatacaaccaaggtgtacgtcactgaccctaaccagg

SEQ ID NO: 44448 - DNA, 60 bp, Artificial
  Synthetic oligonucleotide
cggttatgattgtaagcccaagacccatgcatcacttgacactgcagaatcctgctcatc

SEQ ID NO: 44449 - DNA, 56 bp, Artificial
  Synthetic oligonucleotide
ggtagaatactcatacatattcttagatgaataccactgtgccactcctgaacaac

SEQ ID NO: 44450 - DNA, 60 bp, Artificial
  Synthetic oligonucleotide
gccagcagggtcggtgaccacaacaggtcaaaagcacccaatagaggaattcatagcccc

SEQ ID NO: 44451 - DNA, 60 bp, Artificial
  Synthetic oligonucleotide
gccggcagggtcggtgaccacaacaggtcaaaagcacccaatagaggaattcatagcccc

SEQ ID NO: 44452 - DNA, 60 bp, Artificial
  Synthetic oligonucleotide
gttcttggtcacccaggaggtccttcgcaagaggtggacagccaagatcagcatgccagc

SEQ ID NO: 44453 - DNA, 60 bp, Artificial
  Synthetic oligonucleotide
atcggaagcttgcttaacgtagttctaacagttttttattagagagcagatctctgatga

SEQ ID NO: 44454 - DNA, 50 bp, Artificial
  Synthetic oligonucleotide
gatcaacccgctcaatgcctggagatttgggcgtgcccccgcaagactgc

SEQ ID NO: 44455 - DNA, 60 bp, Artificial
  Synthetic oligonucleotide
gcggaaccggtgagtacaccggaattgccaggacgaccgggtcctttcttggataaaccc

SEQ ID NO: 44456 - DNA, 60 bp, Artificial
  Synthetic oligonucleotide
agggcagggcctgggctcagcccgggtacccttggcccctctatggcaatgagggcctgg

SEQ ID NO: 44457 - DNA, 60 bp, Artificial
  Synthetic oligonucleotide
ggagacccccccgaaacaaaaaacagcatattgacgctgggaaagaccagagatcctgct

SEQ ID NO: 44458 - DNA, 60 bp, Artificial
  Synthetic oligonucleotide
caagtgaatgcttacaacgctgatatgattgatccttttcagctgggccttctggtcgtg

SEQ ID NO: 44459 - DNA, 60 bp, Artificial
  Synthetic oligonucleotide
gagccatagtggtctgcggaaccggtgagtacaccggaattgccggaaagactgggtcct

SEQ ID NO: 44460 - DNA, 60 bp, Artificial
  Synthetic oligonucleotide
tcatcgataccctcacgtgcggcttcgccgacctcatggggtacattccgctcgtcggcg

SEQ ID NO: 44461 - DNA, 59 bp, Artificial
  Synthetic oligonucleotide
gtcatcgataccctcacgtgcggcttcgccgacctcatggggtacattccgctcgtcgg

SEQ ID NO: 44462 - DNA, 60 bp, Artificial
  Synthetic oligonucleotide
gagggtagggcctgggctcagcccgggtacccttggcccctctatggcaatgagggcttg

SEQ ID NO: 44463 - DNA, 60 bp, Artificial
  Synthetic oligonucleotide
tacagggcagaaacaccctatagaggagttcatagccccggaagtgatgaaaggagaaga

SEQ ID NO: 44464 - DNA, 60 bp, Artificial
  Synthetic oligonucleotide
tgagctgacaaacttagtagtgtttgtgaggattaacgacaattaacacagtgcgagctg

SEQ ID NO: 44465 - DNA, 60 bp, Artificial
  Synthetic oligonucleotide
tgagctgacaaacttagtagtgtttgtgaggattaataacaattaacacagtgcgagctg

SEQ ID NO: 44466 - DNA, 60 bp, Artificial
  Synthetic oligonucleotide
acaagcggccacagacttggtcgtttactatatcatcaacagacctcagttcccaggaga

SEQ ID NO: 44467 - DNA, 60 bp, Artificial
  Synthetic oligonucleotide
cggccacagacttggtcgtttactatatcatcaacagacctcagttcccaggagacacgg

SEQ ID NO: 44468 - DNA, 60 bp, Artificial
  Synthetic oligonucleotide
gccacagacttggtcgtttactatatcatcaacagacctcagttcccaggagacacggag

SEQ ID NO: 44469 - DNA, 60 bp, Artificial
  Synthetic oligonucleotide
cagccacagacttggtcgtttactatatcatcaacagacctcagttcccaggagacacgg

SEQ ID NO: 44470 - DNA, 60 bp, Artificial
  Synthetic oligonucleotide
cagacttggtcgtttactatatcatcaacagacctcagttcccaggagacacggagacac

SEQ ID NO: 44471 - DNA, 57 bp, Artificial
  Synthetic oligonucleotide
cgaccgggtcctttcttggataaacccgctcaatgcctggagatttgggcgtgcccc

SEQ ID NO: 44472 - DNA, 58 bp, Artificial
  Synthetic oligonucleotide
acgaccgggtcctttcttggataaacccgctcaatgcctggagatttgggcgtgcccc

SEQ ID NO: 44473 - DNA, 59 bp, Artificial
  Synthetic oligonucleotide
gacgaccgggtcctttcttggataaacccgctcaatgcctggagatttgggcgtgcccc

SEQ ID NO: 44474 - DNA, 60 bp, Artificial
  Synthetic oligonucleotide
ctgctgtctcctcagcatcattccaggcacagaacgccagaaaatggaatggtgctgttg

SEQ ID NO: 44475 - DNA, 60 bp, Artificial
  Synthetic oligonucleotide
agcggcccaaaccatggagtgcgtgaccatggcgtaaggactagaggttagaggagaccc

SEQ ID NO: 44476 - DNA, 60 bp, Artificial
  Synthetic oligonucleotide
cgtgaccatggcgtaaggactagaggttagaggagaccccgctgtaacttggcaaggccc

SEQ ID NO: 44477 - DNA, 60 bp, Artificial
  Synthetic oligonucleotide
acacacagagagtggtctttgtgatcatgctgatgctgattgctccggcatacagcttca

SEQ ID NO: 44478 - DNA, 56 bp, Artificial
  Synthetic oligonucleotide
atgcaaagctatggatggaatctggtccacatgaaaagtggagtggacgtgttcca

SEQ ID NO: 44479 - DNA, 60 bp, Artificial
  Synthetic oligonucleotide
gtctgctggatggccgtggacccgtgcggttcatactagccatcctgacattcttccgat

SEQ ID NO: 44480 - DNA, 55 bp, Artificial
  Synthetic oligonucleotide
cccggtagaaaccgggttgtcaatatgctaaaacgcggtgtatcccgcgtgaacc

SEQ ID NO: 44481 - DNA, 60 bp, Artificial
  Synthetic oligonucleotide
aaagcccctcattccgactcgggagggtccctggcacgtaggctggagaggacgcaaaag

SEQ ID NO: 44482 - DNA, 60 bp, Artificial
  Synthetic oligonucleotide
gctggagaggacgcaaaagtcagaccagaaatgccacctgaaagcatgctaaaggtgctg

SEQ ID NO: 44483 - DNA, 60 bp, Artificial
  Synthetic oligonucleotide
actgggttatcaaagccaatccggctgggtgcaaagcccctcattccgactcgggagggt

SEQ ID NO: 44484 - DNA, 60 bp, Artificial
  Synthetic oligonucleotide
aggttgtggacgaggagggtggagctactactgtgcaaccctgaagcatgttcaagaagt

SEQ ID NO: 44485 - DNA, 60 bp, Artificial
  Synthetic oligonucleotide
ccccaggaggactgggttaataaagcttaacagccccagcggcccaaaccatggagtgcg

SEQ ID NO: 44486 - DNA, 60 bp, Artificial
  Synthetic oligonucleotide
ggaggactgggttaacaaagcttaacagccccagcggcccaaaccatggagtgcgtgacc

SEQ ID NO: 44487 - DNA, 60 bp, Artificial
  Synthetic oligonucleotide
ctcaggccaaagtggatggatgcgcgggtctgctgcgactaccaagcgctcaagtcattt

SEQ ID NO: 44488 - DNA, 60 bp, Artificial
  Synthetic oligonucleotide
caccggcgaccccaatgacagagaagaaaatgggtcaaatcctactcattgctgcagcgg

SEQ ID NO: 44489 - DNA, 60 bp, Artificial
  Synthetic oligonucleotide
ctgctggatggccgtggacccgtgcggttcatactagccatcctgacattcttccgattc

SEQ ID NO: 44490 - DNA, 60 bp, Artificial
  Synthetic oligonucleotide
ggcacagccataaaaggagacagagctgttcacagtgacctatcgtattggattgagagc

SEQ ID NO: 44491 - DNA, 60 bp, Artificial
  Synthetic oligonucleotide
caccaaaaggagtgacccaacatttgtctgcaaaagagatgttgtggaccgcggatgggg

SEQ ID NO: 44492 - DNA, 60 bp, Artificial
  Synthetic oligonucleotide
cgaagttgaagttttcaccaaaaccggagacaggaaaattctcaggccaaagtggatgga

SEQ ID NO: 44493 - DNA, 60 bp, Artificial
  Synthetic oligonucleotide
attctcaggccaaagtggatggatgcgcgggtctgttgcgactaccaagcgctcaagtca

SEQ ID NO: 44494 - DNA, 60 bp, Artificial
  Synthetic oligonucleotide
cgaccacgatttggccaactggactgaagcaaagattctcctcgataacatatacctccc

SEQ ID NO: 44495 - DNA, 60 bp, Artificial
  Synthetic oligonucleotide
ggggtgcaaccaatgaggacgaccatgatctggccaactggactgaagcaaagattctcc

SEQ ID NO: 44496 - DNA, 60 bp, Artificial
  Synthetic oligonucleotide
cgggttcccaactaccaagtgtacatcatggatgaggcccactttattgatccagcaagc

SEQ ID NO: 44497 - DNA, 60 bp, Artificial
  Synthetic oligonucleotide
ggcagctgctatctttatgacggcaactccaccaggaacaaatgacccttttccagactc

SEQ ID NO: 44498 - DNA, 60 bp, Artificial
  Synthetic oligonucleotide
gaaaaggagccactcttggagagatctggaagtcaagactgaatcagctgacacgagccg

SEQ ID NO: 44499 - DNA, 60 bp, Artificial
  Synthetic oligonucleotide
gggttatcaaagccaatctggctgagtgcaaagcccctcattccgactcgggagggtccc

SEQ ID NO: 44500 - DNA, 60 bp, Artificial
  Synthetic oligonucleotide
gggattggtttcacgacttgaaccttccatggacgagccctgctacaactgattggcgca

SEQ ID NO: 44501 - DNA, 60 bp, Artificial
  Synthetic oligonucleotide
ggagccactcttggagagatctggaagtcaagactgaatcagctgacacgagccgaattc

SEQ ID NO: 44502 - DNA, 60 bp, Artificial
  Synthetic oligonucleotide
aaaaggagtgactcaacatttgtctgcaaaagagatgttgtggaccgtggatggggtaac

SEQ ID NO: 44503 - DNA, 60 bp, Artificial
  Synthetic oligonucleotide
ctccggaaagttggggaaaggatacggagattgagggaagaataccaacaaacgtggacg

SEQ ID NO: 44504 - DNA, 60 bp, Artificial
  Synthetic oligonucleotide
tgaggtggaggaagcccgaacagcaagagtgttggacatggctgaggaatggctaaagaa

SEQ ID NO: 44505 - DNA, 60 bp, Artificial
  Synthetic oligonucleotide
gtgctctgtgacattggagagtcaaacccaagctgtgaggtggaggaagcccgaacagca

SEQ ID NO: 44506 - DNA, 60 bp, Artificial
  Synthetic oligonucleotide
tgacactgtgctctgtgacattggagagtcaaacccaagctgtgaggtggaggaagcccg

SEQ ID NO: 44507 - DNA, 60 bp, Artificial
  Synthetic oligonucleotide
tcggcgatcattggcacagccataaaaggagacagagctgttcacagtgacctatcgtat

SEQ ID NO: 44508 - DNA, 60 bp, Artificial
  Synthetic oligonucleotide
catgggaagggcgaatggatgacaacagaagacatgttgagtgtctggaaccgtgtgtgg

SEQ ID NO: 44509 - DNA, 60 bp, Artificial
  Synthetic oligonucleotide
ccatgcaggagccaggatgagctgattggcagagccagaatttcaccaggagcaggatgg

SEQ ID NO: 44510 - DNA, 60 bp, Artificial
  Synthetic oligonucleotide
ccccggaaagttggggaaaggatacggagattgagggaagaataccaacaaacgtggacg

SEQ ID NO: 44511 - DNA, 60 bp, Artificial
  Synthetic oligonucleotide
gtgaccatggcgtaaggactagaggttagaggagaccccgctgcaacttggcaaggccca

SEQ ID NO: 44512 - DNA, 60 bp, Artificial
  Synthetic oligonucleotide
gattcggcaatcatcggcacagccataaaaggagacagagctgttcacagtgacctatcg

SEQ ID NO: 44513 - DNA, 60 bp, Artificial
  Synthetic oligonucleotide
gactcaacatttgtctgcaaaagagatgttgtggaccgtggatggggtaacggatgtggt

SEQ ID NO: 44514 - DNA, 60 bp, Artificial
  Synthetic oligonucleotide
ccaacatttgtctgcaaaagagatgttgtggaccgcggatggggtaacggatgtggcctg

SEQ ID NO: 44515 - DNA, 60 bp, Artificial
  Synthetic oligonucleotide
aatctggccgagtgcaaagcccctcattccgactcgggagggtccctggcacgtaggctg

SEQ ID NO: 44516 - DNA, 60 bp, Artificial
  Synthetic oligonucleotide
gaaatgccacctgaaagcatgctaaaggtgctgtctgtacatgccccaggaggactgggt

SEQ ID NO: 44517 - DNA, 60 bp, Artificial
  Synthetic oligonucleotide
gctgtctgtacatgccccaggaggactgggttaacaaagcttaacagccccagcggccca

SEQ ID NO: 44518 - DNA, 60 bp, Artificial
  Synthetic oligonucleotide
gactcgggttcccaactaccaagtgtacatcatggatgaggcccacttcattgacccagc

SEQ ID NO: 44519 - DNA, 54 bp, Artificial
  Synthetic oligonucleotide
cgcacaaccacagcgagcggcaagctggtcactgattggtgttgcaggagctgt

SEQ ID NO: 44520 - DNA, 60 bp, Artificial
  Synthetic oligonucleotide
tcactgcgcacaaccacagcgagcggcaagctggtcactgattggtgttgcaggagctgt

SEQ ID NO: 44521 - DNA, 60 bp, Artificial
  Synthetic oligonucleotide
ggagcattgtgggacgtgccgtcaccaaaagtatatccaaaatgtgagacaaaaccagga

SEQ ID NO: 44522 - DNA, 60 bp, Artificial
  Synthetic oligonucleotide
aaagcagcagacatcacatgggaacagaatgccgagatcaccggaaccagccccaggctt

SEQ ID NO: 44523 - DNA, 60 bp, Artificial
  Synthetic oligonucleotide
gtcactgcgcacaaccacagcgagcggcaagctggtcactgattggtgttgcaggagctg

SEQ ID NO: 44524 - DNA, 60 bp, Artificial
  Synthetic oligonucleotide
aggacgaccgggtcctttcttggataaacccgctcaatgcctggagatttgggcgtgccc

SEQ ID NO: 44525 - DNA, 60 bp, Artificial
  Synthetic oligonucleotide
gccctggtgatggtgttaaccagggcgaaaggactagaggttagaggagaccccgcggtt

SEQ ID NO: 44526 - DNA, 60 bp, Artificial
  Synthetic oligonucleotide
gccctggtaatggtgttaaccagggcgaaaggactagaggttagaggagaccccgcggtt

SEQ ID NO: 44527 - DNA, 60 bp, Artificial
  Synthetic oligonucleotide
ctagccctggtaatggtgttaaccagggcgaaaggactagaggttagaggagaccccgcg

SEQ ID NO: 44528 - DNA, 60 bp, Artificial
  Synthetic oligonucleotide
aggagccccatgcaagattcccgtgattgtggctgatgacctaacggctgcagtgaacaa

SEQ ID NO: 44529 - DNA, 60 bp, Artificial
  Synthetic oligonucleotide
ttagcagagaactgaccagagaaatgtctggtcgaaaagctcagggtaaaaccctgggcg

SEQ ID NO: 44530 - DNA, 60 bp, Artificial
  Synthetic oligonucleotide
ccaaaggggccccatgcaagattcccgtgattgtggcagatgacctaacggctgcggtga

SEQ ID NO: 44531 - DNA, 60 bp, Artificial
  Synthetic oligonucleotide
ttgccttgagatgctacgtggacgagggcatgcccaagacacactttaaccctggcgggg

SEQ ID NO: 44532 - DNA, 60 bp, Artificial
  Synthetic oligonucleotide
cgctgtgatactatcaaagatggcaacaagattggattcaagtggagagaggggtaccac

SEQ ID NO: 44533 - DNA, 60 bp, Artificial
  Synthetic oligonucleotide
caccgctgtgatactatcaaagatggcaacaagattggattcaagtggagagaggggtac

SEQ ID NO: 44534 - DNA, 60 bp, Artificial
  Synthetic oligonucleotide
gggaccctacatggagaagatgtccggcaaacatccatcggtgtattgtgggcatgatac

SEQ ID NO: 44535 - DNA, 60 bp, Artificial
  Synthetic oligonucleotide
aaaacacgcggttgcaactggccactcctcgtgggcgtccaacggactatgtgccgggaa

SEQ ID NO: 44536 - DNA, 60 bp, Artificial
  Synthetic oligonucleotide
tcggggcctgttgtggcaccctggtcttcgactaaggccacctgaaattgctggaatccc

SEQ ID NO: 44537 - DNA, 60 bp, Artificial
  Synthetic oligonucleotide
acccagctccgcggcggactgcagccggggtagaccaaaatccttcgggtgaggtcgggt

SEQ ID NO: 44538 - DNA, 60 bp, Artificial
  Synthetic oligonucleotide
tcagcaactgcgcgcatgggacgctgctttggaacctctgtctttctcccggaccgactg

SEQ ID NO: 44539 - DNA, 60 bp, Artificial
  Synthetic oligonucleotide
agttgtggcggctgcgtgagagactgctggccggagaccggtgagtttgggaccccattc

SEQ ID NO: 44540 - DNA, 60 bp, Artificial
  Synthetic oligonucleotide
gaggtcgctgacttccgtggctcttctggttccccggttctctgtgatgagggtcatgct

SEQ ID NO: 44541 - DNA, 60 bp, Artificial
  Synthetic oligonucleotide
ccatcctgggttgggtattggcctcgctgatagcctggtcgattgcccttctcgcaacca

SEQ ID NO: 44542 - DNA, 60 bp, Artificial
  Synthetic oligonucleotide
acccactggggacctcggggctcgcccctttgttcctggtccgggttggggttgcacatg

SEQ ID NO: 44543 - DNA, 60 bp, Artificial
  Synthetic oligonucleotide
gccctcattgaagcgccttgccagggtactagaggcatgtgtgacagctggtgagaaggc

SEQ ID NO: 44544 - DNA, 60 bp, Artificial
  Synthetic oligonucleotide
gtgggtgtggctccctagcatttgcggtggtgttgcttggggtagtggcgtggtcaagac

SEQ ID NO: 44545 - DNA, 60 bp, Artificial
  Synthetic oligonucleotide
gaccacacccgccgtcgcagcttggtgcttggctgcgtacttctggcctgacgcggtgat

SEQ ID NO: 44546 - DNA, 60 bp, Artificial
  Synthetic oligonucleotide
gaggataaatcggtcacccggttcttctcgcttggcctcaccgttgctgatgtggcgagc

SEQ ID NO: 44547 - DNA, 60 bp, Artificial
  Synthetic oligonucleotide
gaagatgacaagcgctgtgaaacgctgacctccttctcatattgttggtcgggagtgccc

SEQ ID NO: 44548 - DNA, 60 bp, Artificial
  Synthetic oligonucleotide
ggtcagtgctgcttgtgcacgcattggcctgaagggcgtgtcgctgcttattgctggtga

SEQ ID NO: 44549 - DNA, 60 bp, Artificial
  Synthetic oligonucleotide
tctgtgatgagtgccactcccacgatcccactgtcttgctgggcataggacgcgtaaggg

SEQ ID NO: 44550 - DNA, 60 bp, Artificial
  Synthetic oligonucleotide
aacagagagcaccgacgggcctgaaacatcgtcagagccatcctcgcaggatgactgtcc

SEQ ID NO: 44551 - DNA, 60 bp, Artificial
  Synthetic oligonucleotide
ccatcctatcatgcctcccttgacactgctccgttttgctcgacctggctggcagagtgt

SEQ ID NO: 44552 - DNA, 60 bp, Artificial
  Synthetic oligonucleotide
ccggctttgccttggggcttgtattgtattcgggtaacactgctggggcaacgacatggc

SEQ ID NO: 44553 - DNA, 60 bp, Artificial
  Synthetic oligonucleotide
gagcttagcatgcagcgacggggccggacggggagaggaagatcaggtcgttactactat

SEQ ID NO: 44554 - DNA, 59 bp, Artificial
  Synthetic oligonucleotide
ggaggctgggaaggtgctatccgacatgaaactcccgggcctctctgtctaccggaaaa

SEQ ID NO: 44555 - DNA, 60 bp, Artificial
  Synthetic oligonucleotide
tacctaatggggctaggagtgggcggaaacgcacaggtgcgcctagcgtcggctcttttg

SEQ ID NO: 44556 - DNA, 60 bp, Artificial
  Synthetic oligonucleotide
tccggacaatgtggggagaagggttgacagtgtgaccttttggcgtggaccccgggttca

SEQ ID NO: 44557 - DNA, 60 bp, Artificial
  Synthetic oligonucleotide
tgttggctgcagtgcaagctaaggccacgacagcgcacgcttggctggctgggtgttaca

SEQ ID NO: 44558 - DNA, 60 bp, Artificial
  Synthetic oligonucleotide
cacgatgtctctgtggctgtgtgatcactggagaggttctcaatgggaaattgcaggacg

SEQ ID NO: 44559 - DNA, 60 bp, Artificial
  Synthetic oligonucleotide
gagcgcctccagttaacaactgcttcttgctgggcactgaggtcagtgaggagttagggg

SEQ ID NO: 44560 - DNA, 60 bp, Artificial
  Synthetic oligonucleotide
tgaaacacctgaagggaaaatggcggtacatgaccgtctcctggacattcaaaaggggac

SEQ ID NO: 44561 - DNA, 60 bp, Artificial
  Synthetic oligonucleotide
cgtaaaatccacccctggcagggttatagcctgatggtggtaatccaccgctgccgcagg

SEQ ID NO: 44562 - DNA, 60 bp, Artificial
  Synthetic oligonucleotide
tagacgtcctgttggcctttgtggcggccttactcctcttggagcagcgcctggttatgc

SEQ ID NO: 44563 - DNA, 60 bp, Artificial
  Synthetic oligonucleotide
ggtgtggatggtggtgacagggttggcaggtcgtaaatcccggccattctggtagcacct

SEQ ID NO: 44564 - DNA, 56 bp, Artificial
  Synthetic oligonucleotide
cacgcctatcccctccccaacctgacatgtgctgttgagtgtgagatggagtgggg

SEQ ID NO: 44565 - DNA, 60 bp, Artificial
  Synthetic oligonucleotide
tgtatgggatctctgggaatgggtgatgcgcctcctgcgtcgatgcgtgaataggctgcg

SEQ ID NO: 44566 - DNA, 60 bp, Artificial
  Synthetic oligonucleotide
cacgtacttccaggaggctgactattgtgacagagtatctgccctactgcgacgcctcag

SEQ ID NO: 44567 - DNA, 60 bp, Artificial
  Synthetic oligonucleotide
cgtgcgtcgctcctcttcttataagttgatgcgccaacaagttctctccgcagcggtgtc

SEQ ID NO: 44568 - DNA, 60 bp, Artificial
  Synthetic oligonucleotide
tcacaaactgttgcgcagcgagggacgtcgcattctgccttgaaggtgggtgtgtggtgg

SEQ ID NO: 44569 - DNA, 60 bp, Artificial
  Synthetic oligonucleotide
ggcacacccgctgatcctgtctggtgccaagtgcacgggaattactatctgttccctttg

SEQ ID NO: 44570 - DNA, 60 bp, Artificial
  Synthetic oligonucleotide
ctgccgacgcaaagacagtgactgaggcggtgctggccgtccaaacagcgtgcgattggt

SEQ ID NO: 44571 - DNA, 60 bp, Artificial
  Synthetic oligonucleotide
cctcacggagtatggggacttgtctcaacggcatgctcttcactacgtaccatggggcaa

SEQ ID NO: 44572 - DNA, 60 bp, Artificial
  Synthetic oligonucleotide
atctgtcaatgatttgcctcccgggttcgtccccactgcacctgtggtcatcaggcggtg

SEQ ID NO: 44573 - DNA, 60 bp, Artificial
  Synthetic oligonucleotide
ccctttccactggttattctggcaacttcgattcggtgactgactgtggattggtggtgg

SEQ ID NO: 44574 - DNA, 60 bp, Artificial
  Synthetic oligonucleotide
gggagcaagaagacaccctgtgccatatgtgtagacgccaaatgtttcgatagctccatc

SEQ ID NO: 44575 - DNA, 60 bp, Artificial
  Synthetic oligonucleotide
attagcaccctgcacatgccaaccctcatcggtttgggtcatccgagctgatggggcgct

SEQ ID NO: 44576 - DNA, 60 bp, Artificial
  Synthetic oligonucleotide
tcctgaacaagtcagagcccttggtcggtattacgcggaaggtcctatggtttcccctga

SEQ ID NO: 44577 - DNA, 60 bp, Artificial
  Synthetic oligonucleotide
ccggacttgacagcttcacttttgagactttacgacgactgcccatacaccgcagccgtt

SEQ ID NO: 44578 - DNA, 60 bp, Artificial
  Synthetic oligonucleotide
agggtcatgctgtggggatgttggtggccgtgctccatgtgggaaatagggttaccgctg

SEQ ID NO: 44579 - DNA, 60 bp, Artificial
  Synthetic oligonucleotide
atcctgcttttgttgtggtggtggctaaatcaactggctgccctcggagcagttgtgggg

SEQ ID NO: 44580 - DNA, 60 bp, Artificial
  Synthetic oligonucleotide
tgatctatgcgtcgtacacaggatccttggtggtggttactgattgggaagtgcgagggg

SEQ ID NO: 44581 - DNA, 60 bp, Artificial
  Synthetic oligonucleotide
tcagtagcatgtgcggcgagttggcaatcccagagggcgggcggggcgtacacggtagga

SEQ ID NO: 44582 - DNA, 60 bp, Artificial
  Synthetic oligonucleotide
atagagacccgacgccagtcacgtcgttaaacagagtgcctttccccatcgcaacgccgg

SEQ ID NO: 44583 - DNA, 60 bp, Artificial
  Synthetic oligonucleotide
ggggtcacttgtcggaggtactactactttctttagtggtgctgtccgacttcgcaccgg

SEQ ID NO: 44584 - DNA, 60 bp, Artificial
  Synthetic oligonucleotide
ggggccacttgtcggaggtactactactttctttagtggtgctgtccgacttcgcaccgg

SEQ ID NO: 44585 - DNA, 60 bp, Artificial
  Synthetic oligonucleotide
cgtcatcagtctggaatgtaggcaaatacgtgtgtgttagaccagactggtggccatatg

SEQ ID NO: 44586 - DNA, 60 bp, Artificial
  Synthetic oligonucleotide
ccgtggaagctgtacgcacggtgtagcagactagtggttagaggagacccctcccatgac

SEQ ID NO: 44587 - DNA, 57 bp, Artificial
  Synthetic oligonucleotide
ccccgctcaacaacaaacagcatattgacgctgggagagaccagagatcctgctgtc

SEQ ID NO: 44588 - DNA, 60 bp, Artificial
  Synthetic oligonucleotide
tcactccatagttactctccaggtgaaatcaatagggtggcttcatgcctcaggaagctt

SEQ ID NO: 44589 - DNA, 60 bp, Artificial
  Synthetic oligonucleotide
tttgggtaaggtcatcgacaccctcacatgcggcttcgccgacctcatggggtacatccc

SEQ ID NO: 44590 - DNA, 60 bp, Artificial
  Synthetic oligonucleotide
gagtaaatttggtgacaggtcatgatgcctatgacagtatcattagtaattcagtaggtc

SEQ ID NO: 44591 - DNA, 60 bp, Artificial
  Synthetic oligonucleotide
gagtaaacttggtgacaggtcatgatgcctatgacagtatcatcagtaattcagtgggtc

SEQ ID NO: 44592 - DNA, 60 bp, Artificial
  Synthetic oligonucleotide
gagtaaatttggtgacaggtcatgatgcctatgacagtatcatcagtaattcagtaggtc

SEQ ID NO: 44593 - DNA, 60 bp, Artificial
  Synthetic oligonucleotide
gagtaaacttggtgacaggtcatgatgcctatgacagtatcatcagtaattcagtaggtc

SEQ ID NO: 44594 - DNA, 60 bp, Artificial
  Synthetic oligonucleotide
gcctttagatatgagtttacacgacatttcatagactactgtaatcgatgttacggtgtt

SEQ ID NO: 44595 - DNA, 60 bp, Artificial
  Synthetic oligonucleotide
catgaccttgataatctaacaaatcgtgaacttttgctgttgatggcacggaagatgctc

SEQ ID NO: 44596 - DNA, 60 bp, Artificial
  Synthetic oligonucleotide
agagatcatgaccttgataatctaacaaatcgtgaacttttgctactgatggctcgaaaa

SEQ ID NO: 44597 - DNA, 60 bp, Artificial
  Synthetic oligonucleotide
catgaccttgataatctaacaaatcgtgaactcttgctgttgatggcacggaagatgctc

SEQ ID NO: 44598 - DNA, 60 bp, Artificial
  Synthetic oligonucleotide
gtaatagggatcatgaccttgataatctaacaaatcgtgaacttttgctattgatggccc

SEQ ID NO: 44599 - DNA, 57 bp, Artificial
  Synthetic oligonucleotide
caacaatggaccactgctggccatatctggcatccttcatcaactgagggttgaaaa

SEQ ID NO: 44600 - DNA, 52 bp, Artificial
  Synthetic oligonucleotide
aaaatcccaacaatggaccactgctggccatatctggcatccttcaccaact

SEQ ID NO: 44601 - DNA, 60 bp, Artificial
  Synthetic oligonucleotide
ggaccactgctggccatatctggcatccttcaccaactgagggtcgagaaagtcccagag

SEQ ID NO: 44602 - DNA, 57 bp, Artificial
  Synthetic oligonucleotide
caacaatggaccactgctggccatatctggcatccttcatcaactgagggtcgaaaa

SEQ ID NO: 44603 - DNA, 60 bp, Artificial
  Synthetic oligonucleotide
gaatcctaacaatggaccactgctggccatatctggcatccttcatcaactgagggttga

SEQ ID NO: 44604 - DNA, 60 bp, Artificial
  Synthetic oligonucleotide
ctaaatgtaaaactgttcatcatattcaaggtcaaaaccctcatgcacaggggattgccc

SEQ ID NO: 44605 - DNA, 60 bp, Artificial
  Synthetic oligonucleotide
ggttcttgaactcagtgaggaaacgttctccaagccaaacctttcagctaaggatttagc

SEQ ID NO: 44606 - DNA, 60 bp, Artificial
  Synthetic oligonucleotide
ggatttcgcttcctgccgacatgttctcagtaaaagagggtatgatgaagaaaagaggag

SEQ ID NO: 44607 - DNA, 60 bp, Artificial
  Synthetic oligonucleotide
cagagtgtatgaattgtgcagatttaaacttgggttttgccttatgcttcacaggtggtc

SEQ ID NO: 44608 - DNA, 60 bp, Artificial
  Synthetic oligonucleotide
aacttgcatttccaaattccatcaacccacaccaacaactcctcagatcagagcccggcg

SEQ ID NO: 44609 - DNA, 60 bp, Artificial
  Synthetic oligonucleotide
ctcccatctgggctttgagggtgattttggcagccggattgcaggatcagttgttagacc

SEQ ID NO: 44610 - DNA, 60 bp, Artificial
  Synthetic oligonucleotide
gctatattcgatgatctacaaggaacacttgccagtattggaactgccttcgaacgtgct

SEQ ID NO: 44611 - DNA, 60 bp, Artificial
  Synthetic oligonucleotide
cagacaggaatttaactccaggactcaactccgtcataaaacgtaatcactttccttcac

SEQ ID NO: 44612 - DNA, 60 bp, Artificial
  Synthetic oligonucleotide
ccgcgaacccaatgacaaccaccattgccccaagtccaaccatgacaagcgaggttgata

SEQ ID NO: 44613 - DNA, 60 bp, Artificial
  Synthetic oligonucleotide
caagttgaaatcattacgatggatgctgaaacaacagagaacttaaacaggtcccaactc

SEQ ID NO: 44614 - DNA, 60 bp, Artificial
  Synthetic oligonucleotide
aggttggcataaggtcattaacaccagcatagtcggctcgaccaagactgtaagcgggtc

SEQ ID NO: 44615 - DNA, 60 bp, Artificial
  Synthetic oligonucleotide
gcagtgcagaagcccacgagcctccccacaaatcctcgaacgagccagctgaaacatcac

SEQ ID NO: 44616 - DNA, 60 bp, Artificial
  Synthetic oligonucleotide
ccggcctttcttggaagcgagagtcaaccttagtgtcagtgaagtcctgcaaatgacacc

SEQ ID NO: 44617 - DNA, 60 bp, Artificial
  Synthetic oligonucleotide
agcaactccaacaatatgctgagtccagagaactcgacagcctaggcctagacgatcagg

SEQ ID NO: 44618 - DNA, 60 bp, Artificial
  Synthetic oligonucleotide
gaaaactcaagaccataatgatttctcaagaggggatggaacacttacagaacccgtgcg

SEQ ID NO: 44619 - DNA, 60 bp, Artificial
  Synthetic oligonucleotide
cctcatgccatatggctacccagcatacccagtacccggatgcacgtttatcttcaccta

SEQ ID NO: 44620 - DNA, 60 bp, Artificial
  Synthetic oligonucleotide
agcgttccttcccgggtttgttcttccaccagtccagcttccccagtatttcacatttga

SEQ ID NO: 44621 - DNA, 60 bp, Artificial
  Synthetic oligonucleotide
ggcgggacatctggagatcgagggctgtctgatgctgctcgactgtttcttcggacagca

SEQ ID NO: 44622 - DNA, 60 bp, Artificial
  Synthetic oligonucleotide
gaatcaagcagaggcaacagactcacagcttacgcctagatgactaatattaaggagttt

SEQ ID NO: 44623 - DNA, 60 bp, Artificial
  Synthetic oligonucleotide
gctttgcaagcacaagtccagcgaggcgtgtactggttgagtcacatcgcacagtatgct

SEQ ID NO: 44624 - DNA, 60 bp, Artificial
  Synthetic oligonucleotide
caagaaggtcaatacaacaggcaccgaggcccagaacgtacgaccgccaatcgaagactc

SEQ ID NO: 44625 - DNA, 60 bp, Artificial
  Synthetic oligonucleotide
ctcgctcattatctcgggaccctaatcaggttgatcgtaggcagcctcgaagtgcatccc

SEQ ID NO: 44626 - DNA, 60 bp, Artificial
  Synthetic oligonucleotide
ctgaatcacccatctgatgtcaccatatccaaatgttgtgctagtcgcatttaaacatgc

SEQ ID NO: 44627 - DNA, 60 bp, Artificial
  Synthetic oligonucleotide
gactttattgacaatcccctaccagaccacggagatgatcttaatctatggacaggttgg

SEQ ID NO: 44628 - DNA, 60 bp, Artificial
  Synthetic oligonucleotide
tattggacagctgttgatgagggggcagcagtaggattggcatggattccatatttcgga

SEQ ID NO: 44629 - DNA, 60 bp, Artificial
  Synthetic oligonucleotide
caacgcctacgcgatgcagaaatcaagctaattgaacgccttaccgggttaatgcgattt

SEQ ID NO: 44630 - DNA, 60 bp, Artificial
  Synthetic oligonucleotide
tcgtcgaagccacgttggtggtgcttgcagctgagaacaactccagagattgtaggtaga

SEQ ID NO: 44631 - DNA, 60 bp, Artificial
  Synthetic oligonucleotide
gctcaggctcgcttttcaggactcctaattgtcaaaaccgttcttgatcatattctgcag

SEQ ID NO: 44632 - DNA, 60 bp, Artificial
  Synthetic oligonucleotide
gctccggaagaaggacggtgtcaatcggctcgaggaattgcttcctgctgcaacgagtgg

SEQ ID NO: 44633 - DNA, 60 bp, Artificial
  Synthetic oligonucleotide
gctggttccaacggattcccctccagtggtttcagtgctcactgcaggacggacagagga

SEQ ID NO: 44634 - DNA, 60 bp, Artificial
  Synthetic oligonucleotide
cctgggctctcactccatcccaagcttcgtccaattctcctgccggggaagacaggaaag

SEQ ID NO: 44635 - DNA, 60 bp, Artificial
  Synthetic oligonucleotide
caggcatcatggcaccacaccagtgatgattttggagagaatgctaccgttcgagggagt

SEQ ID NO: 44636 - DNA, 60 bp, Artificial
  Synthetic oligonucleotide
ctcaacattgctctccagataccttgtgaaagttctagtgtcgtagtctcaggtcttgcc

SEQ ID NO: 44637 - DNA, 60 bp, Artificial
  Synthetic oligonucleotide
gttaatcttagcaatcgagaatatcctcctgaaggcccgagttcgtaccgagggcactta

SEQ ID NO: 44638 - DNA, 60 bp, Artificial
  Synthetic oligonucleotide
cagaaaattagttgcacggtggatttggcccagattttgcgtgagtatacatggtcacac

SEQ ID NO: 44639 - DNA, 57 bp, Artificial
  Synthetic oligonucleotide
aggaagcctatcctccatggctcaccgagaaagaacgactggacaaagagaatcgct

SEQ ID NO: 44640 - DNA, 60 bp, Artificial
  Synthetic oligonucleotide
tctaagcgcccaggaccagtcaagttctcattacttcatgagtctgccttcaaacctttc

SEQ ID NO: 44641 - DNA, 60 bp, Artificial
  Synthetic oligonucleotide
ccaggacaccgagtggtaaacgtctccaaatattaggttatcttgaagggaccaggactc

SEQ ID NO: 44642 - DNA, 60 bp, Artificial
  Synthetic oligonucleotide
gtagcggagaaacacgctctttcacaactcattttctcacttaccctcagattggccttc

SEQ ID NO: 44643 - DNA, 60 bp, Artificial
  Synthetic oligonucleotide
aaggcaagccacaaccttagatggaacctcagccagactattgaactattgacgctgttg

SEQ ID NO: 44644 - DNA, 60 bp, Artificial
  Synthetic oligonucleotide
cccaatgtgcactcatacagataaccaaaagggtcccaatctttcaggatgtgccgcccc

SEQ ID NO: 44645 - DNA, 60 bp, Artificial
  Synthetic oligonucleotide
ggcgcggagtgttaccaacggctcctccagcatataatgatattgcataccctatgagca

SEQ ID NO: 44646 - DNA, 60 bp, Artificial
  Synthetic oligonucleotide
ggcataatagggctcatcttcacctgacagagtgctgtactaaagaggtcccggcccagt

SEQ ID NO: 44647 - DNA, 60 bp, Artificial
  Synthetic oligonucleotide
ctggcatgacctgtctattttggctcgacgtgggcgtctgaatcgcgggaacaaccgttc

SEQ ID NO: 44648 - DNA, 63 bp, Artificial
  Synthetic oligonucleotide
ggggataaataatactttatatttctgattgtggattgacccattctgcttaaaatgcttcgc

SEQ ID NO: 44649 - DNA, 60 bp, Artificial
  Synthetic oligonucleotide
ccggtgaacacaacagatgattccacaagctactacatgaccctgacactcagctacgag

SEQ ID NO: 44650 - DNA, 60 bp, Artificial
  Synthetic oligonucleotide
cgggtctagacaagacgacgacaatgaaataccgttccctgggcctataagcaacaaccc

SEQ ID NO: 44651 - DNA, 60 bp, Artificial
  Synthetic oligonucleotide
gaatgcctccctctccctcccgacggtgtacgaggattccctagatgtcgctatgtccac

SEQ ID NO: 44652 - DNA, 60 bp, Artificial
  Synthetic oligonucleotide
gctcaagtctgtggggctgaatctggaaggaaatggaattgcaaccgatgtcccatcagc

SEQ ID NO: 44653 - DNA, 60 bp, Artificial
  Synthetic oligonucleotide
ggatacattaactatgctagtgaatgccaccagtcgtcagaatgctgcaatcgaggccct

SEQ ID NO: 44654 - DNA, 65 bp, Artificial
  Synthetic oligonucleotide
cttcggtgtgcaattgtcaagagttccatttagtaataatgattcttaaaacaatctactatcgc

SEQ ID NO: 44655 - DNA, 60 bp, Artificial
  Synthetic oligonucleotide
ctttgctctaaattcacagaaagaaaaggtcgtttcctcacacagatgcgtttatcagta

SEQ ID NO: 44656 - DNA, 56 bp, Artificial
  Synthetic oligonucleotide
tcgccttccgatatgaatttacacggcatttcatagactactgtaatcgatgttat

SEQ ID NO: 44657 - DNA, 60 bp, Artificial
  Synthetic oligonucleotide
gcgctgatcccacttgtaatagagatcatgaccttgataatctaacaaatcgtgaacttt

SEQ ID NO: 44658 - DNA, 60 bp, Artificial
  Synthetic oligonucleotide
cggagaccgagctagcatcgaaaaggccctgagacaagtaacagtgcatcaggaacaagg

SEQ ID NO: 44659 - DNA, 60 bp, Artificial
  Synthetic oligonucleotide
ctaaatgtaagcgatattggatcttacgactttccgactattgctgcgtggactttagga

SEQ ID NO: 44660 - DNA, 60 bp, Artificial
  Synthetic oligonucleotide
tagactatcagacagtgctcaacttcctgcccactcactactcaggcaatatagttcaca

SEQ ID NO: 44661 - DNA, 60 bp, Artificial
  Synthetic oligonucleotide
acgatgggctttcaggacaggtgttcctcccaagaacgttgagtatacggaaggagaaga

SEQ ID NO: 44662 - DNA, 60 bp, Artificial
  Synthetic oligonucleotide
ctccagaagactgagattacacacagtcagacattggccgtcctcagccagaaacgagag

SEQ ID NO: 44663 - DNA, 60 bp, Artificial
  Synthetic oligonucleotide
gccacactaccatgtttactggagcaattcaatgtaaagtgggtcaacttgtctgaagac

SEQ ID NO: 44664 - DNA, 60 bp, Artificial
  Synthetic oligonucleotide
ccggacaacagatcataatcactcgagttaacatggggttcttagtagaagttaggagga

SEQ ID NO: 44665 - DNA, 60 bp, Artificial
  Synthetic oligonucleotide
gattcagaatgcaacagcctcgtgggagaagccgaaatcgtagccaccaagttgcactat

SEQ ID NO: 44666 - DNA, 60 bp, Artificial
  Synthetic oligonucleotide
gcaaacaccccacaaattcttctccggattctagtccgacaacccgccctcctatatact

SEQ ID NO: 44667 - DNA, 60 bp, Artificial
  Synthetic oligonucleotide
tgctcaggaaaagagacaggatcccatacagcatccagccgtgagctcccaagatccctt

SEQ ID NO: 44668 - DNA, 60 bp, Artificial
  Synthetic oligonucleotide
gagttgaggatttggagtgtgcaggaggacgatttggcggcagggcttagctggatacca

SEQ ID NO: 44669 - DNA, 60 bp, Artificial
  Synthetic oligonucleotide
ttcattttctgaaccctctctacatgcgagctctatctcttctagtcaagaagtggtcaa

SEQ ID NO: 44670 - DNA, 60 bp, Artificial
  Synthetic oligonucleotide
aggcaaactcggaaaggcaatctgcctagccgaaggggaagggagtggcgctcgactact

SEQ ID NO: 44671 - DNA, 60 bp, Artificial
  Synthetic oligonucleotide
gcgaaatgacaacaaaagtccatgagatcgagcgtcaactacatgatatcaccccagttg

SEQ ID NO: 44672 - DNA, 60 bp, Artificial
  Synthetic oligonucleotide
tgattaaagatgtcttcatcgaaaggtacaacacgtgggagatctgtgctcgcgcttggg

SEQ ID NO: 44673 - DNA, 60 bp, Artificial
  Synthetic oligonucleotide
cccttgttgaagagtaccaaaaccctgtctcagcaaaagagcttcaagcggattggcctg

SEQ ID NO: 44674 - DNA, 60 bp, Artificial
  Synthetic oligonucleotide
gcaacacccgactcaatatccagatgcaagattatcttctcccataattttagatcagtg

SEQ ID NO: 44675 - DNA, 60 bp, Artificial
  Synthetic oligonucleotide
cggaaacaccatgcaccctgcggtttctgtacacccaaacctgccgcctattgtcctacc

SEQ ID NO: 44676 - DNA, 60 bp, Artificial
  Synthetic oligonucleotide
caaggttcactagccagtattggcacatcatttgagagaggggcaagcgagacacggcat

SEQ ID NO: 44677 - DNA, 60 bp, Artificial
  Synthetic oligonucleotide
ggctggggtctaggtggcaaatggtggacatctgactggggtgttctcaccaatttgggc

SEQ ID NO: 44678 - DNA, 60 bp, Artificial
  Synthetic oligonucleotide
cccgacatgctgtaactgagcacaatggaaccgacccaacaacacaaccagcaacgctcc

SEQ ID NO: 44679 - DNA, 60 bp, Artificial
  Synthetic oligonucleotide
cccagcagaccagctatcaaatcaacatggtataactccgaattatgtgggcgacttgaa

SEQ ID NO: 44680 - DNA, 60 bp, Artificial
  Synthetic oligonucleotide
gcaggactgtggatcgccatctctttccaaagggctttcaaaggacaagcaggaacaagc

SEQ ID NO: 44681 - DNA, 60 bp, Artificial
  Synthetic oligonucleotide
gcactcagtatgcataacacatgttgatcacgaatgtattggctgtgagagacggttatt

SEQ ID NO: 44682 - DNA, 60 bp, Artificial
  Synthetic oligonucleotide
cagtgacttttatagccctcctcactgcgtgacagaaaataaccgaaataacccacctga

SEQ ID NO: 44683 - DNA, 60 bp, Artificial
  Synthetic oligonucleotide
gcatcgactgactggtaccaacctaatatcttcaaggaggctattcaaggacacacacat

SEQ ID NO: 44684 - DNA, 60 bp, Artificial
  Synthetic oligonucleotide
ggcatgatctctccatcctcacccgtcgagggagaatgaaccgaggaaatgtgcgctcca

SEQ ID NO: 44685 - DNA, 60 bp, Artificial
  Synthetic oligonucleotide
caattcctctactttatgatggctacccaacatacacaatatcctgatgcaagattgtct

SEQ ID NO: 44686 - DNA, 60 bp, Artificial
  Synthetic oligonucleotide
gtcgaagttcaggaaccagataaatctgcgatggatatacgacaccctggtcctgtcaag

SEQ ID NO: 44687 - DNA, 60 bp, Artificial
  Synthetic oligonucleotide
ccagaatggctaaagccacaggccggtacaacttggtaacaccaaaacgggagctagagc

SEQ ID NO: 44688 - DNA, 60 bp, Artificial
  Synthetic oligonucleotide
cctacaacatggataaacgggtgagaggttcatgggccctgggaggacaatctgaggttg

SEQ ID NO: 44689 - DNA, 60 bp, Artificial
  Synthetic oligonucleotide
attatcctgactacgaggattcggctgaaggcaccacaggagatcttgatctcttcaatt

SEQ ID NO: 44690 - DNA, 60 bp, Artificial
  Synthetic oligonucleotide
cgggagcacgctggctggtgttaatgtaggggagcaatatcagcaactgcgtgaggctgc

SEQ ID NO: 44691 - DNA, 60 bp, Artificial
  Synthetic oligonucleotide
aaccaacagtctgaagtccaaactcccatttgggccttgagggtaattcttgccgccggg

SEQ ID NO: 44692 - DNA, 60 bp, Artificial
  Synthetic oligonucleotide
ccgaatcgcaatttcaactttcttgagctttgttgaggagtgggttatctttaggaaggc

SEQ ID NO: 44693 - DNA, 60 bp, Artificial
  Synthetic oligonucleotide
cattgactatgtttatatctgcttttctccatgtagcattgcaactttcctgtgagagct

SEQ ID NO: 44694 - DNA, 60 bp, Artificial
  Synthetic oligonucleotide
ctgacgaattgttgtacgagggaagtaccggcccaatacttaacatacacaaccacgcta

SEQ ID NO: 44695 - DNA, 60 bp, Artificial
  Synthetic oligonucleotide
cccctcgttagagtgaatcgacttggtcagggaataccggatcacccactcagattgctc

SEQ ID NO: 44696 - DNA, 60 bp, Artificial
  Synthetic oligonucleotide
gcttagtcaattatgtgagagtcatcttaggagggaaaacttaggacaagaccaagctga

SEQ ID NO: 44697 - DNA, 60 bp, Artificial
  Synthetic oligonucleotide
gaccaccaacttgaaagcctaaccgaccgggagctcctgcttcttatagcacggaagacc

SEQ ID NO: 44698 - DNA, 60 bp, Artificial
  Synthetic oligonucleotide
ggagaggtcgacatagacctaagaagactataggtgcaactaacgcgacaacagctccac

SEQ ID NO: 44699 - DNA, 60 bp, Artificial
  Synthetic oligonucleotide
gggctgaaaattgctacaatcttgaaataaagaagccggacgggagcgaatgcttacccc

SEQ ID NO: 44700 - DNA, 60 bp, Artificial
  Synthetic oligonucleotide
cctccagtaaagaaatcaaatcttatctatagcaactcaatcgacttttggaaggctagc

SEQ ID NO: 44701 - DNA, 60 bp, Artificial
  Synthetic oligonucleotide
cgacctactggtgatgaccactggacgcgcaactgccactgctgcagcaacagaagcata

SEQ ID NO: 44702 - DNA, 60 bp, Artificial
  Synthetic oligonucleotide
tgccgtgttgcagctgcctttcatacatatttctctgttcggatcttacaacatcatcac

SEQ ID NO: 44703 - DNA, 60 bp, Artificial
  Synthetic oligonucleotide
caccagggccacgggtaaatgcaatcccaacttacactactggactgcacaagaacaaca

SEQ ID NO: 44704 - DNA, 60 bp, Artificial
  Synthetic oligonucleotide
gggtgttgtgactaacagcactttagaagtaacagagattgaccagctagtctgcaagga

SEQ ID NO: 44705 - DNA, 58 bp, Artificial
  Synthetic oligonucleotide
aatatgtttcccgaaggtttcaggtctagttcagtctaattctaactgcaccaaaggc

SEQ ID NO: 44706 - DNA, 60 bp, Artificial
  Synthetic oligonucleotide
caagtcgttttaacacccttctgattgctgagttagccaggttggaagatccagtgtccg

SEQ ID NO: 44707 - DNA, 60 bp, Artificial
  Synthetic oligonucleotide
ggtgatatcggctgtgcgtcggcaaaccaatgctattgaatcactagaaagtcgaatagc

SEQ ID NO: 44708 - DNA, 60 bp, Artificial
  Synthetic oligonucleotide
gttgaacaaacctgttgggatgcagttttcgagcctaacgttttgggctacagtccacct

SEQ ID NO: 44709 - DNA, 60 bp, Artificial
  Synthetic oligonucleotide
cgccgggattgaattcctacattaggcgaaatcaattcccaccacttccaatgatcaaag

SEQ ID NO: 44710 - DNA, 60 bp, Artificial
  Synthetic oligonucleotide
ctgatagtagcaattcatcaacagatcccattagcagcggtgaaacaagatcctttacaa

SEQ ID NO: 44711 - DNA, 60 bp, Artificial
  Synthetic oligonucleotide
gtcaaggttctgaaagtgaagctctcccaatcaaccccgaaaagggatctgcactggaag

SEQ ID NO: 44712 - DNA, 60 bp, Artificial
  Synthetic oligonucleotide
gcagaagacaatgcagccagagtagctgctagcttggccaaagtcacaagtgcctgtggg

SEQ ID NO: 44713 - DNA, 60 bp, Artificial
  Synthetic oligonucleotide
cagactcccttgaagaagcctacccgccgtggttgagtgagaaggaggccttagagaagg

SEQ ID NO: 44714 - DNA, 60 bp, Artificial
  Synthetic oligonucleotide
gagggccatggtttcaggtttgaggtccgagaaaaggagaatgtgcaccgtctggatgaa

SEQ ID NO: 44715 - DNA, 60 bp, Artificial
  Synthetic oligonucleotide
gctcactgggaagaaaatgagtcagaagaatggacagcctataattcctgtcttactccc

SEQ ID NO: 44716 - DNA, 60 bp, Artificial
  Synthetic oligonucleotide
gctctgccaattttcatctccttaagatatatgattttgttcctgcgagataaggttatc

SEQ ID NO: 44717 - DNA, 60 bp, Artificial
  Synthetic oligonucleotide
gaaccatggttgatactaccatatattgtcgcttcactgggattgtttcatcaatgcatt

SEQ ID NO: 44718 - DNA, 60 bp, Artificial
  Synthetic oligonucleotide
gctgcaacatggacagatgagactccgagcaacctttcaggagcactccgtccagggctc

SEQ ID NO: 44719 - DNA, 66 bp, Artificial
  Synthetic oligonucleotide
cgattatttgtaatcatatcaatcctaaaactttgaaagtggtcatcttaaaagtcttcctcagcg

SEQ ID NO: 44720 - DNA, 60 bp, Artificial
  Synthetic oligonucleotide
cttcaacgcccgtcatgagccgtttcgcagccgatattttctcacgaacaccaagcggga

SEQ ID NO: 44721 - DNA, 60 bp, Artificial
  Synthetic oligonucleotide
gagctgcggacatataccatactcaataggaaggccatagatttccttctgcgacgatgg

SEQ ID NO: 44722 - DNA, 60 bp, Artificial
  Synthetic oligonucleotide
ccacaaatatggagaggggtcgtgagcgcgggagatcaaggaattcacgtgccgaccagc

SEQ ID NO: 44723 - DNA, 60 bp, Artificial
  Synthetic oligonucleotide
ctcggagtacgacttcatccactggccaggacagcaaaagtgaagaatgaggtcagttca

SEQ ID NO: 44724 - DNA, 60 bp, Artificial
  Synthetic oligonucleotide
cgtcgagaattacaaagggaagaatctccgaccgggccaccaggaagtattcggacctgg

SEQ ID NO: 44725 - DNA, 56 bp, Artificial
  Synthetic oligonucleotide
tctggacaggccccacacgcctcagttccttttccagctgaatgataccattcacc

SEQ ID NO: 44726 - DNA, 60 bp, Artificial
  Synthetic oligonucleotide
gtggcctcagcattcatcttggaggcaactgtcaatgtgatctcggggcccaaagtcctc

SEQ ID NO: 44727 - DNA, 60 bp, Artificial
  Synthetic oligonucleotide
gggttactgtgccgactgcaccacctgcatatgctgacattggctatcctatgagcatgc

SEQ ID NO: 44728 - DNA, 60 bp, Artificial
  Synthetic oligonucleotide
ctgccatgtatacctgagcagttccaaaccacatggttaaaaccttacgagcaatgtgtg

SEQ ID NO: 44729 - DNA, 60 bp, Artificial
  Synthetic oligonucleotide
tgcaaccaatgctatggggttcgcaatgtctttgattggatgcacttcctaattccgcaa

SEQ ID NO: 44730 - DNA, 60 bp, Artificial
  Synthetic oligonucleotide
ctcaagaactgaggacaaaataggtcagcccgctattaagccgaggtgcccatcagctgc

SEQ ID NO: 44731 - DNA, 60 bp, Artificial
  Synthetic oligonucleotide
ccctcgctcctttatggccaaccgcatgagtaacacagcaacgcgcttgatggtatctac

SEQ ID NO: 44732 - DNA, 60 bp, Artificial
  Synthetic oligonucleotide
ccagtgtgcattaatccagataacaaaacggatccctgctttccaagatgcctctcctcc

SEQ ID NO: 44733 - DNA, 60 bp, Artificial
  Synthetic oligonucleotide
gctttcatcaacaatgccacccactccctcaccacaaccaagcacgccacagcaaggagg

SEQ ID NO: 44734 - DNA, 60 bp, Artificial
  Synthetic oligonucleotide
gcaagggctttcatcaacaatgccacccactccctcaccacaaccaagcacgccacagca

SEQ ID NO: 44735 - DNA, 60 bp, Artificial
  Synthetic oligonucleotide
ggtaccgtcacatgaatctgacttctactaataaatattggacaagtagcaacggaacgc

SEQ ID NO: 44736 - DNA, 60 bp, Artificial
  Synthetic oligonucleotide
ctcgaggcaaggacaagggtaccgtcacatgaatctgacttctactaataaatattggac

SEQ ID NO: 44737 - DNA, 60 bp, Artificial
  Synthetic oligonucleotide
ctttctactcacaaggtggggaggaacatgcaaagtgcttggacctgattgttgcatcgg

SEQ ID NO: 44738 - DNA, 60 bp, Artificial
  Synthetic oligonucleotide
gacacgctattgactttctactcacaaggtggggaggaacatgcaaagtgcttggacctg

SEQ ID NO: 44739 - DNA, 60 bp, Artificial
  Synthetic oligonucleotide
ggggaggaacatgcaaagtgcttggacctgattgttgcatcgggatagaagacttgtcca

SEQ ID NO: 44740 - DNA, 60 bp, Artificial
  Synthetic oligonucleotide
catccaactcaatatcctgatgcaaggttgtcctctcctataatcctagaccagtgtgac

SEQ ID NO: 44741 - DNA, 60 bp, Artificial
  Synthetic oligonucleotide
ctatcttaagtgaatcctttcttcaatatgcagcatccaactcaatatcctgatgcaagg

SEQ ID NO: 44742 - DNA, 60 bp, Artificial
  Synthetic oligonucleotide
gccagaagtttagggttgtatagtcattattcacataatccgaaattgcgtaattgtagg

SEQ ID NO: 44743 - DNA, 60 bp, Artificial
  Synthetic oligonucleotide
ctcgtgcatctatctcaacttgccaggaggataaaaggacaaagagggtcattaagaagt

SEQ ID NO: 44744 - DNA, 60 bp, Artificial
  Synthetic oligonucleotide
gagcatgaatctacagaagatagctcttcttcaagtagctttgttgacttgaatgatcca

SEQ ID NO: 44745 - DNA, 60 bp, Artificial
  Synthetic oligonucleotide
ggccacaaagagtggtgacaaagaagggtagaactttcctttatcctaatgatcttctgc

SEQ ID NO: 44746 - DNA, 60 bp, Artificial
  Synthetic oligonucleotide
caggatccgacaatgaacaaggagttgatcttccacctcctccgttgtacgctcaggaaa

SEQ ID NO: 44747 - DNA, 60 bp, Artificial
  Synthetic oligonucleotide
gacctacttataccgataaataggcagatatcagacattcaaagcactctaagcgaagtg

SEQ ID NO: 44748 - DNA, 60 bp, Artificial
  Synthetic oligonucleotide
gggaccaactgatcgtgaagaaaacactagctgatctacttataccgataaataggcaga

SEQ ID NO: 44749 - DNA, 60 bp, Artificial
  Synthetic oligonucleotide
gcgaagtaacaacaagagtccatgaaattgagcggcaattacatgagattaccccagttt

SEQ ID NO: 44750 - DNA, 60 bp, Artificial
  Synthetic oligonucleotide
cggcttcaggtcttaggctatctggaaggaacaagaacattactagcttctcggacaata

SEQ ID NO: 44751 - DNA, 60 bp, Artificial
  Synthetic oligonucleotide
caggaatcccggcacacccactcaggatgttgcgtgaaggaaatcaagcttttattcaga

SEQ ID NO: 44752 - DNA, 60 bp, Artificial
  Synthetic oligonucleotide
gaagctattgagatggtttctagattgttatgggtgactcaaggcactgcagaccgagaa

SEQ ID NO: 44753 - DNA, 66 bp, Artificial
  Synthetic oligonucleotide
cgtcaaggcaaacaacatttacattctcttatgttggattatgaaaataattcacctctactagac

SEQ ID NO: 44754 - DNA, 60 bp, Artificial
  Synthetic oligonucleotide
gggcaagttcaactcaagaaaccatatagctcaaatgcaaagaactcagaatggtacttg

SEQ ID NO: 44755 - DNA, 60 bp, Artificial
  Synthetic oligonucleotide
gaccctctttgcagtgggattaaagggagattaggcagagtatcccgatcaacactctcg

SEQ ID NO: 44756 - DNA, 59 bp, Artificial
  Synthetic oligonucleotide
ggggttctgcaggagagaaaagttcatcagatgctgttcggctatttcttacagcaagt

SEQ ID NO: 44757 - DNA, 60 bp, Artificial
  Synthetic oligonucleotide
tgagtaatacatctacacgtgcaattatatcaactaacacactgggtaaatatgctgggg

SEQ ID NO: 44758 - DNA, 60 bp, Artificial
  Synthetic oligonucleotide
aaagaggggactggttggggtctgggtggtaaatggtggacatccgactggggtgttctt

SEQ ID NO: 44759 - DNA, 59 bp, Artificial
  Synthetic oligonucleotide
cttgacaaaggaggtcaattcgaagccgccttatggcaaggttgggataagagatcgat

SEQ ID NO: 44760 - DNA, 60 bp, Artificial
  Synthetic oligonucleotide
cagagttaaactatgtcagttgtgctctcgaccggaaagttgtccagaaacatccctctg

SEQ ID NO: 44761 - DNA, 60 bp, Artificial
  Synthetic oligonucleotide
gacaacagatcattatcactcgtgttaatatggggtttctagtggaagtcaggaggattg

SEQ ID NO: 44762 - DNA, 60 bp, Artificial
  Synthetic oligonucleotide
gctaatgcttatcattatcacttaggaggtatagagggacttcaacagaaattgtggaca

SEQ ID NO: 44763 - DNA, 55 bp, Artificial
  Synthetic oligonucleotide
tggccagtattggtacatcctttgagagaggaacaagcgagacacggcacatttt

SEQ ID NO: 44764 - DNA, 60 bp, Artificial
  Synthetic oligonucleotide
cccgcgcttggctcgaagacagtgatggagctgattatcctcctcttgatgtgttaggtg

SEQ ID NO: 44765 - DNA, 65 bp, Artificial
  Synthetic oligonucleotide
gtagcaaagaatcattatcattctcaaggatcatggtataaaaccacacatgatttgcatttgac

SEQ ID NO: 44766 - DNA, 60 bp, Artificial
  Synthetic oligonucleotide
gcaattcagtaggtcaaactagattctcaggacttcttattgtgaaaacagttctcgagt

SEQ ID NO: 44767 - DNA, 60 bp, Artificial
  Synthetic oligonucleotide
ccgtaatgagccgatttgctgctgacatcttttcaagaacacccagtggaaaacggcttc

SEQ ID NO: 44768 - DNA, 60 bp, Artificial
  Synthetic oligonucleotide
cgcattgcctccacaacaatgtaccgaggcaaagtcttcactgaagggaacatagcagcc

SEQ ID NO: 44769 - DNA, 60 bp, Artificial
  Synthetic oligonucleotide
ccacaatcaggaatttatcacatagatcacttcggattcttcaatctaccttccgacatg

SEQ ID NO: 44770 - DNA, 60 bp, Artificial
  Synthetic oligonucleotide
gtcaataagacagtgcacaaaatgattttctcgaggcaaggacaagggtaccgtcacatg

SEQ ID NO: 44771 - DNA, 60 bp, Artificial
  Synthetic oligonucleotide
tagcagctatgattgtcaataagacagtgcacaaaatgattttctcgcggcaaggacaag

SEQ ID NO: 44772 - DNA, 60 bp, Artificial
  Synthetic oligonucleotide
ttcattgagtttgaacgtcagtgacattggttcttatgactttccaactattgctgcatg

SEQ ID NO: 44773 - DNA, 60 bp, Artificial
  Synthetic oligonucleotide
cggatccctctggaaaatccttgctgttagatcctcctaccaacatccgtgactatccta

SEQ ID NO: 44774 - DNA, 66 bp, Artificial
  Synthetic oligonucleotide
gaatctctcagatttaacattccttatatcatccacaatcaggaatttatcacatagatcacttcg

SEQ ID NO: 44775 - DNA, 60 bp, Artificial
  Synthetic oligonucleotide
cttatgactttccaactattgctgcatggacactaggagaaactatagtcggaagcattt

SEQ ID NO: 44776 - DNA, 60 bp, Artificial
  Synthetic oligonucleotide
cgcagtctccatccacccgaatctgccgcctattgttctaccaacagtcaagaagcaggc

SEQ ID NO: 44777 - DNA, 60 bp, Artificial
  Synthetic oligonucleotide
ctggttttaagttacgctcagctgtgatgggtgacaatcagtgcattaccgttttatcag

SEQ ID NO: 44778 - DNA, 60 bp, Artificial
  Synthetic oligonucleotide
actcctgttatgagtcgttttgcggccgatatcttttcacgcacgccgagcgggaagcga

SEQ ID NO: 44779 - DNA, 60 bp, Artificial
  Synthetic oligonucleotide
caggctcctgcgaattggaaaccaggccttcctccaggagttcgttcttccgccagtcca

SEQ ID NO: 44780 - DNA, 60 bp, Artificial
  Synthetic oligonucleotide
cggccgccatcatgcttgcttcatacactatcacccatttcggcaaggcaaccaatccac

SEQ ID NO: 44781 - DNA, 60 bp, Artificial
  Synthetic oligonucleotide
acctttaattgcgaagaaccctgggaactgcactgccattgactttgtgctaaatcctag

SEQ ID NO: 44782 - DNA, 60 bp, Artificial
  Synthetic oligonucleotide
gctcaaccagccctcgcatgctgacaccaatcaacgaagaggcagacccactggacgatg

SEQ ID NO: 44783 - DNA, 60 bp, Artificial
  Synthetic oligonucleotide
atgatcttctggtgatgacaaccggtcgggcaacagcaaccgctgcggcaactgaggctt

SEQ ID NO: 44784 - DNA, 60 bp, Artificial
  Synthetic oligonucleotide
acggaacttccaaccgcacacccactgtcgccccaccggctcccgtatacagagatcact

SEQ ID NO: 44785 - DNA, 60 bp, Artificial
  Synthetic oligonucleotide
ggaccacactcaagaggccaggaaccaggacagtgacaacacccagccagaacactcttt

SEQ ID NO: 44786 - DNA, 60 bp, Artificial
  Synthetic oligonucleotide
accagtggcgacattgcccatagatttcatagtcccagttcttctcaaggcactgtcagg

SEQ ID NO: 44787 - DNA, 60 bp, Artificial
  Synthetic oligonucleotide
caagaaaacacgcaccagggtccgtcgttccagtcctttctaagtgactctgcttgtggg

SEQ ID NO: 44788 - DNA, 60 bp, Artificial
  Synthetic oligonucleotide
tacaggcctttgaagcaggtgttgattttcaagagagtgcggacggtttccttctcatgc

SEQ ID NO: 44789 - DNA, 60 bp, Artificial
  Synthetic oligonucleotide
ccaggtgggaaaccattcgtgtcagtggcagtcaagaaacatattgttagtgcatggccg

SEQ ID NO: 44790 - DNA, 60 bp, Artificial
  Synthetic oligonucleotide
gaccccttcacattactcaggaaatattgttcacaggtacaacgatcaatacagtcctca

SEQ ID NO: 44791 - DNA, 60 bp, Artificial
  Synthetic oligonucleotide
acaacatcaccgcagaacagacaacgacagcacagcctccgacactccctctgccacgac

SEQ ID NO: 44792 - DNA, 60 bp, Artificial
  Synthetic oligonucleotide
gaccgctggcaacaacaacactcatcaccaagataccggagaagagagtgccagcagcgg

SEQ ID NO: 44793 - DNA, 60 bp, Artificial
  Synthetic oligonucleotide
ccgacaatccctaattatgtttatcactgcattcttgaatatcgctctccagttaccgtg

SEQ ID NO: 44794 - DNA, 60 bp, Artificial
  Synthetic oligonucleotide
tccctccgttgccaatgattaaagaactactatgggaattttaccaccttgaccaccctc

SEQ ID NO: 44795 - DNA, 60 bp, Artificial
  Synthetic oligonucleotide
ggaccagctgattgaccagtctttgattgaacccttagcaggagcccttggtctgatctc

SEQ ID NO: 44796 - DNA, 60 bp, Artificial
  Synthetic oligonucleotide
agggaagctgcagtgtcgcatctgacaacccttgccacaatctccacgagtccccaaccc

SEQ ID NO: 44797 - DNA, 60 bp, Artificial
  Synthetic oligonucleotide
gaaccttcggaaaattgccttatccgactcgcaatgttcaaacactttgtgaagctctgt

SEQ ID NO: 44798 - DNA, 60 bp, Artificial
  Synthetic oligonucleotide
gacacaatccaggccaactcaaaatgtcccaggccctcacagaacaatccaccacgccag

SEQ ID NO: 44799 - DNA, 60 bp, Artificial
  Synthetic oligonucleotide
caattgcactcggagtcgccacagcacacgggagtaccctcgcaggagtaaatgttggag

SEQ ID NO: 44800 - DNA, 60 bp, Artificial
  Synthetic oligonucleotide
cgaaatcagcttccagcaaacaaacgctatggtaactctaagaaaagagcgcctggccaa

SEQ ID NO: 44801 - DNA, 60 bp, Artificial
  Synthetic oligonucleotide
cacctaggtcttatcacatcacaagttccacctcagactctgcagggtgatccaacaacc

SEQ ID NO: 44802 - DNA, 66 bp, Artificial
  Synthetic oligonucleotide
cagagacaacagagaatataaacagatcgaaattgtacgaagctgtatataaattgatcttacacc

SEQ ID NO: 44803 - DNA, 56 bp, Artificial
  Synthetic oligonucleotide
tcctcaaattgcctgcatgcttacatctgaggatagccagtgtgacttggattgga

SEQ ID NO: 44804 - DNA, 60 bp, Artificial
  Synthetic oligonucleotide
ccccgagcttgccagaaaagcttgcgtccagtcccaccatcgcccaagattgatcgaggt

SEQ ID NO: 44805 - DNA, 60 bp, Artificial
  Synthetic oligonucleotide
atccctgttcttttgccaaagtacattggtttggacccggtggctccaggagacctcacc

SEQ ID NO: 44806 - DNA, 60 bp, Artificial
  Synthetic oligonucleotide
atccactcaggccaattgccgatgacaccatcgaccatgccagccacacaccaggcagtg

SEQ ID NO: 44807 - DNA, 60 bp, Artificial
  Synthetic oligonucleotide
gcatggaacaatgggatgattcaaccgacaaatagctaacattaagtagtcaaggaacga

SEQ ID NO: 44808 - DNA, 60 bp, Artificial
  Synthetic oligonucleotide
aaccagaacaaagggcaggggccacactgcggccacgactcaaaacgacagaatgccagg

SEQ ID NO: 44809 - DNA, 60 bp, Artificial
  Synthetic oligonucleotide
cactgatcaagacggcagaacactgggcgagacaagacatcagaaccatagaggattcaa

SEQ ID NO: 44810 - DNA, 60 bp, Artificial
  Synthetic oligonucleotide
cttggacagttaacactcggcaaacctctggatttcggaacaatatcattggcactagcg

SEQ ID NO: 44811 - DNA, 60 bp, Artificial
  Synthetic oligonucleotide
aaaccaggactcagaatccctcaaacaagagattccaagacaacatcatagaattgcttt

SEQ ID NO: 44812 - DNA, 60 bp, Artificial
  Synthetic oligonucleotide
gggaaatagagagttttaagtcggctgtgacgctagcagagggagaaggtgctggtgcct

SEQ ID NO: 44813 - DNA, 60 bp, Artificial
  Synthetic oligonucleotide
ccgacaaatcggcaatgaaccgcaagaagcctgggccggcgaaattttccctccttcatg

SEQ ID NO: 44814 - DNA, 60 bp, Artificial
  Synthetic oligonucleotide
ggaacgtcgttccaacaatcgagcgcaaggtttcaaggttgaactgagagtgtctagaca

SEQ ID NO: 44815 - DNA, 60 bp, Artificial
  Synthetic oligonucleotide
ctgtttacataggcggtgctgcaggtgacagaggactctcagatgcggccaggttatttt

SEQ ID NO: 44816 - DNA, 60 bp, Artificial
  Synthetic oligonucleotide
gactgcctcacttatctggatgggagctagccaagaccatcatgcaatcaattatttcag

SEQ ID NO: 44817 - DNA, 60 bp, Artificial
  Synthetic oligonucleotide
gctcaacccaaatgcaaccctaatttacattactggactactcaggatgaaggtgctgca

SEQ ID NO: 44818 - DNA, 60 bp, Artificial
  Synthetic oligonucleotide
gcattcttcatctccttttagcaaagtactatttcagggtagtccaattagtggcacgtc

SEQ ID NO: 44819 - DNA, 60 bp, Artificial
  Synthetic oligonucleotide
cttcacaggctcaaaagatccgtgaattccatagaacattgataaggctggagatgacgc

SEQ ID NO: 44820 - DNA, 60 bp, Artificial
  Synthetic oligonucleotide
agaggacgcccacgagctgccagacagcattcaagggatggacacgaccaccatgttcga

SEQ ID NO: 44821 - DNA, 60 bp, Artificial
  Synthetic oligonucleotide
gaggtccactagtctctatcactcagcacttagcacatcttagagcagagattcgagaat

SEQ ID NO: 44822 - DNA, 60 bp, Artificial
  Synthetic oligonucleotide
agcttatcgaaaggctgacagggcttctgagtttatttccggatggtctctacaggtttg

SEQ ID NO: 44823 - DNA, 60 bp, Artificial
  Synthetic oligonucleotide
ccccttgagagagccggtcaatgcaacggaggacccgtctagtggctactattctaccac

SEQ ID NO: 44824 - DNA, 60 bp, Artificial
  Synthetic oligonucleotide
attgagaccagttggactgaatctcgaagggaatggagtggcaactgacgtgccatctgc

SEQ ID NO: 44825 - DNA, 60 bp, Artificial
  Synthetic oligonucleotide
gttaatgataattaagacattgaccacgctcatcagaaggctcgccagaataaacgttgc

SEQ ID NO: 44826 - DNA, 60 bp, Artificial
  Synthetic oligonucleotide
gactatcctaaatgcaaaactatccatcatattcaaggtcaaaaccctcatgcacagggg

SEQ ID NO: 44827 - DNA, 60 bp, Artificial
  Synthetic oligonucleotide
ctaaatgcaaaactatccatcatattcaaggtcaaaaccctcatgcacaggggatcgctc

SEQ ID NO: 44828 - DNA, 60 bp, Artificial
  Synthetic oligonucleotide
ccatcatattcaaggtcaaaaccctcatgcacaagggatcgccctccatttgtggggagc

SEQ ID NO: 44829 - DNA, 60 bp, Artificial
  Synthetic oligonucleotide
gcctatgaattatcacctgattttacaagctatgaggataatcagcagaattggccacag

SEQ ID NO: 44830 - DNA, 60 bp, Artificial
  Synthetic oligonucleotide
gcaagtctacgcggactaaccattattacgcaagtcttaattattggagagacaaagcta

SEQ ID NO: 44831 - DNA, 60 bp, Artificial
  Synthetic oligonucleotide
gagaagacgagcctgtttaggatctcgcttcctgccgacatgttctcagtaaaagagggt

SEQ ID NO: 44832 - DNA, 60 bp, Artificial
  Synthetic oligonucleotide
gagaagacaagcctgtttaggatttcgcttcctgccgacatgttctcagtaaaagagggt

SEQ ID NO: 44833 - DNA, 60 bp, Artificial
  Synthetic oligonucleotide
taatcttgctgacacgcttctcggcgggctcccgacagaattgatttcgtcggctggtgg

SEQ ID NO: 44834 - DNA, 60 bp, Artificial
  Synthetic oligonucleotide
atattcatccaaccaaccccttcgccgccgatgtcgtttcacaacccggggctggagctc

SEQ ID NO: 44835 - DNA, 60 bp, Artificial
  Synthetic oligonucleotide
tatattcatccaaccaaccccttcgccgccgatgtcgtttcacaacccggggctggagct

SEQ ID NO: 44836 - DNA, 60 bp, Artificial
  Synthetic oligonucleotide
gaccgggttgattctcagcccttcgcaatcccctatattcatccaaccaaccccttcgcc

SEQ ID NO: 44837 - DNA, 60 bp, Artificial
  Synthetic oligonucleotide
ttgatttcgtcggctggtggccagctgttctactctcgccccgtcgtctcagccaatggc

SEQ ID NO: 44838 - DNA, 60 bp, Artificial
  Synthetic oligonucleotide
cgtggtcgacgccatggaggcccaccagttcataaaggctcctggcgtcactactgctat

SEQ ID NO: 44839 - DNA, 60 bp, Artificial
  Synthetic oligonucleotide
cccctatattcatccaaccaaccccttcgccgccgatgtcgtttcacaatccggggctgg

SEQ ID NO: 44840 - DNA, 60 bp, Artificial
  Synthetic oligonucleotide
tactgctattgagcaggcagctctagcagcggccaactccgccctggcgaatgctgtggt

SEQ ID NO: 44841 - DNA, 60 bp, Artificial
  Synthetic oligonucleotide
caccatccctgtttccaactgcctgctctactaagtcaacatttcatgccgtccctgtgc

SEQ ID NO: 44842 - DNA, 50 bp, Artificial
  Synthetic oligonucleotide
cttaccaccattcagcagtattctaagacattctatgtgctcccacttcg

SEQ ID NO: 44843 - DNA, 60 bp, Artificial
  Synthetic oligonucleotide
gtcgacgccatggaggcccatcagtttataaaggctcctggcgtcactactgctattgag

SEQ ID NO: 44844 - DNA, 60 bp, Artificial
  Synthetic oligonucleotide
caaccccggcagttggttttccgccctgaggtgctttggaatcaccccatccagcgagtt

SEQ ID NO: 44845 - DNA, 60 bp, Artificial
  Synthetic oligonucleotide
gctgcggccaattccgccttggcgaatgctgtggtggttcggccgtttctgtctcgtgtt

SEQ ID NO: 44846 - DNA, 60 bp, Artificial
  Synthetic oligonucleotide
ggtttctggggtgaccgggttgattctcagcccttcgccctcccctatattcatccaacc

SEQ ID NO: 44847 - DNA, 60 bp, Artificial
  Synthetic oligonucleotide
tggtttctggggtgaccgggttgattctcagcccttcgccctcccctatattcatccaac

SEQ ID NO: 44848 - DNA, 60 bp, Artificial
  Synthetic oligonucleotide
cggtggtttctggggtgaccgggttgattctcagcccttcgccctcccctatattcatcc

SEQ ID NO: 44849 - DNA, 60 bp, Artificial
  Synthetic oligonucleotide
ttctgttgttgctcttcgtgcttctgcctatgctgcccgcgccaccggccggccagccgt

SEQ ID NO: 44850 - DNA, 60 bp, Artificial
  Synthetic oligonucleotide
ttctgctgttgttcctcatgcttctgcctatgctgcccgcgccaccggccggccagccgt

SEQ ID NO: 44851 - DNA, 60 bp, Artificial
  Synthetic oligonucleotide
gggctcccgacagaattgatttcgtcggctggtggtcagttgttttactctcgccccgtc

SEQ ID NO: 44852 - DNA, 60 bp, Artificial
  Synthetic oligonucleotide
gtcatcaaaggtgggtgcgcacacagggcatagctcggggtgtgaggcgcttacaggctg

SEQ ID NO: 44853 - DNA, 60 bp, Artificial
  Synthetic oligonucleotide
actaccgtattaagcctgaccccgacggcctccgcagagtatacgctgttgtgcaccagg

SEQ ID NO: 44854 - DNA, 60 bp, Artificial
  Synthetic oligonucleotide
tgtgcacttttcggcccctggttccgggctatagagaagcaccttgtggctgggttaccc

SEQ ID NO: 44855 - DNA, 60 bp, Artificial
  Synthetic oligonucleotide
cgccttctgttgctcgcgcctgctaacttatttacgtgggatttcaaccaaggtgacagt

SEQ ID NO: 44856 - DNA, 60 bp, Artificial
  Synthetic oligonucleotide
tatgtgcacaagcgtgaggtattacaggactggataacgacaacaggcgtttctggtcgg

SEQ ID NO: 44857 - DNA, 60 bp, Artificial
  Synthetic oligonucleotide
gttgaccgggctatggctgacatggttaattatgggctggcaaccgagcccgagccgtac

SEQ ID NO: 44858 - DNA, 60 bp, Artificial
  Synthetic oligonucleotide
gcgcagttctggcatcatatcggaccaatcaacccctcaacactggagtatgcagagatg

SEQ ID NO: 44859 - DNA, 60 bp, Artificial
  Synthetic oligonucleotide
ccttgctttatgccgcaccggtgtcaccgttaatgccgcttcaggacggcacgacgtcta

SEQ ID NO: 44860 - DNA, 60 bp, Artificial
  Synthetic oligonucleotide
aggggctcccaaacgctcccagccggaggcaggcgtggccagcgccgccgtgacaattca

SEQ ID NO: 44861 - DNA, 60 bp, Artificial
  Synthetic oligonucleotide
gccgggctctgctggtttgctgactataccacatgagcgtttggcgtataagaacaatgg

SEQ ID NO: 44862 - DNA, 60 bp, Artificial
  Synthetic oligonucleotide
tgtctgcctctggggttaagaacatgttgccgccaggcgccagaagaccagtcacctgag

SEQ ID NO: 44863 - DNA, 60 bp, Artificial
  Synthetic oligonucleotide
gtggatggggtccaggtgaagactgtcgatgctagttctgggagtaataggtttgcagcg

SEQ ID NO: 44864 - DNA, 60 bp, Artificial
  Synthetic oligonucleotide
taagcgagctttgggcaccctaaggtcaggggatgtgttgcgtattactggctccatgca

SEQ ID NO: 44865 - DNA, 60 bp, Artificial
  Synthetic oligonucleotide
aagtgtgggtgctgttgcgtctgcgagcgccgtcctgctgaccccgggtgcttgtgcatt

SEQ ID NO: 44866 - DNA, 60 bp, Artificial
  Synthetic oligonucleotide
cgagccccagacgacaccgtggatggcttgttggacatacccccggcccacactgatgta

SEQ ID NO: 44867 - DNA, 60 bp, Artificial
  Synthetic oligonucleotide
atacgcaagcaaccgtccgccccgccatcattgcacattttggaccgccgaccggtaggt

SEQ ID NO: 44868 - DNA, 60 bp, Artificial
  Synthetic oligonucleotide
cagtcgaaccccgggtccataacggtccatgaggcgcagggcagtacttttgatcagact

SEQ ID NO: 44869 - DNA, 60 bp, Artificial
  Synthetic oligonucleotide
tattggacgttgccgccgactggcttgttaacccggctaatcgagaccatcagcccggag

SEQ ID NO: 44870 - DNA, 60 bp, Artificial
  Synthetic oligonucleotide
tgctatcccgccgcacctgcttgtggcgtcccttcgtcgggcgcgcgatgttgttatgtt

SEQ ID NO: 44871 - DNA, 60 bp, Artificial
  Synthetic oligonucleotide
tggcaggtagcaccacggaggggtctttgcaacctaatccgtcgcgcgctgctcaatggt

SEQ ID NO: 44872 - DNA, 58 bp, Artificial
  Synthetic oligonucleotide
aaaatgaaggacaagaccggcccgtgtggcgccttttccaacctgctgatcttcccgg

SEQ ID NO: 44873 - DNA, 60 bp, Artificial
  Synthetic oligonucleotide
cccttgatctcgaatgtgaattgatgcgcaggtttgggatgcccgattggatggtagcct

SEQ ID NO: 44874 - DNA, 60 bp, Artificial
  Synthetic oligonucleotide
ttctgtttaacctggcggacacagttttaggtggcttgccctcgacactgctgcgggcgg

SEQ ID NO: 44875 - DNA, 60 bp, Artificial
  Synthetic oligonucleotide
tggctgcggctaactccgccttggcgaatgctgtggtggtccggccgttcttgtcccgta

SEQ ID NO: 44876 - DNA, 60 bp, Artificial
  Synthetic oligonucleotide
tacgaattctatcatacagcgggtggaatgaataacatgtcttttgcatcgcccatggga

SEQ ID NO: 44877 - DNA, 60 bp, Artificial
  Synthetic oligonucleotide
atctcgtgtacaaaccgagattcttattaatttgatgcaaccccggcagttggttttccg

SEQ ID NO: 44878 - DNA, 60 bp, Artificial
  Synthetic oligonucleotide
gaccacgtatgtggtcgacgccatggaggcccaccagtttattaaggctcctggcgtcac

SEQ ID NO: 44879 - DNA, 60 bp, Artificial
  Synthetic oligonucleotide
gaccacgtatgtggtcgacgccatggaggcccaccagtttataaaggctcctggcgtcac

SEQ ID NO: 44880 - DNA, 60 bp, Artificial
  Synthetic oligonucleotide
catctgcctgctctactaagtcaacatttcatgccgtccctgtgcatatatgggataggc

SEQ ID NO: 44881 - DNA, 60 bp, Artificial
  Synthetic oligonucleotide
cgccatggaggcccaccagttcataaaggctcctggcgtcactactgctattgagcaggc

SEQ ID NO: 44882 - DNA, 60 bp, Artificial
  Synthetic oligonucleotide
gcttggcgcgaccagtcccagcgcccctccgctgccccccgtcgtcgatctaccccagct

SEQ ID NO: 44883 - DNA, 60 bp, Artificial
  Synthetic oligonucleotide
atattcatccaaccaaccccttcgcatctgacattccaaccgccgccggggctggagctc

SEQ ID NO: 44884 - DNA, 60 bp, Artificial
  Synthetic oligonucleotide
ttcatccaaccaaccccttcgcatctgacataccaaccgcagccgggtctggagctcgcc

SEQ ID NO: 44885 - DNA, 60 bp, Artificial
  Synthetic oligonucleotide
tattcatccaaccaaccccttcgcatctgacattccagcagccgccggggctggagctcg

SEQ ID NO: 44886 - DNA, 60 bp, Artificial
  Synthetic oligonucleotide
agctctagcagcggccaactccgccttggcgaatgctgtggtggttcggcctttcttatc

SEQ ID NO: 44887 - DNA, 60 bp, Artificial
  Synthetic oligonucleotide
agctctagcagcggccaactccgccttggcgaatgctgtggtggttcggcctttcctatc

SEQ ID NO: 44888 - DNA, 60 bp, Artificial
  Synthetic oligonucleotide
tactgctattgaccaggctgctctagcagcggccaactccgccttggcgaatgctgtggt

SEQ ID NO: 44889 - DNA, 53 bp, Artificial
  Synthetic oligonucleotide
cttcgtgcttctgcctatgctgcccgcgccaccggccggccagccgtctggcc

SEQ ID NO: 44890 - DNA, 60 bp, Artificial
  Synthetic oligonucleotide
tacaaactctatcatacagcgggtggaatgaataacatgtcttgtgcatcgcccatggga

SEQ ID NO: 44891 - DNA, 60 bp, Artificial
  Synthetic oligonucleotide
gcgggcttccgacagaattgatttcgtcggctggtggccagttattttactctcgccccg

SEQ ID NO: 44892 - DNA, 60 bp, Artificial
  Synthetic oligonucleotide
ctcagccaatggcgagccgactgttaagctgtacacctccgtcgagaatgcacagcagga

SEQ ID NO: 44893 - DNA, 60 bp, Artificial
  Synthetic oligonucleotide
ccagttgttttactcacgccccgtcgtctcagccaatggcgagccgacagtgaagctcta

SEQ ID NO: 44894 - DNA, 60 bp, Artificial
  Synthetic oligonucleotide
aatcttgctgacaccctgcttggcggcctaccgacagaattgatttcgtcggctggtggc

SEQ ID NO: 44895 - DNA, 60 bp, Artificial
  Synthetic oligonucleotide
actgctattgagcaggcagctctagcagcggccaactccgctttggcgaatgctgtggtg

SEQ ID NO: 44896 - DNA, 60 bp, Artificial
  Synthetic oligonucleotide
actgctattgagcaggcagctctagcagcggccaactctgccttggcgaatgctgtggtg

SEQ ID NO: 44897 - DNA, 60 bp, Artificial
  Synthetic oligonucleotide
tcgtagacctaccacagctggggccgcgccgctaaccgcggtcgctccggcccatgacac

SEQ ID NO: 44898 - DNA, 60 bp, Artificial
  Synthetic oligonucleotide
tcgtagacctaccacagctggggccgcgccgctaaccgcggtcgctccggctcatgacac

SEQ ID NO: 44899 - DNA, 60 bp, Artificial
  Synthetic oligonucleotide
tcgtagacctaccacagctggggccgcgccgctaaccgcggtcgccccggctcatgacac

SEQ ID NO: 44900 - DNA, 60 bp, Artificial
  Synthetic oligonucleotide
tcgtagacctaccacagctggggccgcgccgctgactgcggttgctccggcccatgatac

SEQ ID NO: 44901 - DNA, 60 bp, Artificial
  Synthetic oligonucleotide
ttgcctcacgtcgtagacctaccacagctggggccgcgccgctaaccgcggtcgctccgg

SEQ ID NO: 44902 - DNA, 60 bp, Artificial
  Synthetic oligonucleotide
gcctcacgtcgtagacctaccacagctggggccgcgccgctaaccgcggtcgctccggct

SEQ ID NO: 44903 - DNA, 60 bp, Artificial
  Synthetic oligonucleotide
gcctcacgtcgtagacctaccacagctggggccgcgccgctgactgcggttgctccggcc

SEQ ID NO: 44904 - DNA, 60 bp, Artificial
  Synthetic oligonucleotide
gtggaatgaataacatgtcttttgctgcgcccatgggttcgcgaccatgcgccctcggcc

SEQ ID NO: 44905 - DNA, 60 bp, Artificial
  Synthetic oligonucleotide
gtctatgtctctgactctgtgaccttggttaatgttgcgaccggcgcgcaggccgttgcc

SEQ ID NO: 44906 - DNA, 60 bp, Artificial
  Synthetic oligonucleotide
caatggcgagccgactgttaagctgtatacatctgtagagaatgctcagcaggataaggg

SEQ ID NO: 44907 - DNA, 60 bp, Artificial
  Synthetic oligonucleotide
gcgcccatacttttgatgatttctgcccagagtgccgcccccttggcctccagggctgcg

SEQ ID NO: 44908 - DNA, 60 bp, Artificial
  Synthetic oligonucleotide
cagcgccttaagatgaaggtgggtaaaactcgggagttatagtttatttgcttgtgcccc

SEQ ID NO: 44909 - DNA, 60 bp, Artificial
  Synthetic oligonucleotide
gcggcttaagatgaaggtgggtaaaactcgggagttatagtttatttgcttgtgccctcc

SEQ ID NO: 44910 - DNA, 52 bp, Artificial
  Synthetic oligonucleotide
taagatgaaggtgggtaaaactcgggagttatagtttatttgcttgtgcccc

SEQ ID NO: 44911 - DNA, 60 bp, Artificial
  Synthetic oligonucleotide
gtcgggtggaatgaataacatgtcttttgctgcgcccatgggttcgcgaccatgcgccct

SEQ ID NO: 44912 - DNA, 60 bp, Artificial
  Synthetic oligonucleotide
tctcggcgggctcccgacagaattgatttcgtcggccggaggccagttgttttactcacg

SEQ ID NO: 44913 - DNA, 60 bp, Artificial
  Synthetic oligonucleotide
cgacgccttctgctgctcgcgcctgttaacttacctacgtgggatttcaaccaaggtgac

SEQ ID NO: 44914 - DNA, 60 bp, Artificial
  Synthetic oligonucleotide
gcggaatctatcgcccggtaatacgaatgccagggttacccgtgtgaaggtgacggctcc

SEQ ID NO: 44915 - DNA, 60 bp, Artificial
  Synthetic oligonucleotide
gcacaagcgcgaagtattgcaggattggataacgacaacgggcgtttctggtcggcatcc

SEQ ID NO: 44916 - DNA, 60 bp, Artificial
  Synthetic oligonucleotide
agcgccgccgtgacaactcagcccagtggagtactcaacaacgccccgagggagccgtcg

SEQ ID NO: 44917 - DNA, 60 bp, Artificial
  Synthetic oligonucleotide
gtgttaaggtggcgcgtgagttttgtcagttagggtttggcgcctgctctcaccagtgtg

SEQ ID NO: 44918 - DNA, 60 bp, Artificial
  Synthetic oligonucleotide
gcgagcagcgagtggtcagtatatgtacggtcggcctgtggggaacgcgaatggtgaacc

SEQ ID NO: 44919 - DNA, 60 bp, Artificial
  Synthetic oligonucleotide
cgcactgtatcccatcgctgcccttgggatgtttgcatgttcctgcgcaccgactatccg

SEQ ID NO: 44920 - DNA, 60 bp, Artificial
  Synthetic oligonucleotide
gcacgtgtcatcgtaggtaatttattggacgtcgccgccgactggcttgttaacccggcc

SEQ ID NO: 44921 - DNA, 60 bp, Artificial
  Synthetic oligonucleotide
tggcgatgattgcaccacttgtttgccattgggactaagaacatgttgccgtcaggcgcc

SEQ ID NO: 44922 - DNA, 60 bp, Artificial
  Synthetic oligonucleotide
ggcgcagggcagcacttttgatcagaccaccataattgccacgttagacgctcgcggcct

SEQ ID NO: 44923 - DNA, 60 bp, Artificial
  Synthetic oligonucleotide
cccgttgaacccgttcagggcccggagactgatggacctggggttggtgagcctcaatct

SEQ ID NO: 44924 - DNA, 60 bp, Artificial
  Synthetic oligonucleotide
gcccccctcgagctggctgccataaatccacccgggcctgcgttagagcagggcctgtta

SEQ ID NO: 44925 - DNA, 60 bp, Artificial
  Synthetic oligonucleotide
acaccaggcgcatggtacggtagccagccccttaatcagtgccgggatataccgggcgcc

SEQ ID NO: 44926 - DNA, 60 bp, Artificial
  Synthetic oligonucleotide
gcgtatgcaggaccttgagcaagcgtgcaaggactttgtcgcacgtgttgtgactcaggg

SEQ ID NO: 44927 - DNA, 60 bp, Artificial
  Synthetic oligonucleotide
gcgatgacagtgttgttgtctgcgaatcggtgcacgcccgcccagagggtgttagtcttg

SEQ ID NO: 44928 - DNA, 60 bp, Artificial
  Synthetic oligonucleotide
tatcccaccgcacttgctcgtggcgtccctccgccgggcgcgcgatgttgttatgttagg

SEQ ID NO: 44929 - DNA, 60 bp, Artificial
  Synthetic oligonucleotide
cgccgcagcaatacgtaaacaaccgtctgctccgccttcattacatattctagaccgccg

SEQ ID NO: 44930 - DNA, 60 bp, Artificial
  Synthetic oligonucleotide
ccgccctgctgatcccgggtgcttgtgtatcgacgatttccctgatggagcaaatgggct

SEQ ID NO: 44931 - DNA, 60 bp, Artificial
  Synthetic oligonucleotide
gttgcgccaatgactgtgaaatacgcgctcatagctggtgtcccgggcagcggcaagtca

SEQ ID NO: 44932 - DNA, 60 bp, Artificial
  Synthetic oligonucleotide
tggtgtgcgtgcccctgctagttcggtggattggacgaaggcaacggtggatggagtcca

SEQ ID NO: 44933 - DNA, 60 bp, Artificial
  Synthetic oligonucleotide
ttcaacattggagtatgcggagatgtgcgaggccatgctcagcaagggccaggacgggtc

SEQ ID NO: 44934 - DNA, 60 bp, Artificial
  Synthetic oligonucleotide
agtacaatctcgtgactagcccgcttggcctggccaccctcggtagcaccaacgctttac

SEQ ID NO: 44935 - DNA, 60 bp, Artificial
  Synthetic oligonucleotide
tatgctcagtaccgtgtgcagggcctgactgtccgttggcgtccagttgtgccaaatgcg

SEQ ID NO: 44936 - DNA, 60 bp, Artificial
  Synthetic oligonucleotide
cagggttgattctcagcccttcgccctcccctatattcatccaaccaaccccttcgtcgc

SEQ ID NO: 44937 - DNA, 60 bp, Artificial
  Synthetic oligonucleotide
tccgccttggcgaatgctgtggtggttcggccttttctgtcccggctacagacagagata

SEQ ID NO: 44938 - DNA, 60 bp, Artificial
  Synthetic oligonucleotide
ggtaccggcggtggtttctggggtgacagggttgattctcagcccttcgccctcccctat

SEQ ID NO: 44939 - DNA, 60 bp, Artificial
  Synthetic oligonucleotide
gcagaccacgtatgtggtcgacgccatggaggcccatcagttcataaaggctcctggcgt

SEQ ID NO: 44940 - DNA, 60 bp, Artificial
  Synthetic oligonucleotide
gaccacgtatgtggtcgacgccatggaggcccatcagttcataaaggctcctggcgtcac

SEQ ID NO: 44941 - DNA, 50 bp, Artificial
  Synthetic oligonucleotide
tagaagcggccgctctagctgcagccaataccgccctgcgaaatgcgcgg

SEQ ID NO: 44942 - DNA, 55 bp, Artificial
  Synthetic oligonucleotide
tagaagcggccgctctagctgcagccaatactgccctgcgaaatgcgcgggtggt

SEQ ID NO: 44943 - DNA, 57 bp, Artificial
  Synthetic oligonucleotide
gcatgaccccatgccagggtaagaatggacgtctcgcagtttgcagagtccaagggg

SEQ ID NO: 44944 - DNA, 60 bp, Artificial
  Synthetic oligonucleotide
agttgcggtttgagccacgcgataactgggcgcaccctgtgcagcgggtcgtgcatgatg

SEQ ID NO: 44945 - DNA, 60 bp, Artificial
  Synthetic oligonucleotide
agttgcggtttgagccacgcgacaactgggcgcaccctgtgcagcgggtcgtgcatgatg

SEQ ID NO: 44946 - DNA, 60 bp, Artificial
  Synthetic oligonucleotide
ggcgccagaagaccagtcacctgagacgcgccggctcctagaccggcttagtaggacatt

SEQ ID NO: 44947 - DNA, 60 bp, Artificial
  Synthetic oligonucleotide
gtcaggcgccagaagaccagtcacctgagacgcgccggcttctagaccggcttagtaaaa

SEQ ID NO: 44948 - DNA, 60 bp, Artificial
  Synthetic oligonucleotide
gtgcatgatgcccttgagcagtatgtacgccgcgcagcggggcccaattgcctggaggtc

SEQ ID NO: 44949 - DNA, 60 bp, Artificial
  Synthetic oligonucleotide
gtgcatgatgcccttgagcagtatgtacgccgcgcagcggggcctaactgcctggaggtc

SEQ ID NO: 44950 - DNA, 60 bp, Artificial
  Synthetic oligonucleotide
cctggaggtcggcgctcatccacgctccattaataggcatcaagcctcgcaccgttgctt

SEQ ID NO: 44951 - DNA, 60 bp, Artificial
  Synthetic oligonucleotide
attgcctggaggtcggcgctcatccacgctccattaataggcatcaagcctcgcaccgct

SEQ ID NO: 44952 - DNA, 60 bp, Artificial
  Synthetic oligonucleotide
agctctttacagcttacacgacatgcgtcctgcggacgtggcgtgtgcgatggcccgtca

SEQ ID NO: 44953 - DNA, 60 bp, Artificial
  Synthetic oligonucleotide
gggttcggtgcctgctctcaccagtgtgaggtgggcatagctctttacagcttacacgac

SEQ ID NO: 44954 - DNA, 60 bp, Artificial
  Synthetic oligonucleotide
ccagccctgccccatgccgtatacgccttacccgtcctcaaacaccgtgtacgttaggaa

SEQ ID NO: 44955 - DNA, 60 bp, Artificial
  Synthetic oligonucleotide
ctgcggacgtggcgtgtgcgatggcccgtcacaacatgcgcaccatgtatattgtgttgc

SEQ ID NO: 44956 - DNA, 60 bp, Artificial
  Synthetic oligonucleotide
cctaagtgttgtgttgatgctacgttctaccctgtgcccaggcgtgtgtggcagcggttg

SEQ ID NO: 44957 - DNA, 60 bp, Artificial
  Synthetic oligonucleotide
ccctgccccatgccgtatacgccttacccgtcctcaagcaccgtgtacgtcaggaatgtt

SEQ ID NO: 44958 - DNA, 60 bp, Artificial
  Synthetic oligonucleotide
ccgttgcacatggtaaagtgggacaggggatatctgcgtggcccaaaactttgtgtgcac

SEQ ID NO: 44959 - DNA, 60 bp, Artificial
  Synthetic oligonucleotide
aacgccccgagggagccgtcggccccgcccctctcacagacgttgtcaccgcggcaggta

SEQ ID NO: 44960 - DNA, 60 bp, Artificial
  Synthetic oligonucleotide
ccgtcggccccgcccctctcacagacgttgtcaccgcggcaggtactcgcacggtaccag

SEQ ID NO: 44961 - DNA, 60 bp, Artificial
  Synthetic oligonucleotide
cgtcggccccgcccctctcacagacgttgtcaccgcggcaggtactcgcacggtaccaga

SEQ ID NO: 44962 - DNA, 60 bp, Artificial
  Synthetic oligonucleotide
ccaaatgttgtgttgatgccacgttctaccctgtgcccaggcgtgtgtggcagcggctga

SEQ ID NO: 44963 - DNA, 60 bp, Artificial
  Synthetic oligonucleotide
aatcgccacgttagatgctcgtggccttatagcttcatctcgcgcgcatgccatagttgc

SEQ ID NO: 44964 - DNA, 60 bp, Artificial
  Synthetic oligonucleotide
gacgctcgcggccttatagcttcatctcgcgcgcatgccatagtcgcgctgactcgccat

SEQ ID NO: 44965 - DNA, 60 bp, Artificial
  Synthetic oligonucleotide
tcgcggccttatagcttcatctcgcgcgcatgccatagtcgcgctgactcgccatcggga

SEQ ID NO: 44966 - DNA, 60 bp, Artificial
  Synthetic oligonucleotide
cttcaggacggcacgacgtctaatatcatgagcacggagtctagcaactatgctcaatac

SEQ ID NO: 44967 - DNA, 60 bp, Artificial
  Synthetic oligonucleotide
taagaacatgttgccgtcaggcgccagaagaccagtcacctgagacgcgccggcttctag

SEQ ID NO: 44968 - DNA, 58 bp, Artificial
  Synthetic oligonucleotide
cagcggcagtgccggcggtggtttctggggtgacagggttgattctcagcccttcgcc

SEQ ID NO: 44969 - DNA, 54 bp, Artificial
  Synthetic oligonucleotide
gcaggcagctctagcagcggccaactccgccttggcgaatgctgtggtggttcg

SEQ ID NO: 44970 - DNA, 60 bp, Artificial
  Synthetic oligonucleotide
gaccgggctgattctcagcccttcgcaatcccctatattcatccaaccaaccccttcgcc

SEQ ID NO: 44971 - DNA, 60 bp, Artificial
  Synthetic oligonucleotide
aggctgctctggctgcggccaactccgccttggcgaatgctgtggtggtccggccgtttt

SEQ ID NO: 44972 - DNA, 60 bp, Artificial
  Synthetic oligonucleotide
tcaactgttgctgagttacagcgtcttaaaatgaaggtgggtaaaacccgggagtattga

SEQ ID NO: 44973 - DNA, 60 bp, Artificial
  Synthetic oligonucleotide
caactgttgctgagctgcagcgtcttaaaatgaaggtgggtaaaacccgggagtattgat

SEQ ID NO: 44974 - DNA, 60 bp, Artificial
  Synthetic oligonucleotide
gtcaactgttgctgagttacagcgtcttaaaatgaaggtgggtaaaacccgggagtattg

SEQ ID NO: 44975 - DNA, 52 bp, Artificial
  Synthetic oligonucleotide
tcctcgtgcttttgcctatgctgcccgcgccaccggccggtcagccgtctga

SEQ ID NO: 44976 - DNA, 51 bp, Artificial
  Synthetic oligonucleotide
aaatgaaggtaggtaaaacccgggagtcttaattaattccttttgtgcccc

SEQ ID NO: 44977 - DNA, 60 bp, Artificial
  Synthetic oligonucleotide
gagcaggctgctctggctgcggccaattccgccttggcgaatgctgtggtggtccggccg

SEQ ID NO: 44978 - DNA, 51 bp, Artificial
  Synthetic oligonucleotide
tcgtgcttctgcctatgctgcccgcgccaccggccggccagccgtctggcc

SEQ ID NO: 44979 - DNA, 60 bp, Artificial
  Synthetic oligonucleotide
ttctgttgttgttcctcgtgcttctgcctatgctgcccgcgccaccggccggccagccgt

SEQ ID NO: 44980 - DNA, 60 bp, Artificial
  Synthetic oligonucleotide
ttctgttgctgttcatcgtgcttctgcctatgctgcccgcgccaccggccggccagccgt

SEQ ID NO: 44981 - DNA, 60 bp, Artificial
  Synthetic oligonucleotide
cagggctgtgcttttcaatctactatcgctgagcttcagcgccttaaaatgaaggtaggt

SEQ ID NO: 44982 - DNA, 60 bp, Artificial
  Synthetic oligonucleotide
ctccgccttggcgaatgctgtggtggttcggccctttttatcccgccaacagacagagat

SEQ ID NO: 44983 - DNA, 60 bp, Artificial
  Synthetic oligonucleotide
atattcatccaaccaaccccttcgccgccgatgttgttccgcaatccggggctggagctc

SEQ ID NO: 44984 - DNA, 60 bp, Artificial
  Synthetic oligonucleotide
ttcatccaaccaaccccttcgccgccgatgtcgcttcacaatccggggctggagctcgcc

SEQ ID NO: 44985 - DNA, 60 bp, Artificial
  Synthetic oligonucleotide
ttcatccaaccaaccccttcgccgccgatgtcgtttcacaacccggggctggaactcgcc

SEQ ID NO: 44986 - DNA, 60 bp, Artificial
  Synthetic oligonucleotide
ttcatccaaccaaccccttcgccgccgatgtcttttcacaatccggggctggagctcgcc

SEQ ID NO: 44987 - DNA, 60 bp, Artificial
  Synthetic oligonucleotide
cccgtcgtcgatctgccccagctggggcttcgccgctgactgctgtggccccggcccccg

SEQ ID NO: 44988 - DNA, 60 bp, Artificial
  Synthetic oligonucleotide
gcagactattgctgatggcaaggcccattttacagagactattaaacctgtgcttgatct

SEQ ID NO: 44989 - DNA, 60 bp, Artificial
  Synthetic oligonucleotide
aactgctatcgagcaggcagctctagcagcggccaactccgccttggcgaatgctgtggt

SEQ ID NO: 44990 - DNA, 60 bp, Artificial
  Synthetic oligonucleotide
agaggtaggccaccaccgcccctctgtgataccccgtggcaaccctgatcagaatcttga

SEQ ID NO: 44991 - DNA, 60 bp, Artificial
  Synthetic oligonucleotide
gcgggctcccgacagaattgatttcgtcggctggtggtcagttgttttactctcgccccg

SEQ ID NO: 44992 - DNA, 60 bp, Artificial
  Synthetic oligonucleotide
gggctcccgacagaattgatttcgtcggctggtggccagctattttactctcgccccgtc

SEQ ID NO: 44993 - DNA, 60 bp, Artificial
  Synthetic oligonucleotide
tctcgccccgtcgtctcagccaatggcgagccgacggtgaagctttacacttcagtcgag

SEQ ID NO: 44994 - DNA, 59 bp, Artificial
  Synthetic oligonucleotide
cgtcggccggcggtcaactgttttattctcgccccgtcgtctcagccaatggcgagccg

SEQ ID NO: 44995 - DNA, 60 bp, Artificial
  Synthetic oligonucleotide
ttcgtcggccggtggtcagctgttttactctcgccccgtcgtctcagccaatggcgagcc

SEQ ID NO: 44996 - DNA, 60 bp, Artificial
  Synthetic oligonucleotide
gtcaactgtcgctgagctacagcgtcttaaaatgaaggtgggtaaaacccgggagtattg

SEQ ID NO: 44997 - DNA, 60 bp, Artificial
  Synthetic oligonucleotide
cgccatggaggcccatcagttcataaaggctcctggcgtcacaactgctattgagcaggc

SEQ ID NO: 44998 - DNA, 60 bp, Artificial
  Synthetic oligonucleotide
ccgccttggcgaatgctgtggtggttcggccttttctgtcccggctacagacagagatac

SEQ ID NO: 44999 - DNA, 53 bp, Artificial
  Synthetic oligonucleotide
gagcaggctgctctggctgcggccaactccgccttggcgaatgctgtggtggt

SEQ ID NO: 45000 - DNA, 60 bp, Artificial
  Synthetic oligonucleotide
actgtcgctgagcttcagcgccttaagatgaaggtgggtaaaactcgggagttatagttt

SEQ ID NO: 45001 - DNA, 60 bp, Artificial
  Synthetic oligonucleotide
gctgcggccaactccgccttggcgaatgctgtggtggttcggccgtttctatctcgtgta

SEQ ID NO: 45002 - DNA, 60 bp, Artificial
  Synthetic oligonucleotide
tcgtcgatctaccccagctggggctgcgccgttaactgctatatcaccagctcctgacac

SEQ ID NO: 45003 - DNA, 60 bp, Artificial
  Synthetic oligonucleotide
catcgcccatggtaaagtgggccagggcatttcggcctggagtaagaccttctgtgccct

SEQ ID NO: 45004 - DNA, 56 bp, Artificial
  Synthetic oligonucleotide
agtcaactgttgctgagctccagcgtcttaaaatgaaggtgggtaaaacccgggag

SEQ ID NO: 45005 - DNA, 60 bp, Artificial
  Synthetic oligonucleotide
agtcaactgttgctgagttacagcgtcttaaaatgaaggtgggtaaaacccgggagtatt

SEQ ID NO: 45006 - DNA, 54 bp, Artificial
  Synthetic oligonucleotide
ccccttactactattcagcagtattctaagacattctatgtcctcccgcttcgc

SEQ ID NO: 45007 - DNA, 55 bp, Artificial
  Synthetic oligonucleotide
ccccttactactattcagcagtattctaagacattctatgtcctcccgctccgcg

SEQ ID NO: 45008 - DNA, 60 bp, Artificial
  Synthetic oligonucleotide
ccgtactactaaaatagttggtgaccacccgttggttatagagcgtgtgcgggccattgg

SEQ ID NO: 45009 - DNA, 60 bp, Artificial
  Synthetic oligonucleotide
gtgtacaaactgagatccttattaatttgatgcaaccccggcagttggttttccgccctg

SEQ ID NO: 45010 - DNA, 59 bp, Artificial
  Synthetic oligonucleotide
gctgacacacttctcggcgggcttcccacagaattgatttcgtcggctggtggccagct

SEQ ID NO: 45011 - DNA, 60 bp, Artificial
  Synthetic oligonucleotide
ggggtgaccgggttgattctcagcccttcgccctcccctatattcatccaaccaacccct

SEQ ID NO: 45012 - DNA, 60 bp, Artificial
  Synthetic oligonucleotide
gcggtggtttctggggtgacagggttgattctcagcccttcgccctcccctatattcatc

SEQ ID NO: 45013 - DNA, 60 bp, Artificial
  Synthetic oligonucleotide
cttcgtgcttctgcctatgctgcccgcgccaccggccggccagccgtctggccgtcgtcg

SEQ ID NO: 45014 - DNA, 60 bp, Artificial
  Synthetic oligonucleotide
atattcatccaaccaacccctttgccgccgacgtcgtatcacaacccggggctggagctc

SEQ ID NO: 45015 - DNA, 60 bp, Artificial
  Synthetic oligonucleotide
cccctatattcatccaaccaacccctttgccgccgacgtcatttcacaacccggggctgg

SEQ ID NO: 45016 - DNA, 60 bp, Artificial
  Synthetic oligonucleotide
ttgctgacaccctgcttggcggtctaccgacagaattgatttcgtcggctggtggccagc

SEQ ID NO: 45017 - DNA, 60 bp, Artificial
  Synthetic oligonucleotide
cagtttattaaggctcctggcatcactactgctattgagcaggctgctctagcagcggcc

SEQ ID NO: 45018 - DNA, 60 bp, Artificial
  Synthetic oligonucleotide
aaggctcctggcatcactactgctattgagcaggctgctttagcagcggccaattctgcc

SEQ ID NO: 45019 - DNA, 60 bp, Artificial
  Synthetic oligonucleotide
gcccatcagtttatcaaggctcctggcatcactactgctattgagcaggctgctctagca

SEQ ID NO: 45020 - DNA, 60 bp, Artificial
  Synthetic oligonucleotide
gcccaccagtttatcaaggctcctggcatcactactgctattgagcaggctgctctagca

SEQ ID NO: 45021 - DNA, 60 bp, Artificial
  Synthetic oligonucleotide
aaggctcctggcatcactactgctattgagcaggctgctctagcagcggccaactctgcc

SEQ ID NO: 45022 - DNA, 60 bp, Artificial
  Synthetic oligonucleotide
aaggctcctggcatcactactgctattgagcaggctgctctagcagcggccaactctgtc

SEQ ID NO: 45023 - DNA, 60 bp, Artificial
  Synthetic oligonucleotide
tcaaggctcctggcatcactactgctattgagcaggctgctctggcagcggccaactctg

SEQ ID NO: 45024 - DNA, 60 bp, Artificial
  Synthetic oligonucleotide
cttttctctctcaccagcagattgagatcctcattaacctaatgcaacctcgccagcttg

SEQ ID NO: 45025 - DNA, 60 bp, Artificial
  Synthetic oligonucleotide
gagcaggctgctctggctgcggccaactccgccttggcgaatgctgtggtggttcggccg

SEQ ID NO: 45026 - DNA, 60 bp, Artificial
  Synthetic oligonucleotide
cggtggtttctggggtgacagggttgattctcagcccctcgccctcccctatattcatcc

SEQ ID NO: 45027 - DNA, 60 bp, Artificial
  Synthetic oligonucleotide
ccagtccactattgctgagcttcagcgccttaaaatgaaggtaggtaaaacccgggagtt

SEQ ID NO: 45028 - DNA, 60 bp, Artificial
  Synthetic oligonucleotide
tggctccacttggcgtgaccagtcccagcgcccctccactgccccccgtcgtcgatctgc

SEQ ID NO: 45029 - DNA, 60 bp, Artificial
  Synthetic oligonucleotide
agctctagcagcggccaactccgccttggcgaatgctgtggtggttcggccttttctgtc

SEQ ID NO: 45030 - DNA, 60 bp, Artificial
  Synthetic oligonucleotide
agcagattgagatccttattaacctaatgcaacctcgccagcttgttttccgccccgagg

SEQ ID NO: 45031 - DNA, 60 bp, Artificial
  Synthetic oligonucleotide
gtctcgtgtgcaaaccgagatccttattaatttgatgcaaccccggcagttggttttccg

SEQ ID NO: 45032 - DNA, 60 bp, Artificial
  Synthetic oligonucleotide
tgtctcgcgtacaaaccgagatccttattaatttgatgcaaccccggcagttggttttcc

SEQ ID NO: 45033 - DNA, 60 bp, Artificial
  Synthetic oligonucleotide
ttaacttgatgcagccccggcagcttgttttccggcctgaggtcctgtggaatcacccca

SEQ ID NO: 45034 - DNA, 60 bp, Artificial
  Synthetic oligonucleotide
atttcgtcggctggtggccagctattttactctcgccccgtcgtctcagccaatggcgag

SEQ ID NO: 45035 - DNA, 60 bp, Artificial
  Synthetic oligonucleotide
aatttcgtcggctggtggccagctgttttactctcgccccgtcgtctcagccaatggcga

SEQ ID NO: 45036 - DNA, 60 bp, Artificial
  Synthetic oligonucleotide
ccttggcgaatgctgtggtggttcggcctttcttgtcccggctccagactgagatcctca

SEQ ID NO: 45037 - DNA, 60 bp, Artificial
  Synthetic oligonucleotide
cgcgtacaaaccgagattcttattaatttaatgcaaccccggcagttggttttccgccct

SEQ ID NO: 45038 - DNA, 60 bp, Artificial
  Synthetic oligonucleotide
ctcctggcgtcactactgctattgagcaggcagctctagcagcggccaattccgccttgg

SEQ ID NO: 45039 - DNA, 60 bp, Artificial
  Synthetic oligonucleotide
cagggcctcctctatctgccccaggagctcaccacctgtgatagtgtcgtaacatttgaa

SEQ ID NO: 45040 - DNA, 60 bp, Artificial
  Synthetic oligonucleotide
tcaatcttgtgtcgggtggaatgaataacatgtcttttgctgcgcccatgggttcgcgac

SEQ ID NO: 45041 - DNA, 60 bp, Artificial
  Synthetic oligonucleotide
attgatttcgtcggctggtggccagctgttctactcccgtcccgtcgtctcagccaatgg

SEQ ID NO: 45042 - DNA, 60 bp, Artificial
  Synthetic oligonucleotide
ataccgcaccgcgtcgtacttgctgatccatgacggcaggcgcgttgtggtgacgtatga

SEQ ID NO: 45043 - DNA, 60 bp, Artificial
  Synthetic oligonucleotide
ctcagccaatggcgagccgactgttaagctgtatacatctgtagagaatgctcagcagga

SEQ ID NO: 45044 - DNA, 60 bp, Artificial
  Synthetic oligonucleotide
ctgtcgctgagctccagcgccttaagatgaaggtgggtaaaactcgggagttatagttta

SEQ ID NO: 45045 - DNA, 60 bp, Artificial
  Synthetic oligonucleotide
actgtcgctgagctccagcgccttaagatgaaggtgggtaaaactcgggagttatagttt

SEQ ID NO: 45046 - DNA, 58 bp, Artificial
  Synthetic oligonucleotide
cagcggcggtgccagcggtggtttctggggtgacagggttgattctcagcccttcgcc

SEQ ID NO: 45047 - DNA, 60 bp, Artificial
  Synthetic oligonucleotide
ccgccttggcgaatgctgtggtggttcggcctttcctatcccggctacagacagagatac

SEQ ID NO: 45048 - DNA, 60 bp, Artificial
  Synthetic oligonucleotide
cgccatggaggcccatcagtttataaaggctcctggcgtcactactgctattgagcaggc

SEQ ID NO: 45049 - DNA, 60 bp, Artificial
  Synthetic oligonucleotide
caacggcggtgccggcggtggtttctggggtgacagggttgattctcagcccttcgccct

SEQ ID NO: 45050 - DNA, 60 bp, Artificial
  Synthetic oligonucleotide
gctgcggccaattccgccttggcgaatgctgtggtggtccggccgttcttatctcgtgta

SEQ ID NO: 45051 - DNA, 60 bp, Artificial
  Synthetic oligonucleotide
acagctgtcatcactgccgcctaccttaccatttgccaccagcggtatctccgcacccag

SEQ ID NO: 45052 - DNA, 60 bp, Artificial
  Synthetic oligonucleotide
gcaccgcatcgtatttgctgattcatgacggcaggcgcgttgtggtgacgtatgagggtg

SEQ ID NO: 45053 - DNA, 60 bp, Artificial
  Synthetic oligonucleotide
ccatcctgcgccggcagtataacctatcaacatctccccttacctcttccgtggccaccg

SEQ ID NO: 45054 - DNA, 60 bp, Artificial
  Synthetic oligonucleotide
atggccacggaagcttctaattatgcccagtaccgggttgcccgtgccgcgatccgttac

SEQ ID NO: 45055 - DNA, 56 bp, Artificial
  Synthetic oligonucleotide
cccgcctcggtaccgctgcatacccactcctcgggaccggcatataccaggtgccg

SEQ ID NO: 45056 - DNA, 60 bp, Artificial
  Synthetic oligonucleotide
tggaacataacccaaagaggcttgaggctgcctaccgggagacttgctcccgcctcggta

SEQ ID NO: 45057 - DNA, 60 bp, Artificial
  Synthetic oligonucleotide
ccactctgatgttcgcgactctctcgcccgttttatcccggccattggccccgtacaggt

SEQ ID NO: 45058 - DNA, 60 bp, Artificial
  Synthetic oligonucleotide
ccttcctgagcttgctgccagatggtttgaggccaataggccgacctgcccaactctcac

SEQ ID NO: 45059 - DNA, 60 bp, Artificial
  Synthetic oligonucleotide
taatggtgttggtgagatcggccgcgggatagcgcttaccctgtttaaccttgctgacac

SEQ ID NO: 45060 - DNA, 60 bp, Artificial
  Synthetic oligonucleotide
cccatggcaaggttggccagggtatatcggcctggagtaagaccttctgtgccctgtttg

SEQ ID NO: 45061 - DNA, 60 bp, Artificial
  Synthetic oligonucleotide
cttcgagctaatgatgtgctttggctctctctcaccgctgccgagtatgaccagtccacc

SEQ ID NO: 45062 - DNA, 60 bp, Artificial
  Synthetic oligonucleotide
tgcaaccccggcagttggttttccgccctgaggtgctttggaatcatcctattcagaggg

SEQ ID NO: 45063 - DNA, 60 bp, Artificial
  Synthetic oligonucleotide
gcaaccccggcagttggttttccgccctgaggtgctttggaaccatcctattcagagggt

SEQ ID NO: 45064 - DNA, 60 bp, Artificial
  Synthetic oligonucleotide
atgcaaccccggcagttggttttccgccctgaggtgctttggaaccatcctattcagagg

SEQ ID NO: 45065 - DNA, 60 bp, Artificial
  Synthetic oligonucleotide
caaccccggcagttggttttccgccctgaggtgctttggaatcatcctattcagagagtc

SEQ ID NO: 45066 - DNA, 60 bp, Artificial
  Synthetic oligonucleotide
gcaaccccggcagttggttttccgccctgaggtgctttggaatcatcctattcagagggt

SEQ ID NO: 45067 - DNA, 60 bp, Artificial
  Synthetic oligonucleotide
gctgttctgttgctgttcttcgtgcttttgcctatgctgcccgcgccaccggccggccag

SEQ ID NO: 45068 - DNA, 60 bp, Artificial
  Synthetic oligonucleotide
tggccagggtatatcggcctggagtaagaccttctgtgctctgttcggcccgtggtttcg

SEQ ID NO: 45069 - DNA, 58 bp, Artificial
  Synthetic oligonucleotide
caacggcggtgccggcggtggtttctggggtgacagggttgattctcagcccttcgcc

SEQ ID NO: 45070 - DNA, 60 bp, Artificial
  Synthetic oligonucleotide
gagatccttattaatttgatgcaaccccggcagttggttttccgccctgaggtactttgg

SEQ ID NO: 45071 - DNA, 60 bp, Artificial
  Synthetic oligonucleotide
taacttgatgcagccccggcagcttgttttccggcctgaggtcctgtggaatcaccccat

SEQ ID NO: 45072 - DNA, 60 bp, Artificial
  Synthetic oligonucleotide
taatctgatgcagccccggcagcttgttttccggcctgaggtcctgtggaatcaccctat

SEQ ID NO: 45073 - DNA, 60 bp, Artificial
  Synthetic oligonucleotide
tgatgcagccccggcagcttgttttccggcctgaggtcctgtggaatcaccccattcaac

SEQ ID NO: 45074 - DNA, 60 bp, Artificial
  Synthetic oligonucleotide
ttcatccaaccaaccccttcgcatctgacattccaaccgcagccggggctggagctcgcc

SEQ ID NO: 45075 - DNA, 60 bp, Artificial
  Synthetic oligonucleotide
tcccctatattcatccaaccaaccccttcgcatctgacattccagccgcagccggggctg

SEQ ID NO: 45076 - DNA, 60 bp, Artificial
  Synthetic oligonucleotide
aggctgctctggctgcggccaattccgccttggcgaatgctgtggtggtccggccgtttt

SEQ ID NO: 45077 - DNA, 58 bp, Artificial
  Synthetic oligonucleotide
gggctgattctcagccctttgccctcccctatattcatccaaccaaccccttcgccgc

SEQ ID NO: 45078 - DNA, 60 bp, Artificial
  Synthetic oligonucleotide
gcgcccatgggttcgcgaccatgcgccctcggcctattttgttgctgttcctcatgtttc

SEQ ID NO: 45079 - DNA, 60 bp, Artificial
  Synthetic oligonucleotide
ttctgttgttgctcttcgtgcttttgcctatgctgcccgcgccaccggccggccagccgt

SEQ ID NO: 45080 - DNA, 60 bp, Artificial
  Synthetic oligonucleotide
ttctgttgctgttcttcgtgcttttgcctatgctgcccgcgccaccggccggccagccgt

SEQ ID NO: 45081 - DNA, 60 bp, Artificial
  Synthetic oligonucleotide
ctgttgttcctcgtgcttttgcctatgctgcccgcgccaccggccggccagccgtctggc

SEQ ID NO: 45082 - DNA, 60 bp, Artificial
  Synthetic oligonucleotide
tgttgttcctcgtgcttttgcctatgctgcccgcgccaccggccggccagccgtctggcc

SEQ ID NO: 45083 - DNA, 60 bp, Artificial
  Synthetic oligonucleotide
tgacagggttgattctcagcccttcgccctcccctatattcatccaaccaaccccttcgc

SEQ ID NO: 45084 - DNA, 60 bp, Artificial
  Synthetic oligonucleotide
gtgacagggttgattctcagcccttcgccctcccctatattcatccaaccaaccccttcg

SEQ ID NO: 45085 - DNA, 57 bp, Artificial
  Synthetic oligonucleotide
tgctcttcgtgcttttgcctatgctgcccgcgccaccggccggccagccgtctggcc

SEQ ID NO: 45086 - DNA, 60 bp, Artificial
  Synthetic oligonucleotide
cagccccggcagcttgttttccggcctgaggttttatggaatcacccaattcagcgtgtg

SEQ ID NO: 45087 - DNA, 60 bp, Artificial
  Synthetic oligonucleotide
cagggttgattctcagcccttcgccctcccctatattcatccaaccaaccccttcgccgc

SEQ ID NO: 45088 - DNA, 60 bp, Artificial
  Synthetic oligonucleotide
cagggttgattctcagcccttcgccctcccctatattcatccaaccaaccccttcgccac

SEQ ID NO: 45089 - DNA, 51 bp, Artificial
  Synthetic oligonucleotide
ttcgccctcccctatattcatccaaccaaccccttcgcatctgacattcca

SEQ ID NO: 45090 - DNA, 60 bp, Artificial
  Synthetic oligonucleotide
tcgtcgatctaccccagctggggctgcgccgttgactgctgtgtcacctgcacctgacac

SEQ ID NO: 45091 - DNA, 60 bp, Artificial
  Synthetic oligonucleotide
gtctccatacttcgtgcgtggatccgcacgactaaaatagttggtgaccacccgttggtg

SEQ ID NO: 45092 - DNA, 60 bp, Artificial
  Synthetic oligonucleotide
ggctgttcgagaagtccggccgtgattacatccccggccgtcagttgcagttttatgccc

SEQ ID NO: 45093 - DNA, 60 bp, Artificial
  Synthetic oligonucleotide
cgccttggcgaatgctgtggtggttcggcctttcctgtcccggctacagacagagatact

SEQ ID NO: 45094 - DNA, 51 bp, Artificial
  Synthetic oligonucleotide
ttgctgacacgcttctcggcgggctcccgacagaattgatttcgtcggctg

SEQ ID NO: 45095 - DNA, 60 bp, Artificial
  Synthetic oligonucleotide
ttctgttgctgttcttcgtgcttttgcctatgctgcccgcgccaccggccggtcagccgt

SEQ ID NO: 45096 - DNA, 60 bp, Artificial
  Synthetic oligonucleotide
ttctgttgttgttcctcgtgcttttgcctatgctgcccgcgccaccggccggtcagccgt

SEQ ID NO: 45097 - DNA, 54 bp, Artificial
  Synthetic oligonucleotide
ggtgacagggttgattctcagcccttcgccctcccctatattcatccaaccaac

SEQ ID NO: 45098 - DNA, 60 bp, Artificial
  Synthetic oligonucleotide
cgctcgtgctcatacttttgatgatttctgccctgagtgccgtgcgcttggtcttcaggg

SEQ ID NO: 45099 - DNA, 60 bp, Artificial
  Synthetic oligonucleotide
cagttcataaaggctcctggcgtcactactgctattgagcaggcagctctagcagcggcc

SEQ ID NO: 45100 - DNA, 60 bp, Artificial
  Synthetic oligonucleotide
cagttcataaaggctcctggcgtcacaactgctattgagcaggcagctctagcagcggcc

SEQ ID NO: 45101 - DNA, 60 bp, Artificial
  Synthetic oligonucleotide
gacacgcttctcggcgggctcccgacagaattgatttcgtcggctggtggccagctattt

SEQ ID NO: 45102 - DNA, 60 bp, Artificial
  Synthetic oligonucleotide
tctggctgcggccaattccgccttggcgaatgctgtggtggttcggccgttcttgtctcg

SEQ ID NO: 45103 - DNA, 60 bp, Artificial
  Synthetic oligonucleotide
aatcttgctgacacacttctcggcggtttgccgacagaattgatttcgtcggctggaggc

SEQ ID NO: 45104 - DNA, 60 bp, Artificial
  Synthetic oligonucleotide
aggctgctctggctgcggccaattccgccttggcgaatgctgtggtggttcggccgtttt

SEQ ID NO: 45105 - DNA, 60 bp, Artificial
  Synthetic oligonucleotide
tgctctggctgcggctaactccgccttggcgaatgctgtggtggtccggccgttcttatc

SEQ ID NO: 45106 - DNA, 60 bp, Artificial
  Synthetic oligonucleotide
tgctctggcagcggctaactccgccttggcgaatgctgtggtggtccggccgttcttatc

SEQ ID NO: 45107 - DNA, 51 bp, Artificial
  Synthetic oligonucleotide
ggtaccggcggtggtttctggggtgacagggttgattctcagcccttcgcc

SEQ ID NO: 45108 - DNA, 52 bp, Artificial
  Synthetic oligonucleotide
cggtaccggcggtggtttctggggtgacagggttgattctcagcccttcgcc

SEQ ID NO: 45109 - DNA, 51 bp, Artificial
  Synthetic oligonucleotide
agtgccggcggtggtttctggggtgacagggttgattctcagcccttcgcc

SEQ ID NO: 45110 - DNA, 60 bp, Artificial
  Synthetic oligonucleotide
ccttcgccctcccctatattcatccaaccaaccccttcgccgccgatgtcgtttcacaat

SEQ ID NO: 45111 - DNA, 60 bp, Artificial
  Synthetic oligonucleotide
ccttcgccctcccctatattcatccaaccaacccctttgccgccgacgtcgtatcacaac

SEQ ID NO: 45112 - DNA, 60 bp, Artificial
  Synthetic oligonucleotide
ccctcccctatattcatccaaccaacccctttgccgccgacgtcatttcacaacccgggg

SEQ ID NO: 45113 - DNA, 60 bp, Artificial
  Synthetic oligonucleotide
ccttcgccctcccctatattcatccaaccaacccctttgccgccgacgtcgtaccacaac

SEQ ID NO: 45114 - DNA, 60 bp, Artificial
  Synthetic oligonucleotide
aactgctattgagcaggcagctctagcagcggccaactccgccttggcgaatgctgtggt

SEQ ID NO: 45115 - DNA, 60 bp, Artificial
  Synthetic oligonucleotide
taaaggctcctggcgtcactactgctattgagcaggcagctctagcagcggccaactccg

SEQ ID NO: 45116 - DNA, 60 bp, Artificial
  Synthetic oligonucleotide
tactgctattgagcaggcagctctagcagcggccaactccgccttggcgaatgctgtggt

SEQ ID NO: 45117 - DNA, 60 bp, Artificial
  Synthetic oligonucleotide
ggcgggcttccgacagaattgatttcgtcggctggtggccagttattttactctcgcccc

SEQ ID NO: 45118 - DNA, 60 bp, Artificial
  Synthetic oligonucleotide
cggccgttcttatctcgtgtacaaactgagattcttattaatttgatgcaaccccggcag

SEQ ID NO: 45119 - DNA, 60 bp, Artificial
  Synthetic oligonucleotide
ttcatccaaccaaccccttcgccgccgatgtcgtttcacaatccggggctggagctcgcc

SEQ ID NO: 45120 - DNA, 60 bp, Artificial
  Synthetic oligonucleotide
aggctgctctggctgcggccaactccgccttggcgaatgctgtggtggttcggccgtttt

SEQ ID NO: 45121 - DNA, 60 bp, Artificial
  Synthetic oligonucleotide
cttttcaatctactgttgctgagctgcagcgtcttaaaatgaaggtgggtaaaacccggg

SEQ ID NO: 45122 - DNA, 54 bp, Artificial
  Synthetic oligonucleotide
ggtgaccgggttgattctcaacccttcgccctcccctatattcatccaaccaac

SEQ ID NO: 45123 - DNA, 60 bp, Artificial
  Synthetic oligonucleotide
ctgtgcttgaccttacaaactctatcatacagcgggtggaatgaataacatgtcttttgc

SEQ ID NO: 45124 - DNA, 60 bp, Artificial
  Synthetic oligonucleotide
ggggtgaccggattgattctcagcccttcgccctcccctatattcatccaaccaacccct

SEQ ID NO: 45125 - DNA, 60 bp, Artificial
  Synthetic oligonucleotide
ggggtgacagggttgattcccagcccttcgccctcccctatattcatccaaccaacccct

SEQ ID NO: 45126 - DNA, 60 bp, Artificial
  Synthetic oligonucleotide
gcttggcgtgaccagtcccagcgcccctccgctgccccccgtcgtcgatctgccccagcc

SEQ ID NO: 45127 - DNA, 60 bp, Artificial
  Synthetic oligonucleotide
tgcaaccccggcagttggttttccgccctgaggtgctctggaatcaccctatccagcggg

SEQ ID NO: 45128 - DNA, 60 bp, Artificial
  Synthetic oligonucleotide
ccgccttggcgaatgctgtggtggttcggccttttctatcccggctacagacagagatac

SEQ ID NO: 45129 - DNA, 60 bp, Artificial
  Synthetic oligonucleotide
agcagattgagatcctcattaacctaatgcaacctcgccagcttgttttccgccccgagg

SEQ ID NO: 45130 - DNA, 60 bp, Artificial
  Synthetic oligonucleotide
ccagcagattgagattctcattaacctaatgcaacctcgccagcttgttttccgccccga

SEQ ID NO: 45131 - DNA, 60 bp, Artificial
  Synthetic oligonucleotide
agcagattgagattctcattaacctaatgcaacctcgccagcttgttttccgccccgagg

SEQ ID NO: 45132 - DNA, 60 bp, Artificial
  Synthetic oligonucleotide
tgctgacacacttctcggcgggcttccgacagaattgatttcgtcggctggtggccagct

SEQ ID NO: 45133 - DNA, 60 bp, Artificial
  Synthetic oligonucleotide
cagtctactgtcgctgagcttcagcgccttaagatgaaggtgggtaaaactcgggagtta

SEQ ID NO: 45134 - DNA, 56 bp, Artificial
  Synthetic oligonucleotide
atcctcacaataccgcagagtctagactcgtggtggacttctctcaattttctagg

SEQ ID NO: 45135 - DNA, 60 bp, Artificial
  Synthetic oligonucleotide
aatcctcacaataccgcagagtctagactcgtggtggacttctctcaattttctaggggg

SEQ ID NO: 45136 - DNA, 60 bp, Artificial
  Synthetic oligonucleotide
tcttgtacatgtcccactgttcaagcctccaagctgtgccttgggtggctttgggacatg

SEQ ID NO: 45137 - DNA, 60 bp, Artificial
  Synthetic oligonucleotide
tcatgtcccactgttcaagcctccaagctgtgccttgggtggctttggggcatggacatt

SEQ ID NO: 45138 - DNA, 60 bp, Artificial
  Synthetic oligonucleotide
tcatgttccactgttcaagcctccaagctgtgccttgggtggctttggggcatggacatt

SEQ ID NO: 45139 - DNA, 60 bp, Artificial
  Synthetic oligonucleotide
tacatgtcccactgttcaagcctccaagctgtgccttgggtggctttggggcatggacat

SEQ ID NO: 45140 - DNA, 60 bp, Artificial
  Synthetic oligonucleotide
acatgtcccactgttcaagcctccaagctgtgccttgggtggctttggggcatggacatt

SEQ ID NO: 45141 - DNA, 60 bp, Artificial
  Synthetic oligonucleotide
gacaaaaatcctcacaataccacagagtctagactcgtggtggacttctctcaattttct

SEQ ID NO: 45142 - DNA, 60 bp, Artificial
  Synthetic oligonucleotide
ccggtccgtgtgcacttcgcttcacctctgcacgtcgcatggagaccaccgtgaacgccc

SEQ ID NO: 45143 - DNA, 60 bp, Artificial
  Synthetic oligonucleotide
acctgccggaccgtgtgcacttcgcttcacctctgcacgtcgcatggagaccaccgtgaa

SEQ ID NO: 45144 - DNA, 60 bp, Artificial
  Synthetic oligonucleotide
atcggcgcatgcgtggaacctttgtggctcctctgccgatccatactgcggaactcctag

SEQ ID NO: 45145 - DNA, 60 bp, Artificial
  Synthetic oligonucleotide
tcatgttccactgttcaagcctccaagctgtgccttgggtggctttggagcatggacatt

SEQ ID NO: 45146 - DNA, 60 bp, Artificial
  Synthetic oligonucleotide
tcatgtcctactgttcaagcctccaagctgtgccttggctggctttggggcatggacatt

SEQ ID NO: 45147 - DNA, 60 bp, Artificial
  Synthetic oligonucleotide
tcatgtcctactgttcaagcctccaagctgtgccttgggtggctttaggacatggacatc

SEQ ID NO: 45148 - DNA, 60 bp, Artificial
  Synthetic oligonucleotide
tcatgtcctactgttcaagcctccaagctgtgccttgggtggctttaggacatggacatt

SEQ ID NO: 45149 - DNA, 60 bp, Artificial
  Synthetic oligonucleotide
cggaccgtgtgcacttcgcttcacctctgcacgtcgcatggagaccaccgtgaacgccca

SEQ ID NO: 45150 - DNA, 60 bp, Artificial
  Synthetic oligonucleotide
ctctgcctaatcatctcatgttcatgtcctactgttcaagcctccaagctgtgccttggg

SEQ ID NO: 45151 - DNA, 60 bp, Artificial
  Synthetic oligonucleotide
ctgcctaatcatctcatgttcatgtcctactgttcaagcctccaagctgtgccttgggtg

SEQ ID NO: 45152 - DNA, 60 bp, Artificial
  Synthetic oligonucleotide
ctgccggaccgtgtgcacttcgcttcacctctgcacgtcgcatggagaccaccgtgaacg

SEQ ID NO: 45153 - DNA, 60 bp, Artificial
  Synthetic oligonucleotide
ttgtggctcctctgccgatccatactgcggaactcctagccgcttgttttgctcgcagcc

SEQ ID NO: 45154 - DNA, 60 bp, Artificial
  Synthetic oligonucleotide
tgacaagcttcctcacaataccgcagagtctagactcgtggtggacttctctcaattttc

SEQ ID NO: 45155 - DNA, 60 bp, Artificial
  Synthetic oligonucleotide
tgacaagaatcctcacaatacctcagagtctagactcgtggtggacttctctcaattttc

SEQ ID NO: 45156 - DNA, 60 bp, Artificial
  Synthetic oligonucleotide
tgacaagaatcctcacaataccgaagagtctagactcgtggtggacttctctcaattttc

SEQ ID NO: 45157 - DNA, 60 bp, Artificial
  Synthetic oligonucleotide
tgacaaaaatcctcacaataccgaagagtctagactcgtggtggacttctctcaattttc

SEQ ID NO: 45158 - DNA, 60 bp, Artificial
  Synthetic oligonucleotide
tgacaagaatcctcacaaaaccgcagagtctagactcgtggtggacttctctcaattttc

SEQ ID NO: 45159 - DNA, 60 bp, Artificial
  Synthetic oligonucleotide
ttgacaaaaatcctcacaataccaaagagtctagactcgtggtggacttctctcaatttt

SEQ ID NO: 45160 - DNA, 60 bp, Artificial
  Synthetic oligonucleotide
tgacaaaaatcctcacaattccgcagagtctagactcgtggtggacttctctcaattttc

SEQ ID NO: 45161 - DNA, 60 bp, Artificial
  Synthetic oligonucleotide
tctcttgttcatgtcctactgttcaagcctccaagctgtgccttgggtggctttggggca

SEQ ID NO: 45162 - DNA, 60 bp, Artificial
  Synthetic oligonucleotide
tgttgacaagaatcctcacaataccgcagagtctagactcgtggtggacttctctcaatt

SEQ ID NO: 45163 - DNA, 60 bp, Artificial
  Synthetic oligonucleotide
ccgtctgtgccttctcatctgccggaccgtgtgcacttcgcttcacctctgcacgtcgca

SEQ ID NO: 45164 - DNA, 60 bp, Artificial
  Synthetic oligonucleotide
actccccgtctgtgccttctcatctgccggaccgtgtgcacttcgcttcacctctgcacg

SEQ ID NO: 45165 - DNA, 60 bp, Artificial
  Synthetic oligonucleotide
ctccccgtctgtgccttctcatctgccggaccgtgtgcacttcgcttcacctctgcacgt

SEQ ID NO: 45166 - DNA, 60 bp, Artificial
  Synthetic oligonucleotide
tctccccgtctgtgccttctcatctgccggaccgtgtgcacttcgcttcacctctgcacg

SEQ ID NO: 45167 - DNA, 60 bp, Artificial
  Synthetic oligonucleotide
atcctcacaataccacagagtctagactcgtggtggacttctctcaattttctaggggga

SEQ ID NO: 45168 - DNA, 60 bp, Artificial
  Synthetic oligonucleotide
tctcctctgccgatccatactgcggaactcctagccgcttgttttgctcgcagccggtct

SEQ ID NO: 45169 - DNA, 60 bp, Artificial
  Synthetic oligonucleotide
gccggaccgtgtgcacttcgcttcacctctgcacgtcgcatggagacctccgtgaacgcc

SEQ ID NO: 45170 - DNA, 60 bp, Artificial
  Synthetic oligonucleotide
gccggaccgtgtgcacttcgcttcacctctgcacgtcgcacggagaccaccgtgaacgcc

SEQ ID NO: 45171 - DNA, 60 bp, Artificial
  Synthetic oligonucleotide
gccggaccgtgtgcacttcgcttcacctctgcacgtcgcatggagaccaccgtgaacgct

SEQ ID NO: 45172 - DNA, 60 bp, Artificial
  Synthetic oligonucleotide
gccggaccgtgtgcacttcgcttcacctctgcacgtcgcatggagaccaccgtgaacgcc

SEQ ID NO: 45173 - DNA, 60 bp, Artificial
  Synthetic oligonucleotide
tgccggaccgtgtgcacttcgcttcacctctgcacgtcgcatggagaccaccgtgaacgc

SEQ ID NO: 45174 - DNA, 60 bp, Artificial
  Synthetic oligonucleotide
cctactgttcaagcctccaagctgtgccttgggtggcttttgggcatggacattgaccca

SEQ ID NO: 45175 - DNA, 60 bp, Artificial
  Synthetic oligonucleotide
cctactgttcaagcctccaagctgtgccttgggtggcttttgggcatggacattgaccct

SEQ ID NO: 45176 - DNA, 60 bp, Artificial
  Synthetic oligonucleotide
cggaccgtgtgcacttcgcttcacctctgcacgtcgcatggaaaccaccgtgaacgcccc

SEQ ID NO: 45177 - DNA, 60 bp, Artificial
  Synthetic oligonucleotide
cggaccgtgtgcacttcgcttcacctctgcacgtcgcatggaaaccaccgtgaacgccca

SEQ ID NO: 45178 - DNA, 60 bp, Artificial
  Synthetic oligonucleotide
acaaaaatcctcacaataccgcagagtctagactcgtggtggacttctctcaattttcta

SEQ ID NO: 45179 - DNA, 57 bp, Artificial
  Synthetic oligonucleotide
aatcctcacaataccacagagtctagactcgtggtggacttctctcaattttctagg

SEQ ID NO: 45180 - DNA, 56 bp, Artificial
  Synthetic oligonucleotide
atcctcacaataccacagagtctagactcgtggtggacttctctcaattttctagg

SEQ ID NO: 45181 - DNA, 58 bp, Artificial
  Synthetic oligonucleotide
gaatcctcacaataccacagagtctagactcgtggtggacttctctcaattttctagg

SEQ ID NO: 45182 - DNA, 52 bp, Artificial
  Synthetic oligonucleotide
tcacaataccacagagtctagactcgtggtggacttctctcaattttctagg

SEQ ID NO: 45183 - DNA, 58 bp, Artificial
  Synthetic oligonucleotide
atcctcacaataccacagagtctagactcgtggtggacttctctcaattttctagggg

SEQ ID NO: 45184 - DNA, 57 bp, Artificial
  Synthetic oligonucleotide
tcaagcctccaagctgtgccttgggtggctttggggcatggacattgacccttataa

SEQ ID NO: 45185 - DNA, 60 bp, Artificial
  Synthetic oligonucleotide
ctgttcaagcctccaagctgtgccttgggtggctttggggcatggacattgacccttata

SEQ ID NO: 45186 - DNA, 60 bp, Artificial
  Synthetic oligonucleotide
tcatgttcatgtcctactgttcaagcctccaagctgtgccttgggtggctttggggcatg

SEQ ID NO: 45187 - DNA, 60 bp, Artificial
  Synthetic oligonucleotide
atgtccaactgttcaagcctccaagctgtgccttgggtggctttggggcatggacattga

SEQ ID NO: 45188 - DNA, 60 bp, Artificial
  Synthetic oligonucleotide
atgtcccactgttcaagcctccaagctgtgccttgggtggctttggggcatggacattga

SEQ ID NO: 45189 - DNA, 60 bp, Artificial
  Synthetic oligonucleotide
ttgttcatgtcccactgttcaagcctccaagctgtgccttgggtggctttggggcatgga

SEQ ID NO: 45190 - DNA, 60 bp, Artificial
  Synthetic oligonucleotide
cctactgttcaagcctccaagctgtgccttgggtggctttggggcatggacattgacaca

SEQ ID NO: 45191 - DNA, 60 bp, Artificial
  Synthetic oligonucleotide
cctactgttcaagcctccaagctgtgccttgggtggctttggggcatggacattgacacc

SEQ ID NO: 45192 - DNA, 60 bp, Artificial
  Synthetic oligonucleotide
cctactgttcaagcctccaagctgtgccttgggtggctttggggcatggacattgacacg

SEQ ID NO: 45193 - DNA, 60 bp, Artificial
  Synthetic oligonucleotide
cctactgttcaagcctccaagctgtgccttgggtggctttggggcatggacattgatcct

SEQ ID NO: 45194 - DNA, 60 bp, Artificial
  Synthetic oligonucleotide
atgtcctactgttcaagcctccaagctgtgccttgggtggctttggggcatggacattga

SEQ ID NO: 45195 - DNA, 60 bp, Artificial
  Synthetic oligonucleotide
tgtcctactgttcaagcctccaagctgtgccttgggtggctttggggcatggacattgac

SEQ ID NO: 45196 - DNA, 60 bp, Artificial
  Synthetic oligonucleotide
atctgccggaccgtgtgcacttcgcttcacctctgcacgtcgcatggaaaccaccgtgaa

SEQ ID NO: 45197 - DNA, 60 bp, Artificial
  Synthetic oligonucleotide
gccggaccgtgtgcacttcgcttcacctctgcacgtcgcatggcaaccaccgtgaacgcc

SEQ ID NO: 45198 - DNA, 60 bp, Artificial
  Synthetic oligonucleotide
atctgccggtccgtgtgcacttcgcttcacctctgcacgttgcgtggagaccaccgtgaa

SEQ ID NO: 45199 - DNA, 60 bp, Artificial
  Synthetic oligonucleotide
tgtcccactgttcaagcctccaagctgtgccttgggtggctttgggacatggacattgac

SEQ ID NO: 45200 - DNA, 60 bp, Artificial
  Synthetic oligonucleotide
cctctgcctaatcatctcatgttcatgtcctactgttcaagcctccaagctgtgccttgg

SEQ ID NO: 45201 - DNA, 60 bp, Artificial
  Synthetic oligonucleotide
cggaccgtgtgcacttcgcttcacctctgcacgttgcatggagaccaccgtgaacgcccc

SEQ ID NO: 45202 - DNA, 60 bp, Artificial
  Synthetic oligonucleotide
gttgacaagaatcctcacaataccacagagtctagactcgtggtggacttctctcaattt

SEQ ID NO: 45203 - DNA, 60 bp, Artificial
  Synthetic oligonucleotide
gccggcccgtgtgcacttcgcttcacctctgcacgtcgcatggaaaccaccgtgaacgcc

SEQ ID NO: 45204 - DNA, 60 bp, Artificial
  Synthetic oligonucleotide
gccggtccgtgtgcacttcgcttcacctctgcacgtcgcatggaaaccaccgtgaacgcc

SEQ ID NO: 45205 - DNA, 60 bp, Artificial
  Synthetic oligonucleotide
gccggtccgtgtgcacttcgcttcacctctgcacgtcgcatggaaaccaccgtgaacgtc

SEQ ID NO: 45206 - DNA, 60 bp, Artificial
  Synthetic oligonucleotide
gttcatgtcctactgttcaagcctccaagctgtgccttgggtggctttggggcatggaca

SEQ ID NO: 45207 - DNA, 60 bp, Artificial
  Synthetic oligonucleotide
catgcgtggaacctttgtggctcctctgccgatccatactgcggaactcctagccgcttg

SEQ ID NO: 45208 - DNA, 60 bp, Artificial
  Synthetic oligonucleotide
atctgccgggccgtgtgcacttcgcttcacctctgcacgtcgcatggaaacctccgtgaa

SEQ ID NO: 45209 - DNA, 60 bp, Artificial
  Synthetic oligonucleotide
gaatcctcacaataccgcagaatctagactcgtggtggacttctctcaattttctagggg

SEQ ID NO: 45210 - DNA, 56 bp, Artificial
  Synthetic oligonucleotide
atcctcacaataccaaagagtctagactcgtggtggacttctctcaattttctagg

SEQ ID NO: 45211 - DNA, 60 bp, Artificial
  Synthetic oligonucleotide
cctactgttcaagcctccaagctgtgccttgggtggctttaggacatggacattgaccca

SEQ ID NO: 45212 - DNA, 60 bp, Artificial
  Synthetic oligonucleotide
cctactgttcaagcctccaagctgtgccttgggtggctttaggacatggacattgacccg

SEQ ID NO: 45213 - DNA, 60 bp, Artificial
  Synthetic oligonucleotide
cctactgttcaagcctccaagctgtgccttgggtggctttaggacatggacattgacacc

SEQ ID NO: 45214 - DNA, 60 bp, Artificial
  Synthetic oligonucleotide
cctactgttcaagcctccaagctgtgccttgggtggctttaggacatggacattgacacg

SEQ ID NO: 45215 - DNA, 60 bp, Artificial
  Synthetic oligonucleotide
gcctaatcatctcatgttcatgtcctactgttcaagcctccaagctgtgccttgggtggc

SEQ ID NO: 45216 - DNA, 60 bp, Artificial
  Synthetic oligonucleotide
ggaccgtgtgcacttcgcttcacctctgcacgtcgcatggagaccaccgtgaacgcccac

SEQ ID NO: 45217 - DNA, 60 bp, Artificial
  Synthetic oligonucleotide
ggaccgtgtgcacttcgcttcacctctgcacgtcgcatggagaccaccgtgaacgcccat

SEQ ID NO: 45218 - DNA, 60 bp, Artificial
  Synthetic oligonucleotide
cctactgttcaagcctccaagctgtgccttgggtggctttggggcatggacattgaccca

SEQ ID NO: 45219 - DNA, 60 bp, Artificial
  Synthetic oligonucleotide
cctactgttcaagcctccaagctgtgccttgggtggctttggggcatggacattgacccg

SEQ ID NO: 45220 - DNA, 60 bp, Artificial
  Synthetic oligonucleotide
cctactgttcaagcctccaagctgtgccttgggtggctttggggcatggacattgacccc

SEQ ID NO: 45221 - DNA, 60 bp, Artificial
  Synthetic oligonucleotide
cctactgttcaagcctccaagctgtgccttgggtggctttggggcatggacattgaccct

SEQ ID NO: 45222 - DNA, 60 bp, Artificial
  Synthetic oligonucleotide
ttcatgtctcactgttcaagcctccaagctgtgccttgggtggctttgaggcatggacat

SEQ ID NO: 45223 - DNA, 56 bp, Artificial
  Synthetic oligonucleotide
cggaccgtgtgcacttcgcttcacctctgcacgtcgcatggagaccaccgtgaacg

SEQ ID NO: 45224 - DNA, 60 bp, Artificial
  Synthetic oligonucleotide
atctgccggtccgtgtgcacttcgcttcacctctgcacgtcgcatggaaaccaccgtgaa

SEQ ID NO: 45225 - DNA, 60 bp, Artificial
  Synthetic oligonucleotide
ctgcctaatcatctcttgtacatgtcccactgttcaagcctccaagctgtgccttgggtg

SEQ ID NO: 45226 - DNA, 60 bp, Artificial
  Synthetic oligonucleotide
ccgtctgtgccttctcatctgccggaccgtgtgcacttcgcttcacctctgcacgttgca

SEQ ID NO: 45227 - DNA, 60 bp, Artificial
  Synthetic oligonucleotide
cccgtctgtgccttctcatctgccggaccgtgtgcacttcgcttcacctctgcacgttgc

SEQ ID NO: 45228 - DNA, 60 bp, Artificial
  Synthetic oligonucleotide
tcatgtcctactgttcaagcctccaagctgtgccttgggtggctttagggcatggacatt

SEQ ID NO: 45229 - DNA, 60 bp, Artificial
  Synthetic oligonucleotide
tcatgtcctactgttcaagcctccaagctgtgccttgggtggctttgcggcatggacatt

SEQ ID NO: 45230 - DNA, 60 bp, Artificial
  Synthetic oligonucleotide
tgacaagaatcctcacaataccgcagagtctagactcgtggtggacttctctcaatttcc

SEQ ID NO: 45231 - DNA, 60 bp, Artificial
  Synthetic oligonucleotide
cctactgttcaagcctccaagctgtgccttgggtggctttaggacatggacatcgacccg

SEQ ID NO: 45232 - DNA, 60 bp, Artificial
  Synthetic oligonucleotide
cctactgttcaagcctccaagctgtgccttgggtggctttaggacatggacatcgaccca

SEQ ID NO: 45233 - DNA, 60 bp, Artificial
  Synthetic oligonucleotide
tgacaagaatcctcgcaataccgcagagtctagactcgtggtggacttctctcaattttc

SEQ ID NO: 45234 - DNA, 60 bp, Artificial
  Synthetic oligonucleotide
gccggaccgtgtgcacttcgcttcacctctgcacgtcgcatggaaaccaccgtgaacgcc

SEQ ID NO: 45235 - DNA, 60 bp, Artificial
  Synthetic oligonucleotide
tgccggtccgtgtgcacttcgcttcacctctgcacgttgcatggagaccaccgtgaacgc

SEQ ID NO: 45236 - DNA, 60 bp, Artificial
  Synthetic oligonucleotide
cggtccgtgtgcacttcgcttcacctctgcacgttgcatggagaccaccgtgaacgccca

SEQ ID NO: 45237 - DNA, 60 bp, Artificial
  Synthetic oligonucleotide
cggtccgtgtgcacttcgcttcacctctgcacgttgcatggagaccaccgtgaacgcccc

SEQ ID NO: 45238 - DNA, 60 bp, Artificial
  Synthetic oligonucleotide
gccggtccgtgtgcacttcgcttcacctctgcacgttgcatggagaccaccgtgaacgcc

SEQ ID NO: 45239 - DNA, 60 bp, Artificial
  Synthetic oligonucleotide
atcctcacaataccacagagtctagactcgtggtggacttctctcaattttctaggggaa

SEQ ID NO: 45240 - DNA, 60 bp, Artificial
  Synthetic oligonucleotide
atcctcacaataccacagagtctagactcgtggtggacttctctcaattttctaggggta

SEQ ID NO: 45241 - DNA, 52 bp, Artificial
  Synthetic oligonucleotide
gccggaccgtgtgcacttcgcttcacctctgcacgtcgcatggaaaccaccg

SEQ ID NO: 45242 - DNA, 60 bp, Artificial
  Synthetic oligonucleotide
ttgacaagaatcctcacaataccacagagtctagactcgtggtggacttctctcaatttt

SEQ ID NO: 45243 - DNA, 60 bp, Artificial
  Synthetic oligonucleotide
tgacaagaatcctcacaataccacagagtctagactcgtggtggacttctctcaattttc

SEQ ID NO: 45244 - DNA, 60 bp, Artificial
  Synthetic oligonucleotide
atctgccggaccgtgtgcacttcgcttcacctctgcacgtggcatggagaccaccgtgaa

SEQ ID NO: 45245 - DNA, 60 bp, Artificial
  Synthetic oligonucleotide
atctgccggaccgtgtgcacttcgcttcacctctgcacgtcacatggagaccaccgtgaa

SEQ ID NO: 45246 - DNA, 60 bp, Artificial
  Synthetic oligonucleotide
atctgccggaccgtgtgcacttcgcttcacctctgcacgtcgcctggagaccaccgtgaa

SEQ ID NO: 45247 - DNA, 60 bp, Artificial
  Synthetic oligonucleotide
cctactgttcaagcctccaagctgtgccttgggtggctttgggacatggacattgaccca

SEQ ID NO: 45248 - DNA, 60 bp, Artificial
  Synthetic oligonucleotide
cctactgttcaagcctccaagctgtgccttgggtggctttgggacatggacattgacccg

SEQ ID NO: 45249 - DNA, 60 bp, Artificial
  Synthetic oligonucleotide
cctactgttcaagcctccaagctgtgccttgggtggctttgggacatggacattgaccct

SEQ ID NO: 45250 - DNA, 60 bp, Artificial
  Synthetic oligonucleotide
cctactgttcaagcctccaagctgtgccttgggtggctttagggcatggacattgaccca

SEQ ID NO: 45251 - DNA, 60 bp, Artificial
  Synthetic oligonucleotide
cctactgttcaagcctccaagctgtgccttgggtggctttagggcatggacattgacgcg

SEQ ID NO: 45252 - DNA, 60 bp, Artificial
  Synthetic oligonucleotide
cctactgttcaagcctccaagctgtgccttgggtggctttgcggcatggacattgacccg

SEQ ID NO: 45253 - DNA, 60 bp, Artificial
  Synthetic oligonucleotide
cctactgttcaagcctccaagctgtgccttgggtggctttagggcatggacattgacacc

SEQ ID NO: 45254 - DNA, 60 bp, Artificial
  Synthetic oligonucleotide
cctactgttcaagcctccaagctgtgccttgggtggctttagggcatggacattgaccct

SEQ ID NO: 45255 - DNA, 60 bp, Artificial
  Synthetic oligonucleotide
cctactgttcaagcctccaagctgtgccttgggtggctttagggcatggacattgatcct

SEQ ID NO: 45256 - DNA, 60 bp, Artificial
  Synthetic oligonucleotide
cctactgttcaagcctccaagctgtgccttgggtggctttagggcatggacattgacacg

SEQ ID NO: 45257 - DNA, 60 bp, Artificial
  Synthetic oligonucleotide
cctactgttcaagcctccaagctgtgccttgggtggctttagggcatggacattgacccg

SEQ ID NO: 45258 - DNA, 60 bp, Artificial
  Synthetic oligonucleotide
gcctaatcatttcatgttcatgtcctactgttcaagcctccaagctgtgccttgggtggc

SEQ ID NO: 45259 - DNA, 60 bp, Artificial
  Synthetic oligonucleotide
gcctagtcatctcatgttcatgtcctactgttcaagcctccaagctgtgccttgggtggc

SEQ ID NO: 45260 - DNA, 60 bp, Artificial
  Synthetic oligonucleotide
gacaaaaatcctcacaataccgcagagtctagactcgtggtggacttctctcaattttct

SEQ ID NO: 45261 - DNA, 60 bp, Artificial
  Synthetic oligonucleotide
atctgccggaccgtgtgcacttcgcttcacctctgcacgtcgcatggagaccaccgtgaa

SEQ ID NO: 45262 - DNA, 60 bp, Artificial
  Synthetic oligonucleotide
tgacaagaatcctcacaataccgcagagtctagactcgtggtggacttctctcaattttc

SEQ ID NO: 45263 - DNA, 60 bp, Artificial
  Synthetic oligonucleotide
atcctcacaatacctcagagtctagactcgtggtggacttctctcaattttctaggggga

SEQ ID NO: 45264 - DNA, 60 bp, Artificial
  Synthetic oligonucleotide
atctgccggtccgtgtgcacttcgcttcacctctgcacgttgcatggagaccaccgtgaa

SEQ ID NO: 45265 - DNA, 60 bp, Artificial
  Synthetic oligonucleotide
catctgccggtccgtgtgcacttcgcttcacctctgcacgttgcatggagaccaccgtga

SEQ ID NO: 45266 - DNA, 54 bp, Artificial
  Synthetic oligonucleotide
catgtcctactgttcaagcctccaagctgtgccttgggtggctttagggcatgg

SEQ ID NO: 45267 - DNA, 60 bp, Artificial
  Synthetic oligonucleotide
atcctcacaataccgcagagtctagactcgtggtggacttctctcaattttctaggggga

SEQ ID NO: 45268 - DNA, 60 bp, Artificial
  Synthetic oligonucleotide
tcatgtcctactgttcaagcctccaagctgtgccttgggtggctttggggcatggacatt

SEQ ID NO: 45269 - DNA, 60 bp, Artificial
  Synthetic oligonucleotide
tcatgtcctactgttcaagcctccaagctgtgccttgggtggctttggggcatggacatc

SEQ ID NO: 45270 - DNA, 60 bp, Artificial
  Synthetic oligonucleotide
tgttcatgttccactgttcaagcctccaagctgtgccttgggtggctttggagcatggac

SEQ ID NO: 45271 - DNA, 60 bp, Artificial
  Synthetic oligonucleotide
acaaaaatcctcacaattccacagagtctagactcgtggtggacttctctcaattttcta

SEQ ID NO: 45272 - DNA, 60 bp, Artificial
  Synthetic oligonucleotide
ccaactgttcaagcctccaagctgtgccttgggtggctttggggcatggacattgaccct

SEQ ID NO: 45273 - DNA, 60 bp, Artificial
  Synthetic oligonucleotide
cccactgttcaagcctccaagctgtgccttgggtggctttggggcatggacattgaccct

SEQ ID NO: 45274 - DNA, 60 bp, Artificial
  Synthetic oligonucleotide
gcctaatcatctcatgttcgtgtcctactgttcaagcctccaagctgtgccttgggtggc

SEQ ID NO: 45275 - DNA, 60 bp, Artificial
  Synthetic oligonucleotide
gcctaatcacctcttgttcatgtcctactgttcaagcctccaagctgtgccttgggtggc

SEQ ID NO: 45276 - DNA, 60 bp, Artificial
  Synthetic oligonucleotide
gccgaatcatctcttgttcatgtcctactgttcaagcctccaagctgtgccttgggtggc

SEQ ID NO: 45277 - DNA, 60 bp, Artificial
  Synthetic oligonucleotide
tgcctaatcatctcgtgttcatgtcctactgttcaagcctccaagctgtgccttgggtgg

SEQ ID NO: 45278 - DNA, 60 bp, Artificial
  Synthetic oligonucleotide
atctgccggaccgtgtgcacttcgcttcacctctgcacgttgcatggagaccaccgtgaa

SEQ ID NO: 45279 - DNA, 60 bp, Artificial
  Synthetic oligonucleotide
cggaccgtgtgcacttcgcttcacctctgcacgtcgcatggagaccaccgtgaacggcca

SEQ ID NO: 45280 - DNA, 60 bp, Artificial
  Synthetic oligonucleotide
tctgccggaccgtgtgcacttcgcttcacctctgcacgtcgcatggagaccaccgtgaac

SEQ ID NO: 45281 - DNA, 60 bp, Artificial
  Synthetic oligonucleotide
aaaatcctcacaattccacagagtctagactcgtggtggacttctctcaattttctaggg

SEQ ID NO: 45282 - DNA, 60 bp, Artificial
  Synthetic oligonucleotide
gtcctactgttcaagcctccaagctgtgccttgggtggctttagggcatggacattgacc

SEQ ID NO: 45283 - DNA, 60 bp, Artificial
  Synthetic oligonucleotide
ggaccgtgtgcacttcgcttcacctctgcacgtcgcatggagaccaccgtgaacggccgc

SEQ ID NO: 45284 - DNA, 60 bp, Artificial
  Synthetic oligonucleotide
gcctaatcatctcttgttcatgtcctactgttcaagcctccaagctgtgccttgggtggc

SEQ ID NO: 45285 - DNA, 60 bp, Artificial
  Synthetic oligonucleotide
ctcacaataccgcagagtctagactcgtggtggacttctctcaattttctagggggagca

SEQ ID NO: 45286 - DNA, 60 bp, Artificial
  Synthetic oligonucleotide
atgtcctactgttcaagcctccaagctgtgccttgggtggctttagggcatggacattga

SEQ ID NO: 45287 - DNA, 60 bp, Artificial
  Synthetic oligonucleotide
tgtcctactgttcaagcctccaagctgtgccttgggtggctttagggcatggacattgac

SEQ ID NO: 45288 - DNA, 60 bp, Artificial
  Synthetic oligonucleotide
tgacaaaaatcctcacaataccacagagtctagactcgtggtggacttctctcaattttc

SEQ ID NO: 45289 - DNA, 60 bp, Artificial
  Synthetic oligonucleotide
gcctaatcatctcttgttcatgtcccactgttcaagcctccaagctgtgccttgggtggc

SEQ ID NO: 45290 - DNA, 60 bp, Artificial
  Synthetic oligonucleotide
gcctaatcatctcatgttcatgtcccactgttcaagcctccaagctgtgccttgggtggc

SEQ ID NO: 45291 - DNA, 56 bp, Artificial
  Synthetic oligonucleotide
atcctcacaataccacggagtctagactcgtggtggacttctctcaattttctagg

SEQ ID NO: 45292 - DNA, 60 bp, Artificial
  Synthetic oligonucleotide
tgtcctactgttcaagcctccaagctgtgccttgggtggctttaggacatggacattgac

SEQ ID NO: 45293 - DNA, 60 bp, Artificial
  Synthetic oligonucleotide
gcgcatgcgtggaacctttgtggctcctctgccgatccatactgcggaactcctagccgc

SEQ ID NO: 45294 - DNA, 60 bp, Artificial
  Synthetic oligonucleotide
atctcttgtacatgtcccactgttcaagcctccaagctgtgccttgggtggctttggggc

SEQ ID NO: 45295 - DNA, 60 bp, Artificial
  Synthetic oligonucleotide
tcatgtcctactgttcaagcctccaagctgtgccttgggtggctttgggacatggacatt

SEQ ID NO: 45296 - DNA, 60 bp, Artificial
  Synthetic oligonucleotide
ctctgcctaatcatctcttgtacatgtcccactgttcaagcctccaagctgtgccttggg

SEQ ID NO: 45297 - DNA, 60 bp, Artificial
  Synthetic oligonucleotide
cccactgttcaagcctccaagctgtgccttgggtggctttgggacatggacattgacccg

SEQ ID NO: 45298 - DNA, 60 bp, Artificial
  Synthetic oligonucleotide
cctactgttcaagcctccaagctgtgccttgggtggctttggggcatggacatcgaccct

SEQ ID NO: 45299 - DNA, 60 bp, Artificial
  Synthetic oligonucleotide
cctactgttcaagcctccaagctgtgccttgggtggctttggggcatggacatcgacccg

SEQ ID NO: 45300 - DNA, 60 bp, Artificial
  Synthetic oligonucleotide
tctaccggaccgtgtgcacttcgcttcacctctgcacgtcgcatggaaaccaccgtgaac

SEQ ID NO: 45301 - DNA, 60 bp, Artificial
  Synthetic oligonucleotide
gccggaccgtgtgcacttcgcttcacctctgcacgttgcatggagaccaccgtgaacgcc

SEQ ID NO: 45302 - DNA, 60 bp, Artificial
  Synthetic oligonucleotide
tgtcctactgttcaagcctccaagctgtgccttgggtggctttgggacatggacattgac

SEQ ID NO: 45303 - DNA, 60 bp, Artificial
  Synthetic oligonucleotide
atctgccggtccgtgtgcacttcgcttcacctctgcacgtcgcatggagaccaccgtgaa

SEQ ID NO: 45304 - DNA, 60 bp, Artificial
  Synthetic oligonucleotide
agaatcctcacaataccacagagtctagactcgtggtggacttctctcaattttctaggg

SEQ ID NO: 45305 - DNA, 60 bp, Artificial
  Synthetic oligonucleotide
gccggtccgtgtgcacttcgcttcacctctgcacgtcgcatggagaccaccgtgaacgcc

SEQ ID NO: 45306 - DNA, 60 bp, Artificial
  Synthetic oligonucleotide
gccggcccgtgtgcacttcgcttcacctctgcacgtcgcatggagaccaccgtgaacgcc

SEQ ID NO: 45307 - DNA, 60 bp, Artificial
  Synthetic oligonucleotide
tcatgtcctactgttcaagcctccaagctgtgccttgggtggcttttgggcatggacatt

SEQ ID NO: 45308 - DNA, 60 bp, Artificial
  Synthetic oligonucleotide
catgtcctactgttcaagcctccaagctgtgccttgggtggcttttgggcatggacattg

SEQ ID NO: 45309 - DNA, 60 bp, Artificial
  Synthetic oligonucleotide
accggaccgtgtgcacttcgcttcacctctgcacgtcgcatggagaccaccgtgaacgcc

SEQ ID NO: 45310 - DNA, 60 bp, Artificial
  Synthetic oligonucleotide
ccggaccgtgtgcacttcgcttcacctctgcacgtcgcatggagaccaccgtgaacgctc

SEQ ID NO: 45311 - DNA, 60 bp, Artificial
  Synthetic oligonucleotide
tgacaaaaatcctcacaataccgcagagtctagactcgtggtggacttctctcaattttc

SEQ ID NO: 45312 - DNA, 60 bp, Artificial
  Synthetic oligonucleotide
acatgtcccactgttcaagcctccaagctgtgccttggatggctttggggcatggacatt

SEQ ID NO: 45313 - DNA, 60 bp, Artificial
  Synthetic oligonucleotide
cggaccgtgtgcacttcgcttcacctctgcacgtcgcatggagaccaccgtgaacgcccc

SEQ ID NO: 45314 - DNA, 60 bp, Artificial
  Synthetic oligonucleotide
cggaccgtgtgcacttcgcttcacctctgcacgtcgcatggagaccaccgtgaacgccct

SEQ ID NO: 45315 - DNA, 60 bp, Artificial
  Synthetic oligonucleotide
tggctcctctgccgatccatactgcggaactcctagccgcttgttttgctcgcagcaggt

SEQ ID NO: 45316 - DNA, 60 bp, Artificial
  Synthetic oligonucleotide
ttgaagaagaaaatgtctggtaccttcgggggaatactagctggcctaatcggattactg

SEQ ID NO: 45317 - DNA, 60 bp, Artificial
  Synthetic oligonucleotide
gtgaagaagaaaatgtctggtaccttcgggggaatactagctggcctaatcggattactg

SEQ ID NO: 45318 - DNA, 60 bp, Artificial
  Synthetic oligonucleotide
tgtcctactgttcaagcctccaagctgtgccttgggtggctttggggcatggacattgat

SEQ ID NO: 45319 - DNA, 60 bp, Artificial
  Synthetic oligonucleotide
caatgggagtcggccttagcccttttctcctccatctcttcactactgccctcggatccg

SEQ ID NO: 45320 - DNA, 60 bp, Artificial
  Synthetic oligonucleotide
gctccaatgggagtcggtctcagtccttttctcctccatctcttcactactgccctcgga

SEQ ID NO: 45321 - DNA, 60 bp, Artificial
  Synthetic oligonucleotide
tcatgtcctactgttcaagcctccaagctgtgccttggatggctttggggcatggacatt

SEQ ID NO: 45322 - DNA, 60 bp, Artificial
  Synthetic oligonucleotide
agaagaagaaaagttaaaaccacagttgtctatgggagaagacgttcaaagtccagggat

SEQ ID NO: 45323 - DNA, 60 bp, Artificial
  Synthetic oligonucleotide
agaagaagaaaagttaaaaccacagttgtctatgggagaagacgttcaaagtccagggaa

SEQ ID NO: 45324 - DNA, 60 bp, Artificial
  Synthetic oligonucleotide
cgaagaagaaaagttaaaaccacagttgtctatgggagaagacgttcaaagtccagggaa

SEQ ID NO: 45325 - DNA, 60 bp, Artificial
  Synthetic oligonucleotide
ctaggagaagaagagttaaaaccacagttgtctatgggagaagacgttcaaagtccaggg

SEQ ID NO: 45326 - DNA, 60 bp, Artificial
  Synthetic oligonucleotide
ctaggagaagaagagttaaaaccacaattgtctatgggagaagacgttcaaagtccaggg

SEQ ID NO: 45327 - DNA, 60 bp, Artificial
  Synthetic oligonucleotide
gccggaccgtgtgcacttcgcttcacctctgcacgacgcatggagaccaccgtgaacgcc

SEQ ID NO: 45328 - DNA, 60 bp, Artificial
  Synthetic oligonucleotide
cgcggactccccgtctgtgccttctcatctgccggaccgtgtgcacttcgcttcacctct

SEQ ID NO: 45329 - DNA, 60 bp, Artificial
  Synthetic oligonucleotide
gcggactccccgtctgtgccttctcatctgccggaccgtgtgcacttcgcttcacctctg

SEQ ID NO: 45330 - DNA, 58 bp, Artificial
  Synthetic oligonucleotide
agcctccaagctgtgccttggatggctttggggcatggacattgacccgtataaagaa

SEQ ID NO: 45331 - DNA, 60 bp, Artificial
  Synthetic oligonucleotide
accggaccgtgtgcacttcgcttcacctctgcacgtcgcatggaagccaccgtgaacgcc

SEQ ID NO: 45332 - DNA, 60 bp, Artificial
  Synthetic oligonucleotide
agggaactggaaaacctcgtggactcgaacctagaagaagaaaagttaaaaccacagttg

SEQ ID NO: 45333 - DNA, 60 bp, Artificial
  Synthetic oligonucleotide
tccccgtctgtgccttctcatctgccggaccgtgtgcacttcgcttcacctctgcacgtt

SEQ ID NO: 45334 - DNA, 60 bp, Artificial
  Synthetic oligonucleotide
acatgtcccacttttcaagcctccaagctgtgccttggatggctttggggcatggacatt

SEQ ID NO: 45335 - DNA, 60 bp, Artificial
  Synthetic oligonucleotide
acatgtcccacttttcaagcctccaagctgtgccttggatggctttggggcatggacatc

SEQ ID NO: 45336 - DNA, 60 bp, Artificial
  Synthetic oligonucleotide
cctacttttcaagcctccaagctgtgccttggatggctttggggcatggacatagatccc

SEQ ID NO: 45337 - DNA, 60 bp, Artificial
  Synthetic oligonucleotide
agggaactagaaaacctcgtggactcgaacctagaagaagaaaagttaaaaccacagttg

SEQ ID NO: 45338 - DNA, 60 bp, Artificial
  Synthetic oligonucleotide
cgggaactagaaaacctcgtggactcgaacctagaagaagaaaagttaaaaccacagttg

SEQ ID NO: 45339 - DNA, 60 bp, Artificial
  Synthetic oligonucleotide
gccgggccgtgtgcacttcgcttcacctctgcacgtcgcatggagaccaccatgaacgcc

SEQ ID NO: 45340 - DNA, 60 bp, Artificial
  Synthetic oligonucleotide
ccggaccgtgtgcacttcgcttcacctctgcacgtcgcatggagaccaccgtgaacgccc

SEQ ID NO: 45341 - DNA, 60 bp, Artificial
  Synthetic oligonucleotide
acgtcccactgttcaagcctccaagctgtgccttgggtggctttggggcatggacattga

SEQ ID NO: 45342 - DNA, 60 bp, Artificial
  Synthetic oligonucleotide
tcctactgttcaagcctccaagctgtgccttgggtggctttggggcatggacattgacac

SEQ ID NO: 45343 - DNA, 60 bp, Artificial
  Synthetic oligonucleotide
tcatctcatgttcatgtcctactgttcaagcctccaagctgtgccttgggtggcttttgg

SEQ ID NO: 45344 - DNA, 60 bp, Artificial
  Synthetic oligonucleotide
gccggaccgtgtgcacttcgcttcacctctgcacgtcgcatggaagccaccgtgaacgcc

SEQ ID NO: 45345 - DNA, 60 bp, Artificial
  Synthetic oligonucleotide
caatgggagtcggtctcagcccttttctcctccatctcttcactactgccctcggatccg

SEQ ID NO: 45346 - DNA, 60 bp, Artificial
  Synthetic oligonucleotide
caatgggagtcggtctcagcccttttctcctccatctcttcactactgccctcggatcag

SEQ ID NO: 45347 - DNA, 60 bp, Artificial
  Synthetic oligonucleotide
caatgggcgtcggtctcagcccttttctcctccatctcttcactactgccctcggatcag

SEQ ID NO: 45348 - DNA, 60 bp, Artificial
  Synthetic oligonucleotide
ccaatgggcgtcggtctcagcccttttctcctccatctcttcactactgccctcggatca

SEQ ID NO: 45349 - DNA, 60 bp, Artificial
  Synthetic oligonucleotide
caatgggcgtcggtctcagcccttttctcctccatctcttcactactgccctcggatccg

SEQ ID NO: 45350 - DNA, 60 bp, Artificial
  Synthetic oligonucleotide
ctccaatgggcgtcggtctcagcccttttctcctccatctcttcactactgccctcggat

SEQ ID NO: 45351 - DNA, 60 bp, Artificial
  Synthetic oligonucleotide
ccaatgggcgtcggtctcagcccttttctcctccatctcttcactactgccctcggatcc

SEQ ID NO: 45352 - DNA, 60 bp, Artificial
  Synthetic oligonucleotide
ccaatgggagtcggtctcagcccttttctcctccatctcttcactactgccctcggatca

SEQ ID NO: 45353 - DNA, 60 bp, Artificial
  Synthetic oligonucleotide
acatgtcccacttttcaagcctccaagctgtgccttggctggctttggggcatggacatt

SEQ ID NO: 45354 - DNA, 60 bp, Artificial
  Synthetic oligonucleotide
cccacttttcaagcctccaagctgtgccttggctggctttggggcatggacattgacccg

SEQ ID NO: 45355 - DNA, 60 bp, Artificial
  Synthetic oligonucleotide
gcctaatcatctcttgttcatgtcctacttttcaagcctccaagctgtgccttgggtggc

SEQ ID NO: 45356 - DNA, 60 bp, Artificial
  Synthetic oligonucleotide
ttaggaaagctccaatgggagtcggtctcagcccttttctcctccatctcttcactactg

SEQ ID NO: 45357 - DNA, 54 bp, Artificial
  Synthetic oligonucleotide
agcctccaagctgtgccttggatggctttggggcatggacattgacccttataa

SEQ ID NO: 45358 - DNA, 59 bp, Artificial
  Synthetic oligonucleotide
tttcaagcctccaagctgtgccttggatggctttggggcatggacattgacccttataa

SEQ ID NO: 45359 - DNA, 60 bp, Artificial
  Synthetic oligonucleotide
gccggaccgtgtgcacttcgcttcacctctgcacgttacatggaaaccgccatgaacacc

SEQ ID NO: 45360 - DNA, 60 bp, Artificial
  Synthetic oligonucleotide
gccgggccgtgtgcacttcgcttcacctctgcacgtcgcatggaaaccaccgtgaacgcc

SEQ ID NO: 45361 - DNA, 60 bp, Artificial
  Synthetic oligonucleotide
cggaccgtgtgcacttcgcttcacctctgcacgtcgcatggagaccaccgtgaacgctca

SEQ ID NO: 45362 - DNA, 60 bp, Artificial
  Synthetic oligonucleotide
agaaaatgtctggtaccttcgggggaatactagctggcctaatcggattactggtaagct

SEQ ID NO: 45363 - DNA, 60 bp, Artificial
  Synthetic oligonucleotide
gccggaccgtgtgcacttcgcttcacctctgcacgtagcatggagaccaccgtgaacgcc

SEQ ID NO: 45364 - DNA, 60 bp, Artificial
  Synthetic oligonucleotide
ccttcgggggaatactagctggcctaatcggattactggtaagctttttcttgttgataa

SEQ ID NO: 45365 - DNA, 60 bp, Artificial
  Synthetic oligonucleotide
ctccaagctgtgccttggatggctttggggcatggacatagatccctataaagaatttgg

SEQ ID NO: 45366 - DNA, 60 bp, Artificial
  Synthetic oligonucleotide
ctccaagctgtgccttggatggctttggggcatggacatagatccttataaagaatttgg

SEQ ID NO: 45367 - DNA, 60 bp, Artificial
  Synthetic oligonucleotide
gaagaaaatgtctggtaccttcgggggaatactagctggcctaatcggattactggtaag

SEQ ID NO: 45368 - DNA, 60 bp, Artificial
  Synthetic oligonucleotide
cctactgttcaagcctccaagctgtgccttgggtggctttggggcatggacattgatccg

SEQ ID NO: 45369 - DNA, 54 bp, Artificial
  Synthetic oligonucleotide
atgtcctactgttcaagcctccaagctgtgccttgggtggctttagggcatgga

SEQ ID NO: 45370 - DNA, 52 bp, Artificial
  Synthetic oligonucleotide
tgtcctactgttcaagcctccaagctgtgccttgggtggctttagggcatgg

SEQ ID NO: 45371 - DNA, 60 bp, Artificial
  Synthetic oligonucleotide
gtcctactgttcaagcctccaagctgtgccttgggtggctttggggcatggacattgacc

SEQ ID NO: 45372 - DNA, 60 bp, Artificial
  Synthetic oligonucleotide
cctttctggctcctctgccgatccatactgcggaactcctagccgcttgttttgctcgca

SEQ ID NO: 45373 - DNA, 60 bp, Artificial
  Synthetic oligonucleotide
ctttgtggctcctctgccgatccatactgcggaactcctagccgcttgttttgctcgcag

SEQ ID NO: 45374 - DNA, 60 bp, Artificial
  Synthetic oligonucleotide
ccctactgttcaagcctccaagctgtgccttgggtggctttggggcatggacattgaccc

SEQ ID NO: 45375 - DNA, 60 bp, Artificial
  Synthetic oligonucleotide
gctccaatgggagtcggtctcagcccttttctcctccatctcttcactactgccctcgga

SEQ ID NO: 45376 - DNA, 60 bp, Artificial
  Synthetic oligonucleotide
gctccaatgggagtcggtctcagcccttttctcctccatctcttcactactgccctcggg

SEQ ID NO: 45377 - DNA, 60 bp, Artificial
  Synthetic oligonucleotide
atgtcctactgttcaagcctccaagctgtgccttgggtggctttaggacatggacattga

SEQ ID NO: 45378 - DNA, 60 bp, Artificial
  Synthetic oligonucleotide
atgtcctactgttcaagcctccaagctgtgccttgggtggctttaggacatggacatcga

SEQ ID NO: 45379 - DNA, 60 bp, Artificial
  Synthetic oligonucleotide
tatggatgacttcctcctctgccacccaaacgctcgtcaccttaactcaattagccacgc

SEQ ID NO: 45380 - DNA, 60 bp, Artificial
  Synthetic oligonucleotide
tggatgacttcctcctctgccacccaaacgctcgtcaccttaactcaattagccacgctg

SEQ ID NO: 45381 - DNA, 60 bp, Artificial
  Synthetic oligonucleotide
gatgacttcctcctctgccacccaaacgctcgtcaccttaactcaattagccacgctgtc

SEQ ID NO: 45382 - DNA, 60 bp, Artificial
  Synthetic oligonucleotide
cttcctcctctgccacccaaacgctcgtcaccttaactcaattagccacgctgtctgctc

SEQ ID NO: 45383 - DNA, 60 bp, Artificial
  Synthetic oligonucleotide
caatgggagtcggtctcagcccttttctcctccatctatttactactgccatcggagccg

SEQ ID NO: 45384 - DNA, 54 bp, Artificial
  Synthetic oligonucleotide
agcctccaagctgtgccttggatggctttgggacatggacattgacccttataa

SEQ ID NO: 45385 - DNA, 54 bp, Artificial
  Synthetic oligonucleotide
agcctccaagctgtgccttggatggctttggggcatggacatcgacccttataa

SEQ ID NO: 45386 - DNA, 54 bp, Artificial
  Synthetic oligonucleotide
agcctccaagctgtgccttggatggctttggggcatggacattgacctttataa

SEQ ID NO: 45387 - DNA, 60 bp, Artificial
  Synthetic oligonucleotide
cattgctgttgtcgtgtgtgactgtacctttggtatgtaccattgtttatgattcttgct

SEQ ID NO: 45388 - DNA, 60 bp, Artificial
  Synthetic oligonucleotide
cattgctgttgtcaagtctgactgtacctttggtatgtaccattgtttatgattcttgct

SEQ ID NO: 45389 - DNA, 60 bp, Artificial
  Synthetic oligonucleotide
ctttacgtctacattgctgttgtcgtgtttgactgtacctttggtatgtaccattgttta

SEQ ID NO: 45390 - DNA, 60 bp, Artificial
  Synthetic oligonucleotide
acgtctacattgctgttgtcgtgtgtgactgtacctttggtatgtaccattgtttatgat

SEQ ID NO: 45391 - DNA, 60 bp, Artificial
  Synthetic oligonucleotide
cgtgtgtgactgtacctttggtatgtaccattgtttatgattcttgcttatatatggatg

SEQ ID NO: 45392 - DNA, 60 bp, Artificial
  Synthetic oligonucleotide
gtcgtgtgtgactgtacctttggtatgtaccattgtttatgattcttgcttatatatgga

SEQ ID NO: 45393 - DNA, 60 bp, Artificial
  Synthetic oligonucleotide
cattgctgttgtcgtgtttgactgtacctttggtatgtaccattgtttatgattcttgct

SEQ ID NO: 45394 - DNA, 60 bp, Artificial
  Synthetic oligonucleotide
cgtgtgtgactgtacctttggtatgtaccattgtttatgattcttgcttatatatggata

SEQ ID NO: 45395 - DNA, 60 bp, Artificial
  Synthetic oligonucleotide
atttacgtctacattgctgttgtcaagtctgactgtacctttggtatgtaccattgttta

SEQ ID NO: 45396 - DNA, 60 bp, Artificial
  Synthetic oligonucleotide
gactgtacctttggtatgtaccattgtttatgattcttgcttatatatggatgtcaatgc

SEQ ID NO: 45397 - DNA, 60 bp, Artificial
  Synthetic oligonucleotide
gactgtacctttggtatgtaccattgtttatgattcttgcttatgtatggatatcaacgc

SEQ ID NO: 45398 - DNA, 60 bp, Artificial
  Synthetic oligonucleotide
gactgtacctttggtatgtaccattgtttatgatttctgcttatatatggatgtcaatgc

SEQ ID NO: 45399 - DNA, 50 bp, Artificial
  Synthetic oligonucleotide
aatggctggtaccttcgggggaatactagctggcctaatcggattactgg

SEQ ID NO: 45400 - DNA, 60 bp, Artificial
  Synthetic oligonucleotide
gaagaaaagttaaaaccacagttgtctatgggagaagacgttcaaagtccagggatagga

SEQ ID NO: 45401 - DNA, 60 bp, Artificial
  Synthetic oligonucleotide
gattggacggctcttacatacacccctctctcgaaagcaatatatattccacataggcta

SEQ ID NO: 45402 - DNA, 60 bp, Artificial
  Synthetic oligonucleotide
tggacggctcttacatacacccctctctcgaaagcaatatatattccacacaggctatgt

SEQ ID NO: 45403 - DNA, 60 bp, Artificial
  Synthetic oligonucleotide
tcggctcctctgccgatccatactgcggaactcctagccgcttgttttgctcgcagcagg

SEQ ID NO: 45404 - DNA, 60 bp, Artificial
  Synthetic oligonucleotide
ggctcctctgccgatccatactgcggaactcctagccgcttgttttgctcgcagcaggtt

SEQ ID NO: 45405 - DNA, 60 bp, Artificial
  Synthetic oligonucleotide
aggctcctctgccgatccatactgcggaactcctagccgcttgttttgctcgcagcaggt

SEQ ID NO: 45406 - DNA, 60 bp, Artificial
  Synthetic oligonucleotide
acatgtcccacttttcaagcctccaagctgtgccttgggtggctttggggcatggacatt

SEQ ID NO: 45407 - DNA, 60 bp, Artificial
  Synthetic oligonucleotide
cccacttttcaagcctccaagctgtgccttgggtggctttggggcatggacattgaccct

SEQ ID NO: 45408 - DNA, 60 bp, Artificial
  Synthetic oligonucleotide
tctgccggaccgtgtgcacttcgcttcacctctgcacgtcgcatggagaccaccgtgaaa

SEQ ID NO: 45409 - DNA, 60 bp, Artificial
  Synthetic oligonucleotide
ttttaggaaagctccaatgggagtcggtctcagcccttttctcctccatctcttcactac

SEQ ID NO: 45410 - DNA, 50 bp, Artificial
  Synthetic oligonucleotide
cggaccgtgtgcacttcgcttcacctctgcacgtcgcatggagaccaccg

SEQ ID NO: 45411 - DNA, 60 bp, Artificial
  Synthetic oligonucleotide
ccttttcggctcctctgccgatccatactgcggaactcctagccgcttgttttgctcgca

SEQ ID NO: 45412 - DNA, 60 bp, Artificial
  Synthetic oligonucleotide
cggcccgtgtgcacttcgcttcacctctgcacgtcgcatggagaccaccgtgaacgccca

SEQ ID NO: 45413 - DNA, 60 bp, Artificial
  Synthetic oligonucleotide
cggtccgtgtgcacttcgcttcacctctgcacgtcgcatggagaccaccgtgaacgccca

SEQ ID NO: 45414 - DNA, 60 bp, Artificial
  Synthetic oligonucleotide
ggaaagctccaatgggcgtcggtctcagcccttttctcctccatctcttcactactgccc

SEQ ID NO: 45415 - DNA, 60 bp, Artificial
  Synthetic oligonucleotide
cttacatacacccctctctcgaaagcaatatatattccacataggctatgtggaacttaa

SEQ ID NO: 45416 - DNA, 60 bp, Artificial
  Synthetic oligonucleotide
ctcttacatacacccctctctcgaaagcaatatatattccacataggctatgtggaactt

SEQ ID NO: 45417 - DNA, 60 bp, Artificial
  Synthetic oligonucleotide
catacacccctctctcgaaagcaatatatattccacataggctatgtggaacttaagaat

SEQ ID NO: 45418 - DNA, 60 bp, Artificial
  Synthetic oligonucleotide
cccggaccgtgtgcacttcgcttcacctctgcacgtcgcatggagaccaccgtgaacgcc

SEQ ID NO: 45419 - DNA, 60 bp, Artificial
  Synthetic oligonucleotide
cccacttttcaagcctccaagctgtgccttggttggctttggggcatggacattgaccct

SEQ ID NO: 45420 - DNA, 60 bp, Artificial
  Synthetic oligonucleotide
acatgtcccacttttcaagcctccaagctgtgccttggttggctttggggcatggacatt

SEQ ID NO: 45421 - DNA, 60 bp, Artificial
  Synthetic oligonucleotide
cctttgtggctcctctgccgatccatactgcggaactcctagccgcttgttttgctcgca

SEQ ID NO: 45422 - DNA, 60 bp, Artificial
  Synthetic oligonucleotide
tgccggaccgtgtgcacttcgcttcacctctgcacgtcgcatggaggccaccgtgaacgc

SEQ ID NO: 45423 - DNA, 60 bp, Artificial
  Synthetic oligonucleotide
atctaccggaccgtgtgcacttcgcttcacctctgcacgtcgcatggaggccaccgtgaa

SEQ ID NO: 45424 - DNA, 60 bp, Artificial
  Synthetic oligonucleotide
gccggaccgtgtgcacttcgcttcacctctgcacgtcgcatggaggccaccgtgaacgcc

SEQ ID NO: 45425 - DNA, 60 bp, Artificial
  Synthetic oligonucleotide
catgtcctactgttcaagcctccaagctgtgccttgggtggctttggggcatggacattg

SEQ ID NO: 45426 - DNA, 60 bp, Artificial
  Synthetic oligonucleotide
tcatgccctactgttcaagcctccaagctgtgccttgggtggctttggggcatggacatt

SEQ ID NO: 45427 - DNA, 60 bp, Artificial
  Synthetic oligonucleotide
atctgccggcccgtgtgcacttcgcttcacctctgcacgttgcatggagaccaccgtgaa

SEQ ID NO: 45428 - DNA, 60 bp, Artificial
  Synthetic oligonucleotide
ggcctgcagtgggcacttattacacaaccacttaccctcagaaccagtcagtgtttcaac

SEQ ID NO: 45429 - DNA, 60 bp, Artificial
  Synthetic oligonucleotide
tcgcaggagaagatctcaatcaccgcgtcgcagacgctctcaatctccatctgccaactg

SEQ ID NO: 45430 - DNA, 60 bp, Artificial
  Synthetic oligonucleotide
cttcaatgggtacataaaactaatgcaattacaggtctttactctaaccaagctgctcag

SEQ ID NO: 45431 - DNA, 60 bp, Artificial
  Synthetic oligonucleotide
acaacaacggaacgccaacacaatgcctatggagatccttttacaacactaagccctgcg

SEQ ID NO: 45432 - DNA, 60 bp, Artificial
  Synthetic oligonucleotide
ctggggaccctgcacagtcaccggagatgtcaccatcaagtctcctaggactcctcgcag

SEQ ID NO: 45433 - DNA, 60 bp, Artificial
  Synthetic oligonucleotide
tcaagggagaaagcctactcctccaactccacctctcagagatactcacccccacttaac

SEQ ID NO: 45434 - DNA, 60 bp, Artificial
  Synthetic oligonucleotide
ctttgggccgcctccccgcctgtttcgcctcgggctccggtccgtgttgcttggtcttca

SEQ ID NO: 45435 - DNA, 60 bp, Artificial
  Synthetic oligonucleotide
ggaggctgtaggcataaatgcatgcgacttctgtaaccatgtatctttttcacctgtgcc

SEQ ID NO: 45436 - DNA, 60 bp, Artificial
  Synthetic oligonucleotide
tgctttggtggacactgctactgccttgtatgaagaagaactaacaggtagggaacattg

SEQ ID NO: 45437 - DNA, 60 bp, Artificial
  Synthetic oligonucleotide
gctggggcattgccaccacctgtcaactcctttccgggactttcgctttccccctcccta

SEQ ID NO: 45438 - DNA, 60 bp, Artificial
  Synthetic oligonucleotide
caggcaacgtggcgtggtgtgcactgtgtttgctgacgcaacccccactggctggggcat

SEQ ID NO: 45439 - DNA, 57 bp, Artificial
  Synthetic oligonucleotide
gaactcatcgccgcctgccttgcccgctgctggacaggggctcggctgttgggcact

SEQ ID NO: 45440 - DNA, 60 bp, Artificial
  Synthetic oligonucleotide
cccctcccgatcgccacggcagaactcatcgccgcctgccttgcccgctgctggacaggg

SEQ ID NO: 45441 - DNA, 60 bp, Artificial
  Synthetic oligonucleotide
gggagtgggccttagcccgtttctcttggctcaatttactagtgcccttgcttcaatggt

SEQ ID NO: 45442 - DNA, 60 bp, Artificial
  Synthetic oligonucleotide
cacaatctctgcacaagacatgtatactcctccttactgttgttgtttaaaacctacggc

SEQ ID NO: 45443 - DNA, 60 bp, Artificial
  Synthetic oligonucleotide
tcgttggatgtatctgcggcgttttatcatatacctattagtcctgctgctgtgcctcat

SEQ ID NO: 45444 - DNA, 60 bp, Artificial
  Synthetic oligonucleotide
gacttttaaaggtaaaccatattcttgggaacacagacagctagtgcaacataatgggca

SEQ ID NO: 45445 - DNA, 60 bp, Artificial
  Synthetic oligonucleotide
gggcaacaacataaaagtcaccttcaatccagacaaaatagcagcgtggtggcctgcagt

SEQ ID NO: 45446 - DNA, 60 bp, Artificial
  Synthetic oligonucleotide
cccattctctcgactcttccggaacatacagtcattaggagaagaggaggtgcaagagct

SEQ ID NO: 45447 - DNA, 60 bp, Artificial
  Synthetic oligonucleotide
agaagaggaggtgcaagagcttctaggtcccccagaagacgcactccctctcctcgcagg

SEQ ID NO: 45448 - DNA, 60 bp, Artificial
  Synthetic oligonucleotide
ctcataaacagatacaaacagatagattggaacacttggcaaggatttcctgtggatcaa

SEQ ID NO: 45449 - DNA, 60 bp, Artificial
  Synthetic oligonucleotide
gtcggggaagctgacgtcctttccatggctgctcgcctgtgttgccacctggattctgcg

SEQ ID NO: 45450 - DNA, 60 bp, Artificial
  Synthetic oligonucleotide
ttgtaaaccatgtcaatgatacctggggacttaaggtgagacaaagtttatggtttcatt

SEQ ID NO: 45451 - DNA, 60 bp, Artificial
  Synthetic oligonucleotide
gtcctttccatggctgctcgcctgtgttgccacctggattctgcgcgggacgtccttctg

SEQ ID NO: 45452 - DNA, 60 bp, Artificial
  Synthetic oligonucleotide
cacttgccaacctcctgtccaccgacttgcaatggctttcgttggatgtatctgcggcgt

SEQ ID NO: 45453 - DNA, 60 bp, Artificial
  Synthetic oligonucleotide
tcagttttccagggggcataccagagtgcactggccaaaattcgcagttccaaacttgca

SEQ ID NO: 45454 - DNA, 60 bp, Artificial
  Synthetic oligonucleotide
cctccttgtataaatcctggttgctgtctctttatgaggagttgtggcccgttgtcaggc

SEQ ID NO: 45455 - DNA, 60 bp, Artificial
  Synthetic oligonucleotide
ttctgcgcgggacgtccttctgctacgtcccttcggccctcaatccagcggacctccctt

SEQ ID NO: 45456 - DNA, 60 bp, Artificial
  Synthetic oligonucleotide
tatatggatgatttggttttgggggcccgcacttctgagcatcttaccgccatttattcc

SEQ ID NO: 45457 - DNA, 60 bp, Artificial
  Synthetic oligonucleotide
gccggaccgtgtgcacttcgcttcacctctgcacgtcgcatggcgaccaccgtgaacgcc

SEQ ID NO: 45458 - DNA, 60 bp, Artificial
  Synthetic oligonucleotide
cctactgttcaagcctccaagctgtgccttggatggctttggggcatggacatagatcct

SEQ ID NO: 45459 - DNA, 60 bp, Artificial
  Synthetic oligonucleotide
tgtgtctcctctgccgatccatactgcggaactcctagccgcttgttttgctcgcagcag

SEQ ID NO: 45460 - DNA, 60 bp, Artificial
  Synthetic oligonucleotide
ttgtggctcctctgccgatccatactgcggaactcctagccgcttgtttcgctcgcagca

SEQ ID NO: 45461 - DNA, 60 bp, Artificial
  Synthetic oligonucleotide
acatgtcccacttttcaagcctccaagctgtgccttggatggctttgggacatggacatt

SEQ ID NO: 45462 - DNA, 60 bp, Artificial
  Synthetic oligonucleotide
gtcccactgttcaagcctccaagctgtgccttgggtggctttggggcatggacattgacc

SEQ ID NO: 45463 - DNA, 55 bp, Artificial
  Synthetic oligonucleotide
tcatgtcctactgttcaagcctccaagctgtgccttgggtggctttggggcatgg

SEQ ID NO: 45464 - DNA, 60 bp, Artificial
  Synthetic oligonucleotide
ttcatgtcctactgttcaagcctccaagctgtgccttgggtggctttggggcatggacat

SEQ ID NO: 45465 - DNA, 60 bp, Artificial
  Synthetic oligonucleotide
tcgtgtcctactgttcaagcctccaagctgtgccttgggtggctttggggcatggacatt

SEQ ID NO: 45466 - DNA, 60 bp, Artificial
  Synthetic oligonucleotide
tctgccggaccgtgtgcacttcgcttcacctctgcacgtcgcatggaaaccaccgtgaac

SEQ ID NO: 45467 - DNA, 60 bp, Artificial
  Synthetic oligonucleotide
agcaactgatgctaccttaacacatggcgcaatatcccatatcaccggcgggagcgcagt

SEQ ID NO: 45468 - DNA, 60 bp, Artificial
  Synthetic oligonucleotide
agcaactgatgctaccctaacacatggcgcaatatcccatatcaccggcgggagcgcagt

SEQ ID NO: 45469 - DNA, 60 bp, Artificial
  Synthetic oligonucleotide
ccacagatgctacacccacacatggcgcaatatcccatatcaccggcgggagcgcagtgt

SEQ ID NO: 45470 - DNA, 60 bp, Artificial
  Synthetic oligonucleotide
gccacagatgctacacccacacatggcgcaatatcccatatcaccggcgggagcgcagtg

SEQ ID NO: 45471 - DNA, 60 bp, Artificial
  Synthetic oligonucleotide
gctacattaacacatggcgcaatatcccatatcaccggcgggagcgcagtgtttaccttt

SEQ ID NO: 45472 - DNA, 60 bp, Artificial
  Synthetic oligonucleotide
ccacagatgctaccccaacacatggcgcaatatcccatatcaccggcgggagcgcagtgt

SEQ ID NO: 45473 - DNA, 60 bp, Artificial
  Synthetic oligonucleotide
gctacagatgctaccccaacacatggcgcaatatcccatatcaccggcgggagcgcagtg

SEQ ID NO: 45474 - DNA, 60 bp, Artificial
  Synthetic oligonucleotide
gccacagatgctactccaacacatggcgcaatatcccatatcaccggcgggagcgcagtg

SEQ ID NO: 45475 - DNA, 60 bp, Artificial
  Synthetic oligonucleotide
tcatgtcctactgttcaagcctccaagctgtgccttgggtggctttggggcatggccatt

SEQ ID NO: 45476 - DNA, 60 bp, Artificial
  Synthetic oligonucleotide
tcatgtcctactgttcaagcctccaagctgtgccttgggtggctttggggcatagacatc

SEQ ID NO: 45477 - DNA, 60 bp, Artificial
  Synthetic oligonucleotide
atgtcctactgttcaagcctccaagctgtgccttgggtggctttgggacatggacattga

SEQ ID NO: 45478 - DNA, 59 bp, Artificial
  Synthetic oligonucleotide
tgccggaccgtgtgcacttcgcttcacctctgcacgtcgcatggagaccaccgtgaacg

SEQ ID NO: 45479 - DNA, 60 bp, Artificial
  Synthetic oligonucleotide
gtgtctcctctgccgatccatactgcggaactcctagccgcttgttttgctcgcagcagg

SEQ ID NO: 45480 - DNA, 60 bp, Artificial
  Synthetic oligonucleotide
atgtcccactgttcaagcctccaagctgtgccttgggtggctttggggcatggacatcga

SEQ ID NO: 45481 - DNA, 60 bp, Artificial
  Synthetic oligonucleotide
catgtcctactgttcaagcctccaagctgtgccttgggtggctttagggcatggacattg

SEQ ID NO: 45482 - DNA, 60 bp, Artificial
  Synthetic oligonucleotide
agaagaagaaaagttaaaaccacagttgtctatgggagaagacgttcaaagtcccgggaa

SEQ ID NO: 45483 - DNA, 60 bp, Artificial
  Synthetic oligonucleotide
cccacttttcaagcctccaagctgtgccttgggtggctttgggacatggacattgacccg

SEQ ID NO: 45484 - DNA, 60 bp, Artificial
  Synthetic oligonucleotide
ccacacatgccgcaatatcccatatcaccggcgggagcgcagtgtttgcttttacaaagg

SEQ ID NO: 45485 - DNA, 60 bp, Artificial
  Synthetic oligonucleotide
catggcgcaatatcccatatcaccggcgggagcgcagtgtttgccttttcaaaggtcagg

SEQ ID NO: 45486 - DNA, 60 bp, Artificial
  Synthetic oligonucleotide
tggcgcaatatcccatatcaccggcgggagcgcagtgtttactttttcaaaggtcagaga

SEQ ID NO: 45487 - DNA, 60 bp, Artificial
  Synthetic oligonucleotide
ggcgcaatatcccatatcaccggcgggagcgcagtgtttgccttttcaaaggtcagggac

SEQ ID NO: 45488 - DNA, 60 bp, Artificial
  Synthetic oligonucleotide
tctaacacatggcgcaatatcccatatcaccggcgggtgcgcagtgtttaccttttcaaa

SEQ ID NO: 45489 - DNA, 60 bp, Artificial
  Synthetic oligonucleotide
cacgtgtagccacagatgctactccaacacatggcgcaatatcccatatcaccggcggga

SEQ ID NO: 45490 - DNA, 60 bp, Artificial
  Synthetic oligonucleotide
ttgccaagagtagccacggatgctacaccaacacatggcgcaatatcccatatcaccggc

SEQ ID NO: 45491 - DNA, 60 bp, Artificial
  Synthetic oligonucleotide
acatggcgcaatatcccatatcaccggcgggtgcgcagtgtttactttttcaaaggttag

SEQ ID NO: 45492 - DNA, 60 bp, Artificial
  Synthetic oligonucleotide
gcaaagctccaatgggagtcggtctcagcccttttctcctccatctcttcactactgccc

SEQ ID NO: 45493 - DNA, 60 bp, Artificial
  Synthetic oligonucleotide
tcctactgttcaagcctccaagctgtgccttgggtggctttagggcatggacattgaccc

SEQ ID NO: 45494 - DNA, 60 bp, Artificial
  Synthetic oligonucleotide
ctcctccatctcttcactactgccctcggatccgaaatctctcgtcgctttaacgtttgg

SEQ ID NO: 45495 - DNA, 60 bp, Artificial
  Synthetic oligonucleotide
ccacacatggcgcaatatcccatatcaccggcgggagcgcagtgtttgctttttcaaagg

SEQ ID NO: 45496 - DNA, 60 bp, Artificial
  Synthetic oligonucleotide
aacacatggcgcaatatcccatatcaccggcgggagcgcagtgtttaccttttcaaaggt

SEQ ID NO: 45497 - DNA, 53 bp, Artificial
  Synthetic oligonucleotide
ccacacatggcgcaatatcccatatcaccggcgggagcgcagtgtttgctttt

SEQ ID NO: 45498 - DNA, 60 bp, Artificial
  Synthetic oligonucleotide
cacatggcgcaatatcccatatcaccggcgggagcgcagtgtttgctttttcaaaggtca

SEQ ID NO: 45499 - DNA, 53 bp, Artificial
  Synthetic oligonucleotide
caacacatggcgcaatatcccatatcaccggcgggagcgcagtgtttgctttt

SEQ ID NO: 45500 - DNA, 60 bp, Artificial
  Synthetic oligonucleotide
aacacatggcgcaatatcccatatcaccggcgggagcgcagtgtttgccttttcaaaggt

SEQ ID NO: 45501 - DNA, 60 bp, Artificial
  Synthetic oligonucleotide
caacacatggcgcaatatcccatatcaccggcgggagcgcagtgtttgctttttcaaagg

SEQ ID NO: 45502 - DNA, 50 bp, Artificial
  Synthetic oligonucleotide
cacatggcgcaatatcccatatcaccggcgggagcgcagtgtttactttt

SEQ ID NO: 45503 - DNA, 50 bp, Artificial
  Synthetic oligonucleotide
cacatggcgcaatatcccatatcaccggcgggagcgcagtgtttgctttt

SEQ ID NO: 45504 - DNA, 60 bp, Artificial
  Synthetic oligonucleotide
cacatggcgcaatatcccatatcaccggcgggagcgcagtgtttactttttcaaaggtca

SEQ ID NO: 45505 - DNA, 60 bp, Artificial
  Synthetic oligonucleotide
ctttgtgtctcctctgccgatccatactgcggaactcctagccgcttgttttgctcgcag

SEQ ID NO: 45506 - DNA, 60 bp, Artificial
  Synthetic oligonucleotide
tgtctcctctgccgatccatactgcggaactcctagccgcctgttttgctcgcagcaggt

SEQ ID NO: 45507 - DNA, 60 bp, Artificial
  Synthetic oligonucleotide
cctttgtgtctcctctgccgatccatactgcggaactcctagccgcttgttttgctcgca

SEQ ID NO: 45508 - DNA, 60 bp, Artificial
  Synthetic oligonucleotide
gtcctactgttcaagcctccaagctgtgccttgggtggcttttgggcatggacattgacc

SEQ ID NO: 45509 - DNA, 60 bp, Artificial
  Synthetic oligonucleotide
ttctaccttcgggggaatactagctggcctaatcggattactggtaggatttttcttgtt

SEQ ID NO: 45510 - DNA, 60 bp, Artificial
  Synthetic oligonucleotide
gcacaaagactccatcgatcgtatccaccccggctcctgtcctgtcttcgcacggtgcta

SEQ ID NO: 45511 - DNA, 60 bp, Artificial
  Synthetic oligonucleotide
acggacggtacagacgggtcggttcagtcagtaaccgcgcctacggagctcccagaccta

SEQ ID NO: 45512 - DNA, 60 bp, Artificial
  Synthetic oligonucleotide
gcgctgccagttctgcatgtttaacccgcccagctcctatgcttaggttgtcaaatccgg

SEQ ID NO: 45513 - DNA, 60 bp, Artificial
  Synthetic oligonucleotide
gggactgatcccacttccgacgatggccttgctgtcccctttgccttaacacccgcgaaa

SEQ ID NO: 45514 - DNA, 60 bp, Artificial
  Synthetic oligonucleotide
gagcaggcaatctaactctcattccacgccccaaccacaggacagagtcaatgcggccgc

SEQ ID NO: 45515 - DNA, 60 bp, Artificial
  Synthetic oligonucleotide
gggcactattcgcgccctgactgaacaagcaattcacaacgctgtggccgaggtggttcg

SEQ ID NO: 45516 - DNA, 60 bp, Artificial
  Synthetic oligonucleotide
tctgactcggtggagctgtgtcccgtgtcctcctcgcccaagtccactccccggcaccca

SEQ ID NO: 45517 - DNA, 60 bp, Artificial
  Synthetic oligonucleotide
gagtcactcatttcttgcccatccacgtcgtctggtcctcgttccattgttcgcttacgc

SEQ ID NO: 45518 - DNA, 60 bp, Artificial
  Synthetic oligonucleotide
gcgatgtccagcggcctttcagtgaagctgcgcgcccacaaaactgcttccacgaagtga

SEQ ID NO: 45519 - DNA, 60 bp, Artificial
  Synthetic oligonucleotide
gtagaagcagggacactgactccaaaattcacggtcatgacgagtgctccggacaaggcc

SEQ ID NO: 45520 - DNA, 60 bp, Artificial
  Synthetic oligonucleotide
tcctctactgctgccccttcccattgaccctttccgctcttccacagggacgtccactca

SEQ ID NO: 45521 - DNA, 60 bp, Artificial
  Synthetic oligonucleotide
gcggaggacacgcgcaaagtgacattcttcaacaggaaccactacatcaccgcctggctt

SEQ ID NO: 45522 - DNA, 60 bp, Artificial
  Synthetic oligonucleotide
ccttcaagggtcgtggtccctccctcctctatatctagcagagctgatgccgcgccaata

SEQ ID NO: 45523 - DNA, 60 bp, Artificial
  Synthetic oligonucleotide
gcgcctgcggcttatcggttactggggagagtgctgtcaaatccttcgagctttcagcgg

SEQ ID NO: 45524 - DNA, 60 bp, Artificial
  Synthetic oligonucleotide
caaggagagaggctcactttggtccgaagatgtgcataacgcagctgaccacaaggcggc

SEQ ID NO: 45525 - DNA, 60 bp, Artificial
  Synthetic oligonucleotide
aaacgccacggacgagctttacctatgggacgaggaatgcgccggtccgctggacgagta

SEQ ID NO: 45526 - DNA, 60 bp, Artificial
  Synthetic oligonucleotide
cggtggatcagacatgggaactggaaatacgtggagaagccagccagcccctcccttcca

SEQ ID NO: 45527 - DNA, 60 bp, Artificial
  Synthetic oligonucleotide
acggtaattcccgccctccctctcgcagcgtcctggtccgatcccagcaaaattccacag

SEQ ID NO: 45528 - DNA, 60 bp, Artificial
  Synthetic oligonucleotide
ataccgctggccaaagtacagtgtggaagagcagcgcgagagcaggcgaggcgtggattt

SEQ ID NO: 45529 - DNA, 60 bp, Artificial
  Synthetic oligonucleotide
tgtcatcgggtacgcggccctgcttaccgctaaaagttcgaaaggaatcgggcccttggc

SEQ ID NO: 45530 - DNA, 60 bp, Artificial
  Synthetic oligonucleotide
ttcgaaaagcatggcatcgctacttggaactctggctctccttgccgcgacgctcgcacc

SEQ ID NO: 45531 - DNA, 60 bp, Artificial
  Synthetic oligonucleotide
gctgccagttcatccggtgtcaaccctcttgttctgatgtgagtgtcccaatcgcgctcc

SEQ ID NO: 45532 - DNA, 60 bp, Artificial
  Synthetic oligonucleotide
gctgcccctgctggtctaagctccgtatctgtatccattaaaggctccacccacagcggg

SEQ ID NO: 45533 - DNA, 60 bp, Artificial
  Synthetic oligonucleotide
cgtccgtgccgaagagcacctggagttcttccgtggaggctggcgagacatgcgggcaaa

SEQ ID NO: 45534 - DNA, 60 bp, Artificial
  Synthetic oligonucleotide
ctcctccgtcccgcgcgtggaagttaatgctcgccttgttgccgcggttgcactgataat

SEQ ID NO: 45535 - DNA, 60 bp, Artificial
  Synthetic oligonucleotide
aatagcttcccgccggaccgctgctcaacccgcgcaaatagttcgcgagccgctccaaag

SEQ ID NO: 45536 - DNA, 60 bp, Artificial
  Synthetic oligonucleotide
cgcatttgccgccatcatccgcccaccatagtccttgaggtgaagtgctcccggaccaat

SEQ ID NO: 45537 - DNA, 60 bp, Artificial
  Synthetic oligonucleotide
cgtctcccgccccttcagccttacaaaccgtagctgcattgttttcgtcgcgcgtgggaa

SEQ ID NO: 45538 - DNA, 60 bp, Artificial
  Synthetic oligonucleotide
ggtatccggaagtctgtaggtcattccagtgctcggcgggctacttgtcatcacccaact

SEQ ID NO: 45539 - DNA, 60 bp, Artificial
  Synthetic oligonucleotide
ccggggtcagcttaacgcggtgatgctcagaggaacctgggccatcttctttggaaacga

SEQ ID NO: 45540 - DNA, 60 bp, Artificial
  Synthetic oligonucleotide
ccgcacgacccgtcgcacccacgacatctcatatacatctcgcacttctgctctactcgc

SEQ ID NO: 45541 - DNA, 60 bp, Artificial
  Synthetic oligonucleotide
atcgtctcctcgcgtctaccggggagctcagtttactgccagcgtttgtgacccaagtgt

SEQ ID NO: 45542 - DNA, 60 bp, Artificial
  Synthetic oligonucleotide
taccgagaccccgagcgcggcacatgaaactacacagacccagagtgcagaaacggtggt

SEQ ID NO: 45543 - DNA, 60 bp, Artificial
  Synthetic oligonucleotide
aaaggtgcaggacggcaggacggcgacatttgactggcaggtagtggcgttgcgggaaag

SEQ ID NO: 45544 - DNA, 60 bp, Artificial
  Synthetic oligonucleotide
cttacgcccctcttccggattttcatgtctcgctcggacctcccctagcttccccaactg

SEQ ID NO: 45545 - DNA, 60 bp, Artificial
  Synthetic oligonucleotide
ggctctcctgtctctttcagctcttccatcccatcgttcatcttgccgattggcgcacga

SEQ ID NO: 45546 - DNA, 60 bp, Artificial
  Synthetic oligonucleotide
gcctcatcgcggcccgccttggcatcgaaactgcccgtgccaacgtcccggcaatgtaca

SEQ ID NO: 45547 - DNA, 60 bp, Artificial
  Synthetic oligonucleotide
tatagtttccaagcgcgcgtggctgcagcattcaccgcagcggtgtccgaggccattgta

SEQ ID NO: 45548 - DNA, 60 bp, Artificial
  Synthetic oligonucleotide
aggcgagataccaccacccgccgccccaaaccaccccaattcgaacacccctggtctggg

SEQ ID NO: 45549 - DNA, 60 bp, Artificial
  Synthetic oligonucleotide
ttcccacgcggcggcccggggaatctgcttgccccagaccttgctttccaactccccgtt

SEQ ID NO: 45550 - DNA, 60 bp, Artificial
  Synthetic oligonucleotide
cgcctgcgtcttggcaccacctacaaccaaacctgagctctccttcaacatgacaactgg

SEQ ID NO: 45551 - DNA, 60 bp, Artificial
  Synthetic oligonucleotide
acaatcgcgcctgaagccgaaacccacaaacgagcacgtcggaggggagcggtgcccctc

SEQ ID NO: 45552 - DNA, 60 bp, Artificial
  Synthetic oligonucleotide
gcgcaaacacctattcgacgataagaaaactcccgtccgtggcaactagcgcgtgcaatg

SEQ ID NO: 45553 - DNA, 60 bp, Artificial
  Synthetic oligonucleotide
ggtccgccatccgactttccgcccttagttgtgccagatgaactcttttccatttgcgcg

SEQ ID NO: 45554 - DNA, 60 bp, Artificial
  Synthetic oligonucleotide
gcgatcatgtcgagctgttcctgaaccacgggcacgcgcttaagtagtttgtgtctgcca

SEQ ID NO: 45555 - DNA, 60 bp, Artificial
  Synthetic oligonucleotide
ggcgacggctttgttccacggtagttctcgcggctttggctactttgattgattcctgtg

SEQ ID NO: 45556 - DNA, 60 bp, Artificial
  Synthetic oligonucleotide
cgcaaacggccccaagcttcgatataagcgagagtcagcaaccgtccgggcaaacacacg

SEQ ID NO: 45557 - DNA, 60 bp, Artificial
  Synthetic oligonucleotide
ccgattggtgaggcgcggtaacatggtttggtcgatttggtatctggtgatggaagagcg

SEQ ID NO: 45558 - DNA, 60 bp, Artificial
  Synthetic oligonucleotide
gcacaagtaaccgctcaaaccgcagacaggacgatgatgctaggtgacatgaccgtgctt

SEQ ID NO: 45559 - DNA, 60 bp, Artificial
  Synthetic oligonucleotide
ggccacaccgggaagcagtgaagtttattttgaatgccaacgaaagcacatgggtcacgc

SEQ ID NO: 45560 - DNA, 60 bp, Artificial
  Synthetic oligonucleotide
tccaggccgtaaccgccgacctgttagccgctacgcacgagcaactcggaatcgccgccg

SEQ ID NO: 45561 - DNA, 60 bp, Artificial
  Synthetic oligonucleotide
agctagaacgcatccctcaaagttcccgtcgaaggccacagccgtagccgcccgcgccac

SEQ ID NO: 45562 - DNA, 60 bp, Artificial
  Synthetic oligonucleotide
agatcgatgacagtgttgcggggtgggcgtacacagaactgatggcagaggggtcgtctc

SEQ ID NO: 45563 - DNA, 60 bp, Artificial
  Synthetic oligonucleotide
aacagcaagccgagaagtcccgtgtagccagagtcgaccagccccggtacgatctcccaa

SEQ ID NO: 45564 - DNA, 60 bp, Artificial
  Synthetic oligonucleotide
cgctcaagccagacctcataaagatcgcggtggaaagggtgctcgcggctattgacacgg

SEQ ID NO: 45565 - DNA, 60 bp, Artificial
  Synthetic oligonucleotide
tgttccaagagagcccgaaatcccgcagccacgagagagccttattgagtcgcgctagcg

SEQ ID NO: 45566 - DNA, 60 bp, Artificial
  Synthetic oligonucleotide
gaccgcagtcacggctccacacccaagcgctacgttgatcaaccgccgcagcaccgacca

SEQ ID NO: 45567 - DNA, 60 bp, Artificial
  Synthetic oligonucleotide
agagcgcgcaagatcggtgccacgaccacgcggcgacgcctaagcccacgcccgcagtgg

SEQ ID NO: 45568 - DNA, 60 bp, Artificial
  Synthetic oligonucleotide
aaaggcccggcaggcgtcagcgagttcttgcgtggccggtgaactagataacgtgcgcta

SEQ ID NO: 45569 - DNA, 60 bp, Artificial
  Synthetic oligonucleotide
tcgtgccggcctccggtgaacgcgacgccaagccctcggttgcctatgaccaacaccgcg

SEQ ID NO: 45570 - DNA, 60 bp, Artificial
  Synthetic oligonucleotide
agcaaacacgtgtacgccacgcacaggttcgcgcactgggctatctctgccgccgcctcg

SEQ ID NO: 45571 - DNA, 60 bp, Artificial
  Synthetic oligonucleotide
gtgccgcagttcgcttgccccagatcgacccgtaagcatgtcttctgcgatgggtgccgt

SEQ ID NO: 45572 - DNA, 60 bp, Artificial
  Synthetic oligonucleotide
tccgaagctgcgaacgcaaacatgcacgacgccgcgcaacaggagtgcagggaccctacg

SEQ ID NO: 45573 - DNA, 60 bp, Artificial
  Synthetic oligonucleotide
attaaccgcgcgtcacctctctgtcccacccctaaccctggcaccgagtggccgtcgccc

SEQ ID NO: 45574 - DNA, 60 bp, Artificial
  Synthetic oligonucleotide
tcagcgccatccagcctctgcgccacgaactactgccccgatagcccacccagtagaccc

SEQ ID NO: 45575 - DNA, 60 bp, Artificial
  Synthetic oligonucleotide
cctcgccctcccgcacctgatggacgtcatccgggtctgccgccgctacgacgcgagcca

SEQ ID NO: 45576 - DNA, 59 bp, Artificial
  Synthetic oligonucleotide
ggggaatgcctaggacccgccctgccagttgcctctgcccacgacgccttcggcactct

SEQ ID NO: 45577 - DNA, 60 bp, Artificial
  Synthetic oligonucleotide
tgttctccgtatggcccacctcgaccctgcccaagtccgcctcgcgttctgcgtcctcat

SEQ ID NO: 45578 - DNA, 60 bp, Artificial
  Synthetic oligonucleotide
ggcttagtcacgaacgctttcccgcctgccgtccatcacgcccgcttatcttgtttgggt

SEQ ID NO: 45579 - DNA, 60 bp, Artificial
  Synthetic oligonucleotide
cgtttcgcggcttttctgagagcaagtacgctaagggatggctgcacatggacggatggc

SEQ ID NO: 45580 - DNA, 60 bp, Artificial
  Synthetic oligonucleotide
gcgcccgacaacctggaacgacgacgcagagctggaagccgccgatgtcgaacgagcaat

SEQ ID NO: 45581 - DNA, 60 bp, Artificial
  Synthetic oligonucleotide
tcgtctcgcttctcggtgggtgggcattcagcgccagagtcgtgagctcgcgcgggatcg

SEQ ID NO: 45582 - DNA, 60 bp, Artificial
  Synthetic oligonucleotide
aaaccgcacaatacggacacgcctttcagctgcccgttgccgccaggtcccgcgccccac

SEQ ID NO: 45583 - DNA, 60 bp, Artificial
  Synthetic oligonucleotide
tgccgcccattcaggtttatgcgccgcagccgcagcaacacccgccttctctcgacacga

SEQ ID NO: 45584 - DNA, 60 bp, Artificial
  Synthetic oligonucleotide
gctctttacccgagtagccgcgtctgtatttcccgctcgtacttcagcgccccgataacg

SEQ ID NO: 45585 - DNA, 60 bp, Artificial
  Synthetic oligonucleotide
aaccgcggagaaccaaggccccagcgccgcgtgcccgacctagaaagcgtcgtcatggac

SEQ ID NO: 45586 - DNA, 60 bp, Artificial
  Synthetic oligonucleotide
cgccaccgcgaagaccccggccaagcttcccaccgcaattcctatgatgtagttcttgtc

SEQ ID NO: 45587 - DNA, 60 bp, Artificial
  Synthetic oligonucleotide
ccatcccctgacctacatggagagcaccaacaacaaccccttgcgggacatgccagacct

SEQ ID NO: 45588 - DNA, 60 bp, Artificial
  Synthetic oligonucleotide
tccttgtcggcgtcatcgtcgtcgcagtcgaagttcagcatttctccgtcggtcgccact

SEQ ID NO: 45589 - DNA, 60 bp, Artificial
  Synthetic oligonucleotide
gctccgttctttgcccggcttccgcgacttgccagatcgtattcgcacatcatctctcgc

SEQ ID NO: 45590 - DNA, 60 bp, Artificial
  Synthetic oligonucleotide
cattgccgagacagatccgtagcaactaaagagccgccgcgctaccatttcgccgcagac

SEQ ID NO: 45591 - DNA, 60 bp, Artificial
  Synthetic oligonucleotide
acgctacatcatcgtccccgccgcctaccccgcgccgctgcggagatgcttcctcatccc

SEQ ID NO: 45592 - DNA, 60 bp, Artificial
  Synthetic oligonucleotide
atcaacacgaaagactccccgccgccgtccgtaactcctcagaccaccgtcacgttcgtc

SEQ ID NO: 45593 - DNA, 60 bp, Artificial
  Synthetic oligonucleotide
ctgtgtaggatgaataaggagccactcgccgccgtcgtttccagtagagagcgtggggtc

SEQ ID NO: 45594 - DNA, 60 bp, Artificial
  Synthetic oligonucleotide
atctgtgtctcgccccattcgccgcacatatccatacacgcgtgccacgccgttagctgg

SEQ ID NO: 45595 - DNA, 60 bp, Artificial
  Synthetic oligonucleotide
tgctccgaccctcgcgataacttcggcgccttcctcaacataagtgctgacccaaccgct

SEQ ID NO: 45596 - DNA, 60 bp, Artificial
  Synthetic oligonucleotide
tgcgtgacgtaccgcaaacgcccaactctccaatgtgcctccctactgtggccccaatgt

SEQ ID NO: 45597 - DNA, 60 bp, Artificial
  Synthetic oligonucleotide
tccgcggtccccggagacccctatcttcctcgcagcgtggccgagcctactctgtgccgc

SEQ ID NO: 45598 - DNA, 60 bp, Artificial
  Synthetic oligonucleotide
atagacgcctctgggttctcgcacgggaccttgccgcgcctgtttctatctacagagcca

SEQ ID NO: 45599 - DNA, 60 bp, Artificial
  Synthetic oligonucleotide
tcgcacgtctctttcgcccaattggccatggtcctcgccccgctcccactcgacacgttg

SEQ ID NO: 45600 - DNA, 60 bp, Artificial
  Synthetic oligonucleotide
cacccgctcctggccgccgcccgacgccccagtctaccggctgcgccccaaaataaactt

SEQ ID NO: 45601 - DNA, 60 bp, Artificial
  Synthetic oligonucleotide
ccgccccagattcatacccgccacccgcttggtcccagccctcgtcccagagaaacaaca

SEQ ID NO: 45602 - DNA, 60 bp, Artificial
  Synthetic oligonucleotide
acgtcgtaattggaatcccattgcccggccacatcctcttccccttcctctacgtcgcgc

SEQ ID NO: 45603 - DNA, 60 bp, Artificial
  Synthetic oligonucleotide
tcgttaactcgcctcaactctgccggcactgccctggccaccgtgtgcgccaacacgtac

SEQ ID NO: 45604 - DNA, 60 bp, Artificial
  Synthetic oligonucleotide
tatgttccccgcgcttttgttcgccgctgtgccttccacgtgcccctcctaacgtattgg

SEQ ID NO: 45605 - DNA, 60 bp, Artificial
  Synthetic oligonucleotide
tggccggtgtcatcccgtggcccatcagatctccgccgaagctgctttcccctaccgtac

SEQ ID NO: 45606 - DNA, 60 bp, Artificial
  Synthetic oligonucleotide
cgcatgcgcggaagtaacaacaccacagagcagacacaggacggctcagtaggtcgcatg

SEQ ID NO: 45607 - DNA, 58 bp, Artificial
  Synthetic oligonucleotide
cggtaagcatcaggttgcacagcagacattctccgcccgtgccgcccctgccgttagg

SEQ ID NO: 45608 - DNA, 60 bp, Artificial
  Synthetic oligonucleotide
ttgccgcgcacgccacagatggatacgaaccaaccacggccgccgcaaccttaagcacta

SEQ ID NO: 45609 - DNA, 60 bp, Artificial
  Synthetic oligonucleotide
ccagtttcgcgcgccattttgcttccgtctatcgtcttcgccgcgaacttcagccactcc

SEQ ID NO: 45610 - DNA, 60 bp, Artificial
  Synthetic oligonucleotide
ttctacaacaccccggtgctggtggtggactttgccagcctgtaccccaccatcatccag

SEQ ID NO: 45611 - DNA, 60 bp, Artificial
  Synthetic oligonucleotide
tcctgtgcagagccttgacattgatgctgaagcccggctccacggtgatgccgcaaagga

SEQ ID NO: 45612 - DNA, 60 bp, Artificial
  Synthetic oligonucleotide
cgccccgatatacctagtgggtggagcctagaggtaggtatccatagggttccattatcc

SEQ ID NO: 45613 - DNA, 60 bp, Artificial
  Synthetic oligonucleotide
tgcatgcctttggtggggccttccctgcacatgttggggcctctgttgagattggcgtcg

SEQ ID NO: 45614 - DNA, 53 bp, Artificial
  Synthetic oligonucleotide
ggggtgacggtcaggcagctcctgtatttaactttgcggacagaggccagagc

SEQ ID NO: 45615 - DNA, 60 bp, Artificial
  Synthetic oligonucleotide
taaacctcctctcccgctggcaggatggcgctctccgggcacgtcttgatagaccccgcc

SEQ ID NO: 45616 - DNA, 60 bp, Artificial
  Synthetic oligonucleotide
agtacactaaagatgctgttcttatacagcttctcggccacaccacttcgaattatgggg

SEQ ID NO: 45617 - DNA, 60 bp, Artificial
  Synthetic oligonucleotide
agatacgggagtaggaggtgggaataacaactgggatttcttgttgtgctgtccaggcct

SEQ ID NO: 45618 - DNA, 60 bp, Artificial
  Synthetic oligonucleotide
ccccacagcgaccggcgaagcactgactcatgaaggtgaccgtgatggcctgtgatgtgt

SEQ ID NO: 45619 - DNA, 60 bp, Artificial
  Synthetic oligonucleotide
tcgtcggaggccaggcagaagcagaagcaccccaagaaagtgaagcaggcctttaacccc

SEQ ID NO: 45620 - DNA, 60 bp, Artificial
  Synthetic oligonucleotide
agtttctggaggccacggccgatcgcatcctgggtgacattggtcaggctcccttgtatg

SEQ ID NO: 45621 - DNA, 60 bp, Artificial
  Synthetic oligonucleotide
ccaagttgttgtacgtgcgtgatcatgagggctttgcctgcctaacggtcgaaacccacc

SEQ ID NO: 45622 - DNA, 60 bp, Artificial
  Synthetic oligonucleotide
tgtgggcgggtctccatcaagtccctgatgttctctatcgtcaactgcgccgtcaaggcc

SEQ ID NO: 45623 - DNA, 60 bp, Artificial
  Synthetic oligonucleotide
tcaaggcccggatgatctcgtcccagttttgcggctacgtcctcgtgagtctgctggact

SEQ ID NO: 45624 - DNA, 60 bp, Artificial
  Synthetic oligonucleotide
gtcttcaggcaccagggaggtccaggtttgggagtgggccaatatttgcaaggcctgacc

SEQ ID NO: 45625 - DNA, 60 bp, Artificial
  Synthetic oligonucleotide
ggccataatcctggagactgcatctgaactggggcataaacagggcgtggcaggacgtgc

SEQ ID NO: 45626 - DNA, 60 bp, Artificial
  Synthetic oligonucleotide
gcccctgattgcaccgtccgcctacgcgaggctgaacctcctgaatcactgcctctttct

SEQ ID NO: 45627 - DNA, 60 bp, Artificial
  Synthetic oligonucleotide
aatctccgagggtgtgagatcttgcagttcttctactgttttaacggcggttgaagtggc

SEQ ID NO: 45628 - DNA, 60 bp, Artificial
  Synthetic oligonucleotide
aagttcgaggcctgcatccagaagcgatggccgagcgatgactcgtgtgcgagccggttt

SEQ ID NO: 45629 - DNA, 60 bp, Artificial
  Synthetic oligonucleotide
tagctttccctcagcgtctatgcccagccgagacagccgctccagcaggttctggttcag

SEQ ID NO: 45630 - DNA, 60 bp, Artificial
  Synthetic oligonucleotide
tgggccacatggacttgaagcagaagttggccggggcctggcccgtgaggatggatttaa

SEQ ID NO: 45631 - DNA, 60 bp, Artificial
  Synthetic oligonucleotide
gcaggagatttgcaggatcaggtcagcctcgttggtggccgtgggaaagccctcctcccc

SEQ ID NO: 45632 - DNA, 60 bp, Artificial
  Synthetic oligonucleotide
tatgtgacccttgggcctggctccccatagactcccatgtaagcctgcctcgagtaggtg

SEQ ID NO: 45633 - DNA, 60 bp, Artificial
  Synthetic oligonucleotide
cctccaggcgccctcctggtctccgctcccctctgagccccgttaaacccaaagaatgtc

SEQ ID NO: 45634 - DNA, 60 bp, Artificial
  Synthetic oligonucleotide
aatgatgctcgggtagaggctggcaaagtccaccaccagcaccggggagttgtagaagcc

SEQ ID NO: 45635 - DNA, 60 bp, Artificial
  Synthetic oligonucleotide
ctccctactatgttgtggacctgtcggttcgtgggatgttagaagccagcgaaggccttg

SEQ ID NO: 45636 - DNA, 60 bp, Artificial
  Synthetic oligonucleotide
aatttggggcagctcctcgttgcgctcgacgaacttctggtagacggccaggtgaggcat

SEQ ID NO: 45637 - DNA, 60 bp, Artificial
  Synthetic oligonucleotide
cattgctctctgagcggttaaaagcgtgcgtgtttatgctgtggggtgcgaaggcaggag

SEQ ID NO: 45638 - DNA, 60 bp, Artificial
  Synthetic oligonucleotide
gccgtactcgagggtcttcatgaggtgcccgaactggacgtcggtgcagcgcttgttgtt

SEQ ID NO: 45639 - DNA, 60 bp, Artificial
  Synthetic oligonucleotide
cagcttggaagaggaaattatgccatttcgcaatatgtcccacatcaggttctcagactg

SEQ ID NO: 45640 - DNA, 54 bp, Artificial
  Synthetic oligonucleotide
ccccagctcggccagggacgtgacggcggccaggctctgaccagactcggaagt

SEQ ID NO: 45641 - DNA, 60 bp, Artificial
  Synthetic oligonucleotide
acagataccaccagctccccgaggacccggagacctttgagtgcccggaccgctggcgag

SEQ ID NO: 45642 - DNA, 60 bp, Artificial
  Synthetic oligonucleotide
aggatgccctgcatggccaggcccgacctgccaaagatcgtcggcctgtggtgaggaatg

SEQ ID NO: 45643 - DNA, 60 bp, Artificial
  Synthetic oligonucleotide
ttaagtatgagtgggcagcagagaggctcggttattttggttcctgaacatctggctggg

SEQ ID NO: 45644 - DNA, 60 bp, Artificial
  Synthetic oligonucleotide
cttaagaatttattactcaccatccatcatgcaccgctacgctgtggtccagcccctaca

SEQ ID NO: 45645 - DNA, 60 bp, Artificial
  Synthetic oligonucleotide
ttcggcgaacgtgacaaagctggtggtaaacgagcgcaagacccgcctggacatactggg

SEQ ID NO: 45646 - DNA, 60 bp, Artificial
  Synthetic oligonucleotide
accagccatctccccagcgtcgttttcgccgcgttaaaagcgtagaatgacagcccctcc

SEQ ID NO: 45647 - DNA, 60 bp, Artificial
  Synthetic oligonucleotide
cctctgggttctccagcacggtgggcatgacgtactccagaaagttgtggtagacgggga

SEQ ID NO: 45648 - DNA, 60 bp, Artificial
  Synthetic oligonucleotide
atcgtggactgcgtggctttcatctactacgcctgtggggaggtggcactgatcaaggcc

SEQ ID NO: 45649 - DNA, 60 bp, Artificial
  Synthetic oligonucleotide
ccactgattgaaacgagggaaggaagacattcagccgcgtattttgccatgggagagcgg

SEQ ID NO: 45650 - DNA, 60 bp, Artificial
  Synthetic oligonucleotide
ctgagtggtcagtacaagcacaagcccgcccgcctagaagcattccagaaacaagtagtg

SEQ ID NO: 45651 - DNA, 60 bp, Artificial
  Synthetic oligonucleotide
tcgcctatggagttgactcgtcgtcggcaaagagaccagagggcacccatggcgcggtgt

SEQ ID NO: 45652 - DNA, 60 bp, Artificial
  Synthetic oligonucleotide
gctggcctccttcctgcggcacaactttggcttctactgcggcatgttcatcgcctccat

SEQ ID NO: 45653 - DNA, 60 bp, Artificial
  Synthetic oligonucleotide
actcggccatggtctgacattccaccccggccaggtccaggagggtgcagatgttctcca

SEQ ID NO: 45654 - DNA, 60 bp, Artificial
  Synthetic oligonucleotide
cggaggggacgggcaccgagcgccgcctggaaaagttgtgccacaggtagaggctcgaga

SEQ ID NO: 45655 - DNA, 60 bp, Artificial
  Synthetic oligonucleotide
ctgcgtagaagtaggcctgctgcccaaacacgttcacgcacacgctggccccgtcagcct

SEQ ID NO: 45656 - DNA, 60 bp, Artificial
  Synthetic oligonucleotide
ccgcgtaccagccgttgtagacgagcgtgttggtcactatcttggtgtaggagcggacct

SEQ ID NO: 45657 - DNA, 60 bp, Artificial
  Synthetic oligonucleotide
agtctctgctttcgcgcagagcccggcctacgagcgcatcgtctccagcggctacctgtc

SEQ ID NO: 45658 - DNA, 60 bp, Artificial
  Synthetic oligonucleotide
ccacacagcgccagcagggcacagaggtgatgtagaggcgcgggtctgggatgggactta

SEQ ID NO: 45659 - DNA, 60 bp, Artificial
  Synthetic oligonucleotide
gcagactgccccaccgctacctcctgttttaacgatggaatggccaccaggtttccgctg

SEQ ID NO: 45660 - DNA, 60 bp, Artificial
  Synthetic oligonucleotide
gtacgctgtagaagctgttgaaggaggtctctatccagtcgctcggctcgatgcctggcc

SEQ ID NO: 45661 - DNA, 60 bp, Artificial
  Synthetic oligonucleotide
catatgcatcgagtcccgccccatttccttattctgcctagcaaccccggtcttcattgg

SEQ ID NO: 45662 - DNA, 60 bp, Artificial
  Synthetic oligonucleotide
aggacccgttcgcgctgcaggagtacctagagtcccacatgctggcccagaggtgctcgg

SEQ ID NO: 45663 - DNA, 60 bp, Artificial
  Synthetic oligonucleotide
aagaaggtcactactgggtccacagctcaccccaacagcaggccctcggtctactcagct

SEQ ID NO: 45664 - DNA, 60 bp, Artificial
  Synthetic oligonucleotide
tcctgacggacctcctctcgggcgacccctcccgctcagagtatttcgaggccctgcacc

SEQ ID NO: 45665 - DNA, 60 bp, Artificial
  Synthetic oligonucleotide
tgacaggatccagtccaggctctccccgtacacagcgaccgtgcccctcctctggcccat

SEQ ID NO: 45666 - DNA, 60 bp, Artificial
  Synthetic oligonucleotide
cgtgaagctcaggagcgccccgcccatgtttatctacaagaccctcaacgaccccaccat

SEQ ID NO: 45667 - DNA, 60 bp, Artificial
  Synthetic oligonucleotide
gggacggcacctggaacctgctcaagatgtcctccctctactcccgctgcaccctgtacg

SEQ ID NO: 45668 - DNA, 60 bp, Artificial
  Synthetic oligonucleotide
aaaacgcccaccacacaaacgccgccacttgattggccagttcccctctcagccgcgcgc

SEQ ID NO: 45669 - DNA, 60 bp, Artificial
  Synthetic oligonucleotide
catcgccaaggtggaggaagaggactgggacgacgcgccacccaagcacgcgctgaacga

SEQ ID NO: 45670 - DNA, 60 bp, Artificial
  Synthetic oligonucleotide
aaaacatggtcctggacgaagatggcggttcggggtgcggggacgggcgaggcgatgtca

SEQ ID NO: 45671 - DNA, 60 bp, Artificial
  Synthetic oligonucleotide
ttaggaagctaggccagaggtccgtgccgggtccagacgcgaggtgcaaaatccaggggt

SEQ ID NO: 45672 - DNA, 60 bp, Artificial
  Synthetic oligonucleotide
tcctcggcacctcgcgccagaccgtgagcctcgagcggaatcgccccagcagggacttgg

SEQ ID NO: 45673 - DNA, 60 bp, Artificial
  Synthetic oligonucleotide
gcgcggtgacttcggcagcaacgggagaggtcgcggggagttcacctcggggtcagcccc

SEQ ID NO: 45674 - DNA, 60 bp, Artificial
  Synthetic oligonucleotide
tgccgtgccaagaggacactgacagaggatacaggggagacagcggttttgggtcatccg

SEQ ID NO: 45675 - DNA, 60 bp, Artificial
  Synthetic oligonucleotide
cagaaggtggagggcagggagacggtggcggacccgaggggctacgcggggatcctgacg

SEQ ID NO: 45676 - DNA, 60 bp, Artificial
  Synthetic oligonucleotide
cctccccgttgaagatgatgggcctgttgaccacctccacggttatcctttgcccgcgat

SEQ ID NO: 45677 - DNA, 60 bp, Artificial
  Synthetic oligonucleotide
agagcgagtccgagccagagtctccaaacacaacagctctgcccgcgagcggcgaaacga

SEQ ID NO: 45678 - DNA, 60 bp, Artificial
  Synthetic oligonucleotide
ccacgtccaccctgaacaccaccgtctcgtctgttgcatccacttccactccatccacag

SEQ ID NO: 45679 - DNA, 60 bp, Artificial
  Synthetic oligonucleotide
gggtggtccttggcttctagtgcgtgtaccgtctttacctcccctgcgccttttcttggt

SEQ ID NO: 45680 - DNA, 60 bp, Artificial
  Synthetic oligonucleotide
atcccaccatctcctctcccatccctctccccacacggccctctcgccgcgcgccaccca

SEQ ID NO: 45681 - DNA, 60 bp, Artificial
  Synthetic oligonucleotide
cgagggatcttccgcaccgccggccgcacccaacagactcagatcgctcaaaaggtcaca

SEQ ID NO: 45682 - DNA, 60 bp, Artificial
  Synthetic oligonucleotide
cagggagcagctgtccgtgtccaggcacgagtactttaacccgcgcctgcccgtcttcaa

SEQ ID NO: 45683 - DNA, 60 bp, Artificial
  Synthetic oligonucleotide
tcaaaaccccgcatgccatcgcgctgggaccgtgtgcgcgcgagatgcgcccaggctcca

SEQ ID NO: 45684 - DNA, 60 bp, Artificial
  Synthetic oligonucleotide
aagctcgtccaccgcccgctccaggacgcaggaggcaaacagagacctaaacagaaagca

SEQ ID NO: 45685 - DNA, 60 bp, Artificial
  Synthetic oligonucleotide
acctgtagagggtcagctccccgcccgcgcacgcgtcctccagggaccccgcgtccagct

SEQ ID NO: 45686 - DNA, 60 bp, Artificial
  Synthetic oligonucleotide
ccggttggtgggtgtgtgtgtccaaactataagccccgagtggagtgaatgagaaggcag

SEQ ID NO: 45687 - DNA, 60 bp, Artificial
  Synthetic oligonucleotide
tgcccgccttgaccctggccaccctagcggcgagcgcgtttctcctgagacttgaagcaa

SEQ ID NO: 45688 - DNA, 60 bp, Artificial
  Synthetic oligonucleotide
tgttgttggtgtaggcggggtccacgtacaggaacagggtggggttcaggccgcgctggg

SEQ ID NO: 45689 - DNA, 60 bp, Artificial
  Synthetic oligonucleotide
aagtgggcgtggcttccggtgggcggagcttcagcgtcaaccaatcagagcacgtacctg

SEQ ID NO: 45690 - DNA, 60 bp, Artificial
  Synthetic oligonucleotide
tgtaccccaccatcatccaggcccacaacctctgctactccaccatgatccccggagaca

SEQ ID NO: 45691 - DNA, 60 bp, Artificial
  Synthetic oligonucleotide
aataggctaccccatagagcacgaagcgggcgcagtcctcctcgcccacgcgcaggccct

SEQ ID NO: 45692 - DNA, 60 bp, Artificial
  Synthetic oligonucleotide
tatagccctgaggtccctgcccagctccgacgccctgaaggtgcccagcttgtgggtctg

SEQ ID NO: 45693 - DNA, 60 bp, Artificial
  Synthetic oligonucleotide
tgatctccccgcccgcgtccgagaacccgatctccagctcgctgtgcagggcgtacgggt

SEQ ID NO: 45694 - DNA, 60 bp, Artificial
  Synthetic oligonucleotide
agccggccgcctccccgagtgttatctatctttgtcttctcaccaggccacggcccaacg

SEQ ID NO: 45695 - DNA, 60 bp, Artificial
  Synthetic oligonucleotide
cccgacaccctggtcttctcccgcctcgaccactcccagaactacgagctcaagaacgtg

SEQ ID NO: 45696 - DNA, 60 bp, Artificial
  Synthetic oligonucleotide
agtctctcaccccggctccccggtccggcgcgtctaattctgaaacccctgtgtggtgaa

SEQ ID NO: 45697 - DNA, 60 bp, Artificial
  Synthetic oligonucleotide
ttcctaccttggtccagggcgaccgtcttcaaacactcacccgccctcgcgcggctcctg

SEQ ID NO: 45698 - DNA, 60 bp, Artificial
  Synthetic oligonucleotide
aggaccccagatgcaccatcatcaccctgcccttttcggtgtggtcggcgatggagtgca

SEQ ID NO: 45699 - DNA, 60 bp, Artificial
  Synthetic oligonucleotide
ggcaccgtggccgagagcacaaacatcacaaagtacaggaccagcagcttgaaccaggtc

SEQ ID NO: 45700 - DNA, 60 bp, Artificial
  Synthetic oligonucleotide
ttcaaccaggccgagctcagcagggacctgcgcgacaagatgcccgtggtggtggtcgag

SEQ ID NO: 45701 - DNA, 60 bp, Artificial
  Synthetic oligonucleotide
accttttgaacgccgccacgtccgcctacaacctcctgctgaccggggtcctgcgctggg

SEQ ID NO: 45702 - DNA, 60 bp, Artificial
  Synthetic oligonucleotide
accacgccgtcaggcagcagaactccagcaagaagctctttcagccctggcccatagtca

SEQ ID NO: 45703 - DNA, 60 bp, Artificial
  Synthetic oligonucleotide
ttgggagagctgtccagggcatggtgcagggaacagtacagggcctcgctcatgtggtac

SEQ ID NO: 45704 - DNA, 60 bp, Artificial
  Synthetic oligonucleotide
tgcggcgcggggcgcatccaggacgcgggcatgctcctgagggaggttaaggtgggcagc

SEQ ID NO: 45705 - DNA, 60 bp, Artificial
  Synthetic oligonucleotide
aagtggtgtccatgcttcccaacggccccgccttcaaaccgcccgccttcgactggctca

SEQ ID NO: 45706 - DNA, 60 bp, Artificial
  Synthetic oligonucleotide
accggggctcctcatcgccacccttatagccacccacgccgtccccagagtcaggtgatt

SEQ ID NO: 45707 - DNA, 60 bp, Artificial
  Synthetic oligonucleotide
tcatcagggtttgttggatctctgccatcgtcctctccggtgttccttgggtctcccggg

SEQ ID NO: 45708 - DNA, 60 bp, Artificial
  Synthetic oligonucleotide
ttgcggacgtgagccccttcctgcagaaccccgaggagttcctggccacggacttcttca

SEQ ID NO: 45709 - DNA, 60 bp, Artificial
  Synthetic oligonucleotide
accagtacaagctgcccaaggtgtacgagtgcagggagtttccagcgaccggccacaggg

SEQ ID NO: 45710 - DNA, 60 bp, Artificial
  Synthetic oligonucleotide
ccacctttcgtaaacacatgaggtccacttgcacatctgtctacatcaatctgaacacca

SEQ ID NO: 45711 - DNA, 60 bp, Artificial
  Synthetic oligonucleotide
ggaagtcgctgagctgtctcacagtcagtggaatttcccaaaagcagatccagtaattcc

SEQ ID NO: 45712 - DNA, 60 bp, Artificial
  Synthetic oligonucleotide
ggtgtaagtttggaccgtaagaaaatatgacagcacgttgcccgagattgtgatccaggc

SEQ ID NO: 45713 - DNA, 60 bp, Artificial
  Synthetic oligonucleotide
atgtctgctagtagaggaagtggagatatgtgtggttatattgttttaggcggggagggg

SEQ ID NO: 45714 - DNA, 60 bp, Artificial
  Synthetic oligonucleotide
ctcaagtttgcttccccactcttagctcttaaaactgcaactgaccgtctctcaagccct

SEQ ID NO: 45715 - DNA, 60 bp, Artificial
  Synthetic oligonucleotide
gtctgcttccgctagctcctgcatatatacttgcaatccctactatccccacagatccac

SEQ ID NO: 45716 - DNA, 60 bp, Artificial
  Synthetic oligonucleotide
ccaaggaccaggatccgcaacaaagtcaggcacttcaacagtaggcagagaagaccctct

SEQ ID NO: 45717 - DNA, 60 bp, Artificial
  Synthetic oligonucleotide
ccacatcataaccctcctcaaccacttataaaaccaacagatccacagcaacttacgcta

SEQ ID NO: 45718 - DNA, 60 bp, Artificial
  Synthetic oligonucleotide
cagccgcggatgaattaagatgcaagttcttcagtgactttagcgaaatcccgccactcg

SEQ ID NO: 45719 - DNA, 60 bp, Artificial
  Synthetic oligonucleotide
ctgtgagtttcatctgtcagtcacggcacaaaattcacccagggtttgctctaactgctg

SEQ ID NO: 45720 - DNA, 60 bp, Artificial
  Synthetic oligonucleotide
gtgccaacaagtatgtggcgctcgtctcctcgtttctgcgttacctccacaagttgttgc

SEQ ID NO: 45721 - DNA, 60 bp, Artificial
  Synthetic oligonucleotide
gctcataatctatgctactccactcttataccccaccatgctttacacaactaccctcac

SEQ ID NO: 45722 - DNA, 60 bp, Artificial
  Synthetic oligonucleotide
gtagtgcacgtgtgttttcaatgctactggcactttccgtttcaagcacaaataccacag

SEQ ID NO: 45723 - DNA, 60 bp, Artificial
  Synthetic oligonucleotide
gctggcgtatgttctgcagatggaagacacctcgcattgcttcatgacccaagtctttgc

SEQ ID NO: 45724 - DNA, 60 bp, Artificial
  Synthetic oligonucleotide
gtataatgaccaatttgacccagaacaatgcccaggaactctgcttccatttacttgcta

SEQ ID NO: 45725 - DNA, 60 bp, Artificial
  Synthetic oligonucleotide
tgagactgggtagttggagaaagcggcttcggaggagaaggaagtagttgtggtgagtct

SEQ ID NO: 45726 - DNA, 60 bp, Artificial
  Synthetic oligonucleotide
aagactgcgatggagccttcaattagctttgtatggggacgatggacagtaacagtttcc

SEQ ID NO: 45727 - DNA, 60 bp, Artificial
  Synthetic oligonucleotide
cacagagacatgctttgttttagagagtacagtaagtgaagctagcgcatgggtaagggc

SEQ ID NO: 45728 - DNA, 60 bp, Artificial
  Synthetic oligonucleotide
tggtaagcgaccccgtatcagcagcaactctacatctagatcttgcaaaacaagctgggc

SEQ ID NO: 45729 - DNA, 60 bp, Artificial
  Synthetic oligonucleotide
cacttcaatgtcttttgccaactctgcaaactatcagtgctacagaatatcctcatgtgt

SEQ ID NO: 45730 - DNA, 60 bp, Artificial
  Synthetic oligonucleotide
ccatcacagaccgtggaaagctattgttagcagctaagcatcttggggtttgtgcgcttg

SEQ ID NO: 45731 - DNA, 60 bp, Artificial
  Synthetic oligonucleotide
ggagttgctgccaaagctccgagacatgaagctctgatgttcaagacccattgtgtccac

SEQ ID NO: 45732 - DNA, 60 bp, Artificial
  Synthetic oligonucleotide
gactttattcttcgccgctctggacagcttggacataaccaatatgcacagttgcaccat

SEQ ID NO: 45733 - DNA, 60 bp, Artificial
  Synthetic oligonucleotide
aataaacagttgcagagtccacatgcgagcgatccctataaacaacatagtatgagagcc

SEQ ID NO: 45734 - DNA, 60 bp, Artificial
  Synthetic oligonucleotide
gcatgaagaaaagttagcaagtctccgcttatgttgatgtttatagcagccccgttgcac

SEQ ID NO: 45735 - DNA, 60 bp, Artificial
  Synthetic oligonucleotide
agtacacagagcccagcaggcagctacagccgctcaacgcgagtccctccccttgctcaa

SEQ ID NO: 45736 - DNA, 60 bp, Artificial
  Synthetic oligonucleotide
cagtcatcgaagtcttcccgcttgcgcttgtttggtctagaaggaaacattgcaggcaca

SEQ ID NO: 45737 - DNA, 60 bp, Artificial
  Synthetic oligonucleotide
aactatgatgacctctgaagcatctctcttcctccagacaccgcaacacttgttttgtgg

SEQ ID NO: 45738 - DNA, 60 bp, Artificial
  Synthetic oligonucleotide
gctccgaaatgcctccactgaaatccatacacaggtccaagatctccttcatctctgtca

SEQ ID NO: 45739 - DNA, 60 bp, Artificial
  Synthetic oligonucleotide
ggggcagctacatttctgggaaagaattgatcgagaataaaacacaagcgcttttcgtct

SEQ ID NO: 45740 - DNA, 60 bp, Artificial
  Synthetic oligonucleotide
ctgtcccctctgtgaatgcatagcatctcatccaaacgccatagacacattacaaacact

SEQ ID NO: 45741 - DNA, 60 bp, Artificial
  Synthetic oligonucleotide
gccaatacacagcttgcaatgctacaactgttctcactcaactatgcagtgtactacatc

SEQ ID NO: 45742 - DNA, 60 bp, Artificial
  Synthetic oligonucleotide
cccactgccttcgaatatagctttagctcactgtctagatgctgctggagctttgcctca

SEQ ID NO: 45743 - DNA, 60 bp, Artificial
  Synthetic oligonucleotide
gatgattctgggctctcaaagcatccacatctaacaatggcaacgaagacagcgcaacct

SEQ ID NO: 45744 - DNA, 60 bp, Artificial
  Synthetic oligonucleotide
cactgcgtttgtctatggtgtccctaaactgcatgactattcagacctctgccctcctag

SEQ ID NO: 45745 - DNA, 60 bp, Artificial
  Synthetic oligonucleotide
gactgagtctgagccactacttgttaacagtccatcttctccatcgctgctgcttccact

SEQ ID NO: 45746 - DNA, 60 bp, Artificial
  Synthetic oligonucleotide
cgacagagtcgcaacatagatccaaacacaccaaggcggccaagaggcagacctaagggc

SEQ ID NO: 45747 - DNA, 60 bp, Artificial
  Synthetic oligonucleotide
gaaactacttggaagaacactagagggtgcgagcgtatgtgttaacgtgtttggacaaag

SEQ ID NO: 45748 - DNA, 60 bp, Artificial
  Synthetic oligonucleotide
cccatacagaagccctggaaatagtgtcctaggtgggctcggccagagagtccctagaac

SEQ ID NO: 45749 - DNA, 60 bp, Artificial
  Synthetic oligonucleotide
ctcagactgatctaacgggcaagcatcctcagttttatggctgtctggcaactccctagc

SEQ ID NO: 45750 - DNA, 60 bp, Artificial
  Synthetic oligonucleotide
gctatgcaccacaggactgcacgtcatttgtatactgggctggccaatcaaagaatgtac

SEQ ID NO: 45751 - DNA, 60 bp, Artificial
  Synthetic oligonucleotide
taatgctggaagagctgaaggtaaattcacagttacaccgaaagtgctggcaaaacacat

SEQ ID NO: 45752 - DNA, 60 bp, Artificial
  Synthetic oligonucleotide
cacgcagcttataacagttttctttgctttctcggcacaagcactttcattttctggccg

SEQ ID NO: 45753 - DNA, 60 bp, Artificial
  Synthetic oligonucleotide
ggtccagtgcttaacaaacatgaacctatgccttatcttatggctcagaagacaaaacct

SEQ ID NO: 45754 - DNA, 60 bp, Artificial
  Synthetic oligonucleotide
gacacgtgtttctggtgcgccacgtagccgatgctgatgccgatcatgtgcttgagtagg

SEQ ID NO: 45755 - DNA, 60 bp, Artificial
  Synthetic oligonucleotide
cctgtggactaaagtcctgtatatcggacaaatgtaggacgcccctttctctccgcttca

SEQ ID NO: 45756 - DNA, 60 bp, Artificial
  Synthetic oligonucleotide
gcaggaagtacaaatcaaaacgatcctaaatacggaccaagagccggaaagcaatgtatg

SEQ ID NO: 45757 - DNA, 60 bp, Artificial
  Synthetic oligonucleotide
gttccgatcgctgctacccctgttccagaagcacgtcgattgattgtgtatgctggatca

SEQ ID NO: 45758 - DNA, 60 bp, Artificial
  Synthetic oligonucleotide
ttctcaacccttcctcttccacgcccacattgcctctgcactccgcgctctcttggctgt

SEQ ID NO: 45759 - DNA, 60 bp, Artificial
  Synthetic oligonucleotide
ctcgtgcttcaccggaatacttgcgtaaaccaagggcttccgcggtgtagctagagccaa

SEQ ID NO: 45760 - DNA, 60 bp, Artificial
  Synthetic oligonucleotide
ttacaaagcatttcacgcccaagacatgtgacagaagctgctattgccacacatggaagt

SEQ ID NO: 45761 - DNA, 60 bp, Artificial
  Synthetic oligonucleotide
gtgacccaccaaagttacgcattctgcattgttttcagttccatcggtaattagcaacag

SEQ ID NO: 45762 - DNA, 60 bp, Artificial
  Synthetic oligonucleotide
cgccatcttcttgagccttgctagcaccgaaaatggtattttgcgtctctttgcctgtta

SEQ ID NO: 45763 - DNA, 60 bp, Artificial
  Synthetic oligonucleotide
cgaactcctcaccgctgcatttggtttctccgtaccacagtctgtctagctcaatatcta

SEQ ID NO: 45764 - DNA, 60 bp, Artificial
  Synthetic oligonucleotide
acaggcctgtatcaagcgctgcctaatgcagttacggatccaccaagcgaacagagagcc

SEQ ID NO: 45765 - DNA, 60 bp, Artificial
  Synthetic oligonucleotide
ggatcatagtaaacacgtagaacaaactggcaaaaccgttggatgcactgataatcaaga

SEQ ID NO: 45766 - DNA, 60 bp, Artificial
  Synthetic oligonucleotide
caagagactccaatcgagcaacagtcaccaagggcgtagaggcagacctaaacccagagc

SEQ ID NO: 45767 - DNA, 60 bp, Artificial
  Synthetic oligonucleotide
gacgtaatcggctgcgtgtgtcacagtgccccaacgaagaaaactgcccagtttaagcaa

SEQ ID NO: 45768 - DNA, 60 bp, Artificial
  Synthetic oligonucleotide
catgatactgacgggccgctcattccaagaagcaccctgccaaaacactcgcacgtccgt

SEQ ID NO: 45769 - DNA, 60 bp, Artificial
  Synthetic oligonucleotide
gtggacacagctcgcgaaattcctgtagtcgttgtcttctccaggtttccatttctcaca

SEQ ID NO: 45770 - DNA, 57 bp, Artificial
  Synthetic oligonucleotide
ggttctcacccgtttaggcaggaaagaccccaaccacataacccactaacattttaa

SEQ ID NO: 45771 - DNA, 60 bp, Artificial
  Synthetic oligonucleotide
gattgtggccaaacgcacgacgcaaactgctgcagcacctacatccggaccacccacttg

SEQ ID NO: 45772 - DNA, 60 bp, Artificial
  Synthetic oligonucleotide
gatgttcgcgatgatctcggtgactatggtgttctctgttgctacgatccatgctgcacc

SEQ ID NO: 45773 - DNA, 60 bp, Artificial
  Synthetic oligonucleotide
tcgcggcgtcccagaagctgacacccattcttcggcaaccccaaacatcaccatctttcc

SEQ ID NO: 45774 - DNA, 60 bp, Artificial
  Synthetic oligonucleotide
tttcaagtgtcaaacgttgcccgccacataatgaacaataaagcaaatctgtgtgcatac

SEQ ID NO: 45775 - DNA, 60 bp, Artificial
  Synthetic oligonucleotide
gcgaatacttgttgagcttttctttccgggtaacgcatctccacagtggtgcaggtcgct

SEQ ID NO: 45776 - DNA, 60 bp, Artificial
  Synthetic oligonucleotide
ggtagagttgtggcgttaggctgcggatgtcattccgtatagagaggttgatggctttca

SEQ ID NO: 45777 - DNA, 60 bp, Artificial
  Synthetic oligonucleotide
gccgatttgcagttttcagtgtttcgatttcgtccagttgtgattgaatctgttcctcca

SEQ ID NO: 45778 - DNA, 60 bp, Artificial
  Synthetic oligonucleotide
gtagccattacatggttactgtggtccaaaacgcggtatccgaatcgcaatccacaatac

SEQ ID NO: 45779 - DNA, 60 bp, Artificial
  Synthetic oligonucleotide
cgaaagagtcatggcttcacgaaccacgtcagctgtagtgctcatgggtgcatgcaatgg

SEQ ID NO: 45780 - DNA, 60 bp, Artificial
  Synthetic oligonucleotide
tacaactgcatttactgcttgaactgctgcttgaactcgatgtatccgtatcagagtcac

SEQ ID NO: 45781 - DNA, 60 bp, Artificial
  Synthetic oligonucleotide
atttctgacgcataaaacggaaatcttgcaagccggaggaaggagggtttaaattgcgat

SEQ ID NO: 45782 - DNA, 60 bp, Artificial
  Synthetic oligonucleotide
agagaaaactccattcaccacatctcccaaagcaccagccgttacacccagcacagcccc

SEQ ID NO: 45783 - DNA, 60 bp, Artificial
  Synthetic oligonucleotide
ttggtcgaagtttatgcagaatttgatggtaagggcaatccagtgagacattgtaatcta

SEQ ID NO: 45784 - DNA, 60 bp, Artificial
  Synthetic oligonucleotide
ccaggatcatgattgcaaaatgtaccttgtgttggacagtatttgttcacgcgctaatca

SEQ ID NO: 45785 - DNA, 60 bp, Artificial
  Synthetic oligonucleotide
gggctgggacaaacatattcgatcgcatttcactaactgatctagccatcaagaaacgcc

SEQ ID NO: 45786 - DNA, 60 bp, Artificial
  Synthetic oligonucleotide
gtaaagtcctaaatttgtgttgccaattaaatgacggtgcgacggtattgggatgacggc

SEQ ID NO: 45787 - DNA, 60 bp, Artificial
  Synthetic oligonucleotide
ggtaaccagtacggttgtttctttaggcgcagttacgtcgtttcctgtagcgactctagg

SEQ ID NO: 45788 - DNA, 60 bp, Artificial
  Synthetic oligonucleotide
cctgtcgggcacagtgagacacgcagccgtaaattcaaaactcaacccaaaccgaagtct

SEQ ID NO: 45789 - DNA, 60 bp, Artificial
  Synthetic oligonucleotide
gctgaaattatggcatcacgtaagcaccacatatctaagcccgaatttaagcgccggaga

SEQ ID NO: 45790 - DNA, 60 bp, Artificial
  Synthetic oligonucleotide
cagagcaagcggatttatttccacagacgaatttcattcctgtcgaactttccaccgtca

SEQ ID NO: 45791 - DNA, 60 bp, Artificial
  Synthetic oligonucleotide
ccttcggtagttttaatgttagagccgtaagacgcgcaagaaacctccctgtcaaaacgc

SEQ ID NO: 45792 - DNA, 60 bp, Artificial
  Synthetic oligonucleotide
gctgagtgtcgttgtctgcgagccgttgtaattttcacgcactgttggactgtcctgtct

SEQ ID NO: 45793 - DNA, 60 bp, Artificial
  Synthetic oligonucleotide
gaatggctcagctactggcaactcagctagtcttcccgctcctcagttttccgaatgtgt

SEQ ID NO: 45794 - DNA, 60 bp, Artificial
  Synthetic oligonucleotide
ccaacggtgaaggtcttgatcagtataaggtgtcatgggaagtctgcaaaatcgtgtgta

SEQ ID NO: 45795 - DNA, 60 bp, Artificial
  Synthetic oligonucleotide
gccgcgactgcagagtgtctgattttatcgtctgaacattgtttgctcaaagatatgtcg

SEQ ID NO: 45796 - DNA, 60 bp, Artificial
  Synthetic oligonucleotide
gaaacttctgagatgctgacggtttcgactcgatccagaggacgttccaggggaaggcca

SEQ ID NO: 45797 - DNA, 60 bp, Artificial
  Synthetic oligonucleotide
ccggtactgcgggtgcgggcaaaacaagcagcattcaaaccttagcagctaatagtgatt

SEQ ID NO: 45798 - DNA, 60 bp, Artificial
  Synthetic oligonucleotide
cgtctttcccaacggtggcgagcagggaacaaaaccaggctcgtcaaaatgtttgcggtg

SEQ ID NO: 45799 - DNA, 60 bp, Artificial
  Synthetic oligonucleotide
ctctgtcctgttagaatttgatctgctttagtatccctgcagcttttcatagtagcctct

SEQ ID NO: 45800 - DNA, 60 bp, Artificial
  Synthetic oligonucleotide
gcacggcactctccatgtggaatgtaattgtgctccatgcgctcaactatttggacagga

SEQ ID NO: 45801 - DNA, 60 bp, Artificial
  Synthetic oligonucleotide
ttgtcagattcagactgcacacaggcgacaaagaaaatgcgatttgattatcacgtcaca

SEQ ID NO: 45802 - DNA, 60 bp, Artificial
  Synthetic oligonucleotide
cgtaagttgttatagccacgcctacgcagcaatgtatataagcagacaccgtcatttcgc

SEQ ID NO: 45803 - DNA, 60 bp, Artificial
  Synthetic oligonucleotide
ttattgcaaccgaaattgggaaaagaggtgccgatatttgtccatcagcagcagtatttg

SEQ ID NO: 45804 - DNA, 60 bp, Artificial
  Synthetic oligonucleotide
gggtgccatttccaccgtcccaacgccccattactcgcagcagtacagcaccacacgaat

SEQ ID NO: 45805 - DNA, 60 bp, Artificial
  Synthetic oligonucleotide
tgatcatgcccacggatcccatactgcggtggaaggccaaatgttgctgcggcgtggttg

SEQ ID NO: 45806 - DNA, 60 bp, Artificial
  Synthetic oligonucleotide
gaccgccaccaccacaccgccgactcgtcgtctcaccaccataatatgcgggagaacaaa

SEQ ID NO: 45807 - DNA, 60 bp, Artificial
  Synthetic oligonucleotide
ataggtgcgcggcgagcaaatgtttcaccgtgtgccagtcacgtgcgctgcatgtccagg

SEQ ID NO: 45808 - DNA, 59 bp, Artificial
  Synthetic oligonucleotide
ttgctgtgacgcgtttgtgatatgtgctgcgccggggtttgggtgtaccgctcgtgcct

SEQ ID NO: 45809 - DNA, 60 bp, Artificial
  Synthetic oligonucleotide
accacgaagcccaagtccaaccacccacctaaccaccattgtgcacgagttaccgcgctg

SEQ ID NO: 45810 - DNA, 60 bp, Artificial
  Synthetic oligonucleotide
attgctcggcgagcggtcactcagcgcacacgcgcaactgaggcagtgcggagggtgggt

SEQ ID NO: 45811 - DNA, 60 bp, Artificial
  Synthetic oligonucleotide
tcgttccgccccagtcgaagattacatgcagcctgggagccgtacaatccatagactcgc

SEQ ID NO: 45812 - DNA, 60 bp, Artificial
  Synthetic oligonucleotide
tggcaacacggcggcatcattttcgcaccaggcggcatccgtgaaggcgcgggataacct

SEQ ID NO: 45813 - DNA, 60 bp, Artificial
  Synthetic oligonucleotide
tgtttctctcgacttgcgctcgcaacaccgtgccacaagatatgccccttctgccgccag

SEQ ID NO: 45814 - DNA, 60 bp, Artificial
  Synthetic oligonucleotide
tcggtggggagcaagggaacgtgagcggagcgcatctatatctcctggttagacgcacgc

SEQ ID NO: 45815 - DNA, 60 bp, Artificial
  Synthetic oligonucleotide
tcacccgaacgatgtggcgatggacggagagtgggtgcggtcaaagcccggcgtcgtgaa

SEQ ID NO: 45816 - DNA, 60 bp, Artificial
  Synthetic oligonucleotide
atttgctccttcgaagcgttcatgtacgtcgcgcgtccggcctccgcctctgcccatttt

SEQ ID NO: 45817 - DNA, 60 bp, Artificial
  Synthetic oligonucleotide
ttatctccaggtccgcgcgccccggcaagctttcacaatgatgtgcgttggtatgtcgcg

SEQ ID NO: 45818 - DNA, 60 bp, Artificial
  Synthetic oligonucleotide
tctgggagcggggcaggggtgcagacatgaagagttactgcggttggacaggtgcgatct

SEQ ID NO: 45819 - DNA, 60 bp, Artificial
  Synthetic oligonucleotide
tttaccaccggcacaacgtgtcacgatggcacccacagactaccccacagcccgcgaaca

SEQ ID NO: 45820 - DNA, 60 bp, Artificial
  Synthetic oligonucleotide
aacgtggccccgacggtaatcacccctcccgtgcccatgcactgctctttctctattacg

SEQ ID NO: 45821 - DNA, 60 bp, Artificial
  Synthetic oligonucleotide
aaagcgcgaggcggggatggaagcggttcggcgggctgcgggaggtgagcacgtgtctcg

SEQ ID NO: 45822 - DNA, 58 bp, Artificial
  Synthetic oligonucleotide
cgcacacgacacggcgggcgcggtgcatttggacgcaggggaacaaggtaacgagggg

SEQ ID NO: 45823 - DNA, 60 bp, Artificial
  Synthetic oligonucleotide
tatcatcacatctgcctctaggtctgcgcgccccaccgtcgcacctcgctctcctagtct

SEQ ID NO: 45824 - DNA, 60 bp, Artificial
  Synthetic oligonucleotide
aatatgtttgtcgcttaaacgtgccgccgtggtgacccgccagctgtcagactcgtgtgc

SEQ ID NO: 45825 - DNA, 60 bp, Artificial
  Synthetic oligonucleotide
ttaaccagagtaacacgcccgacgttctgcaatggctcacggctgcacacaacccggtgc

SEQ ID NO: 45826 - DNA, 60 bp, Artificial
  Synthetic oligonucleotide
acatgcatttcagtaacgtgtcccgccggggagcaaaccgacagtgttggcacgtgcgcg

SEQ ID NO: 45827 - DNA, 60 bp, Artificial
  Synthetic oligonucleotide
agacagtagcgacggccctgcgccacggttgtcctgcaaatcccaacctgtatcatcctg

SEQ ID NO: 45828 - DNA, 60 bp, Artificial
  Synthetic oligonucleotide
acttcatcgcgcggtgggaagcggttcaacaggttgggatcggaggtgcaccacggaggc

SEQ ID NO: 45829 - DNA, 60 bp, Artificial
  Synthetic oligonucleotide
tggtggtgagccccatcccggtgatgcggttggctttgcactacgtggacgcgttcggca

SEQ ID NO: 45830 - DNA, 60 bp, Artificial
  Synthetic oligonucleotide
cttgctcgcctccgcatccttgtgcaacaaaacgctatccccttgacacaccccagcagg

SEQ ID NO: 45831 - DNA, 60 bp, Artificial
  Synthetic oligonucleotide
ttcgtgtgtgtatcttcatgtggggcgccagactctcagcgaggccgccgaccgttccct

SEQ ID NO: 45832 - DNA, 60 bp, Artificial
  Synthetic oligonucleotide
atgacatggtgtgggacaaggagaaacggcttttgctggacggcgcgggcaaggtggtgt

SEQ ID NO: 45833 - DNA, 60 bp, Artificial
  Synthetic oligonucleotide
tggaccgcgagtggagtttacgcacggcacagggagcgcagtgttgttggaacgaggtgt

SEQ ID NO: 45834 - DNA, 60 bp, Artificial
  Synthetic oligonucleotide
attgcccacccagcccatcacgtccgcgcacataccacgcacctctggcgacacgtcgtc

SEQ ID NO: 45835 - DNA, 60 bp, Artificial
  Synthetic oligonucleotide
tacttgcaaagcacaccggcggcaaacaacggcacacgcctcgacaccgacctgaaccca

SEQ ID NO: 45836 - DNA, 60 bp, Artificial
  Synthetic oligonucleotide
tgggctgatcaggcggaggggctgaccaagaatgcgtttaggcgggcgtgggtgatcgca

SEQ ID NO: 45837 - DNA, 60 bp, Artificial
  Synthetic oligonucleotide
gacgaggtggccgctttgttggagggcagcagcaccttcgcacacgcaccgcgcaccagg

SEQ ID NO: 45838 - DNA, 60 bp, Artificial
  Synthetic oligonucleotide
ggctttgtggttctgcgggtgggttttgtggtgtgaattgctgcacatctgtcctccagc

SEQ ID NO: 45839 - DNA, 60 bp, Artificial
  Synthetic oligonucleotide
atctgcgttgtggtgatctgcgcggccaagcccgcttgccctcgtcttcgctagagtcga

SEQ ID NO: 45840 - DNA, 60 bp, Artificial
  Synthetic oligonucleotide
caagccacgcctgcctcgcatgtcgctgtacgtccacaattcccagctttccaaccggta

SEQ ID NO: 45841 - DNA, 60 bp, Artificial
  Synthetic oligonucleotide
gcgagcggcaagacggcgcacgcacccatacagagctgaccgggcgacggagcggatgtg

SEQ ID NO: 45842 - DNA, 60 bp, Artificial
  Synthetic oligonucleotide
ggtgtgcttgtcagtgttcaggcggcccacctgtggtgtgttgcgtgcgggccagtactg

SEQ ID NO: 45843 - DNA, 60 bp, Artificial
  Synthetic oligonucleotide
cgcacgccactagcaacgcagccctaccgccgctattactacaacacgcgcgtatctttg

SEQ ID NO: 45844 - DNA, 60 bp, Artificial
  Synthetic oligonucleotide
ttcttccaattgacttgcgtccagttccgcatagccgttcgccgcaccctctagctcgcg

SEQ ID NO: 45845 - DNA, 60 bp, Artificial
  Synthetic oligonucleotide
aggcaccagcccttgcagattccacaccaccgccttcgcctctacccaccgaagacctca

SEQ ID NO: 45846 - DNA, 60 bp, Artificial
  Synthetic oligonucleotide
cccggccacactccttgcacgctctgaagcccgttgctgttttctgtttgtacccgcatg

SEQ ID NO: 45847 - DNA, 60 bp, Artificial
  Synthetic oligonucleotide
atctcgcctgctgtacaaacatatgccccgttgctccgctactttctcgaccacgccggc

SEQ ID NO: 45848 - DNA, 60 bp, Artificial
  Synthetic oligonucleotide
tccccgaacgccgaactgaaacgctgtcacaaatttacgcatttcacgcccgacggtgcg

SEQ ID NO: 45849 - DNA, 60 bp, Artificial
  Synthetic oligonucleotide
atgccgcaggggatccaccgtcgctgtctctcctccacgccacctctccacatctatttg

SEQ ID NO: 45850 - DNA, 60 bp, Artificial
  Synthetic oligonucleotide
ccgcgtgtcccgaaaccattctcacagctgcaatgcacgcctatccaaccgctgaaccga

SEQ ID NO: 45851 - DNA, 60 bp, Artificial
  Synthetic oligonucleotide
tgtcgcatatggtgctagtgtgtgtcgcattcatggccgctgggtcgtccgcttggtctg

SEQ ID NO: 45852 - DNA, 60 bp, Artificial
  Synthetic oligonucleotide
aacgagggagcagcactctgtggagcggcaaacgggtctgtatatgcggcggtgtttggc

SEQ ID NO: 45853 - DNA, 60 bp, Artificial
  Synthetic oligonucleotide
gtaggcaaagcactcggacggacggcagggcaccgctaaaagacccaacgccagcagggg

SEQ ID NO: 45854 - DNA, 57 bp, Artificial
  Synthetic oligonucleotide
aacaccgtttccaccgaccgtcccgcacccgcctacgctattaagatcgagtgccac

SEQ ID NO: 45855 - DNA, 60 bp, Artificial
  Synthetic oligonucleotide
acacagccgcccgttcaggcccgtcagttcgcaggtccgcgccacgaaccgtgtgatgga

SEQ ID NO: 45856 - DNA, 60 bp, Artificial
  Synthetic oligonucleotide
accccgccggcacagccaggacgacgactttacttatgcggacccggccgatgtgagact

SEQ ID NO: 45857 - DNA, 60 bp, Artificial
  Synthetic oligonucleotide
agcaacaacacgcaggaactgacggagtcctccacgggaaaagagcaccacagcaggcca

SEQ ID NO: 45858 - DNA, 60 bp, Artificial
  Synthetic oligonucleotide
ggcgcgacccaagcccatcacccgaaaacatacctcgatcacccaggcgctcgttaagtt

SEQ ID NO: 45859 - DNA, 60 bp, Artificial
  Synthetic oligonucleotide
agatccctcgtcacagggcgcagtcgaggctgtagaggggctcgggctgggtcgtcggtt

SEQ ID NO: 45860 - DNA, 60 bp, Artificial
  Synthetic oligonucleotide
tgttaacttcgggccgcacgacctccgctgagccgcacgcccagaaccctcctgagatga

SEQ ID NO: 45861 - DNA, 60 bp, Artificial
  Synthetic oligonucleotide
cccgactgcagctggacactttcgagagcgacatgtgcgaggccatcaggaggatcaaga

SEQ ID NO: 45862 - DNA, 59 bp, Artificial
  Synthetic oligonucleotide
gggcagatatcgcacaacctcgccagcagggacaagagccgtcgacagaccgccacccc

SEQ ID NO: 45863 - DNA, 60 bp, Artificial
  Synthetic oligonucleotide
tatccgtccagtcctcctcctcgttcgtgtacatctccccggcctttctcttcatggcgc

SEQ ID NO: 45864 - DNA, 60 bp, Artificial
  Synthetic oligonucleotide
gtcggttggacatctatcgagttggcggcgtctgtgtgttgttcaaaacgcgctccccgg

SEQ ID NO: 45865 - DNA, 60 bp, Artificial
  Synthetic oligonucleotide
tatcaatactggagcggggaggggaggggtttatgtgatggcgaggcgatgtaccgtccg

SEQ ID NO: 45866 - DNA, 60 bp, Artificial
  Synthetic oligonucleotide
agcgaggttggggcgtcgggtgggtggtgctggtgggaatcgttcttcagatggccttct

SEQ ID NO: 45867 - DNA, 60 bp, Artificial
  Synthetic oligonucleotide
acacgaggatgggcgcgttcacccagaccccggacacgcacgccttgaccatgaagacgg

SEQ ID NO: 45868 - DNA, 60 bp, Artificial
  Synthetic oligonucleotide
atctcgaaggtcgttccgtacgtcccaccgcccaaagcacccgccgtcccacccaaagta

SEQ ID NO: 45869 - DNA, 60 bp, Artificial
  Synthetic oligonucleotide
ttctccgtcgggtccgtgtccgtttccgccgctcggtctctcgcccgtggctctcataaa

SEQ ID NO: 45870 - DNA, 60 bp, Artificial
  Synthetic oligonucleotide
ttccatgccggactgtacctttattaaccccgtcgcaccatcatacaacacgccacgcgg

SEQ ID NO: 45871 - DNA, 60 bp, Artificial
  Synthetic oligonucleotide
cgccgtccgagatgagctgcgtgaggttgtccgagacgtacatgatgaagcaggcatcgt

SEQ ID NO: 45872 - DNA, 60 bp, Artificial
  Synthetic oligonucleotide
tctgcccgatacacgcgccctccgtgccgttgatcatggagaagaggtccagcgacgagt

SEQ ID NO: 45873 - DNA, 60 bp, Artificial
  Synthetic oligonucleotide
tcctgtcgccgatcccgacgttccgcctgcgcaacgccacgaccacggtgtgcctgctgt

SEQ ID NO: 45874 - DNA, 60 bp, Artificial
  Synthetic oligonucleotide
acgccaggttcgacgccgccacctctaggtccagcgtgctcttgctcgtccgcatcgcca

SEQ ID NO: 45875 - DNA, 60 bp, Artificial
  Synthetic oligonucleotide
taccgccgggctgcttaccgccgggaaattggtgaatgcttcgtgcgaaccgactcccat

SEQ ID NO: 45876 - DNA, 60 bp, Artificial
  Synthetic oligonucleotide
acggtagacacgaccaacacgacgcaacagacgaggcagcacacgaggagcgttcccatt

SEQ ID NO: 45877 - DNA, 60 bp, Artificial
  Synthetic oligonucleotide
tggacccgtatagtcgcgcctgcctcccgatacgcacgggctgtagatctccgacggtgc

SEQ ID NO: 45878 - DNA, 60 bp, Artificial
  Synthetic oligonucleotide
aacgtcgatccaaacaccctcttccgcacgcgcagctgctggccctcaatggcgactgtt

SEQ ID NO: 45879 - DNA, 60 bp, Artificial
  Synthetic oligonucleotide
tgtcgaccgcacctccgcaacgccgccgagatcgagtgtcagaaatccaaacgtgtcatg

SEQ ID NO: 45880 - DNA, 60 bp, Artificial
  Synthetic oligonucleotide
tcccggcggcttctgcgcgaccttccagctgcaggtagaccatggcgacgtccagactat

SEQ ID NO: 45881 - DNA, 60 bp, Artificial
  Synthetic oligonucleotide
aaaaccggacacgacgaccaccccagagaagagcgccagtttcggcggcctcaagagccc

SEQ ID NO: 45882 - DNA, 60 bp, Artificial
  Synthetic oligonucleotide
actcacccacatccgccgcctgacgagcctgagcgcgtaactggtctgccaccacggggt

SEQ ID NO: 45883 - DNA, 60 bp, Artificial
  Synthetic oligonucleotide
agcccgccgccgccggagatgctggatatgttacgcacgcagatcgaggaggtggagagc

SEQ ID NO: 45884 - DNA, 60 bp, Artificial
  Synthetic oligonucleotide
tcgcaggcctcggagtacgcgtcttccaccacgccgctggcaccgggcagtccccagtag

SEQ ID NO: 45885 - DNA, 60 bp, Artificial
  Synthetic oligonucleotide
aacccgccgtccatcgtcgtcttgagctctaccgaaccgcgaccgtccggatgacatctg

SEQ ID NO: 45886 - DNA, 60 bp, Artificial
  Synthetic oligonucleotide
accacgaccgccgccatgacgctcgcgggtatgaacagggccaacaggacgaccgagttc

SEQ ID NO: 45887 - DNA, 60 bp, Artificial
  Synthetic oligonucleotide
tcggcatgatcggcttcccttgcgtcagactcttcggcgagcccaccaacatcgacatcg

SEQ ID NO: 45888 - DNA, 60 bp, Artificial
  Synthetic oligonucleotide
tcgtcgaacttgggtttctcgtgacagcggcatttctccgtcagcatctgcgcgcccatc

SEQ ID NO: 45889 - DNA, 60 bp, Artificial
  Synthetic oligonucleotide
tcctcgtcacctccaccttcgccgtcgtcagcctgatctcgatcgttctcatcctaggga

SEQ ID NO: 45890 - DNA, 60 bp, Artificial
  Synthetic oligonucleotide
cctcggcgaaccgcttctgcgtctcggacctctgcgccctgggacacgtggccgctttct

SEQ ID NO: 45891 - DNA, 60 bp, Artificial
  Synthetic oligonucleotide
tcgttgctccctgcccaggtcccggttcccgaatcccgctcgacgctccgcttttgctct

SEQ ID NO: 45892 - DNA, 60 bp, Artificial
  Synthetic oligonucleotide
tacgcatcacctcagacgccgcgccgccgccactaacagtttgctcgctcgatggaaacc

SEQ ID NO: 45893 - DNA, 60 bp, Artificial
  Synthetic oligonucleotide
ttaggatgaccaggagcgtccaggtgcacaacgccacgccgacaagcccagccaccacca

SEQ ID NO: 45894 - DNA, 60 bp, Artificial
  Synthetic oligonucleotide
cccgcgtctcttccaactctcaactcacgatccagggaaaccaccgtccagtggccatgt

SEQ ID NO: 45895 - DNA, 60 bp, Artificial
  Synthetic oligonucleotide
attcgtttcgtctacagaccgacgccctccgcccgtcagcttgtcatgggtcaggcttca

SEQ ID NO: 45896 - DNA, 60 bp, Artificial
  Synthetic oligonucleotide
gcccggtttgagtcatggtcagctggcaacctgcgagataattcccacgccggtcacatc

SEQ ID NO: 45897 - DNA, 60 bp, Artificial
  Synthetic oligonucleotide
tgccttagatcacaactgtcacccggaagcactgtctatcgcgagcggcatctttgacga

SEQ ID NO: 45898 - DNA, 60 bp, Artificial
  Synthetic oligonucleotide
ctcagcatcgaggtacccgtaccccaattccgcaaacacatccgccaacccctgaacacc

SEQ ID NO: 45899 - DNA, 60 bp, Artificial
  Synthetic oligonucleotide
gctcgctgcttgccttcttgccgcttctggttttcattggtgccgccgattgtgggttga

SEQ ID NO: 45900 - DNA, 60 bp, Artificial
  Synthetic oligonucleotide
ccgtgtgccattttctgccaccactacaacgactagaggaagagacgcgcactacaatgc

SEQ ID NO: 45901 - DNA, 60 bp, Artificial
  Synthetic oligonucleotide
aggccggtatctgccgcccctatcccgagcccgttaccgtcttcggtcgcagccacaccg

SEQ ID NO: 45902 - DNA, 60 bp, Artificial
  Synthetic oligonucleotide
gctgtggctcccgctgctgtggctcccgctgctggggctcccgctgctgtggctcccgct

SEQ ID NO: 45903 - DNA, 60 bp, Artificial
  Synthetic oligonucleotide
cgggcccggtgctacttccaggtcacatgtacgctcccaaacgggatcttttgtcgttcg

SEQ ID NO: 45904 - DNA, 60 bp, Artificial
  Synthetic oligonucleotide
ggggcggctggcgggtcgggtgtcctgacgcagaaagaacttgagctcttgaacaaaata

SEQ ID NO: 45905 - DNA, 60 bp, Artificial
  Synthetic oligonucleotide
ggagaacctggcgtcttgcaaagttgatgagccccgcagaaagaatgtgtctcccgtggg

SEQ ID NO: 45906 - DNA, 60 bp, Artificial
  Synthetic oligonucleotide
acagtggctcctgacacttcccacattcgaccccacgcgcccggcctgcgtcccagccgg

SEQ ID NO: 45907 - DNA, 60 bp, Artificial
  Synthetic oligonucleotide
acgcaacccgtcactttaacctttcgtctcccacctaccgcacccactcccgcaactgca

SEQ ID NO: 45908 - DNA, 60 bp, Artificial
  Synthetic oligonucleotide
aacccgggactttacacagtctcagggcggcgattaaggactccaggctaacccggctca

SEQ ID NO: 45909 - DNA, 60 bp, Artificial
  Synthetic oligonucleotide
atgggctcgaggagatgggcgtgtcaagtgagatgctgctgtgtgaggcataccgggaca

SEQ ID NO: 45910 - DNA, 60 bp, Artificial
  Synthetic oligonucleotide
atacacccgctcactcgcagcaccctgaggagcccggccttctgtagatgccccgcaagc

SEQ ID NO: 45911 - DNA, 60 bp, Artificial
  Synthetic oligonucleotide
tccctcgtctccagagtcctcagattccgcgcccgtctgcgtgaccggcacatcgcaaaa

SEQ ID NO: 45912 - DNA, 60 bp, Artificial
  Synthetic oligonucleotide
gcgtcgatatgtccttcactttggcgcgggctctggtctttgctgggaggggcggcggtt

SEQ ID NO: 45913 - DNA, 60 bp, Artificial
  Synthetic oligonucleotide
cccacccagacggacgcctttcagtcggtcttcaaccacacgcagcagagaaacgagata

SEQ ID NO: 45914 - DNA, 60 bp, Artificial
  Synthetic oligonucleotide
ggtctcgcccagatccccaggcaccgcgcccgactctgccaccaccgcaaacaccaggga

SEQ ID NO: 45915 - DNA, 60 bp, Artificial
  Synthetic oligonucleotide
cccgctgcacgtacatcccgccgcccacacaacccaccgcccagtacatcaaccatccta

SEQ ID NO: 45916 - DNA, 60 bp, Artificial
  Synthetic oligonucleotide
tacgcgccaatggatcgcttcgccttccagagccccagggtgtgtggtcgccctcccctt

SEQ ID NO: 45917 - DNA, 60 bp, Artificial
  Synthetic oligonucleotide
ggctacactctgctgacatgcctggaactctatctcgatctgccgctaaacaaccctctg

SEQ ID NO: 45918 - DNA, 60 bp, Artificial
  Synthetic oligonucleotide
ccgcccgcgcttccgcaaggcacggggccgcatcggacacaggctaagcattaaggatca

SEQ ID NO: 45919 - DNA, 60 bp, Artificial
  Synthetic oligonucleotide
tgatgaaactcgtgaaccaatcccagccaagtccctcgtgtgagccggccctccccttct

SEQ ID NO: 45920 - DNA, 60 bp, Artificial
  Synthetic oligonucleotide
cggaggccatcgaccgcaccatagaccagatcaggggcaaactcatgctgtctaaccagg

SEQ ID NO: 45921 - DNA, 60 bp, Artificial
  Synthetic oligonucleotide
taaacacgcacatgagcgggcatcctgtttccgccttgacgcccaccactctgaccgcac

SEQ ID NO: 45922 - DNA, 60 bp, Artificial
  Synthetic oligonucleotide
attcgctccacctgcacccacacctctccccggacgactacgaaacctttgtcctcagcg

SEQ ID NO: 45923 - DNA, 60 bp, Artificial
  Synthetic oligonucleotide
aattcgaccgagaccgccgtcaccatgcccgtatccaaagaacgcgccctcgccatctac

SEQ ID NO: 45924 - DNA, 60 bp, Artificial
  Synthetic oligonucleotide
aaaccacccagaggcgagattccagggccgtgactcactagctcccctcccatcgaacaa

SEQ ID NO: 45925 - DNA, 60 bp, Artificial
  Synthetic oligonucleotide
ttgtacgcttgagctggtcccgggccttcgcaccccatccaccgatgccgaaatcagtgt

SEQ ID NO: 45926 - DNA, 60 bp, Artificial
  Synthetic oligonucleotide
cgaaggccgcgtccatccccggcgtcctctcatgtgtctttctggcgcgacaaataatag

SEQ ID NO: 45927 - DNA, 60 bp, Artificial
  Synthetic oligonucleotide
ttgcctgtggggtttctgggatagtgtctggctggcagggtctcatccgcggcatttcca

SEQ ID NO: 45928 - DNA, 60 bp, Artificial
  Synthetic oligonucleotide
caatgtggaccaacttcaagggtgcctgcttcgacaaaggagcaatcacgggcggggaac

SEQ ID NO: 45929 - DNA, 60 bp, Artificial
  Synthetic oligonucleotide
aaaccccgcgccaccttccgccacgtggagccaacaaacaagacacacccgccaatgttt

SEQ ID NO: 45930 - DNA, 60 bp, Artificial
  Synthetic oligonucleotide
ccggacacacacattggaaacgccctcttcatcatcgcacccaaggcccgaggtttacgc

SEQ ID NO: 45931 - DNA, 60 bp, Artificial
  Synthetic oligonucleotide
tggcttcggaggctagtgcctggataagagctgccacgtccccgccccttggccgccacg

SEQ ID NO: 45932 - DNA, 60 bp, Artificial
  Synthetic oligonucleotide
tccaaccacctccccaatcgcaacagacgttcgaagtgctgccggacctcaaactgcgca

SEQ ID NO: 45933 - DNA, 60 bp, Artificial
  Synthetic oligonucleotide
tcgcccgcatccggccgtcctgggcagcaccgcaccctgcgtaaacaaccgcgtactttt

SEQ ID NO: 45934 - DNA, 60 bp, Artificial
  Synthetic oligonucleotide
ggcctccttgagtgtctagctggtcccgtggtcattgtgtggtttggcagtcacttcccc

SEQ ID NO: 45935 - DNA, 60 bp, Artificial
  Synthetic oligonucleotide
ccaagttcgtaggagacgccatttccgtgaccgagtgcattaacgtggaccagagctccg

SEQ ID NO: 45936 - DNA, 60 bp, Artificial
  Synthetic oligonucleotide
aatgcacaaccccacccagtcagcccaggcactaaaccaagcttttcccgatcccgacgg

SEQ ID NO: 45937 - DNA, 60 bp, Artificial
  Synthetic oligonucleotide
ccgcgcgtaaacactccaccaccgtcaattattaaaccttcgccgctgtaccgtcgaccc

SEQ ID NO: 45938 - DNA, 60 bp, Artificial
  Synthetic oligonucleotide
ttccatggtagacctcagcgatgtgctggcaaaacccgccgttattctgagcgcccctgc

SEQ ID NO: 45939 - DNA, 60 bp, Artificial
  Synthetic oligonucleotide
cctccaaatgtgacgctggctcagtgcttcgaggctgcgggcatgcttccccatcaaaag

SEQ ID NO: 45940 - DNA, 60 bp, Artificial
  Synthetic oligonucleotide
taatcctctgccccgctcccattggtccgccggcccgtcaatcaaagttttccgagccgc

SEQ ID NO: 45941 - DNA, 60 bp, Artificial
  Synthetic oligonucleotide
atccgagcacctcagaaagtggattgccgtcacatatcagttcgaccacccctgcaccta

SEQ ID NO: 45942 - DNA, 60 bp, Artificial
  Synthetic oligonucleotide
cctctgttgtaagtctggaccgtatgaaaacctgaccgctcgttgcccagcattgttgcc

SEQ ID NO: 45943 - DNA, 60 bp, Artificial
  Synthetic oligonucleotide
caaccagtctatgtggcacttgaagagaccatgtaaaaccatcgaacccgtggaacaatc

SEQ ID NO: 45944 - DNA, 60 bp, Artificial
  Synthetic oligonucleotide
tatcagctaccacgacctcgtctaaacgaaccgcccgcagatcaaaggttgcagatgcgc

SEQ ID NO: 45945 - DNA, 60 bp, Artificial
  Synthetic oligonucleotide
tggtggtgttcctggcgtcgggtcctgagggatgttaggtggcccttcttcaccagagtc

SEQ ID NO: 45946 - DNA, 60 bp, Artificial
  Synthetic oligonucleotide
ccaggtacaaacaccccaggaattttacacagcccaagagccatagacaaagcagtaata

SEQ ID NO: 45947 - DNA, 60 bp, Artificial
  Synthetic oligonucleotide
tattagcgcctggaacttgtccttaattacacacaaacttgcacttgcctctgacccctc

SEQ ID NO: 45948 - DNA, 60 bp, Artificial
  Synthetic oligonucleotide
ctcaataagcaacaacgaagaaatagcacctcctgccactccagttgccaggccagtgca

SEQ ID NO: 45949 - DNA, 60 bp, Artificial
  Synthetic oligonucleotide
caacggccttgtggaccactaacatcattgtcatagacgaagctggcacattgtcctctc

SEQ ID NO: 45950 - DNA, 60 bp, Artificial
  Synthetic oligonucleotide
ttcgacggctcttcgtactccaaccgtgtgtgcggccaccgaagcatctttgagagaaaa

SEQ ID NO: 45951 - DNA, 60 bp, Artificial
  Synthetic oligonucleotide
cctggcccatcataggtaggcccacttgccccggtagcaccgtttgctaaggtaccaaga

SEQ ID NO: 45952 - DNA, 60 bp, Artificial
  Synthetic oligonucleotide
tagagacgccccaagagccgtgtgccttactagactatacatcctggccaatatttgaca

SEQ ID NO: 45953 - DNA, 60 bp, Artificial
  Synthetic oligonucleotide
acatcagccagtccttgacaccctatacccattgacctttcacgttgacccactgtcgca

SEQ ID NO: 45954 - DNA, 60 bp, Artificial
  Synthetic oligonucleotide
gaacccgcacctgcaacttctccacaatcttcctcaaaatcagtaactaccaaacaaaca

SEQ ID NO: 45955 - DNA, 60 bp, Artificial
  Synthetic oligonucleotide
tccaagtctcttgttattatgttgcttcttttcaaatggtctcgcatcagcttgtccagt

SEQ ID NO: 45956 - DNA, 60 bp, Artificial
  Synthetic oligonucleotide
ggtcggatgttttaattaagcctggagaaggaggcccaatagtacacgcacatcacctgg

SEQ ID NO: 45957 - DNA, 58 bp, Artificial
  Synthetic oligonucleotide
aaaatacaagccccacatattccaagacaaggaacggccacgtcaaattgctgagaag

SEQ ID NO: 45958 - DNA, 60 bp, Artificial
  Synthetic oligonucleotide
catggcttgatgcaaccagcacacattcttctccaaaacataccttcacacatattgctg

SEQ ID NO: 45959 - DNA, 60 bp, Artificial
  Synthetic oligonucleotide
ccaactttccttggagcagtaacatcttcagaatcagttttgccacctgtcatgctgaat

SEQ ID NO: 45960 - DNA, 60 bp, Artificial
  Synthetic oligonucleotide
ccagcaccagacatacccgagcaaagaccaccaagtaaaatacctactcctacggaagaa

SEQ ID NO: 45961 - DNA, 60 bp, Artificial
  Synthetic oligonucleotide
ggcttcagaaggcctgttttctccgcctcacatccccttcatgcctgacgactgccatgc

SEQ ID NO: 45962 - DNA, 60 bp, Artificial
  Synthetic oligonucleotide
ccaagaaggaatcataattgaagtgagtccacctaataccccaaagccaaccagaacacc

SEQ ID NO: 45963 - DNA, 60 bp, Artificial
  Synthetic oligonucleotide
ggacgcaaaactaaaatctctactacctaatggaccggctttcacctcacctaaacttga

SEQ ID NO: 45964 - DNA, 60 bp, Artificial
  Synthetic oligonucleotide
ccaggaagatttatgctcgcagacttgggtcttgcaacgctacactctggcaatcatcca

SEQ ID NO: 45965 - DNA, 60 bp, Artificial
  Synthetic oligonucleotide
tcggctctgaatggacaaattgtacccgtgaaaatgcaagtaaggttagcaaaagcgtta

SEQ ID NO: 45966 - DNA, 60 bp, Artificial
  Synthetic oligonucleotide
gatgttacaaatggcaccaaccgtagccccacattcgtcagtatggactccatcaggaaa

SEQ ID NO: 45967 - DNA, 60 bp, Artificial
  Synthetic oligonucleotide
caacgccttctccaccataattgtgcttaagaccttgatattctgctccaaaatgcctcc
